United States Patent Application Publication US 2005/0255487 A1 - sequence listing, part 72

SEQ ID NO: 1977008 - RNA, 19 nt, Homo sapiens
  misc_RNA (1)...(19): siRNA sense strand
ggagaauuguuaccuugca

SEQ ID NO: 1977009 - RNA, 19 nt, Homo sapiens
  misc_RNA (1)...(19): siRNA sense strand
gagaauuguuaccuugcaa

SEQ ID NO: 1977010 - RNA, 19 nt, Homo sapiens
  misc_RNA (1)...(19): siRNA sense strand
gaagagaauggagguguug

SEQ ID NO: 1977011 - RNA, 19 nt, Homo sapiens
  misc_RNA (1)...(19): siRNA sense strand
ggagaaggaaacaugaaga

SEQ ID NO: 1977012 - RNA, 19 nt, Homo sapiens
  misc_RNA (1)...(19): siRNA sense strand
caccaaagaaaccaucuaa

SEQ ID NO: 1977013 - RNA, 19 nt, Homo sapiens
  misc_RNA (1)...(19): siRNA sense strand
gacuaaauacccuguagaa

SEQ ID NO: 1977014 - RNA, 19 nt, Homo sapiens
  misc_RNA (1)...(19): siRNA sense strand
aagaaaccaucuaauugga

SEQ ID NO: 1977015 - RNA, 19 nt, Homo sapiens
  misc_RNA (1)...(19): siRNA sense strand
ggaaauauuaaaggcauug

SEQ ID NO: 1977016 - RNA, 19 nt, Homo sapiens
  misc_RNA (1)...(19): siRNA sense strand
gccagaaccaccaaagaaa

SEQ ID NO: 1977017 - RNA, 19 nt, Homo sapiens
  misc_RNA (1)...(19): siRNA sense strand
aaagaaaccaucuaauugg

SEQ ID NO: 1977018 - RNA, 19 nt, Homo sapiens
  misc_RNA (1)...(19): siRNA sense strand
auuguuaccuugcaagauu

SEQ ID NO: 1977019 - RNA, 19 nt, Homo sapiens
  misc_RNA (1)...(19): siRNA sense strand
gcagcugauagacauauaa

SEQ ID NO: 1977020 - RNA, 19 nt, Homo sapiens
  misc_RNA (1)...(19): siRNA sense strand
aaaugcagcugauagacau

SEQ ID NO: 1977021 - RNA, 19 nt, Homo sapiens
  misc_RNA (1)...(19): siRNA sense strand
cuucuuaugauccugauua

SEQ ID NO: 1977022 - RNA, 19 nt, Homo sapiens
  misc_RNA (1)...(19): siRNA sense strand
cagguaaagugucuucaag

SEQ ID NO: 1977023 - RNA, 19 nt, Homo sapiens
  misc_RNA (1)...(19): siRNA sense strand
ggacuaaauacccuguaga

SEQ ID NO: 1977024 - RNA, 19 nt, Homo sapiens
  misc_RNA (1)...(19): siRNA sense strand
ucaaguagcagcucuuugg

SEQ ID NO: 1977025 - RNA, 19 nt, Homo sapiens
  misc_RNA (1)...(19): siRNA sense strand
gagcugaaggaacugauau

SEQ ID NO: 1977026 - RNA, 19 nt, Homo sapiens
  misc_RNA (1)...(19): siRNA sense strand
gggacuaaauacccuguag

SEQ ID NO: 1977027 - RNA, 19 nt, Homo sapiens
  misc_RNA (1)...(19): siRNA sense strand
guaaagugucuucaaguag

SEQ ID NO: 1977028 - RNA, 19 nt, Homo sapiens
  misc_RNA (1)...(19): siRNA sense strand
cgaaauuccacaccaccua

SEQ ID NO: 1977029 - RNA, 19 nt, Homo sapiens
  misc_RNA (1)...(19): siRNA sense strand
uguagaaugggccaaauuu

SEQ ID NO: 1977030 - RNA, 19 nt, Homo sapiens
  misc_RNA (1)...(19): siRNA sense strand
ccuuaaugguggaaauauu

SEQ ID NO: 1977031 - RNA, 19 nt, Homo sapiens
  misc_RNA (1)...(19): siRNA sense strand
gaauuguuaccuugcaaga

SEQ ID NO: 1977032 - RNA, 19 nt, Homo sapiens
  misc_RNA (1)...(19): siRNA sense strand
uaaaggcauugaaggacau

SEQ ID NO: 1977033 - RNA, 19 nt, Homo sapiens
  misc_RNA (1)...(19): siRNA sense strand
caccuaguuuggcaagaaa

SEQ ID NO: 1977034 - RNA, 19 nt, Homo sapiens
  misc_RNA (1)...(19): siRNA sense strand
auucauugcuaccauaaga

SEQ ID NO: 1977035 - RNA, 19 nt, Homo sapiens
  misc_RNA (1)...(19): siRNA sense strand
guagguguuccuucaggua

SEQ ID NO: 1977036 - RNA, 19 nt, Homo sapiens
  misc_RNA (1)...(19): siRNA sense strand
cagcugauagacauauaaa

SEQ ID NO: 1977037 - RNA, 19 nt, Homo sapiens
  misc_RNA (1)...(19): siRNA sense strand
aggcagcacguauuaguaa

SEQ ID NO: 1977038 - RNA, 19 nt, Homo sapiens
  misc_RNA (1)...(19): siRNA sense strand
ccaucuaauuggagaagga

SEQ ID NO: 1977039 - RNA, 19 nt, Homo sapiens
  misc_RNA (1)...(19): siRNA sense strand
guuggagaauuguuaccuu

SEQ ID NO: 1977040 - RNA, 19 nt, Homo sapiens
  misc_RNA (1)...(19): siRNA sense strand
ugucagaggagauucaaug

SEQ ID NO: 1977041 - RNA, 19 nt, Homo sapiens
  misc_RNA (1)...(19): siRNA sense strand
ggagguguuguccaaguug

SEQ ID NO: 1977042 - RNA, 19 nt, Homo sapiens
  misc_RNA (1)...(19): siRNA sense strand
gacauucaccuggaaacuu

SEQ ID NO: 1977043 - RNA, 19 nt, Homo sapiens
  misc_RNA (1)...(19): siRNA sense strand
ggagggacuggaagagaau

SEQ ID NO: 1977044 - RNA, 19 nt, Homo sapiens
  misc_RNA (1)...(19): siRNA sense strand
agacagagagcugaaggaa

SEQ ID NO: 1977045 - RNA, 19 nt, Homo sapiens
  misc_RNA (1)...(19): siRNA sense strand
gcagcucuuugggaaacaa

SEQ ID NO: 1977046 - RNA, 19 nt, Homo sapiens
  misc_RNA (1)...(19): siRNA sense strand
ugcaagauuuguggaagaa

SEQ ID NO: 1977047 - RNA, 19 nt, Homo sapiens
  misc_RNA (1)...(19): siRNA sense strand
ccuggaaacuuaccaaaau

SEQ ID NO: 1977048 - RNA, 19 nt, Homo sapiens
  misc_RNA (1)...(19): siRNA sense strand
uauuaaaggcauugaagga

SEQ ID NO: 1977049 - RNA, 19 nt, Homo sapiens
  misc_RNA (1)...(19): siRNA sense strand
gcugaaggaacugauauuc

SEQ ID NO: 1977050 - RNA, 19 nt, Homo sapiens
  misc_RNA (1)...(19): siRNA sense strand
caucaggaucuucacgauu

SEQ ID NO: 1977051 - RNA, 19 nt, Homo sapiens
  misc_RNA (1)...(19): siRNA sense strand
cagcuaaaggccuugauca

SEQ ID NO: 1977052 - RNA, 19 nt, Homo sapiens
  misc_RNA (1)...(19): siRNA sense strand
gaagaauucauugcuacca

SEQ ID NO: 1977053 - RNA, 19 nt, Homo sapiens
  misc_RNA (1)...(19): siRNA sense strand
cuacauagccaggccagau

SEQ ID NO: 1977054 - RNA, 19 nt, Homo sapiens
  misc_RNA (1)...(19): siRNA sense strand
ccaggugugcuuacaaaca

SEQ ID NO: 1977055 - RNA, 19 nt, Homo sapiens
  misc_RNA (1)...(19): siRNA sense strand
uagcagcucuuugggaaac

SEQ ID NO: 1977056 - RNA, 19 nt, Homo sapiens
  misc_RNA (1)...(19): siRNA sense strand
uguuguagguguuccuuca

SEQ ID NO: 1977057 - RNA, 19 nt, Homo sapiens
  misc_RNA (1)...(19): siRNA sense strand
gaaggggaauuuucuacag

SEQ ID NO: 1977058 - RNA, 19 nt, Homo sapiens
  misc_RNA (1)...(19): siRNA sense strand
cauauugucagaggagauu

SEQ ID NO: 1977059 - RNA, 19 nt, Homo sapiens
  misc_RNA (1)...(19): siRNA sense strand
gcagcuaaaggccuugauc

SEQ ID NO: 1977060 - RNA, 19 nt, Homo sapiens
  misc_RNA (1)...(19): siRNA sense strand
ccaaaauucugccaugagu

SEQ ID NO: 1977061 - RNA, 19 nt, Homo sapiens
  misc_RNA (1)...(19): siRNA sense strand
uugcaagauuuguggaaga

SEQ ID NO: 1977062 - RNA, 19 nt, Homo sapiens
  misc_RNA (1)...(19): siRNA sense strand
caggcagcacguauuagua

SEQ ID NO: 1977063 - RNA, 19 nt, Homo sapiens
  misc_RNA (1)...(19): siRNA sense strand
uaccauaagagcagcuaaa

SEQ ID NO: 1977064 - RNA, 19 nt, Homo sapiens
  misc_RNA (1)...(19): siRNA sense strand
ggggaauuuucuacagaua

SEQ ID NO: 1977065 - RNA, 19 nt, Homo sapiens
  misc_RNA (1)...(19): siRNA sense strand
ccaccaaagaaaccaucua

SEQ ID NO: 1977066 - RNA, 19 nt, Homo sapiens
  misc_RNA (1)...(19): siRNA sense strand
ccaugagugugggacuaaa

SEQ ID NO: 1977067 - RNA, 19 nt, Homo sapiens
  misc_RNA (1)...(19): siRNA sense strand
agaacaggcagcacguauu

SEQ ID NO: 1977068 - RNA, 19 nt, Homo sapiens
  misc_RNA (1)...(19): siRNA sense strand
aaagaggguggcaaacuuc

SEQ ID NO: 1977069 - RNA, 19 nt, Homo sapiens
  misc_RNA (1)...(19): siRNA sense strand
guauaagccacccgcacuu

SEQ ID NO: 1977070 - RNA, 19 nt, Homo sapiens
  misc_RNA (1)...(19): siRNA sense strand
gccaugagugugggacuaa

SEQ ID NO: 1977071 - RNA, 19 nt, Homo sapiens
  misc_RNA (1)...(19): siRNA sense strand
ucagguaaagugucuucaa

SEQ ID NO: 1977072 - RNA, 19 nt, Homo sapiens
  misc_RNA (1)...(19): siRNA sense strand
uggcaaaacuguuguaggu

SEQ ID NO: 1977073 - RNA, 19 nt, Homo sapiens
  misc_RNA (1)...(19): siRNA sense strand
ucaucaggaucuucacgau

SEQ ID NO: 1977074 - RNA, 19 nt, Homo sapiens
  misc_RNA (1)...(19): siRNA sense strand
uccuggaacugcaucauca

SEQ ID NO: 1977075 - RNA, 19 nt, Homo sapiens
  misc_RNA (1)...(19): siRNA sense strand
gucaaauucuccuggaacu

SEQ ID NO: 1977076 - RNA, 19 nt, Homo sapiens
  misc_RNA (1)...(19): siRNA sense strand
ucaaagaggguggcaaacu

SEQ ID NO: 1977077 - RNA, 19 nt, Homo sapiens
  misc_RNA (1)...(19): siRNA sense strand
uagguguuccuucagguaa

SEQ ID NO: 1977078 - RNA, 19 nt, Homo sapiens
  misc_RNA (1)...(19): siRNA sense strand
gaagaaggcuggcccauug

SEQ ID NO: 1977079 - RNA, 19 nt, Homo sapiens
  misc_RNA (1)...(19): siRNA sense strand
aaacugaagcucucaaaua

SEQ ID NO: 1977080 - RNA, 19 nt, Homo sapiens
  misc_RNA (1)...(19): siRNA sense strand
gcagaucggugccaaauac

SEQ ID NO: 1977081 - RNA, 19 nt, Homo sapiens
  misc_RNA (1)...(19): siRNA sense strand
gaaagagcauuggcuguau

SEQ ID NO: 1977082 - RNA, 19 nt, Homo sapiens
  misc_RNA (1)...(19): siRNA sense strand
cugaagcucucaaauauug

SEQ ID NO: 1977083 - RNA, 19 nt, Homo sapiens
  misc_RNA (1)...(19): siRNA sense strand
gagagaaugugguuguuag

SEQ ID NO: 1977084 - RNA, 19 nt, Homo sapiens
  misc_RNA (1)...(19): siRNA sense strand
gagaagugcugguggaucu

SEQ ID NO: 1977085 - RNA, 19 nt, Homo sapiens
  misc_RNA (1)...(19): siRNA sense strand
ggguagagcauguggauaa

SEQ ID NO: 1977086 - RNA, 19 nt, Homo sapiens
  misc_RNA (1)...(19): siRNA sense strand
gcacauccaaccagugaaa

SEQ ID NO: 1977087 - RNA, 19 nt, Homo sapiens
  misc_RNA (1)...(19): siRNA sense strand
ggcagaaacucuuugauac

SEQ ID NO: 1977088 - RNA, 19 nt, Homo sapiens
  misc_RNA (1)...(19): siRNA sense strand
aaacaucacugagaagcuu

SEQ ID NO: 1977089 - RNA, 19 nt, Homo sapiens
  misc_RNA (1)...(19): siRNA sense strand
ucucaaauauugcagauag

SEQ ID NO: 1977090 - RNA, 19 nt, Homo sapiens
  misc_RNA (1)...(19): siRNA sense strand
guaguugcucugagaaaua

SEQ ID NO: 1977091 - RNA, 19 nt, Homo sapiens
  misc_RNA (1)...(19): siRNA sense strand
caaauuaccaccaaccaau

SEQ ID NO: 1977092 - RNA, 19 nt, Homo sapiens
  misc_RNA (1)...(19): siRNA sense strand
aacugaagcucucaaauau

SEQ ID NO: 1977093 - RNA, 19 nt, Homo sapiens
  misc_RNA (1)...(19): siRNA sense strand
uacauugccuuuccuaguu

SEQ ID NO: 1977094 - RNA, 19 nt, Homo sapiens
  misc_RNA (1)...(19): siRNA sense strand
gcaugguaaucucuuguug

SEQ ID NO: 1977095 - RNA, 19 nt, Homo sapiens
  misc_RNA (1)...(19): siRNA sense strand
gcagaaacucuuugauaca

SEQ ID NO: 1977096 - RNA, 19 nt, Homo sapiens
  misc_RNA (1)...(19): siRNA sense strand
gagagagaaugugguuguu

SEQ ID NO: 1977097 - RNA, 19 nt, Homo sapiens
  misc_RNA (1)...(19): siRNA sense strand
ggagauaacagaaaacuga

SEQ ID NO: 1977098 - RNA, 19 nt, Homo sapiens
  misc_RNA (1)...(19): siRNA sense strand
aggcagaaacucuuugaua

SEQ ID NO: 1977099 - RNA, 19 nt, Homo sapiens
  misc_RNA (1)...(19): siRNA sense strand
agaaauaaccuugagauca

SEQ ID NO: 1977100 - RNA, 19 nt, Homo sapiens
  misc_RNA (1)...(19): siRNA sense strand
uaguugcucugagaaauaa

SEQ ID NO: 1977101 - RNA, 19 nt, Homo sapiens
  misc_RNA (1)...(19): siRNA sense strand
gaagagggcccaggguugu

SEQ ID NO: 1977102 - RNA, 19 nt, Homo sapiens
  misc_RNA (1)...(19): siRNA sense strand
gagcugaggaaucguguug

SEQ ID NO: 1977103 - RNA, 19 nt, Homo sapiens
  misc_RNA (1)...(19): siRNA sense strand
gcaaauuaccaccaaccaa

SEQ ID NO: 1977104 - RNA, 19 nt, Homo sapiens
  misc_RNA (1)...(19): siRNA sense strand
agaaagagcauuggcugua

SEQ ID NO: 1977105 - RNA, 19 nt, Homo sapiens
  misc_RNA (1)...(19): siRNA sense strand
gagcauguggauaauggua

SEQ ID NO: 1977106 - RNA, 19 nt, Homo sapiens
  misc_RNA (1)...(19): siRNA sense strand
ugagaucaauggaguagca

SEQ ID NO: 1977107 - RNA, 19 nt, Homo sapiens
  misc_RNA (1)...(19): siRNA sense strand
ucagcaaaguagagaaaga

SEQ ID NO: 1977108 - RNA, 19 nt, Homo sapiens
  misc_RNA (1)...(19): siRNA sense strand
ugguauccguuauaaguuu

SEQ ID NO: 1977109 - RNA, 19 nt, Homo sapiens
  misc_RNA (1)...(19): siRNA sense strand
gcaaaggugggcagaaucu

SEQ ID NO: 1977110 - RNA, 19 nt, Homo sapiens
  misc_RNA (1)...(19): siRNA sense strand
caacauggagagagaaagu

SEQ ID NO: 1977111 - RNA, 19 nt, Homo sapiens
  misc_RNA (1)...(19): siRNA sense strand
ggaucucuaugcagggauu

SEQ ID NO: 1977112 - RNA, 19 nt, Homo sapiens
  misc_RNA (1)...(19): siRNA sense strand
augcagggauugguuauuu

SEQ ID NO: 1977113 - RNA, 19 nt, Homo sapiens
  misc_RNA (1)...(19): siRNA sense strand
caguguauguucuccuuug

SEQ ID NO: 1977114 - RNA, 19 nt, Homo sapiens
  misc_RNA (1)...(19): siRNA sense strand
caaguggucagccgaguug

SEQ ID NO: 1977115 - RNA, 19 nt, Homo sapiens
  misc_RNA (1)...(19): siRNA sense strand
agacacaaauucugcacau

SEQ ID NO: 1977116 - RNA, 19 nt, Homo sapiens
  misc_RNA (1)...(19): siRNA sense strand
agaaugugguuguuagcaa

SEQ ID NO: 1977117 - RNA, 19 nt, Homo sapiens
  misc_RNA (1)...(19): siRNA sense strand
gagugaagacuguuuccaa

SEQ ID NO: 1977118 - RNA, 19 nt, Homo sapiens
  misc_RNA (1)...(19): siRNA sense strand
uagagcauguggauaaugg

SEQ ID NO: 1977119 - RNA, 19 nt, Homo sapiens
  misc_RNA (1)...(19): siRNA sense strand
gcucucaaauauugcagau

SEQ ID NO: 1977120 - RNA, 19 nt, Homo sapiens
  misc_RNA (1)...(19): siRNA sense strand
gguauccguuauaaguuug

SEQ ID NO: 1977121 - RNA, 19 nt, Homo sapiens
  misc_RNA (1)...(19): siRNA sense strand
gcaacggcaugguaaucuc

SEQ ID NO: 1977122 - RNA, 19 nt, Homo sapiens
  misc_RNA (1)...(19): siRNA sense strand
uggcaaaggugggcagaau

SEQ ID NO: 1977123 - RNA, 19 nt, Homo sapiens
  misc_RNA (1)...(19): siRNA sense strand
gagaaauaaccuugagauc

SEQ ID NO: 1977124 - RNA, 19 nt, Homo sapiens
  misc_RNA (1)...(19): siRNA sense strand
uuggaaacaucacugagaa

SEQ ID NO: 1977125 - RNA, 19 nt, Homo sapiens
  misc_RNA (1)...(19): siRNA sense strand
uguauguucuccuuuggaa

SEQ ID NO: 1977126 - RNA, 19 nt, Homo sapiens
  misc_RNA (1)...(19): siRNA sense strand
gguagagcauguggauaau

SEQ ID NO: 1977127 - RNA, 19 nt, Homo sapiens
  misc_RNA (1)...(19): siRNA sense strand
gcugguggaucucuaugca

SEQ ID NO: 1977128 - RNA, 19 nt, Homo sapiens
  misc_RNA (1)...(19): siRNA sense strand
gcagggauugguuauuuua

SEQ ID NO: 1977129 - RNA, 19 nt, Homo sapiens
  misc_RNA (1)...(19): siRNA sense strand
gacgugacccaguguaugu

SEQ ID NO: 1977130 - RNA, 19 nt, Homo sapiens
  misc_RNA (1)...(19): siRNA sense strand
caaaguagagaaagagcau

SEQ ID NO: 1977131 - RNA, 19 nt, Homo sapiens
  misc_RNA (1)...(19): siRNA sense strand
guccugugcuggagaagug

SEQ ID NO: 1977132 - RNA, 19 nt, Homo sapiens
  misc_RNA (1)...(19): siRNA sense strand
uuagcaacauggagagaga

SEQ ID NO: 1977133 - RNA, 19 nt, Homo sapiens
  misc_RNA (1)...(19): siRNA sense strand
cgaguuggaggcugauuug

SEQ ID NO: 1977134 - RNA, 19 nt, Homo sapiens
  misc_RNA (1)...(19): siRNA sense strand
agagagaaugugguuguua

SEQ ID NO: 1977135 - RNA, 19 nt, Homo sapiens
  misc_RNA (1)...(19): siRNA sense strand
cagaaacucuuugauacac

SEQ ID NO: 1977136 - RNA, 19 nt, Homo sapiens
  misc_RNA (1)...(19): siRNA sense strand
aaugguauccguuauaagu

SEQ ID NO: 1977137 - RNA, 19 nt, Homo sapiens
  misc_RNA (1)...(19): siRNA sense strand
ggagcuaccagggauucua

SEQ ID NO: 1977138 - RNA, 19 nt, Homo sapiens
  misc_RNA (1)...(19): siRNA sense strand
ggagucagcaaaguagaga

SEQ ID NO: 1977139 - RNA, 19 nt, Homo sapiens
  misc_RNA (1)...(19): siRNA sense strand
ugaagaaggcuggcccauu

SEQ ID NO: 1977140 - RNA, 19 nt, Homo sapiens
  misc_RNA (1)...(19): siRNA sense strand
gaucaauggaguagcagau

SEQ ID NO: 1977141 - RNA, 19 nt, Homo sapiens
  misc_RNA (1)...(19): siRNA sense strand
ccagcgauacagagaauau

SEQ ID NO: 1977142 - RNA, 19 nt, Homo sapiens
  misc_RNA (1)...(19): siRNA sense strand
aaagagcauuggcuguauc

SEQ ID NO: 1977143 - RNA, 19 nt, Homo sapiens
  misc_RNA (1)...(19): siRNA sense strand
gcccauugccugccaagug

SEQ ID NO: 1977144 - RNA, 19 nt, Homo sapiens
  misc_RNA (1)...(19): siRNA sense strand
ugagaaauaaccuugagau

SEQ ID NO: 1977145 - RNA, 19 nt, Homo sapiens
  misc_RNA (1)...(19): siRNA sense strand
cccauugccugccaagugu

SEQ ID NO: 1977146 - RNA, 19 nt, Homo sapiens
  misc_RNA (1)...(19): siRNA sense strand
gaaaacugaagcucucaaa

SEQ ID NO: 1977147 - RNA, 19 nt, Homo sapiens
  misc_RNA (1)...(19): siRNA sense strand
ccauggaagacacaaauuc

SEQ ID NO: 1977148 - RNA, 19 nt, Homo sapiens
  misc_RNA (1)...(19): siRNA sense strand
aaacucgaaucgccacucu

SEQ ID NO: 1977149 - RNA, 19 nt, Homo sapiens
  misc_RNA (1)...(19): siRNA sense strand
gagcuaccagggauucuag

SEQ ID NO: 1977150 - RNA, 19 nt, Homo sapiens
  misc_RNA (1)...(19): siRNA sense strand
gcaggugcaugggaaacca

SEQ ID NO: 1977151 - RNA, 19 nt, Homo sapiens
  misc_RNA (1)...(19): siRNA sense strand
uguaguugcucugagaaau

SEQ ID NO: 1977152 - RNA, 19 nt, Homo sapiens
  misc_RNA (1)...(19): siRNA sense strand
cggauccuguuccuucgaa

SEQ ID NO: 1977153 - RNA, 19 nt, Homo sapiens
  misc_RNA (1)...(19): siRNA sense strand
uccaaccagugaaauccua

SEQ ID NO: 1977154 - RNA, 19 nt, Homo sapiens
  misc_RNA (1)...(19): siRNA sense strand
cgaaucgccacucuucuuc

SEQ ID NO: 1977155 - RNA, 19 nt, Homo sapiens
  misc_RNA (1)...(19): siRNA sense strand
ucuaugcagggauugguua

SEQ ID NO: 1977156 - RNA, 19 nt, Homo sapiens
  misc_RNA (1)...(19): siRNA sense strand
ggaaaccauggaagacaca

SEQ ID NO: 1977157 - RNA, 19 nt, Homo sapiens
  misc_RNA (1)...(19): siRNA sense strand
gaagcucucaaauauugca

SEQ ID NO: 1977158 - RNA, 19 nt, Homo sapiens
  misc_RNA (1)...(19): siRNA sense strand
uuacauugccuuuccuagu

SEQ ID NO: 1977159 - RNA, 19 nt, Homo sapiens
  misc_RNA (1)...(19): siRNA sense strand
cacaaauucugcacaucca

SEQ ID NO: 1977160 - RNA, 19 nt, Homo sapiens
  misc_RNA (1)...(19): siRNA sense strand
gacacaaauucugcacauc

SEQ ID NO: 1977161 - RNA, 19 nt, Homo sapiens
  misc_RNA (1)...(19): siRNA sense strand
gaaucgccacucuucuuca

SEQ ID NO: 1977162 - RNA, 19 nt, Homo sapiens
  misc_RNA (1)...(19): siRNA sense strand
gauccuguuccuucgaaga

SEQ ID NO: 1977163 - RNA, 19 nt, Homo sapiens
  misc_RNA (1)...(19): siRNA sense strand
uagcagaucggugccaaau

SEQ ID NO: 1977164 - RNA, 19 nt, Homo sapiens
  misc_RNA (1)...(19): siRNA sense strand
cauugccugccaaguguua

SEQ ID NO: 1977165 - RNA, 19 nt, Homo sapiens
  misc_RNA (1)...(19): siRNA sense strand
gagaaugugguuguuagca

SEQ ID NO: 1977166 - RNA, 19 nt, Homo sapiens
  misc_RNA (1)...(19): siRNA sense strand
gaaacaucacugagaagcu

SEQ ID NO: 1977167 - RNA, 19 nt, Homo sapiens
  misc_RNA (1)...(19): siRNA sense strand
cugcacauccaaccaguga

SEQ ID NO: 1977168 - RNA, 19 nt, Homo sapiens
  misc_RNA (1)...(19): siRNA sense strand
ucgaaucgccacucuucuu

SEQ ID NO: 1977169 - RNA, 19 nt, Homo sapiens
  misc_RNA (1)...(19): siRNA sense strand
gcucuuggagucagcaaag

SEQ ID NO: 1977170 - RNA, 19 nt, Homo sapiens
  misc_RNA (1)...(19): siRNA sense strand
guuguccugugcuggagaa

SEQ ID NO: 1977171 - RNA, 19 nt, Homo sapiens
  misc_RNA (1)...(19): siRNA sense strand
cccaguguauguucuccuu

SEQ ID NO: 1977172 - RNA, 19 nt, Homo sapiens
  misc_RNA (1)...(19): siRNA sense strand
cauggaagacacaaauucu

SEQ ID NO: 1977173 - RNA, 19 nt, Homo sapiens
  misc_RNA (1)...(19): siRNA sense strand
gaucggugccaaauacacu

SEQ ID NO: 1977174 - RNA, 19 nt, Homo sapiens
  misc_RNA (1)...(19): siRNA sense strand
gcagcucccggauccuguu

SEQ ID NO: 1977175 - RNA, 19 nt, Homo sapiens
  misc_RNA (1)...(19): siRNA sense strand
guugcugagugaagacugu

SEQ ID NO: 1977176 - RNA, 19 nt, Homo sapiens
  misc_RNA (1)...(19): siRNA sense strand
agaaacucuuugauacaca

SEQ ID NO: 1977177 - RNA, 19 nt, Homo sapiens
  misc_RNA (1)...(19): siRNA sense strand
ucacauaguccuggaucug

SEQ ID NO: 1977178 - RNA, 19 nt, Homo sapiens
  misc_RNA (1)...(19): siRNA sense strand
gaaacuccauggaaacaaa

SEQ ID NO: 1977179 - RNA, 19 nt, Homo sapiens
  misc_RNA (1)...(19): siRNA sense strand
gaggaugacuauaucaaga

SEQ ID NO: 1977180 - RNA, 19 nt, Homo sapiens
  misc_RNA (1)...(19): siRNA sense strand
gagacgaaguggaggauga

SEQ ID NO: 1977181 - RNA, 19 nt, Homo sapiens
  misc_RNA (1)...(19): siRNA sense strand
ccaucaaccuggacaagua

SEQ ID NO: 1977182 - RNA, 19 nt, Homo sapiens
  misc_RNA (1)...(19): siRNA sense strand
gcucagauggccacacuua

SEQ ID NO: 1977183 - RNA, 19 nt, Homo sapiens
  misc_RNA (1)...(19): siRNA sense strand
ggagaugaagcccuggaua

SEQ ID NO: 1977184 - RNA, 19 nt, Homo sapiens
  misc_RNA (1)...(19): siRNA sense strand
gguuccagcuccuucauga

SEQ ID NO: 1977185 - RNA, 19 nt, Homo sapiens
  misc_RNA (1)...(19): siRNA sense strand
cgacgaggauggcuacuac

SEQ ID NO: 1977186 - RNA, 19 nt, Homo sapiens
  misc_RNA (1)...(19): siRNA sense strand
ggaggacaaucagcaagga

SEQ ID NO: 1977187 - RNA, 19 nt, Homo sapiens
  misc_RNA (1)...(19): siRNA sense strand
caccagugcugaccucuuc

SEQ ID NO: 1977188 - RNA, 19 nt, Homo sapiens
  misc_RNA (1)...(19): siRNA sense strand
uguguaagcuggagcaaca

SEQ ID NO: 1977189 - RNA, 19 nt, Homo sapiens
  misc_RNA (1)...(19): siRNA sense strand
ccgugaaacuccauggaaa

SEQ ID NO: 1977190 - RNA, 19 nt, Homo sapiens
  misc_RNA (1)...(19): siRNA sense strand
cgaaguggaggaugacuau

SEQ ID NO: 1977191 - RNA, 19 nt, Homo sapiens
  misc_RNA (1)...(19): siRNA sense strand
gaaacaaagacuccaucug

SEQ ID NO: 1977192 - RNA, 19 nt, Homo sapiens
  misc_RNA (1)...(19): siRNA sense strand
ugucguccaucucgcagua

SEQ ID NO: 1977193 - RNA, 19 nt, Homo sapiens
  misc_RNA (1)...(19): siRNA sense strand
gagaugaagcccuggauac

SEQ ID NO: 1977194 - RNA, 19 nt, Homo sapiens
  misc_RNA (1)...(19): siRNA sense strand
ucaagcagccgaccgugaa

SEQ ID NO: 1977195 - RNA, 19 nt, Homo sapiens
  misc_RNA (1)...(19): siRNA sense strand
gugcaucagucgcaagaag

SEQ ID NO: 1977196 - RNA, 19 nt, Homo sapiens
  misc_RNA (1)...(19): siRNA sense strand
gaaccgcuuccgagacgaa

SEQ ID NO: 1977197 - RNA, 19 nt, Homo sapiens
  misc_RNA (1)...(19): siRNA sense strand
ggaggaugacuauaucaag

SEQ ID NO: 1977198 - RNA, 19 nt, Homo sapiens
  misc_RNA (1)...(19): siRNA sense strand
gaaguggaggaugacuaua

SEQ ID NO: 1977199 - RNA, 19 nt, Homo sapiens
  misc_RNA (1)...(19): siRNA sense strand
ggaaacaaagacuccaucu

SEQ ID NO: 1977200 - RNA, 19 nt, Homo sapiens
  misc_RNA (1)...(19): siRNA sense strand
gaagugcagccgccacaag

SEQ ID NO: 1977201 - RNA, 19 nt, Homo sapiens
  misc_RNA (1)...(19): siRNA sense strand
gcaagaucaagcacuggaa

SEQ ID NO: 1977202 - RNA, 19 nt, Homo sapiens
  misc_RNA (1)...(19): siRNA sense strand
gcaguacagcggcaagauc

SEQ ID NO: 1977203 - RNA, 19 nt, Homo sapiens
  misc_RNA (1)...(19): siRNA sense strand
accggaagaugcaguguga

SEQ ID NO: 1977204 - RNA, 19 nt, Homo sapiens
  misc_RNA (1)...(19): siRNA sense strand
ucagauggccacacuuaca

SEQ ID NO: 1977205 - RNA, 19 nt, Homo sapiens
  misc_RNA (1)...(19): siRNA sense strand
ggacaaucagcaaggagau

SEQ ID NO: 1977206 - RNA, 19 nt, Homo sapiens
  misc_RNA (1)...(19): siRNA sense strand
gggaggaugaggaggagaa

SEQ ID NO: 1977207 - RNA, 19 nt, Homo sapiens
  misc_RNA (1)...(19): siRNA sense strand
gauggcuacuaccggaaga

SEQ ID NO: 1977208 - RNA, 19 nt, Homo sapiens
  misc_RNA (1)...(19): siRNA sense strand
acaaagacuccaucugcaa

SEQ ID NO: 1977209 - RNA, 19 nt, Homo sapiens
  misc_RNA (1)...(19): siRNA sense strand
uggcccagcuugccucugu

SEQ ID NO: 1977210 - RNA, 19 nt, Homo sapiens
  misc_RNA (1)...(19): siRNA sense strand
gaguggugcuucugcuucu

SEQ ID NO: 1977211 - RNA, 19 nt, Homo sapiens
  misc_RNA (1)...(19): siRNA sense strand
cugcauccgucccuucuuc

SEQ ID NO: 1977212 - RNA, 19 nt, Homo sapiens
  misc_RNA (1)...(19): siRNA sense strand
gaaggagacggaggaagca

SEQ ID NO: 1977213 - RNA, 19 nt, Homo sapiens
  misc_RNA (1)...(19): siRNA sense strand
caguacagcggcaagauca

SEQ ID NO: 1977214 - RNA, 19 nt, Homo sapiens
  misc_RNA (1)...(19): siRNA sense strand
gcgacgaggauggcuacua

SEQ ID NO: 1977215 - RNA, 19 nt, Homo sapiens
  misc_RNA (1)...(19): siRNA sense strand
ggagaaggagacggaggaa

SEQ ID NO: 1977216 - RNA, 19 nt, Homo sapiens
  misc_RNA (1)...(19): siRNA sense strand
acaaucagcaaggagauga

SEQ ID NO: 1977217 - RNA, 19 nt, Homo sapiens
  misc_RNA (1)...(19): siRNA sense strand
guacagcggcaagaucaag

SEQ ID NO: 1977218 - RNA, 19 nt, Homo sapiens
  misc_RNA (1)...(19): siRNA sense strand
aaguggaggaugacuauau

SEQ ID NO: 1977219 - RNA, 19 nt, Homo sapiens
  misc_RNA (1)...(19): siRNA sense strand
aguggaggaugacuauauc

SEQ ID NO: 1977220 - RNA, 19 nt, Homo sapiens
  misc_RNA (1)...(19): siRNA sense strand
caagcagccgaccgugaaa

SEQ ID NO: 1977221 - RNA, 19 nt, Homo sapiens
  misc_RNA (1)...(19): siRNA sense strand
gaugaagcccuggauacca

SEQ ID NO: 1977222 - RNA, 19 nt, Homo sapiens
  misc_RNA (1)...(19): siRNA sense strand
gccgauggcaaaccagaga

SEQ ID NO: 1977223 - RNA, 19 nt, Homo sapiens
  misc_RNA (1)...(19): siRNA sense strand
gagaacuccaagcagaaug

SEQ ID NO: 1977224 - RNA, 19 nt, Homo sapiens
  misc_RNA (1)...(19): siRNA sense strand
gaugaaaccuauagugaua

SEQ ID NO: 1977225 - RNA, 19 nt, Homo sapiens
  misc_RNA (1)...(19): siRNA sense strand
gaaaugggaugcucacaaa

SEQ ID NO: 1977226 - RNA, 19 nt, Homo sapiens
  misc_RNA (1)...(19): siRNA sense strand
agaagaagcuaguucauua

SEQ ID NO: 1977227 - RNA, 19 nt, Homo sapiens
  misc_RNA (1)...(19): siRNA sense strand
gaaagacucuguaguagga

SEQ ID NO: 1977228 - RNA, 19 nt, Homo sapiens
  misc_RNA (1)...(19): siRNA sense strand
gaugaaaguuccugggaua

SEQ ID NO: 1977229 - RNA, 19 nt, Homo sapiens
  misc_RNA (1)...(19): siRNA sense strand
guaaacaugugcaaucaaa

SEQ ID NO: 1977230 - RNA, 19 nt, Homo sapiens
  misc_RNA (1)...(19): siRNA sense strand
caaaacagcucuccucaua

SEQ ID NO: 1977231 - RNA, 19 nt, Homo sapiens
  misc_RNA (1)...(19): siRNA sense strand
gaaggaaaguucuguugga

SEQ ID NO: 1977232 - RNA, 19 nt, Homo sapiens
  misc_RNA (1)...(19): siRNA sense strand
ggacugauuugucucuuga

SEQ ID NO: 1977233 - RNA, 19 nt, Homo sapiens
  misc_RNA (1)...(19): siRNA sense strand
gagaagaaaucguguccuu

SEQ ID NO: 1977234 - RNA, 19 nt, Homo sapiens
  misc_RNA (1)...(19): siRNA sense strand
gaaaguuccugggauaaug

SEQ ID NO: 1977235 - RNA, 19 nt, Homo sapiens
  misc_RNA (1)...(19): siRNA sense strand
gaacaaauagccacaagug

SEQ ID NO: 1977236 - RNA, 19 nt, Homo sapiens
  misc_RNA (1)...(19): siRNA sense strand
gaucgcaauucacuucuaa

SEQ ID NO: 1977237 - RNA, 19 nt, Homo sapiens
  misc_RNA (1)...(19): siRNA sense strand
ggacggacauuucgagauc

SEQ ID NO: 1977238 - RNA, 19 nt, Homo sapiens
  misc_RNA (1)...(19): siRNA sense strand
aggaagaagugcacgauua

SEQ ID NO: 1977239 - RNA, 19 nt, Homo sapiens
  misc_RNA (1)...(19): siRNA sense strand
caugaaagacucuguagua

SEQ ID NO: 1977240 - RNA, 19 nt, Homo sapiens
  misc_RNA (1)...(19): siRNA sense strand
ccaaucagguguaaacaug

SEQ ID NO: 1977241 - RNA, 19 nt, Homo sapiens
  misc_RNA (1)...(19): siRNA sense strand
gggaagacuuggauagcua

SEQ ID NO: 1977242 - RNA, 19 nt, Homo sapiens
  misc_RNA (1)...(19): siRNA sense strand
guacuugcauucaucauca

SEQ ID NO: 1977243 - RNA, 19 nt, Homo sapiens
  misc_RNA (1)...(19): siRNA sense strand
aaucauauccugugcauuu

SEQ ID NO: 1977244 - RNA, 19 nt, Homo sapiens
  misc_RNA (1)...(19): siRNA sense strand
ugaagaaccuguagauagu

SEQ ID NO: 1977245 - RNA, 19 nt, Homo sapiens
  misc_RNA (1)...(19): siRNA sense strand
gaagaagcuaguucauuaa

SEQ ID NO: 1977246 - RNA, 19 nt, Homo sapiens
  misc_RNA (1)...(19): siRNA sense strand
guuagaagcccacuugaaa

SEQ ID NO: 1977247 - RNA, 19 nt, Homo sapiens
  misc_RNA (1)...(19): siRNA sense strand
aaacagcucuccucauaag

SEQ ID NO: 1977248 - RNA, 19 nt, Homo sapiens
  misc_RNA (1)...(19): siRNA sense strand
ggaucaaccucacaaucaa

SEQ ID NO: 1977249 - RNA, 19 nt, Homo sapiens
  misc_RNA (1)...(19): siRNA sense strand
gcaauucacuucuaaaaca

SEQ ID NO: 1977250 - RNA, 19 nt, Homo sapiens
  misc_RNA (1)...(19): siRNA sense strand
gaagaaaucguguccuuac

SEQ ID NO: 1977251 - RNA, 19 nt, Homo sapiens
  misc_RNA (1)...(19): siRNA sense strand
guaaagagaguaauuaagg

SEQ ID NO: 1977252 - RNA, 19 nt, Homo sapiens
  misc_RNA (1)...(19): siRNA sense strand
caaccacauuuccaaagaa

SEQ ID NO: 1977253 - RNA, 19 nt, Homo sapiens
  misc_RNA (1)...(19): siRNA sense strand
gcucacaaaucuccaaucu

SEQ ID NO: 1977254 - RNA, 19 nt, Homo sapiens
  misc_RNA (1)...(19): siRNA sense strand
gaagacagaaguugaugga

SEQ ID NO: 1977255 - RNA, 19 nt, Homo sapiens
  misc_RNA (1)...(19): siRNA sense strand
gaagaugaaaccuauagug

SEQ ID NO: 1977256 - RNA, 19 nt, Homo sapiens
  misc_RNA (1)...(19): siRNA sense strand
aaaaucagcuaccuacaua

SEQ ID NO: 1977257 - RNA, 19 nt, Homo sapiens
  misc_RNA (1)...(19): siRNA sense strand
uauggucacuucugauauu

SEQ ID NO: 1977258 - RNA, 19 nt, Homo sapiens
  misc_RNA (1)...(19): siRNA sense strand
gguguuggguuaucaaauc

SEQ ID NO: 1977259 - RNA, 19 nt, Homo sapiens
  misc_RNA (1)...(19): siRNA sense strand
uaaggaaucuaagaaggaa

SEQ ID NO: 1977260 - RNA, 19 nt, Homo sapiens
  misc_RNA (1)...(19): siRNA sense strand
gaagcgaacauuuggauca

SEQ ID NO: 1977261 - RNA, 19 nt, Homo sapiens
  misc_RNA (1)...(19): siRNA sense strand
gaacucugcuuuaaaacaa

SEQ ID NO: 1977262 - RNA, 19 nt, Homo sapiens
  misc_RNA (1)...(19): siRNA sense strand
gccauaugcuuguagagaa

SEQ ID NO: 1977263 - RNA, 19 nt, Homo sapiens
  misc_RNA (1)...(19): siRNA sense strand
uaaaaugacuguugucguu

SEQ ID NO: 1977264 - RNA, 19 nt, Homo sapiens
  misc_RNA (1)...(19): siRNA sense strand
gaaccuguagauagugaua

SEQ ID NO: 1977265 - RNA, 19 nt, Homo sapiens
  misc_RNA (1)...(19): siRNA sense strand
gagagaagacagaaguuga

SEQ ID NO: 1977266 - RNA, 19 nt, Homo sapiens
  misc_RNA (1)...(19): siRNA sense strand
gcucuguggugguugguuu

SEQ ID NO: 1977267 - RNA, 19 nt, Homo sapiens
  misc_RNA (1)...(19): siRNA sense strand
gugguugguuugauacuaa

SEQ ID NO: 1977268 - RNA, 19 nt, Homo sapiens
  misc_RNA (1)...(19): siRNA sense strand
gagcaggauuaagcuauga

SEQ ID NO: 1977269 - RNA, 19 nt, Homo sapiens
  misc_RNA (1)...(19): siRNA sense strand
uauguaagauguguccuuu

SEQ ID NO: 1977270 - RNA, 19 nt, Homo sapiens
  misc_RNA (1)...(19): siRNA sense strand
gcagaugcuucauugucaa

SEQ ID NO: 1977271 - RNA, 19 nt, Homo sapiens
  misc_RNA (1)...(19): siRNA sense strand
gcuguaaagagaguaauua

SEQ ID NO: 1977272 - RNA, 19 nt, Homo sapiens
  misc_RNA (1)...(19): siRNA sense strand
ucaaccacauuuccaaaga

SEQ ID NO: 1977273 - RNA, 19 nt, Homo sapiens
  misc_RNA (1)...(19): siRNA sense strand
uguaagauguguccuuuua

SEQ ID NO: 1977274 - RNA, 19 nt, Homo sapiens
  misc_RNA (1)...(19): siRNA sense strand
ucauaagccugacgccaaa

SEQ ID NO: 1977275 - RNA, 19 nt, Homo sapiens
  misc_RNA (1)...(19): siRNA sense strand
ucaaguaauucucacaaca

SEQ ID NO: 1977276 - RNA, 19 nt, Homo sapiens
  misc_RNA (1)...(19): siRNA sense strand
aaacagaagaugaaaguuc

SEQ ID NO: 1977277 - RNA, 19 nt, Homo sapiens
  misc_RNA (1)...(19): siRNA sense strand
uacaugauccucagcauuu

SEQ ID NO: 1977278 - RNA, 19 nt, Homo sapiens
  misc_RNA (1)...(19): siRNA sense strand
gggauaauguugaguuagg

SEQ ID NO: 1977279 - RNA, 19 nt, Homo sapiens
  misc_RNA (1)...(19): siRNA sense strand
ugaagcccgucauguugua

SEQ ID NO: 1977280 - RNA, 19 nt, Homo sapiens
  misc_RNA (1)...(19): siRNA sense strand
aaacaacagucaaccacau

SEQ ID NO: 1977281 - RNA, 19 nt, Homo sapiens
  misc_RNA (1)...(19): siRNA sense strand
caaguaauucucacaacaa

SEQ ID NO: 1977282 - RNA, 19 nt, Homo sapiens
  misc_RNA (1)...(19): siRNA sense strand
ggagagaagacagaaguug

SEQ ID NO: 1977283 - RNA, 19 nt, Homo sapiens
  misc_RNA (1)...(19): siRNA sense strand
gaaaagcuauagagaaguc

SEQ ID NO: 1977284 - RNA, 19 nt, Homo sapiens
  misc_RNA (1)...(19): siRNA sense strand
uguaucaccagaacaaaua

SEQ ID NO: 1977285 - RNA, 19 nt, Homo sapiens
  misc_RNA (1)...(19): siRNA sense strand
gcccuauggucacuucuga

SEQ ID NO: 1977286 - RNA, 19 nt, Homo sapiens
  misc_RNA (1)...(19): siRNA sense strand
ggagaaaaugcuacucuua

SEQ ID NO: 1977287 - RNA, 19 nt, Homo sapiens
  misc_RNA (1)...(19): siRNA sense strand
cuacacaggccauagaaga

SEQ ID NO: 1977288 - RNA, 19 nt, Homo sapiens
  misc_RNA (1)...(19): siRNA sense strand
ggaagaagugcacgauuac

SEQ ID NO: 1977289 - RNA, 19 nt, Homo sapiens
  misc_RNA (1)...(19): siRNA sense strand
gaagcccacuugaaagacu

SEQ ID NO: 1977290 - RNA, 19 nt, Homo sapiens
  misc_RNA (1)...(19): siRNA sense strand
uguggugguugguuugaua

SEQ ID NO: 1977291 - RNA, 19 nt, Homo sapiens
  misc_RNA (1)...(19): siRNA sense strand
ugaaacagaagaugaaagu

SEQ ID NO: 1977292 - RNA, 19 nt, Homo sapiens
  misc_RNA (1)...(19): siRNA sense strand
agaaguugauggaggaaau

SEQ ID NO: 1977293 - RNA, 19 nt, Homo sapiens
  misc_RNA (1)...(19): siRNA sense strand
caaauagccacaagugaca

SEQ ID NO: 1977294 - RNA, 19 nt, Homo sapiens
  misc_RNA (1)...(19): siRNA sense strand
ucacagagcaggauuaagc

SEQ ID NO: 1977295 - RNA, 19 nt, Homo sapiens
  misc_RNA (1)...(19): siRNA sense strand
ucaaagcauaguucuguuu

SEQ ID NO: 1977296 - RNA, 19 nt, Homo sapiens
  misc_RNA (1)...(19): siRNA sense strand
ggauaauguugaguuagga

SEQ ID NO: 1977297 - RNA, 19 nt, Homo sapiens
  misc_RNA (1)...(19): siRNA sense strand
cauaagcggccacacagaa

SEQ ID NO: 1977298 - RNA, 19 nt, Homo sapiens
  misc_RNA (1)...(19): siRNA sense strand
cuacugcugugaagagugu

SEQ ID NO: 1977299 - RNA, 19 nt, Homo sapiens
  misc_RNA (1)...(19): siRNA sense strand
gacagaaaaugaauuggaa

SEQ ID NO: 1977300 - RNA, 19 nt, Homo sapiens
  misc_RNA (1)...(19): siRNA sense strand
ggugguugguuugauacua

SEQ ID NO: 1977301 - RNA, 19 nt, Homo sapiens
  misc_RNA (1)...(19): siRNA sense strand
gaaaccacuucugaacaca

SEQ ID NO: 1977302 - RNA, 19 nt, Homo sapiens
  misc_RNA (1)...(19): siRNA sense strand
aagaugaaaccuauaguga

SEQ ID NO: 1977303 - RNA, 19 nt, Homo sapiens
  misc_RNA (1)...(19): siRNA sense strand
gagaguaauuaaggaaucu

SEQ ID NO: 1977304 - RNA, 19 nt, Homo sapiens
  misc_RNA (1)...(19): siRNA sense strand
acguguagcuguaaagaga

SEQ ID NO: 1977305 - RNA, 19 nt, Homo sapiens
  misc_RNA (1)...(19): siRNA sense strand
aaaaugacauccuugaaga

SEQ ID NO: 1977306 - RNA, 19 nt, Homo sapiens
  misc_RNA (1)...(19): siRNA sense strand
ccuauggucacuucugaua

SEQ ID NO: 1977307 - RNA, 19 nt, Homo sapiens
  misc_RNA (1)...(19): siRNA sense strand
guuaugaaacagaagauga

SEQ ID NO: 1977308 - RNA, 19 nt, Homo sapiens
  misc_RNA (1)...(19): siRNA sense strand
uagaagcccacuugaaaga

SEQ ID NO: 1977309 - RNA, 19 nt, Homo sapiens
  misc_RNA (1)...(19): siRNA sense strand
caauugcccuaaaacauuu

SEQ ID NO: 1977310 - RNA, 19 nt, Homo sapiens
  misc_RNA (1)...(19): siRNA sense strand
ccauaugcuuguagagaau

SEQ ID NO: 1977311 - RNA, 19 nt, Homo sapiens
  misc_RNA (1)...(19): siRNA sense strand
cgaaaugggaugcucacaa

SEQ ID NO: 1977312 - RNA, 19 nt, Homo sapiens
  misc_RNA (1)...(19): siRNA sense strand
gaaguugauggaggaaauu

SEQ ID NO: 1977313 - RNA, 19 nt, Homo sapiens
  misc_RNA (1)...(19): siRNA sense strand
acaugauccucagcauuua

SEQ ID NO: 1977314 - RNA, 19 nt, Homo sapiens
  misc_RNA (1)...(19): siRNA sense strand
guguaaacaugugcaauca

SEQ ID NO: 1977315 - RNA, 19 nt, Homo sapiens
  misc_RNA (1)...(19): siRNA sense strand
uaagcggccacacagaaua

SEQ ID NO: 1977316 - RNA, 19 nt, Homo sapiens
  misc_RNA (1)...(19): siRNA sense strand
cgagaucgcaauucacuuc

SEQ ID NO: 1977317 - RNA, 19 nt, Homo sapiens
  misc_RNA (1)...(19): siRNA sense strand
ccauagaagaugaaaccua

SEQ ID NO: 1977318 - RNA, 19 nt, Homo sapiens
  misc_RNA (1)...(19): siRNA sense strand
gaaggaagaagugcacgau

SEQ ID NO: 1977319 - RNA, 19 nt, Homo sapiens
  misc_RNA (1)...(19): siRNA sense strand
ugaaucauauccugugcau

SEQ ID NO: 1977320 - RNA, 19 nt, Homo sapiens
  misc_RNA (1)...(19): siRNA sense strand
ccacacagaauacagaaag

SEQ ID NO: 1977321 - RNA, 19 nt, Homo sapiens
  misc_RNA (1)...(19): siRNA sense strand
uuacugcccagcaacauuu

SEQ ID NO: 1977322 - RNA, 19 nt, Homo sapiens
  misc_RNA (1)...(19): siRNA sense strand
ugaaaccacuucugaacac

SEQ ID NO: 1977323 - RNA, 19 nt, Homo sapiens
  misc_RNA (1)...(19): siRNA sense strand
cagaacaaauagccacaag

SEQ ID NO: 1977324 - RNA, 19 nt, Homo sapiens
  misc_RNA (1)...(19): siRNA sense strand
ggagcuagcugcugugaga

SEQ ID NO: 1977325 - RNA, 19 nt, Homo sapiens
  misc_RNA (1)...(19): siRNA sense strand
gaggaaccaugguaaccua

SEQ ID NO: 1977326 - RNA, 19 nt, Homo sapiens
  misc_RNA (1)...(19): siRNA sense strand
uaagaaggcccgaaaugaa

SEQ ID NO: 1977327 - RNA, 19 nt, Homo sapiens
  misc_RNA (1)...(19): siRNA sense strand
gaucagauguccgugugaa

SEQ ID NO: 1977328 - RNA, 19 nt, Homo sapiens
  misc_RNA (1)...(19): siRNA sense strand
caaagcagauucucaccau

SEQ ID NO: 1977329 - RNA, 19 nt, Homo sapiens
  misc_RNA (1)...(19): siRNA sense strand
caauccaucugacauaaau

SEQ ID NO: 1977330 - RNA, 19 nt, Homo sapiens
  misc_RNA (1)...(19): siRNA sense strand
gagcugauccucacacugu

SEQ ID NO: 1977331 - RNA, 19 nt, Homo sapiens
  misc_RNA (1)...(19): siRNA sense strand
gagcuaagaaggcccgaaa

SEQ ID NO: 1977332 - RNA, 19 nt, Homo sapiens
  misc_RNA (1)...(19): siRNA sense strand
ucucaaacuucgaggcuuu

SEQ ID NO: 1977333 - RNA, 19 nt, Homo sapiens
  misc_RNA (1)...(19): siRNA sense strand
gcaaaugcugguuuaggaa

SEQ ID NO: 1977334 - RNA, 19 nt, Homo sapiens
  misc_RNA (1)...(19): siRNA sense strand
gcuaagaaggcccgaaaug

SEQ ID NO: 1977335 - RNA, 19 nt, Homo sapiens
  misc_RNA (1)...(19): siRNA sense strand
cgagugacaucccucuuca

SEQ ID NO: 1977336 - RNA, 19 nt, Homo sapiens
  misc_RNA (1)...(19): siRNA sense strand
cuaagaaggcccgaaauga

SEQ ID NO: 1977337 - RNA, 19 nt, Homo sapiens
  misc_RNA (1)...(19): siRNA sense strand
uaucaauccaucugacaua

SEQ ID NO: 1977338 - RNA, 19 nt, Homo sapiens
  misc_RNA (1)...(19): siRNA sense strand
cuaccagucugccuuggaa

SEQ ID NO: 1977339 - RNA, 19 nt, Homo sapiens
  misc_RNA (1)...(19): siRNA sense strand
ggcaagcggucauccagau

SEQ ID NO: 1977340 - RNA, 19 nt, Homo sapiens
  misc_RNA (1)...(19): siRNA sense strand
aagaaggcccgaaaugaaa

SEQ ID NO: 1977341 - RNA, 19 nt, Homo sapiens
  misc_RNA (1)...(19): siRNA sense strand
gaccugauauccagaagcu

SEQ ID NO: 1977342 - RNA, 19 nt, Homo sapiens
  misc_RNA (1)...(19): siRNA sense strand
gagcaugucaucacagaag

SEQ ID NO: 1977343 - RNA, 19 nt, Homo sapiens
  misc_RNA (1)...(19): siRNA sense strand
ugaacugccugcuguugga

SEQ ID NO: 1977344 - RNA, 19 nt, Homo sapiens
  misc_RNA (1)...(19): siRNA sense strand
ggauguugauggacuucga

SEQ ID NO: 1977345 - RNA, 19 nt, Homo sapiens
  misc_RNA (1)...(19): siRNA sense strand
gcggugggcagcaauguga

SEQ ID NO: 1977346 - RNA, 19 nt, Homo sapiens
  misc_RNA (1)...(19): siRNA sense strand
cagaagaggagcuaagaag

SEQ ID NO: 1977347 - RNA, 19 nt, Homo sapiens
  misc_RNA (1)...(19): siRNA sense strand
ggagggaacgaagguguug

SEQ ID NO: 1977348 - RNA, 19 nt, Homo sapiens
  misc_RNA (1)...(19): siRNA sense strand
ccuaagaaccaucaaugug

SEQ ID NO: 1977349 - RNA, 19 nt, Homo sapiens
  misc_RNA (1)...(19): siRNA sense strand
ggccuaagaaccaucaaug

SEQ ID NO: 1977350 - RNA, 19 nt, Homo sapiens
  misc_RNA (1)...(19): siRNA sense strand
gcugugagaggaucagaug

SEQ ID NO: 1977351 - RNA, 19 nt, Homo sapiens
  misc_RNA (1)...(19): siRNA sense strand
aggaagcacugauccaagu

SEQ ID NO: 1977352 - RNA, 19 nt, Homo sapiens
  misc_RNA (1)...(19): siRNA sense strand
gaagcacugauccaaguuc

SEQ ID NO: 1977353 - RNA, 19 nt, Homo sapiens
  misc_RNA (1)...(19): siRNA sense strand
ggaagcacugauccaaguu

SEQ ID NO: 1977354 - RNA, 19 nt, Homo sapiens
  misc_RNA (1)...(19): siRNA sense strand
guccagaccaguucaagga

SEQ ID NO: 1977355 - RNA, 19 nt, Homo sapiens
  misc_RNA (1)...(19): siRNA sense strand
ccuacaggauguugaugga

SEQ ID NO: 1977356 - RNA, 19 nt, Homo sapiens
  misc_RNA (1)...(19): siRNA sense strand
cagccaaggucgucgaacu

SEQ ID NO: 1977357 - RNA, 19 nt, Homo sapiens
  misc_RNA (1)...(19): siRNA sense strand
ggcuugcucucaacugugu

SEQ ID NO: 1977358 - RNA, 19 nt, Homo sapiens
  misc_RNA (1)...(19): siRNA sense strand
ugauccaaguuccgaguga

SEQ ID NO: 1977359 - RNA, 19 nt, Homo sapiens
  misc_RNA (1)...(19): siRNA sense strand
guccgagacagaccugaua

SEQ ID NO: 1977360 - RNA, 19 nt, Homo sapiens
  misc_RNA (1)...(19): siRNA sense strand
ccaaggucgucgaacucaa

SEQ ID NO: 1977361 - RNA, 19 nt, Homo sapiens
  misc_RNA (1)...(19): siRNA sense strand
cugagcaugucaucacaga

SEQ ID NO: 1977362 - RNA, 19 nt, Homo sapiens
  misc_RNA (1)...(19): siRNA sense strand
ucagauguccgugugaaga

SEQ ID NO: 1977363 - RNA, 19 nt, Homo sapiens
  misc_RNA (1)...(19): siRNA sense strand
ggaccgaggcuguguucag

SEQ ID NO: 1977364 - RNA, 19 nt, Homo sapiens
  misc_RNA (1)...(19): siRNA sense strand
cgaggaagcacugauccaa

SEQ ID NO: 1977365 - RNA, 19 nt, Homo sapiens
  misc_RNA (1)...(19): siRNA sense strand
ggaaccaugguaaccuaug

SEQ ID NO: 1977366 - RNA, 19 nt, Homo sapiens
  misc_RNA (1)...(19): siRNA sense strand
aaacuucuuuaaggacaug

SEQ ID NO: 1977367 - RNA, 19 nt, Homo sapiens
  misc_RNA (1)...(19): siRNA sense strand
ucaauccaucugacauaaa

SEQ ID NO: 1977368 - RNA, 19 nt, Homo sapiens
  misc_RNA (1)...(19): siRNA sense strand
guugauggacuucgagcaa

SEQ ID NO: 1977369 - RNA, 19 nt, Homo sapiens
  misc_RNA (1)...(19): siRNA sense strand
caaugugguccgagacaga

SEQ ID NO: 1977370 - RNA, 19 nt, Homo sapiens
  misc_RNA (1)...(19): siRNA sense strand
ucacaguccagaccaguuc

SEQ ID NO: 1977371 - RNA, 19 nt, Homo sapiens
  misc_RNA (1)...(19): siRNA sense strand
caucacagaagaggagcua

SEQ ID NO: 1977372 - RNA, 19 nt, Homo sapiens
  misc_RNA (1)...(19): siRNA sense strand
gcacagccuacaggauguu

SEQ ID NO: 1977373 - RNA, 19 nt, Homo sapiens
  misc_RNA (1)...(19): siRNA sense strand
caaggucgucgaacucaag

SEQ ID NO: 1977374 - RNA, 19 nt, Homo sapiens
  misc_RNA (1)...(19): siRNA sense strand
gcaaugugaccgggcugaa

SEQ ID NO: 1977375 - RNA, 19 nt, Homo sapiens
  misc_RNA (1)...(19): siRNA sense strand
aagcagauucucaccaugu

SEQ ID NO: 1977376 - RNA, 19 nt, Homo sapiens
  misc_RNA (1)...(19): siRNA sense strand
gagcugcugcgccaguuag

SEQ ID NO: 1977377 - RNA, 19 nt, Homo sapiens
  misc_RNA (1)...(19): siRNA sense strand
ucacagaagaggagcuaag

SEQ ID NO: 1977378 - RNA, 19 nt, Homo sapiens
  misc_RNA (1)...(19): siRNA sense strand
gagacagaccugauaucca

SEQ ID NO: 1977379 - RNA, 19 nt, Homo sapiens
  misc_RNA (1)...(19): siRNA sense strand
gcguggaggaaccauggua

SEQ ID NO: 1977380 - RNA, 19 nt, Homo sapiens
  misc_RNA (1)...(19): siRNA sense strand
cagagcugcugcgccaguu

SEQ ID NO: 1977381 - RNA, 19 nt, Homo sapiens
  misc_RNA (1)...(19): siRNA sense strand
cacagaagaggagcuaaga

SEQ ID NO: 1977382 - RNA, 19 nt, Homo sapiens
  misc_RNA (1)...(19): siRNA sense strand
aucaauccaucugacauaa

SEQ ID NO: 1977383 - RNA, 19 nt, Homo sapiens
  misc_RNA (1)...(19): siRNA sense strand
gccuaagaaccaucaaugu

SEQ ID NO: 1977384 - RNA, 19 nt, Homo sapiens
  misc_RNA (1)...(19): siRNA sense strand
gaaauugcaucuuguaguu

SEQ ID NO: 1977385 - RNA, 19 nt, Homo sapiens
  misc_RNA (1)...(19): siRNA sense strand
gaaguuaauugauggguuu

SEQ ID NO: 1977386 - RNA, 19 nt, Homo sapiens
  misc_RNA (1)...(19): siRNA sense strand
gaccagaucucaaaggaaa

SEQ ID NO: 1977387 - RNA, 19 nt, Homo sapiens
  misc_RNA (1)...(19): siRNA sense strand
gaauauggcauuugacuuu

SEQ ID NO: 1977388 - RNA, 19 nt, Homo sapiens
  misc_RNA (1)...(19): siRNA sense strand
gaaauacuguacugaucua

SEQ ID NO: 1977389 - RNA, 19 nt, Homo sapiens
  misc_RNA (1)...(19): siRNA sense strand
gaaauuggaggaacaguuu

SEQ ID NO: 1977390 - RNA, 19 nt, Homo sapiens
  misc_RNA (1)...(19): siRNA sense strand
gcauuugacuuuauucuug

SEQ ID NO: 1977391 - RNA, 19 nt, Homo sapiens
  misc_RNA (1)...(19): siRNA sense strand
gaaaggcgaugcuaaacau

SEQ ID NO: 1977392 - RNA, 19 nt, Homo sapiens
  misc_RNA (1)...(19): siRNA sense strand
gaaaugugcugccucuguu

SEQ ID NO: 1977393 - RNA, 19 nt, Homo sapiens
  misc_RNA (1)...(19): siRNA sense strand
ggagauaugucaguauuga

SEQ ID NO: 1977394 - RNA, 19 nt, Homo sapiens
  misc_RNA (1)...(19): siRNA sense strand
gagaagagcagcacugauu

SEQ ID NO: 1977395 - RNA, 19 nt, Homo sapiens
  misc_RNA (1)...(19): siRNA sense strand
gagaucaacuauggaauaa

SEQ ID NO: 1977396 - RNA, 19 nt, Homo sapiens
  misc_RNA (1)...(19): siRNA sense strand
caucagagcuguauaaugc

SEQ ID NO: 1977397 - RNA, 19 nt, Homo sapiens
  misc_RNA (1)...(19): siRNA sense strand
cagaagaaguagaugauuu

SEQ ID NO: 1977398 - RNA, 19 nt, Homo sapiens
  misc_RNA (1)...(19): siRNA sense strand
ccacaaaucuucccaaugc

SEQ ID NO: 1977399 - RNA, 19 nt, Homo sapiens
  misc_RNA (1)...(19): siRNA sense strand
gaaauggaauggucuacau

SEQ ID NO: 1977400 - RNA, 19 nt, Homo sapiens
  misc_RNA (1)...(19): siRNA sense strand
ggaagcacauuaaaaguua

SEQ ID NO: 1977401 - RNA, 19 nt, Homo sapiens
  misc_RNA (1)...(19): siRNA sense strand
ggaguugccaucuauguua

SEQ ID NO: 1977402 - RNA, 19 nt, Homo sapiens
  misc_RNA (1)...(19): siRNA sense strand
gagaauggauaacuacaau

SEQ ID NO: 1977403 - RNA, 19 nt, Homo sapiens
  misc_RNA (1)...(19): siRNA sense strand
ugauauggauugcuucuuu

SEQ ID NO: 1977404 - RNA, 19 nt, Homo sapiens
  misc_RNA (1)...(19): siRNA sense strand
ggaagucgcacaaacauug

SEQ ID NO: 1977405 - RNA, 19 nt, Homo sapiens
  misc_RNA (1)...(19): siRNA sense strand
gggcugaaauugcaucuug

SEQ ID NO: 1977406 - RNA, 19 nt, Homo sapiens
  misc_RNA (1)...(19): siRNA sense strand
gaaagcagcguaugaucaa

SEQ ID NO: 1977407 - RNA, 19 nt, Homo sapiens
  misc_RNA (1)...(19): siRNA sense strand
ccaaacagcucaacaacag

SEQ ID NO: 1977408 - RNA, 19 nt, Homo sapiens
  misc_RNA (1)...(19): siRNA sense strand
aaacaacuauguccuaauc

SEQ ID NO: 1977409 - RNA, 19 nt, Homo sapiens
  misc_RNA (1)...(19): siRNA sense strand
gcaagcaaauggaauugau

SEQ ID NO: 1977410 - RNA, 19 nt, Homo sapiens
  misc_RNA (1)...(19): siRNA sense strand
uaacaaggcugagucuuca

SEQ ID NO: 1977411 - RNA, 19 nt, Homo sapiens
  misc_RNA (1)...(19): siRNA sense strand
aaacaggucagaugcuuua

SEQ ID NO: 1977412 - RNA, 19 nt, Homo sapiens
  misc_RNA (1)...(19): siRNA sense strand
gcgcaucugugccaaagaa

SEQ ID NO: 1977413 - RNA, 19 nt, Homo sapiens
  misc_RNA (1)...(19): siRNA sense strand
gaaauaucaucugcuucua

SEQ ID NO: 1977414 - RNA, 19 nt, Homo sapiens
  misc_RNA (1)...(19): siRNA sense strand
gaucaacuauggaauaagg

SEQ ID NO: 1977415 - RNA, 19 nt, Homo sapiens
  misc_RNA (1)...(19): siRNA sense strand
cauaucagcuguacaccaa

SEQ ID NO: 1977416 - RNA, 19 nt, Homo sapiens
  misc_RNA (1)...(19): siRNA sense strand
cagaagaaauucaaagaag

SEQ ID NO: 1977417 - RNA, 19 nt, Homo sapiens
  misc_RNA (1)...(19): siRNA sense strand
cagcugagaucaacuaugg

SEQ ID NO: 1977418 - RNA, 19 nt, Homo sapiens
  misc_RNA (1)...(19): siRNA sense strand
gcaaauaccagaaccucaa

SEQ ID NO: 1977419 - RNA, 19 nt, Homo sapiens
  misc_RNA (1)...(19): siRNA sense strand
caggagauaugucaguauu

SEQ ID NO: 1977420 - RNA, 19 nt, Homo sapiens
  misc_RNA (1)...(19): siRNA sense strand
gaagacauucuccaaguug

SEQ ID NO: 1977421 - RNA, 19 nt, Homo sapiens
  misc_RNA (1)...(19): siRNA sense strand
uaauagcccuuccagcauu

SEQ ID NO: 1977422 - RNA, 19 nt, Homo sapiens
  misc_RNA (1)...(19): siRNA sense strand
ccacuggcaugaaggguaa

SEQ ID NO: 1977423 - RNA, 19 nt, Homo sapiens
  misc_RNA (1)...(19): siRNA sense strand
gaaggaaacagaauggaau

SEQ ID NO: 1977424 - RNA, 19 nt, Homo sapiens
  misc_RNA (1)...(19): siRNA sense strand
ucaauggcaugaacaguug

SEQ ID NO: 1977425 - RNA, 19 nt, Homo sapiens
  misc_RNA (1)...(19): siRNA sense strand
ggaaauaucaucugcuucu

SEQ ID NO: 1977426 - RNA, 19 nt, Homo sapiens
  misc_RNA (1)...(19): siRNA sense strand
ucaaagaccagacgaaaug

SEQ ID NO: 1977427 - RNA, 19 nt, Homo sapiens
  misc_RNA (1)...(19): siRNA sense strand
caaacuuacuccugaugaa

SEQ ID NO: 1977428 - RNA, 19 nt, Homo sapiens
  misc_RNA (1)...(19): siRNA sense strand
aagcuacacucauaacauu

SEQ ID NO: 1977429 - RNA, 19 nt, Homo sapiens
  misc_RNA (1)...(19): siRNA sense strand
cuacaaagacaaaguaaug

SEQ ID NO: 1977430 - RNA, 19 nt, Homo sapiens
  misc_RNA (1)...(19): siRNA sense strand
ucaaugaugugaagaccuu

SEQ ID NO: 1977431 - RNA, 19 nt, Homo sapiens
  misc_RNA (1)...(19): siRNA sense strand
gguggacccugagguauuu

SEQ ID NO: 1977432 - RNA, 19 nt, Homo sapiens
  misc_RNA (1)...(19): siRNA sense strand
ccaggcaacuuggcauuaa

SEQ ID NO: 1977433 - RNA, 19 nt, Homo sapiens
  misc_RNA (1)...(19): siRNA sense strand
gauauggauugcuucuuug

SEQ ID NO: 1977434 - RNA, 19 nt, Homo sapiens
  misc_RNA (1)...(19): siRNA sense strand
cagcagauauaccagauuc

SEQ ID NO: 1977435 - RNA, 19 nt, Homo sapiens
  misc_RNA (1)...(19): siRNA sense strand
ggacagucuuguugcaaau

SEQ ID NO: 1977436 - RNA, 19 nt, Homo sapiens
  misc_RNA (1)...(19): siRNA sense strand
gcacuuucuugccaccuuu

SEQ ID NO: 1977437 - RNA, 19 nt, Homo sapiens
  misc_RNA (1)...(19): siRNA sense strand
gaaauucaaagaagacuag

SEQ ID NO: 1977438 - RNA, 19 nt, Homo sapiens
  misc_RNA (1)...(19): siRNA sense strand
cuaaacaacuauguccuaa

SEQ ID NO: 1977439 - RNA, 19 nt, Homo sapiens
  misc_RNA (1)...(19): siRNA sense strand
cagaauggauuguggaaag

SEQ ID NO: 1977440 - RNA, 19 nt, Homo sapiens
  misc_RNA (1)...(19): siRNA sense strand
gggacuucaucuacaauuu

SEQ ID NO: 1977441 - RNA, 19 nt, Homo sapiens
  misc_RNA (1)...(19): siRNA sense strand
ugagaucaacuauggaaua

SEQ ID NO: 1977442 - RNA, 19 nt, Homo sapiens
  misc_RNA (1)...(19): siRNA sense strand
gaguugccaucuauguuaa

SEQ ID NO: 1977443 - RNA, 19 nt, Homo sapiens
  misc_RNA (1)...(19): siRNA sense strand
caaagacaaaguaauggua

SEQ ID NO: 1977444 - RNA, 19 nt, Homo sapiens
  misc_RNA (1)...(19): siRNA sense strand
gcucaccacuccacuguuc

SEQ ID NO: 1977445 - RNA, 19 nt, Homo sapiens
  misc_RNA (1)...(19): siRNA sense strand
ggaaggaaacagaauggaa

SEQ ID NO: 1977446 - RNA, 19 nt, Homo sapiens
  misc_RNA (1)...(19): siRNA sense strand
guggagacuugcaguauau

SEQ ID NO: 1977447 - RNA, 19 nt, Homo sapiens
  misc_RNA (1)...(19): siRNA sense strand
gggacagucuuguugcaaa

SEQ ID NO: 1977448 - RNA, 19 nt, Homo sapiens
  misc_RNA (1)...(19): siRNA sense strand
cgacuccucuccuacauuc

SEQ ID NO: 1977449 - RNA, 19 nt, Homo sapiens
  misc_RNA (1)...(19): siRNA sense strand
agacuuaaccugaguauag

SEQ ID NO: 1977450 - RNA, 19 nt, Homo sapiens
  misc_RNA (1)...(19): siRNA sense strand
uauaccagauucaucauug

SEQ ID NO: 1977451 - RNA, 19 nt, Homo sapiens
  misc_RNA (1)...(19): siRNA sense strand
aggcaaagcagcagauaua

SEQ ID NO: 1977452 - RNA, 19 nt, Homo sapiens
  misc_RNA (1)...(19): siRNA sense strand
gaaauagaccagaucucaa

SEQ ID NO: 1977453 - RNA, 19 nt, Homo sapiens
  misc_RNA (1)...(19): siRNA sense strand
cagcaaagcaccagaaaca

SEQ ID NO: 1977454 - RNA, 19 nt, Homo sapiens
  misc_RNA (1)...(19): siRNA sense strand
guaaaucacaucguuaaga

SEQ ID NO: 1977455 - RNA, 19 nt, Homo sapiens
  misc_RNA (1)...(19): siRNA sense strand
ugccaggccuuucuaguuu

SEQ ID NO: 1977456 - RNA, 19 nt, Homo sapiens
  misc_RNA (1)...(19): siRNA sense strand
caggucagaugcuuuauag

SEQ ID NO: 1977457 - RNA, 19 nt, Homo sapiens
  misc_RNA (1)...(19): siRNA sense strand
gaagcgagcugaaaaugau

SEQ ID NO: 1977458 - RNA, 19 nt, Homo sapiens
  misc_RNA (1)...(19): siRNA sense strand
gcaaagcaccagaaacaca

SEQ ID NO: 1977459 - RNA, 19 nt, Homo sapiens
  misc_RNA (1)...(19): siRNA sense strand
cgaaauagaccagaucuca

SEQ ID NO: 1977460 - RNA, 19 nt, Homo sapiens
  misc_RNA (1)...(19): siRNA sense strand
cgaccaguccugauacuaa

SEQ ID NO: 1977461 - RNA, 19 nt, Homo sapiens
  misc_RNA (1)...(19): siRNA sense strand
ggccauggaauuugugaua

SEQ ID NO: 1977462 - RNA, 19 nt, Homo sapiens
  misc_RNA (1)...(19): siRNA sense strand
guaaacgucuaacucucaa

SEQ ID NO: 1977463 - RNA, 19 nt, Homo sapiens
  misc_RNA (1)...(19): siRNA sense strand
gcuaaacaacuauguccua

SEQ ID NO: 1977464 - RNA, 19 nt, Homo sapiens
  misc_RNA (1)...(19): siRNA sense strand
caggguaaaucacaucguu

SEQ ID NO: 1977465 - RNA, 19 nt, Homo sapiens
  misc_RNA (1)...(19): siRNA sense strand
ccaguaaauggcuguaaua

SEQ ID NO: 1977466 - RNA, 19 nt, Homo sapiens
  misc_RNA (1)...(19): siRNA sense strand
gaugauagaccaguucgaa

SEQ ID NO: 1977467 - RNA, 19 nt, Homo sapiens
  misc_RNA (1)...(19): siRNA sense strand
cauugaagcugucaguugu

SEQ ID NO: 1977468 - RNA, 19 nt, Homo sapiens
  misc_RNA (1)...(19): siRNA sense strand
gaacaguuggaaugaagaa

SEQ ID NO: 1977469 - RNA, 19 nt, Homo sapiens
  misc_RNA (1)...(19): siRNA sense strand
caagcaauauagccaaaca

SEQ ID NO: 1977470 - RNA, 19 nt, Homo sapiens
  misc_RNA (1)...(19): siRNA sense strand
gaacaguuucgaucagaug

SEQ ID NO: 1977471 - RNA, 19 nt, Homo sapiens
  misc_RNA (1)...(19): siRNA sense strand
ggagcacaaagaaguauuu

SEQ ID NO: 1977472 - RNA, 19 nt, Homo sapiens
  misc_RNA (1)...(19): siRNA sense strand
aaauagaccagaucucaaa

SEQ ID NO: 1977473 - RNA, 19 nt, Homo sapiens
  misc_RNA (1)...(19): siRNA sense strand
caaagucaauggcaugaac

SEQ ID NO: 1977474 - RNA, 19 nt, Homo sapiens
  misc_RNA (1)...(19): siRNA sense strand
ggguaaaucacaucguuaa

SEQ ID NO: 1977475 - RNA, 19 nt, Homo sapiens
  misc_RNA (1)...(19): siRNA sense strand
ggaaucgguuuggaauaug

SEQ ID NO: 1977476 - RNA, 19 nt, Homo sapiens
  misc_RNA (1)...(19): siRNA sense strand
uggaaucgguuuggaauau

SEQ ID NO: 1977477 - RNA, 19 nt, Homo sapiens
  misc_RNA (1)...(19): siRNA sense strand
cgugaugucuuccaaguuc

SEQ ID NO: 1977478 - RNA, 19 nt, Homo sapiens
  misc_RNA (1)...(19): siRNA sense strand
ggaaaggcgaugcuaaaca

SEQ ID NO: 1977479 - RNA, 19 nt, Homo sapiens
  misc_RNA (1)...(19): siRNA sense strand
gccauggaauuugugauaa

SEQ ID NO: 1977480 - RNA, 19 nt, Homo sapiens
  misc_RNA (1)...(19): siRNA sense strand
agacaucagagcuguauaa

SEQ ID NO: 1977481 - RNA, 19 nt, Homo sapiens
  misc_RNA (1)...(19): siRNA sense strand
gaagagcagcacugauuuc

SEQ ID NO: 1977482 - RNA, 19 nt, Homo sapiens
  misc_RNA (1)...(19): siRNA sense strand
guuaauggauacacagauc

SEQ ID NO: 1977483 - RNA, 19 nt, Homo sapiens
  misc_RNA (1)...(19): siRNA sense strand
gugaaauacuguacugauc

SEQ ID NO: 1977484 - RNA, 19 nt, Homo sapiens
  misc_RNA (1)...(19): siRNA sense strand
cgaaucagauguauaguua

SEQ ID NO: 1977485 - RNA, 19 nt, Homo sapiens
  misc_RNA (1)...(19): siRNA sense strand
gcaaggagaucaccagaaa

SEQ ID NO: 1977486 - RNA, 19 nt, Homo sapiens
  misc_RNA (1)...(19): siRNA sense strand
ggaaagaagauuuggauaa

SEQ ID NO: 1977487 - RNA, 19 nt, Homo sapiens
  misc_RNA (1)...(19): siRNA sense strand
gaaagaagauuuggauaag

SEQ ID NO: 1977488 - RNA, 19 nt, Homo sapiens
  misc_RNA (1)...(19): siRNA sense strand
gaaguugcuuuggauauaa

SEQ ID NO: 1977489 - RNA, 19 nt, Homo sapiens
  misc_RNA (1)...(19): siRNA sense strand
cagaagaauuugccuauga

SEQ ID NO: 1977490 - RNA, 19 nt, Homo sapiens
  misc_RNA (1)...(19): siRNA sense strand
ggacagugacuucugauaa

SEQ ID NO: 1977491 - RNA, 19 nt, Homo sapiens
  misc_RNA (1)...(19): siRNA sense strand
ggagaagccugauguuagu

SEQ ID NO: 1977492 - RNA, 19 nt, Homo sapiens
  misc_RNA (1)...(19): siRNA sense strand
ggacgaaucagauguauag

SEQ ID NO: 1977493 - RNA, 19 nt, Homo sapiens
  misc_RNA (1)...(19): siRNA sense strand
gagcuuaacccaaggcuuu

SEQ ID NO: 1977494 - RNA, 19 nt, Homo sapiens
  misc_RNA (1)...(19): siRNA sense strand
ggauucaccuuggcugaua

SEQ ID NO: 1977495 - RNA, 19 nt, Homo sapiens
  misc_RNA (1)...(19): siRNA sense strand
uaaccaaagugcacugcua

SEQ ID NO: 1977496 - RNA, 19 nt, Homo sapiens
  misc_RNA (1)...(19): siRNA sense strand
agaaguugcuuuggauaua

SEQ ID NO: 1977497 - RNA, 19 nt, Homo sapiens
  misc_RNA (1)...(19): siRNA sense strand
gaggagaagccugauguua

SEQ ID NO: 1977498 - RNA, 19 nt, Homo sapiens
  misc_RNA (1)...(19): siRNA sense strand
ggccuuggauggugaauau

SEQ ID NO: 1977499 - RNA, 19 nt, Homo sapiens
  misc_RNA (1)...(19): siRNA sense strand
aggcagaagugaaguguuu

SEQ ID NO: 1977500 - RNA, 19 nt, Homo sapiens
  misc_RNA (1)...(19): siRNA sense strand
ggcaaagccuccucacaga

SEQ ID NO: 1977501 - RNA, 19 nt, Homo sapiens
  misc_RNA (1)...(19): siRNA sense strand
ucaaggaggacacagauuu

SEQ ID NO: 1977502 - RNA, 19 nt, Homo sapiens
  misc_RNA (1)...(19): siRNA sense strand
caccuuggcugauaaagug

SEQ ID NO: 1977503 - RNA, 19 nt, Homo sapiens
  misc_RNA (1)...(19): siRNA sense strand
gauguuaguuucgauaaag

SEQ ID NO: 1977504 - RNA, 19 nt, Homo sapiens
  misc_RNA (1)...(19): siRNA sense strand
aaagugcacugcuauaugg

SEQ ID NO: 1977505 - RNA, 19 nt, Homo sapiens
  misc_RNA (1)...(19): siRNA sense strand
gacagugacuucugauaag

SEQ ID NO: 1977506 - RNA, 19 nt, Homo sapiens
  misc_RNA (1)...(19): siRNA sense strand
agaagaauuugccuaugaa

SEQ ID NO: 1977507 - RNA, 19 nt, Homo sapiens
  misc_RNA (1)...(19): siRNA sense strand
aagaagauuuggauaagug

SEQ ID NO: 1977508 - RNA, 19 nt, Homo sapiens
  misc_RNA (1)...(19): siRNA sense strand
gauaaagcaauuagagaug

SEQ ID NO: 1977509 - RNA, 19 nt, Homo sapiens
  misc_RNA (1)...(19): siRNA sense strand
gauguauaguuacuucaug

SEQ ID NO: 1977510 - RNA, 19 nt, Homo sapiens
  misc_RNA (1)...(19): siRNA sense strand
gggcaagaauaaccaaagu

SEQ ID NO: 1977511 - RNA, 19 nt, Homo sapiens
  misc_RNA (1)...(19): siRNA sense strand
ucagauguauaguuacuuc

SEQ ID NO: 1977512 - RNA, 19 nt, Homo sapiens
  misc_RNA (1)...(19): siRNA sense strand
caaagugcacugcuauaug

SEQ ID NO: 1977513 - RNA, 19 nt, Homo sapiens
  misc_RNA (1)...(19): siRNA sense strand
gaagaauuugccuaugaaa

SEQ ID NO: 1977514 - RNA, 19 nt, Homo sapiens
  misc_RNA (1)...(19): siRNA sense strand
cgaaguggguacugugcaa

SEQ ID NO: 1977515 - RNA, 19 nt, Homo sapiens
  misc_RNA (1)...(19): siRNA sense strand
gaucucuucuauaggauuc

SEQ ID NO: 1977516 - RNA, 19 nt, Homo sapiens
  misc_RNA (1)...(19): siRNA sense strand
ggaggacacagauuucuuc

SEQ ID NO: 1977517 - RNA, 19 nt, Homo sapiens
  misc_RNA (1)...(19): siRNA sense strand
ugauccagcucauacagaa

SEQ ID NO: 1977518 - RNA, 19 nt, Homo sapiens
  misc_RNA (1)...(19): siRNA sense strand
gaagccugauguuaguuuc

SEQ ID NO: 1977519 - RNA, 19 nt, Homo sapiens
  misc_RNA (1)...(19): siRNA sense strand
ggagaucaccagaaagaag

SEQ ID NO: 1977520 - RNA, 19 nt, Homo sapiens
  misc_RNA (1)...(19): siRNA sense strand
gccaacuucugccuuguau

SEQ ID NO: 1977521 - RNA, 19 nt, Homo sapiens
  misc_RNA (1)...(19): siRNA sense strand
agcaugagcuuccgcuuga

SEQ ID NO: 1977522 - RNA, 19 nt, Homo sapiens
  misc_RNA (1)...(19): siRNA sense strand
gaggacgaaucagauguau

SEQ ID NO: 1977523 - RNA, 19 nt, Homo sapiens
  misc_RNA (1)...(19): siRNA sense strand
uggguacugugcaaugaua

SEQ ID NO: 1977524 - RNA, 19 nt, Homo sapiens
  misc_RNA (1)...(19): siRNA sense strand
gcagaguauuccaguaguc

SEQ ID NO: 1977525 - RNA, 19 nt, Homo sapiens
  misc_RNA (1)...(19): siRNA sense strand
gaugaagcaauauaccauu

SEQ ID NO: 1977526 - RNA, 19 nt, Homo sapiens
  misc_RNA (1)...(19): siRNA sense strand
ccaaagugcacugcuauau

SEQ ID NO: 1977527 - RNA, 19 nt, Homo sapiens
  misc_RNA (1)...(19): siRNA sense strand
gaaauuguggaucauugga

SEQ ID NO: 1977528 - RNA, 19 nt, Homo sapiens
  misc_RNA (1)...(19): siRNA sense strand
gggaaagaagauuuggaua

SEQ ID NO: 1977529 - RNA, 19 nt, Homo sapiens
  misc_RNA (1)...(19): siRNA sense strand
gauucaccuuggcugauaa

SEQ ID NO: 1977530 - RNA, 19 nt, Homo sapiens
  misc_RNA (1)...(19): siRNA sense strand
uuggauaaguggacaguga

SEQ ID NO: 1977531 - RNA, 19 nt, Homo sapiens
  misc_RNA (1)...(19): siRNA sense strand
aggaugaaauuguggauca

SEQ ID NO: 1977532 - RNA, 19 nt, Homo sapiens
  misc_RNA (1)...(19): siRNA sense strand
gcaauuagagaugaagcaa

SEQ ID NO: 1977533 - RNA, 19 nt, Homo sapiens
  misc_RNA (1)...(19): siRNA sense strand
gagaucaccagaaagaagu

SEQ ID NO: 1977534 - RNA, 19 nt, Homo sapiens
  misc_RNA (1)...(19): siRNA sense strand
cgauaaagcaauuagagau

SEQ ID NO: 1977535 - RNA, 19 nt, Homo sapiens
  misc_RNA (1)...(19): siRNA sense strand
aaggagaucaccagaaaga

SEQ ID NO: 1977536 - RNA, 19 nt, Homo sapiens
  misc_RNA (1)...(19): siRNA sense strand
ccaagguugucuggcaauu

SEQ ID NO: 1977537 - RNA, 19 nt, Homo sapiens
  misc_RNA (1)...(19): siRNA sense strand
acagugacuucugauaaga

SEQ ID NO: 1977538 - RNA, 19 nt, Homo sapiens
  misc_RNA (1)...(19): siRNA sense strand
gagcuuccgcuugauaaga

SEQ ID NO: 1977539 - RNA, 19 nt, Homo sapiens
  misc_RNA (1)...(19): siRNA sense strand
caugagcuuccgcuugaua

SEQ ID NO: 1977540 - RNA, 19 nt, Homo sapiens
  misc_RNA (1)...(19): siRNA sense strand
caaggaggacacagauuuc

SEQ ID NO: 1977541 - RNA, 19 nt, Homo sapiens
  misc_RNA (1)...(19): siRNA sense strand
uuauuggcguguuuacuga

SEQ ID NO: 1977542 - RNA, 19 nt, Homo sapiens
  misc_RNA (1)...(19): siRNA sense strand
gagaugaagcaauauacca

SEQ ID NO: 1977543 - RNA, 19 nt, Homo sapiens
  misc_RNA (1)...(19): siRNA sense strand
gcacugcuauauggaacuc

SEQ ID NO: 1977544 - RNA, 19 nt, Homo sapiens
  misc_RNA (1)...(19): siRNA sense strand
ccaguagucuucagaaacc

SEQ ID NO: 1977545 - RNA, 19 nt, Homo sapiens
  misc_RNA (1)...(19): siRNA sense strand
gcucauacagaagaauuug

SEQ ID NO: 1977546 - RNA, 19 nt, Homo sapiens
  misc_RNA (1)...(19): siRNA sense strand
uuugaaggaugaaauugug

SEQ ID NO: 1977547 - RNA, 19 nt, Homo sapiens
  misc_RNA (1)...(19): siRNA sense strand
ggucccaguucaauacucu

SEQ ID NO: 1977548 - RNA, 19 nt, Homo sapiens
  misc_RNA (1)...(19): siRNA sense strand
ggcaggaggucaagauucc

SEQ ID NO: 1977549 - RNA, 19 nt, Homo sapiens
  misc_RNA (1)...(19): siRNA sense strand
agaggacgaaucagaugua

SEQ ID NO: 1977550 - RNA, 19 nt, Homo sapiens
  misc_RNA (1)...(19): siRNA sense strand
cagcucauacagaagaauu

SEQ ID NO: 1977551 - RNA, 19 nt, Homo sapiens
  misc_RNA (1)...(19): siRNA sense strand
guauaguuacuucauguuc

SEQ ID NO: 1977552 - RNA, 19 nt, Homo sapiens
  misc_RNA (1)...(19): siRNA sense strand
acagaagaauuugccuaug

SEQ ID NO: 1977553 - RNA, 19 nt, Homo sapiens
  misc_RNA (1)...(19): siRNA sense strand
ucacagaggaagacugaag

SEQ ID NO: 1977554 - RNA, 19 nt, Homo sapiens
  misc_RNA (1)...(19): siRNA sense strand
uccgggauguucagcauga

SEQ ID NO: 1977555 - RNA, 19 nt, Homo sapiens
  misc_RNA (1)...(19): siRNA sense strand
gauuggaggcagaagugaa

SEQ ID NO: 1977556 - RNA, 19 nt, Homo sapiens
  misc_RNA (1)...(19): siRNA sense strand
gaaaauucuccagagcuua

SEQ ID NO: 1977557 - RNA, 19 nt, Homo sapiens
  misc_RNA (1)...(19): siRNA sense strand
ccagaggacgaaucagaug

SEQ ID NO: 1977558 - RNA, 19 nt, Homo sapiens
  misc_RNA (1)...(19): siRNA sense strand
gaaggaugaaauuguggau

SEQ ID NO: 1977559 - RNA, 19 nt, Homo sapiens
  misc_RNA (1)...(19): siRNA sense strand
uacagaagaauuugccuau

SEQ ID NO: 1977560 - RNA, 19 nt, Homo sapiens
  misc_RNA (1)...(19): siRNA sense strand
aggagaagccugauguuag

SEQ ID NO: 1977561 - RNA, 19 nt, Homo sapiens
  misc_RNA (1)...(19): siRNA sense strand
caacuucugccuuguaucc

SEQ ID NO: 1977562 - RNA, 19 nt, Homo sapiens
  misc_RNA (1)...(19): siRNA sense strand
ggauggugaauaucaagga

SEQ ID NO: 1977563 - RNA, 19 nt, Homo sapiens
  misc_RNA (1)...(19): siRNA sense strand
ugaaaaugggcaagaauaa

SEQ ID NO: 1977564 - RNA, 19 nt, Homo sapiens
  misc_RNA (1)...(19): siRNA sense strand
ggaaggccacccucugcau

SEQ ID NO: 1977565 - RNA, 19 nt, Homo sapiens
  misc_RNA (1)...(19): siRNA sense strand
aguggacagugacuucuga

SEQ ID NO: 1977566 - RNA, 19 nt, Homo sapiens
  misc_RNA (1)...(19): siRNA sense strand
ugaaaauucuccagagcuu

SEQ ID NO: 1977567 - RNA, 19 nt, Homo sapiens
  misc_RNA (1)...(19): siRNA sense strand
gaguauuccaguagucuuc

SEQ ID NO: 1977568 - RNA, 19 nt, Homo sapiens
  misc_RNA (1)...(19): siRNA sense strand
gcuggaacaagccaagguu

SEQ ID NO: 1977569 - RNA, 19 nt, Homo sapiens
  misc_RNA (1)...(19): siRNA sense strand
agaagccugauguuaguuu

SEQ ID NO: 1977570 - RNA, 19 nt, Homo sapiens
  misc_RNA (1)...(19): siRNA sense strand
ggaggcagaagugaagugu

SEQ ID NO: 1977571 - RNA, 19 nt, Homo sapiens
  misc_RNA (1)...(19): siRNA sense strand
gaauaucaaggaggacaca

SEQ ID NO: 1977572 - RNA, 19 nt, Homo sapiens
  misc_RNA (1)...(19): siRNA sense strand
uuacugauccagcucauac

SEQ ID NO: 1977573 - RNA, 19 nt, Homo sapiens
  misc_RNA (1)...(19): siRNA sense strand
ucgauaaagcaauuagaga

SEQ ID NO: 1977574 - RNA, 19 nt, Homo sapiens
  misc_RNA (1)...(19): siRNA sense strand
uaucaaggaggacacagau

SEQ ID NO: 1977575 - RNA, 19 nt, Homo sapiens
  misc_RNA (1)...(19): siRNA sense strand
aagaaguugcuuuggauau

SEQ ID NO: 1977576 - RNA, 19 nt, Homo sapiens
  misc_RNA (1)...(19): siRNA sense strand
cuucugccuuguauccauu

SEQ ID NO: 1977577 - RNA, 19 nt, Homo sapiens
  misc_RNA (1)...(19): siRNA sense strand
acgaaucagauguauaguu

SEQ ID NO: 1977578 - RNA, 19 nt, Homo sapiens
  misc_RNA (1)...(19): siRNA sense strand
cauucuuccuggagauaga

SEQ ID NO: 1977579 - RNA, 19 nt, Homo sapiens
  misc_RNA (1)...(19): siRNA sense strand
ggaagaauuuggccacauc

SEQ ID NO: 1977580 - RNA, 19 nt, Homo sapiens
  misc_RNA (1)...(19): siRNA sense strand
ccugugaccuggauacauu

SEQ ID NO: 1977581 - RNA, 19 nt, Homo sapiens
  misc_RNA (1)...(19): siRNA sense strand
gucaaaugcuggucuguga

SEQ ID NO: 1977582 - RNA, 19 nt, Homo sapiens
  misc_RNA (1)...(19): siRNA sense strand
gaaagggucaguugcuugu

SEQ ID NO: 1977583 - RNA, 19 nt, Homo sapiens
  misc_RNA (1)...(19): siRNA sense strand
gaaagaggaggcagacaca

SEQ ID NO: 1977584 - RNA, 19 nt, Homo sapiens
  misc_RNA (1)...(19): siRNA sense strand
gucaguugcuuguuucuau

SEQ ID NO: 1977585 - RNA, 19 nt, Homo sapiens
  misc_RNA (1)...(19): siRNA sense strand
gggaaagggucaguugcuu

SEQ ID NO: 1977586 - RNA, 19 nt, Homo sapiens
  misc_RNA (1)...(19): siRNA sense strand
gacagggacggaucaguuu

SEQ ID NO: 1977587 - RNA, 19 nt, Homo sapiens
  misc_RNA (1)...(19): siRNA sense strand
ugacagggacggaucaguu

SEQ ID NO: 1977588 - RNA, 19 nt, Homo sapiens
  misc_RNA (1)...(19): siRNA sense strand
aagggucaguugcuuguuu

SEQ ID NO: 1977589 - RNA, 19 nt, Homo sapiens
  misc_RNA (1)...(19): siRNA sense strand
caaaugcuggucugugaga

SEQ ID NO: 1977590 - RNA, 19 nt, Homo sapiens
  misc_RNA (1)...(19): siRNA sense strand
cugagacauucaauauuug

SEQ ID NO: 1977591 - RNA, 19 nt, Homo sapiens
  misc_RNA (1)...(19): siRNA sense strand
gccaacugcugcuucucuu

SEQ ID NO: 1977592 - RNA, 19 nt, Homo sapiens
  misc_RNA (1)...(19): siRNA sense strand
gggaagaauuuggccacau

SEQ ID NO: 1977593 - RNA, 19 nt, Homo sapiens
  misc_RNA (1)...(19): siRNA sense strand
agaagggucucugggaauc

SEQ ID NO: 1977594 - RNA, 19 nt, Homo sapiens
  misc_RNA (1)...(19): siRNA sense strand
gcuuguuucuaucagauuc

SEQ ID NO: 1977595 - RNA, 19 nt, Homo sapiens
  misc_RNA (1)...(19): siRNA sense strand
aauccaaucucagucuguu

SEQ ID NO: 1977596 - RNA, 19 nt, Homo sapiens
  misc_RNA (1)...(19): siRNA sense strand
ucauggacaccaccaagaa

SEQ ID NO: 1977597 - RNA, 19 nt, Homo sapiens
  misc_RNA (1)...(19): siRNA sense strand
cuuacaaagugaccaaagu

SEQ ID NO: 1977598 - RNA, 19 nt, Homo sapiens
  misc_RNA (1)...(19): siRNA sense strand
cuguugggcuuacaaagug

SEQ ID NO: 1977599 - RNA, 19 nt, Homo sapiens
  misc_RNA (1)...(19): siRNA sense strand
cauggacaccaccaagaaa

SEQ ID NO: 1977600 - RNA, 19 nt, Homo sapiens
  misc_RNA (1)...(19): siRNA sense strand
ucaguugcuuguuucuauc

SEQ ID NO: 1977601 - RNA, 19 nt, Homo sapiens
  misc_RNA (1)...(19): siRNA sense strand
gaauccaaucucagucugu

SEQ ID NO: 1977602 - RNA, 19 nt, Homo sapiens
  misc_RNA (1)...(19): siRNA sense strand
ggucaguugcuuguuucua

SEQ ID NO: 1977603 - RNA, 19 nt, Homo sapiens
  misc_RNA (1)...(19): siRNA sense strand
gggaauccaaucucagucu

SEQ ID NO: 1977604 - RNA, 19 nt, Homo sapiens
  misc_RNA (1)...(19): siRNA sense strand
ccugaacacgggaacagaa

SEQ ID NO: 1977605 - RNA, 19 nt, Homo sapiens
  misc_RNA (1)...(19): siRNA sense strand
gcaacaagugcaauuauua

SEQ ID NO: 1977606 - RNA, 19 nt, Homo sapiens
  misc_RNA (1)...(19): siRNA sense strand
gcagaagaauuuaaaguuc

SEQ ID NO: 1977607 - RNA, 19 nt, Homo sapiens
  misc_RNA (1)...(19): siRNA sense strand
ucacagcagucuuaaaguu

SEQ ID NO: 1977608 - RNA, 19 nt, Homo sapiens
  misc_RNA (1)...(19): siRNA sense strand
gaacugcggauuauuccua

SEQ ID NO: 1977609 - RNA, 19 nt, Homo sapiens
  misc_RNA (1)...(19): siRNA sense strand
gugcaauuauuaccaauga

SEQ ID NO: 1977610 - RNA, 19 nt, Homo sapiens
  misc_RNA (1)...(19): siRNA sense strand
caagugcaauuauuaccaa

SEQ ID NO: 1977611 - RNA, 19 nt, Homo sapiens
  misc_RNA (1)...(19): siRNA sense strand
gcaauuauuaccaaugaug

SEQ ID NO: 1977612 - RNA, 19 nt, Homo sapiens
  misc_RNA (1)...(19): siRNA sense strand
uaaaguuccugcugcaaca

SEQ ID NO: 1977613 - RNA, 19 nt, Homo sapiens
  misc_RNA (1)...(19): siRNA sense strand
gauggaauaggaauaaauc

SEQ ID NO: 1977614 - RNA, 19 nt, Homo sapiens
  misc_RNA (1)...(19): siRNA sense strand
gagaucguguuggaaguug

SEQ ID NO: 1977615 - RNA, 19 nt, Homo sapiens
  misc_RNA (1)...(19): siRNA sense strand
ggaauaaauccugcacaga

SEQ ID NO: 1977616 - RNA, 19 nt, Homo sapiens
  misc_RNA (1)...(19): siRNA sense strand
acagacugcuggaaauguu

SEQ ID NO: 1977617 - RNA, 19 nt, Homo sapiens
  misc_RNA (1)...(19): siRNA sense strand
acagcagucuuaaaguuug

SEQ ID NO: 1977618 - RNA, 19 nt, Homo sapiens
  misc_RNA (1)...(19): siRNA sense strand
gcacagacugcuggaaaug

SEQ ID NO: 1977619 - RNA, 19 nt, Homo sapiens
  misc_RNA (1)...(19): siRNA sense strand
guuugcagcagaagaauuu

SEQ ID NO: 1977620 - RNA, 19 nt, Homo sapiens
  misc_RNA (1)...(19): siRNA sense strand
uaccaaugauggaauagga

SEQ ID NO: 1977621 - RNA, 19 nt, Homo sapiens
  misc_RNA (1)...(19): siRNA sense strand
caacaagugcaauuauuac

SEQ ID NO: 1977622 - RNA, 19 nt, Homo sapiens
  misc_RNA (1)...(19): siRNA sense strand
ucagaacugcggauuauuc

SEQ ID NO: 1977623 - RNA, 19 nt, Homo sapiens
  misc_RNA (1)...(19): siRNA sense strand
aaaguuugcagcagaagaa

SEQ ID NO: 1977624 - RNA, 19 nt, Homo sapiens
  misc_RNA (1)...(19): siRNA sense strand
cacagcagucuuaaaguuu

SEQ ID NO: 1977625 - RNA, 19 nt, Homo sapiens
  misc_RNA (1)...(19): siRNA sense strand
cuuaaaguuugcagcagaa

SEQ ID NO: 1977626 - RNA, 19 nt, Homo sapiens
  misc_RNA (1)...(19): siRNA sense strand
cagcagaagaauuuaaagu

SEQ ID NO: 1977627 - RNA, 19 nt, Homo sapiens
  misc_RNA (1)...(19): siRNA sense strand
caaugauggaauaggaaua

SEQ ID NO: 1977628 - RNA, 19 nt, Homo sapiens
  misc_RNA (1)...(19): siRNA sense strand
ucuaaaacaugguucagaa

SEQ ID NO: 1977629 - RNA, 19 nt, Homo sapiens
  misc_RNA (1)...(19): siRNA sense strand
aauaaauccugcacagacu

SEQ ID NO: 1977630 - RNA, 19 nt, Homo sapiens
  misc_RNA (1)...(19): siRNA sense strand
gaucguguuggaaguuguu

SEQ ID NO: 1977631 - RNA, 19 nt, Homo sapiens
  misc_RNA (1)...(19): siRNA sense strand
ccaaugauggaauaggaau

SEQ ID NO: 1977632 - RNA, 19 nt, Homo sapiens
  misc_RNA (1)...(19): siRNA sense strand
gcggauuauuccuagagau

SEQ ID NO: 1977633 - RNA, 19 nt, Homo sapiens
  misc_RNA (1)...(19): siRNA sense strand
uacaaaguacucaguguuc

SEQ ID NO: 1977634 - RNA, 19 nt, Homo sapiens
  misc_RNA (1)...(19): siRNA sense strand
uccuagagaucguguugga

SEQ ID NO: 1977635 - RNA, 19 nt, Homo sapiens
  misc_RNA (1)...(19): siRNA sense strand
cugcacagacugcuggaaa

SEQ ID NO: 1977636 - RNA, 19 nt, Homo sapiens
  misc_RNA (1)...(19): siRNA sense strand
uaaaguuugcagcagaaga

SEQ ID NO: 1977637 - RNA, 19 nt, Homo sapiens
  misc_RNA (1)...(19): siRNA sense strand
uuucacagcagucuuaaag

SEQ ID NO: 1977638 - RNA, 19 nt, Homo sapiens
  misc_RNA (1)...(19): siRNA sense strand
gauuauuccuagagaucgu

SEQ ID NO: 1977639 - RNA, 19 nt, Homo sapiens
  misc_RNA (1)...(19): siRNA sense strand
uagagaucguguuggaagu

SEQ ID NO: 1977640 - RNA, 19 nt, Homo sapiens
  misc_RNA (1)...(19): siRNA sense strand
gauaaccucuccaguauua

SEQ ID NO: 1977641 - RNA, 19 nt, Homo sapiens
  misc_RNA (1)...(19): siRNA sense strand
ggacuaggaucacggauua

SEQ ID NO: 1977642 - RNA, 19 nt, Homo sapiens
  misc_RNA (1)...(19): siRNA sense strand
gaaauacacuuuacucuuc

SEQ ID NO: 1977643 - RNA, 19 nt, Homo sapiens
  misc_RNA (1)...(19): siRNA sense strand
gaucacggauuaauuguaa

SEQ ID NO: 1977644 - RNA, 19 nt, Homo sapiens
  misc_RNA (1)...(19): siRNA sense strand
ggagauugcuucaaaauua

SEQ ID NO: 1977645 - RNA, 19 nt, Homo sapiens
  misc_RNA (1)...(19): siRNA sense strand
cagaauugcuuguauguuu

SEQ ID NO: 1977646 - RNA, 19 nt, Homo sapiens
  misc_RNA (1)...(19): siRNA sense strand
acaaugauguggaacuuua

SEQ ID NO: 1977647 - RNA, 19 nt, Homo sapiens
  misc_RNA (1)...(19): siRNA sense strand
gaaccucuaugcagacauu

SEQ ID NO: 1977648 - RNA, 19 nt, Homo sapiens
  misc_RNA (1)...(19): siRNA sense strand
gacaguaucuugaaagguu

SEQ ID NO: 1977649 - RNA, 19 nt, Homo sapiens
  misc_RNA (1)...(19): siRNA sense strand
cgaguugccuuuccugaua

SEQ ID NO: 1977650 - RNA, 19 nt, Homo sapiens
  misc_RNA (1)...(19): siRNA sense strand
uaagauaaccucuccagua

SEQ ID NO: 1977651 - RNA, 19 nt, Homo sapiens
  misc_RNA (1)...(19): siRNA sense strand
caacagaauugcuuguaug

SEQ ID NO: 1977652 - RNA, 19 nt, Homo sapiens
  misc_RNA (1)...(19): siRNA sense strand
gaacuggugcagaaacaua

SEQ ID NO: 1977653 - RNA, 19 nt, Homo sapiens
  misc_RNA (1)...(19): siRNA sense strand
ccaaggagaccuacuguuu

SEQ ID NO: 1977654 - RNA, 19 nt, Homo sapiens
  misc_RNA (1)...(19): siRNA sense strand
gcuauugaguguuucauga

SEQ ID NO: 1977655 - RNA, 19 nt, Homo sapiens
  misc_RNA (1)...(19): siRNA sense strand
gauuauauauggccaaagu

SEQ ID NO: 1977656 - RNA, 19 nt, Homo sapiens
  misc_RNA (1)...(19): siRNA sense strand
ugagagugcugcuguuauu

SEQ ID NO: 1977657 - RNA, 19 nt, Homo sapiens
  misc_RNA (1)...(19): siRNA sense strand
aagauaaccucuccaguau

SEQ ID NO: 1977658 - RNA, 19 nt, Homo sapiens
  misc_RNA (1)...(19): siRNA sense strand
ggaacuuuauggacaguau

SEQ ID NO: 1977659 - RNA, 19 nt, Homo sapiens
  misc_RNA (1)...(19): siRNA sense strand
aagaugcuauugaguguuu

SEQ ID NO: 1977660 - RNA, 19 nt, Homo sapiens
  misc_RNA (1)...(19): siRNA sense strand
cacaggaacuggugcagaa

SEQ ID NO: 1977661 - RNA, 19 nt, Homo sapiens
  misc_RNA (1)...(19): siRNA sense strand
ggaucuugcugcucgauau

SEQ ID NO: 1977662 - RNA, 19 nt, Homo sapiens
  misc_RNA (1)...(19): siRNA sense strand
gauccaacuuacacacuga

SEQ ID NO: 1977663 - RNA, 19 nt, Homo sapiens
  misc_RNA (1)...(19): siRNA sense strand
ggacuuuacaucugucuga

SEQ ID NO: 1977664 - RNA, 19 nt, Homo sapiens
  misc_RNA (1)...(19): siRNA sense strand
cgaaauacacuuuacucuu

SEQ ID NO: 1977665 - RNA, 19 nt, Homo sapiens
  misc_RNA (1)...(19): siRNA sense strand
gagcaggucacaaugaugu

SEQ ID NO: 1977666 - RNA, 19 nt, Homo sapiens
  misc_RNA (1)...(19): siRNA sense strand
guacguuguucacccaaug

SEQ ID NO: 1977667 - RNA, 19 nt, Homo sapiens
  misc_RNA (1)...(19): siRNA sense strand
ggaaacccacagagaagaa

SEQ ID NO: 1977668 - RNA, 19 nt, Homo sapiens
  misc_RNA (1)...(19): siRNA sense strand
ugaaggagcaggucacaau

SEQ ID NO: 1977669 - RNA, 19 nt, Homo sapiens
  misc_RNA (1)...(19): siRNA sense strand
ccaaugcgaaauacacuuu

SEQ ID NO: 1977670 - RNA, 19 nt, Homo sapiens
  misc_RNA (1)...(19): siRNA sense strand
uggaaaugcuguugaucuu

SEQ ID NO: 1977671 - RNA, 19 nt, Homo sapiens
  misc_RNA (1)...(19): siRNA sense strand
agaauugcuuguauguuug

SEQ ID NO: 1977672 - RNA, 19 nt, Homo sapiens
  misc_RNA (1)...(19): siRNA sense strand
cacauggccucgcauuguu

SEQ ID NO: 1977673 - RNA, 19 nt, Homo sapiens
  misc_RNA (1)...(19): siRNA sense strand
uuacauaggacuaggauca

SEQ ID NO: 1977674 - RNA, 19 nt, Homo sapiens
  misc_RNA (1)...(19): siRNA sense strand
cuugaaagguugaaacagu

SEQ ID NO: 1977675 - RNA, 19 nt, Homo sapiens
  misc_RNA (1)...(19): siRNA sense strand
uaggaucacggauuaauug

SEQ ID NO: 1977676 - RNA, 19 nt, Homo sapiens
  misc_RNA (1)...(19): siRNA sense strand
gaaggagcaggucacaaug

SEQ ID NO: 1977677 - RNA, 19 nt, Homo sapiens
  misc_RNA (1)...(19): siRNA sense strand
ugagcuauguugccucuuc

SEQ ID NO: 1977678 - RNA, 19 nt, Homo sapiens
  misc_RNA (1)...(19): siRNA sense strand
acacuuuacucuucucaca

SEQ ID NO: 1977679 - RNA, 19 nt, Homo sapiens
  misc_RNA (1)...(19): siRNA sense strand
caaaguauagggacaguac

SEQ ID NO: 1977680 - RNA, 19 nt, Homo sapiens
  misc_RNA (1)...(19): siRNA sense strand
ggaucacggauuaauugua

SEQ ID NO: 1977681 - RNA, 19 nt, Homo sapiens
  misc_RNA (1)...(19): siRNA sense strand
ggaaaugcuguugaucuug

SEQ ID NO: 1977682 - RNA, 19 nt, Homo sapiens
  misc_RNA (1)...(19): siRNA sense strand
caguaaaggcaacagaauu

SEQ ID NO: 1977683 - RNA, 19 nt, Homo sapiens
  misc_RNA (1)...(19): siRNA sense strand
gugauuauauauggccaaa

SEQ ID NO: 1977684 - RNA, 19 nt, Homo sapiens
  misc_RNA (1)...(19): siRNA sense strand
guucacccaaugcgaaaua

SEQ ID NO: 1977685 - RNA, 19 nt, Homo sapiens
  misc_RNA (1)...(19): siRNA sense strand
gcuuguauguuuguacguu

SEQ ID NO: 1977686 - RNA, 19 nt, Homo sapiens
  misc_RNA (1)...(19): siRNA sense strand
uugaaagguugaaacaguu

SEQ ID NO: 1977687 - RNA, 19 nt, Homo sapiens
  misc_RNA (1)...(19): siRNA sense strand
uauggacaguaucuugaaa

SEQ ID NO: 1977688 - RNA, 19 nt, Homo sapiens
  misc_RNA (1)...(19): siRNA sense strand
ucacauggccucgcauugu

SEQ ID NO: 1977689 - RNA, 19 nt, Homo sapiens
  misc_RNA (1)...(19): siRNA sense strand
gggaaugcgaguugccuuu

SEQ ID NO: 1977690 - RNA, 19 nt, Homo sapiens
  misc_RNA (1)...(19): siRNA sense strand
gugcugcuguuauucuuca

SEQ ID NO: 1977691 - RNA, 19 nt, Homo sapiens
  misc_RNA (1)...(19): siRNA sense strand
gagugcugcuguuauucuu

SEQ ID NO: 1977692 - RNA, 19 nt, Homo sapiens
  misc_RNA (1)...(19): siRNA sense strand
uaugagagugcugcuguua

SEQ ID NO: 1977693 - RNA, 19 nt, Homo sapiens
  misc_RNA (1)...(19): siRNA sense strand
gaaagccggacgcguugga

SEQ ID NO: 1977694 - RNA, 19 nt, Homo sapiens
  misc_RNA (1)...(19): siRNA sense strand
aguaaaggcaacagaauug

SEQ ID NO: 1977695 - RNA, 19 nt, Homo sapiens
  misc_RNA (1)...(19): siRNA sense strand
cugcuuggcuugcucuuag

SEQ ID NO: 1977696 - RNA, 19 nt, Homo sapiens
  misc_RNA (1)...(19): siRNA sense strand
gagcagcuuuuacauagga

SEQ ID NO: 1977697 - RNA, 19 nt, Homo sapiens
  misc_RNA (1)...(19): siRNA sense strand
uuacucuucucacauggaa

SEQ ID NO: 1977698 - RNA, 19 nt, Homo sapiens
  misc_RNA (1)...(19): siRNA sense strand
caggggagauugcuucaaa

SEQ ID NO: 1977699 - RNA, 19 nt, Homo sapiens
  misc_RNA (1)...(19): siRNA sense strand
caaugcgaaauacacuuua

SEQ ID NO: 1977700 - RNA, 19 nt, Homo sapiens
  misc_RNA (1)...(19): siRNA sense strand
caaaugagcagcuuuuaca

SEQ ID NO: 1977701 - RNA, 19 nt, Homo sapiens
  misc_RNA (1)...(19): siRNA sense strand
uaaccucuccaguauuaau

SEQ ID NO: 1977702 - RNA, 19 nt, Homo sapiens
  misc_RNA (1)...(19): siRNA sense strand
gaugcauucccaaacauug

SEQ ID NO: 1977703 - RNA, 19 nt, Homo sapiens
  misc_RNA (1)...(19): siRNA sense strand
gcguuggacuuuacaucug

SEQ ID NO: 1977704 - RNA, 19 nt, Homo sapiens
  misc_RNA (1)...(19): siRNA sense strand
gagccucucuggguugaag

SEQ ID NO: 1977705 - RNA, 19 nt, Homo sapiens
  misc_RNA (1)...(19): siRNA sense strand
ccaguaaaggcaacagaau

SEQ ID NO: 1977706 - RNA, 19 nt, Homo sapiens
  misc_RNA (1)...(19): siRNA sense strand
gagcuauguugccucuucu

SEQ ID NO: 1977707 - RNA, 19 nt, Homo sapiens
  misc_RNA (1)...(19): siRNA sense strand
acauggaaaugcuguugau

SEQ ID NO: 1977708 - RNA, 19 nt, Homo sapiens
  misc_RNA (1)...(19): siRNA sense strand
gaauugcuuguauguuugu

SEQ ID NO: 1977709 - RNA, 19 nt, Homo sapiens
  misc_RNA (1)...(19): siRNA sense strand
gacuuuacaucugucugaa

SEQ ID NO: 1977710 - RNA, 19 nt, Homo sapiens
  misc_RNA (1)...(19): siRNA sense strand
ggaaugcgaguugccuuuc

SEQ ID NO: 1977711 - RNA, 19 nt, Homo sapiens
  misc_RNA (1)...(19): siRNA sense strand
ggcaguauucuucuagaga

SEQ ID NO: 1977712 - RNA, 19 nt, Homo sapiens
  misc_RNA (1)...(19): siRNA sense strand
gggaaacccacagagaaga

SEQ ID NO: 1977713 - RNA, 19 nt, Homo sapiens
  misc_RNA (1)...(19): siRNA sense strand
gaguguuucaugacuagaa

SEQ ID NO: 1977714 - RNA, 19 nt, Homo sapiens
  misc_RNA (1)...(19): siRNA sense strand
gugcagaaacauaaagaag

SEQ ID NO: 1977715 - RNA, 19 nt, Homo sapiens
  misc_RNA (1)...(19): siRNA sense strand
caaggagaccuacuguuuu

SEQ ID NO: 1977716 - RNA, 19 nt, Homo sapiens
  misc_RNA (1)...(19): siRNA sense strand
ccgggaaacccacagagaa

SEQ ID NO: 1977717 - RNA, 19 nt, Homo sapiens
  misc_RNA (1)...(19): siRNA sense strand
gagauugcuucaaaauuag

SEQ ID NO: 1977718 - RNA, 19 nt, Homo sapiens
  misc_RNA (1)...(19): siRNA sense strand
gcgaaauacacuuuacucu

SEQ ID NO: 1977719 - RNA, 19 nt, Homo sapiens
  misc_RNA (1)...(19): siRNA sense strand
aaaagaugcuauugagugu

SEQ ID NO: 1977720 - RNA, 19 nt, Homo sapiens
  misc_RNA (1)...(19): siRNA sense strand
ccggacgcguuggacuuua

SEQ ID NO: 1977721 - RNA, 19 nt, Homo sapiens
  misc_RNA (1)...(19): siRNA sense strand
acuuuacucuucucacaug

SEQ ID NO: 1977722 - RNA, 19 nt, Homo sapiens
  misc_RNA (1)...(19): siRNA sense strand
acauaaagaagggaaguga

SEQ ID NO: 1977723 - RNA, 19 nt, Homo sapiens
  misc_RNA (1)...(19): siRNA sense strand
cuucugcuguccaccuuug

SEQ ID NO: 1977724 - RNA, 19 nt, Homo sapiens
  misc_RNA (1)...(19): siRNA sense strand
gaguugccuuuccugauac

SEQ ID NO: 1977725 - RNA, 19 nt, Homo sapiens
  misc_RNA (1)...(19): siRNA sense strand
gaucuugcugcucgauaug

SEQ ID NO: 1977726 - RNA, 19 nt, Homo sapiens
  misc_RNA (1)...(19): siRNA sense strand
cuaggaucacggauuaauu

SEQ ID NO: 1977727 - RNA, 19 nt, Homo sapiens
  misc_RNA (1)...(19): siRNA sense strand
ucacauggaaaugcuguug

SEQ ID NO: 1977728 - RNA, 19 nt, Homo sapiens
  misc_RNA (1)...(19): siRNA sense strand
aaggagaccuacuguuuug

SEQ ID NO: 1977729 - RNA, 19 nt, Homo sapiens
  misc_RNA (1)...(19): siRNA sense strand
gaacuuuauggacaguauc

SEQ ID NO: 1977730 - RNA, 19 nt, Homo sapiens
  misc_RNA (1)...(19): siRNA sense strand
aggagcaggucacaaugau

SEQ ID NO: 1977731 - RNA, 19 nt, Homo sapiens
  misc_RNA (1)...(19): siRNA sense strand
ggucaaaugagcagcuuuu

SEQ ID NO: 1977732 - RNA, 19 nt, Homo sapiens
  misc_RNA (1)...(19): siRNA sense strand
gcgaguugccuuuccugau

SEQ ID NO: 1977733 - RNA, 19 nt, Homo sapiens
  misc_RNA (1)...(19): siRNA sense strand
gaaugcgaguugccuuucc

SEQ ID NO: 1977734 - RNA, 19 nt, Homo sapiens
  misc_RNA (1)...(19): siRNA sense strand
ugauuauucuggauauggu

SEQ ID NO: 1977735 - RNA, 19 nt, Homo sapiens
  misc_RNA (1)...(19): siRNA sense strand
cguuggacuuuacaucugu

SEQ ID NO: 1977736 - RNA, 19 nt, Homo sapiens
  misc_RNA (1)...(19): siRNA sense strand
ggagcaggucacaaugaug

SEQ ID NO: 1977737 - RNA, 19 nt, Homo sapiens
  misc_RNA (1)...(19): siRNA sense strand
uaauaauucaugggacuga

SEQ ID NO: 1977738 - RNA, 19 nt, Homo sapiens
  misc_RNA (1)...(19): siRNA sense strand
cugcuguuauucuucauuc

SEQ ID NO: 1977739 - RNA, 19 nt, Homo sapiens
  misc_RNA (1)...(19): siRNA sense strand
ccucuaugcagacauugaa

SEQ ID NO: 1977740 - RNA, 19 nt, Homo sapiens
  misc_RNA (1)...(19): siRNA sense strand
guacaaggcucuaacauug

SEQ ID NO: 1977741 - RNA, 19 nt, Homo sapiens
  misc_RNA (1)...(19): siRNA sense strand
ggacuuggcugacaucuuc

SEQ ID NO: 1977742 - RNA, 19 nt, Homo sapiens
  misc_RNA (1)...(19): siRNA sense strand
ggacagagagccugagaga

SEQ ID NO: 1977743 - RNA, 19 nt, Homo sapiens
  misc_RNA (1)...(19): siRNA sense strand
ugaagaacaucgugcacaa

SEQ ID NO: 1977744 - RNA, 19 nt, Homo sapiens
  misc_RNA (1)...(19): siRNA sense strand
gcgagaaccucuacaccau

SEQ ID NO: 1977745 - RNA, 19 nt, Homo sapiens
  misc_RNA (1)...(19): siRNA sense strand
acagagagccugagagaga

SEQ ID NO: 1977746 - RNA, 19 nt, Homo sapiens
  misc_RNA (1)...(19): siRNA sense strand
gaacaucgugcacaacuac

SEQ ID NO: 1977747 - RNA, 19 nt, Homo sapiens
  misc_RNA (1)...(19): siRNA sense strand
uaacauugcuggacuaccu

SEQ ID NO: 1977748 - RNA, 19 nt, Homo sapiens
  misc_RNA (1)...(19): siRNA sense strand
gcacuaacccagccaagca

SEQ ID NO: 1977749 - RNA, 19 nt, Homo sapiens
  misc_RNA (1)...(19): siRNA sense strand
gaaaggaggaggagaagcu

SEQ ID NO: 1977750 - RNA, 19 nt, Homo sapiens
  misc_RNA (1)...(19): siRNA sense strand
gguggugccucgaccuuug

SEQ ID NO: 1977751 - RNA, 19 nt, Homo sapiens
  misc_RNA (1)...(19): siRNA sense strand
ucgcugaccugaccuucaa

SEQ ID NO: 1977752 - RNA, 19 nt, Homo sapiens
  misc_RNA (1)...(19): siRNA sense strand
ucaaggacuuccaguacau

SEQ ID NO: 1977753 - RNA, 19 nt, Homo sapiens
  misc_RNA (1)...(19): siRNA sense strand
caacuacuccgaggcagaa

SEQ ID NO: 1977754 - RNA, 19 nt, Homo sapiens
  misc_RNA (1)...(19): siRNA sense strand
ugauggcccugcucaagga

SEQ ID NO: 1977755 - RNA, 19 nt, Homo sapiens
  misc_RNA (1)...(19): siRNA sense strand
ggccgacgcuaaaccagau

SEQ ID NO: 1977756 - RNA, 19 nt, Homo sapiens
  misc_RNA (1)...(19): siRNA sense strand
ggcaggagcacgagaagga

SEQ ID NO: 1977757 - RNA, 19 nt, Homo sapiens
  misc_RNA (1)...(19): siRNA sense strand
agagaaaggaggaggagaa

SEQ ID NO: 1977758 - RNA, 19 nt, Homo sapiens
  misc_RNA (1)...(19): siRNA sense strand
agaacaucgugcacaacua

SEQ ID NO: 1977759 - RNA, 19 nt, Homo sapiens
  misc_RNA (1)...(19): siRNA sense strand
gaacuggcggcacguguac

SEQ ID NO: 1977760 - RNA, 19 nt, Homo sapiens
  misc_RNA (1)...(19): siRNA sense strand
uguacaaggcucuaacauu

SEQ ID NO: 1977761 - RNA, 19 nt, Homo sapiens
  misc_RNA (1)...(19): siRNA sense strand
uaacccagccaagcaaaga

SEQ ID NO: 1977762 - RNA, 19 nt, Homo sapiens
  misc_RNA (1)...(19): siRNA sense strand
gcaaggaccagggcgucaa

SEQ ID NO: 1977763 - RNA, 19 nt, Homo sapiens
  misc_RNA (1)...(19): siRNA sense strand
ugccaaaccuccagaaucc

SEQ ID NO: 1977764 - RNA, 19 nt, Homo sapiens
  misc_RNA (1)...(19): siRNA sense strand
gaaggucaagcaggugaug

SEQ ID NO: 1977765 - RNA, 19 nt, Homo sapiens
  misc_RNA (1)...(19): siRNA sense strand
gaacucuccccacuacaaa

SEQ ID NO: 1977766 - RNA, 19 nt, Homo sapiens
  misc_RNA (1)...(19): siRNA sense strand
cuguggagcuggaccuguu

SEQ ID NO: 1977767 - RNA, 19 nt, Homo sapiens
  misc_RNA (1)...(19): siRNA sense strand
ccuccagaauccacagaga

SEQ ID NO: 1977768 - RNA, 19 nt, Homo sapiens
  misc_RNA (1)...(19): siRNA sense strand
ccucgaccuuugacccauu

SEQ ID NO: 1977769 - RNA, 19 nt, Homo sapiens
  misc_RNA (1)...(19): siRNA sense strand
ucaaugacagcggcaagaa

SEQ ID NO: 1977770 - RNA, 19 nt, Homo sapiens
  misc_RNA (1)...(19): siRNA sense strand
uccagacacucaaggacuu

SEQ ID NO: 1977771 - RNA, 19 nt, Homo sapiens
  misc_RNA (1)...(19): siRNA sense strand
gcgaggccaccagcaauga

SEQ ID NO: 1977772 - RNA, 19 nt, Homo sapiens
  misc_RNA (1)...(19): siRNA sense strand
agaacuggcggcacgugua

SEQ ID NO: 1977773 - RNA, 19 nt, Homo sapiens
  misc_RNA (1)...(19): siRNA sense strand
gagaaaggaggaggagaag

SEQ ID NO: 1977774 - RNA, 19 nt, Homo sapiens
  misc_RNA (1)...(19): siRNA sense strand
gaacccacgcccucaagac

SEQ ID NO: 1977775 - RNA, 19 nt, Homo sapiens
  misc_RNA (1)...(19): siRNA sense strand
ugaccugaccuucaacaca

SEQ ID NO: 1977776 - RNA, 19 nt, Homo sapiens
  misc_RNA (1)...(19): siRNA sense strand
gcacguguacaaggcucua

SEQ ID NO: 1977777 - RNA, 19 nt, Homo sapiens
  misc_RNA (1)...(19): siRNA sense strand
uggacuaccugcucaagac

SEQ ID NO: 1977778 - RNA, 19 nt, Homo sapiens
  misc_RNA (1)...(19): siRNA sense strand
acaaggcucuaacauugcu

SEQ ID NO: 1977779 - RNA, 19 nt, Homo sapiens
  misc_RNA (1)...(19): siRNA sense strand
agagagaggagagaaagga

SEQ ID NO: 1977780 - RNA, 19 nt, Homo sapiens
  misc_RNA (1)...(19): siRNA sense strand
uggcccugcucaaggauga

SEQ ID NO: 1977781 - RNA, 19 nt, Homo sapiens
  misc_RNA (1)...(19): siRNA sense strand
ggugauggcccugcucaag

SEQ ID NO: 1977782 - RNA, 19 nt, Homo sapiens
  misc_RNA (1)...(19): siRNA sense strand
cucaaggacuuccaguaca

SEQ ID NO: 1977783 - RNA, 19 nt, Homo sapiens
  misc_RNA (1)...(19): siRNA sense strand
gaagaacaucgugcacaac

SEQ ID NO: 1977784 - RNA, 19 nt, Homo sapiens
  misc_RNA (1)...(19): siRNA sense strand
gcacuucacucccuugaua

SEQ ID NO: 1977785 - RNA, 19 nt, Homo sapiens
  misc_RNA (1)...(19): siRNA sense strand
cgacacaucuuuacaauuc

SEQ ID NO: 1977786 - RNA, 19 nt, Homo sapiens
  misc_RNA (1)...(19): siRNA sense strand
ccacaacucuuugcauaua

SEQ ID NO: 1977787 - RNA, 19 nt, Homo sapiens
  misc_RNA (1)...(19): siRNA sense strand
cagauaagauuguaaggaa

SEQ ID NO: 1977788 - RNA, 19 nt, Homo sapiens
  misc_RNA (1)...(19): siRNA sense strand
gcagaacucagaugacuuu

SEQ ID NO: 1977789 - RNA, 19 nt, Homo sapiens
  misc_RNA (1)...(19): siRNA sense strand
gaaaaggacacucgauuua

SEQ ID NO: 1977790 - RNA, 19 nt, Homo sapiens
  misc_RNA (1)...(19): siRNA sense strand
aaaggacacucgauuuauu

SEQ ID NO: 1977791 - RNA, 19 nt, Homo sapiens
  misc_RNA (1)...(19): siRNA sense strand
cgaacgagcuaucacagaa

SEQ ID NO: 1977792 - RNA, 19 nt, Homo sapiens
  misc_RNA (1)...(19): siRNA sense strand
gaacucagaugacuuugac

SEQ ID NO: 1977793 - RNA, 19 nt, Homo sapiens
  misc_RNA (1)...(19): siRNA sense strand
ggaagaugauccuccaaau

SEQ ID NO: 1977794 - RNA, 19 nt, Homo sapiens
  misc_RNA (1)...(19): siRNA sense strand
gacaaaugcuuauguuuac

SEQ ID NO: 1977795 - RNA, 19 nt, Homo sapiens
  misc_RNA (1)...(19): siRNA sense strand
gaagaacucaagcgaagaa

SEQ ID NO: 1977796 - RNA, 19 nt, Homo sapiens
  misc_RNA (1)...(19): siRNA sense strand
gcauauaauuucagagaag

SEQ ID NO: 1977797 - RNA, 19 nt, Homo sapiens
  misc_RNA (1)...(19): siRNA sense strand
gaagaugauccuccaaaug

SEQ ID NO: 1977798 - RNA, 19 nt, Homo sapiens
  misc_RNA (1)...(19): siRNA sense strand
cguagucgccucucuguua

SEQ ID NO: 1977799 - RNA, 19 nt, Homo sapiens
  misc_RNA (1)...(19): siRNA sense strand
cgacgucgcugaacuucug

SEQ ID NO: 1977800 - RNA, 19 nt, Homo sapiens
  misc_RNA (1)...(19): siRNA sense strand
gcugacagauaagauugua

SEQ ID NO: 1977801 - RNA, 19 nt, Homo sapiens
  misc_RNA (1)...(19): siRNA sense strand
gcaaucugacaaaugcuua

SEQ ID NO: 1977802 - RNA, 19 nt, Homo sapiens
  misc_RNA (1)...(19): siRNA sense strand
gagaauuguucauggagau

SEQ ID NO: 1977803 - RNA, 19 nt, Homo sapiens
  misc_RNA (1)...(19): siRNA sense strand
gcaagcagcgaacgagcua

SEQ ID NO: 1977804 - RNA, 19 nt, Homo sapiens
  misc_RNA (1)...(19): siRNA sense strand
gacuugaggcugacagaua

SEQ ID NO: 1977805 - RNA, 19 nt, Homo sapiens
  misc_RNA (1)...(19): siRNA sense strand
aaggaaagcuggcaaucug

SEQ ID NO: 1977806 - RNA, 19 nt, Homo sapiens
  misc_RNA (1)...(19): siRNA sense strand
guagucgccucucuguuau

SEQ ID NO: 1977807 - RNA, 19 nt, Homo sapiens
  misc_RNA (1)...(19): siRNA sense strand
gaacuucuggugguugaaa

SEQ ID NO: 1977808 - RNA, 19 nt, Homo sapiens
  misc_RNA (1)...(19): siRNA sense strand
acccacaacucuuugcaua

SEQ ID NO: 1977809 - RNA, 19 nt, Homo sapiens
  misc_RNA (1)...(19): siRNA sense strand
cgagaaaucauuaaguugu

SEQ ID NO: 1977810 - RNA, 19 nt, Homo sapiens
  misc_RNA (1)...(19): siRNA sense strand
gagccucugugauguauac

SEQ ID NO: 1977811 - RNA, 19 nt, Homo sapiens
  misc_RNA (1)...(19): siRNA sense strand
gagauggaccuuuuguuua

SEQ ID NO: 1977812 - RNA, 19 nt, Homo sapiens
  misc_RNA (1)...(19): siRNA sense strand
guauuucaguuccgaagga

SEQ ID NO: 1977813 - RNA, 19 nt, Homo sapiens
  misc_RNA (1)...(19): siRNA sense strand
acuugaggcugacagauaa

SEQ ID NO: 1977814 - RNA, 19 nt, Homo sapiens
  misc_RNA (1)...(19): siRNA sense strand
aagaugauccuccaaaugu

SEQ ID NO: 1977815 - RNA, 19 nt, Homo sapiens
  misc_RNA (1)...(19): siRNA sense strand
gggaagaugauccuccaaa

SEQ ID NO: 1977816 - RNA, 19 nt, Homo sapiens
  misc_RNA (1)...(19): siRNA sense strand
ucgauuuauuccuggauua

SEQ ID NO: 1977817 - RNA, 19 nt, Homo sapiens
  misc_RNA (1)...(19): siRNA sense strand
gacauagacccuacucuuc

SEQ ID NO: 1977818 - RNA, 19 nt, Homo sapiens
  misc_RNA (1)...(19): siRNA sense strand
ugauacagcccaagauaga

SEQ ID NO: 1977819 - RNA, 19 nt, Homo sapiens
  misc_RNA (1)...(19): siRNA sense strand
gauaagauuguaaggaaag

SEQ ID NO: 1977820 - RNA, 19 nt, Homo sapiens
  misc_RNA (1)...(19): siRNA sense strand
cacaacucuuugcauauaa

SEQ ID NO: 1977821 - RNA, 19 nt, Homo sapiens
  misc_RNA (1)...(19): siRNA sense strand
caagauagagcagccauuc

SEQ ID NO: 1977822 - RNA, 19 nt, Homo sapiens
  misc_RNA (1)...(19): siRNA sense strand
ccuccaaauguacauauua

SEQ ID NO: 1977823 - RNA, 19 nt, Homo sapiens
  misc_RNA (1)...(19): siRNA sense strand
gaugaagacccacaacucu

SEQ ID NO: 1977824 - RNA, 19 nt, Homo sapiens
  misc_RNA (1)...(19): siRNA sense strand
gaacgagcuaucacagaau

SEQ ID NO: 1977825 - RNA, 19 nt, Homo sapiens
  misc_RNA (1)...(19): siRNA sense strand
aauauuuccuguagagaug

SEQ ID NO: 1977826 - RNA, 19 nt, Homo sapiens
  misc_RNA (1)...(19): siRNA sense strand
agaugauccuccaaaugua

SEQ ID NO: 1977827 - RNA, 19 nt, Homo sapiens
  misc_RNA (1)...(19): siRNA sense strand
agacauagacccuacucuu

SEQ ID NO: 1977828 - RNA, 19 nt, Homo sapiens
  misc_RNA (1)...(19): siRNA sense strand
ucugacaaaugcuuauguu

SEQ ID NO: 1977829 - RNA, 19 nt, Homo sapiens
  misc_RNA (1)...(19): siRNA sense strand
aggaugacgcagagaauua

SEQ ID NO: 1977830 - RNA, 19 nt, Homo sapiens
  misc_RNA (1)...(19): siRNA sense strand
gggaaucacaagaucuauu

SEQ ID NO: 1977831 - RNA, 19 nt, Homo sapiens
  misc_RNA (1)...(19): siRNA sense strand
agaauuuccuccuggacuu

SEQ ID NO: 1977832 - RNA, 19 nt, Homo sapiens
  misc_RNA (1)...(19): siRNA sense strand
gcucaguaccucugcaaug

SEQ ID NO: 1977833 - RNA, 19 nt, Homo sapiens
  misc_RNA (1)...(19): siRNA sense strand
aaacugagaauuguucaug

SEQ ID NO: 1977834 - RNA, 19 nt, Homo sapiens
  misc_RNA (1)...(19): siRNA sense strand
gaggaugacgcagagaauu

SEQ ID NO: 1977835 - RNA, 19 nt, Homo sapiens
  misc_RNA (1)...(19): siRNA sense strand
caguaccucugcaauguuc

SEQ ID NO: 1977836 - RNA, 19 nt, Homo sapiens
  misc_RNA (1)...(19): siRNA sense strand
gggaaacugagaauuguuc

SEQ ID NO: 1977837 - RNA, 19 nt, Homo sapiens
  misc_RNA (1)...(19): siRNA sense strand
caucgagggcucagaaugu

SEQ ID NO: 1977838 - RNA, 19 nt, Homo sapiens
  misc_RNA (1)...(19): siRNA sense strand
uguuucaacuccacugauu

SEQ ID NO: 1977839 - RNA, 19 nt, Homo sapiens
  misc_RNA (1)...(19): siRNA sense strand
aacgagcuaucacagaauu

SEQ ID NO: 1977840 - RNA, 19 nt, Homo sapiens
  misc_RNA (1)...(19): siRNA sense strand
gaggcugacagauaagauu

SEQ ID NO: 1977841 - RNA, 19 nt, Homo sapiens
  misc_RNA (1)...(19): siRNA sense strand
gcacgggcaggcuguuaga

SEQ ID NO: 1977842 - RNA, 19 nt, Homo sapiens
  misc_RNA (1)...(19): siRNA sense strand
ccugggaaacugagaauug

SEQ ID NO: 1977843 - RNA, 19 nt, Homo sapiens
  misc_RNA (1)...(19): siRNA sense strand
cgggcaggcuguuagaguu

SEQ ID NO: 1977844 - RNA, 19 nt, Homo sapiens
  misc_RNA (1)...(19): siRNA sense strand
agagagacuugcagccaau

SEQ ID NO: 1977845 - RNA, 19 nt, Homo sapiens
  misc_RNA (1)...(19): siRNA sense strand
ggaaaucugccuuuuagug

SEQ ID NO: 1977846 - RNA, 19 nt, Homo sapiens
  misc_RNA (1)...(19): siRNA sense strand
ucucuguuauggcucagua

SEQ ID NO: 1977847 - RNA, 19 nt, Homo sapiens
  misc_RNA (1)...(19): siRNA sense strand
ggaagcaaacagcguaguc

SEQ ID NO: 1977848 - RNA, 19 nt, Homo sapiens
  misc_RNA (1)...(19): siRNA sense strand
gaaaucugccuuuuagugu

SEQ ID NO: 1977849 - RNA, 19 nt, Homo sapiens
  misc_RNA (1)...(19): siRNA sense strand
agauagagcagccauucaa

SEQ ID NO: 1977850 - RNA, 19 nt, Homo sapiens
  misc_RNA (1)...(19): siRNA sense strand
guucgacacaucuuuacaa

SEQ ID NO: 1977851 - RNA, 19 nt, Homo sapiens
  misc_RNA (1)...(19): siRNA sense strand
ugacagauaagauuguaag

SEQ ID NO: 1977852 - RNA, 19 nt, Homo sapiens
  misc_RNA (1)...(19): siRNA sense strand
ucagaugacuuugacuuuu

SEQ ID NO: 1977853 - RNA, 19 nt, Homo sapiens
  misc_RNA (1)...(19): siRNA sense strand
caaaugcuuauguuuacga

SEQ ID NO: 1977854 - RNA, 19 nt, Homo sapiens
  misc_RNA (1)...(19): siRNA sense strand
gcaccugggaaacugagaa

SEQ ID NO: 1977855 - RNA, 19 nt, Homo sapiens
  misc_RNA (1)...(19): siRNA sense strand
gcgaacgagcuaucacaga

SEQ ID NO: 1977856 - RNA, 19 nt, Homo sapiens
  misc_RNA (1)...(19): siRNA sense strand
gaaagcuggcaaucugaca

SEQ ID NO: 1977857 - RNA, 19 nt, Homo sapiens
  misc_RNA (1)...(19): siRNA sense strand
guuuauggcagaacucaga

SEQ ID NO: 1977858 - RNA, 19 nt, Homo sapiens
  misc_RNA (1)...(19): siRNA sense strand
gcucuccaucucacacuuu

SEQ ID NO: 1977859 - RNA, 19 nt, Homo sapiens
  misc_RNA (1)...(19): siRNA sense strand
cauucaagcugguggaaaa

SEQ ID NO: 1977860 - RNA, 19 nt, Homo sapiens
  misc_RNA (1)...(19): siRNA sense strand
gagagacuugcagccaaua

SEQ ID NO: 1977861 - RNA, 19 nt, Homo sapiens
  misc_RNA (1)...(19): siRNA sense strand
ggaaacugagaauuguuca

SEQ ID NO: 1977862 - RNA, 19 nt, Homo sapiens
  misc_RNA (1)...(19): siRNA sense strand
cgagggcucagaauguuau

SEQ ID NO: 1977863 - RNA, 19 nt, Homo sapiens
  misc_RNA (1)...(19): siRNA sense strand
cucaguaccucugcaaugu

SEQ ID NO: 1977864 - RNA, 19 nt, Homo sapiens
  misc_RNA (1)...(19): siRNA sense strand
aaaggaaguggcagagaga

SEQ ID NO: 1977865 - RNA, 19 nt, Homo sapiens
  misc_RNA (1)...(19): siRNA sense strand
uggcagaacucagaugacu

SEQ ID NO: 1977866 - RNA, 19 nt, Homo sapiens
  misc_RNA (1)...(19): siRNA sense strand
agauggaccuuuuguuuau

SEQ ID NO: 1977867 - RNA, 19 nt, Homo sapiens
  misc_RNA (1)...(19): siRNA sense strand
ugaaaaggacacucgauuu

SEQ ID NO: 1977868 - RNA, 19 nt, Homo sapiens
  misc_RNA (1)...(19): siRNA sense strand
gaauuuccuccuggacuug

SEQ ID NO: 1977869 - RNA, 19 nt, Homo sapiens
  misc_RNA (1)...(19): siRNA sense strand
guuagaguuggcagacaua

SEQ ID NO: 1977870 - RNA, 19 nt, Homo sapiens
  misc_RNA (1)...(19): siRNA sense strand
gggcaggcuguuagaguug

SEQ ID NO: 1977871 - RNA, 19 nt, Homo sapiens
  misc_RNA (1)...(19): siRNA sense strand
aaaagugguucagaaugua

SEQ ID NO: 1977872 - RNA, 19 nt, Homo sapiens
  misc_RNA (1)...(19): siRNA sense strand
guuucaacuccacugauua

SEQ ID NO: 1977873 - RNA, 19 nt, Homo sapiens
  misc_RNA (1)...(19): siRNA sense strand
gaugauccuccaaauguac

SEQ ID NO: 1977874 - RNA, 19 nt, Homo sapiens
  misc_RNA (1)...(19): siRNA sense strand
acugagaauuguucaugga

SEQ ID NO: 1977875 - RNA, 19 nt, Homo sapiens
  misc_RNA (1)...(19): siRNA sense strand
cugggaaacugagaauugu

SEQ ID NO: 1977876 - RNA, 19 nt, Homo sapiens
  misc_RNA (1)...(19): siRNA sense strand
ugacgcagagaauuacaga

SEQ ID NO: 1977877 - RNA, 19 nt, Homo sapiens
  misc_RNA (1)...(19): siRNA sense strand
cugaacuucuggugguuga

SEQ ID NO: 1977878 - RNA, 19 nt, Homo sapiens
  misc_RNA (1)...(19): siRNA sense strand
gauagagcagccauucaag

SEQ ID NO: 1977879 - RNA, 19 nt, Homo sapiens
  misc_RNA (1)...(19): siRNA sense strand
augcuuauguuuacgaagu

SEQ ID NO: 1977880 - RNA, 19 nt, Homo sapiens
  misc_RNA (1)...(19): siRNA sense strand
uaaggaaagcuggcaaucu

SEQ ID NO: 1977881 - RNA, 19 nt, Homo sapiens
  misc_RNA (1)...(19): siRNA sense strand
guucagaauguauuucagu

SEQ ID NO: 1977882 - RNA, 19 nt, Homo sapiens
  misc_RNA (1)...(19): siRNA sense strand
gcuggcaaucugacaaaug

SEQ ID NO: 1977883 - RNA, 19 nt, Homo sapiens
  misc_RNA (1)...(19): siRNA sense strand
uauggcagaacucagauga

SEQ ID NO: 1977884 - RNA, 19 nt, Homo sapiens
  misc_RNA (1)...(19): siRNA sense strand
gaacaugggugaucgguuu

SEQ ID NO: 1977885 - RNA, 19 nt, Homo sapiens
  misc_RNA (1)...(19): siRNA sense strand
cgagaaagcugcacaguau

SEQ ID NO: 1977886 - RNA, 19 nt, Homo sapiens
  misc_RNA (1)...(19): siRNA sense strand
gaaaugagcuugggcugaa

SEQ ID NO: 1977887 - RNA, 19 nt, Homo sapiens
  misc_RNA (1)...(19): siRNA sense strand
gagguugacuuuccaauga

SEQ ID NO: 1977888 - RNA, 19 nt, Homo sapiens
  misc_RNA (1)...(19): siRNA sense strand
ucaaagagauaugccguua

SEQ ID NO: 1977889 - RNA, 19 nt, Homo sapiens
  misc_RNA (1)...(19): siRNA sense strand
aaagagauaugccguuauu

SEQ ID NO: 1977890 - RNA, 19 nt, Homo sapiens
  misc_RNA (1)...(19): siRNA sense strand
gaagagaagcuaaagaaau

SEQ ID NO: 1977891 - RNA, 19 nt, Homo sapiens
  misc_RNA (1)...(19): siRNA sense strand
gaagugagcaggauagaau

SEQ ID NO: 1977892 - RNA, 19 nt, Homo sapiens
  misc_RNA (1)...(19): siRNA sense strand
aagagaagcuaaagaaaug

SEQ ID NO: 1977893 - RNA, 19 nt, Homo sapiens
  misc_RNA (1)...(19): siRNA sense strand
gaacggcuccugucgaaug

SEQ ID NO: 1977894 - RNA, 19 nt, Homo sapiens
  misc_RNA (1)...(19): siRNA sense strand
gggcagaucaugauugaaa

SEQ ID NO: 1977895 - RNA, 19 nt, Homo sapiens
  misc_RNA (1)...(19): siRNA sense strand
gaaaucaacagaggauauu

SEQ ID NO: 1977896 - RNA, 19 nt, Homo sapiens
  misc_RNA (1)...(19): siRNA sense strand
ccgcaaaccuccugaagug

SEQ ID NO: 1977897 - RNA, 19 nt, Homo sapiens
  misc_RNA (1)...(19): siRNA sense strand
gagagagccauguucauaa

SEQ ID NO: 1977898 - RNA, 19 nt, Homo sapiens
  misc_RNA (1)...(19): siRNA sense strand
ggaagagaagcuaaagaaa

SEQ ID NO: 1977899 - RNA, 19 nt, Homo sapiens
  misc_RNA (1)...(19): siRNA sense strand
ugucugaacuggaagagaa

SEQ ID NO: 1977900 - RNA, 19 nt, Homo sapiens
  misc_RNA (1)...(19): siRNA sense strand
ugagagagccauguucaua

SEQ ID NO: 1977901 - RNA, 19 nt, Homo sapiens
  misc_RNA (1)...(19): siRNA sense strand
cugaaugugugcugguuua

SEQ ID NO: 1977902 - RNA, 19 nt, Homo sapiens
  misc_RNA (1)...(19): siRNA sense strand
gagccauguucauaaacua

SEQ ID NO: 1977903 - RNA, 19 nt, Homo sapiens
  misc_RNA (1)...(19): siRNA sense strand
agagagccauguucauaaa

SEQ ID NO: 1977904 - RNA, 19 nt, Homo sapiens
  misc_RNA (1)...(19): siRNA sense strand
gacacauacuggauucaaa

SEQ ID NO: 1977905 - RNA, 19 nt, Homo sapiens
  misc_RNA (1)...(19): siRNA sense strand
gaacuggaagagaagcuaa

SEQ ID NO: 1977906 - RNA, 19 nt, Homo sapiens
  misc_RNA (1)...(19): siRNA sense strand
gauaccaccuucuggagau

SEQ ID NO: 1977907 - RNA, 19 nt, Homo sapiens
  misc_RNA (1)...(19): siRNA sense strand
cauacuggauucaaagaga

SEQ ID NO: 1977908 - RNA, 19 nt, Homo sapiens
  misc_RNA (1)...(19): siRNA sense strand
gcuacuggcaugacccuua

SEQ ID NO: 1977909 - RNA, 19 nt, Homo sapiens
  misc_RNA (1)...(19): siRNA sense strand
gagaagcuaaagaaaugua

SEQ ID NO: 1977910 - RNA, 19 nt, Homo sapiens
  misc_RNA (1)...(19): siRNA sense strand
gagauuaaaggaugaagau

SEQ ID NO: 1977911 - RNA, 19 nt, Homo sapiens
  misc_RNA (1)...(19): siRNA sense strand
aagaacggcuccugucgaa

SEQ ID NO: 1977912 - RNA, 19 nt, Homo sapiens
  misc_RNA (1)...(19): siRNA sense strand
gagauaugccguuauugga

SEQ ID NO: 1977913 - RNA, 19 nt, Homo sapiens
  misc_RNA (1)...(19): siRNA sense strand
gcaagucauuagagucaca

SEQ ID NO: 1977914 - RNA, 19 nt, Homo sapiens
  misc_RNA (1)...(19): siRNA sense strand
gcaugacccuuacauacag

SEQ ID NO: 1977915 - RNA, 19 nt, Homo sapiens
  misc_RNA (1)...(19): siRNA sense strand
gaagugggcagccaacagu

SEQ ID NO: 1977916 - RNA, 19 nt, Homo sapiens
  misc_RNA (1)...(19): siRNA sense strand
gagcugaagugagcaggau

SEQ ID NO: 1977917 - RNA, 19 nt, Homo sapiens
  misc_RNA (1)...(19): siRNA sense strand
uggaagagaagcuaaagaa

SEQ ID NO: 1977918 - RNA, 19 nt, Homo sapiens
  misc_RNA (1)...(19): siRNA sense strand
ggcugaaggagauaacuua

SEQ ID NO: 1977919 - RNA, 19 nt, Homo sapiens
  misc_RNA (1)...(19): siRNA sense strand
caggauagaaucacuugaa

SEQ ID NO: 1977920 - RNA, 19 nt, Homo sapiens
  misc_RNA (1)...(19): siRNA sense strand
ggacacauacuggauucaa

SEQ ID NO: 1977921 - RNA, 19 nt, Homo sapiens
  misc_RNA (1)...(19): siRNA sense strand
ggagaccugcaagucauua

SEQ ID NO: 1977922 - RNA, 19 nt, Homo sapiens
  misc_RNA (1)...(19): siRNA sense strand
caaaggaggaaaugagcuu

SEQ ID NO: 1977923 - RNA, 19 nt, Homo sapiens
  misc_RNA (1)...(19): siRNA sense strand
ugaaaucaacagaggauau

SEQ ID NO: 1977924 - RNA, 19 nt, Homo sapiens
  misc_RNA (1)...(19): siRNA sense strand
cauggugucagucagcuua

SEQ ID NO: 1977925 - RNA, 19 nt, Homo sapiens
  misc_RNA (1)...(19): siRNA sense strand
gauggacacauacuggauu

SEQ ID NO: 1977926 - RNA, 19 nt, Homo sapiens
  misc_RNA (1)...(19): siRNA sense strand
gauuaaaggaugaagaucu

SEQ ID NO: 1977927 - RNA, 19 nt, Homo sapiens
  misc_RNA (1)...(19): siRNA sense strand
ggugucagucagcuuauaa

SEQ ID NO: 1977928 - RNA, 19 nt, Homo sapiens
  misc_RNA (1)...(19): siRNA sense strand
gcuuauaaaggcauuucua

SEQ ID NO: 1977929 - RNA, 19 nt, Homo sapiens
  misc_RNA (1)...(19): siRNA sense strand
gaggaaagccccugaaauc

SEQ ID NO: 1977930 - RNA, 19 nt, Homo sapiens
  misc_RNA (1)...(19): siRNA sense strand
gguugacuuuccaaugauu

SEQ ID NO: 1977931 - RNA, 19 nt, Homo sapiens
  misc_RNA (1)...(19): siRNA sense strand
ggagauuaaaggaugaaga

SEQ ID NO: 1977932 - RNA, 19 nt, Homo sapiens
  misc_RNA (1)...(19): siRNA sense strand
gucauuagagucacagaaa

SEQ ID NO: 1977933 - RNA, 19 nt, Homo sapiens
  misc_RNA (1)...(19): siRNA sense strand
gagguuugcaguaagcauu

SEQ ID NO: 1977934 - RNA, 19 nt, Homo sapiens
  misc_RNA (1)...(19): siRNA sense strand
ggcaugacccuuacauaca

SEQ ID NO: 1977935 - RNA, 19 nt, Homo sapiens
  misc_RNA (1)...(19): siRNA sense strand
guggagaccugcaagucau

SEQ ID NO: 1977936 - RNA, 19 nt, Homo sapiens
  misc_RNA (1)...(19): siRNA sense strand
ggaaagccccugaaaucaa

SEQ ID NO: 1977937 - RNA, 19 nt, Homo sapiens
  misc_RNA (1)...(19): siRNA sense strand
gaaagccccugaaaucaac

SEQ ID NO: 1977938 - RNA, 19 nt, Homo sapiens
  misc_RNA (1)...(19): siRNA sense strand
gaaagcugcacaguaucaa

SEQ ID NO: 1977939 - RNA, 19 nt, Homo sapiens
  misc_RNA (1)...(19): siRNA sense strand
ucgacaugauggaguugua

SEQ ID NO: 1977940 - RNA, 19 nt, Homo sapiens
  misc_RNA (1)...(19): siRNA sense strand
uugggcagaucaugauuga

SEQ ID NO: 1977941 - RNA, 19 nt, Homo sapiens
  misc_RNA (1)...(19): siRNA sense strand
agaaagcugcacaguauca

SEQ ID NO: 1977942 - RNA, 19 nt, Homo sapiens
  misc_RNA (1)...(19): siRNA sense strand
caaccaaaggaggaaauga

SEQ ID NO: 1977943 - RNA, 19 nt, Homo sapiens
  misc_RNA (1)...(19): siRNA sense strand
cauuagagucacagaaaga

SEQ ID NO: 1977944 - RNA, 19 nt, Homo sapiens
  misc_RNA (1)...(19): siRNA sense strand
caaagagauaugccguuau

SEQ ID NO: 1977945 - RNA, 19 nt, Homo sapiens
  misc_RNA (1)...(19): siRNA sense strand
caucggccgucgacaugau

SEQ ID NO: 1977946 - RNA, 19 nt, Homo sapiens
  misc_RNA (1)...(19): siRNA sense strand
uucuagaacugcauucaga

SEQ ID NO: 1977947 - RNA, 19 nt, Homo sapiens
  misc_RNA (1)...(19): siRNA sense strand
gagcaggauagaaucacuu

SEQ ID NO: 1977948 - RNA, 19 nt, Homo sapiens
  misc_RNA (1)...(19): siRNA sense strand
uuacauacagcacuuugug

SEQ ID NO: 1977949 - RNA, 19 nt, Homo sapiens
  misc_RNA (1)...(19): siRNA sense strand
gcauucagaggacacacuu

SEQ ID NO: 1977950 - RNA, 19 nt, Homo sapiens
  misc_RNA (1)...(19): siRNA sense strand
gcauggauaccaccuucug

SEQ ID NO: 1977951 - RNA, 19 nt, Homo sapiens
  misc_RNA (1)...(19): siRNA sense strand
ucauuagagucacagaaag

SEQ ID NO: 1977952 - RNA, 19 nt, Homo sapiens
  misc_RNA (1)...(19): siRNA sense strand
agagauaugccguuauugg

SEQ ID NO: 1977953 - RNA, 19 nt, Homo sapiens
  misc_RNA (1)...(19): siRNA sense strand
acgagaaagcugcacagua

SEQ ID NO: 1977954 - RNA, 19 nt, Homo sapiens
  misc_RNA (1)...(19): siRNA sense strand
gcaaccaaaggaggaaaug

SEQ ID NO: 1977955 - RNA, 19 nt, Homo sapiens
  misc_RNA (1)...(19): siRNA sense strand
cuacuggcaugacccuuac

SEQ ID NO: 1977956 - RNA, 19 nt, Homo sapiens
  misc_RNA (1)...(19): siRNA sense strand
gggcugaaggagauaacuu

SEQ ID NO: 1977957 - RNA, 19 nt, Homo sapiens
  misc_RNA (1)...(19): siRNA sense strand
gaauacacaauugccaaca

SEQ ID NO: 1977958 - RNA, 19 nt, Homo sapiens
  misc_RNA (1)...(19): siRNA sense strand
ggauggacacauacuggau

SEQ ID NO: 1977959 - RNA, 19 nt, Homo sapiens
  misc_RNA (1)...(19): siRNA sense strand
ugagguugacuuuccaaug

SEQ ID NO: 1977960 - RNA, 19 nt, Homo sapiens
  misc_RNA (1)...(19): siRNA sense strand
cuccagagcaguccgcaaa

SEQ ID NO: 1977961 - RNA, 19 nt, Homo sapiens
  misc_RNA (1)...(19): siRNA sense strand
gaaugugugcugguuuaca

SEQ ID NO: 1977962 - RNA, 19 nt, Homo sapiens
  misc_RNA (1)...(19): siRNA sense strand
auacuggauucaaagagau

SEQ ID NO: 1977963 - RNA, 19 nt, Homo sapiens
  misc_RNA (1)...(19): siRNA sense strand
acacauacuggauucaaag

SEQ ID NO: 1977964 - RNA, 19 nt, Homo sapiens
  misc_RNA (1)...(19): siRNA sense strand
uggcaugacccuuacauac

SEQ ID NO: 1977965 - RNA, 19 nt, Homo sapiens
  misc_RNA (1)...(19): siRNA sense strand
cauacagcacuuugugaga

SEQ ID NO: 1977966 - RNA, 19 nt, Homo sapiens
  misc_RNA (1)...(19): siRNA sense strand
gcugaaugugugcugguuu

SEQ ID NO: 1977967 - RNA, 19 nt, Homo sapiens
  misc_RNA (1)...(19): siRNA sense strand
cugcaagucauuagaguca

SEQ ID NO: 1977968 - RNA, 19 nt, Homo sapiens
  misc_RNA (1)...(19): siRNA sense strand
gaacaugggugaucgguuu

SEQ ID NO: 1977969 - RNA, 19 nt, Homo sapiens
  misc_RNA (1)...(19): siRNA sense strand
cgagaaagcugcacaguau

SEQ ID NO: 1977970 - RNA, 19 nt, Homo sapiens
  misc_RNA (1)...(19): siRNA sense strand
gaaaugagcuugggcugaa

SEQ ID NO: 1977971 - RNA, 19 nt, Homo sapiens
  misc_RNA (1)...(19): siRNA sense strand
gagguugacuuuccaauga

SEQ ID NO: 1977972 - RNA, 19 nt, Homo sapiens
  misc_RNA (1)...(19): siRNA sense strand
ucaaagagauaugccguua

SEQ ID NO: 1977973 - RNA, 19 nt, Homo sapiens
  misc_RNA (1)...(19): siRNA sense strand
aaagagauaugccguuauu

SEQ ID NO: 1977974 - RNA, 19 nt, Homo sapiens
  misc_RNA (1)...(19): siRNA sense strand
gaagagaagcuaaagaaau

SEQ ID NO: 1977975 - RNA, 19 nt, Homo sapiens
  misc_RNA (1)...(19): siRNA sense strand
gaagugagcaggauagaau

SEQ ID NO: 1977976 - RNA, 19 nt, Homo sapiens
  misc_RNA (1)...(19): siRNA sense strand
aagagaagcuaaagaaaug

SEQ ID NO: 1977977 - RNA, 19 nt, Homo sapiens
  misc_RNA (1)...(19): siRNA sense strand
gaacggcuccugucgaaug

SEQ ID NO: 1977978 - RNA, 19 nt, Homo sapiens
  misc_RNA (1)...(19): siRNA sense strand
gggcagaucaugauugaaa

SEQ ID NO: 1977979 - RNA, 19 nt, Homo sapiens
  misc_RNA (1)...(19): siRNA sense strand
gaaaucaacagaggauauu

SEQ ID NO: 1977980 - RNA, 19 nt, Homo sapiens
  misc_RNA (1)...(19): siRNA sense strand
ccgcaaaccuccugaagug

SEQ ID NO: 1977981 - RNA, 19 nt, Homo sapiens
  misc_RNA (1)...(19): siRNA sense strand
gagagagccauguucauaa

SEQ ID NO: 1977982 - RNA, 19 nt, Homo sapiens
  misc_RNA (1)...(19): siRNA sense strand
ggaagagaagcuaaagaaa

SEQ ID NO: 1977983 - RNA, 19 nt, Homo sapiens
  misc_RNA (1)...(19): siRNA sense strand
ugucugaacuggaagagaa

SEQ ID NO: 1977984 - RNA, 19 nt, Homo sapiens
  misc_RNA (1)...(19): siRNA sense strand
ugagagagccauguucaua

SEQ ID NO: 1977985 - RNA, 19 nt, Homo sapiens
  misc_RNA (1)...(19): siRNA sense strand
cugaaugugugcugguuua

SEQ ID NO: 1977986 - RNA, 19 nt, Homo sapiens
  misc_RNA (1)...(19): siRNA sense strand
gagccauguucauaaacua

SEQ ID NO: 1977987 - RNA, 19 nt, Homo sapiens
  misc_RNA (1)...(19): siRNA sense strand
agagagccauguucauaaa

SEQ ID NO: 1977988 - RNA, 19 nt, Homo sapiens
  misc_RNA (1)...(19): siRNA sense strand
gacacauacuggauucaaa

SEQ ID NO: 1977989 - RNA, 19 nt, Homo sapiens
  misc_RNA (1)...(19): siRNA sense strand
gaacuggaagagaagcuaa

SEQ ID NO: 1977990 - RNA, 19 nt, Homo sapiens
  misc_RNA (1)...(19): siRNA sense strand
gauaccaccuucuggagau

SEQ ID NO: 1977991 - RNA, 19 nt, Homo sapiens
  misc_RNA (1)...(19): siRNA sense strand
cauacuggauucaaagaga

SEQ ID NO: 1977992 - RNA, 19 nt, Homo sapiens
  misc_RNA (1)...(19): siRNA sense strand
gagaagcuaaagaaaugua

SEQ ID NO: 1977993 - RNA, 19 nt, Homo sapiens
  misc_RNA (1)...(19): siRNA sense strand
gcuacuggcaugacccuua

SEQ ID NO: 1977994 - RNA, 19 nt, Homo sapiens
  misc_RNA (1)...(19): siRNA sense strand
gagauuaaaggaugaagau

SEQ ID NO: 1977995 - RNA, 19 nt, Homo sapiens
  misc_RNA (1)...(19): siRNA sense strand
aagaacggcuccugucgaa

SEQ ID NO: 1977996 - RNA, 19 nt, Homo sapiens
  misc_RNA (1)...(19): siRNA sense strand
gagauaugccguuauugga

SEQ ID NO: 1977997 - RNA, 19 nt, Homo sapiens
  misc_RNA (1)...(19): siRNA sense strand
gcaagucauuagagucaca

SEQ ID NO: 1977998 - RNA, 19 nt, Homo sapiens
  misc_RNA (1)...(19): siRNA sense strand
gcaugacccuuacauacag

SEQ ID NO: 1977999 - RNA, 19 nt, Homo sapiens
  misc_RNA (1)...(19): siRNA sense strand
gaagugggcagccaacagu

SEQ ID NO: 1978000 - RNA, 19 nt, Homo sapiens
  misc_RNA (1)...(19): siRNA sense strand
gagcugaagugagcaggau

SEQ ID NO: 1978001 - RNA, 19 nt, Homo sapiens
  misc_RNA (1)...(19): siRNA sense strand
uggaagagaagcuaaagaa

SEQ ID NO: 1978002 - RNA, 19 nt, Homo sapiens
  misc_RNA (1)...(19): siRNA sense strand
ggcugaaggagauaacuua

SEQ ID NO: 1978003 - RNA, 19 nt, Homo sapiens
  misc_RNA (1)...(19): siRNA sense strand
caggauagaaucacuugaa

SEQ ID NO: 1978004 - RNA, 19 nt, Homo sapiens
  misc_RNA (1)...(19): siRNA sense strand
ggacacauacuggauucaa

SEQ ID NO: 1978005 - RNA, 19 nt, Homo sapiens
  misc_RNA (1)...(19): siRNA sense strand
ggagaccugcaagucauua

SEQ ID NO: 1978006 - RNA, 19 nt, Homo sapiens
  misc_RNA (1)...(19): siRNA sense strand
caaaggaggaaaugagcuu

SEQ ID NO: 1978007 - RNA, 19 nt, Homo sapiens
  misc_RNA (1)...(19): siRNA sense strand
ugaaaucaacagaggauau

SEQ ID NO: 1978008 - RNA, 19 nt, Homo sapiens
  misc_RNA (1)...(19): siRNA sense strand
cauggugucagucagcuua

SEQ ID NO: 1978009 - RNA, 19 nt, Homo sapiens
  misc_RNA (1)...(19): siRNA sense strand
gauggacacauacuggauu

SEQ ID NO: 1978010 - RNA, 19 nt, Homo sapiens
  misc_RNA (1)...(19): siRNA sense strand
gauuaaaggaugaagaucu

SEQ ID NO: 1978011 - RNA, 19 nt, Homo sapiens
  misc_RNA (1)...(19): siRNA sense strand
ggugucagucagcuuauaa

SEQ ID NO: 1978012 - RNA, 19 nt, Homo sapiens
  misc_RNA (1)...(19): siRNA sense strand
gcuuauaaaggcauuucua

SEQ ID NO: 1978013 - RNA, 19 nt, Homo sapiens
  misc_RNA (1)...(19): siRNA sense strand
gguugacuuuccaaugauu

SEQ ID NO: 1978014 - RNA, 19 nt, Homo sapiens
  misc_RNA (1)...(19): siRNA sense strand
gaggaaagccccugaaauc

SEQ ID NO: 1978015 - RNA, 19 nt, Homo sapiens
  misc_RNA (1)...(19): siRNA sense strand
ggagauuaaaggaugaaga

SEQ ID NO: 1978016 - RNA, 19 nt, Homo sapiens
  misc_RNA (1)...(19): siRNA sense strand
gucauuagagucacagaaa

SEQ ID NO: 1978017 - RNA, 19 nt, Homo sapiens
  misc_RNA (1)...(19): siRNA sense strand
ggcaugacccuuacauaca

SEQ ID NO: 1978018 - RNA, 19 nt, Homo sapiens
  misc_RNA (1)...(19): siRNA sense strand
guggagaccugcaagucau

SEQ ID NO: 1978019 - RNA, 19 nt, Homo sapiens
  misc_RNA (1)...(19): siRNA sense strand
gagguuugcaguaagcauu

SEQ ID NO: 1978020 - RNA, 19 nt, Homo sapiens
  misc_RNA (1)...(19): siRNA sense strand
ucuaucaccuccugcuguu

SEQ ID NO: 1978021 - RNA, 19 nt, Homo sapiens
  misc_RNA (1)...(19): siRNA sense strand
ggaaagccccugaaaucaa

SEQ ID NO: 1978022 - RNA, 19 nt, Homo sapiens
  misc_RNA (1)...(19): siRNA sense strand
gaaagccccugaaaucaac

SEQ ID NO: 1978023 - RNA, 19 nt, Homo sapiens
  misc_RNA (1)...(19): siRNA sense strand
gaaagcugcacaguaucaa

SEQ ID NO: 1978024 - RNA, 19 nt, Homo sapiens
  misc_RNA (1)...(19): siRNA sense strand
ucgacaugauggaguugua

SEQ ID NO: 1978025 - RNA, 19 nt, Homo sapiens
  misc_RNA (1)...(19): siRNA sense strand
uugggcagaucaugauuga

SEQ ID NO: 1978026 - RNA, 19 nt, Homo sapiens
  misc_RNA (1)...(19): siRNA sense strand
agaaagcugcacaguauca

SEQ ID NO: 1978027 - RNA, 19 nt, Homo sapiens
  misc_RNA (1)...(19): siRNA sense strand
caaccaaaggaggaaauga

SEQ ID NO: 1978028 - RNA, 19 nt, Homo sapiens
  misc_RNA (1)...(19): siRNA sense strand
cauuagagucacagaaaga

SEQ ID NO: 1978029 - RNA, 19 nt, Homo sapiens
  misc_RNA (1)...(19): siRNA sense strand
caaagagauaugccguuau

SEQ ID NO: 1978030 - RNA, 19 nt, Homo sapiens
  misc_RNA (1)...(19): siRNA sense strand
caucggccgucgacaugau

SEQ ID NO: 1978031 - RNA, 19 nt, Homo sapiens
  misc_RNA (1)...(19): siRNA sense strand
uucuagaacugcauucaga

SEQ ID NO: 1978032 - RNA, 19 nt, Homo sapiens
  misc_RNA (1)...(19): siRNA sense strand
gagcaggauagaaucacuu

SEQ ID NO: 1978033 - RNA, 19 nt, Homo sapiens
  misc_RNA (1)...(19): siRNA sense strand
uuacauacagcacuuugug

SEQ ID NO: 1978034 - RNA, 19 nt, Homo sapiens
  misc_RNA (1)...(19): siRNA sense strand
gcauucagaggacacacuu

SEQ ID NO: 1978035 - RNA, 19 nt, Homo sapiens
  misc_RNA (1)...(19): siRNA sense strand
gcauggauaccaccuucug

SEQ ID NO: 1978036 - RNA, 19 nt, Homo sapiens
  misc_RNA (1)...(19): siRNA sense strand
ucauuagagucacagaaag

SEQ ID NO: 1978037 - RNA, 19 nt, Homo sapiens
  misc_RNA (1)...(19): siRNA sense strand
agagauaugccguuauugg

SEQ ID NO: 1978038 - RNA, 19 nt, Homo sapiens
  misc_RNA (1)...(19): siRNA sense strand
acgagaaagcugcacagua

SEQ ID NO: 1978039 - RNA, 19 nt, Homo sapiens
  misc_RNA (1)...(19): siRNA sense strand
gcaaccaaaggaggaaaug

SEQ ID NO: 1978040 - RNA, 19 nt, Homo sapiens
  misc_RNA (1)...(19): siRNA sense strand
gaauacacaauugccaaca

SEQ ID NO: 1978041 - RNA, 19 nt, Homo sapiens
  misc_RNA (1)...(19): siRNA sense strand
gggcugaaggagauaacuu

SEQ ID NO: 1978042 - RNA, 19 nt, Homo sapiens
  misc_RNA (1)...(19): siRNA sense strand
cuacuggcaugacccuuac

SEQ ID NO: 1978043 - RNA, 19 nt, Homo sapiens
  misc_RNA (1)...(19): siRNA sense strand
ggauggacacauacuggau

SEQ ID NO: 1978044 - RNA, 19 nt, Homo sapiens
  misc_RNA (1)...(19): siRNA sense strand
ugagguugacuuuccaaug

SEQ ID NO: 1978045 - RNA, 19 nt, Homo sapiens
  misc_RNA (1)...(19): siRNA sense strand
cuccagagcaguccgcaaa

SEQ ID NO: 1978046 - RNA, 19 nt, Homo sapiens
  misc_RNA (1)...(19): siRNA sense strand
gaaugugugcugguuuaca

SEQ ID NO: 1978047 - RNA, 19 nt, Homo sapiens
  misc_RNA (1)...(19): siRNA sense strand
auacuggauucaaagagau

SEQ ID NO: 1978048 - RNA, 19 nt, Homo sapiens
  misc_RNA (1)...(19): siRNA sense strand
acacauacuggauucaaag

SEQ ID NO: 1978049 - RNA, 19 nt, Homo sapiens
  misc_RNA (1)...(19): siRNA sense strand
ccacuaggcagagggaauc

SEQ ID NO: 1978050 - RNA, 19 nt, Homo sapiens
  misc_RNA (1)...(19): siRNA sense strand
gaugcuucccugugcaaga

SEQ ID NO: 1978051 - RNA, 19 nt, Homo sapiens
  misc_RNA (1)...(19): siRNA sense strand
gcugaaugugugcugguuu

SEQ ID NO: 1978052 - RNA, 19 nt, Homo sapiens
  misc_RNA (1)...(19): siRNA sense strand
cauacagcacuuugugaga

SEQ ID NO: 1978053 - RNA, 19 nt, Homo sapiens
  misc_RNA (1)...(19): siRNA sense strand
uggcaugacccuuacauac

SEQ ID NO: 1978054 - RNA, 19 nt, Homo sapiens
  misc_RNA (1)...(19): siRNA sense strand
cugcaagucauuagaguca

SEQ ID NO: 1978055 - RNA, 19 nt, Homo sapiens
  misc_RNA (1)...(19): siRNA sense strand
cagcgcagcucuuguguaa

SEQ ID NO: 1978056 - RNA, 19 nt, Homo sapiens
  misc_RNA (1)...(19): siRNA sense strand
ggaguuguguucuuugaug

SEQ ID NO: 1978057 - RNA, 19 nt, Homo sapiens
  misc_RNA (1)...(19): siRNA sense strand
gccauuauccugcuccaua

SEQ ID NO: 1978058 - RNA, 19 nt, Homo sapiens
  misc_RNA (1)...(19): siRNA sense strand
gcgcagcucuuguguaagg

SEQ ID NO: 1978059 - RNA, 19 nt, Homo sapiens
  misc_RNA (1)...(19): siRNA sense strand
aguggugucuucucuguua

SEQ ID NO: 1978060 - RNA, 19 nt, Homo sapiens
  misc_RNA (1)...(19): siRNA sense strand
gaaggcagaugagggguua

SEQ ID NO: 1978061 - RNA, 19 nt, Homo sapiens
  misc_RNA (1)...(19): siRNA sense strand
uaucaucaguggugucuuc

SEQ ID NO: 1978062 - RNA, 19 nt, Homo sapiens
  misc_RNA (1)...(19): siRNA sense strand
cauggagacucacccuauu

SEQ ID NO: 1978063 - RNA, 19 nt, Homo sapiens
  misc_RNA (1)...(19): siRNA sense strand
ugucuucucuguuaucaau

SEQ ID NO: 1978064 - RNA, 19 nt, Homo sapiens
  misc_RNA (1)...(19): siRNA sense strand
cuacugacaucgggacuga

SEQ ID NO: 1978065 - RNA, 19 nt, Homo sapiens
  misc_RNA (1)...(19): siRNA sense strand
gagacucacccuauuacuu

SEQ ID NO: 1978066 - RNA, 19 nt, Homo sapiens
  misc_RNA (1)...(19): siRNA sense strand
ccagauggccuauguuucu

SEQ ID NO: 1978067 - RNA, 19 nt, Homo sapiens
  misc_RNA (1)...(19): siRNA sense strand
ccuauuacuuccugacuuc

SEQ ID NO: 1978068 - RNA, 19 nt, Homo sapiens
  misc_RNA (1)...(19): siRNA sense strand
caggagguguuccgcuuug

SEQ ID NO: 1978069 - RNA, 19 nt, Homo sapiens
  misc_RNA (1)...(19): siRNA sense strand
gcucugggccuucaucaca

SEQ ID NO: 1978070 - RNA, 19 nt, Homo sapiens
  misc_RNA (1)...(19): siRNA sense strand
caucaguggugucuucucu

SEQ ID NO: 1978071 - RNA, 19 nt, Homo sapiens
  misc_RNA (1)...(19): siRNA sense strand
ccaguacggccuccugauu

SEQ ID NO: 1978072 - RNA, 19 nt, Homo sapiens
  misc_RNA (1)...(19): siRNA sense strand
agacucacccuauuacuuc

SEQ ID NO: 1978073 - RNA, 19 nt, Homo sapiens
  misc_RNA (1)...(19): siRNA sense strand
ucaguggugucuucucugu

SEQ ID NO: 1978074 - RNA, 19 nt, Homo sapiens
  misc_RNA (1)...(19): siRNA sense strand
caguacggccuccugauuu

SEQ ID NO: 1978075 - RNA, 19 nt, Homo sapiens
  misc_RNA (1)...(19): siRNA sense strand
gcucuuguguaaggacuga

SEQ ID NO: 1978076 - RNA, 19 nt, Homo sapiens
  misc_RNA (1)...(19): siRNA sense strand
ugacaucgggacugacauu

SEQ ID NO: 1978077 - RNA, 19 nt, Homo sapiens
  misc_RNA (1)...(19): siRNA sense strand
ccauggagacucacccuau

SEQ ID NO: 1978078 - RNA, 19 nt, Homo sapiens
  misc_RNA (1)...(19): siRNA sense strand
ggucucuccuucgguauca

SEQ ID NO: 1978079 - RNA, 19 nt, Homo sapiens
  misc_RNA (1)...(19): siRNA sense strand
gagugaggacggaagauca

SEQ ID NO: 1978080 - RNA, 19 nt, Homo sapiens
  misc_RNA (1)...(19): siRNA sense strand
gcccaucuaugcagucacu

SEQ ID NO: 1978081 - RNA, 19 nt, Homo sapiens
  misc_RNA (1)...(19): siRNA sense strand
ggugucuucucuguuauca

SEQ ID NO: 1978082 - RNA, 19 nt, Homo sapiens
  misc_RNA (1)...(19): siRNA sense strand
ugggauccauggagacuca

SEQ ID NO: 1978083 - RNA, 19 nt, Homo sapiens
  misc_RNA (1)...(19): siRNA sense strand
ccauuauccugcuccauac

SEQ ID NO: 1978084 - RNA, 19 nt, Homo sapiens
  misc_RNA (1)...(19): siRNA sense strand
gggacccgcuucgcguuau

SEQ ID NO: 1978085 - RNA, 19 nt, Homo sapiens
  misc_RNA (1)...(19): siRNA sense strand
ggacccgcuucgcguuauc

SEQ ID NO: 1978086 - RNA, 19 nt, Homo sapiens
  misc_RNA (1)...(19): siRNA sense strand
guauucagcgcagcucuug

SEQ ID NO: 1978087 - RNA, 19 nt, Homo sapiens
  misc_RNA (1)...(19): siRNA sense strand
ucuguggucugguucaucu

SEQ ID NO: 1978088 - RNA, 19 nt, Homo sapiens
  misc_RNA (1)...(19): siRNA sense strand
gguugggagucaccuacug

SEQ ID NO: 1978089 - RNA, 19 nt, Homo sapiens
  misc_RNA (1)...(19): siRNA sense strand
caucgggacugacauuccu

SEQ ID NO: 1978090 - RNA, 19 nt, Homo sapiens
  misc_RNA (1)...(19): siRNA sense strand
gguuagcaucgcugaguga

SEQ ID NO: 1978091 - RNA, 19 nt, Homo sapiens
  misc_RNA (1)...(19): siRNA sense strand
guugggagucaccuacuga

SEQ ID NO: 1978092 - RNA, 19 nt, Homo sapiens
  misc_RNA (1)...(19): siRNA sense strand
ggagacgguacugggcuuu

SEQ ID NO: 1978093 - RNA, 19 nt, Homo sapiens
  misc_RNA (1)...(19): siRNA sense strand
gagcacaucugcagucauu

SEQ ID NO: 1978094 - RNA, 19 nt, Homo sapiens
  misc_RNA (1)...(19): siRNA sense strand
gaauauaaguucccagcuu

SEQ ID NO: 1978095 - RNA, 19 nt, Homo sapiens
  misc_RNA (1)...(19): siRNA sense strand
gaacuugugucuaauagca

SEQ ID NO: 1978096 - RNA, 19 nt, Homo sapiens
  misc_RNA (1)...(19): siRNA sense strand
gaauuugaguggcuaaaga

SEQ ID NO: 1978097 - RNA, 19 nt, Homo sapiens
  misc_RNA (1)...(19): siRNA sense strand
guacaaaggugugguaucu

SEQ ID NO: 1978098 - RNA, 19 nt, Homo sapiens
  misc_RNA (1)...(19): siRNA sense strand
gaagagccauaaguuagaa

SEQ ID NO: 1978099 - RNA, 19 nt, Homo sapiens
  misc_RNA (1)...(19): siRNA sense strand
gcuaugaggugccuugugu

SEQ ID NO: 1978100 - RNA, 19 nt, Homo sapiens
  misc_RNA (1)...(19): siRNA sense strand
ggacauugcacauaauuca

SEQ ID NO: 1978101 - RNA, 19 nt, Homo sapiens
  misc_RNA (1)...(19): siRNA sense strand
aaucugaagucuuguacua

SEQ ID NO: 1978102 - RNA, 19 nt, Homo sapiens
  misc_RNA (1)...(19): siRNA sense strand
gcucccugcuggucauuua

SEQ ID NO: 1978103 - RNA, 19 nt, Homo sapiens
  misc_RNA (1)...(19): siRNA sense strand
guucccagcuuaaacacua

SEQ ID NO: 1978104 - RNA, 19 nt, Homo sapiens
  misc_RNA (1)...(19): siRNA sense strand
caaagcaucggaaccagua

SEQ ID NO: 1978105 - RNA, 19 nt, Homo sapiens
  misc_RNA (1)...(19): siRNA sense strand
gaaugaaggagaaugcaaa

SEQ ID NO: 1978106 - RNA, 19 nt, Homo sapiens
  misc_RNA (1)...(19): siRNA sense strand
cagcaacaguuacagagaa

SEQ ID NO: 1978107 - RNA, 19 nt, Homo sapiens
  misc_RNA (1)...(19): siRNA sense strand
ucuaauagcauauccauug

SEQ ID NO: 1978108 - RNA, 19 nt, Homo sapiens
  misc_RNA (1)...(19): siRNA sense strand
cggaaccaguacaaauuua

SEQ ID NO: 1978109 - RNA, 19 nt, Homo sapiens
  misc_RNA (1)...(19): siRNA sense strand
gcagugggcaguuaauguu

SEQ ID NO: 1978110 - RNA, 19 nt, Homo sapiens
  misc_RNA (1)...(19): siRNA sense strand
caugaaaugucaccagcaa

SEQ ID NO: 1978111 - RNA, 19 nt, Homo sapiens
  misc_RNA (1)...(19): siRNA sense strand
acaaaggugugguaucugu

SEQ ID NO: 1978112 - RNA, 19 nt, Homo sapiens
  misc_RNA (1)...(19): siRNA sense strand
caacaguuacagagaauga

SEQ ID NO: 1978113 - RNA, 19 nt, Homo sapiens
  misc_RNA (1)...(19): siRNA sense strand
cuaauagcauauccauuga

SEQ ID NO: 1978114 - RNA, 19 nt, Homo sapiens
  misc_RNA (1)...(19): siRNA sense strand
gugcuccgcuucaaugaga

SEQ ID NO: 1978115 - RNA, 19 nt, Homo sapiens
  misc_RNA (1)...(19): siRNA sense strand
gccauaaguuagaagaaga

SEQ ID NO: 1978116 - RNA, 19 nt, Homo sapiens
  misc_RNA (1)...(19): siRNA sense strand
aaaccugacuucccgcuau

SEQ ID NO: 1978117 - RNA, 19 nt, Homo sapiens
  misc_RNA (1)...(19): siRNA sense strand
gaaggcagccaaccagauc

SEQ ID NO: 1978118 - RNA, 19 nt, Homo sapiens
  misc_RNA (1)...(19): siRNA sense strand
gagaagaaggggaauauaa

SEQ ID NO: 1978119 - RNA, 19 nt, Homo sapiens
  misc_RNA (1)...(19): siRNA sense strand
aaugaagagccauaaguua

SEQ ID NO: 1978120 - RNA, 19 nt, Homo sapiens
  misc_RNA (1)...(19): siRNA sense strand
cuaaagaaaucugaagucu

SEQ ID NO: 1978121 - RNA, 19 nt, Homo sapiens
  misc_RNA (1)...(19): siRNA sense strand
gaaaggggaccauggaauu

SEQ ID NO: 1978122 - RNA, 19 nt, Homo sapiens
  misc_RNA (1)...(19): siRNA sense strand
ggaaccaguacaaauuuau

SEQ ID NO: 1978123 - RNA, 19 nt, Homo sapiens
  misc_RNA (1)...(19): siRNA sense strand
cugcugagaugcgcaaauu

SEQ ID NO: 1978124 - RNA, 19 nt, Homo sapiens
  misc_RNA (1)...(19): siRNA sense strand
gacccucccugcugagaug

SEQ ID NO: 1978125 - RNA, 19 nt, Homo sapiens
  misc_RNA (1)...(19): siRNA sense strand
gcugagaugcgcaaauuca

SEQ ID NO: 1978126 - RNA, 19 nt, Homo sapiens
  misc_RNA (1)...(19): siRNA sense strand
ugaggugccuuguguccuu

SEQ ID NO: 1978127 - RNA, 19 nt, Homo sapiens
  misc_RNA (1)...(19): siRNA sense strand
gaaccaguacaaauuuauc

SEQ ID NO: 1978128 - RNA, 19 nt, Homo sapiens
  misc_RNA (1)...(19): siRNA sense strand
caucaugucuuagaaacag

SEQ ID NO: 1978129 - RNA, 19 nt, Homo sapiens
  misc_RNA (1)...(19): siRNA sense strand
aaaugaagagccauaaguu

SEQ ID NO: 1978130 - RNA, 19 nt, Homo sapiens
  misc_RNA (1)...(19): siRNA sense strand
caggaacuugugucuaaua

SEQ ID NO: 1978131 - RNA, 19 nt, Homo sapiens
  misc_RNA (1)...(19): siRNA sense strand
uauaacccuuggagcauga

SEQ ID NO: 1978132 - RNA, 19 nt, Homo sapiens
  misc_RNA (1)...(19): siRNA sense strand
guaaagaggagaaaaugaa

SEQ ID NO: 1978133 - RNA, 19 nt, Homo sapiens
  misc_RNA (1)...(19): siRNA sense strand
ugaagagccauaaguuaga

SEQ ID NO: 1978134 - RNA, 19 nt, Homo sapiens
  misc_RNA (1)...(19): siRNA sense strand
gaugaagacaggaacuugu

SEQ ID NO: 1978135 - RNA, 19 nt, Homo sapiens
  misc_RNA (1)...(19): siRNA sense strand
ggcaguuaauguucaugaa

SEQ ID NO: 1978136 - RNA, 19 nt, Homo sapiens
  misc_RNA (1)...(19): siRNA sense strand
gcaggcagugggcaguuaa

SEQ ID NO: 1978137 - RNA, 19 nt, Homo sapiens
  misc_RNA (1)...(19): siRNA sense strand
gcacaucugcagucauugg

SEQ ID NO: 1978138 - RNA, 19 nt, Homo sapiens
  misc_RNA (1)...(19): siRNA sense strand
ugugguaucugugcgcuuu

SEQ ID NO: 1978139 - RNA, 19 nt, Homo sapiens
  misc_RNA (1)...(19): siRNA sense strand
caucggaaccaguacaaau

SEQ ID NO: 1978140 - RNA, 19 nt, Homo sapiens
  misc_RNA (1)...(19): siRNA sense strand
cuccuaagguggacaacaa

SEQ ID NO: 1978141 - RNA, 19 nt, Homo sapiens
  misc_RNA (1)...(19): siRNA sense strand
uacagagaaugaaggagaa

SEQ ID NO: 1978142 - RNA, 19 nt, Homo sapiens
  misc_RNA (1)...(19): siRNA sense strand
uagcauauccauugaaagg

SEQ ID NO: 1978143 - RNA, 19 nt, Homo sapiens
  misc_RNA (1)...(19): siRNA sense strand
caagaugggcacacgacaa

SEQ ID NO: 1978144 - RNA, 19 nt, Homo sapiens
  misc_RNA (1)...(19): siRNA sense strand
caaauucacuccccaguac

SEQ ID NO: 1978145 - RNA, 19 nt, Homo sapiens
  misc_RNA (1)...(19): siRNA sense strand
ugaaggagaaugcaaagca

SEQ ID NO: 1978146 - RNA, 19 nt, Homo sapiens
  misc_RNA (1)...(19): siRNA sense strand
ugaaaugucaccagcaaca

SEQ ID NO: 1978147 - RNA, 19 nt, Homo sapiens
  misc_RNA (1)...(19): siRNA sense strand
uugaguggcuaaagaaauc

SEQ ID NO: 1978148 - RNA, 19 nt, Homo sapiens
  misc_RNA (1)...(19): siRNA sense strand
gaagaauuugaguggcuaa

SEQ ID NO: 1978149 - RNA, 19 nt, Homo sapiens
  misc_RNA (1)...(19): siRNA sense strand
uaagguggacaacaaacaa

SEQ ID NO: 1978150 - RNA, 19 nt, Homo sapiens
  misc_RNA (1)...(19): siRNA sense strand
ccauggaauuguggacauu

SEQ ID NO: 1978151 - RNA, 19 nt, Homo sapiens
  misc_RNA (1)...(19): siRNA sense strand
cgccagcucuguagaugug

SEQ ID NO: 1978152 - RNA, 19 nt, Homo sapiens
  misc_RNA (1)...(19): siRNA sense strand
gaaaucugaagucuuguac

SEQ ID NO: 1978153 - RNA, 19 nt, Homo sapiens
  misc_RNA (1)...(19): siRNA sense strand
ugagucugcuggugccuau

SEQ ID NO: 1978154 - RNA, 19 nt, Homo sapiens
  misc_RNA (1)...(19): siRNA sense strand
gcuaaagaaaucugaaguc

SEQ ID NO: 1978155 - RNA, 19 nt, Homo sapiens
  misc_RNA (1)...(19): siRNA sense strand
agagauaagugaggagagu

SEQ ID NO: 1978156 - RNA, 19 nt, Homo sapiens
  misc_RNA (1)...(19): siRNA sense strand
ggaccugucagaggaauca

SEQ ID NO: 1978157 - RNA, 19 nt, Homo sapiens
  misc_RNA (1)...(19): siRNA sense strand
gggcaguuaauguucauga

SEQ ID NO: 1978158 - RNA, 19 nt, Homo sapiens
  misc_RNA (1)...(19): siRNA sense strand
agaaaucugaagucuugua

SEQ ID NO: 1978159 - RNA, 19 nt, Homo sapiens
  misc_RNA (1)...(19): siRNA sense strand
ccaguacaaagguguggua

SEQ ID NO: 1978160 - RNA, 19 nt, Homo sapiens
  misc_RNA (1)...(19): siRNA sense strand
ggauuuggaggaccuguca

SEQ ID NO: 1978161 - RNA, 19 nt, Homo sapiens
  misc_RNA (1)...(19): siRNA sense strand
ucggaaccaguacaaauuu

SEQ ID NO: 1978162 - RNA, 19 nt, Homo sapiens
  misc_RNA (1)...(19): siRNA sense strand
gcaaauucacuccccagua

SEQ ID NO: 1978163 - RNA, 19 nt, Homo sapiens
  misc_RNA (1)...(19): siRNA sense strand
acuugugucuaauagcaua

SEQ ID NO: 1978164 - RNA, 19 nt, Homo sapiens
  misc_RNA (1)...(19): siRNA sense strand
gagaaaaugaagagccaua

SEQ ID NO: 1978165 - RNA, 19 nt, Homo sapiens
  misc_RNA (1)...(19): siRNA sense strand
cagccaaccagauccgaaa

SEQ ID NO: 1978166 - RNA, 19 nt, Homo sapiens
  misc_RNA (1)...(19): siRNA sense strand
caagcucccugcuggucau

SEQ ID NO: 1978167 - RNA, 19 nt, Homo sapiens
  misc_RNA (1)...(19): siRNA sense strand
gcccugugcucaagaagcu

SEQ ID NO: 1978168 - RNA, 19 nt, Homo sapiens
  misc_RNA (1)...(19): siRNA sense strand
gaagaugaagacaggaacu

SEQ ID NO: 1978169 - RNA, 19 nt, Homo sapiens
  misc_RNA (1)...(19): siRNA sense strand
gcgcuuugaagaagaugaa

SEQ ID NO: 1978170 - RNA, 19 nt, Homo sapiens
  misc_RNA (1)...(19): siRNA sense strand
cuccagagccugauagaca

SEQ ID NO: 1978171 - RNA, 19 nt, Homo sapiens
  misc_RNA (1)...(19): siRNA sense strand
guuagaagaagaauuugag

SEQ ID NO: 1978172 - RNA, 19 nt, Homo sapiens
  misc_RNA (1)...(19): siRNA sense strand
ccauaaguuagaagaagaa

SEQ ID NO: 1978173 - RNA, 19 nt, Homo sapiens
  misc_RNA (1)...(19): siRNA sense strand
gagccauaaguuagaagaa

SEQ ID NO: 1978174 - RNA, 19 nt, Homo sapiens
  misc_RNA (1)...(19): siRNA sense strand
cagaaaagaccccuaagga

SEQ ID NO: 1978175 - RNA, 19 nt, Homo sapiens
  misc_RNA (1)...(19): siRNA sense strand
aaacagaaaagaccccuaa

SEQ ID NO: 1978176 - RNA, 19 nt, Homo sapiens
  misc_RNA (1)...(19): siRNA sense strand
guggacauugcacauaauu

SEQ ID NO: 1978177 - RNA, 19 nt, Homo sapiens
  misc_RNA (1)...(19): siRNA sense strand
gaggaccugucagaggaau

SEQ ID NO: 1978178 - RNA, 19 nt, Homo sapiens
  misc_RNA (1)...(19): siRNA sense strand
uaccauggacggaagcuau

SEQ ID NO: 1978179 - RNA, 19 nt, Homo sapiens
  misc_RNA (1)...(19): siRNA sense strand
uguguggcaugcaggugua

SEQ ID NO: 1978180 - RNA, 19 nt, Homo sapiens
  misc_RNA (1)...(19): siRNA sense strand
uaucugugcgcuuugaaga

SEQ ID NO: 1978181 - RNA, 19 nt, Homo sapiens
  misc_RNA (1)...(19): siRNA sense strand
gaagaaggggaauauaagu

SEQ ID NO: 1978182 - RNA, 19 nt, Homo sapiens
  misc_RNA (1)...(19): siRNA sense strand
ggcagugggcaguuaaugu

SEQ ID NO: 1978183 - RNA, 19 nt, Homo sapiens
  misc_RNA (1)...(19): siRNA sense strand
ccagcaacaguuacagaga

SEQ ID NO: 1978184 - RNA, 19 nt, Homo sapiens
  misc_RNA (1)...(19): siRNA sense strand
ggcgccagcucuguagaug

SEQ ID NO: 1978185 - RNA, 19 nt, Homo sapiens
  misc_RNA (1)...(19): siRNA sense strand
ggaggaccugucagaggaa

SEQ ID NO: 1978186 - RNA, 19 nt, Homo sapiens
  misc_RNA (1)...(19): siRNA sense strand
gaugggcacacgacaacau

SEQ ID NO: 1978187 - RNA, 19 nt, Homo sapiens
  misc_RNA (1)...(19): siRNA sense strand
cuuggagcaugaaauguca

SEQ ID NO: 1978188 - RNA, 19 nt, Homo sapiens
  misc_RNA (1)...(19): siRNA sense strand
ggaugcuggcuauaucuuc

SEQ ID NO: 1978189 - RNA, 19 nt, Homo sapiens
  misc_RNA (1)...(19): siRNA sense strand
ggaggcacuuuuccaguuc

SEQ ID NO: 1978190 - RNA, 19 nt, Homo sapiens
  misc_RNA (1)...(19): siRNA sense strand
aggaacuugugucuaauag

SEQ ID NO: 1978191 - RNA, 19 nt, Homo sapiens
  misc_RNA (1)...(19): siRNA sense strand
aagaagaugaagacaggaa

SEQ ID NO: 1978192 - RNA, 19 nt, Homo sapiens
  misc_RNA (1)...(19): siRNA sense strand
uuccaguucuuccacaaug

SEQ ID NO: 1978193 - RNA, 19 nt, Homo sapiens
  misc_RNA (1)...(19): siRNA sense strand
ucacauggcucuacucuua

SEQ ID NO: 1978194 - RNA, 19 nt, Homo sapiens
  misc_RNA (1)...(19): siRNA sense strand
gaacaacgguauuugaaga

SEQ ID NO: 1978195 - RNA, 19 nt, Homo sapiens
  misc_RNA (1)...(19): siRNA sense strand
gcagcaaauucuuacauua

SEQ ID NO: 1978196 - RNA, 19 nt, Homo sapiens
  misc_RNA (1)...(19): siRNA sense strand
gacacuaccuauugcauua

SEQ ID NO: 1978197 - RNA, 19 nt, Homo sapiens
  misc_RNA (1)...(19): siRNA sense strand
uugaagaccucuaugauua

SEQ ID NO: 1978198 - RNA, 19 nt, Homo sapiens
  misc_RNA (1)...(19): siRNA sense strand
gaagaccucuaugauuaua

SEQ ID NO: 1978199 - RNA, 19 nt, Homo sapiens
  misc_RNA (1)...(19): siRNA sense strand
gaauacuccugagaauuua

SEQ ID NO: 1978200 - RNA, 19 nt, Homo sapiens
  misc_RNA (1)...(19): siRNA sense strand
gaauacaucagcuguuuaa

SEQ ID NO: 1978201 - RNA, 19 nt, Homo sapiens
  misc_RNA (1)...(19): siRNA sense strand
gaaauggagagcaacaaua

SEQ ID NO: 1978202 - RNA, 19 nt, Homo sapiens
  misc_RNA (1)...(19): siRNA sense strand
gagaugugauuaagacuga

SEQ ID NO: 1978203 - RNA, 19 nt, Homo sapiens
  misc_RNA (1)...(19): siRNA sense strand
caacacagauccugacaag

SEQ ID NO: 1978204 - RNA, 19 nt, Homo sapiens
  misc_RNA (1)...(19): siRNA sense strand
cagaauacaucagcuguuu

SEQ ID NO: 1978205 - RNA, 19 nt, Homo sapiens
  misc_RNA (1)...(19): siRNA sense strand
ggacauggcccaguaauuc

SEQ ID NO: 1978206 - RNA, 19 nt, Homo sapiens
  misc_RNA (1)...(19): siRNA sense strand
ggcuaaacauaaucucuua

SEQ ID NO: 1978207 - RNA, 19 nt, Homo sapiens
  misc_RNA (1)...(19): siRNA sense strand
caagaauacuccugagaau

SEQ ID NO: 1978208 - RNA, 19 nt, Homo sapiens
  misc_RNA (1)...(19): siRNA sense strand
agaauacuccugagaauuu

SEQ ID NO: 1978209 - RNA, 19 nt, Homo sapiens
  misc_RNA (1)...(19): siRNA sense strand
acacagauccugacaagaa

SEQ ID NO: 1978210 - RNA, 19 nt, Homo sapiens
  misc_RNA (1)...(19): siRNA sense strand
ggaaggaacaacgguauuu

SEQ ID NO: 1978211 - RNA, 19 nt, Homo sapiens
  misc_RNA (1)...(19): siRNA sense strand
gaaagauggagaugugauu

SEQ ID NO: 1978212 - RNA, 19 nt, Homo sapiens
  misc_RNA (1)...(19): siRNA sense strand
uaaagcaggcucuaacuga

SEQ ID NO: 1978213 - RNA, 19 nt, Homo sapiens
  misc_RNA (1)...(19): siRNA sense strand
gcauaggagauauuuguaa

SEQ ID NO: 1978214 - RNA, 19 nt, Homo sapiens
  misc_RNA (1)...(19): siRNA sense strand
ucauaaugcugaagcuaaa

SEQ ID NO: 1978215 - RNA, 19 nt, Homo sapiens
  misc_RNA (1)...(19): siRNA sense strand
ccugagaauuuacaugaaa

SEQ ID NO: 1978216 - RNA, 19 nt, Homo sapiens
  misc_RNA (1)...(19): siRNA sense strand
caugaaauggcuaaacaua

SEQ ID NO: 1978217 - RNA, 19 nt, Homo sapiens
  misc_RNA (1)...(19): siRNA sense strand
cgagagcagcaaauucuua

SEQ ID NO: 1978218 - RNA, 19 nt, Homo sapiens
  misc_RNA (1)...(19): siRNA sense strand
gagagaagaaauuauagga

SEQ ID NO: 1978219 - RNA, 19 nt, Homo sapiens
  misc_RNA (1)...(19): siRNA sense strand
uaacacagcaauccaggaa

SEQ ID NO: 1978220 - RNA, 19 nt, Homo sapiens
  misc_RNA (1)...(19): siRNA sense strand
aaagcaggcucuaacugaa

SEQ ID NO: 1978221 - RNA, 19 nt, Homo sapiens
  misc_RNA (1)...(19): siRNA sense strand
ggaaauggagagcaacaau

SEQ ID NO: 1978222 - RNA, 19 nt, Homo sapiens
  misc_RNA (1)...(19): siRNA sense strand
ccucagagagaagaaauua

SEQ ID NO: 1978223 - RNA, 19 nt, Homo sapiens
  misc_RNA (1)...(19): siRNA sense strand
acacagcaauccaggaaau

SEQ ID NO: 1978224 - RNA, 19 nt, Homo sapiens
  misc_RNA (1)...(19): siRNA sense strand
uauaggaaauggagagcaa

SEQ ID NO: 1978225 - RNA, 19 nt, Homo sapiens
  misc_RNA (1)...(19): siRNA sense strand
gaaauggaaagcucaucuu

SEQ ID NO: 1978226 - RNA, 19 nt, Homo sapiens
  misc_RNA (1)...(19): siRNA sense strand
gaaggaacaacgguauuug

SEQ ID NO: 1978227 - RNA, 19 nt, Homo sapiens
  misc_RNA (1)...(19): siRNA sense strand
gugagaacuuugagaaauc

SEQ ID NO: 1978228 - RNA, 19 nt, Homo sapiens
  misc_RNA (1)...(19): siRNA sense strand
cgugagaacuuugagaaau

SEQ ID NO: 1978229 - RNA, 19 nt, Homo sapiens
  misc_RNA (1)...(19): siRNA sense strand
ucugaaagauggagaugug

SEQ ID NO: 1978230 - RNA, 19 nt, Homo sapiens
  misc_RNA (1)...(19): siRNA sense strand
uacaugaaauggcuaaaca

SEQ ID NO: 1978231 - RNA, 19 nt, Homo sapiens
  misc_RNA (1)...(19): siRNA sense strand
ugagggagccacucuaaga

SEQ ID NO: 1978232 - RNA, 19 nt, Homo sapiens
  misc_RNA (1)...(19): siRNA sense strand
auaaugacacuaccuauug

SEQ ID NO: 1978233 - RNA, 19 nt, Homo sapiens
  misc_RNA (1)...(19): siRNA sense strand
cacagauccugacaagaaa

SEQ ID NO: 1978234 - RNA, 19 nt, Homo sapiens
  misc_RNA (1)...(19): siRNA sense strand
ggaggcauaggagauauuu

SEQ ID NO: 1978235 - RNA, 19 nt, Homo sapiens
  misc_RNA (1)...(19): siRNA sense strand
acaauacauuucucacaga

SEQ ID NO: 1978236 - RNA, 19 nt, Homo sapiens
  misc_RNA (1)...(19): siRNA sense strand
caacaauacauuucucaca

SEQ ID NO: 1978237 - RNA, 19 nt, Homo sapiens
  misc_RNA (1)...(19): siRNA sense strand
ucaauaaugacacuaccua

SEQ ID NO: 1978238 - RNA, 19 nt, Homo sapiens
  misc_RNA (1)...(19): siRNA sense strand
ggagauauuuguaaaagca

SEQ ID NO: 1978239 - RNA, 19 nt, Homo sapiens
  misc_RNA (1)...(19): siRNA sense strand
aaauggagagcaacaauau

SEQ ID NO: 1978240 - RNA, 19 nt, Homo sapiens
  misc_RNA (1)...(19): siRNA sense strand
aaagauggagaugugauua

SEQ ID NO: 1978241 - RNA, 19 nt, Homo sapiens
  misc_RNA (1)...(19): siRNA sense strand
agaccucuaugauuauaug

SEQ ID NO: 1978242 - RNA, 19 nt, Homo sapiens
  misc_RNA (1)...(19): siRNA sense strand
acaagaauacuccugagaa

SEQ ID NO: 1978243 - RNA, 19 nt, Homo sapiens
  misc_RNA (1)...(19): siRNA sense strand
ugagaacuuugagaaauca

SEQ ID NO: 1978244 - RNA, 19 nt, Homo sapiens
  misc_RNA (1)...(19): siRNA sense strand
gaaauggcuaaacauaauc

SEQ ID NO: 1978245 - RNA, 19 nt, Homo sapiens
  misc_RNA (1)...(19): siRNA sense strand
uacaucagcuguuuaaagc

SEQ ID NO: 1978246 - RNA, 19 nt, Homo sapiens
  misc_RNA (1)...(19): siRNA sense strand
agaggaaaaugcuaucuuu

SEQ ID NO: 1978247 - RNA, 19 nt, Homo sapiens
  misc_RNA (1)...(19): siRNA sense strand
ggaacaacgguauuugaag

SEQ ID NO: 1978248 - RNA, 19 nt, Homo sapiens
  misc_RNA (1)...(19): siRNA sense strand
uccaggacauggcccagua

SEQ ID NO: 1978249 - RNA, 19 nt, Homo sapiens
  misc_RNA (1)...(19): siRNA sense strand
gagcagcaaauucuuacau

SEQ ID NO: 1978250 - RNA, 19 nt, Homo sapiens
  misc_RNA (1)...(19): siRNA sense strand
ccaggaaauuguagugacu

SEQ ID NO: 1978251 - RNA, 19 nt, Homo sapiens
  misc_RNA (1)...(19): siRNA sense strand
caccaacaccuaccuagug

SEQ ID NO: 1978252 - RNA, 19 nt, Homo sapiens
  misc_RNA (1)...(19): siRNA sense strand
ugacacuaccuauugcauu

SEQ ID NO: 1978253 - RNA, 19 nt, Homo sapiens
  misc_RNA (1)...(19): siRNA sense strand
gcaccaacaccuaccuagu

SEQ ID NO: 1978254 - RNA, 19 nt, Homo sapiens
  misc_RNA (1)...(19): siRNA sense strand
gcccaguaauucauaaugc

SEQ ID NO: 1978255 - RNA, 19 nt, Homo sapiens
  misc_RNA (1)...(19): siRNA sense strand
ugaagaccucuaugauuau

SEQ ID NO: 1978256 - RNA, 19 nt, Homo sapiens
  misc_RNA (1)...(19): siRNA sense strand
ggcauaggagauauuugua

SEQ ID NO: 1978257 - RNA, 19 nt, Homo sapiens
  misc_RNA (1)...(19): siRNA sense strand
gacauggcccaguaauuca

SEQ ID NO: 1978258 - RNA, 19 nt, Homo sapiens
  misc_RNA (1)...(19): siRNA sense strand
gguauuugaagaccucuau

SEQ ID NO: 1978259 - RNA, 19 nt, Homo sapiens
  misc_RNA (1)...(19): siRNA sense strand
gggaaggaacaacgguauu

SEQ ID NO: 1978260 - RNA, 19 nt, Homo sapiens
  misc_RNA (1)...(19): siRNA sense strand
agaauacaucagcuguuua

SEQ ID NO: 1978261 - RNA, 19 nt, Homo sapiens
  misc_RNA (1)...(19): siRNA sense strand
ggaauccucagagagaaga

SEQ ID NO: 1978262 - RNA, 19 nt, Homo sapiens
  misc_RNA (1)...(19): siRNA sense strand
cacuaccuauugcauuaaa

SEQ ID NO: 1978263 - RNA, 19 nt, Homo sapiens
  misc_RNA (1)...(19): siRNA sense strand
gauggagaugugauuaaga

SEQ ID NO: 1978264 - RNA, 19 nt, Homo sapiens
  misc_RNA (1)...(19): siRNA sense strand
agcagcaaauucuuacauu

SEQ ID NO: 1978265 - RNA, 19 nt, Homo sapiens
  misc_RNA (1)...(19): siRNA sense strand
gaucacauggcucuacucu

SEQ ID NO: 1978266 - RNA, 19 nt, Homo sapiens
  misc_RNA (1)...(19): siRNA sense strand
uaaugacacuaccuauugc

SEQ ID NO: 1978267 - RNA, 19 nt, Homo sapiens
  misc_RNA (1)...(19): siRNA sense strand
gagagcagcaaauucuuac

SEQ ID NO: 1978268 - RNA, 19 nt, Homo sapiens
  misc_RNA (1)...(19): siRNA sense strand
agaucauucuggaggcaua

SEQ ID NO: 1978269 - RNA, 19 nt, Homo sapiens
  misc_RNA (1)...(19): siRNA sense strand
acaguaauggagcuuguaa

SEQ ID NO: 1978270 - RNA, 19 nt, Homo sapiens
  misc_RNA (1)...(19): siRNA sense strand
cacggaauccucagagaga

SEQ ID NO: 1978271 - RNA, 19 nt, Homo sapiens
  misc_RNA (1)...(19): siRNA sense strand
caauaaugacacuaccuau

SEQ ID NO: 1978272 - RNA, 19 nt, Homo sapiens
  misc_RNA (1)...(19): siRNA sense strand
aagauggagaugugauuaa

SEQ ID NO: 1978273 - RNA, 19 nt, Homo sapiens
  misc_RNA (1)...(19): siRNA sense strand
gcaacacagauccugacaa

SEQ ID NO: 1978274 - RNA, 19 nt, Homo sapiens
  misc_RNA (1)...(19): siRNA sense strand
gaauuuaacacagcaaucc

SEQ ID NO: 1978275 - RNA, 19 nt, Homo sapiens
  misc_RNA (1)...(19): siRNA sense strand
ccucuaugauuauaugaac

SEQ ID NO: 1978276 - RNA, 19 nt, Homo sapiens
  misc_RNA (1)...(19): siRNA sense strand
uuugaagaccucuaugauu

SEQ ID NO: 1978277 - RNA, 19 nt, Homo sapiens
  misc_RNA (1)...(19): siRNA sense strand
aaggaacaacgguauuuga

SEQ ID NO: 1978278 - RNA, 19 nt, Homo sapiens
  misc_RNA (1)...(19): siRNA sense strand
gugcguguguugggcugua

SEQ ID NO: 1978279 - RNA, 19 nt, Homo sapiens
  misc_RNA (1)...(19): siRNA sense strand
auacaucagcuguuuaaag

SEQ ID NO: 1978280 - RNA, 19 nt, Homo sapiens
  misc_RNA (1)...(19): siRNA sense strand
aggcauaggagauauuugu

SEQ ID NO: 1978281 - RNA, 19 nt, Homo sapiens
  misc_RNA (1)...(19): siRNA sense strand
uauuugaagaccucuauga

SEQ ID NO: 1978282 - RNA, 19 nt, Homo sapiens
  misc_RNA (1)...(19): siRNA sense strand
agauggagaugugauuaag

SEQ ID NO: 1978283 - RNA, 19 nt, Homo sapiens
  misc_RNA (1)...(19): siRNA sense strand
agcaggcucuaacugaauu

SEQ ID NO: 1978284 - RNA, 19 nt, Homo sapiens
  misc_RNA (1)...(19): siRNA sense strand
ucuaagaguucuauauacc

SEQ ID NO: 1978285 - RNA, 19 nt, Homo sapiens
  misc_RNA (1)...(19): siRNA sense strand
ggcucuaacugaauuuaac

SEQ ID NO: 1978286 - RNA, 19 nt, Homo sapiens
  misc_RNA (1)...(19): siRNA sense strand
aagaauacuccugagaauu

SEQ ID NO: 1978287 - RNA, 19 nt, Homo sapiens
  misc_RNA (1)...(19): siRNA sense strand
cauugacacuggagaacca

SEQ ID NO: 1978288 - RNA, 19 nt, Homo sapiens
  misc_RNA (1)...(19): siRNA sense strand
gcucuaacugaauuuaaca

SEQ ID NO: 1978289 - RNA, 19 nt, Homo sapiens
  misc_RNA (1)...(19): siRNA sense strand
aggaacaacgguauuugaa

SEQ ID NO: 1978290 - RNA, 19 nt, Homo sapiens
  misc_RNA (1)...(19): siRNA sense strand
ccagaauacaucagcuguu

SEQ ID NO: 1978291 - RNA, 19 nt, Homo sapiens
  misc_RNA (1)...(19): siRNA sense strand
uacauuauuucgugagaac

SEQ ID NO: 1978292 - RNA, 19 nt, Homo sapiens
  misc_RNA (1)...(19): siRNA sense strand
cuccugagaauuuacauga

SEQ ID NO: 1978293 - RNA, 19 nt, Homo sapiens
  misc_RNA (1)...(19): siRNA sense strand
gauauucaccguuccauua

SEQ ID NO: 1978294 - RNA, 19 nt, Homo sapiens
  misc_RNA (1)...(19): siRNA sense strand
caugucagauuccuacuua

SEQ ID NO: 1978295 - RNA, 19 nt, Homo sapiens
  misc_RNA (1)...(19): siRNA sense strand
gaaguuggguagcacagaa

SEQ ID NO: 1978296 - RNA, 19 nt, Homo sapiens
  misc_RNA (1)...(19): siRNA sense strand
aagcuucgguccauuaaua

SEQ ID NO: 1978297 - RNA, 19 nt, Homo sapiens
  misc_RNA (1)...(19): siRNA sense strand
cuacuuaacuucuuaugga

SEQ ID NO: 1978298 - RNA, 19 nt, Homo sapiens
  misc_RNA (1)...(19): siRNA sense strand
gcacagagcaugguaacaa

SEQ ID NO: 1978299 - RNA, 19 nt, Homo sapiens
  misc_RNA (1)...(19): siRNA sense strand
gagaagcuucgguccauua

SEQ ID NO: 1978300 - RNA, 19 nt, Homo sapiens
  misc_RNA (1)...(19): siRNA sense strand
ugaaggacguucccaauag

SEQ ID NO: 1978301 - RNA, 19 nt, Homo sapiens
  misc_RNA (1)...(19): siRNA sense strand
gagaaacgccaaagaggaa

SEQ ID NO: 1978302 - RNA, 19 nt, Homo sapiens
  misc_RNA (1)...(19): siRNA sense strand
gcaguggguucggucauaa

SEQ ID NO: 1978303 - RNA, 19 nt, Homo sapiens
  misc_RNA (1)...(19): siRNA sense strand
gguagcggguccauuacua

SEQ ID NO: 1978304 - RNA, 19 nt, Homo sapiens
  misc_RNA (1)...(19): siRNA sense strand
gauauuggaacuugggaua

SEQ ID NO: 1978305 - RNA, 19 nt, Homo sapiens
  misc_RNA (1)...(19): siRNA sense strand
guugguagcggguccauua

SEQ ID NO: 1978306 - RNA, 19 nt, Homo sapiens
  misc_RNA (1)...(19): siRNA sense strand
aaauggaucuguacaucaa

SEQ ID NO: 1978307 - RNA, 19 nt, Homo sapiens
  misc_RNA (1)...(19): siRNA sense strand
gagacuggaugcugcuuau

SEQ ID NO: 1978308 - RNA, 19 nt, Homo sapiens
  misc_RNA (1)...(19): siRNA sense strand
gcacugaaguuggguagca

SEQ ID NO: 1978309 - RNA, 19 nt, Homo sapiens
  misc_RNA (1)...(19): siRNA sense strand
caucguggcuuccaauagu

SEQ ID NO: 1978310 - RNA, 19 nt, Homo sapiens
  misc_RNA (1)...(19): siRNA sense strand
aaacagcaaccuaaacuga

SEQ ID NO: 1978311 - RNA, 19 nt, Homo sapiens
  misc_RNA (1)...(19): siRNA sense strand
gaggaagaagaaaguguua

SEQ ID NO: 1978312 - RNA, 19 nt, Homo sapiens
  misc_RNA (1)...(19): siRNA sense strand
ccuaccagaugcaauguuu

SEQ ID NO: 1978313 - RNA, 19 nt, Homo sapiens
  misc_RNA (1)...(19): siRNA sense strand
gaaaucugcuguggacuac

SEQ ID NO: 1978314 - RNA, 19 nt, Homo sapiens
  misc_RNA (1)...(19): siRNA sense strand
ggauauaguagcaauuaug

SEQ ID NO: 1978315 - RNA, 19 nt, Homo sapiens
  misc_RNA (1)...(19): siRNA sense strand
gugaaggacguucccaaua

SEQ ID NO: 1978316 - RNA, 19 nt, Homo sapiens
  misc_RNA (1)...(19): siRNA sense strand
ggucagcaggcuaacaaua

SEQ ID NO: 1978317 - RNA, 19 nt, Homo sapiens
  misc_RNA (1)...(19): siRNA sense strand
uagagaacaacgagaauaa

SEQ ID NO: 1978318 - RNA, 19 nt, Homo sapiens
  misc_RNA (1)...(19): siRNA sense strand
aagcagguguugaaaauua

SEQ ID NO: 1978319 - RNA, 19 nt, Homo sapiens
  misc_RNA (1)...(19): siRNA sense strand
gaacaacgagaauaaacca

SEQ ID NO: 1978320 - RNA, 19 nt, Homo sapiens
  misc_RNA (1)...(19): siRNA sense strand
ggcaguggguucggucaua

SEQ ID NO: 1978321 - RNA, 19 nt, Homo sapiens
  misc_RNA (1)...(19): siRNA sense strand
ccacaggcaaggcccaaua

SEQ ID NO: 1978322 - RNA, 19 nt, Homo sapiens
  misc_RNA (1)...(19): siRNA sense strand
caaagaggaagaagaaagu

SEQ ID NO: 1978323 - RNA, 19 nt, Homo sapiens
  misc_RNA (1)...(19): siRNA sense strand
gggauugacuucucagcau

SEQ ID NO: 1978324 - RNA, 19 nt, Homo sapiens
  misc_RNA (1)...(19): siRNA sense strand
acacagccaugcccuacuu

SEQ ID NO: 1978325 - RNA, 19 nt, Homo sapiens
  misc_RNA (1)...(19): siRNA sense strand
gaugacuucucacacuaug

SEQ ID NO: 1978326 - RNA, 19 nt, Homo sapiens
  misc_RNA (1)...(19): siRNA sense strand
caugauugauggacaguca

SEQ ID NO: 1978327 - RNA, 19 nt, Homo sapiens
  misc_RNA (1)...(19): siRNA sense strand
ugaaaucugcuguggacua

SEQ ID NO: 1978328 - RNA, 19 nt, Homo sapiens
  misc_RNA (1)...(19): siRNA sense strand
gagcuacucugaggacgau

SEQ ID NO: 1978329 - RNA, 19 nt, Homo sapiens
  misc_RNA (1)...(19): siRNA sense strand
ggagaagcuucgguccauu

SEQ ID NO: 1978330 - RNA, 19 nt, Homo sapiens
  misc_RNA (1)...(19): siRNA sense strand
gaaacaaaguacaaaaugg

SEQ ID NO: 1978331 - RNA, 19 nt, Homo sapiens
  misc_RNA (1)...(19): siRNA sense strand
gcuccuggcaugaauacua

SEQ ID NO: 1978332 - RNA, 19 nt, Homo sapiens
  misc_RNA (1)...(19): siRNA sense strand
aaccuaaacugaagaccaa

SEQ ID NO: 1978333 - RNA, 19 nt, Homo sapiens
  misc_RNA (1)...(19): siRNA sense strand
gaaggacguucccaauagc

SEQ ID NO: 1978334 - RNA, 19 nt, Homo sapiens
  misc_RNA (1)...(19): siRNA sense strand
uccauuggcuucuccuauu

SEQ ID NO: 1978335 - RNA, 19 nt, Homo sapiens
  misc_RNA (1)...(19): siRNA sense strand
gccaugcccuacuuaacuu

SEQ ID NO: 1978336 - RNA, 19 nt, Homo sapiens
  misc_RNA (1)...(19): siRNA sense strand
uuaugcaccuagcuccuua

SEQ ID NO: 1978337 - RNA, 19 nt, Homo sapiens
  misc_RNA (1)...(19): siRNA sense strand
gcuacaagcacaccacuuc

SEQ ID NO: 1978338 - RNA, 19 nt, Homo sapiens
  misc_RNA (1)...(19): siRNA sense strand
uuacuacagucccuccauu

SEQ ID NO: 1978339 - RNA, 19 nt, Homo sapiens
  misc_RNA (1)...(19): siRNA sense strand
caaggaaacaaaguacaaa

SEQ ID NO: 1978340 - RNA, 19 nt, Homo sapiens
  misc_RNA (1)...(19): siRNA sense strand
caaccaggagcccuaggua

SEQ ID NO: 1978341 - RNA, 19 nt, Homo sapiens
  misc_RNA (1)...(19): siRNA sense strand
aagcacaccacuuccauuu

SEQ ID NO: 1978342 - RNA, 19 nt, Homo sapiens
  misc_RNA (1)...(19): siRNA sense strand
ucaaggaaacaaaguacaa

SEQ ID NO: 1978343 - RNA, 19 nt, Homo sapiens
  misc_RNA (1)...(19): siRNA sense strand
aaacugaagaccaagaaug

SEQ ID NO: 1978344 - RNA, 19 nt, Homo sapiens
  misc_RNA (1)...(19): siRNA sense strand
cuagguagcacuccauuuc

SEQ ID NO: 1978345 - RNA, 19 nt, Homo sapiens
  misc_RNA (1)...(19): siRNA sense strand
ccaaagaggaagaagaaag

SEQ ID NO: 1978346 - RNA, 19 nt, Homo sapiens
  misc_RNA (1)...(19): siRNA sense strand
gagaacaacgagaauaaac

SEQ ID NO: 1978347 - RNA, 19 nt, Homo sapiens
  misc_RNA (1)...(19): siRNA sense strand
caugaauacuauagaccaa

SEQ ID NO: 1978348 - RNA, 19 nt, Homo sapiens
  misc_RNA (1)...(19): siRNA sense strand
ggauuaaacgaugaugauu

SEQ ID NO: 1978349 - RNA, 19 nt, Homo sapiens
  misc_RNA (1)...(19): siRNA sense strand
aggcuuugguucagaauau

SEQ ID NO: 1978350 - RNA, 19 nt, Homo sapiens
  misc_RNA (1)...(19): siRNA sense strand
cuagagaacaacgagaaua

SEQ ID NO: 1978351 - RNA, 19 nt, Homo sapiens
  misc_RNA (1)...(19): siRNA sense strand
ggaaacaaaguacaaaaug

SEQ ID NO: 1978352 - RNA, 19 nt, Homo sapiens
  misc_RNA (1)...(19): siRNA sense strand
cagggacagucuacucaga

SEQ ID NO: 1978353 - RNA, 19 nt, Homo sapiens
  misc_RNA (1)...(19): siRNA sense strand
aaucugcuguggacuacaa

SEQ ID NO: 1978354 - RNA, 19 nt, Homo sapiens
  misc_RNA (1)...(19): siRNA sense strand
caaaauggaucuguacauc

SEQ ID NO: 1978355 - RNA, 19 nt, Homo sapiens
  misc_RNA (1)...(19): siRNA sense strand
accguuccauuaaguauaa

SEQ ID NO: 1978356 - RNA, 19 nt, Homo sapiens
  misc_RNA (1)...(19): siRNA sense strand
auacugccaugucagauuc

SEQ ID NO: 1978357 - RNA, 19 nt, Homo sapiens
  misc_RNA (1)...(19): siRNA sense strand
cgccaaagaggaagaagaa

SEQ ID NO: 1978358 - RNA, 19 nt, Homo sapiens
  misc_RNA (1)...(19): siRNA sense strand
agaauaaaccagugaccaa

SEQ ID NO: 1978359 - RNA, 19 nt, Homo sapiens
  misc_RNA (1)...(19): siRNA sense strand
gauggcagcacugaaguug

SEQ ID NO: 1978360 - RNA, 19 nt, Homo sapiens
  misc_RNA (1)...(19): siRNA sense strand
cuggauauaguagcaauua

SEQ ID NO: 1978361 - RNA, 19 nt, Homo sapiens
  misc_RNA (1)...(19): siRNA sense strand
ccauuggcuucuccuauuc

SEQ ID NO: 1978362 - RNA, 19 nt, Homo sapiens
  misc_RNA (1)...(19): siRNA sense strand
uaaggcuccuggcaugaau

SEQ ID NO: 1978363 - RNA, 19 nt, Homo sapiens
  misc_RNA (1)...(19): siRNA sense strand
ucaaaaggauggauuaaac

SEQ ID NO: 1978364 - RNA, 19 nt, Homo sapiens
  misc_RNA (1)...(19): siRNA sense strand
cgacacauucgccuagaga

SEQ ID NO: 1978365 - RNA, 19 nt, Homo sapiens
  misc_RNA (1)...(19): siRNA sense strand
gcaacagacacagccauug

SEQ ID NO: 1978366 - RNA, 19 nt, Homo sapiens
  misc_RNA (1)...(19): siRNA sense strand
acauggauauuggaacuug

SEQ ID NO: 1978367 - RNA, 19 nt, Homo sapiens
  misc_RNA (1)...(19): siRNA sense strand
ccagugggauugacuucuc

SEQ ID NO: 1978368 - RNA, 19 nt, Homo sapiens
  misc_RNA (1)...(19): siRNA sense strand
caacagacacagccauugc

SEQ ID NO: 1978369 - RNA, 19 nt, Homo sapiens
  misc_RNA (1)...(19): siRNA sense strand
ggcuuugguucagaauaua

SEQ ID NO: 1978370 - RNA, 19 nt, Homo sapiens
  misc_RNA (1)...(19): siRNA sense strand
gauauaguagcaauuaugc

SEQ ID NO: 1978371 - RNA, 19 nt, Homo sapiens
  misc_RNA (1)...(19): siRNA sense strand
ugcccuacuuaacuucuua

SEQ ID NO: 1978372 - RNA, 19 nt, Homo sapiens
  misc_RNA (1)...(19): siRNA sense strand
gaaacgccaaagaggaaga

SEQ ID NO: 1978373 - RNA, 19 nt, Homo sapiens
  misc_RNA (1)...(19): siRNA sense strand
cuaagcagguguugaaaau

SEQ ID NO: 1978374 - RNA, 19 nt, Homo sapiens
  misc_RNA (1)...(19): siRNA sense strand
guaacaucguggcuuccaa

SEQ ID NO: 1978375 - RNA, 19 nt, Homo sapiens
  misc_RNA (1)...(19): siRNA sense strand
gguagcacuccauuucuug

SEQ ID NO: 1978376 - RNA, 19 nt, Homo sapiens
  misc_RNA (1)...(19): siRNA sense strand
caaggcccaauaaugcaua

SEQ ID NO: 1978377 - RNA, 19 nt, Homo sapiens
  misc_RNA (1)...(19): siRNA sense strand
uaacaucguggcuuccaau

SEQ ID NO: 1978378 - RNA, 19 nt, Homo sapiens
  misc_RNA (1)...(19): siRNA sense strand
caggcaaggcccaauaaug

SEQ ID NO: 1978379 - RNA, 19 nt, Homo sapiens
  misc_RNA (1)...(19): siRNA sense strand
uugaugacuucucacacua

SEQ ID NO: 1978380 - RNA, 19 nt, Homo sapiens
  misc_RNA (1)...(19): siRNA sense strand
ggaagugccucuggaaaag

SEQ ID NO: 1978381 - RNA, 19 nt, Homo sapiens
  misc_RNA (1)...(19): siRNA sense strand
cauauacugccaugucaga

SEQ ID NO: 1978382 - RNA, 19 nt, Homo sapiens
  misc_RNA (1)...(19): siRNA sense strand
cuacuuacccaguuacuac

SEQ ID NO: 1978383 - RNA, 19 nt, Homo sapiens
  misc_RNA (1)...(19): siRNA sense strand
uggcguggcagaaaugaaa

SEQ ID NO: 1978384 - RNA, 19 nt, Homo sapiens
  misc_RNA (1)...(19): siRNA sense strand
gcagcacagagcaugguaa

SEQ ID NO: 1978385 - RNA, 19 nt, Homo sapiens
  misc_RNA (1)...(19): siRNA sense strand
ugacuggaaucugaaacau

SEQ ID NO: 1978386 - RNA, 19 nt, Homo sapiens
  misc_RNA (1)...(19): siRNA sense strand
caccauugcuccuccaaaa

SEQ ID NO: 1978387 - RNA, 19 nt, Homo sapiens
  misc_RNA (1)...(19): siRNA sense strand
acagcaaccuaaacugaag

SEQ ID NO: 1978388 - RNA, 19 nt, Homo sapiens
  misc_RNA (1)...(19): siRNA sense strand
caagcaauguuccaaaagu

SEQ ID NO: 1978389 - RNA, 19 nt, Homo sapiens
  misc_RNA (1)...(19): siRNA sense strand
caagcacaccacuuccauu

SEQ ID NO: 1978390 - RNA, 19 nt, Homo sapiens
  misc_RNA (1)...(19): siRNA sense strand
acaaauggaagggucguuu

SEQ ID NO: 1978391 - RNA, 19 nt, Homo sapiens
  misc_RNA (1)...(19): siRNA sense strand
ggcaacagacacagccauu

SEQ ID NO: 1978392 - RNA, 19 nt, Homo sapiens
  misc_RNA (1)...(19): siRNA sense strand
aggcuaagcagguguugaa

SEQ ID NO: 1978393 - RNA, 19 nt, Homo sapiens
  misc_RNA (1)...(19): siRNA sense strand
aaacagagcuuccuacuaa

SEQ ID NO: 1978394 - RNA, 19 nt, Homo sapiens
  misc_RNA (1)...(19): siRNA sense strand
gcaauuccuugaacaaaga

SEQ ID NO: 1978395 - RNA, 19 nt, Homo sapiens
  misc_RNA (1)...(19): siRNA sense strand
ggucagacguggcacuuug

SEQ ID NO: 1978396 - RNA, 19 nt, Homo sapiens
  misc_RNA (1)...(19): siRNA sense strand
gagaggcugugaucaauag

SEQ ID NO: 1978397 - RNA, 19 nt, Homo sapiens
  misc_RNA (1)...(19): siRNA sense strand
gagaaacgaagcuuggaua

SEQ ID NO: 1978398 - RNA, 19 nt, Homo sapiens
  misc_RNA (1)...(19): siRNA sense strand
aaacgaagcuuggauaguc

SEQ ID NO: 1978399 - RNA, 19 nt, Homo sapiens
  misc_RNA (1)...(19): siRNA sense strand
gaacaaagaauggaagaag

SEQ ID NO: 1978400 - RNA, 19 nt, Homo sapiens
  misc_RNA (1)...(19): siRNA sense strand
gacaugagguggccaagca

SEQ ID NO: 1978401 - RNA, 19 nt, Homo sapiens
  misc_RNA (1)...(19): siRNA sense strand
guacaagaaagaaauguug

SEQ ID NO: 1978402 - RNA, 19 nt, Homo sapiens
  misc_RNA (1)...(19): siRNA sense strand
agacagagagugagcagua

SEQ ID NO: 1978403 - RNA, 19 nt, Homo sapiens
  misc_RNA (1)...(19): siRNA sense strand
caugagcacuguccagaug

SEQ ID NO: 1978404 - RNA, 19 nt, Homo sapiens
  misc_RNA (1)...(19): siRNA sense strand
guaauggcuuucuacucua

SEQ ID NO: 1978405 - RNA, 19 nt, Homo sapiens
  misc_RNA (1)...(19): siRNA sense strand
agacacaucuggugcuaau

SEQ ID NO: 1978406 - RNA, 19 nt, Homo sapiens
  misc_RNA (1)...(19): siRNA sense strand
gcagaagucagacgacaug

SEQ ID NO: 1978407 - RNA, 19 nt, Homo sapiens
  misc_RNA (1)...(19): siRNA sense strand
ggacguggcuaccguucuc

SEQ ID NO: 1978408 - RNA, 19 nt, Homo sapiens
  misc_RNA (1)...(19): siRNA sense strand
cguuguagcugcagugaga

SEQ ID NO: 1978409 - RNA, 19 nt, Homo sapiens
  misc_RNA (1)...(19): siRNA sense strand
caaacagagcuuccuacua

SEQ ID NO: 1978410 - RNA, 19 nt, Homo sapiens
  misc_RNA (1)...(19): siRNA sense strand
agagugagcaguacaagaa

SEQ ID NO: 1978411 - RNA, 19 nt, Homo sapiens
  misc_RNA (1)...(19): siRNA sense strand
uauguaacccuguccagua

SEQ ID NO: 1978412 - RNA, 19 nt, Homo sapiens
  misc_RNA (1)...(19): siRNA sense strand
gaaguggcaauuccuugaa

SEQ ID NO: 1978413 - RNA, 19 nt, Homo sapiens
  misc_RNA (1)...(19): siRNA sense strand
uuaacgggcucgucaagga

SEQ ID NO: 1978414 - RNA, 19 nt, Homo sapiens
  misc_RNA (1)...(19): siRNA sense strand
guaacccuguccaguaaug

SEQ ID NO: 1978415 - RNA, 19 nt, Homo sapiens
  misc_RNA (1)...(19): siRNA sense strand
gcugugaucuucgucuuca

SEQ ID NO: 1978416 - RNA, 19 nt, Homo sapiens
  misc_RNA (1)...(19): siRNA sense strand
gagcaguacaagaaagaaa

SEQ ID NO: 1978417 - RNA, 19 nt, Homo sapiens
  misc_RNA (1)...(19): siRNA sense strand
gauccuagccagucugcaa

SEQ ID NO: 1978418 - RNA, 19 nt, Homo sapiens
  misc_RNA (1)...(19): siRNA sense strand
ggcaauuccuugaacaaag

SEQ ID NO: 1978419 - RNA, 19 nt, Homo sapiens
  misc_RNA (1)...(19): siRNA sense strand
gaaacgcugcagcuacuau

SEQ ID NO: 1978420 - RNA, 19 nt, Homo sapiens
  misc_RNA (1)...(19): siRNA sense strand
ucaaggacaugagcacugu

SEQ ID NO: 1978421 - RNA, 19 nt, Homo sapiens
  misc_RNA (1)...(19): siRNA sense strand
gagcgcgagucguggauuc

SEQ ID NO: 1978422 - RNA, 19 nt, Homo sapiens
  misc_RNA (1)...(19): siRNA sense strand
caacaccauccaagacuga

SEQ ID NO: 1978423 - RNA, 19 nt, Homo sapiens
  misc_RNA (1)...(19): siRNA sense strand
aacaaagaauggaagaaga

SEQ ID NO: 1978424 - RNA, 19 nt, Homo sapiens
  misc_RNA (1)...(19): siRNA sense strand
gaauggaagaagaaauaug

SEQ ID NO: 1978425 - RNA, 19 nt, Homo sapiens
  misc_RNA (1)...(19): siRNA sense strand
acaaagaauggaagaagaa

SEQ ID NO: 1978426 - RNA, 19 nt, Homo sapiens
  misc_RNA (1)...(19): siRNA sense strand
caaccuaugggcucaaugu

SEQ ID NO: 1978427 - RNA, 19 nt, Homo sapiens
  misc_RNA (1)...(19): siRNA sense strand
gaagccagaccggaauuug

SEQ ID NO: 1978428 - RNA, 19 nt, Homo sapiens
  misc_RNA (1)...(19): siRNA sense strand
cgaaguggcaauuccuuga

SEQ ID NO: 1978429 - RNA, 19 nt, Homo sapiens
  misc_RNA (1)...(19): siRNA sense strand
cgcaacugcugcuguggua

SEQ ID NO: 1978430 - RNA, 19 nt, Homo sapiens
  misc_RNA (1)...(19): siRNA sense strand
caaagaauggaagaagaaa

SEQ ID NO: 1978431 - RNA, 19 nt, Homo sapiens
  misc_RNA (1)...(19): siRNA sense strand
gcaguacaagaaagaaaug

SEQ ID NO: 1978432 - RNA, 19 nt, Homo sapiens
  misc_RNA (1)...(19): siRNA sense strand
ugaagaagcagaggaggaa

SEQ ID NO: 1978433 - RNA, 19 nt, Homo sapiens
  misc_RNA (1)...(19): siRNA sense strand
gaaacgaagcuuggauagu

SEQ ID NO: 1978434 - RNA, 19 nt, Homo sapiens
  misc_RNA (1)...(19): siRNA sense strand
caauguggaucgggucuuc

SEQ ID NO: 1978435 - RNA, 19 nt, Homo sapiens
  misc_RNA (1)...(19): siRNA sense strand
caagacaggaucagugcuu

SEQ ID NO: 1978436 - RNA, 19 nt, Homo sapiens
  misc_RNA (1)...(19): siRNA sense strand
gcagugagagcagaaguca

SEQ ID NO: 1978437 - RNA, 19 nt, Homo sapiens
  misc_RNA (1)...(19): siRNA sense strand
gcgaacaacagucaaaguc

SEQ ID NO: 1978438 - RNA, 19 nt, Homo sapiens
  misc_RNA (1)...(19): siRNA sense strand
ggaagaagaaauauguaac

SEQ ID NO: 1978439 - RNA, 19 nt, Homo sapiens
  misc_RNA (1)...(19): siRNA sense strand
cgagaggcugugaucaaua

SEQ ID NO: 1978440 - RNA, 19 nt, Homo sapiens
  misc_RNA (1)...(19): siRNA sense strand
ccagaggcaguucguugua

SEQ ID NO: 1978441 - RNA, 19 nt, Homo sapiens
  misc_RNA (1)...(19): siRNA sense strand
caucgagagucagauccua

SEQ ID NO: 1978442 - RNA, 19 nt, Homo sapiens
  misc_RNA (1)...(19): siRNA sense strand
gaaagaaauguugguggau

SEQ ID NO: 1978443 - RNA, 19 nt, Homo sapiens
  misc_RNA (1)...(19): siRNA sense strand
caucaaacagagcuuccua

SEQ ID NO: 1978444 - RNA, 19 nt, Homo sapiens
  misc_RNA (1)...(19): siRNA sense strand
guccaguaauggcuuucua

SEQ ID NO: 1978445 - RNA, 19 nt, Homo sapiens
  misc_RNA (1)...(19): siRNA sense strand
gaagaagaaauauguaacc

SEQ ID NO: 1978446 - RNA, 19 nt, Homo sapiens
  misc_RNA (1)...(19): siRNA sense strand
gagagugagcaguacaaga

SEQ ID NO: 1978447 - RNA, 19 nt, Homo sapiens
  misc_RNA (1)...(19): siRNA sense strand
ucgagaggcugugaucaau

SEQ ID NO: 1978448 - RNA, 19 nt, Homo sapiens
  misc_RNA (1)...(19): siRNA sense strand
gcagcuacuaugagacuug

SEQ ID NO: 1978449 - RNA, 19 nt, Homo sapiens
  misc_RNA (1)...(19): siRNA sense strand
guugguggauggacagaca

SEQ ID NO: 1978450 - RNA, 19 nt, Homo sapiens
  misc_RNA (1)...(19): siRNA sense strand
auguaacccuguccaguaa

SEQ ID NO: 1978451 - RNA, 19 nt, Homo sapiens
  misc_RNA (1)...(19): siRNA sense strand
uccaggagguggcccagaa

SEQ ID NO: 1978452 - RNA, 19 nt, Homo sapiens
  misc_RNA (1)...(19): siRNA sense strand
caccagaucagacauccaa

SEQ ID NO: 1978453 - RNA, 19 nt, Homo sapiens
  misc_RNA (1)...(19): siRNA sense strand
gguagugacuccgagaaac

SEQ ID NO: 1978454 - RNA, 19 nt, Homo sapiens
  misc_RNA (1)...(19): siRNA sense strand
gcugugcgccgacauccuu

SEQ ID NO: 1978455 - RNA, 19 nt, Homo sapiens
  misc_RNA (1)...(19): siRNA sense strand
guacgagcagcuacuguuc

SEQ ID NO: 1978456 - RNA, 19 nt, Homo sapiens
  misc_RNA (1)...(19): siRNA sense strand
agccaggaauggacuuuga

SEQ ID NO: 1978457 - RNA, 19 nt, Homo sapiens
  misc_RNA (1)...(19): siRNA sense strand
uggagaagacagagaguga

SEQ ID NO: 1978458 - RNA, 19 nt, Homo sapiens
  misc_RNA (1)...(19): siRNA sense strand
gaagaagcagaggaggaaa

SEQ ID NO: 1978459 - RNA, 19 nt, Homo sapiens
  misc_RNA (1)...(19): siRNA sense strand
uggaggaugagaacaguuu

SEQ ID NO: 1978460 - RNA, 19 nt, Homo sapiens
  misc_RNA (1)...(19): siRNA sense strand
cagcauccaggccucauug

SEQ ID NO: 1978461 - RNA, 19 nt, Homo sapiens
  misc_RNA (1)...(19): siRNA sense strand
agugagagcagaagucaga

SEQ ID NO: 1978462 - RNA, 19 nt, Homo sapiens
  misc_RNA (1)...(19): siRNA sense strand
ugggcaggcugaagaggaa

SEQ ID NO: 1978463 - RNA, 19 nt, Homo sapiens
  misc_RNA (1)...(19): siRNA sense strand
acgauuacauccacaguac

SEQ ID NO: 1978464 - RNA, 19 nt, Homo sapiens
  misc_RNA (1)...(19): siRNA sense strand
ugagacuugugcaaccuau

SEQ ID NO: 1978465 - RNA, 19 nt, Homo sapiens
  misc_RNA (1)...(19): siRNA sense strand
cagaucagacauccaaaca

SEQ ID NO: 1978466 - RNA, 19 nt, Homo sapiens
  misc_RNA (1)...(19): siRNA sense strand
gagugagcaguacaagaaa

SEQ ID NO: 1978467 - RNA, 19 nt, Homo sapiens
  misc_RNA (1)...(19): siRNA sense strand
gccaaccgcgugugggaaa

SEQ ID NO: 1978468 - RNA, 19 nt, Homo sapiens
  misc_RNA (1)...(19): siRNA sense strand
ugacggcuauuggcaacga

SEQ ID NO: 1978469 - RNA, 19 nt, Homo sapiens
  misc_RNA (1)...(19): siRNA sense strand
agucugcaaugcugugaga

SEQ ID NO: 1978470 - RNA, 19 nt, Homo sapiens
  misc_RNA (1)...(19): siRNA sense strand
cagaggcaguucguuguag

SEQ ID NO: 1978471 - RNA, 19 nt, Homo sapiens
  misc_RNA (1)...(19): siRNA sense strand
uaauggcuuucuacucuac

SEQ ID NO: 1978472 - RNA, 19 nt, Homo sapiens
  misc_RNA (1)...(19): siRNA sense strand
ugugaucaauagccaggaa

SEQ ID NO: 1978473 - RNA, 19 nt, Homo sapiens
  misc_RNA (1)...(19): siRNA sense strand
gcugcgaacaacagucaaa

SEQ ID NO: 1978474 - RNA, 19 nt, Homo sapiens
  misc_RNA (1)...(19): siRNA sense strand
ggguagugacuccgagaaa

SEQ ID NO: 1978475 - RNA, 19 nt, Homo sapiens
  misc_RNA (1)...(19): siRNA sense strand
gggccacacuagcgacuac

SEQ ID NO: 1978476 - RNA, 19 nt, Homo sapiens
  misc_RNA (1)...(19): siRNA sense strand
cagcuacuaugagacuugu

SEQ ID NO: 1978477 - RNA, 19 nt, Homo sapiens
  misc_RNA (1)...(19): siRNA sense strand
ggacuugcugcgaacaaca

SEQ ID NO: 1978478 - RNA, 19 nt, Homo sapiens
  misc_RNA (1)...(19): siRNA sense strand
gacagagagugagcaguac

SEQ ID NO: 1978479 - RNA, 19 nt, Homo sapiens
  misc_RNA (1)...(19): siRNA sense strand
gugagcaguacaagaaaga

SEQ ID NO: 1978480 - RNA, 19 nt, Homo sapiens
  misc_RNA (1)...(19): siRNA sense strand
cauccaaacaccugcugaa

SEQ ID NO: 1978481 - RNA, 19 nt, Homo sapiens
  misc_RNA (1)...(19): siRNA sense strand
ccacgugggccagcuugaa

SEQ ID NO: 1978482 - RNA, 19 nt, Homo sapiens
  misc_RNA (1)...(19): siRNA sense strand
gacaacaccauccaagacu

SEQ ID NO: 1978483 - RNA, 19 nt, Homo sapiens
  misc_RNA (1)...(19): siRNA sense strand
ugacaacaccauccaagac

SEQ ID NO: 1978484 - RNA, 19 nt, Homo sapiens
  misc_RNA (1)...(19): siRNA sense strand
gaucaauagccaggaaugg

SEQ ID NO: 1978485 - RNA, 19 nt, Homo sapiens
  misc_RNA (1)...(19): siRNA sense strand
ucaucugcaucgaguguuc

SEQ ID NO: 1978486 - RNA, 19 nt, Homo sapiens
  misc_RNA (1)...(19): siRNA sense strand
ucugugcgcggacaugaaa

SEQ ID NO: 1978487 - RNA, 19 nt, Homo sapiens
  misc_RNA (1)...(19): siRNA sense strand
gcugaagccagaccggaau

SEQ ID NO: 1978488 - RNA, 19 nt, Homo sapiens
  misc_RNA (1)...(19): siRNA sense strand
gcauuaacgggcucgucaa

SEQ ID NO: 1978489 - RNA, 19 nt, Homo sapiens
  misc_RNA (1)...(19): siRNA sense strand
aacagagcuuccuacuaaa

SEQ ID NO: 1978490 - RNA, 19 nt, Homo sapiens
  misc_RNA (1)...(19): siRNA sense strand
uggccaagcaggcucuaaa

SEQ ID NO: 1978491 - RNA, 19 nt, Homo sapiens
  misc_RNA (1)...(19): siRNA sense strand
ccaagccacucagcugcau

SEQ ID NO: 1978492 - RNA, 19 nt, Homo sapiens
  misc_RNA (1)...(19): siRNA sense strand
gcuggauacugccgaucua

SEQ ID NO: 1978493 - RNA, 19 nt, Homo sapiens
  misc_RNA (1)...(19): siRNA sense strand
gggaugaagaggacgcaua

SEQ ID NO: 1978494 - RNA, 19 nt, Homo sapiens
  misc_RNA (1)...(19): siRNA sense strand
caccaucucuggccucuac

SEQ ID NO: 1978495 - RNA, 19 nt, Homo sapiens
  misc_RNA (1)...(19): siRNA sense strand
ugccggagcuuugcuacaa

SEQ ID NO: 1978496 - RNA, 19 nt, Homo sapiens
  misc_RNA (1)...(19): siRNA sense strand
ggaugaagaggacgcauac

SEQ ID NO: 1978497 - RNA, 19 nt, Homo sapiens
  misc_RNA (1)...(19): siRNA sense strand
ggauacugccgaucuacug

SEQ ID NO: 1978498 - RNA, 19 nt, Homo sapiens
  misc_RNA (1)...(19): siRNA sense strand
ccagcaaacgcaaggaugu

SEQ ID NO: 1978499 - RNA, 19 nt, Homo sapiens
  misc_RNA (1)...(19): siRNA sense strand
gggcuggagucugggaagu

SEQ ID NO: 1978500 - RNA, 19 nt, Homo sapiens
  misc_RNA (1)...(19): siRNA sense strand
gaaagaaacuccuggaacu

SEQ ID NO: 1978501 - RNA, 19 nt, Homo sapiens
  misc_RNA (1)...(19): siRNA sense strand
cagaacaccugaacucaaa

SEQ ID NO: 1978502 - RNA, 19 nt, Homo sapiens
  misc_RNA (1)...(19): siRNA sense strand
ggaagucgaccucccagua

SEQ ID NO: 1978503 - RNA, 19 nt, Homo sapiens
  misc_RNA (1)...(19): siRNA sense strand
ggacugacuggauuucaua

SEQ ID NO: 1978504 - RNA, 19 nt, Homo sapiens
  misc_RNA (1)...(19): siRNA sense strand
ggaagaaucgcguccagaa

SEQ ID NO: 1978505 - RNA, 19 nt, Homo sapiens
  misc_RNA (1)...(19): siRNA sense strand
ugacuggauuucauacuuu

SEQ ID NO: 1978506 - RNA, 19 nt, Homo sapiens
  misc_RNA (1)...(19): siRNA sense strand
cuacagccauggcaauauu

SEQ ID NO: 1978507 - RNA, 19 nt, Homo sapiens
  misc_RNA (1)...(19): siRNA sense strand
gugaagaacugcugugaag

SEQ ID NO: 1978508 - RNA, 19 nt, Homo sapiens
  misc_RNA (1)...(19): siRNA sense strand
gaagaacugcugugaagug

SEQ ID NO: 1978509 - RNA, 19 nt, Homo sapiens
  misc_RNA (1)...(19): siRNA sense strand
ucauagaaauggagauaga

SEQ ID NO: 1978510 - RNA, 19 nt, Homo sapiens
  misc_RNA (1)...(19): siRNA sense strand
gcaauauugugaagaacug

SEQ ID NO: 1978511 - RNA, 19 nt, Homo sapiens
  misc_RNA (1)...(19): siRNA sense strand
ggaacuaccgcuacuucua

SEQ ID NO: 1978512 - RNA, 19 nt, Homo sapiens
  misc_RNA (1)...(19): siRNA sense strand
ggagauagaagcuaccaau

SEQ ID NO: 1978513 - RNA, 19 nt, Homo sapiens
  misc_RNA (1)...(19): siRNA sense strand
gagcaggaauuccaaucau

SEQ ID NO: 1978514 - RNA, 19 nt, Homo sapiens
  misc_RNA (1)...(19): siRNA sense strand
gaauuccaaucaugucugu

SEQ ID NO: 1978515 - RNA, 19 nt, Homo sapiens
  misc_RNA (1)...(19): siRNA sense strand
cagcaucugugacaacugu

SEQ ID NO: 1978516 - RNA, 19 nt, Homo sapiens
  misc_RNA (1)...(19): siRNA sense strand
ggaauuguguuggaaagag

SEQ ID NO: 1978517 - RNA, 19 nt, Homo sapiens
  misc_RNA (1)...(19): siRNA sense strand
gaacuaccgcuacuucuac

SEQ ID NO: 1978518 - RNA, 19 nt, Homo sapiens
  misc_RNA (1)...(19): siRNA sense strand
ccagauaaacaaccagauu

SEQ ID NO: 1978519 - RNA, 19 nt, Homo sapiens
  misc_RNA (1)...(19): siRNA sense strand
gaacaccugaacucaaaug

SEQ ID NO: 1978520 - RNA, 19 nt, Homo sapiens
  misc_RNA (1)...(19): siRNA sense strand
gaaauggagauagaagcua

SEQ ID NO: 1978521 - RNA, 19 nt, Homo sapiens
  misc_RNA (1)...(19): siRNA sense strand
uuggagacauugaaagaaa

SEQ ID NO: 1978522 - RNA, 19 nt, Homo sapiens
  misc_RNA (1)...(19): siRNA sense strand
cagcagcacucccgaagag

SEQ ID NO: 1978523 - RNA, 19 nt, Homo sapiens
  misc_RNA (1)...(19): siRNA sense strand
guccucauuugcuucuuua

SEQ ID NO: 1978524 - RNA, 19 nt, Homo sapiens
  misc_RNA (1)...(19): siRNA sense strand
ggacauguacacucuucuu

SEQ ID NO: 1978525 - RNA, 19 nt, Homo sapiens
  misc_RNA (1)...(19): siRNA sense strand
gacaaccaaugaagacauc

SEQ ID NO: 1978526 - RNA, 19 nt, Homo sapiens
  misc_RNA (1)...(19): siRNA sense strand
uagaaguccucauuugcuu

SEQ ID NO: 1978527 - RNA, 19 nt, Homo sapiens
  misc_RNA (1)...(19): siRNA sense strand
gcaggaauuccaaucaugu

SEQ ID NO: 1978528 - RNA, 19 nt, Homo sapiens
  misc_RNA (1)...(19): siRNA sense strand
gaagaaucgcguccagaau

SEQ ID NO: 1978529 - RNA, 19 nt, Homo sapiens
  misc_RNA (1)...(19): siRNA sense strand
caaugaagacaucaaagga

SEQ ID NO: 1978530 - RNA, 19 nt, Homo sapiens
  misc_RNA (1)...(19): siRNA sense strand
cagugacccuggagugauu

SEQ ID NO: 1978531 - RNA, 19 nt, Homo sapiens
  misc_RNA (1)...(19): siRNA sense strand
gaucauggacagggaagaa

SEQ ID NO: 1978532 - RNA, 19 nt, Homo sapiens
  misc_RNA (1)...(19): siRNA sense strand
cagauaaacaaccagauug

SEQ ID NO: 1978533 - RNA, 19 nt, Homo sapiens
  misc_RNA (1)...(19): siRNA sense strand
cgccucguaucaagaauuu

SEQ ID NO: 1978534 - RNA, 19 nt, Homo sapiens
  misc_RNA (1)...(19): siRNA sense strand
ccacagaacaccugaacuc

SEQ ID NO: 1978535 - RNA, 19 nt, Homo sapiens
  misc_RNA (1)...(19): siRNA sense strand
ugaaauacuguuacacaug

SEQ ID NO: 1978536 - RNA, 19 nt, Homo sapiens
  misc_RNA (1)...(19): siRNA sense strand
cuccauggcuacacuguug

SEQ ID NO: 1978537 - RNA, 19 nt, Homo sapiens
  misc_RNA (1)...(19): siRNA sense strand
gaggaacuaccgcuacuuc

SEQ ID NO: 1978538 - RNA, 19 nt, Homo sapiens
  misc_RNA (1)...(19): siRNA sense strand
ggagcaggaauuccaauca

SEQ ID NO: 1978539 - RNA, 19 nt, Homo sapiens
  misc_RNA (1)...(19): siRNA sense strand
gagauagaagcuaccaaug

SEQ ID NO: 1978540 - RNA, 19 nt, Homo sapiens
  misc_RNA (1)...(19): siRNA sense strand
gaagucgaccucccaguac

SEQ ID NO: 1978541 - RNA, 19 nt, Homo sapiens
  misc_RNA (1)...(19): siRNA sense strand
agaaacuccuggaacuguu

SEQ ID NO: 1978542 - RNA, 19 nt, Homo sapiens
  misc_RNA (1)...(19): siRNA sense strand
uuucuucucucguguaauc

SEQ ID NO: 1978543 - RNA, 19 nt, Homo sapiens
  misc_RNA (1)...(19): siRNA sense strand
ucaaccagacaaccaauga

SEQ ID NO: 1978544 - RNA, 19 nt, Homo sapiens
  misc_RNA (1)...(19): siRNA sense strand
gggacugacuggauuucau

SEQ ID NO: 1978545 - RNA, 19 nt, Homo sapiens
  misc_RNA (1)...(19): siRNA sense strand
gaaggugacacggaaaugg

SEQ ID NO: 1978546 - RNA, 19 nt, Homo sapiens
  misc_RNA (1)...(19): siRNA sense strand
guucuagaaguccucauuu

SEQ ID NO: 1978547 - RNA, 19 nt, Homo sapiens
  misc_RNA (1)...(19): siRNA sense strand
gaaacugaaauacuguuac

SEQ ID NO: 1978548 - RNA, 19 nt, Homo sapiens
  misc_RNA (1)...(19): siRNA sense strand
gacuggauuucauacuuuc

SEQ ID NO: 1978549 - RNA, 19 nt, Homo sapiens
  misc_RNA (1)...(19): siRNA sense strand
cugacuggauuucauacuu

SEQ ID NO: 1978550 - RNA, 19 nt, Homo sapiens
  misc_RNA (1)...(19): siRNA sense strand
ccaaugaagacaucaaagg

SEQ ID NO: 1978551 - RNA, 19 nt, Homo sapiens
  misc_RNA (1)...(19): siRNA sense strand
caaccagacaaccaaugaa

SEQ ID NO: 1978552 - RNA, 19 nt, Homo sapiens
  misc_RNA (1)...(19): siRNA sense strand
gccgcuaccuggcuguuca

SEQ ID NO: 1978553 - RNA, 19 nt, Homo sapiens
  misc_RNA (1)...(19): siRNA sense strand
gcagcacucccgaagagau

SEQ ID NO: 1978554 - RNA, 19 nt, Homo sapiens
  misc_RNA (1)...(19): siRNA sense strand
caaccagauugugaaacug

SEQ ID NO: 1978555 - RNA, 19 nt, Homo sapiens
  misc_RNA (1)...(19): siRNA sense strand
aagaaucgcguccagaauc

SEQ ID NO: 1978556 - RNA, 19 nt, Homo sapiens
  misc_RNA (1)...(19): siRNA sense strand
cugaaauacuguuacacau

SEQ ID NO: 1978557 - RNA, 19 nt, Homo sapiens
  misc_RNA (1)...(19): siRNA sense strand
gaagacaucaaaggaucau

SEQ ID NO: 1978558 - RNA, 19 nt, Homo sapiens
  misc_RNA (1)...(19): siRNA sense strand
gacauguacacucuucuuc

SEQ ID NO: 1978559 - RNA, 19 nt, Homo sapiens
  misc_RNA (1)...(19): siRNA sense strand
acagaacaccugaacucaa

SEQ ID NO: 1978560 - RNA, 19 nt, Homo sapiens
  misc_RNA (1)...(19): siRNA sense strand
caaccaaugaagacaucaa

SEQ ID NO: 1978561 - RNA, 19 nt, Homo sapiens
  misc_RNA (1)...(19): siRNA sense strand
aguccucauuugcuucuuu

SEQ ID NO: 1978562 - RNA, 19 nt, Homo sapiens
  misc_RNA (1)...(19): siRNA sense strand
ugucuucgccuucaacauc

SEQ ID NO: 1978563 - RNA, 19 nt, Homo sapiens
  misc_RNA (1)...(19): siRNA sense strand
uugugaaacugaaauacug

SEQ ID NO: 1978564 - RNA, 19 nt, Homo sapiens
  misc_RNA (1)...(19): siRNA sense strand
ugaugguggugagaaagaa

SEQ ID NO: 1978565 - RNA, 19 nt, Homo sapiens
  misc_RNA (1)...(19): siRNA sense strand
gaacaccuuuugcugugau

SEQ ID NO: 1978566 - RNA, 19 nt, Homo sapiens
  misc_RNA (1)...(19): siRNA sense strand
agauagaagcuaccaaugg

SEQ ID NO: 1978567 - RNA, 19 nt, Homo sapiens
  misc_RNA (1)...(19): siRNA sense strand
cgaccaccgccucguauca

SEQ ID NO: 1978568 - RNA, 19 nt, Homo sapiens
  misc_RNA (1)...(19): siRNA sense strand
auguggcccucaaaucuuu

SEQ ID NO: 1978569 - RNA, 19 nt, Homo sapiens
  misc_RNA (1)...(19): siRNA sense strand
gaccaccgccucguaucaa

SEQ ID NO: 1978570 - RNA, 19 nt, Homo sapiens
  misc_RNA (1)...(19): siRNA sense strand
cauagaaauggagauagaa

SEQ ID NO: 1978571 - RNA, 19 nt, Homo sapiens
  misc_RNA (1)...(19): siRNA sense strand
auggcaauauugugaagaa

SEQ ID NO: 1978572 - RNA, 19 nt, Homo sapiens
  misc_RNA (1)...(19): siRNA sense strand
uucuagaaguccucauuug

SEQ ID NO: 1978573 - RNA, 19 nt, Homo sapiens
  misc_RNA (1)...(19): siRNA sense strand
cuauguggcccucaaaucu

SEQ ID NO: 1978574 - RNA, 19 nt, Homo sapiens
  misc_RNA (1)...(19): siRNA sense strand
cuacuucuaccucuucauc

SEQ ID NO: 1978575 - RNA, 19 nt, Homo sapiens
  misc_RNA (1)...(19): siRNA sense strand
gugaugguggugagaaaga

SEQ ID NO: 1978576 - RNA, 19 nt, Homo sapiens
  misc_RNA (1)...(19): siRNA sense strand
acacggaaaugggagaaac

SEQ ID NO: 1978577 - RNA, 19 nt, Homo sapiens
  misc_RNA (1)...(19): siRNA sense strand
guaucaagaauuuccagau

SEQ ID NO: 1978578 - RNA, 19 nt, Homo sapiens
  misc_RNA (1)...(19): siRNA sense strand
ccucacaaucuaugucuuc

SEQ ID NO: 1978579 - RNA, 19 nt, Homo sapiens
  misc_RNA (1)...(19): siRNA sense strand
ccauggcaauauugugaag

SEQ ID NO: 1978580 - RNA, 19 nt, Homo sapiens
  misc_RNA (1)...(19): siRNA sense strand
gacaucaaaggaucaugga

SEQ ID NO: 1978581 - RNA, 19 nt, Homo sapiens
  misc_RNA (1)...(19): siRNA sense strand
ccagacaaccaaugaagac

SEQ ID NO: 1978582 - RNA, 19 nt, Homo sapiens
  misc_RNA (1)...(19): siRNA sense strand
ucgugggacugacuggauu

SEQ ID NO: 1978583 - RNA, 19 nt, Homo sapiens
  misc_RNA (1)...(19): siRNA sense strand
gcugccaugcucuuccuuu

SEQ ID NO: 1978584 - RNA, 19 nt, Homo sapiens
  misc_RNA (1)...(19): siRNA sense strand
ccagauugugaaacugaaa

SEQ ID NO: 1978585 - RNA, 19 nt, Homo sapiens
  misc_RNA (1)...(19): siRNA sense strand
gcagaaagcacagaugauu

SEQ ID NO: 1978586 - RNA, 19 nt, Homo sapiens
  misc_RNA (1)...(19): siRNA sense strand
gggcaggaaugucgggaua

SEQ ID NO: 1978587 - RNA, 19 nt, Homo sapiens
  misc_RNA (1)...(19): siRNA sense strand
ggacaaacacagcguaugu

SEQ ID NO: 1978588 - RNA, 19 nt, Homo sapiens
  misc_RNA (1)...(19): siRNA sense strand
aagaagaacugguuugauc

SEQ ID NO: 1978589 - RNA, 19 nt, Homo sapiens
  misc_RNA (1)...(19): siRNA sense strand
ccaauggacugcaucaaca

SEQ ID NO: 1978590 - RNA, 19 nt, Homo sapiens
  misc_RNA (1)...(19): siRNA sense strand
ggaagaagaacugguuuga

SEQ ID NO: 1978591 - RNA, 19 nt, Homo sapiens
  misc_RNA (1)...(19): siRNA sense strand
gaccagacucggcagaaua

SEQ ID NO: 1978592 - RNA, 19 nt, Homo sapiens
  misc_RNA (1)...(19): siRNA sense strand
gaaauuuacacuccaagau

SEQ ID NO: 1978593 - RNA, 19 nt, Homo sapiens
  misc_RNA (1)...(19): siRNA sense strand
ggccuuagggucucuauuu

SEQ ID NO: 1978594 - RNA, 19 nt, Homo sapiens
  misc_RNA (1)...(19): siRNA sense strand
auggucaccugaucuauua

SEQ ID NO: 1978595 - RNA, 19 nt, Homo sapiens
  misc_RNA (1)...(19): siRNA sense strand
caccugaucuauuaugaug

SEQ ID NO: 1978596 - RNA, 19 nt, Homo sapiens
  misc_RNA (1)...(19): siRNA sense strand
cgagagcgcuaucgagaca

SEQ ID NO: 1978597 - RNA, 19 nt, Homo sapiens
  misc_RNA (1)...(19): siRNA sense strand
uugaagcgcuggaagaaga

SEQ ID NO: 1978598 - RNA, 19 nt, Homo sapiens
  misc_RNA (1)...(19): siRNA sense strand
gauggucaccugaucuauu

SEQ ID NO: 1978599 - RNA, 19 nt, Homo sapiens
  misc_RNA (1)...(19): siRNA sense strand
ggaaauuuacacuccaaga

SEQ ID NO: 1978600 - RNA, 19 nt, Homo sapiens
  misc_RNA (1)...(19): siRNA sense strand
ggaaaacaauuagucuuug

SEQ ID NO: 1978601 - RNA, 19 nt, Homo sapiens
  misc_RNA (1)...(19): siRNA sense strand
guacccauaugcaggacuu

SEQ ID NO: 1978602 - RNA, 19 nt, Homo sapiens
  misc_RNA (1)...(19): siRNA sense strand
gaagaagaacugguuugau

SEQ ID NO: 1978603 - RNA, 19 nt, Homo sapiens
  misc_RNA (1)...(19): siRNA sense strand
gaagaacugguuugaucug

SEQ ID NO: 1978604 - RNA, 19 nt, Homo sapiens
  misc_RNA (1)...(19): siRNA sense strand
cagauuguuugucgagaug

SEQ ID NO: 1978605 - RNA, 19 nt, Homo sapiens
  misc_RNA (1)...(19): siRNA sense strand
ugcuuggccuggaaauuua

SEQ ID NO: 1978606 - RNA, 19 nt, Homo sapiens
  misc_RNA (1)...(19): siRNA sense strand
ccagauuguuugucgagau

SEQ ID NO: 1978607 - RNA, 19 nt, Homo sapiens
  misc_RNA (1)...(19): siRNA sense strand
gcuggaagaagaacugguu

SEQ ID NO: 1978608 - RNA, 19 nt, Homo sapiens
  misc_RNA (1)...(19): siRNA sense strand
gcaggaaugucgggauacu

SEQ ID NO: 1978609 - RNA, 19 nt, Homo sapiens
  misc_RNA (1)...(19): siRNA sense strand
gggaaaacaauuagucuuu

SEQ ID NO: 1978610 - RNA, 19 nt, Homo sapiens
  misc_RNA (1)...(19): siRNA sense strand
aauuuacacuccaagauuc

SEQ ID NO: 1978611 - RNA, 19 nt, Homo sapiens
  misc_RNA (1)...(19): siRNA sense strand
cagaaagcacagaugauug

SEQ ID NO: 1978612 - RNA, 19 nt, Homo sapiens
  misc_RNA (1)...(19): siRNA sense strand
cgagaugggaaaacaauua

SEQ ID NO: 1978613 - RNA, 19 nt, Homo sapiens
  misc_RNA (1)...(19): siRNA sense strand
uaugugggcucugcaguca

SEQ ID NO: 1978614 - RNA, 19 nt, Homo sapiens
  misc_RNA (1)...(19): siRNA sense strand
cgacagaguacuauuuuga

SEQ ID NO: 1978615 - RNA, 19 nt, Homo sapiens
  misc_RNA (1)...(19): siRNA sense strand
cgaaugggcaggcguaugc

SEQ ID NO: 1978616 - RNA, 19 nt, Homo sapiens
  misc_RNA (1)...(19): siRNA sense strand
uugcuuggccuggaaauuu

SEQ ID NO: 1978617 - RNA, 19 nt, Homo sapiens
  misc_RNA (1)...(19): siRNA sense strand
ugaccagacucggcagaau

SEQ ID NO: 1978618 - RNA, 19 nt, Homo sapiens
  misc_RNA (1)...(19): siRNA sense strand
gucaccugaucuauuauga

SEQ ID NO: 1978619 - RNA, 19 nt, Homo sapiens
  misc_RNA (1)...(19): siRNA sense strand
ugugggcucugcagucaug

SEQ ID NO: 1978620 - RNA, 19 nt, Homo sapiens
  misc_RNA (1)...(19): siRNA sense strand
gcuaaccaagucaucauuc

SEQ ID NO: 1978621 - RNA, 19 nt, Homo sapiens
  misc_RNA (1)...(19): siRNA sense strand
ggucaccugaucuauuaug

SEQ ID NO: 1978622 - RNA, 19 nt, Homo sapiens
  misc_RNA (1)...(19): siRNA sense strand
cccugaggcuuauggcuau

SEQ ID NO: 1978623 - RNA, 19 nt, Homo sapiens
  misc_RNA (1)...(19): siRNA sense strand
cugcgacagaguacuauuu

SEQ ID NO: 1978624 - RNA, 19 nt, Homo sapiens
  misc_RNA (1)...(19): siRNA sense strand
uaaccaagucaucauucga

SEQ ID NO: 1978625 - RNA, 19 nt, Homo sapiens
  misc_RNA (1)...(19): siRNA sense strand
cggauggucaccugaucua

SEQ ID NO: 1978626 - RNA, 19 nt, Homo sapiens
  misc_RNA (1)...(19): siRNA sense strand
gccaauggacugcaucaac

SEQ ID NO: 1978627 - RNA, 19 nt, Homo sapiens
  misc_RNA (1)...(19): siRNA sense strand
ccugaucuauuaugaugac

SEQ ID NO: 1978628 - RNA, 19 nt, Homo sapiens
  misc_RNA (1)...(19): siRNA sense strand
agaaagcacagaugauugc

SEQ ID NO: 1978629 - RNA, 19 nt, Homo sapiens
  misc_RNA (1)...(19): siRNA sense strand
gacagaagcugcucaguug

SEQ ID NO: 1978630 - RNA, 19 nt, Homo sapiens
  misc_RNA (1)...(19): siRNA sense strand
gaacugaacccuaaagaug

SEQ ID NO: 1978631 - RNA, 19 nt, Homo sapiens
  misc_RNA (1)...(19): siRNA sense strand
gaaaugccuugguaucaaa

SEQ ID NO: 1978632 - RNA, 19 nt, Homo sapiens
  misc_RNA (1)...(19): siRNA sense strand
caauugaacugaacccuaa

SEQ ID NO: 1978633 - RNA, 19 nt, Homo sapiens
  misc_RNA (1)...(19): siRNA sense strand
gcaaaugcauauaucauca

SEQ ID NO: 1978634 - RNA, 19 nt, Homo sapiens
  misc_RNA (1)...(19): siRNA sense strand
ggaaagacauacuugaaac

SEQ ID NO: 1978635 - RNA, 19 nt, Homo sapiens
  misc_RNA (1)...(19): siRNA sense strand
agccaaaguugaagaaaua

SEQ ID NO: 1978636 - RNA, 19 nt, Homo sapiens
  misc_RNA (1)...(19): siRNA sense strand
aagugaagaugcagaguua

SEQ ID NO: 1978637 - RNA, 19 nt, Homo sapiens
  misc_RNA (1)...(19): siRNA sense strand
caauucaccuuauggguau

SEQ ID NO: 1978638 - RNA, 19 nt, Homo sapiens
  misc_RNA (1)...(19): siRNA sense strand
guaugaagcccuagaguau

SEQ ID NO: 1978639 - RNA, 19 nt, Homo sapiens
  misc_RNA (1)...(19): siRNA sense strand
gaaagcaauugaacugaac

SEQ ID NO: 1978640 - RNA, 19 nt, Homo sapiens
  misc_RNA (1)...(19): siRNA sense strand
uuagugauguuggagauua

SEQ ID NO: 1978641 - RNA, 19 nt, Homo sapiens
  misc_RNA (1)...(19): siRNA sense strand
cagaacaaguggauccaaa

SEQ ID NO: 1978642 - RNA, 19 nt, Homo sapiens
  misc_RNA (1)...(19): siRNA sense strand
cgaaaugccuugguaucaa

SEQ ID NO: 1978643 - RNA, 19 nt, Homo sapiens
  misc_RNA (1)...(19): siRNA sense strand
agaggaggauaaacagaua

SEQ ID NO: 1978644 - RNA, 19 nt, Homo sapiens
  misc_RNA (1)...(19): siRNA sense strand
ucucagcuuugucguauuu

SEQ ID NO: 1978645 - RNA, 19 nt, Homo sapiens
  misc_RNA (1)...(19): siRNA sense strand
caaggaaagugaagaugca

SEQ ID NO: 1978646 - RNA, 19 nt, Homo sapiens
  misc_RNA (1)...(19): siRNA sense strand
agaaagcaauugaacugaa

SEQ ID NO: 1978647 - RNA, 19 nt, Homo sapiens
  misc_RNA (1)...(19): siRNA sense strand
gcagacuaccuguaugaaa

SEQ ID NO: 1978648 - RNA, 19 nt, Homo sapiens
  misc_RNA (1)...(19): siRNA sense strand
gaaagcggagaaacagaaa

SEQ ID NO: 1978649 - RNA, 19 nt, Homo sapiens
  misc_RNA (1)...(19): siRNA sense strand
cagacuaccuguaugaaag

SEQ ID NO: 1978650 - RNA, 19 nt, Homo sapiens
  misc_RNA (1)...(19): siRNA sense strand
cccaggaacuuucaacaga

SEQ ID NO: 1978651 - RNA, 19 nt, Homo sapiens
  misc_RNA (1)...(19): siRNA sense strand
cuacuucaauucaccuuau

SEQ ID NO: 1978652 - RNA, 19 nt, Homo sapiens
  misc_RNA (1)...(19): siRNA sense strand
gcaaucugccuuagugaug

SEQ ID NO: 1978653 - RNA, 19 nt, Homo sapiens
  misc_RNA (1)...(19): siRNA sense strand
cuaaagaugcuacuucaau

SEQ ID NO: 1978654 - RNA, 19 nt, Homo sapiens
  misc_RNA (1)...(19): siRNA sense strand
auaaacagauacagacaga

SEQ ID NO: 1978655 - RNA, 19 nt, Homo sapiens
  misc_RNA (1)...(19): siRNA sense strand
gaggauaaacagauacaga

SEQ ID NO: 1978656 - RNA, 19 nt, Homo sapiens
  misc_RNA (1)...(19): siRNA sense strand
cagccaaaguugaagaaau

SEQ ID NO: 1978657 - RNA, 19 nt, Homo sapiens
  misc_RNA (1)...(19): siRNA sense strand
gcugcuuucuggcuaauga

SEQ ID NO: 1978658 - RNA, 19 nt, Homo sapiens
  misc_RNA (1)...(19): siRNA sense strand
ucacagggcagaacaagug

SEQ ID NO: 1978659 - RNA, 19 nt, Homo sapiens
  misc_RNA (1)...(19): siRNA sense strand
agacauacuugaaacuaca

SEQ ID NO: 1978660 - RNA, 19 nt, Homo sapiens
  misc_RNA (1)...(19): siRNA sense strand
uaugcaaucugccuuagug

SEQ ID NO: 1978661 - RNA, 19 nt, Homo sapiens
  misc_RNA (1)...(19): siRNA sense strand
cucaguugcuuacaaguuu

SEQ ID NO: 1978662 - RNA, 19 nt, Homo sapiens
  misc_RNA (1)...(19): siRNA sense strand
acacagaggaggauaaaca

SEQ ID NO: 1978663 - RNA, 19 nt, Homo sapiens
  misc_RNA (1)...(19): siRNA sense strand
ugaaagcggagaaacagaa

SEQ ID NO: 1978664 - RNA, 19 nt, Homo sapiens
  misc_RNA (1)...(19): siRNA sense strand
agacagaagcugcucaguu

SEQ ID NO: 1978665 - RNA, 19 nt, Homo sapiens
  misc_RNA (1)...(19): siRNA sense strand
augcauauaucaucaagga

SEQ ID NO: 1978666 - RNA, 19 nt, Homo sapiens
  misc_RNA (1)...(19): siRNA sense strand
gaagaugcagaguuacugu

SEQ ID NO: 1978667 - RNA, 19 nt, Homo sapiens
  misc_RNA (1)...(19): siRNA sense strand
gagaaagcaauugaacuga

SEQ ID NO: 1978668 - RNA, 19 nt, Homo sapiens
  misc_RNA (1)...(19): siRNA sense strand
caagcagacuaccuguaug

SEQ ID NO: 1978669 - RNA, 19 nt, Homo sapiens
  misc_RNA (1)...(19): siRNA sense strand
uaaugaaagccaaggacua

SEQ ID NO: 1978670 - RNA, 19 nt, Homo sapiens
  misc_RNA (1)...(19): siRNA sense strand
gaacaaguggauccaaacu

SEQ ID NO: 1978671 - RNA, 19 nt, Homo sapiens
  misc_RNA (1)...(19): siRNA sense strand
ugagaaagcaauugaacug

SEQ ID NO: 1978672 - RNA, 19 nt, Homo sapiens
  misc_RNA (1)...(19): siRNA sense strand
acaagcagacuaccuguau

SEQ ID NO: 1978673 - RNA, 19 nt, Homo sapiens
  misc_RNA (1)...(19): siRNA sense strand
gcucaguugcuuacaaguu

SEQ ID NO: 1978674 - RNA, 19 nt, Homo sapiens
  misc_RNA (1)...(19): siRNA sense strand
caaggagcauuuugagaaa

SEQ ID NO: 1978675 - RNA, 19 nt, Homo sapiens
  misc_RNA (1)...(19): siRNA sense strand
uagcagaaccucagaagag

SEQ ID NO: 1978676 - RNA, 19 nt, Homo sapiens
  misc_RNA (1)...(19): siRNA sense strand
uuugaaacuuaccagguua

SEQ ID NO: 1978677 - RNA, 19 nt, Homo sapiens
  misc_RNA (1)...(19): siRNA sense strand
gaaagacauacuugaaacu

SEQ ID NO: 1978678 - RNA, 19 nt, Homo sapiens
  misc_RNA (1)...(19): siRNA sense strand
uaggaaagacauacuugaa

SEQ ID NO: 1978679 - RNA, 19 nt, Homo sapiens
  misc_RNA (1)...(19): siRNA sense strand
cagaguuacuguggcguuu

SEQ ID NO: 1978680 - RNA, 19 nt, Homo sapiens
  misc_RNA (1)...(19): siRNA sense strand
uguaugaagcccuagagua

SEQ ID NO: 1978681 - RNA, 19 nt, Homo sapiens
  misc_RNA (1)...(19): siRNA sense strand
aaacagauacagacagaag

SEQ ID NO: 1978682 - RNA, 19 nt, Homo sapiens
  misc_RNA (1)...(19): siRNA sense strand
gcacacacagaggaggaua

SEQ ID NO: 1978683 - RNA, 19 nt, Homo sapiens
  misc_RNA (1)...(19): siRNA sense strand
gcuucgagguaaugggaaa

SEQ ID NO: 1978684 - RNA, 19 nt, Homo sapiens
  misc_RNA (1)...(19): siRNA sense strand
gcugcucaguugcuuacaa

SEQ ID NO: 1978685 - RNA, 19 nt, Homo sapiens
  misc_RNA (1)...(19): siRNA sense strand
guaugaaagcggagaaaca

SEQ ID NO: 1978686 - RNA, 19 nt, Homo sapiens
  misc_RNA (1)...(19): siRNA sense strand
cuuacaaguuucagugaga

SEQ ID NO: 1978687 - RNA, 19 nt, Homo sapiens
  misc_RNA (1)...(19): siRNA sense strand
caaucugccuuagugaugu

SEQ ID NO: 1978688 - RNA, 19 nt, Homo sapiens
  misc_RNA (1)...(19): siRNA sense strand
uuacaaguuucagugagaa

SEQ ID NO: 1978689 - RNA, 19 nt, Homo sapiens
  misc_RNA (1)...(19): siRNA sense strand
augaaggcaucaaggcuaa

SEQ ID NO: 1978690 - RNA, 19 nt, Homo sapiens
  misc_RNA (1)...(19): siRNA sense strand
cccuaaagaugcuacuuca

SEQ ID NO: 1978691 - RNA, 19 nt, Homo sapiens
  misc_RNA (1)...(19): siRNA sense strand
ggauaaacagauacagaca

SEQ ID NO: 1978692 - RNA, 19 nt, Homo sapiens
  misc_RNA (1)...(19): siRNA sense strand
aggaaagacauacuugaaa

SEQ ID NO: 1978693 - RNA, 19 nt, Homo sapiens
  misc_RNA (1)...(19): siRNA sense strand
aagcagacuaccuguauga

SEQ ID NO: 1978694 - RNA, 19 nt, Homo sapiens
  misc_RNA (1)...(19): siRNA sense strand
acucucagcuuugucguau

SEQ ID NO: 1978695 - RNA, 19 nt, Homo sapiens
  misc_RNA (1)...(19): siRNA sense strand
ggacuauccagcacacaca

SEQ ID NO: 1978696 - RNA, 19 nt, Homo sapiens
  misc_RNA (1)...(19): siRNA sense strand
uugccgaaaugccuuggua

SEQ ID NO: 1978697 - RNA, 19 nt, Homo sapiens
  misc_RNA (1)...(19): siRNA sense strand
aaagugaagaugcagaguu

SEQ ID NO: 1978698 - RNA, 19 nt, Homo sapiens
  misc_RNA (1)...(19): siRNA sense strand
gaguuacuguggcguuugg

SEQ ID NO: 1978699 - RNA, 19 nt, Homo sapiens
  misc_RNA (1)...(19): siRNA sense strand
caaguuucagugagaagaa

SEQ ID NO: 1978700 - RNA, 19 nt, Homo sapiens
  misc_RNA (1)...(19): siRNA sense strand
cagaggaggauaaacagau

SEQ ID NO: 1978701 - RNA, 19 nt, Homo sapiens
  misc_RNA (1)...(19): siRNA sense strand
cccaauacaaggaaaguga

SEQ ID NO: 1978702 - RNA, 19 nt, Homo sapiens
  misc_RNA (1)...(19): siRNA sense strand
aaugaaagccaaggacuau

SEQ ID NO: 1978703 - RNA, 19 nt, Homo sapiens
  misc_RNA (1)...(19): siRNA sense strand
gccuugguaucaaagaaga

SEQ ID NO: 1978704 - RNA, 19 nt, Homo sapiens
  misc_RNA (1)...(19): siRNA sense strand
aaagaugcuacuucaauuc

SEQ ID NO: 1978705 - RNA, 19 nt, Homo sapiens
  misc_RNA (1)...(19): siRNA sense strand
aaacuuaccagguuaucuc

SEQ ID NO: 1978706 - RNA, 19 nt, Homo sapiens
  misc_RNA (1)...(19): siRNA sense strand
gguaugcaaucugccuuag

SEQ ID NO: 1978707 - RNA, 19 nt, Homo sapiens
  misc_RNA (1)...(19): siRNA sense strand
ccaauacaaggaaagugaa

SEQ ID NO: 1978708 - RNA, 19 nt, Homo sapiens
  misc_RNA (1)...(19): siRNA sense strand
uugcaucucauaaguggua

SEQ ID NO: 1978709 - RNA, 19 nt, Homo sapiens
  misc_RNA (1)...(19): siRNA sense strand
cuuaccagguuaucucuca

SEQ ID NO: 1978710 - RNA, 19 nt, Homo sapiens
  misc_RNA (1)...(19): siRNA sense strand
acacacagaggaggauaaa

SEQ ID NO: 1978711 - RNA, 19 nt, Homo sapiens
  misc_RNA (1)...(19): siRNA sense strand
caacagaggccuuuuacuc

SEQ ID NO: 1978712 - RNA, 19 nt, Homo sapiens
  misc_RNA (1)...(19): siRNA sense strand
ccuccuaguuccaccuaug

SEQ ID NO: 1978713 - RNA, 19 nt, Homo sapiens
  misc_RNA (1)...(19): siRNA sense strand
gcuaacccaauacaaggaa

SEQ ID NO: 1978714 - RNA, 19 nt, Homo sapiens
  misc_RNA (1)...(19): siRNA sense strand
ccacagccaaaguugaaga

SEQ ID NO: 1978715 - RNA, 19 nt, Homo sapiens
  misc_RNA (1)...(19): siRNA sense strand
acuugaaacuacacaacaa

SEQ ID NO: 1978716 - RNA, 19 nt, Homo sapiens
  misc_RNA (1)...(19): siRNA sense strand
gcuacuucaauucaccuua

SEQ ID NO: 1978717 - RNA, 19 nt, Homo sapiens
  misc_RNA (1)...(19): siRNA sense strand
ccgaaaugccuugguauca

SEQ ID NO: 1978718 - RNA, 19 nt, Homo sapiens
  misc_RNA (1)...(19): siRNA sense strand
ccaaacuucuacagcaaaa

SEQ ID NO: 1978719 - RNA, 19 nt, Homo sapiens
  misc_RNA (1)...(19): siRNA sense strand
caucaaggcuaaaauugca

SEQ ID NO: 1978720 - RNA, 19 nt, Homo sapiens
  misc_RNA (1)...(19): siRNA sense strand
aucaguugcuaacccaaua

SEQ ID NO: 1978721 - RNA, 19 nt, Homo sapiens
  misc_RNA (1)...(19): siRNA sense strand
gaaacuuaccagguuaucu

SEQ ID NO: 1978722 - RNA, 19 nt, Homo sapiens
  misc_RNA (1)...(19): siRNA sense strand
uguggcgccuucugccuuu

SEQ ID NO: 1978723 - RNA, 19 nt, Homo sapiens
  misc_RNA (1)...(19): siRNA sense strand
gcagaacaaguggauccaa

SEQ ID NO: 1978724 - RNA, 19 nt, Homo sapiens
  misc_RNA (1)...(19): siRNA sense strand
auggguauuuggugcuaua

SEQ ID NO: 1978725 - RNA, 19 nt, Homo sapiens
  misc_RNA (1)...(19): siRNA sense strand
gcuaaaaugcuguuugcaa

SEQ ID NO: 1978726 - RNA, 19 nt, Homo sapiens
  misc_RNA (1)...(19): siRNA sense strand
uuaggaaagacauacuuga

SEQ ID NO: 1978727 - RNA, 19 nt, Homo sapiens
  misc_RNA (1)...(19): siRNA sense strand
cuaacccaauacaaggaaa

SEQ ID NO: 1978728 - RNA, 19 nt, Homo sapiens
  misc_RNA (1)...(19): siRNA sense strand
cuaguuccaccuaugagaa

SEQ ID NO: 1978729 - RNA, 19 nt, Homo sapiens
  misc_RNA (1)...(19): siRNA sense strand
gagcuuugaucaagaauuu

SEQ ID NO: 1978730 - RNA, 19 nt, Homo sapiens
  misc_RNA (1)...(19): siRNA sense strand
gaugguggauuucuuuauu

SEQ ID NO: 1978731 - RNA, 19 nt, Homo sapiens
  misc_RNA (1)...(19): siRNA sense strand
uggcagagaugguggauuu

SEQ ID NO: 1978732 - RNA, 19 nt, Homo sapiens
  misc_RNA (1)...(19): siRNA sense strand
ucgaacagcuuaugacauu

SEQ ID NO: 1978733 - RNA, 19 nt, Homo sapiens
  misc_RNA (1)...(19): siRNA sense strand
agaaauagaugaagacaca

SEQ ID NO: 1978734 - RNA, 19 nt, Homo sapiens
  misc_RNA (1)...(19): siRNA sense strand
aaggauaucucuaaguuug

SEQ ID NO: 1978735 - RNA, 19 nt, Homo sapiens
  misc_RNA (1)...(19): siRNA sense strand
gcaggcagagaauauguua

SEQ ID NO: 1978736 - RNA, 19 nt, Homo sapiens
  misc_RNA (1)...(19): siRNA sense strand
accauugucuuaagcauua

SEQ ID NO: 1978737 - RNA, 19 nt, Homo sapiens
  misc_RNA (1)...(19): siRNA sense strand
gaacagcuuaugacauugu

SEQ ID NO: 1978738 - RNA, 19 nt, Homo sapiens
  misc_RNA (1)...(19): siRNA sense strand
acacaucaauggaagacuu

SEQ ID NO: 1978739 - RNA, 19 nt, Homo sapiens
  misc_RNA (1)...(19): siRNA sense strand
ucagugggauaaaggauau

SEQ ID NO: 1978740 - RNA, 19 nt, Homo sapiens
  misc_RNA (1)...(19): siRNA sense strand
ugagauaauuugcauuugg

SEQ ID NO: 1978741 - RNA, 19 nt, Homo sapiens
  misc_RNA (1)...(19): siRNA sense strand
gagaugguggauuucuuua

SEQ ID NO: 1978742 - RNA, 19 nt, Homo sapiens
  misc_RNA (1)...(19): siRNA sense strand
cuaaguuugcuaugcauua

SEQ ID NO: 1978743 - RNA, 19 nt, Homo sapiens
  misc_RNA (1)...(19): siRNA sense strand
ggauuucuuuauucucuuc

SEQ ID NO: 1978744 - RNA, 19 nt, Homo sapiens
  misc_RNA (1)...(19): siRNA sense strand
gugauuccuuccucaaaug

SEQ ID NO: 1978745 - RNA, 19 nt, Homo sapiens
  misc_RNA (1)...(19): siRNA sense strand
gcaccucagugggauaaag

SEQ ID NO: 1978746 - RNA, 19 nt, Homo sapiens
  misc_RNA (1)...(19): siRNA sense strand
gcauuacaacguccacuau

SEQ ID NO: 1978747 - RNA, 19 nt, Homo sapiens
  misc_RNA (1)...(19): siRNA sense strand
cgaguugugacaugugaua

SEQ ID NO: 1978748 - RNA, 19 nt, Homo sapiens
  misc_RNA (1)...(19): siRNA sense strand
gaagaaauagaugaagaca

SEQ ID NO: 1978749 - RNA, 19 nt, Homo sapiens
  misc_RNA (1)...(19): siRNA sense strand
ugaagacacaucaauggaa

SEQ ID NO: 1978750 - RNA, 19 nt, Homo sapiens
  misc_RNA (1)...(19): siRNA sense strand
cagagaugguggauuucuu

SEQ ID NO: 1978751 - RNA, 19 nt, Homo sapiens
  misc_RNA (1)...(19): siRNA sense strand
uauccgagcuuugaucaag

SEQ ID NO: 1978752 - RNA, 19 nt, Homo sapiens
  misc_RNA (1)...(19): siRNA sense strand
guggauuucuuuauucucu

SEQ ID NO: 1978753 - RNA, 19 nt, Homo sapiens
  misc_RNA (1)...(19): siRNA sense strand
aaaagcaaccauugucuua

SEQ ID NO: 1978754 - RNA, 19 nt, Homo sapiens
  misc_RNA (1)...(19): siRNA sense strand
auuccuuccucaaauguua

SEQ ID NO: 1978755 - RNA, 19 nt, Homo sapiens
  misc_RNA (1)...(19): siRNA sense strand
aagcaaccauugucuuaag

SEQ ID NO: 1978756 - RNA, 19 nt, Homo sapiens
  misc_RNA (1)...(19): siRNA sense strand
agagaugguggauuucuuu

SEQ ID NO: 1978757 - RNA, 19 nt, Homo sapiens
  misc_RNA (1)...(19): siRNA sense strand
gaugguuguggcacuuaua

SEQ ID NO: 1978758 - RNA, 19 nt, Homo sapiens
  misc_RNA (1)...(19): siRNA sense strand
cauuguagcaggaaccauu

SEQ ID NO: 1978759 - RNA, 19 nt, Homo sapiens
  misc_RNA (1)...(19): siRNA sense strand
cgccgcagccgacaaauug

SEQ ID NO: 1978760 - RNA, 19 nt, Homo sapiens
  misc_RNA (1)...(19): siRNA sense strand
ucucuaaguuugcuaugca

SEQ ID NO: 1978761 - RNA, 19 nt, Homo sapiens
  misc_RNA (1)...(19): siRNA sense strand
cagcauaaucgaacagcuu

SEQ ID NO: 1978762 - RNA, 19 nt, Homo sapiens
  misc_RNA (1)...(19): siRNA sense strand
caauggaagacuugcagaa

SEQ ID NO: 1978763 - RNA, 19 nt, Homo sapiens
  misc_RNA (1)...(19): siRNA sense strand
caaccauugucuuaagcau

SEQ ID NO: 1978764 - RNA, 19 nt, Homo sapiens
  misc_RNA (1)...(19): siRNA sense strand
gauacaucagugcuuauug

SEQ ID NO: 1978765 - RNA, 19 nt, Homo sapiens
  misc_RNA (1)...(19): siRNA sense strand
auacaucagugcuuauugc

SEQ ID NO: 1978766 - RNA, 19 nt, Homo sapiens
  misc_RNA (1)...(19): siRNA sense strand
aaagcaaccauugucuuaa

SEQ ID NO: 1978767 - RNA, 19 nt, Homo sapiens
  misc_RNA (1)...(19): siRNA sense strand
ggauaucucuaaguuugcu

SEQ ID NO: 1978768 - RNA, 19 nt, Homo sapiens
  misc_RNA (1)...(19): siRNA sense strand
acagauuuauggcagagau

SEQ ID NO: 1978769 - RNA, 19 nt, Homo sapiens
  misc_RNA (1)...(19): siRNA sense strand
cgacaggcaggcagagaau

SEQ ID NO: 1978770 - RNA, 19 nt, Homo sapiens
  misc_RNA (1)...(19): siRNA sense strand
gcgacaggcaggcagagaa

SEQ ID NO: 1978771 - RNA, 19 nt, Homo sapiens
  misc_RNA (1)...(19): siRNA sense strand
gcagagaugguggauuucu

SEQ ID NO: 1978772 - RNA, 19 nt, Homo sapiens
  misc_RNA (1)...(19): siRNA sense strand
gguuguggcacuuauauac

SEQ ID NO: 1978773 - RNA, 19 nt, Homo sapiens
  misc_RNA (1)...(19): siRNA sense strand
agugauuccuuccucaaau

SEQ ID NO: 1978774 - RNA, 19 nt, Homo sapiens
  misc_RNA (1)...(19): siRNA sense strand
ccccgcagcugggcuauua

SEQ ID NO: 1978775 - RNA, 19 nt, Homo sapiens
  misc_RNA (1)...(19): siRNA sense strand
acaggcaggcagagaauau

SEQ ID NO: 1978776 - RNA, 19 nt, Homo sapiens
  misc_RNA (1)...(19): siRNA sense strand
aauggaagacuugcagaaa

SEQ ID NO: 1978777 - RNA, 19 nt, Homo sapiens
  misc_RNA (1)...(19): siRNA sense strand
gacaggcaggcagagaaua

SEQ ID NO: 1978778 - RNA, 19 nt, Homo sapiens
  misc_RNA (1)...(19): siRNA sense strand
gcagcugggcuauuacaac

SEQ ID NO: 1978779 - RNA, 19 nt, Homo sapiens
  misc_RNA (1)...(19): siRNA sense strand
cgaacagcuuaugacauug

SEQ ID NO: 1978780 - RNA, 19 nt, Homo sapiens
  misc_RNA (1)...(19): siRNA sense strand
agcauaaucgaacagcuua

SEQ ID NO: 1978781 - RNA, 19 nt, Homo sapiens
  misc_RNA (1)...(19): siRNA sense strand
uggcacuuauauacagauu

SEQ ID NO: 1978782 - RNA, 19 nt, Homo sapiens
  misc_RNA (1)...(19): siRNA sense strand
uccgagcuuugaucaagaa

SEQ ID NO: 1978783 - RNA, 19 nt, Homo sapiens
  misc_RNA (1)...(19): siRNA sense strand
gcaaccauugucuuaagca

SEQ ID NO: 1978784 - RNA, 19 nt, Homo sapiens
  misc_RNA (1)...(19): siRNA sense strand
aacagcuuaugacauugua

SEQ ID NO: 1978785 - RNA, 19 nt, Homo sapiens
  misc_RNA (1)...(19): siRNA sense strand
ggagcuagcguauguaauu

SEQ ID NO: 1978786 - RNA, 19 nt, Homo sapiens
  misc_RNA (1)...(19): siRNA sense strand
cauccugggugcauucuuu

SEQ ID NO: 1978787 - RNA, 19 nt, Homo sapiens
  misc_RNA (1)...(19): siRNA sense strand
gggaggagcugggcauuac

SEQ ID NO: 1978788 - RNA, 19 nt, Homo sapiens
  misc_RNA (1)...(19): siRNA sense strand
gaggagcuagcguauguaa

SEQ ID NO: 1978789 - RNA, 19 nt, Homo sapiens
  misc_RNA (1)...(19): siRNA sense strand
gagcuagcguauguaauuc

SEQ ID NO: 1978790 - RNA, 19 nt, Homo sapiens
  misc_RNA (1)...(19): siRNA sense strand
gggagaucguggugaaaug

SEQ ID NO: 1978791 - RNA, 19 nt, Homo sapiens
  misc_RNA (1)...(19): siRNA sense strand
agacuggccugcccaugug

SEQ ID NO: 1978792 - RNA, 19 nt, Homo sapiens
  misc_RNA (1)...(19): siRNA sense strand
augaggagcuagcguaugu

SEQ ID NO: 1978793 - RNA, 19 nt, Homo sapiens
  misc_RNA (1)...(19): siRNA sense strand
gaucguggugaaaugguuu

SEQ ID NO: 1978794 - RNA, 19 nt, Homo sapiens
  misc_RNA (1)...(19): siRNA sense strand
gugcuggucucggaguuga

SEQ ID NO: 1978795 - RNA, 19 nt, Homo sapiens
  misc_RNA (1)...(19): siRNA sense strand
ggaggugcacgacaugcuu

SEQ ID NO: 1978796 - RNA, 19 nt, Homo sapiens
  misc_RNA (1)...(19): siRNA sense strand
uccucaaccuguacuauga

SEQ ID NO: 1978797 - RNA, 19 nt, Homo sapiens
  misc_RNA (1)...(19): siRNA sense strand
cggcgauggcgcucuauaa

SEQ ID NO: 1978798 - RNA, 19 nt, Homo sapiens
  misc_RNA (1)...(19): siRNA sense strand
cagacuggccugcccaugu

SEQ ID NO: 1978799 - RNA, 19 nt, Homo sapiens
  misc_RNA (1)...(19): siRNA sense strand
gcgaguaucuccguuuccu

SEQ ID NO: 1978800 - RNA, 19 nt, Homo sapiens
  misc_RNA (1)...(19): siRNA sense strand
ggagaucguggugaaaugg

SEQ ID NO: 1978801 - RNA, 19 nt, Homo sapiens
  misc_RNA (1)...(19): siRNA sense strand
guaucuccguuuccuggau

SEQ ID NO: 1978802 - RNA, 19 nt, Homo sapiens
  misc_RNA (1)...(19): siRNA sense strand
guuugaggcuguccagacu

SEQ ID NO: 1978803 - RNA, 19 nt, Homo sapiens
  misc_RNA (1)...(19): siRNA sense strand
gcuagcguauguaauucag

SEQ ID NO: 1978804 - RNA, 19 nt, Homo sapiens
  misc_RNA (1)...(19): siRNA sense strand
ucgcgaguaucuccguuuc

SEQ ID NO: 1978805 - RNA, 19 nt, Homo sapiens
  misc_RNA (1)...(19): siRNA sense strand
cgggaggagcugggcauua

SEQ ID NO: 1978806 - RNA, 19 nt, Homo sapiens
  misc_RNA (1)...(19): siRNA sense strand
ugaaagagcugggcaaugu

SEQ ID NO: 1978807 - RNA, 19 nt, Homo sapiens
  misc_RNA (1)...(19): siRNA sense strand
cuacugaauugcuauguga

SEQ ID NO: 1978808 - RNA, 19 nt, Homo sapiens
  misc_RNA (1)...(19): siRNA sense strand
ugaaagagcugggcaccau

SEQ ID NO: 1978809 - RNA, 19 nt, Homo sapiens
  misc_RNA (1)...(19): siRNA sense strand
gaauugcuaugugacuguu

SEQ ID NO: 1978810 - RNA, 19 nt, Homo sapiens
  misc_RNA (1)...(19): siRNA sense strand
gauccuggcucugcuacug

SEQ ID NO: 1978811 - RNA, 19 nt, Homo sapiens
  misc_RNA (1)...(19): siRNA sense strand
gaaagagcugggcaauguu

SEQ ID NO: 1978812 - RNA, 19 nt, Homo sapiens
  misc_RNA (1)...(19): siRNA sense strand
gugaggagccaaugccaaa

SEQ ID NO: 1978813 - RNA, 19 nt, Homo sapiens
  misc_RNA (1)...(19): siRNA sense strand
gaaagagcugggcaccauu

SEQ ID NO: 1978814 - RNA, 19 nt, Homo sapiens
  misc_RNA (1)...(19): siRNA sense strand
gcuacugaauugcuaugug

SEQ ID NO: 1978815 - RNA, 19 nt, Homo sapiens
  misc_RNA (1)...(19): siRNA sense strand
gaaggcagauguggcucau

SEQ ID NO: 1978816 - RNA, 19 nt, Homo sapiens
  misc_RNA (1)...(19): siRNA sense strand
uggcucugcuacugaauug

SEQ ID NO: 1978817 - RNA, 19 nt, Homo sapiens
  misc_RNA (1)...(19): siRNA sense strand
aaagagcugggcaauguuc

SEQ ID NO: 1978818 - RNA, 19 nt, Homo sapiens
  misc_RNA (1)...(19): siRNA sense strand
uagucuggcugcauuacug

SEQ ID NO: 1978819 - RNA, 19 nt, Homo sapiens
  misc_RNA (1)...(19): siRNA sense strand
gugaagaggcaaggccaaa

SEQ ID NO: 1978820 - RNA, 19 nt, Homo sapiens
  misc_RNA (1)...(19): siRNA sense strand
ucacccugccugugccaua

SEQ ID NO: 1978821 - RNA, 19 nt, Homo sapiens
  misc_RNA (1)...(19): siRNA sense strand
ccauagucuggcugcauua

SEQ ID NO: 1978822 - RNA, 19 nt, Homo sapiens
  misc_RNA (1)...(19): siRNA sense strand
aaagagcugggcaccauuc

SEQ ID NO: 1978823 - RNA, 19 nt, Homo sapiens
  misc_RNA (1)...(19): siRNA sense strand
gaaauucggucuucagaaa

SEQ ID NO: 1978824 - RNA, 19 nt, Homo sapiens
  misc_RNA (1)...(19): siRNA sense strand
gaagaagaccuauuaauug

SEQ ID NO: 1978825 - RNA, 19 nt, Homo sapiens
  misc_RNA (1)...(19): siRNA sense strand
gcagggagcuggucaaugg

SEQ ID NO: 1978826 - RNA, 19 nt, Homo sapiens
  misc_RNA (1)...(19): siRNA sense strand
ggacagaccugcugcuauc

SEQ ID NO: 1978827 - RNA, 19 nt, Homo sapiens
  misc_RNA (1)...(19): siRNA sense strand
gggaaaagcuacagacuua

SEQ ID NO: 1978828 - RNA, 19 nt, Homo sapiens
  misc_RNA (1)...(19): siRNA sense strand
gaagagaaaccuuuaggaa

SEQ ID NO: 1978829 - RNA, 19 nt, Homo sapiens
  misc_RNA (1)...(19): siRNA sense strand
gcaaugaugagacagauaa

SEQ ID NO: 1978830 - RNA, 19 nt, Homo sapiens
  misc_RNA (1)...(19): siRNA sense strand
gaaaugaaacagacaguau

SEQ ID NO: 1978831 - RNA, 19 nt, Homo sapiens
  misc_RNA (1)...(19): siRNA sense strand
ggaaagcaaagcacaagua

SEQ ID NO: 1978832 - RNA, 19 nt, Homo sapiens
  misc_RNA (1)...(19): siRNA sense strand
ggaaaguccucugcuagaa

SEQ ID NO: 1978833 - RNA, 19 nt, Homo sapiens
  misc_RNA (1)...(19): siRNA sense strand
gaaugugcauacuguguuu

SEQ ID NO: 1978834 - RNA, 19 nt, Homo sapiens
  misc_RNA (1)...(19): siRNA sense strand
agagaaaccuuuaggaaau

SEQ ID NO: 1978835 - RNA, 19 nt, Homo sapiens
  misc_RNA (1)...(19): siRNA sense strand
caacagaagagaaaccuuu

SEQ ID NO: 1978836 - RNA, 19 nt, Homo sapiens
  misc_RNA (1)...(19): siRNA sense strand
ggucacagauugauuuaca

SEQ ID NO: 1978837 - RNA, 19 nt, Homo sapiens
  misc_RNA (1)...(19): siRNA sense strand
caacaaccuuugaguuuua

SEQ ID NO: 1978838 - RNA, 19 nt, Homo sapiens
  misc_RNA (1)...(19): siRNA sense strand
agucagagaugcgauguua

SEQ ID NO: 1978839 - RNA, 19 nt, Homo sapiens
  misc_RNA (1)...(19): siRNA sense strand
ugaacgagcucgggauaaa

SEQ ID NO: 1978840 - RNA, 19 nt, Homo sapiens
  misc_RNA (1)...(19): siRNA sense strand
gaagacagcuaugaaacag

SEQ ID NO: 1978841 - RNA, 19 nt, Homo sapiens
  misc_RNA (1)...(19): siRNA sense strand
ugaugaagaagaccuauua

SEQ ID NO: 1978842 - RNA, 19 nt, Homo sapiens
  misc_RNA (1)...(19): siRNA sense strand
ugagaaaucugugcguuug

SEQ ID NO: 1978843 - RNA, 19 nt, Homo sapiens
  misc_RNA (1)...(19): siRNA sense strand
caacaaugcugggucuuuc

SEQ ID NO: 1978844 - RNA, 19 nt, Homo sapiens
  misc_RNA (1)...(19): siRNA sense strand
gaaaucaucacuuggcaau

SEQ ID NO: 1978845 - RNA, 19 nt, Homo sapiens
  misc_RNA (1)...(19): siRNA sense strand
gaggagaccgugucaguug

SEQ ID NO: 1978846 - RNA, 19 nt, Homo sapiens
  misc_RNA (1)...(19): siRNA sense strand
uugcagaacuugaugaaga

SEQ ID NO: 1978847 - RNA, 19 nt, Homo sapiens
  misc_RNA (1)...(19): siRNA sense strand
cagacaaccuaaaugcaaa

SEQ ID NO: 1978848 - RNA, 19 nt, Homo sapiens
  misc_RNA (1)...(19): siRNA sense strand
ggaaaugaaacagacagua

SEQ ID NO: 1978849 - RNA, 19 nt, Homo sapiens
  misc_RNA (1)...(19): siRNA sense strand
gaagaacguccagccagua

SEQ ID NO: 1978850 - RNA, 19 nt, Homo sapiens
  misc_RNA (1)...(19): siRNA sense strand
gaugcgauguuacgacaga

SEQ ID NO: 1978851 - RNA, 19 nt, Homo sapiens
  misc_RNA (1)...(19): siRNA sense strand
gaaaaggacagcaacgaua

SEQ ID NO: 1978852 - RNA, 19 nt, Homo sapiens
  misc_RNA (1)...(19): siRNA sense strand
ggaagacagcuaugaaaca

SEQ ID NO: 1978853 - RNA, 19 nt, Homo sapiens
  misc_RNA (1)...(19): siRNA sense strand
cuucgaaucuucacacaga

SEQ ID NO: 1978854 - RNA, 19 nt, Homo sapiens
  misc_RNA (1)...(19): siRNA sense strand
gaaagcaaagcacaaguag

SEQ ID NO: 1978855 - RNA, 19 nt, Homo sapiens
  misc_RNA (1)...(19): siRNA sense strand
gaacguccagccaguaugu

SEQ ID NO: 1978856 - RNA, 19 nt, Homo sapiens
  misc_RNA (1)...(19): siRNA sense strand
ccacagagagagugaauuc

SEQ ID NO: 1978857 - RNA, 19 nt, Homo sapiens
  misc_RNA (1)...(19): siRNA sense strand
gagaaaccuuuaggaaauc

SEQ ID NO: 1978858 - RNA, 19 nt, Homo sapiens
  misc_RNA (1)...(19): siRNA sense strand
gcucagggcucggaaaguc

SEQ ID NO: 1978859 - RNA, 19 nt, Homo sapiens
  misc_RNA (1)...(19): siRNA sense strand
gaugauggaccuacugguu

SEQ ID NO: 1978860 - RNA, 19 nt, Homo sapiens
  misc_RNA (1)...(19): siRNA sense strand
aguaagggcuguuuaacga

SEQ ID NO: 1978861 - RNA, 19 nt, Homo sapiens
  misc_RNA (1)...(19): siRNA sense strand
gaugaagaccuggaagaaa

SEQ ID NO: 1978862 - RNA, 19 nt, Homo sapiens
  misc_RNA (1)...(19): siRNA sense strand
cuccagagcuuccgagaug

SEQ ID NO: 1978863 - RNA, 19 nt, Homo sapiens
  misc_RNA (1)...(19): siRNA sense strand
ccagagggaucguguuucu

SEQ ID NO: 1978864 - RNA, 19 nt, Homo sapiens
  misc_RNA (1)...(19): siRNA sense strand
ugaauuaccugcggacaca

SEQ ID NO: 1978865 - RNA, 19 nt, Homo sapiens
  misc_RNA (1)...(19): siRNA sense strand
aaaguccucugcuagaaga

SEQ ID NO: 1978866 - RNA, 19 nt, Homo sapiens
  misc_RNA (1)...(19): siRNA sense strand
ucucuugggucacagauug

SEQ ID NO: 1978867 - RNA, 19 nt, Homo sapiens
  misc_RNA (1)...(19): siRNA sense strand
ccaccaugcccuugaaauu

SEQ ID NO: 1978868 - RNA, 19 nt, Homo sapiens
  misc_RNA (1)...(19): siRNA sense strand
acaggaaguugucuacuca

SEQ ID NO: 1978869 - RNA, 19 nt, Homo sapiens
  misc_RNA (1)...(19): siRNA sense strand
cagauugauuuacagaaga

SEQ ID NO: 1978870 - RNA, 19 nt, Homo sapiens
  misc_RNA (1)...(19): siRNA sense strand
uuuaggaaaucaucacuug

SEQ ID NO: 1978871 - RNA, 19 nt, Homo sapiens
  misc_RNA (1)...(19): siRNA sense strand
gaugaagaagaccuauuaa

SEQ ID NO: 1978872 - RNA, 19 nt, Homo sapiens
  misc_RNA (1)...(19): siRNA sense strand
ggacagcaugaaauacaaa

SEQ ID NO: 1978873 - RNA, 19 nt, Homo sapiens
  misc_RNA (1)...(19): siRNA sense strand
aagagaaaccuuuaggaaa

SEQ ID NO: 1978874 - RNA, 19 nt, Homo sapiens
  misc_RNA (1)...(19): siRNA sense strand
ccggagccauuaagauuga

SEQ ID NO: 1978875 - RNA, 19 nt, Homo sapiens
  misc_RNA (1)...(19): siRNA sense strand
aaucauuccuccaaaguca

SEQ ID NO: 1978876 - RNA, 19 nt, Homo sapiens
  misc_RNA (1)...(19): siRNA sense strand
ucacacagacaaccuaaau

SEQ ID NO: 1978877 - RNA, 19 nt, Homo sapiens
  misc_RNA (1)...(19): siRNA sense strand
ggccuuaucuaacaucucu

SEQ ID NO: 1978878 - RNA, 19 nt, Homo sapiens
  misc_RNA (1)...(19): siRNA sense strand
augaagaccuggaagaaau

SEQ ID NO: 1978879 - RNA, 19 nt, Homo sapiens
  misc_RNA (1)...(19): siRNA sense strand
gcaauaguaagggcuguuu

SEQ ID NO: 1978880 - RNA, 19 nt, Homo sapiens
  misc_RNA (1)...(19): siRNA sense strand
ugagacagauaaagagaag

SEQ ID NO: 1978881 - RNA, 19 nt, Homo sapiens
  misc_RNA (1)...(19): siRNA sense strand
aagaagaccuauuaauugc

SEQ ID NO: 1978882 - RNA, 19 nt, Homo sapiens
  misc_RNA (1)...(19): siRNA sense strand
cccaacaaccuuugaguuu

SEQ ID NO: 1978883 - RNA, 19 nt, Homo sapiens
  misc_RNA (1)...(19): siRNA sense strand
gagaagaauggcucugaga

SEQ ID NO: 1978884 - RNA, 19 nt, Homo sapiens
  misc_RNA (1)...(19): siRNA sense strand
uaaggugccugagaaaucu

SEQ ID NO: 1978885 - RNA, 19 nt, Homo sapiens
  misc_RNA (1)...(19): siRNA sense strand
caccggagccauuaagauu

SEQ ID NO: 1978886 - RNA, 19 nt, Homo sapiens
  misc_RNA (1)...(19): siRNA sense strand
ugauggaccuacugguuga

SEQ ID NO: 1978887 - RNA, 19 nt, Homo sapiens
  misc_RNA (1)...(19): siRNA sense strand
aggaagagcacgaugguaa

SEQ ID NO: 1978888 - RNA, 19 nt, Homo sapiens
  misc_RNA (1)...(19): siRNA sense strand
ugcguuuggucgugaauua

SEQ ID NO: 1978889 - RNA, 19 nt, Homo sapiens
  misc_RNA (1)...(19): siRNA sense strand
gcacucacguucucuuacg

SEQ ID NO: 1978890 - RNA, 19 nt, Homo sapiens
  misc_RNA (1)...(19): siRNA sense strand
gaugggaaucuaauggaaa

SEQ ID NO: 1978891 - RNA, 19 nt, Homo sapiens
  misc_RNA (1)...(19): siRNA sense strand
ucacaucugagaacugaaa

SEQ ID NO: 1978892 - RNA, 19 nt, Homo sapiens
  misc_RNA (1)...(19): siRNA sense strand
gaauauucucccagucauu

SEQ ID NO: 1978893 - RNA, 19 nt, Homo sapiens
  misc_RNA (1)...(19): siRNA sense strand
gaaaguccucugcuagaag

SEQ ID NO: 1978894 - RNA, 19 nt, Homo sapiens
  misc_RNA (1)...(19): siRNA sense strand
caccacagaagucacauuu

SEQ ID NO: 1978895 - RNA, 19 nt, Homo sapiens
  misc_RNA (1)...(19): siRNA sense strand
gaugagacagauaaagaga

SEQ ID NO: 1978896 - RNA, 19 nt, Homo sapiens
  misc_RNA (1)...(19): siRNA sense strand
ugaagucggagaugaagaa

SEQ ID NO: 1978897 - RNA, 19 nt, Homo sapiens
  misc_RNA (1)...(19): siRNA sense strand
cagcgaaacuguccuacac

SEQ ID NO: 1978898 - RNA, 19 nt, Homo sapiens
  misc_RNA (1)...(19): siRNA sense strand
caaccuaaaugcaaaagug

SEQ ID NO: 1978899 - RNA, 19 nt, Homo sapiens
  misc_RNA (1)...(19): siRNA sense strand
gaaacccaacaaccuuuga

SEQ ID NO: 1978900 - RNA, 19 nt, Homo sapiens
  misc_RNA (1)...(19): siRNA sense strand
gaagaauggcucugagaac

SEQ ID NO: 1978901 - RNA, 19 nt, Homo sapiens
  misc_RNA (1)...(19): siRNA sense strand
agacagauaaagagaagaa

SEQ ID NO: 1978902 - RNA, 19 nt, Homo sapiens
  misc_RNA (1)...(19): siRNA sense strand
cguguggccuuaucuaaca

SEQ ID NO: 1978903 - RNA, 19 nt, Homo sapiens
  misc_RNA (1)...(19): siRNA sense strand
acagauugauuuacagaag

SEQ ID NO: 1978904 - RNA, 19 nt, Homo sapiens
  misc_RNA (1)...(19): siRNA sense strand
caauaguaagggcuguuua

SEQ ID NO: 1978905 - RNA, 19 nt, Homo sapiens
  misc_RNA (1)...(19): siRNA sense strand
gaaauggaagacagcuaug

SEQ ID NO: 1978906 - RNA, 19 nt, Homo sapiens
  misc_RNA (1)...(19): siRNA sense strand
ugaaauacaaagacaagug

SEQ ID NO: 1978907 - RNA, 19 nt, Homo sapiens
  misc_RNA (1)...(19): siRNA sense strand
caagacaaggcaucggaaa

SEQ ID NO: 1978908 - RNA, 19 nt, Homo sapiens
  misc_RNA (1)...(19): siRNA sense strand
aauaguaagggcuguuuaa

SEQ ID NO: 1978909 - RNA, 19 nt, Homo sapiens
  misc_RNA (1)...(19): siRNA sense strand
caaccgcacugaggauaag

SEQ ID NO: 1978910 - RNA, 19 nt, Homo sapiens
  misc_RNA (1)...(19): siRNA sense strand
caaggacggccuccagguu

SEQ ID NO: 1978911 - RNA, 19 nt, Homo sapiens
  misc_RNA (1)...(19): siRNA sense strand
ccaguguguucucuacaga

SEQ ID NO: 1978912 - RNA, 19 nt, Homo sapiens
  misc_RNA (1)...(19): siRNA sense strand
ucagaaacccaacaaccuu

SEQ ID NO: 1978913 - RNA, 19 nt, Homo sapiens
  misc_RNA (1)...(19): siRNA sense strand
cagaaacccaacaaccuuu

SEQ ID NO: 1978914 - RNA, 19 nt, Homo sapiens
  misc_RNA (1)...(19): siRNA sense strand
gcagcaggacagcaugaaa

SEQ ID NO: 1978915 - RNA, 19 nt, Homo sapiens
  misc_RNA (1)...(19): siRNA sense strand
ggacacgaccgaggacuca

SEQ ID NO: 1978916 - RNA, 19 nt, Homo sapiens
  misc_RNA (1)...(19): siRNA sense strand
auuaauugcuggagaguuc

SEQ ID NO: 1978917 - RNA, 19 nt, Homo sapiens
  misc_RNA (1)...(19): siRNA sense strand
ccucaaaugaugaagaaga

SEQ ID NO: 1978918 - RNA, 19 nt, Homo sapiens
  misc_RNA (1)...(19): siRNA sense strand
acagacaaccuaaaugcaa

SEQ ID NO: 1978919 - RNA, 19 nt, Homo sapiens
  misc_RNA (1)...(19): siRNA sense strand
gcaaucccaguaacauuca

SEQ ID NO: 1978920 - RNA, 19 nt, Homo sapiens
  misc_RNA (1)...(19): siRNA sense strand
gugcauacuguguuucuga

SEQ ID NO: 1978921 - RNA, 19 nt, Homo sapiens
  misc_RNA (1)...(19): siRNA sense strand
agaaauggaagacagcuau

SEQ ID NO: 1978922 - RNA, 19 nt, Homo sapiens
  misc_RNA (1)...(19): siRNA sense strand
ccaacaaccuuugaguuuu

SEQ ID NO: 1978923 - RNA, 19 nt, Homo sapiens
  misc_RNA (1)...(19): siRNA sense strand
gagaagaaauuguucguua

SEQ ID NO: 1978924 - RNA, 19 nt, Homo sapiens
  misc_RNA (1)...(19): siRNA sense strand
gaacucaggacgucaaaua

SEQ ID NO: 1978925 - RNA, 19 nt, Homo sapiens
  misc_RNA (1)...(19): siRNA sense strand
aaaggaaguugaacaguuu

SEQ ID NO: 1978926 - RNA, 19 nt, Homo sapiens
  misc_RNA (1)...(19): siRNA sense strand
gcgaauagcuaaagaaagg

SEQ ID NO: 1978927 - RNA, 19 nt, Homo sapiens
  misc_RNA (1)...(19): siRNA sense strand
ggacuuaagcgaauagcua

SEQ ID NO: 1978928 - RNA, 19 nt, Homo sapiens
  misc_RNA (1)...(19): siRNA sense strand
ugaaaggaguuaccaauca

SEQ ID NO: 1978929 - RNA, 19 nt, Homo sapiens
  misc_RNA (1)...(19): siRNA sense strand
caggauggaguacauauua

SEQ ID NO: 1978930 - RNA, 19 nt, Homo sapiens
  misc_RNA (1)...(19): siRNA sense strand
gaacaacuaaagcugauga

SEQ ID NO: 1978931 - RNA, 19 nt, Homo sapiens
  misc_RNA (1)...(19): siRNA sense strand
caacuaaagcugaugagaa

SEQ ID NO: 1978932 - RNA, 19 nt, Homo sapiens
  misc_RNA (1)...(19): siRNA sense strand
ggauagagaccuugcagaa

SEQ ID NO: 1978933 - RNA, 19 nt, Homo sapiens
  misc_RNA (1)...(19): siRNA sense strand
ggacgucaaauauauagaa

SEQ ID NO: 1978934 - RNA, 19 nt, Homo sapiens
  misc_RNA (1)...(19): siRNA sense strand
gcagaugacuaccguaaaa

SEQ ID NO: 1978935 - RNA, 19 nt, Homo sapiens
  misc_RNA (1)...(19): siRNA sense strand
gaaaggaguuaccaaucag

SEQ ID NO: 1978936 - RNA, 19 nt, Homo sapiens
  misc_RNA (1)...(19): siRNA sense strand
gaagaggguugcagaagcu

SEQ ID NO: 1978937 - RNA, 19 nt, Homo sapiens
  misc_RNA (1)...(19): siRNA sense strand
cagaugaauucuacuacaa

SEQ ID NO: 1978938 - RNA, 19 nt, Homo sapiens
  misc_RNA (1)...(19): siRNA sense strand
caacagaacaagcaugugu

SEQ ID NO: 1978939 - RNA, 19 nt, Homo sapiens
  misc_RNA (1)...(19): siRNA sense strand
caaacacgcaaagaucuua

SEQ ID NO: 1978940 - RNA, 19 nt, Homo sapiens
  misc_RNA (1)...(19): siRNA sense strand
caaaaugacucggguuaaa

SEQ ID NO: 1978941 - RNA, 19 nt, Homo sapiens
  misc_RNA (1)...(19): siRNA sense strand
gaaagugaaggugaagaaa

SEQ ID NO: 1978942 - RNA, 19 nt, Homo sapiens
  misc_RNA (1)...(19): siRNA sense strand
ggauggaguacauauuauu

SEQ ID NO: 1978943 - RNA, 19 nt, Homo sapiens
  misc_RNA (1)...(19): siRNA sense strand
gauagagaccuugcagaaa

SEQ ID NO: 1978944 - RNA, 19 nt, Homo sapiens
  misc_RNA (1)...(19): siRNA sense strand
uaaggagacuaaggaagaa

SEQ ID NO: 1978945 - RNA, 19 nt, Homo sapiens
  misc_RNA (1)...(19): siRNA sense strand
aaacaagaauaccucaaag

SEQ ID NO: 1978946 - RNA, 19 nt, Homo sapiens
  misc_RNA (1)...(19): siRNA sense strand
acgcaaagaucuuauggau

SEQ ID NO: 1978947 - RNA, 19 nt, Homo sapiens
  misc_RNA (1)...(19): siRNA sense strand
gaaguugaacaguuugaug

SEQ ID NO: 1978948 - RNA, 19 nt, Homo sapiens
  misc_RNA (1)...(19): siRNA sense strand
ccagaugaauucuacuaca

SEQ ID NO: 1978949 - RNA, 19 nt, Homo sapiens
  misc_RNA (1)...(19): siRNA sense strand
aagugaaggugaagaaaga

SEQ ID NO: 1978950 - RNA, 19 nt, Homo sapiens
  misc_RNA (1)...(19): siRNA sense strand
ggauugaacgagagaagaa

SEQ ID NO: 1978951 - RNA, 19 nt, Homo sapiens
  misc_RNA (1)...(19): siRNA sense strand
agacuggacuuaagcgaau

SEQ ID NO: 1978952 - RNA, 19 nt, Homo sapiens
  misc_RNA (1)...(19): siRNA sense strand
ggaagcaacagaacaagca

SEQ ID NO: 1978953 - RNA, 19 nt, Homo sapiens
  misc_RNA (1)...(19): siRNA sense strand
auagagaccuugcagaaag

SEQ ID NO: 1978954 - RNA, 19 nt, Homo sapiens
  misc_RNA (1)...(19): siRNA sense strand
gcuagucgacagagucuuu

SEQ ID NO: 1978955 - RNA, 19 nt, Homo sapiens
  misc_RNA (1)...(19): siRNA sense strand
uuaaggagacuaaggaaga

SEQ ID NO: 1978956 - RNA, 19 nt, Homo sapiens
  misc_RNA (1)...(19): siRNA sense strand
cagaacaacuaaagcugau

SEQ ID NO: 1978957 - RNA, 19 nt, Homo sapiens
  misc_RNA (1)...(19): siRNA sense strand
ggauaaaacucagaaagug

SEQ ID NO: 1978958 - RNA, 19 nt, Homo sapiens
  misc_RNA (1)...(19): siRNA sense strand
uuacaaacuucgugcagau

SEQ ID NO: 1978959 - RNA, 19 nt, Homo sapiens
  misc_RNA (1)...(19): siRNA sense strand
gaacgagagaagaaauugu

SEQ ID NO: 1978960 - RNA, 19 nt, Homo sapiens
  misc_RNA (1)...(19): siRNA sense strand
gucgacagagucuuuaaua

SEQ ID NO: 1978961 - RNA, 19 nt, Homo sapiens
  misc_RNA (1)...(19): siRNA sense strand
ggagacuaaggaagaagua

SEQ ID NO: 1978962 - RNA, 19 nt, Homo sapiens
  misc_RNA (1)...(19): siRNA sense strand
ccaaucagacuggacuuaa

SEQ ID NO: 1978963 - RNA, 19 nt, Homo sapiens
  misc_RNA (1)...(19): siRNA sense strand
cucaggacgucaaauauau

SEQ ID NO: 1978964 - RNA, 19 nt, Homo sapiens
  misc_RNA (1)...(19): siRNA sense strand
cgacagagucuuuaauagg

SEQ ID NO: 1978965 - RNA, 19 nt, Homo sapiens
  misc_RNA (1)...(19): siRNA sense strand
gugcagaugacuaccguaa

SEQ ID NO: 1978966 - RNA, 19 nt, Homo sapiens
  misc_RNA (1)...(19): siRNA sense strand
gacuuaagcgaauagcuaa

SEQ ID NO: 1978967 - RNA, 19 nt, Homo sapiens
  misc_RNA (1)...(19): siRNA sense strand
uagagaccuugcagaaaga

SEQ ID NO: 1978968 - RNA, 19 nt, Homo sapiens
  misc_RNA (1)...(19): siRNA sense strand
aaaaggaaguugaacaguu

SEQ ID NO: 1978969 - RNA, 19 nt, Homo sapiens
  misc_RNA (1)...(19): siRNA sense strand
acucaggacgucaaauaua

SEQ ID NO: 1978970 - RNA, 19 nt, Homo sapiens
  misc_RNA (1)...(19): siRNA sense strand
caaucagacuggacuuaag

SEQ ID NO: 1978971 - RNA, 19 nt, Homo sapiens
  misc_RNA (1)...(19): siRNA sense strand
ucaggacgucaaauauaua

SEQ ID NO: 1978972 - RNA, 19 nt, Homo sapiens
  misc_RNA (1)...(19): siRNA sense strand
uuaagcgaauagcuaaaga

SEQ ID NO: 1978973 - RNA, 19 nt, Homo sapiens
  misc_RNA (1)...(19): siRNA sense strand
guucguuauugcucagaaa

SEQ ID NO: 1978974 - RNA, 19 nt, Homo sapiens
  misc_RNA (1)...(19): siRNA sense strand
gaaauuguucguuauugcu

SEQ ID NO: 1978975 - RNA, 19 nt, Homo sapiens
  misc_RNA (1)...(19): siRNA sense strand
ugucgcaacucaccugcaa

SEQ ID NO: 1978976 - RNA, 19 nt, Homo sapiens
  misc_RNA (1)...(19): siRNA sense strand
agaaagugaaggugaagaa

SEQ ID NO: 1978977 - RNA, 19 nt, Homo sapiens
  misc_RNA (1)...(19): siRNA sense strand
gcaacucaccugcaaacag

SEQ ID NO: 1978978 - RNA, 19 nt, Homo sapiens
  misc_RNA (1)...(19): siRNA sense strand
aacuaaagcugaugagaac

SEQ ID NO: 1978979 - RNA, 19 nt, Homo sapiens
  misc_RNA (1)...(19): siRNA sense strand
gaagaaagaaacggugaac

SEQ ID NO: 1978980 - RNA, 19 nt, Homo sapiens
  misc_RNA (1)...(19): siRNA sense strand
aagcgaauagcuaaagaaa

SEQ ID NO: 1978981 - RNA, 19 nt, Homo sapiens
  misc_RNA (1)...(19): siRNA sense strand
agaaauuguucguuauugc

SEQ ID NO: 1978982 - RNA, 19 nt, Homo sapiens
  misc_RNA (1)...(19): siRNA sense strand
agaaagaaacggugaacuc

SEQ ID NO: 1978983 - RNA, 19 nt, Homo sapiens
  misc_RNA (1)...(19): siRNA sense strand
aaauccagaugaauucuac

SEQ ID NO: 1978984 - RNA, 19 nt, Homo sapiens
  misc_RNA (1)...(19): siRNA sense strand
gagacuaaggaagaaguaa

SEQ ID NO: 1978985 - RNA, 19 nt, Homo sapiens
  misc_RNA (1)...(19): siRNA sense strand
gacuggacuuaagcgaaua

SEQ ID NO: 1978986 - RNA, 19 nt, Homo sapiens
  misc_RNA (1)...(19): siRNA sense strand
ucgacagagucuuuaauag

SEQ ID NO: 1978987 - RNA, 19 nt, Homo sapiens
  misc_RNA (1)...(19): siRNA sense strand
uuuaauaggcccaggauag

SEQ ID NO: 1978988 - RNA, 19 nt, Homo sapiens
  misc_RNA (1)...(19): siRNA sense strand
gauaaaacucagaaaguga

SEQ ID NO: 1978989 - RNA, 19 nt, Homo sapiens
  misc_RNA (1)...(19): siRNA sense strand
uaagcgaauagcuaaagaa

SEQ ID NO: 1978990 - RNA, 19 nt, Homo sapiens
  misc_RNA (1)...(19): siRNA sense strand
gugaaaggaguuaccaauc

SEQ ID NO: 1978991 - RNA, 19 nt, Homo sapiens
  misc_RNA (1)...(19): siRNA sense strand
uuaauaggcccaggauaga

SEQ ID NO: 1978992 - RNA, 19 nt, Homo sapiens
  misc_RNA (1)...(19): siRNA sense strand
gagaacucaggacgucaaa

SEQ ID NO: 1978993 - RNA, 19 nt, Homo sapiens
  misc_RNA (1)...(19): siRNA sense strand
gaacuccccagcuauuuau

SEQ ID NO: 1978994 - RNA, 19 nt, Homo sapiens
  misc_RNA (1)...(19): siRNA sense strand
gaaaggcaaaagcaguaua

SEQ ID NO: 1978995 - RNA, 19 nt, Homo sapiens
  misc_RNA (1)...(19): siRNA sense strand
gguugcagaagcuaagaaa

SEQ ID NO: 1978996 - RNA, 19 nt, Homo sapiens
  misc_RNA (1)...(19): siRNA sense strand
ucaaacacgcaaagaucuu

SEQ ID NO: 1978997 - RNA, 19 nt, Homo sapiens
  misc_RNA (1)...(19): siRNA sense strand
ugaacgagagaagaaauug

SEQ ID NO: 1978998 - RNA, 19 nt, Homo sapiens
  misc_RNA (1)...(19): siRNA sense strand
aggauggaguacauauuau

SEQ ID NO: 1978999 - RNA, 19 nt, Homo sapiens
  misc_RNA (1)...(19): siRNA sense strand
ccaggauggaguacauauu

SEQ ID NO: 1979000 - RNA, 19 nt, Homo sapiens
  misc_RNA (1)...(19): siRNA sense strand
gugaaggugaagaaagaaa

SEQ ID NO: 1979001 - RNA, 19 nt, Homo sapiens
  misc_RNA (1)...(19): siRNA sense strand
cgcaaagaucuuauggaua

SEQ ID NO: 1979002 - RNA, 19 nt, Homo sapiens
  misc_RNA (1)...(19): siRNA sense strand
ggaguacauauuauuaagg

SEQ ID NO: 1979003 - RNA, 19 nt, Homo sapiens
  misc_RNA (1)...(19): siRNA sense strand
acaaacuucgugcagauga

SEQ ID NO: 1979004 - RNA, 19 nt, Homo sapiens
  misc_RNA (1)...(19): siRNA sense strand
cucagaaagugaaggugaa

SEQ ID NO: 1979005 - RNA, 19 nt, Homo sapiens
  misc_RNA (1)...(19): siRNA sense strand
gagagaagaaauuguucgu

SEQ ID NO: 1979006 - RNA, 19 nt, Homo sapiens
  misc_RNA (1)...(19): siRNA sense strand
gauugaacgagagaagaaa

SEQ ID NO: 1979007 - RNA, 19 nt, Homo sapiens
  misc_RNA (1)...(19): siRNA sense strand
gaaagauuacaaacuucgu

SEQ ID NO: 1979008 - RNA, 19 nt, Homo sapiens
  misc_RNA (1)...(19): siRNA sense strand
aacgagagaagaaauuguu

SEQ ID NO: 1979009 - RNA, 19 nt, Homo sapiens
  misc_RNA (1)...(19): siRNA sense strand
aaagugaaggugaagaaag

SEQ ID NO: 1979010 - RNA, 19 nt, Homo sapiens
  misc_RNA (1)...(19): siRNA sense strand
ggaaguugaacaguuugau

SEQ ID NO: 1979011 - RNA, 19 nt, Homo sapiens
  misc_RNA (1)...(19): siRNA sense strand
ugaagaaagaaacggugaa

SEQ ID NO: 1979012 - RNA, 19 nt, Homo sapiens
  misc_RNA (1)...(19): siRNA sense strand
acaagaauaccucaaagcu

SEQ ID NO: 1979013 - RNA, 19 nt, Homo sapiens
  misc_RNA (1)...(19): siRNA sense strand
uuauuaaggagacuaagga

SEQ ID NO: 1979014 - RNA, 19 nt, Homo sapiens
  misc_RNA (1)...(19): siRNA sense strand
gaauaccucaaagcucuuc

SEQ ID NO: 1979015 - RNA, 19 nt, Homo sapiens
  misc_RNA (1)...(19): siRNA sense strand
ucgaaagacuaaaaucaga

SEQ ID NO: 1979016 - RNA, 19 nt, Homo sapiens
  misc_RNA (1)...(19): siRNA sense strand
gagcuagucgacagagucu

SEQ ID NO: 1979017 - RNA, 19 nt, Homo sapiens
  misc_RNA (1)...(19): siRNA sense strand
gaagcaacagaacaagcau

SEQ ID NO: 1979018 - RNA, 19 nt, Homo sapiens
  misc_RNA (1)...(19): siRNA sense strand
ggacugguguauauuaaua

SEQ ID NO: 1979019 - RNA, 19 nt, Homo sapiens
  misc_RNA (1)...(19): siRNA sense strand
uaaagagccuagugaauga

SEQ ID NO: 1979020 - RNA, 19 nt, Homo sapiens
  misc_RNA (1)...(19): siRNA sense strand
caaaguagacaguccaauu

SEQ ID NO: 1979021 - RNA, 19 nt, Homo sapiens
  misc_RNA (1)...(19): siRNA sense strand
gaaagaaaaugggagaaaa

SEQ ID NO: 1979022 - RNA, 19 nt, Homo sapiens
  misc_RNA (1)...(19): siRNA sense strand
aaaguagacaguccaauuu

SEQ ID NO: 1979023 - RNA, 19 nt, Homo sapiens
  misc_RNA (1)...(19): siRNA sense strand
caagggagccuguaagagu

SEQ ID NO: 1979024 - RNA, 19 nt, Homo sapiens
  misc_RNA (1)...(19): siRNA sense strand
caggacugguguauauuaa

SEQ ID NO: 1979025 - RNA, 19 nt, Homo sapiens
  misc_RNA (1)...(19): siRNA sense strand
ugccagaaaugcuacauga

SEQ ID NO: 1979026 - RNA, 19 nt, Homo sapiens
  misc_RNA (1)...(19): siRNA sense strand
uuaaagagccuagugaaug

SEQ ID NO: 1979027 - RNA, 19 nt, Homo sapiens
  misc_RNA (1)...(19): siRNA sense strand
gacaagggagccuguaaga

SEQ ID NO: 1979028 - RNA, 19 nt, Homo sapiens
  misc_RNA (1)...(19): siRNA sense strand
guaagagucagcccuccua

SEQ ID NO: 1979029 - RNA, 19 nt, Homo sapiens
  misc_RNA (1)...(19): siRNA sense strand
agucagcccuccuacaaga

SEQ ID NO: 1979030 - RNA, 19 nt, Homo sapiens
  misc_RNA (1)...(19): siRNA sense strand
cuacaagacugagcagagu

SEQ ID NO: 1979031 - RNA, 19 nt, Homo sapiens
  misc_RNA (1)...(19): siRNA sense strand
cuacaugagcagaaagaaa

SEQ ID NO: 1979032 - RNA, 19 nt, Homo sapiens
  misc_RNA (1)...(19): siRNA sense strand
gaaaagcaagcaauggauu

SEQ ID NO: 1979033 - RNA, 19 nt, Homo sapiens
  misc_RNA (1)...(19): siRNA sense strand
gacaguccaauuucucuug

SEQ ID NO: 1979034 - RNA, 19 nt, Homo sapiens
  misc_RNA (1)...(19): siRNA sense strand
guuaaagagccuagugaau

SEQ ID NO: 1979035 - RNA, 19 nt, Homo sapiens
  misc_RNA (1)...(19): siRNA sense strand
agagucagcccuccuacaa

SEQ ID NO: 1979036 - RNA, 19 nt, Homo sapiens
  misc_RNA (1)...(19): siRNA sense strand
gagaaaagcaagcaaugga

SEQ ID NO: 1979037 - RNA, 19 nt, Homo sapiens
  misc_RNA (1)...(19): siRNA sense strand
ccauggaaaggcuuacuug

SEQ ID NO: 1979038 - RNA, 19 nt, Homo sapiens
  misc_RNA (1)...(19): siRNA sense strand
cggaagcugguccauggua

SEQ ID NO: 1979039 - RNA, 19 nt, Homo sapiens
  misc_RNA (1)...(19): siRNA sense strand
cuuacuugcugccagaaau

SEQ ID NO: 1979040 - RNA, 19 nt, Homo sapiens
  misc_RNA (1)...(19): siRNA sense strand
caccuugcccuacgccaaa

SEQ ID NO: 1979041 - RNA, 19 nt, Homo sapiens
  misc_RNA (1)...(19): siRNA sense strand
aaagcaagcaauggauuug

SEQ ID NO: 1979042 - RNA, 19 nt, Homo sapiens
  misc_RNA (1)...(19): siRNA sense strand
guagacaguccaauuucuc

SEQ ID NO: 1979043 - RNA, 19 nt, Homo sapiens
  misc_RNA (1)...(19): siRNA sense strand
ggccagagguugagacaaa

SEQ ID NO: 1979044 - RNA, 19 nt, Homo sapiens
  misc_RNA (1)...(19): siRNA sense strand
caacagaaccauccagaaa

SEQ ID NO: 1979045 - RNA, 19 nt, Homo sapiens
  misc_RNA (1)...(19): siRNA sense strand
caacagggaccaccagaaa

SEQ ID NO: 1979046 - RNA, 19 nt, Homo sapiens
  misc_RNA (1)...(19): siRNA sense strand
ucagggagcucuugcaauc

SEQ ID NO: 1979047 - RNA, 19 nt, Homo sapiens
  misc_RNA (1)...(19): siRNA sense strand
ggaagaugcuguccuuugc

SEQ ID NO: 1979048 - RNA, 19 nt, Homo sapiens
  misc_RNA (1)...(19): siRNA sense strand
gaacagcugccugagauga

SEQ ID NO: 1979049 - RNA, 19 nt, Homo sapiens
  misc_RNA (1)...(19): siRNA sense strand
gcaaagggaagcuggaaga

SEQ ID NO: 1979050 - RNA, 19 nt, Homo sapiens
  misc_RNA (1)...(19): siRNA sense strand
ucaucgagcuccacgcuaa

SEQ ID NO: 1979051 - RNA, 19 nt, Homo sapiens
  misc_RNA (1)...(19): siRNA sense strand
acaccaagcucaccaccuu

SEQ ID NO: 1979052 - RNA, 19 nt, Homo sapiens
  misc_RNA (1)...(19): siRNA sense strand
ugaaugacaucgagaaggu

SEQ ID NO: 1979053 - RNA, 19 nt, Homo sapiens
  misc_RNA (1)...(19): siRNA sense strand
aaacuccucugcagcauca

SEQ ID NO: 1979054 - RNA, 19 nt, Homo sapiens
  misc_RNA (1)...(19): siRNA sense strand
gcaucaaccugaaugacau

SEQ ID NO: 1979055 - RNA, 19 nt, Homo sapiens
  misc_RNA (1)...(19): siRNA sense strand
agacaacucucuggacaug

SEQ ID NO: 1979056 - RNA, 19 nt, Homo sapiens
  misc_RNA (1)...(19): siRNA sense strand
ucaacaugcugcagaagga

SEQ ID NO: 1979057 - RNA, 19 nt, Homo sapiens
  misc_RNA (1)...(19): siRNA sense strand
gcagcgacguggacaccaa

SEQ ID NO: 1979058 - RNA, 19 nt, Homo sapiens
  misc_RNA (1)...(19): siRNA sense strand
ccaaagagaccaugaccau

SEQ ID NO: 1979059 - RNA, 19 nt, Homo sapiens
  misc_RNA (1)...(19): siRNA sense strand
gcccagaacuccaccaacu

SEQ ID NO: 1979060 - RNA, 19 nt, Homo sapiens
  misc_RNA (1)...(19): siRNA sense strand
cuauggagcugcagaguac

SEQ ID NO: 1979061 - RNA, 19 nt, Homo sapiens
  misc_RNA (1)...(19): siRNA sense strand
gccaagcucugcgacaaga

SEQ ID NO: 1979062 - RNA, 19 nt, Homo sapiens
  misc_RNA (1)...(19): siRNA sense strand
uggacaagcugaucgagau

SEQ ID NO: 1979063 - RNA, 19 nt, Homo sapiens
  misc_RNA (1)...(19): siRNA sense strand
ugccugagaugaugacaga

SEQ ID NO: 1979064 - RNA, 19 nt, Homo sapiens
  misc_RNA (1)...(19): siRNA sense strand
gaccgcagcuucgccuuca

SEQ ID NO: 1979065 - RNA, 19 nt, Homo sapiens
  misc_RNA (1)...(19): siRNA sense strand
aggaacagcugccugagau

SEQ ID NO: 1979066 - RNA, 19 nt, Homo sapiens
  misc_RNA (1)...(19): siRNA sense strand
aaacguaaagacaguauuc

SEQ ID NO: 1979067 - RNA, 19 nt, Homo sapiens
  misc_RNA (1)...(19): siRNA sense strand
cagaauggcagcaaagaca

SEQ ID NO: 1979068 - RNA, 19 nt, Homo sapiens
  misc_RNA (1)...(19): siRNA sense strand
gaggaacagcugccugaga

SEQ ID NO: 1979069 - RNA, 19 nt, Homo sapiens
  misc_RNA (1)...(19): siRNA sense strand
cggcgaaggcuaaaggaaa

SEQ ID NO: 1979070 - RNA, 19 nt, Homo sapiens
  misc_RNA (1)...(19): siRNA sense strand
agaacaagauggacaagcu

SEQ ID NO: 1979071 - RNA, 19 nt, Homo sapiens
  misc_RNA (1)...(19): siRNA sense strand
caccuucgauuccuucagu

SEQ ID NO: 1979072 - RNA, 19 nt, Homo sapiens
  misc_RNA (1)...(19): siRNA sense strand
agacugcggcgaaggcuaa

SEQ ID NO: 1979073 - RNA, 19 nt, Homo sapiens
  misc_RNA (1)...(19): siRNA sense strand
guccuuugcugcucuaugg

SEQ ID NO: 1979074 - RNA, 19 nt, Homo sapiens
  misc_RNA (1)...(19): siRNA sense strand
acagaaccauccagaaacu

SEQ ID NO: 1979075 - RNA, 19 nt, Homo sapiens
  misc_RNA (1)...(19): siRNA sense strand
ccaacaccuucgauuccuu

SEQ ID NO: 1979076 - RNA, 19 nt, Homo sapiens
  misc_RNA (1)...(19): siRNA sense strand
ggcgaaggcuaaaggaaaa

SEQ ID NO: 1979077 - RNA, 19 nt, Homo sapiens
  misc_RNA (1)...(19): siRNA sense strand
gcuacgugcuggaguacca

SEQ ID NO: 1979078 - RNA, 19 nt, Homo sapiens
  misc_RNA (1)...(19): siRNA sense strand
agauggcgcucuuuauggu

SEQ ID NO: 1979079 - RNA, 19 nt, Homo sapiens
  misc_RNA (1)...(19): siRNA sense strand
cucaggaugugaaggaaga

SEQ ID NO: 1979080 - RNA, 19 nt, Homo sapiens
  misc_RNA (1)...(19): siRNA sense strand
ggcaucaaccugaaugaca

SEQ ID NO: 1979081 - RNA, 19 nt, Homo sapiens
  misc_RNA (1)...(19): siRNA sense strand
gggaccaccagaaauccua

SEQ ID NO: 1979082 - RNA, 19 nt, Homo sapiens
  misc_RNA (1)...(19): siRNA sense strand
acagcagaauggcagcaaa

SEQ ID NO: 1979083 - RNA, 19 nt, Homo sapiens
  misc_RNA (1)...(19): siRNA sense strand
agaaccauccagaaacuga

SEQ ID NO: 1979084 - RNA, 19 nt, Homo sapiens
  misc_RNA (1)...(19): siRNA sense strand
acgcaguacuacaacagaa

SEQ ID NO: 1979085 - RNA, 19 nt, Homo sapiens
  misc_RNA (1)...(19): siRNA sense strand
gacaaaacguaaagacagu

SEQ ID NO: 1979086 - RNA, 19 nt, Homo sapiens
  misc_RNA (1)...(19): siRNA sense strand
caagcucaccaccuucaug

SEQ ID NO: 1979087 - RNA, 19 nt, Homo sapiens
  misc_RNA (1)...(19): siRNA sense strand
ugaacagcaugcggaacaa

SEQ ID NO: 1979088 - RNA, 19 nt, Homo sapiens
  misc_RNA (1)...(19): siRNA sense strand
acagggaccaccagaaauc

SEQ ID NO: 1979089 - RNA, 19 nt, Homo sapiens
  misc_RNA (1)...(19): siRNA sense strand
caagcucugcgacaagaug

SEQ ID NO: 1979090 - RNA, 19 nt, Homo sapiens
  misc_RNA (1)...(19): siRNA sense strand
uuacccugcuccagucuuc

SEQ ID NO: 1979091 - RNA, 19 nt, Homo sapiens
  misc_RNA (1)...(19): siRNA sense strand
ucuauggagcugcagagua

SEQ ID NO: 1979092 - RNA, 19 nt, Homo sapiens
  misc_RNA (1)...(19): siRNA sense strand
caagauggacaagcugauc

SEQ ID NO: 1979093 - RNA, 19 nt, Homo sapiens
  misc_RNA (1)...(19): siRNA sense strand
gcagcaaagacaacucucu

SEQ ID NO: 1979094 - RNA, 19 nt, Homo sapiens
  misc_RNA (1)...(19): siRNA sense strand
ccgcgaaggguguggcaaa

SEQ ID NO: 1979095 - RNA, 19 nt, Homo sapiens
  misc_RNA (1)...(19): siRNA sense strand
ggcgagaucgugcgcacaa

SEQ ID NO: 1979096 - RNA, 19 nt, Homo sapiens
  misc_RNA (1)...(19): siRNA sense strand
gcacaccgcaaugccaaag

SEQ ID NO: 1979097 - RNA, 19 nt, Homo sapiens
  misc_RNA (1)...(19): siRNA sense strand
cugccaagcucugcgacaa

SEQ ID NO: 1979098 - RNA, 19 nt, Homo sapiens
  misc_RNA (1)...(19): siRNA sense strand
gaccaugaccaucgagaac

SEQ ID NO: 1979099 - RNA, 19 nt, Homo sapiens
  misc_RNA (1)...(19): siRNA sense strand
aaagggaagcuggaagaug

SEQ ID NO: 1979100 - RNA, 19 nt, Homo sapiens
  misc_RNA (1)...(19): siRNA sense strand
ccaucacgcaguacuacaa

SEQ ID NO: 1979101 - RNA, 19 nt, Homo sapiens
  misc_RNA (1)...(19): siRNA sense strand
gcuguccuuugcugcucua

SEQ ID NO: 1979102 - RNA, 19 nt, Homo sapiens
  misc_RNA (1)...(19): siRNA sense strand
gcgcacaaucuaccagaag

SEQ ID NO: 1979103 - RNA, 19 nt, Homo sapiens
  misc_RNA (1)...(19): siRNA sense strand
aagagaccaugaccaucga

SEQ ID NO: 1979104 - RNA, 19 nt, Homo sapiens
  misc_RNA (1)...(19): siRNA sense strand
acaccgcaaugccaaagag

SEQ ID NO: 1979105 - RNA, 19 nt, Homo sapiens
  misc_RNA (1)...(19): siRNA sense strand
gagaucgcacacaccaaga

SEQ ID NO: 1979106 - RNA, 19 nt, Homo sapiens
  misc_RNA (1)...(19): siRNA sense strand
gaaagaagcagaagaagaa

SEQ ID NO: 1979107 - RNA, 19 nt, Homo sapiens
  misc_RNA (1)...(19): siRNA sense strand
ggaggaaggugaagaaaga

SEQ ID NO: 1979108 - RNA, 19 nt, Homo sapiens
  misc_RNA (1)...(19): siRNA sense strand
ggagaaagaagcagaagaa

SEQ ID NO: 1979109 - RNA, 19 nt, Homo sapiens
  misc_RNA (1)...(19): siRNA sense strand
agaaagcccugugugaaua

SEQ ID NO: 1979110 - RNA, 19 nt, Homo sapiens
  misc_RNA (1)...(19): siRNA sense strand
gcaacagccucaaccucua

SEQ ID NO: 1979111 - RNA, 19 nt, Homo sapiens
  misc_RNA (1)...(19): siRNA sense strand
caugaaagcccaccaaaga

SEQ ID NO: 1979112 - RNA, 19 nt, Homo sapiens
  misc_RNA (1)...(19): siRNA sense strand
caacagcacagcuaacuug

SEQ ID NO: 1979113 - RNA, 19 nt, Homo sapiens
  misc_RNA (1)...(19): siRNA sense strand
ccaaaggcaucaauuccaa

SEQ ID NO: 1979114 - RNA, 19 nt, Homo sapiens
  misc_RNA (1)...(19): siRNA sense strand
uguuaaagcugcccucauu

SEQ ID NO: 1979115 - RNA, 19 nt, Homo sapiens
  misc_RNA (1)...(19): siRNA sense strand
agagguggguucugccuua

SEQ ID NO: 1979116 - RNA, 19 nt, Homo sapiens
  misc_RNA (1)...(19): siRNA sense strand
ggaguuggcuuugaagaag

SEQ ID NO: 1979117 - RNA, 19 nt, Homo sapiens
  misc_RNA (1)...(19): siRNA sense strand
gcagaaagcccugugugaa

SEQ ID NO: 1979118 - RNA, 19 nt, Homo sapiens
  misc_RNA (1)...(19): siRNA sense strand
ggaagagaauguuaaagcu

SEQ ID NO: 1979119 - RNA, 19 nt, Homo sapiens
  misc_RNA (1)...(19): siRNA sense strand
gaaagggccaggcucaaga

SEQ ID NO: 1979120 - RNA, 19 nt, Homo sapiens
  misc_RNA (1)...(19): siRNA sense strand
gaagggaggcaucagauca

SEQ ID NO: 1979121 - RNA, 19 nt, Homo sapiens
  misc_RNA (1)...(19): siRNA sense strand
gaaagcccugugugaauaa

SEQ ID NO: 1979122 - RNA, 19 nt, Homo sapiens
  misc_RNA (1)...(19): siRNA sense strand
ccaagaccauggcgaugaa

SEQ ID NO: 1979123 - RNA, 19 nt, Homo sapiens
  misc_RNA (1)...(19): siRNA sense strand
ggagaguggucuguagaga

SEQ ID NO: 1979124 - RNA, 19 nt, Homo sapiens
  misc_RNA (1)...(19): siRNA sense strand
gaaagcccaccaaagaaga

SEQ ID NO: 1979125 - RNA, 19 nt, Homo sapiens
  misc_RNA (1)...(19): siRNA sense strand
gagggaagagaauguuaaa

SEQ ID NO: 1979126 - RNA, 19 nt, Homo sapiens
  misc_RNA (1)...(19): siRNA sense strand
gaaauugaggagaccuuga

SEQ ID NO: 1979127 - RNA, 19 nt, Homo sapiens
  misc_RNA (1)...(19): siRNA sense strand
ccaggaggccgcugaauuc

SEQ ID NO: 1979128 - RNA, 19 nt, Homo sapiens
  misc_RNA (1)...(19): siRNA sense strand
gagcaguggugcagaucau

SEQ ID NO: 1979129 - RNA, 19 nt, Homo sapiens
  misc_RNA (1)...(19): siRNA sense strand
gaagaagcccauggcgaaa

SEQ ID NO: 1979130 - RNA, 19 nt, Homo sapiens
  misc_RNA (1)...(19): siRNA sense strand
gaagaacuccaggcaggaa

SEQ ID NO: 1979131 - RNA, 19 nt, Homo sapiens
  misc_RNA (1)...(19): siRNA sense strand
caaugaauccagaaagguu

SEQ ID NO: 1979132 - RNA, 19 nt, Homo sapiens
  misc_RNA (1)...(19): siRNA sense strand
gagguggguucugccuuaa

SEQ ID NO: 1979133 - RNA, 19 nt, Homo sapiens
  misc_RNA (1)...(19): siRNA sense strand
caagaagggaggcaucaga

SEQ ID NO: 1979134 - RNA, 19 nt, Homo sapiens
  misc_RNA (1)...(19): siRNA sense strand
cagaaagcccugugugaau

SEQ ID NO: 1979135 - RNA, 19 nt, Homo sapiens
  misc_RNA (1)...(19): siRNA sense strand
ugaggugggugaugcugaa

SEQ ID NO: 1979136 - RNA, 19 nt, Homo sapiens
  misc_RNA (1)...(19): siRNA sense strand
ccacggaagaccagcauga

SEQ ID NO: 1979137 - RNA, 19 nt, Homo sapiens
  misc_RNA (1)...(19): siRNA sense strand
agaagccggugaugccaaa

SEQ ID NO: 1979138 - RNA, 19 nt, Homo sapiens
  misc_RNA (1)...(19): siRNA sense strand
agaaagaagcagaagaaga

SEQ ID NO: 1979139 - RNA, 19 nt, Homo sapiens
  misc_RNA (1)...(19): siRNA sense strand
cgucuugguugacucagaa

SEQ ID NO: 1979140 - RNA, 19 nt, Homo sapiens
  misc_RNA (1)...(19): siRNA sense strand
ggaagcagugcccuggaaa

SEQ ID NO: 1979141 - RNA, 19 nt, Homo sapiens
  misc_RNA (1)...(19): siRNA sense strand
gggaagagaauguuaaagc

SEQ ID NO: 1979142 - RNA, 19 nt, Homo sapiens
  misc_RNA (1)...(19): siRNA sense strand
uacccaggaugccgaguuu

SEQ ID NO: 1979143 - RNA, 19 nt, Homo sapiens
  misc_RNA (1)...(19): siRNA sense strand
uuaaagcugcccucauuga

SEQ ID NO: 1979144 - RNA, 19 nt, Homo sapiens
  misc_RNA (1)...(19): siRNA sense strand
gguggguucugccuuaaag

SEQ ID NO: 1979145 - RNA, 19 nt, Homo sapiens
  misc_RNA (1)...(19): siRNA sense strand
ugagggaagagaauguuaa

SEQ ID NO: 1979146 - RNA, 19 nt, Homo sapiens
  misc_RNA (1)...(19): siRNA sense strand
agaagcccauggcgaaaug

SEQ ID NO: 1979147 - RNA, 19 nt, Homo sapiens
  misc_RNA (1)...(19): siRNA sense strand
gaucaagggcagcagaaag

SEQ ID NO: 1979148 - RNA, 19 nt, Homo sapiens
  misc_RNA (1)...(19): siRNA sense strand
aggaggaguuggcuuugaa

SEQ ID NO: 1979149 - RNA, 19 nt, Homo sapiens
  misc_RNA (1)...(19): siRNA sense strand
ugaaccuucuggaggauug

SEQ ID NO: 1979150 - RNA, 19 nt, Homo sapiens
  misc_RNA (1)...(19): siRNA sense strand
ggugaaggugugaaucuga

SEQ ID NO: 1979151 - RNA, 19 nt, Homo sapiens
  misc_RNA (1)...(19): siRNA sense strand
gaucaucuucugcauggau

SEQ ID NO: 1979152 - RNA, 19 nt, Homo sapiens
  misc_RNA (1)...(19): siRNA sense strand
ucgcagggcuggagcuaag

SEQ ID NO: 1979153 - RNA, 19 nt, Homo sapiens
  misc_RNA (1)...(19): siRNA sense strand
ggaggcaucagaucagaag

SEQ ID NO: 1979154 - RNA, 19 nt, Homo sapiens
  misc_RNA (1)...(19): siRNA sense strand
auaaggaggaguuggcuuu

SEQ ID NO: 1979155 - RNA, 19 nt, Homo sapiens
  misc_RNA (1)...(19): siRNA sense strand
gugagggaagagaauguua

SEQ ID NO: 1979156 - RNA, 19 nt, Homo sapiens
  misc_RNA (1)...(19): siRNA sense strand
ucuccuacgucuugguuga

SEQ ID NO: 1979157 - RNA, 19 nt, Homo sapiens
  misc_RNA (1)...(19): siRNA sense strand
gcaggaagaagccggugau

SEQ ID NO: 1979158 - RNA, 19 nt, Homo sapiens
  misc_RNA (1)...(19): siRNA sense strand
aaauugaggagaccuugaa

SEQ ID NO: 1979159 - RNA, 19 nt, Homo sapiens
  misc_RNA (1)...(19): siRNA sense strand
cagaagauggcaggaagaa

SEQ ID NO: 1979160 - RNA, 19 nt, Homo sapiens
  misc_RNA (1)...(19): siRNA sense strand
agaagaagaaggugagcuu

SEQ ID NO: 1979161 - RNA, 19 nt, Homo sapiens
  misc_RNA (1)...(19): siRNA sense strand
ugaaagcccaccaaagaag

SEQ ID NO: 1979162 - RNA, 19 nt, Homo sapiens
  misc_RNA (1)...(19): siRNA sense strand
ccaugaggaagaagaagaa

SEQ ID NO: 1979163 - RNA, 19 nt, Homo sapiens
  misc_RNA (1)...(19): siRNA sense strand
aggaagcagugcccuggaa

SEQ ID NO: 1979164 - RNA, 19 nt, Homo sapiens
  misc_RNA (1)...(19): siRNA sense strand
ccaccaaugaauccagaaa

SEQ ID NO: 1979165 - RNA, 19 nt, Homo sapiens
  misc_RNA (1)...(19): siRNA sense strand
caacagccucaaccucuag

SEQ ID NO: 1979166 - RNA, 19 nt, Homo sapiens
  misc_RNA (1)...(19): siRNA sense strand
gaugaaccuucuggaggau

SEQ ID NO: 1979167 - RNA, 19 nt, Homo sapiens
  misc_RNA (1)...(19): siRNA sense strand
uagagacccuacccaggau

SEQ ID NO: 1979168 - RNA, 19 nt, Homo sapiens
  misc_RNA (1)...(19): siRNA sense strand
ccgcugaauucgaggagau

SEQ ID NO: 1979169 - RNA, 19 nt, Homo sapiens
  misc_RNA (1)...(19): siRNA sense strand
aaggaggaguuggcuuuga

SEQ ID NO: 1979170 - RNA, 19 nt, Homo sapiens
  misc_RNA (1)...(19): siRNA sense strand
gcugaaagcauggcgaucu

SEQ ID NO: 1979171 - RNA, 19 nt, Homo sapiens
  misc_RNA (1)...(19): siRNA sense strand
aaacccaaaggcaucaauu

SEQ ID NO: 1979172 - RNA, 19 nt, Homo sapiens
  misc_RNA (1)...(19): siRNA sense strand
cccaggaggccgcugaauu

SEQ ID NO: 1979173 - RNA, 19 nt, Homo sapiens
  misc_RNA (1)...(19): siRNA sense strand
ugaggaagaagaagaaggu

SEQ ID NO: 1979174 - RNA, 19 nt, Homo sapiens
  misc_RNA (1)...(19): siRNA sense strand
ccauggcgaugaaccuucu

SEQ ID NO: 1979175 - RNA, 19 nt, Homo sapiens
  misc_RNA (1)...(19): siRNA sense strand
gcaugagccuaccaaaccu

SEQ ID NO: 1979176 - RNA, 19 nt, Homo sapiens
  misc_RNA (1)...(19): siRNA sense strand
gcagggaggaaggugaaga

SEQ ID NO: 1979177 - RNA, 19 nt, Homo sapiens
  misc_RNA (1)...(19): siRNA sense strand
cagcagggaggaaggugaa

SEQ ID NO: 1979178 - RNA, 19 nt, Homo sapiens
  misc_RNA (1)...(19): siRNA sense strand
gccaugaaagcccaccaaa

SEQ ID NO: 1979179 - RNA, 19 nt, Homo sapiens
  misc_RNA (1)...(19): siRNA sense strand
cagggaggaaggugaagaa

SEQ ID NO: 1979180 - RNA, 19 nt, Homo sapiens
  misc_RNA (1)...(19): siRNA sense strand
gaggaguuggcuuugaaga

SEQ ID NO: 1979181 - RNA, 19 nt, Homo sapiens
  misc_RNA (1)...(19): siRNA sense strand
gggaggaaggugaagaaag

SEQ ID NO: 1979182 - RNA, 19 nt, Homo sapiens
  misc_RNA (1)...(19): siRNA sense strand
gcuugggcccugucuccua

SEQ ID NO: 1979183 - RNA, 19 nt, Homo sapiens
  misc_RNA (1)...(19): siRNA sense strand
ccaggagaaagaagcagaa

SEQ ID NO: 1979184 - RNA, 19 nt, Homo sapiens
  misc_RNA (1)...(19): siRNA sense strand
guuaaagcugcccucauug

SEQ ID NO: 1979185 - RNA, 19 nt, Homo sapiens
  misc_RNA (1)...(19): siRNA sense strand
gagaaagaagcagaagaag

SEQ ID NO: 1979186 - RNA, 19 nt, Homo sapiens
  misc_RNA (1)...(19): siRNA sense strand
gaggaaggugaagaaagaa

SEQ ID NO: 1979187 - RNA, 19 nt, Homo sapiens
  misc_RNA (1)...(19): siRNA sense strand
aaugaauccagaaagguuu

SEQ ID NO: 1979188 - RNA, 19 nt, Homo sapiens
  misc_RNA (1)...(19): siRNA sense strand
aaagggccaggcucaagaa

SEQ ID NO: 1979189 - RNA, 19 nt, Homo sapiens
  misc_RNA (1)...(19): siRNA sense strand
gcagagagcugugaaauau

SEQ ID NO: 1979190 - RNA, 19 nt, Homo sapiens
  misc_RNA (1)...(19): siRNA sense strand
ggaaaggaguguuguaaga

SEQ ID NO: 1979191 - RNA, 19 nt, Homo sapiens
  misc_RNA (1)...(19): siRNA sense strand
ggagaggccuugagauguu

SEQ ID NO: 1979192 - RNA, 19 nt, Homo sapiens
  misc_RNA (1)...(19): siRNA sense strand
gaacagagaacaugaagag

SEQ ID NO: 1979193 - RNA, 19 nt, Homo sapiens
  misc_RNA (1)...(19): siRNA sense strand
gagaggccuugagauguua

SEQ ID NO: 1979194 - RNA, 19 nt, Homo sapiens
  misc_RNA (1)...(19): siRNA sense strand
gcaaagcgcaguacaaugc

SEQ ID NO: 1979195 - RNA, 19 nt, Homo sapiens
  misc_RNA (1)...(19): siRNA sense strand
gaacuucucacacaacucu

SEQ ID NO: 1979196 - RNA, 19 nt, Homo sapiens
  misc_RNA (1)...(19): siRNA sense strand
ugagagaggcccaagcuuu

SEQ ID NO: 1979197 - RNA, 19 nt, Homo sapiens
  misc_RNA (1)...(19): siRNA sense strand
ggaauuugcuaugagaaag

SEQ ID NO: 1979198 - RNA, 19 nt, Homo sapiens
  misc_RNA (1)...(19): siRNA sense strand
gagagaggcccaagcuuuc

SEQ ID NO: 1979199 - RNA, 19 nt, Homo sapiens
  misc_RNA (1)...(19): siRNA sense strand
cagacuaccuccuccacuu

SEQ ID NO: 1979200 - RNA, 19 nt, Homo sapiens
  misc_RNA (1)...(19): siRNA sense strand
gguaccaccuuggaauuug

SEQ ID NO: 1979201 - RNA, 19 nt, Homo sapiens
  misc_RNA (1)...(19): siRNA sense strand
ccagaugggccucagacua

SEQ ID NO: 1979202 - RNA, 19 nt, Homo sapiens
  misc_RNA (1)...(19): siRNA sense strand
gguccuuuauuaucaguug

SEQ ID NO: 1979203 - RNA, 19 nt, Homo sapiens
  misc_RNA (1)...(19): siRNA sense strand
gagcagagagcugugaaau

SEQ ID NO: 1979204 - RNA, 19 nt, Homo sapiens
  misc_RNA (1)...(19): siRNA sense strand
agagagcugugaaauaucu

SEQ ID NO: 1979205 - RNA, 19 nt, Homo sapiens
  misc_RNA (1)...(19): siRNA sense strand
uuccaucgcuuucaacuuc

SEQ ID NO: 1979206 - RNA, 19 nt, Homo sapiens
  misc_RNA (1)...(19): siRNA sense strand
cagccgcucugggaaauga

SEQ ID NO: 1979207 - RNA, 19 nt, Homo sapiens
  misc_RNA (1)...(19): siRNA sense strand
caaggcagauccacuucca

SEQ ID NO: 1979208 - RNA, 19 nt, Homo sapiens
  misc_RNA (1)...(19): siRNA sense strand
cagcaaagcgcaguacaau

SEQ ID NO: 1979209 - RNA, 19 nt, Homo sapiens
  misc_RNA (1)...(19): siRNA sense strand
ugaggaaggucccggugau

SEQ ID NO: 1979210 - RNA, 19 nt, Homo sapiens
  misc_RNA (1)...(19): siRNA sense strand
ccagcgaccugacaguuac

SEQ ID NO: 1979211 - RNA, 19 nt, Homo sapiens
  misc_RNA (1)...(19): siRNA sense strand
gaaauaucuuuggcuugca

SEQ ID NO: 1979212 - RNA, 19 nt, Homo sapiens
  misc_RNA (1)...(19): siRNA sense strand
ggccuccucugcagaagug

SEQ ID NO: 1979213 - RNA, 19 nt, Homo sapiens
  misc_RNA (1)...(19): siRNA sense strand
gaaaggaguguuguaagac

SEQ ID NO: 1979214 - RNA, 19 nt, Homo sapiens
  misc_RNA (1)...(19): siRNA sense strand
gggcuugugucaugagcau

SEQ ID NO: 1979215 - RNA, 19 nt, Homo sapiens
  misc_RNA (1)...(19): siRNA sense strand
aaugcgggcuugugucaug

SEQ ID NO: 1979216 - RNA, 19 nt, Homo sapiens
  misc_RNA (1)...(19): siRNA sense strand
caaggagcccuaccuggau

SEQ ID NO: 1979217 - RNA, 19 nt, Homo sapiens
  misc_RNA (1)...(19): siRNA sense strand
aggcgguccuuuauuauca

SEQ ID NO: 1979218 - RNA, 19 nt, Homo sapiens
  misc_RNA (1)...(19): siRNA sense strand
cagaugggccucagacuac

SEQ ID NO: 1979219 - RNA, 19 nt, Homo sapiens
  misc_RNA (1)...(19): siRNA sense strand
aaggaguguuguaagacua

SEQ ID NO: 1979220 - RNA, 19 nt, Homo sapiens
  misc_RNA (1)...(19): siRNA sense strand
gggagaggccuugagaugu

SEQ ID NO: 1979221 - RNA, 19 nt, Homo sapiens
  misc_RNA (1)...(19): siRNA sense strand
gaccucagcggguagaaca

SEQ ID NO: 1979222 - RNA, 19 nt, Homo sapiens
  misc_RNA (1)...(19): siRNA sense strand
aaaggaguguuguaagacu

SEQ ID NO: 1979223 - RNA, 19 nt, Homo sapiens
  misc_RNA (1)...(19): siRNA sense strand
ggaaggucccggugauuuu

SEQ ID NO: 1979224 - RNA, 19 nt, Homo sapiens
  misc_RNA (1)...(19): siRNA sense strand
gaccguuucuucucaucuc

SEQ ID NO: 1979225 - RNA, 19 nt, Homo sapiens
  misc_RNA (1)...(19): siRNA sense strand
gcaucgaguccgaggcaaa

SEQ ID NO: 1979226 - RNA, 19 nt, Homo sapiens
  misc_RNA (1)...(19): siRNA sense strand
gaggaaggucccggugauu

SEQ ID NO: 1979227 - RNA, 19 nt, Homo sapiens
  misc_RNA (1)...(19): siRNA sense strand
cccagcgaccugacaguua

SEQ ID NO: 1979228 - RNA, 19 nt, Homo sapiens
  misc_RNA (1)...(19): siRNA sense strand
agacuaccuccuccacuuu

SEQ ID NO: 1979229 - RNA, 19 nt, Homo sapiens
  misc_RNA (1)...(19): siRNA sense strand
cuaccuggaugagcagaga

SEQ ID NO: 1979230 - RNA, 19 nt, Homo sapiens
  misc_RNA (1)...(19): siRNA sense strand
cgaccacacggcagccuuu

SEQ ID NO: 1979231 - RNA, 19 nt, Homo sapiens
  misc_RNA (1)...(19): siRNA sense strand
ggaacagagaacaugaaga

SEQ ID NO: 1979232 - RNA, 19 nt, Homo sapiens
  misc_RNA (1)...(19): siRNA sense strand
cuuggaauuugcuaugaga

SEQ ID NO: 1979233 - RNA, 19 nt, Homo sapiens
  misc_RNA (1)...(19): siRNA sense strand
gcugcagacucaggcuuga

SEQ ID NO: 1979234 - RNA, 19 nt, Homo sapiens
  misc_RNA (1)...(19): siRNA sense strand
gcuccucacugcgacaaca

SEQ ID NO: 1979235 - RNA, 19 nt, Homo sapiens
  misc_RNA (1)...(19): siRNA sense strand
aagacuagguuuuggcuaa

SEQ ID NO: 1979236 - RNA, 19 nt, Homo sapiens
  misc_RNA (1)...(19): siRNA sense strand
gagcugugaaauaucuuug

SEQ ID NO: 1979237 - RNA, 19 nt, Homo sapiens
  misc_RNA (1)...(19): siRNA sense strand
ccuggaccguuucuucuca

SEQ ID NO: 1979238 - RNA, 19 nt, Homo sapiens
  misc_RNA (1)...(19): siRNA sense strand
ugggagaggccuugagaug

SEQ ID NO: 1979239 - RNA, 19 nt, Homo sapiens
  misc_RNA (1)...(19): siRNA sense strand
gugaaaaggaacaagauaa

SEQ ID NO: 1979240 - RNA, 19 nt, Homo sapiens
  misc_RNA (1)...(19): siRNA sense strand
uggaauuugcuaugagaaa

SEQ ID NO: 1979241 - RNA, 19 nt, Homo sapiens
  misc_RNA (1)...(19): siRNA sense strand
guaccaccuuggaauuugc

SEQ ID NO: 1979242 - RNA, 19 nt, Homo sapiens
  misc_RNA (1)...(19): siRNA sense strand
gaugagcagagagcuguga

SEQ ID NO: 1979243 - RNA, 19 nt, Homo sapiens
  misc_RNA (1)...(19): siRNA sense strand
gggaacagagaacaugaag

SEQ ID NO: 1979244 - RNA, 19 nt, Homo sapiens
  misc_RNA (1)...(19): siRNA sense strand
agcagagagcugugaaaua

SEQ ID NO: 1979245 - RNA, 19 nt, Homo sapiens
  misc_RNA (1)...(19): siRNA sense strand
aggaaggucccggugauuu

SEQ ID NO: 1979246 - RNA, 19 nt, Homo sapiens
  misc_RNA (1)...(19): siRNA sense strand
cuggaaaggaguguuguaa

SEQ ID NO: 1979247 - RNA, 19 nt, Homo sapiens
  misc_RNA (1)...(19): siRNA sense strand
uggcaaggcagauccacuu

SEQ ID NO: 1979248 - RNA, 19 nt, Homo sapiens
  misc_RNA (1)...(19): siRNA sense strand
guguuuccaucgcuuucaa

SEQ ID NO: 1979249 - RNA, 19 nt, Homo sapiens
  misc_RNA (1)...(19): siRNA sense strand
gccuuggugugcagaggaa

SEQ ID NO: 1979250 - RNA, 19 nt, Homo sapiens
  misc_RNA (1)...(19): siRNA sense strand
gaauuugcuaugagaaagg

SEQ ID NO: 1979251 - RNA, 19 nt, Homo sapiens
  misc_RNA (1)...(19): siRNA sense strand
gacuaccuccuccacuuug

SEQ ID NO: 1979252 - RNA, 19 nt, Homo sapiens
  misc_RNA (1)...(19): siRNA sense strand
gggaagacgucucugauua

SEQ ID NO: 1979253 - RNA, 19 nt, Homo sapiens
  misc_RNA (1)...(19): siRNA sense strand
ucacaaaucucaacuccuu

SEQ ID NO: 1979254 - RNA, 19 nt, Homo sapiens
  misc_RNA (1)...(19): siRNA sense strand
agacggaccuggcugauaa

SEQ ID NO: 1979255 - RNA, 19 nt, Homo sapiens
  misc_RNA (1)...(19): siRNA sense strand
gcugauaagaggcagauaa

SEQ ID NO: 1979256 - RNA, 19 nt, Homo sapiens
  misc_RNA (1)...(19): siRNA sense strand
gagcagagcgucgggaaga

SEQ ID NO: 1979257 - RNA, 19 nt, Homo sapiens
  misc_RNA (1)...(19): siRNA sense strand
gauaagaggcagauaacca

SEQ ID NO: 1979258 - RNA, 19 nt, Homo sapiens
  misc_RNA (1)...(19): siRNA sense strand
ccaaagaacugagcgucau

SEQ ID NO: 1979259 - RNA, 19 nt, Homo sapiens
  misc_RNA (1)...(19): siRNA sense strand
ggaauccacugagaaaauu

SEQ ID NO: 1979260 - RNA, 19 nt, Homo sapiens
  misc_RNA (1)...(19): siRNA sense strand
ccauugggauugacuucuu

SEQ ID NO: 1979261 - RNA, 19 nt, Homo sapiens
  misc_RNA (1)...(19): siRNA sense strand
ggaagacgucucugauuac

SEQ ID NO: 1979262 - RNA, 19 nt, Homo sapiens
  misc_RNA (1)...(19): siRNA sense strand
gaagacgucucugauuacg

SEQ ID NO: 1979263 - RNA, 19 nt, Homo sapiens
  misc_RNA (1)...(19): siRNA sense strand
uuacgagguucauguacga

SEQ ID NO: 1979264 - RNA, 19 nt, Homo sapiens
  misc_RNA (1)...(19): siRNA sense strand
ggagaauguccaggagaaa

SEQ ID NO: 1979265 - RNA, 19 nt, Homo sapiens
  misc_RNA (1)...(19): siRNA sense strand
uguacgacaucacaaaucu

SEQ ID NO: 1979266 - RNA, 19 nt, Homo sapiens
  misc_RNA (1)...(19): siRNA sense strand
gagaggggcagugauguua

SEQ ID NO: 1979267 - RNA, 19 nt, Homo sapiens
  misc_RNA (1)...(19): siRNA sense strand
ugauuacgagguucaugua

SEQ ID NO: 1979268 - RNA, 19 nt, Homo sapiens
  misc_RNA (1)...(19): siRNA sense strand
ugagcgucauguucauuga

SEQ ID NO: 1979269 - RNA, 19 nt, Homo sapiens
  misc_RNA (1)...(19): siRNA sense strand
cauugggauugacuucuug

SEQ ID NO: 1979270 - RNA, 19 nt, Homo sapiens
  misc_RNA (1)...(19): siRNA sense strand
caaagaacugagcgucaug

SEQ ID NO: 1979271 - RNA, 19 nt, Homo sapiens
  misc_RNA (1)...(19): siRNA sense strand
uacgacagcuucgacaaca

SEQ ID NO: 1979272 - RNA, 19 nt, Homo sapiens
  misc_RNA (1)...(19): siRNA sense strand
ccaggcaaccauugggauu

SEQ ID NO: 1979273 - RNA, 19 nt, Homo sapiens
  misc_RNA (1)...(19): siRNA sense strand
acacauaccaggcaaccau

SEQ ID NO: 1979274 - RNA, 19 nt, Homo sapiens
  misc_RNA (1)...(19): siRNA sense strand
aggcaaccauugggauuga

SEQ ID NO: 1979275 - RNA, 19 nt, Homo sapiens
  misc_RNA (1)...(19): siRNA sense strand
ggacagagaggggcaguga

SEQ ID NO: 1979276 - RNA, 19 nt, Homo sapiens
  misc_RNA (1)...(19): siRNA sense strand
cgucucugauuacgagguu

SEQ ID NO: 1979277 - RNA, 19 nt, Homo sapiens
  misc_RNA (1)...(19): siRNA sense strand
gugcgaagacuggcuacaa

SEQ ID NO: 1979278 - RNA, 19 nt, Homo sapiens
  misc_RNA (1)...(19): siRNA sense strand
cgacagcuucgacaacaca

SEQ ID NO: 1979279 - RNA, 19 nt, Homo sapiens
  misc_RNA (1)...(19): siRNA sense strand
cgggaagacgucucugauu

SEQ ID NO: 1979280 - RNA, 19 nt, Homo sapiens
  misc_RNA (1)...(19): siRNA sense strand
gguguacgacaucacaaau

SEQ ID NO: 1979281 - RNA, 19 nt, Homo sapiens
  misc_RNA (1)...(19): siRNA sense strand
cagcuggucaggagagguu

SEQ ID NO: 1979282 - RNA, 19 nt, Homo sapiens
  misc_RNA (1)...(19): siRNA sense strand
cgacaucacaaaucucaac

SEQ ID NO: 1979283 - RNA, 19 nt, Homo sapiens
  misc_RNA (1)...(19): siRNA sense strand
uacccggaauggagaaugu

SEQ ID NO: 1979284 - RNA, 19 nt, Homo sapiens
  misc_RNA (1)...(19): siRNA sense strand
guacgacagcuucgacaac

SEQ ID NO: 1979285 - RNA, 19 nt, Homo sapiens
  misc_RNA (1)...(19): siRNA sense strand
agaggcagauaaccaucga

SEQ ID NO: 1979286 - RNA, 19 nt, Homo sapiens
  misc_RNA (1)...(19): siRNA sense strand
cgucggcucuacccggaau

SEQ ID NO: 1979287 - RNA, 19 nt, Homo sapiens
  misc_RNA (1)...(19): siRNA sense strand
uaaagaagaugaaguugga

SEQ ID NO: 1979288 - RNA, 19 nt, Homo sapiens
  misc_RNA (1)...(19): siRNA sense strand
ggacaugaccauuaaauau

SEQ ID NO: 1979289 - RNA, 19 nt, Homo sapiens
  misc_RNA (1)...(19): siRNA sense strand
caccagaguuucucaauga

SEQ ID NO: 1979290 - RNA, 19 nt, Homo sapiens
  misc_RNA (1)...(19): siRNA sense strand
gaagccaucuccacaggaa

SEQ ID NO: 1979291 - RNA, 19 nt, Homo sapiens
  misc_RNA (1)...(19): siRNA sense strand
gcucuaaccucaaccugaa

SEQ ID NO: 1979292 - RNA, 19 nt, Homo sapiens
  misc_RNA (1)...(19): siRNA sense strand
ccagagagcaaacacuuua

SEQ ID NO: 1979293 - RNA, 19 nt, Homo sapiens
  misc_RNA (1)...(19): siRNA sense strand
aaacagauuuccuucaugu

SEQ ID NO: 1979294 - RNA, 19 nt, Homo sapiens
  misc_RNA (1)...(19): siRNA sense strand
acaggaagcucaacuuaau

SEQ ID NO: 1979295 - RNA, 19 nt, Homo sapiens
  misc_RNA (1)...(19): siRNA sense strand
ugaagcaguugauaaagaa

SEQ ID NO: 1979296 - RNA, 19 nt, Homo sapiens
  misc_RNA (1)...(19): siRNA sense strand
gcuggaggcuggcagauga

SEQ ID NO: 1979297 - RNA, 19 nt, Homo sapiens
  misc_RNA (1)...(19): siRNA sense strand
gaugaagagugacaaagug

SEQ ID NO: 1979298 - RNA, 19 nt, Homo sapiens
  misc_RNA (1)...(19): siRNA sense strand
guacgggucucugauagaa

SEQ ID NO: 1979299 - RNA, 19 nt, Homo sapiens
  misc_RNA (1)...(19): siRNA sense strand
gaucugaagcaguugauaa

SEQ ID NO: 1979300 - RNA, 19 nt, Homo sapiens
  misc_RNA (1)...(19): siRNA sense strand
ccagggaggucuacaagga

SEQ ID NO: 1979301 - RNA, 19 nt, Homo sapiens
  misc_RNA (1)...(19): siRNA sense strand
ccacaggaagcucaacuua

SEQ ID NO: 1979302 - RNA, 19 nt, Homo sapiens
  misc_RNA (1)...(19): siRNA sense strand
gaaacuucuuagacucuuu

SEQ ID NO: 1979303 - RNA, 19 nt, Homo sapiens
  misc_RNA (1)...(19): siRNA sense strand
gcuagaagaugaagaacca

SEQ ID NO: 1979304 - RNA, 19 nt, Homo sapiens
  misc_RNA (1)...(19): siRNA sense strand
gagagucccuagagauuca

SEQ ID NO: 1979305 - RNA, 19 nt, Homo sapiens
  misc_RNA (1)...(19): siRNA sense strand
ccacagccagugaccauua

SEQ ID NO: 1979306 - RNA, 19 nt, Homo sapiens
  misc_RNA (1)...(19): siRNA sense strand
gaagagagaaaucgacauc

SEQ ID NO: 1979307 - RNA, 19 nt, Homo sapiens
  misc_RNA (1)...(19): siRNA sense strand
ucaaguaccucaccaacca

SEQ ID NO: 1979308 - RNA, 19 nt, Homo sapiens
  misc_RNA (1)...(19): siRNA sense strand
gcuaggagcugggaagaca

SEQ ID NO: 1979309 - RNA, 19 nt, Homo sapiens
  misc_RNA (1)...(19): siRNA sense strand
gaaagaagagagaaaucga

SEQ ID NO: 1979310 - RNA, 19 nt, Homo sapiens
  misc_RNA (1)...(19): siRNA sense strand
uggagaagauguugaggaa

SEQ ID NO: 1979311 - RNA, 19 nt, Homo sapiens
  misc_RNA (1)...(19): siRNA sense strand
uggaggagcuggagaagau

SEQ ID NO: 1979312 - RNA, 19 nt, Homo sapiens
  misc_RNA (1)...(19): siRNA sense strand
ucaaaugcaugaagaagag

SEQ ID NO: 1979313 - RNA, 19 nt, Homo sapiens
  misc_RNA (1)...(19): siRNA sense strand
gacaucaguuccucacaga

SEQ ID NO: 1979314 - RNA, 19 nt, Homo sapiens
  misc_RNA (1)...(19): siRNA sense strand
ccagugaccauuacuuuga

SEQ ID NO: 1979315 - RNA, 19 nt, Homo sapiens
  misc_RNA (1)...(19): siRNA sense strand
uggacaagaugaagaguga

SEQ ID NO: 1979316 - RNA, 19 nt, Homo sapiens
  misc_RNA (1)...(19): siRNA sense strand
ccaaauccuuuccacuuca

SEQ ID NO: 1979317 - RNA, 19 nt, Homo sapiens
  misc_RNA (1)...(19): siRNA sense strand
aaguggagaugcucuauug

SEQ ID NO: 1979318 - RNA, 19 nt, Homo sapiens
  misc_RNA (1)...(19): siRNA sense strand
cuuagacucuuuccacauu

SEQ ID NO: 1979319 - RNA, 19 nt, Homo sapiens
  misc_RNA (1)...(19): siRNA sense strand
cugaggaucugaagcaguu

SEQ ID NO: 1979320 - RNA, 19 nt, Homo sapiens
  misc_RNA (1)...(19): siRNA sense strand
cuuugaagcuuagaaauga

SEQ ID NO: 1979321 - RNA, 19 nt, Homo sapiens
  misc_RNA (1)...(19): siRNA sense strand
cugaagcaguugauaaaga

SEQ ID NO: 1979322 - RNA, 19 nt, Homo sapiens
  misc_RNA (1)...(19): siRNA sense strand
ugucucuucugaccacuua

SEQ ID NO: 1979323 - RNA, 19 nt, Homo sapiens
  misc_RNA (1)...(19): siRNA sense strand
ccaccagaguuucucaaug

SEQ ID NO: 1979324 - RNA, 19 nt, Homo sapiens
  misc_RNA (1)...(19): siRNA sense strand
gcacacucuuccuuacuag

SEQ ID NO: 1979325 - RNA, 19 nt, Homo sapiens
  misc_RNA (1)...(19): siRNA sense strand
cagguggacaugaccauua

SEQ ID NO: 1979326 - RNA, 19 nt, Homo sapiens
  misc_RNA (1)...(19): siRNA sense strand
caugucaucuuucaaaugc

SEQ ID NO: 1979327 - RNA, 19 nt, Homo sapiens
  misc_RNA (1)...(19): siRNA sense strand
gcagugcucuaaccucaac

SEQ ID NO: 1979328 - RNA, 19 nt, Homo sapiens
  misc_RNA (1)...(19): siRNA sense strand
ggcccuaccuggacaagau

SEQ ID NO: 1979329 - RNA, 19 nt, Homo sapiens
  misc_RNA (1)...(19): siRNA sense strand
cagagagucccuagagauu

SEQ ID NO: 1979330 - RNA, 19 nt, Homo sapiens
  misc_RNA (1)...(19): siRNA sense strand
ggacugcacacucuuccuu

SEQ ID NO: 1979331 - RNA, 19 nt, Homo sapiens
  misc_RNA (1)...(19): siRNA sense strand
ugaacuaccucauccaacu

SEQ ID NO: 1979332 - RNA, 19 nt, Homo sapiens
  misc_RNA (1)...(19): siRNA sense strand
gcacuggcuucgcccaagu

SEQ ID NO: 1979333 - RNA, 19 nt, Homo sapiens
  misc_RNA (1)...(19): siRNA sense strand
accauuacuuugaagcuua

SEQ ID NO: 1979334 - RNA, 19 nt, Homo sapiens
  misc_RNA (1)...(19): siRNA sense strand
gaccauuacuuugaagcuu

SEQ ID NO: 1979335 - RNA, 19 nt, Homo sapiens
  misc_RNA (1)...(19): siRNA sense strand
gaugagccaugucucuucu

SEQ ID NO: 1979336 - RNA, 19 nt, Homo sapiens
  misc_RNA (1)...(19): siRNA sense strand
aauggagucuucuuugguu

SEQ ID NO: 1979337 - RNA, 19 nt, Homo sapiens
  misc_RNA (1)...(19): siRNA sense strand
caagaugaagagugacaaa

SEQ ID NO: 1979338 - RNA, 19 nt, Homo sapiens
  misc_RNA (1)...(19): siRNA sense strand
ugaaggaauugaaguccau

SEQ ID NO: 1979339 - RNA, 19 nt, Homo sapiens
  misc_RNA (1)...(19): siRNA sense strand
gcucagcagccagccuuua

SEQ ID NO: 1979340 - RNA, 19 nt, Homo sapiens
  misc_RNA (1)...(19): siRNA sense strand
ugggagaaguggucaaaca

SEQ ID NO: 1979341 - RNA, 19 nt, Homo sapiens
  misc_RNA (1)...(19): siRNA sense strand
cuucugaccacuuacauuu

SEQ ID NO: 1979342 - RNA, 19 nt, Homo sapiens
  misc_RNA (1)...(19): siRNA sense strand
ugagccaugucucuucuga

SEQ ID NO: 1979343 - RNA, 19 nt, Homo sapiens
  misc_RNA (1)...(19): siRNA sense strand
ggaaagaagagagaaaucg

SEQ ID NO: 1979344 - RNA, 19 nt, Homo sapiens
  misc_RNA (1)...(19): siRNA sense strand
agaagcaucuggaacaacu

SEQ ID NO: 1979345 - RNA, 19 nt, Homo sapiens
  misc_RNA (1)...(19): siRNA sense strand
ugaagaaccagacuuugug

SEQ ID NO: 1979346 - RNA, 19 nt, Homo sapiens
  misc_RNA (1)...(19): siRNA sense strand
gccagagagucccuagaga

SEQ ID NO: 1979347 - RNA, 19 nt, Homo sapiens
  misc_RNA (1)...(19): siRNA sense strand
ccacuuacauuuugaucaa

SEQ ID NO: 1979348 - RNA, 19 nt, Homo sapiens
  misc_RNA (1)...(19): siRNA sense strand
uggcugcccuccauaggaa

SEQ ID NO: 1979349 - RNA, 19 nt, Homo sapiens
  misc_RNA (1)...(19): siRNA sense strand
cacaggaagcucaacuuaa

SEQ ID NO: 1979350 - RNA, 19 nt, Homo sapiens
  misc_RNA (1)...(19): siRNA sense strand
gggagaaccccacaaaauu

SEQ ID NO: 1979351 - RNA, 19 nt, Homo sapiens
  misc_RNA (1)...(19): siRNA sense strand
caccaaccaugaaacagau

SEQ ID NO: 1979352 - RNA, 19 nt, Homo sapiens
  misc_RNA (1)...(19): siRNA sense strand
gagagaaaucgacaucagu

SEQ ID NO: 1979353 - RNA, 19 nt, Homo sapiens
  misc_RNA (1)...(19): siRNA sense strand
ucaccaaccaugaaacaga

SEQ ID NO: 1979354 - RNA, 19 nt, Homo sapiens
  misc_RNA (1)...(19): siRNA sense strand
gggagaaguggucaaacaa

SEQ ID NO: 1979355 - RNA, 19 nt, Homo sapiens
  misc_RNA (1)...(19): siRNA sense strand
gaggcuggcagaugaguug

SEQ ID NO: 1979356 - RNA, 19 nt, Homo sapiens
  misc_RNA (1)...(19): siRNA sense strand
cccaaauccuuuccacuuc

SEQ ID NO: 1979357 - RNA, 19 nt, Homo sapiens
  misc_RNA (1)...(19): siRNA sense strand
agaugaagaaccagacuuu

SEQ ID NO: 1979358 - RNA, 19 nt, Homo sapiens
  misc_RNA (1)...(19): siRNA sense strand
ugcacacucuuccuuacua

SEQ ID NO: 1979359 - RNA, 19 nt, Homo sapiens
  misc_RNA (1)...(19): siRNA sense strand
caaacacuuuacaguccaa

SEQ ID NO: 1979360 - RNA, 19 nt, Homo sapiens
  misc_RNA (1)...(19): siRNA sense strand
ccaucuggcuggugaacug

SEQ ID NO: 1979361 - RNA, 19 nt, Homo sapiens
  misc_RNA (1)...(19): siRNA sense strand
gauaaagaagaugaaguug

SEQ ID NO: 1979362 - RNA, 19 nt, Homo sapiens
  misc_RNA (1)...(19): siRNA sense strand
uuaauggagucuucuuugg

SEQ ID NO: 1979363 - RNA, 19 nt, Homo sapiens
  misc_RNA (1)...(19): siRNA sense strand
ccagagagucccuagagau

SEQ ID NO: 1979364 - RNA, 19 nt, Homo sapiens
  misc_RNA (1)...(19): siRNA sense strand
cuucaugucaucuuucaaa

SEQ ID NO: 1979365 - RNA, 19 nt, Homo sapiens
  misc_RNA (1)...(19): siRNA sense strand
ggagaaguggucaaacaag

SEQ ID NO: 1979366 - RNA, 19 nt, Homo sapiens
  misc_RNA (1)...(19): siRNA sense strand
gaucccaaagccauugaaa

SEQ ID NO: 1979367 - RNA, 19 nt, Homo sapiens
  misc_RNA (1)...(19): siRNA sense strand
cagugaccauuacuuugaa

SEQ ID NO: 1979368 - RNA, 19 nt, Homo sapiens
  misc_RNA (1)...(19): siRNA sense strand
agagaaaucgacaucaguu

SEQ ID NO: 1979369 - RNA, 19 nt, Homo sapiens
  misc_RNA (1)...(19): siRNA sense strand
gcgagccagugaucuucaa

SEQ ID NO: 1979370 - RNA, 19 nt, Homo sapiens
  misc_RNA (1)...(19): siRNA sense strand
ucaacuuaauggagucuuc

SEQ ID NO: 1979371 - RNA, 19 nt, Homo sapiens
  misc_RNA (1)...(19): siRNA sense strand
agguggacaugaccauuaa

SEQ ID NO: 1979372 - RNA, 19 nt, Homo sapiens
  misc_RNA (1)...(19): siRNA sense strand
uggaacaacuguggucugu

SEQ ID NO: 1979373 - RNA, 19 nt, Homo sapiens
  misc_RNA (1)...(19): siRNA sense strand
uagacucuuuccacauuga

SEQ ID NO: 1979374 - RNA, 19 nt, Homo sapiens
  misc_RNA (1)...(19): siRNA sense strand
ggucucugauagaaacuuc

SEQ ID NO: 1979375 - RNA, 19 nt, Homo sapiens
  misc_RNA (1)...(19): siRNA sense strand
gccagggacugcacacucu

SEQ ID NO: 1979376 - RNA, 19 nt, Homo sapiens
  misc_RNA (1)...(19): siRNA sense strand
agagagaaaucgacaucag

SEQ ID NO: 1979377 - RNA, 19 nt, Homo sapiens
  misc_RNA (1)...(19): siRNA sense strand
gacugcacacucuuccuua

SEQ ID NO: 1979378 - RNA, 19 nt, Homo sapiens
  misc_RNA (1)...(19): siRNA sense strand
guaccucaccaaccaugaa

SEQ ID NO: 1979379 - RNA, 19 nt, Homo sapiens
  misc_RNA (1)...(19): siRNA sense strand
gacuacgucucaucaaggu

SEQ ID NO: 1979380 - RNA, 19 nt, Homo sapiens
  misc_RNA (1)...(19): siRNA sense strand
caucguggcugaggaucug

SEQ ID NO: 1979381 - RNA, 19 nt, Homo sapiens
  misc_RNA (1)...(19): siRNA sense strand
gagaaaucgacaucaguuc

SEQ ID NO: 1979382 - RNA, 19 nt, Homo sapiens
  misc_RNA (1)...(19): siRNA sense strand
gaugaagaaccagacuuug

SEQ ID NO: 1979383 - RNA, 19 nt, Homo sapiens
  misc_RNA (1)...(19): siRNA sense strand
uggacaugaccauuaaaua

SEQ ID NO: 1979384 - RNA, 19 nt, Homo sapiens
  misc_RNA (1)...(19): siRNA sense strand
uggauccagugaaggaauu

SEQ ID NO: 1979385 - RNA, 19 nt, Homo sapiens
  misc_RNA (1)...(19): siRNA sense strand
uuacuagucccaacgucua

SEQ ID NO: 1979386 - RNA, 19 nt, Homo sapiens
  misc_RNA (1)...(19): siRNA sense strand
ggagaaccccacaaaauuc

SEQ ID NO: 1979387 - RNA, 19 nt, Homo sapiens
  misc_RNA (1)...(19): siRNA sense strand
uaacauaucuccucacuga

SEQ ID NO: 1979388 - RNA, 19 nt, Homo sapiens
  misc_RNA (1)...(19): siRNA sense strand
gcucaaagcucaugauuuc

SEQ ID NO: 1979389 - RNA, 19 nt, Homo sapiens
  misc_RNA (1)...(19): siRNA sense strand
gaaaagagauucagaacga

SEQ ID NO: 1979390 - RNA, 19 nt, Homo sapiens
  misc_RNA (1)...(19): siRNA sense strand
caaagcucaugauuucuga

SEQ ID NO: 1979391 - RNA, 19 nt, Homo sapiens
  misc_RNA (1)...(19): siRNA sense strand
gcggauugcuguggaauuc

SEQ ID NO: 1979392 - RNA, 19 nt, Homo sapiens
  misc_RNA (1)...(19): siRNA sense strand
guggaaggauuaacauauc

SEQ ID NO: 1979393 - RNA, 19 nt, Homo sapiens
  misc_RNA (1)...(19): siRNA sense strand
aauuguugcuucagcuuua

SEQ ID NO: 1979394 - RNA, 19 nt, Homo sapiens
  misc_RNA (1)...(19): siRNA sense strand
gcucaugauuucugaacug

SEQ ID NO: 1979395 - RNA, 19 nt, Homo sapiens
  misc_RNA (1)...(19): siRNA sense strand
caugauuucugaacuggau

SEQ ID NO: 1979396 - RNA, 19 nt, Homo sapiens
  misc_RNA (1)...(19): siRNA sense strand
guucugggauucucugaag

SEQ ID NO: 1979397 - RNA, 19 nt, Homo sapiens
  misc_RNA (1)...(19): siRNA sense strand
gcaugguguggaaggauua

SEQ ID NO: 1979398 - RNA, 19 nt, Homo sapiens
  misc_RNA (1)...(19): siRNA sense strand
ucaaagcucaugauuucug

SEQ ID NO: 1979399 - RNA, 19 nt, Homo sapiens
  misc_RNA (1)...(19): siRNA sense strand
aaagagauucagaacgauu

SEQ ID NO: 1979400 - RNA, 19 nt, Homo sapiens
  misc_RNA (1)...(19): siRNA sense strand
ggaauuguccgaggagcau

SEQ ID NO: 1979401 - RNA, 19 nt, Homo sapiens
  misc_RNA (1)...(19): siRNA sense strand
ccgaggagcauaaggaaca

SEQ ID NO: 1979402 - RNA, 19 nt, Homo sapiens
  misc_RNA (1)...(19): siRNA sense strand
caaauuguugcuucagcuu

SEQ ID NO: 1979403 - RNA, 19 nt, Homo sapiens
  misc_RNA (1)...(19): siRNA sense strand
uguggaaggauuaacauau

SEQ ID NO: 1979404 - RNA, 19 nt, Homo sapiens
  misc_RNA (1)...(19): siRNA sense strand
uggaaggauuaacauaucu

SEQ ID NO: 1979405 - RNA, 19 nt, Homo sapiens
  misc_RNA (1)...(19): siRNA sense strand
ggacaacagaaaagagauu

SEQ ID NO: 1979406 - RNA, 19 nt, Homo sapiens
  misc_RNA (1)...(19): siRNA sense strand
ggauuuccaagacucuguu

SEQ ID NO: 1979407 - RNA, 19 nt, Homo sapiens
  misc_RNA (1)...(19): siRNA sense strand
ggauugcuguggaauuccu

SEQ ID NO: 1979408 - RNA, 19 nt, Homo sapiens
  misc_RNA (1)...(19): siRNA sense strand
gaauuguccgaggagcaua

SEQ ID NO: 1979409 - RNA, 19 nt, Homo sapiens
  misc_RNA (1)...(19): siRNA sense strand
guguggaaggauuaacaua

SEQ ID NO: 1979410 - RNA, 19 nt, Homo sapiens
  misc_RNA (1)...(19): siRNA sense strand
gcucggcaauuucagcuuu

SEQ ID NO: 1979411 - RNA, 19 nt, Homo sapiens
  misc_RNA (1)...(19): siRNA sense strand
ccaggugccuuucuucuuc

SEQ ID NO: 1979412 - RNA, 19 nt, Homo sapiens
  misc_RNA (1)...(19): siRNA sense strand
ccgcagugcucggcaauuu

SEQ ID NO: 1979413 - RNA, 19 nt, Homo sapiens
  misc_RNA (1)...(19): siRNA sense strand
agacagagcagccgaguau

SEQ ID NO: 1979414 - RNA, 19 nt, Homo sapiens
  misc_RNA (1)...(19): siRNA sense strand
gcagaucgaguccuucuuc

SEQ ID NO: 1979415 - RNA, 19 nt, Homo sapiens
  misc_RNA (1)...(19): siRNA sense strand
gcaaggugcugcucuucgu

SEQ ID NO: 1979416 - RNA, 19 nt, Homo sapiens
  misc_RNA (1)...(19): siRNA sense strand
gauccugaccugcaucuga

SEQ ID NO: 1979417 - RNA, 19 nt, Homo sapiens
  misc_RNA (1)...(19): siRNA sense strand
gcagugcucggcaauuuca

SEQ ID NO: 1979418 - RNA, 19 nt, Homo sapiens
  misc_RNA (1)...(19): siRNA sense strand
ucaccuggcugcucauguc

SEQ ID NO: 1979419 - RNA, 19 nt, Homo sapiens
  misc_RNA (1)...(19): siRNA sense strand
gacaacguccggagacaga

SEQ ID NO: 1979420 - RNA, 19 nt, Homo sapiens
  misc_RNA (1)...(19): siRNA sense strand
ccaccaugcucuucaucau

SEQ ID NO: 1979421 - RNA, 19 nt, Homo sapiens
  misc_RNA (1)...(19): siRNA sense strand
gacggucccuggagcagau

SEQ ID NO: 1979422 - RNA, 19 nt, Homo sapiens
  misc_RNA (1)...(19): siRNA sense strand
gguaugcccuggucuacac

SEQ ID NO: 1979423 - RNA, 19 nt, Homo sapiens
  misc_RNA (1)...(19): siRNA sense strand
ucggaucccugucccucua

SEQ ID NO: 1979424 - RNA, 19 nt, Homo sapiens
  misc_RNA (1)...(19): siRNA sense strand
gaagcugagcaucauguuc

SEQ ID NO: 1979425 - RNA, 19 nt, Homo sapiens
  misc_RNA (1)...(19): siRNA sense strand
guacgugucugagauugcu

SEQ ID NO: 1979426 - RNA, 19 nt, Homo sapiens
  misc_RNA (1)...(19): siRNA sense strand
gagcagaucgaguccuucu

SEQ ID NO: 1979427 - RNA, 19 nt, Homo sapiens
  misc_RNA (1)...(19): siRNA sense strand
ucgagcagauccaggacaa

SEQ ID NO: 1979428 - RNA, 19 nt, Homo sapiens
  misc_RNA (1)...(19): siRNA sense strand
ggaagcugagcaucauguu

SEQ ID NO: 1979429 - RNA, 19 nt, Homo sapiens
  misc_RNA (1)...(19): siRNA sense strand
uggagcagaucgaguccuu

SEQ ID NO: 1979430 - RNA, 19 nt, Homo sapiens
  misc_RNA (1)...(19): siRNA sense strand
ccuggcugcucaugucuga

SEQ ID NO: 1979431 - RNA, 19 nt, Homo sapiens
  misc_RNA (1)...(19): siRNA sense strand
ucacgcccauccuggucua

SEQ ID NO: 1979432 - RNA, 19 nt, Homo sapiens
  misc_RNA (1)...(19): siRNA sense strand
caauuucagcuuuggguau

SEQ ID NO: 1979433 - RNA, 19 nt, Homo sapiens
  misc_RNA (1)...(19): siRNA sense strand
ucgggacccugcagaacaa

SEQ ID NO: 1979434 - RNA, 19 nt, Homo sapiens
  misc_RNA (1)...(19): siRNA sense strand
gccggaagcugagcaucau

SEQ ID NO: 1979435 - RNA, 19 nt, Homo sapiens
  misc_RNA (1)...(19): siRNA sense strand
gagacagagcagccgagua

SEQ ID NO: 1979436 - RNA, 19 nt, Homo sapiens
  misc_RNA (1)...(19): siRNA sense strand
ugaccugcaucugaccaaa

SEQ ID NO: 1979437 - RNA, 19 nt, Homo sapiens
  misc_RNA (1)...(19): siRNA sense strand
ucucagcggccaucauguu

SEQ ID NO: 1979438 - RNA, 19 nt, Homo sapiens
  misc_RNA (1)...(19): siRNA sense strand
ggccggaagcugagcauca

SEQ ID NO: 1979439 - RNA, 19 nt, Homo sapiens
  misc_RNA (1)...(19): siRNA sense strand
gguguacgugucugagauu

SEQ ID NO: 1979440 - RNA, 19 nt, Homo sapiens
  misc_RNA (1)...(19): siRNA sense strand
cagcggccaucauguuugc

SEQ ID NO: 1979441 - RNA, 19 nt, Homo sapiens
  misc_RNA (1)...(19): siRNA sense strand
cgucucagcggccaucaug

SEQ ID NO: 1979442 - RNA, 19 nt, Homo sapiens
  misc_RNA (1)...(19): siRNA sense strand
ggcuguacauccacuuugg

SEQ ID NO: 1979443 - RNA, 19 nt, Homo sapiens
  misc_RNA (1)...(19): siRNA sense strand
gccgcaaggugcugcucuu

SEQ ID NO: 1979444 - RNA, 19 nt, Homo sapiens
  misc_RNA (1)...(19): siRNA sense strand
gggcuguacauccacuuug

SEQ ID NO: 1979445 - RNA, 19 nt, Homo sapiens
  misc_RNA (1)...(19): siRNA sense strand
gugccaugauccucaacga

SEQ ID NO: 1979446 - RNA, 19 nt, Homo sapiens
  misc_RNA (1)...(19): siRNA sense strand
aauuucagcuuuggguaug

SEQ ID NO: 1979447 - RNA, 19 nt, Homo sapiens
  misc_RNA (1)...(19): siRNA sense strand
ugccaaagcugccuuaaua

SEQ ID NO: 1979448 - RNA, 19 nt, Homo sapiens
  misc_RNA (1)...(19): siRNA sense strand
ccaaagcugccuuaauaua

SEQ ID NO: 1979449 - RNA, 19 nt, Homo sapiens
  misc_RNA (1)...(19): siRNA sense strand
caaagcugccuuaauauau

SEQ ID NO: 1979450 - RNA, 19 nt, Homo sapiens
  misc_RNA (1)...(19): siRNA sense strand
gaaacaaggacaugaccaa

SEQ ID NO: 1979451 - RNA, 19 nt, Homo sapiens
  misc_RNA (1)...(19): siRNA sense strand
ccaaaaggcugcugccaaa

SEQ ID NO: 1979452 - RNA, 19 nt, Homo sapiens
  misc_RNA (1)...(19): siRNA sense strand
gagcaagcauccuaagacu

SEQ ID NO: 1979453 - RNA, 19 nt, Homo sapiens
  misc_RNA (1)...(19): siRNA sense strand
uccacuuccuccagaauua

SEQ ID NO: 1979454 - RNA, 19 nt, Homo sapiens
  misc_RNA (1)...(19): siRNA sense strand
gaagaaacaaggacaugac

SEQ ID NO: 1979455 - RNA, 19 nt, Homo sapiens
  misc_RNA (1)...(19): siRNA sense strand
gagagcaagcauccuaaga

SEQ ID NO: 1979456 - RNA, 19 nt, Homo sapiens
  misc_RNA (1)...(19): siRNA sense strand
auauauaccugcacugucu

SEQ ID NO: 1979457 - RNA, 19 nt, Homo sapiens
  misc_RNA (1)...(19): siRNA sense strand
caaaugccagacccuaaga

SEQ ID NO: 1979458 - RNA, 19 nt, Homo sapiens
  misc_RNA (1)...(19): siRNA sense strand
aaagcaagcuggacaaaag

SEQ ID NO: 1979459 - RNA, 19 nt, Homo sapiens
  misc_RNA (1)...(19): siRNA sense strand
aaacaaggacaugaccaaa

SEQ ID NO: 1979460 - RNA, 19 nt, Homo sapiens
  misc_RNA (1)...(19): siRNA sense strand
cacaaaugccagacccuaa

SEQ ID NO: 1979461 - RNA, 19 nt, Homo sapiens
  misc_RNA (1)...(19): siRNA sense strand
uaauauauaccugcacugu

SEQ ID NO: 1979462 - RNA, 19 nt, Homo sapiens
  misc_RNA (1)...(19): siRNA sense strand
gccaaagcugccuuaauau

SEQ ID NO: 1979463 - RNA, 19 nt, Homo sapiens
  misc_RNA (1)...(19): siRNA sense strand
agaagaaacaaggacauga

SEQ ID NO: 1979464 - RNA, 19 nt, Homo sapiens
  misc_RNA (1)...(19): siRNA sense strand
gaccuucaagcagcacuuu

SEQ ID NO: 1979465 - RNA, 19 nt, Homo sapiens
  misc_RNA (1)...(19): siRNA sense strand
acaaggacaugaccaaaag

SEQ ID NO: 1979466 - RNA, 19 nt, Homo sapiens
  misc_RNA (1)...(19): siRNA sense strand
aaauucagucucagcagaa

SEQ ID NO: 1979467 - RNA, 19 nt, Homo sapiens
  misc_RNA (1)...(19): siRNA sense strand
cagaauuagcugauguuca

SEQ ID NO: 1979468 - RNA, 19 nt, Homo sapiens
  misc_RNA (1)...(19): siRNA sense strand
ugccagacccuaagaccuu

SEQ ID NO: 1979469 - RNA, 19 nt, Homo sapiens
  misc_RNA (1)...(19): siRNA sense strand
ccaauuaccuuacuucuaa

SEQ ID NO: 1979470 - RNA, 19 nt, Homo sapiens
  misc_RNA (1)...(19): siRNA sense strand
gaagaaagauuuggaagau

SEQ ID NO: 1979471 - RNA, 19 nt, Homo sapiens
  misc_RNA (1)...(19): siRNA sense strand
gaagaguccugugccauua

SEQ ID NO: 1979472 - RNA, 19 nt, Homo sapiens
  misc_RNA (1)...(19): siRNA sense strand
uaaguuagauggaccuaua

SEQ ID NO: 1979473 - RNA, 19 nt, Homo sapiens
  misc_RNA (1)...(19): siRNA sense strand
caaagaagcagaagaauga

SEQ ID NO: 1979474 - RNA, 19 nt, Homo sapiens
  misc_RNA (1)...(19): siRNA sense strand
gaacaaugcuauuucaaag

SEQ ID NO: 1979475 - RNA, 19 nt, Homo sapiens
  misc_RNA (1)...(19): siRNA sense strand
ggugaacgauacuaaguua

SEQ ID NO: 1979476 - RNA, 19 nt, Homo sapiens
  misc_RNA (1)...(19): siRNA sense strand
caaggaagcuuucaguguu

SEQ ID NO: 1979477 - RNA, 19 nt, Homo sapiens
  misc_RNA (1)...(19): siRNA sense strand
ggagaaauacaacagaaua

SEQ ID NO: 1979478 - RNA, 19 nt, Homo sapiens
  misc_RNA (1)...(19): siRNA sense strand
ggaccuauauuacagauuc

SEQ ID NO: 1979479 - RNA, 19 nt, Homo sapiens
  misc_RNA (1)...(19): siRNA sense strand
ggcaaccgcuucuaaauga

SEQ ID NO: 1979480 - RNA, 19 nt, Homo sapiens
  misc_RNA (1)...(19): siRNA sense strand
ggccaaagccucacuguuu

SEQ ID NO: 1979481 - RNA, 19 nt, Homo sapiens
  misc_RNA (1)...(19): siRNA sense strand
uagaagaacuugaagaaca

SEQ ID NO: 1979482 - RNA, 19 nt, Homo sapiens
  misc_RNA (1)...(19): siRNA sense strand
ggaauguaccucaggauaa

SEQ ID NO: 1979483 - RNA, 19 nt, Homo sapiens
  misc_RNA (1)...(19): siRNA sense strand
gcucaaagaggcugaauug

SEQ ID NO: 1979484 - RNA, 19 nt, Homo sapiens
  misc_RNA (1)...(19): siRNA sense strand
gaggaucuuugguuccaua

SEQ ID NO: 1979485 - RNA, 19 nt, Homo sapiens
  misc_RNA (1)...(19): siRNA sense strand
aacagaaguuggagaaaua

SEQ ID NO: 1979486 - RNA, 19 nt, Homo sapiens
  misc_RNA (1)...(19): siRNA sense strand
gaacaccaaaugaaagauu

SEQ ID NO: 1979487 - RNA, 19 nt, Homo sapiens
  misc_RNA (1)...(19): siRNA sense strand
caacuggaaucacgccauu

SEQ ID NO: 1979488 - RNA, 19 nt, Homo sapiens
  misc_RNA (1)...(19): siRNA sense strand
ggaaacagaaguuggagaa

SEQ ID NO: 1979489 - RNA, 19 nt, Homo sapiens
  misc_RNA (1)...(19): siRNA sense strand
gaauauuggugaacgauac

SEQ ID NO: 1979490 - RNA, 19 nt, Homo sapiens
  misc_RNA (1)...(19): siRNA sense strand
ggaaguguccuguauuuua

SEQ ID NO: 1979491 - RNA, 19 nt, Homo sapiens
  misc_RNA (1)...(19): siRNA sense strand
agaaagauuuggaagauuc

SEQ ID NO: 1979492 - RNA, 19 nt, Homo sapiens
  misc_RNA (1)...(19): siRNA sense strand
ggagcucgauucagauaug

SEQ ID NO: 1979493 - RNA, 19 nt, Homo sapiens
  misc_RNA (1)...(19): siRNA sense strand
ggaagaguccugugccauu

SEQ ID NO: 1979494 - RNA, 19 nt, Homo sapiens
  misc_RNA (1)...(19): siRNA sense strand
gaauguaccucaggauaag

SEQ ID NO: 1979495 - RNA, 19 nt, Homo sapiens
  misc_RNA (1)...(19): siRNA sense strand
aaacagaaguuggagaaau

SEQ ID NO: 1979496 - RNA, 19 nt, Homo sapiens
  misc_RNA (1)...(19): siRNA sense strand
ggcaagaaauacaaguaaa

SEQ ID NO: 1979497 - RNA, 19 nt, Homo sapiens
  misc_RNA (1)...(19): siRNA sense strand
caaguaccaucaagucuuc

SEQ ID NO: 1979498 - RNA, 19 nt, Homo sapiens
  misc_RNA (1)...(19): siRNA sense strand
guaccaaacugugacauca

SEQ ID NO: 1979499 - RNA, 19 nt, Homo sapiens
  misc_RNA (1)...(19): siRNA sense strand
gaagcaaacaaucagaauu

SEQ ID NO: 1979500 - RNA, 19 nt, Homo sapiens
  misc_RNA (1)...(19): siRNA sense strand
gaaugcugcucgaauaagu

SEQ ID NO: 1979501 - RNA, 19 nt, Homo sapiens
  misc_RNA (1)...(19): siRNA sense strand
gaagaacaccaaaugaaag

SEQ ID NO: 1979502 - RNA, 19 nt, Homo sapiens
  misc_RNA (1)...(19): siRNA sense strand
ugaagaacaccaaaugaaa

SEQ ID NO: 1979503 - RNA, 19 nt, Homo sapiens
  misc_RNA (1)...(19): siRNA sense strand
acauggagcucgauucaga

SEQ ID NO: 1979504 - RNA, 19 nt, Homo sapiens
  misc_RNA (1)...(19): siRNA sense strand
ucggaaugcugcucgaaua

SEQ ID NO: 1979505 - RNA, 19 nt, Homo sapiens
  misc_RNA (1)...(19): siRNA sense strand
gaauggaggaucuuugguu

SEQ ID NO: 1979506 - RNA, 19 nt, Homo sapiens
  misc_RNA (1)...(19): siRNA sense strand
ucaaagaggcugaauugga

SEQ ID NO: 1979507 - RNA, 19 nt, Homo sapiens
  misc_RNA (1)...(19): siRNA sense strand
ggcagaaucuacuggaaug

SEQ ID NO: 1979508 - RNA, 19 nt, Homo sapiens
  misc_RNA (1)...(19): siRNA sense strand
gaaucacgccauuugaauu

SEQ ID NO: 1979509 - RNA, 19 nt, Homo sapiens
  misc_RNA (1)...(19): siRNA sense strand
gggcaagaaauacaaguaa

SEQ ID NO: 1979510 - RNA, 19 nt, Homo sapiens
  misc_RNA (1)...(19): siRNA sense strand
ucuagaagggcaagaaaua

SEQ ID NO: 1979511 - RNA, 19 nt, Homo sapiens
  misc_RNA (1)...(19): siRNA sense strand
gccaaagccucacuguuuc

SEQ ID NO: 1979512 - RNA, 19 nt, Homo sapiens
  misc_RNA (1)...(19): siRNA sense strand
ggaaucacgccauuugaau

SEQ ID NO: 1979513 - RNA, 19 nt, Homo sapiens
  misc_RNA (1)...(19): siRNA sense strand
gauaagaagcuuguuaaag

SEQ ID NO: 1979514 - RNA, 19 nt, Homo sapiens
  misc_RNA (1)...(19): siRNA sense strand
guuagauggaccuauauua

SEQ ID NO: 1979515 - RNA, 19 nt, Homo sapiens
  misc_RNA (1)...(19): siRNA sense strand
cagaagaaguagaagaaag

SEQ ID NO: 1979516 - RNA, 19 nt, Homo sapiens
  misc_RNA (1)...(19): siRNA sense strand
gcaagaaauacaaguaaag

SEQ ID NO: 1979517 - RNA, 19 nt, Homo sapiens
  misc_RNA (1)...(19): siRNA sense strand
ggauaagaagcuuguuaaa

SEQ ID NO: 1979518 - RNA, 19 nt, Homo sapiens
  misc_RNA (1)...(19): siRNA sense strand
ggaauauuggugaacgaua

SEQ ID NO: 1979519 - RNA, 19 nt, Homo sapiens
  misc_RNA (1)...(19): siRNA sense strand
aggauguguuugccaauua

SEQ ID NO: 1979520 - RNA, 19 nt, Homo sapiens
  misc_RNA (1)...(19): siRNA sense strand
gaaguagaagaaagauuug

SEQ ID NO: 1979521 - RNA, 19 nt, Homo sapiens
  misc_RNA (1)...(19): siRNA sense strand
gagaagcaaacaaucagaa

SEQ ID NO: 1979522 - RNA, 19 nt, Homo sapiens
  misc_RNA (1)...(19): siRNA sense strand
caggauaagaagcuuguua

SEQ ID NO: 1979523 - RNA, 19 nt, Homo sapiens
  misc_RNA (1)...(19): siRNA sense strand
ccaaagaagcagaagaaug

SEQ ID NO: 1979524 - RNA, 19 nt, Homo sapiens
  misc_RNA (1)...(19): siRNA sense strand
cagaggaauuccagacgaa

SEQ ID NO: 1979525 - RNA, 19 nt, Homo sapiens
  misc_RNA (1)...(19): siRNA sense strand
cagauucuauucaugaaca

SEQ ID NO: 1979526 - RNA, 19 nt, Homo sapiens
  misc_RNA (1)...(19): siRNA sense strand
gagaauauggcagaaucua

SEQ ID NO: 1979527 - RNA, 19 nt, Homo sapiens
  misc_RNA (1)...(19): siRNA sense strand
ucaaagcaauaucaucaag

SEQ ID NO: 1979528 - RNA, 19 nt, Homo sapiens
  misc_RNA (1)...(19): siRNA sense strand
gaaaucagaagcuggacau

SEQ ID NO: 1979529 - RNA, 19 nt, Homo sapiens
  misc_RNA (1)...(19): siRNA sense strand
aaacagcgacuccgacguu

SEQ ID NO: 1979530 - RNA, 19 nt, Homo sapiens
  misc_RNA (1)...(19): siRNA sense strand
aagccucacuguuucaauu

SEQ ID NO: 1979531 - RNA, 19 nt, Homo sapiens
  misc_RNA (1)...(19): siRNA sense strand
caacaaggaagcuuucagu

SEQ ID NO: 1979532 - RNA, 19 nt, Homo sapiens
  misc_RNA (1)...(19): siRNA sense strand
gggcaaccgcuucuaaaug

SEQ ID NO: 1979533 - RNA, 19 nt, Homo sapiens
  misc_RNA (1)...(19): siRNA sense strand
gaaucaagaacuuaaacga

SEQ ID NO: 1979534 - RNA, 19 nt, Homo sapiens
  misc_RNA (1)...(19): siRNA sense strand
gcaaccgcuucuaaaugaa

SEQ ID NO: 1979535 - RNA, 19 nt, Homo sapiens
  misc_RNA (1)...(19): siRNA sense strand
ccacgcagaagaaguagaa

SEQ ID NO: 1979536 - RNA, 19 nt, Homo sapiens
  misc_RNA (1)...(19): siRNA sense strand
gcagacaccaguccuucaa

SEQ ID NO: 1979537 - RNA, 19 nt, Homo sapiens
  misc_RNA (1)...(19): siRNA sense strand
ucacuuacgaucucucaaa

SEQ ID NO: 1979538 - RNA, 19 nt, Homo sapiens
  misc_RNA (1)...(19): siRNA sense strand
ggaaauacccaaguaccau

SEQ ID NO: 1979539 - RNA, 19 nt, Homo sapiens
  misc_RNA (1)...(19): siRNA sense strand
ucacgccauuugaauuuga

SEQ ID NO: 1979540 - RNA, 19 nt, Homo sapiens
  misc_RNA (1)...(19): siRNA sense strand
uaccugacaugagcaaauu

SEQ ID NO: 1979541 - RNA, 19 nt, Homo sapiens
  misc_RNA (1)...(19): siRNA sense strand
gaagaaugaaagcaacuca

SEQ ID NO: 1979542 - RNA, 19 nt, Homo sapiens
  misc_RNA (1)...(19): siRNA sense strand
gcagaagaaguagaagaaa

SEQ ID NO: 1979543 - RNA, 19 nt, Homo sapiens
  misc_RNA (1)...(19): siRNA sense strand
guagaagaaagauuuggaa

SEQ ID NO: 1979544 - RNA, 19 nt, Homo sapiens
  misc_RNA (1)...(19): siRNA sense strand
aaucacgccauuugaauuu

SEQ ID NO: 1979545 - RNA, 19 nt, Homo sapiens
  misc_RNA (1)...(19): siRNA sense strand
gagcaggccgagagcguaa

SEQ ID NO: 1979546 - RNA, 19 nt, Homo sapiens
  misc_RNA (1)...(19): siRNA sense strand
agaagaaguagaagaaaga

SEQ ID NO: 1979547 - RNA, 19 nt, Homo sapiens
  misc_RNA (1)...(19): siRNA sense strand
gaauauggcagaaucuacu

SEQ ID NO: 1979548 - RNA, 19 nt, Homo sapiens
  misc_RNA (1)...(19): siRNA sense strand
gaacagcagaggcggaucu

SEQ ID NO: 1979549 - RNA, 19 nt, Homo sapiens
  misc_RNA (1)...(19): siRNA sense strand
cgacauggagcucgauuca

SEQ ID NO: 1979550 - RNA, 19 nt, Homo sapiens
  misc_RNA (1)...(19): siRNA sense strand
guccaaagaagcagaagaa

SEQ ID NO: 1979551 - RNA, 19 nt, Homo sapiens
  misc_RNA (1)...(19): siRNA sense strand
gaaacagaaguuggagaaa

SEQ ID NO: 1979552 - RNA, 19 nt, Homo sapiens
  misc_RNA (1)...(19): siRNA sense strand
ggucaacuauccugguuuu

SEQ ID NO: 1979553 - RNA, 19 nt, Homo sapiens
  misc_RNA (1)...(19): siRNA sense strand
gccaauuaccuuacuucua

SEQ ID NO: 1979554 - RNA, 19 nt, Homo sapiens
  misc_RNA (1)...(19): siRNA sense strand
gcuagaggaggaccacaaa

SEQ ID NO: 1979555 - RNA, 19 nt, Homo sapiens
  misc_RNA (1)...(19): siRNA sense strand
caagaugcacuagguguga

SEQ ID NO: 1979556 - RNA, 19 nt, Homo sapiens
  misc_RNA (1)...(19): siRNA sense strand
gcagcgauaccacgcagaa

SEQ ID NO: 1979557 - RNA, 19 nt, Homo sapiens
  misc_RNA (1)...(19): siRNA sense strand
caaccgcuucuaaaugaaa

SEQ ID NO: 1979558 - RNA, 19 nt, Homo sapiens
  misc_RNA (1)...(19): siRNA sense strand
ccaaguaccaucaagucuu

SEQ ID NO: 1979559 - RNA, 19 nt, Homo sapiens
  misc_RNA (1)...(19): siRNA sense strand
ucuagaagaacuugaagaa

SEQ ID NO: 1979560 - RNA, 19 nt, Homo sapiens
  misc_RNA (1)...(19): siRNA sense strand
gaaagauuuggaagauuca

SEQ ID NO: 1979561 - RNA, 19 nt, Homo sapiens
  misc_RNA (1)...(19): siRNA sense strand
gcgauaccacgcagaagaa

SEQ ID NO: 1979562 - RNA, 19 nt, Homo sapiens
  misc_RNA (1)...(19): siRNA sense strand
ggagaagcaaacaaucaga

SEQ ID NO: 1979563 - RNA, 19 nt, Homo sapiens
  misc_RNA (1)...(19): siRNA sense strand
cagaaucuacuggaaugua

SEQ ID NO: 1979564 - RNA, 19 nt, Homo sapiens
  misc_RNA (1)...(19): siRNA sense strand
caaagcaauaucaucaaga

SEQ ID NO: 1979565 - RNA, 19 nt, Homo sapiens
  misc_RNA (1)...(19): siRNA sense strand
cgauucagauauggaggua

SEQ ID NO: 1979566 - RNA, 19 nt, Homo sapiens
  misc_RNA (1)...(19): siRNA sense strand
caacuauccugguuuuaau

SEQ ID NO: 1979567 - RNA, 19 nt, Homo sapiens
  misc_RNA (1)...(19): siRNA sense strand
uuaccuuacuucuaacuuc

SEQ ID NO: 1979568 - RNA, 19 nt, Homo sapiens
  misc_RNA (1)...(19): siRNA sense strand
cgcacugacucuagaagaa

SEQ ID NO: 1979569 - RNA, 19 nt, Homo sapiens
  misc_RNA (1)...(19): siRNA sense strand
ugaagaaagucuccaaaua

SEQ ID NO: 1979570 - RNA, 19 nt, Homo sapiens
  misc_RNA (1)...(19): siRNA sense strand
gaaagucuccaaauacauu

SEQ ID NO: 1979571 - RNA, 19 nt, Homo sapiens
  misc_RNA (1)...(19): siRNA sense strand
gaagaucuaugcuccacaa

SEQ ID NO: 1979572 - RNA, 19 nt, Homo sapiens
  misc_RNA (1)...(19): siRNA sense strand
gaagaaagucuccaaauac

SEQ ID NO: 1979573 - RNA, 19 nt, Homo sapiens
  misc_RNA (1)...(19): siRNA sense strand
gagcgaggacugcgaguua

SEQ ID NO: 1979574 - RNA, 19 nt, Homo sapiens
  misc_RNA (1)...(19): siRNA sense strand
ggacugcgaguuauugaaa

SEQ ID NO: 1979575 - RNA, 19 nt, Homo sapiens
  misc_RNA (1)...(19): siRNA sense strand
caugagcaguggaagauaa

SEQ ID NO: 1979576 - RNA, 19 nt, Homo sapiens
  misc_RNA (1)...(19): siRNA sense strand
gcauauaccaucuuccuau

SEQ ID NO: 1979577 - RNA, 19 nt, Homo sapiens
  misc_RNA (1)...(19): siRNA sense strand
aagaaagucuccaaauaca

SEQ ID NO: 1979578 - RNA, 19 nt, Homo sapiens
  misc_RNA (1)...(19): siRNA sense strand
gaagguuguuuggcuuguu

SEQ ID NO: 1979579 - RNA, 19 nt, Homo sapiens
  misc_RNA (1)...(19): siRNA sense strand
ccagucauaucucgaaggu

SEQ ID NO: 1979580 - RNA, 19 nt, Homo sapiens
  misc_RNA (1)...(19): siRNA sense strand
ggauugauaggcagcaguu

SEQ ID NO: 1979581 - RNA, 19 nt, Homo sapiens
  misc_RNA (1)...(19): siRNA sense strand
aagguuguuuggcuuguuu

SEQ ID NO: 1979582 - RNA, 19 nt, Homo sapiens
  misc_RNA (1)...(19): siRNA sense strand
uaccauuuaugaagacaga

SEQ ID NO: 1979583 - RNA, 19 nt, Homo sapiens
  misc_RNA (1)...(19): siRNA sense strand
uaaccuuuaugcagaagca

SEQ ID NO: 1979584 - RNA, 19 nt, Homo sapiens
  misc_RNA (1)...(19): siRNA sense strand
uauaccaucuuccuaugca

SEQ ID NO: 1979585 - RNA, 19 nt, Homo sapiens
  misc_RNA (1)...(19): siRNA sense strand
agaaugagaagaucuaugc

SEQ ID NO: 1979586 - RNA, 19 nt, Homo sapiens
  misc_RNA (1)...(19): siRNA sense strand
aggcagcaguuugaagaaa

SEQ ID NO: 1979587 - RNA, 19 nt, Homo sapiens
  misc_RNA (1)...(19): siRNA sense strand
gcaugagcaguggaagaua

SEQ ID NO: 1979588 - RNA, 19 nt, Homo sapiens
  misc_RNA (1)...(19): siRNA sense strand
gaggacugcgaguuauuga

SEQ ID NO: 1979589 - RNA, 19 nt, Homo sapiens
  misc_RNA (1)...(19): siRNA sense strand
gcgaggacugcgaguuauu

SEQ ID NO: 1979590 - RNA, 19 nt, Homo sapiens
  misc_RNA (1)...(19): siRNA sense strand
uaacagcauauaccaucuu

SEQ ID NO: 1979591 - RNA, 19 nt, Homo sapiens
  misc_RNA (1)...(19): siRNA sense strand
acugcgaguuauugaaauu

SEQ ID NO: 1979592 - RNA, 19 nt, Homo sapiens
  misc_RNA (1)...(19): siRNA sense strand
uucaagagcagaaugagaa

SEQ ID NO: 1979593 - RNA, 19 nt, Homo sapiens
  misc_RNA (1)...(19): siRNA sense strand
gcagaaugagaagaucuau

SEQ ID NO: 1979594 - RNA, 19 nt, Homo sapiens
  misc_RNA (1)...(19): siRNA sense strand
cgaggacugcgaguuauug

SEQ ID NO: 1979595 - RNA, 19 nt, Homo sapiens
  misc_RNA (1)...(19): siRNA sense strand
gacugcgaguuauugaaau

SEQ ID NO: 1979596 - RNA, 19 nt, Homo sapiens
  misc_RNA (1)...(19): siRNA sense strand
cgaacucuaaauaaccuuu

SEQ ID NO: 1979597 - RNA, 19 nt, Homo sapiens
  misc_RNA (1)...(19): siRNA sense strand
ggcaugagcaguggaagau

SEQ ID NO: 1979598 - RNA, 19 nt, Homo sapiens
  misc_RNA (1)...(19): siRNA sense strand
gagcagaaugagaagaucu

SEQ ID NO: 1979599 - RNA, 19 nt, Homo sapiens
  misc_RNA (1)...(19): siRNA sense strand
uugauaggcagcaguuuga

SEQ ID NO: 1979600 - RNA, 19 nt, Homo sapiens
  misc_RNA (1)...(19): siRNA sense strand
gauaggcagcaguuugaag

SEQ ID NO: 1979601 - RNA, 19 nt, Homo sapiens
  misc_RNA (1)...(19): siRNA sense strand
auaggcagcaguuugaaga

SEQ ID NO: 1979602 - RNA, 19 nt, Homo sapiens
  misc_RNA (1)...(19): siRNA sense strand
cgaagguuguuuggcuugu

SEQ ID NO: 1979603 - RNA, 19 nt, Homo sapiens
  misc_RNA (1)...(19): siRNA sense strand
cugaagaaagucuccaaau

SEQ ID NO: 1979604 - RNA, 19 nt, Homo sapiens
  misc_RNA (1)...(19): siRNA sense strand
gggcauaggugcagugagu

SEQ ID NO: 1979605 - RNA, 19 nt, Homo sapiens
  misc_RNA (1)...(19): siRNA sense strand
gcucacaucacccaagaua

SEQ ID NO: 1979606 - RNA, 19 nt, Homo sapiens
  misc_RNA (1)...(19): siRNA sense strand
gcgccagggugcaaguuga

SEQ ID NO: 1979607 - RNA, 19 nt, Homo sapiens
  misc_RNA (1)...(19): siRNA sense strand
ucacaucacccaagauacu

SEQ ID NO: 1979608 - RNA, 19 nt, Homo sapiens
  misc_RNA (1)...(19): siRNA sense strand
gggcacaggauccaauugg

SEQ ID NO: 1979609 - RNA, 19 nt, Homo sapiens
  misc_RNA (1)...(19): siRNA sense strand
aggcucacaucacccaaga

SEQ ID NO: 1979610 - RNA, 19 nt, Homo sapiens
  misc_RNA (1)...(19): siRNA sense strand
gaagagagguugcgagaga

SEQ ID NO: 1979611 - RNA, 19 nt, Homo sapiens
  misc_RNA (1)...(19): siRNA sense strand
gaacuugauucacuaauga

SEQ ID NO: 1979612 - RNA, 19 nt, Homo sapiens
  misc_RNA (1)...(19): siRNA sense strand
gaguauaucucugaaagaa

SEQ ID NO: 1979613 - RNA, 19 nt, Homo sapiens
  misc_RNA (1)...(19): siRNA sense strand
gcaugacguuuacaacuuu

SEQ ID NO: 1979614 - RNA, 19 nt, Homo sapiens
  misc_RNA (1)...(19): siRNA sense strand
cgagagauguuugguuuau

SEQ ID NO: 1979615 - RNA, 19 nt, Homo sapiens
  misc_RNA (1)...(19): siRNA sense strand
gagagauguuugguuuaua

SEQ ID NO: 1979616 - RNA, 19 nt, Homo sapiens
  misc_RNA (1)...(19): siRNA sense strand
agaagaacuugauucacua

SEQ ID NO: 1979617 - RNA, 19 nt, Homo sapiens
  misc_RNA (1)...(19): siRNA sense strand
gaagaacuugauucacuaa

SEQ ID NO: 1979618 - RNA, 19 nt, Homo sapiens
  misc_RNA (1)...(19): siRNA sense strand
gggaguauaucucugaaag

SEQ ID NO: 1979619 - RNA, 19 nt, Homo sapiens
  misc_RNA (1)...(19): siRNA sense strand
ggcaugacguuuacaacuu

SEQ ID NO: 1979620 - RNA, 19 nt, Homo sapiens
  misc_RNA (1)...(19): siRNA sense strand
uaaugugccuauacugauu

SEQ ID NO: 1979621 - RNA, 19 nt, Homo sapiens
  misc_RNA (1)...(19): siRNA sense strand
gaaaggcuguuagagucaa

SEQ ID NO: 1979622 - RNA, 19 nt, Homo sapiens
  misc_RNA (1)...(19): siRNA sense strand
gcuaaugugccuauacuga

SEQ ID NO: 1979623 - RNA, 19 nt, Homo sapiens
  misc_RNA (1)...(19): siRNA sense strand
aagaagaacuugauucacu

SEQ ID NO: 1979624 - RNA, 19 nt, Homo sapiens
  misc_RNA (1)...(19): siRNA sense strand
gaaaacugguaaacuggua

SEQ ID NO: 1979625 - RNA, 19 nt, Homo sapiens
  misc_RNA (1)...(19): siRNA sense strand
guauaucucugaaagaacu

SEQ ID NO: 1979626 - RNA, 19 nt, Homo sapiens
  misc_RNA (1)...(19): siRNA sense strand
cagaugaaaccauugcuaa

SEQ ID NO: 1979627 - RNA, 19 nt, Homo sapiens
  misc_RNA (1)...(19): siRNA sense strand
ugacagacuuggacaacau

SEQ ID NO: 1979628 - RNA, 19 nt, Homo sapiens
  misc_RNA (1)...(19): siRNA sense strand
gcccgacccuuagaaguuu

SEQ ID NO: 1979629 - RNA, 19 nt, Homo sapiens
  misc_RNA (1)...(19): siRNA sense strand
ugcgagagauguuugguuu

SEQ ID NO: 1979630 - RNA, 19 nt, Homo sapiens
  misc_RNA (1)...(19): siRNA sense strand
uaagaaaacugguaaacug

SEQ ID NO: 1979631 - RNA, 19 nt, Homo sapiens
  misc_RNA (1)...(19): siRNA sense strand
aaacugguauuucuuggau

SEQ ID NO: 1979632 - RNA, 19 nt, Homo sapiens
  misc_RNA (1)...(19): siRNA sense strand
gcuaaaagaugacagacuu

SEQ ID NO: 1979633 - RNA, 19 nt, Homo sapiens
  misc_RNA (1)...(19): siRNA sense strand
caacauugcuacacaugcu

SEQ ID NO: 1979634 - RNA, 19 nt, Homo sapiens
  misc_RNA (1)...(19): siRNA sense strand
gguaaacugguauuucuug

SEQ ID NO: 1979635 - RNA, 19 nt, Homo sapiens
  misc_RNA (1)...(19): siRNA sense strand
ccgaagaacugaccauugc

SEQ ID NO: 1979636 - RNA, 19 nt, Homo sapiens
  misc_RNA (1)...(19): siRNA sense strand
caacauuacaucccacuuc

SEQ ID NO: 1979637 - RNA, 19 nt, Homo sapiens
  misc_RNA (1)...(19): siRNA sense strand
aagacaagguuacggagaa

SEQ ID NO: 1979638 - RNA, 19 nt, Homo sapiens
  misc_RNA (1)...(19): siRNA sense strand
agaacuugauucacuaaug

SEQ ID NO: 1979639 - RNA, 19 nt, Homo sapiens
  misc_RNA (1)...(19): siRNA sense strand
ggauggcacaguacauuga

SEQ ID NO: 1979640 - RNA, 19 nt, Homo sapiens
  misc_RNA (1)...(19): siRNA sense strand
aaacaacauugcuacacau

SEQ ID NO: 1979641 - RNA, 19 nt, Homo sapiens
  misc_RNA (1)...(19): siRNA sense strand
gauguuugguuuauauggu

SEQ ID NO: 1979642 - RNA, 19 nt, Homo sapiens
  misc_RNA (1)...(19): siRNA sense strand
uggcacaguacauugauua

SEQ ID NO: 1979643 - RNA, 19 nt, Homo sapiens
  misc_RNA (1)...(19): siRNA sense strand
gauuggauuuacagugguu

SEQ ID NO: 1979644 - RNA, 19 nt, Homo sapiens
  misc_RNA (1)...(19): siRNA sense strand
gcgagagauguuugguuua

SEQ ID NO: 1979645 - RNA, 19 nt, Homo sapiens
  misc_RNA (1)...(19): siRNA sense strand
ggaguauaucucugaaaga

SEQ ID NO: 1979646 - RNA, 19 nt, Homo sapiens
  misc_RNA (1)...(19): siRNA sense strand
aaaacuaccuuccugcuau

SEQ ID NO: 1979647 - RNA, 19 nt, Homo sapiens
  misc_RNA (1)...(19): siRNA sense strand
uaagaucgacagaccugaa

SEQ ID NO: 1979648 - RNA, 19 nt, Homo sapiens
  misc_RNA (1)...(19): siRNA sense strand
cuaccuuccugcuaucaau

SEQ ID NO: 1979649 - RNA, 19 nt, Homo sapiens
  misc_RNA (1)...(19): siRNA sense strand
gugccuauacugauucuug

SEQ ID NO: 1979650 - RNA, 19 nt, Homo sapiens
  misc_RNA (1)...(19): siRNA sense strand
cugguaaacugguauuucu

SEQ ID NO: 1979651 - RNA, 19 nt, Homo sapiens
  misc_RNA (1)...(19): siRNA sense strand
ucacuaaugacagaugaaa

SEQ ID NO: 1979652 - RNA, 19 nt, Homo sapiens
  misc_RNA (1)...(19): siRNA sense strand
gauuggauaaugcaggaaa

SEQ ID NO: 1979653 - RNA, 19 nt, Homo sapiens
  misc_RNA (1)...(19): siRNA sense strand
acugguauuucuuggauug

SEQ ID NO: 1979654 - RNA, 19 nt, Homo sapiens
  misc_RNA (1)...(19): siRNA sense strand
gaagccaucagugaagaga

SEQ ID NO: 1979655 - RNA, 19 nt, Homo sapiens
  misc_RNA (1)...(19): siRNA sense strand
uugauucacuaaugacaga

SEQ ID NO: 1979656 - RNA, 19 nt, Homo sapiens
  misc_RNA (1)...(19): siRNA sense strand
ggauugugcagaccacgaa

SEQ ID NO: 1979657 - RNA, 19 nt, Homo sapiens
  misc_RNA (1)...(19): siRNA sense strand
aaacuaccuuccugcuauc

SEQ ID NO: 1979658 - RNA, 19 nt, Homo sapiens
  misc_RNA (1)...(19): siRNA sense strand
gaucuggguggacauguuc

SEQ ID NO: 1979659 - RNA, 19 nt, Homo sapiens
  misc_RNA (1)...(19): siRNA sense strand
uuucuuggauuggauaaug

SEQ ID NO: 1979660 - RNA, 19 nt, Homo sapiens
  misc_RNA (1)...(19): siRNA sense strand
ugaucuggguggacauguu

SEQ ID NO: 1979661 - RNA, 19 nt, Homo sapiens
  misc_RNA (1)...(19): siRNA sense strand
acugaaugcccgacccuua

SEQ ID NO: 1979662 - RNA, 19 nt, Homo sapiens
  misc_RNA (1)...(19): siRNA sense strand
gguauuucuuggauuggau

SEQ ID NO: 1979663 - RNA, 19 nt, Homo sapiens
  misc_RNA (1)...(19): siRNA sense strand
ggacauguucaagcucgaa

SEQ ID NO: 1979664 - RNA, 19 nt, Homo sapiens
  misc_RNA (1)...(19): siRNA sense strand
cgaaaggcuguuagaguca

SEQ ID NO: 1979665 - RNA, 19 nt, Homo sapiens
  misc_RNA (1)...(19): siRNA sense strand
gaaugcccgacccuuagaa

SEQ ID NO: 1979666 - RNA, 19 nt, Homo sapiens
  misc_RNA (1)...(19): siRNA sense strand
cacgaaaggcuguuagagu

SEQ ID NO: 1979667 - RNA, 19 nt, Homo sapiens
  misc_RNA (1)...(19): siRNA sense strand
guauuucuuggauuggaua

SEQ ID NO: 1979668 - RNA, 19 nt, Homo sapiens
  misc_RNA (1)...(19): siRNA sense strand
acagaugaaaccauugcua

SEQ ID NO: 1979669 - RNA, 19 nt, Homo sapiens
  misc_RNA (1)...(19): siRNA sense strand
guagugugcucaaaagaca

SEQ ID NO: 1979670 - RNA, 19 nt, Homo sapiens
  misc_RNA (1)...(19): siRNA sense strand
aaaggcuguuagagucaaa

SEQ ID NO: 1979671 - RNA, 19 nt, Homo sapiens
  misc_RNA (1)...(19): siRNA sense strand
gagguugcgagagauguuu

SEQ ID NO: 1979672 - RNA, 19 nt, Homo sapiens
  misc_RNA (1)...(19): siRNA sense strand
ggguggacauguucaagcu

SEQ ID NO: 1979673 - RNA, 19 nt, Homo sapiens
  misc_RNA (1)...(19): siRNA sense strand
ggcacaguacauugauuaa

SEQ ID NO: 1979674 - RNA, 19 nt, Homo sapiens
  misc_RNA (1)...(19): siRNA sense strand
cuaaugugccuauacugau

SEQ ID NO: 1979675 - RNA, 19 nt, Homo sapiens
  misc_RNA (1)...(19): siRNA sense strand
caaaagaagaacuugauuc

SEQ ID NO: 1979676 - RNA, 19 nt, Homo sapiens
  misc_RNA (1)...(19): siRNA sense strand
gcucgaagaguguggaaaa

SEQ ID NO: 1979677 - RNA, 19 nt, Homo sapiens
  misc_RNA (1)...(19): siRNA sense strand
aaaacaacauugcuacaca

SEQ ID NO: 1979678 - RNA, 19 nt, Homo sapiens
  misc_RNA (1)...(19): siRNA sense strand
cauguguagugugcucaaa

SEQ ID NO: 1979679 - RNA, 19 nt, Homo sapiens
  misc_RNA (1)...(19): siRNA sense strand
gaaaggggaguauaucucu

SEQ ID NO: 1979680 - RNA, 19 nt, Homo sapiens
  misc_RNA (1)...(19): siRNA sense strand
uaaacugguauuucuugga

SEQ ID NO: 1979681 - RNA, 19 nt, Homo sapiens
  misc_RNA (1)...(19): siRNA sense strand
uuguauuucugguggauug

SEQ ID NO: 1979682 - RNA, 19 nt, Homo sapiens
  misc_RNA (1)...(19): siRNA sense strand
aaacugguaaacugguauu

SEQ ID NO: 1979683 - RNA, 19 nt, Homo sapiens
  misc_RNA (1)...(19): siRNA sense strand
ugguuuauauggucagaca

SEQ ID NO: 1979684 - RNA, 19 nt, Homo sapiens
  misc_RNA (1)...(19): siRNA sense strand
gagauguuugguuuauaug

SEQ ID NO: 1979685 - RNA, 19 nt, Homo sapiens
  misc_RNA (1)...(19): siRNA sense strand
gcuguuagagucaaaagaa

SEQ ID NO: 1979686 - RNA, 19 nt, Homo sapiens
  misc_RNA (1)...(19): siRNA sense strand
gaugacagacuuggacaac

SEQ ID NO: 1979687 - RNA, 19 nt, Homo sapiens
  misc_RNA (1)...(19): siRNA sense strand
ugaaugcccgacccuuaga

SEQ ID NO: 1979688 - RNA, 19 nt, Homo sapiens
  misc_RNA (1)...(19): siRNA sense strand
caaauucucuugcaaguua

SEQ ID NO: 1979689 - RNA, 19 nt, Homo sapiens
  misc_RNA (1)...(19): siRNA sense strand
cagaauagcucuacaagug

SEQ ID NO: 1979690 - RNA, 19 nt, Homo sapiens
  misc_RNA (1)...(19): siRNA sense strand
aauaagagcucucaagaaa

SEQ ID NO: 1979691 - RNA, 19 nt, Homo sapiens
  misc_RNA (1)...(19): siRNA sense strand
caagagcacuucccaggua

SEQ ID NO: 1979692 - RNA, 19 nt, Homo sapiens
  misc_RNA (1)...(19): siRNA sense strand
ccagguagcugcaucacua

SEQ ID NO: 1979693 - RNA, 19 nt, Homo sapiens
  misc_RNA (1)...(19): siRNA sense strand
aaacuuaccuccagcacua

SEQ ID NO: 1979694 - RNA, 19 nt, Homo sapiens
  misc_RNA (1)...(19): siRNA sense strand
acaaauacaucgcugcuaa

SEQ ID NO: 1979695 - RNA, 19 nt, Homo sapiens
  misc_RNA (1)...(19): siRNA sense strand
gagaagcauugaaguuauu

SEQ ID NO: 1979696 - RNA, 19 nt, Homo sapiens
  misc_RNA (1)...(19): siRNA sense strand
gcauugaaguuauuucuca

SEQ ID NO: 1979697 - RNA, 19 nt, Homo sapiens
  misc_RNA (1)...(19): siRNA sense strand
uaagagcucucaagaaagu

SEQ ID NO: 1979698 - RNA, 19 nt, Homo sapiens
  misc_RNA (1)...(19): siRNA sense strand
gaaaacaguucaacgugua

SEQ ID NO: 1979699 - RNA, 19 nt, Homo sapiens
  misc_RNA (1)...(19): siRNA sense strand
auacaucgcugcuaacuuc

SEQ ID NO: 1979700 - RNA, 19 nt, Homo sapiens
  misc_RNA (1)...(19): siRNA sense strand
caacaaaguggaucaccua

SEQ ID NO: 1979701 - RNA, 19 nt, Homo sapiens
  misc_RNA (1)...(19): siRNA sense strand
caaaguggaucaccuaaaa

SEQ ID NO: 1979702 - RNA, 19 nt, Homo sapiens
  misc_RNA (1)...(19): siRNA sense strand
gaaagcaacacuggaugua

SEQ ID NO: 1979703 - RNA, 19 nt, Homo sapiens
  misc_RNA (1)...(19): siRNA sense strand
caaagcagcagcagcguuu

SEQ ID NO: 1979704 - RNA, 19 nt, Homo sapiens
  misc_RNA (1)...(19): siRNA sense strand
ugagaguucugucaaauuc

SEQ ID NO: 1979705 - RNA, 19 nt, Homo sapiens
  misc_RNA (1)...(19): siRNA sense strand
ccucacaguugccuucuaa

SEQ ID NO: 1979706 - RNA, 19 nt, Homo sapiens
  misc_RNA (1)...(19): siRNA sense strand
gaauagcucuacaagugau

SEQ ID NO: 1979707 - RNA, 19 nt, Homo sapiens
  misc_RNA (1)...(19): siRNA sense strand
auacagaggcagugaaaua

SEQ ID NO: 1979708 - RNA, 19 nt, Homo sapiens
  misc_RNA (1)...(19): siRNA sense strand
gagguagaauugccacuau

SEQ ID NO: 1979709 - RNA, 19 nt, Homo sapiens
  misc_RNA (1)...(19): siRNA sense strand
uaaacacgguucugcauca

SEQ ID NO: 1979710 - RNA, 19 nt, Homo sapiens
  misc_RNA (1)...(19): siRNA sense strand
ccaguuggcuucuaagagu

SEQ ID NO: 1979711 - RNA, 19 nt, Homo sapiens
  misc_RNA (1)...(19): siRNA sense strand
acacgguucugcaucauuu

SEQ ID NO: 1979712 - RNA, 19 nt, Homo sapiens
  misc_RNA (1)...(19): siRNA sense strand
gcuccaaccuauacaacaa

SEQ ID NO: 1979713 - RNA, 19 nt, Homo sapiens
  misc_RNA (1)...(19): siRNA sense strand
gcagugaaauagaagaucu

SEQ ID NO: 1979714 - RNA, 19 nt, Homo sapiens
  misc_RNA (1)...(19): siRNA sense strand
caagagaagcauugaaguu

SEQ ID NO: 1979715 - RNA, 19 nt, Homo sapiens
  misc_RNA (1)...(19): siRNA sense strand
aagcaacacuggauguauu

SEQ ID NO: 1979716 - RNA, 19 nt, Homo sapiens
  misc_RNA (1)...(19): siRNA sense strand
gacagaugcuccaaccuau

SEQ ID NO: 1979717 - RNA, 19 nt, Homo sapiens
  misc_RNA (1)...(19): siRNA sense strand
cagaggcagugaaauagaa

SEQ ID NO: 1979718 - RNA, 19 nt, Homo sapiens
  misc_RNA (1)...(19): siRNA sense strand
gugcaagucuguguauuug

SEQ ID NO: 1979719 - RNA, 19 nt, Homo sapiens
  misc_RNA (1)...(19): siRNA sense strand
aacaagagaugaacugguu

SEQ ID NO: 1979720 - RNA, 19 nt, Homo sapiens
  misc_RNA (1)...(19): siRNA sense strand
gcuccuaaaugcagcuauu

SEQ ID NO: 1979721 - RNA, 19 nt, Homo sapiens
  misc_RNA (1)...(19): siRNA sense strand
agcagaagcuccagauaaa

SEQ ID NO: 1979722 - RNA, 19 nt, Homo sapiens
  misc_RNA (1)...(19): siRNA sense strand
aagagaagcauugaaguua

SEQ ID NO: 1979723 - RNA, 19 nt, Homo sapiens
  misc_RNA (1)...(19): siRNA sense strand
caaguuaaccaaugaagau

SEQ ID NO: 1979724 - RNA, 19 nt, Homo sapiens
  misc_RNA (1)...(19): siRNA sense strand
gaagaaucgaggccuguaa

SEQ ID NO: 1979725 - RNA, 19 nt, Homo sapiens
  misc_RNA (1)...(19): siRNA sense strand
gcaguugcaucaagagaag

SEQ ID NO: 1979726 - RNA, 19 nt, Homo sapiens
  misc_RNA (1)...(19): siRNA sense strand
gcugaaggcaucaaaguga

SEQ ID NO: 1979727 - RNA, 19 nt, Homo sapiens
  misc_RNA (1)...(19): siRNA sense strand
ugacagaugcuccaaccua

SEQ ID NO: 1979728 - RNA, 19 nt, Homo sapiens
  misc_RNA (1)...(19): siRNA sense strand
ggucggccaucaaaucaga

SEQ ID NO: 1979729 - RNA, 19 nt, Homo sapiens
  misc_RNA (1)...(19): siRNA sense strand
ugaaacagaagcaaccuuu

SEQ ID NO: 1979730 - RNA, 19 nt, Homo sapiens
  misc_RNA (1)...(19): siRNA sense strand
gaagcagaagcuccagaua

SEQ ID NO: 1979731 - RNA, 19 nt, Homo sapiens
  misc_RNA (1)...(19): siRNA sense strand
aaagagggauaucgaguag

SEQ ID NO: 1979732 - RNA, 19 nt, Homo sapiens
  misc_RNA (1)...(19): siRNA sense strand
gaaauccagugugaauagu

SEQ ID NO: 1979733 - RNA, 19 nt, Homo sapiens
  misc_RNA (1)...(19): siRNA sense strand
aagcagaagcuccagauaa

SEQ ID NO: 1979734 - RNA, 19 nt, Homo sapiens
  misc_RNA (1)...(19): siRNA sense strand
cgcaggaggugucggagua

SEQ ID NO: 1979735 - RNA, 19 nt, Homo sapiens
  misc_RNA (1)...(19): siRNA sense strand
caaaagcacuuccuuagca

SEQ ID NO: 1979736 - RNA, 19 nt, Homo sapiens
  misc_RNA (1)...(19): siRNA sense strand
gaaauacagaggcagugaa

SEQ ID NO: 1979737 - RNA, 19 nt, Homo sapiens
  misc_RNA (1)...(19): siRNA sense strand
agagaagcauugaaguuau

SEQ ID NO: 1979738 - RNA, 19 nt, Homo sapiens
  misc_RNA (1)...(19): siRNA sense strand
ggugcaagucuguguauuu

SEQ ID NO: 1979739 - RNA, 19 nt, Homo sapiens
  misc_RNA (1)...(19): siRNA sense strand
gauaucgaguagcaaugaa

SEQ ID NO: 1979740 - RNA, 19 nt, Homo sapiens
  misc_RNA (1)...(19): siRNA sense strand
gcaaguuaaccaaugaaga

SEQ ID NO: 1979741 - RNA, 19 nt, Homo sapiens
  misc_RNA (1)...(19): siRNA sense strand
uagcaagugugucccaguu

SEQ ID NO: 1979742 - RNA, 19 nt, Homo sapiens
  misc_RNA (1)...(19): siRNA sense strand
ggauaucgaguagcaauga

SEQ ID NO: 1979743 - RNA, 19 nt, Homo sapiens
  misc_RNA (1)...(19): siRNA sense strand
ggaaauacagaggcaguga

SEQ ID NO: 1979744 - RNA, 19 nt, Homo sapiens
  misc_RNA (1)...(19): siRNA sense strand
gcagcagcguuuccucuca

SEQ ID NO: 1979745 - RNA, 19 nt, Homo sapiens
  misc_RNA (1)...(19): siRNA sense strand
gguagaagagccauccaaa

SEQ ID NO: 1979746 - RNA, 19 nt, Homo sapiens
  misc_RNA (1)...(19): siRNA sense strand
caaagaaaaugcaaaagca

SEQ ID NO: 1979747 - RNA, 19 nt, Homo sapiens
  misc_RNA (1)...(19): siRNA sense strand
gaucuaguacuccuugaug

SEQ ID NO: 1979748 - RNA, 19 nt, Homo sapiens
  misc_RNA (1)...(19): siRNA sense strand
aaacaguucugcaguugag

SEQ ID NO: 1979749 - RNA, 19 nt, Homo sapiens
  misc_RNA (1)...(19): siRNA sense strand
gcugaaauccagugugaau

SEQ ID NO: 1979750 - RNA, 19 nt, Homo sapiens
  misc_RNA (1)...(19): siRNA sense strand
gguucugcaucauuuguuu

SEQ ID NO: 1979751 - RNA, 19 nt, Homo sapiens
  misc_RNA (1)...(19): siRNA sense strand
caagacagaacgugcauca

SEQ ID NO: 1979752 - RNA, 19 nt, Homo sapiens
  misc_RNA (1)...(19): siRNA sense strand
guucugcaguugagcaaga

SEQ ID NO: 1979753 - RNA, 19 nt, Homo sapiens
  misc_RNA (1)...(19): siRNA sense strand
gguagaauugccacuauug

SEQ ID NO: 1979754 - RNA, 19 nt, Homo sapiens
  misc_RNA (1)...(19): siRNA sense strand
gaagcucagagguagaauu

SEQ ID NO: 1979755 - RNA, 19 nt, Homo sapiens
  misc_RNA (1)...(19): siRNA sense strand
aucgaggccuguaaacuua

SEQ ID NO: 1979756 - RNA, 19 nt, Homo sapiens
  misc_RNA (1)...(19): siRNA sense strand
caaccuauacaacaagaga

SEQ ID NO: 1979757 - RNA, 19 nt, Homo sapiens
  misc_RNA (1)...(19): siRNA sense strand
augaagaugugaaacagaa

SEQ ID NO: 1979758 - RNA, 19 nt, Homo sapiens
  misc_RNA (1)...(19): siRNA sense strand
ccaaugaagaugugaaaca

SEQ ID NO: 1979759 - RNA, 19 nt, Homo sapiens
  misc_RNA (1)...(19): siRNA sense strand
uaaaaguacuucacaguca

SEQ ID NO: 1979760 - RNA, 19 nt, Homo sapiens
  misc_RNA (1)...(19): siRNA sense strand
uugcugaaauccaguguga

SEQ ID NO: 1979761 - RNA, 19 nt, Homo sapiens
  misc_RNA (1)...(19): siRNA sense strand
gcaaguguuucaucaucag

SEQ ID NO: 1979762 - RNA, 19 nt, Homo sapiens
  misc_RNA (1)...(19): siRNA sense strand
ggcaaguguuucaucauca

SEQ ID NO: 1979763 - RNA, 19 nt, Homo sapiens
  misc_RNA (1)...(19): siRNA sense strand
cggaguaccugagccagaa

SEQ ID NO: 1979764 - RNA, 19 nt, Homo sapiens
  misc_RNA (1)...(19): siRNA sense strand
caaugaagaugugaaacag

SEQ ID NO: 1979765 - RNA, 19 nt, Homo sapiens
  misc_RNA (1)...(19): siRNA sense strand
gaucugggaaagcuucuga

SEQ ID NO: 1979766 - RNA, 19 nt, Homo sapiens
  misc_RNA (1)...(19): siRNA sense strand
gauaaacacgguucugcau

SEQ ID NO: 1979767 - RNA, 19 nt, Homo sapiens
  misc_RNA (1)...(19): siRNA sense strand
guuaaccaaugaagaugug

SEQ ID NO: 1979768 - RNA, 19 nt, Homo sapiens
  misc_RNA (1)...(19): siRNA sense strand
ugaaauccagugugaauag

SEQ ID NO: 1979769 - RNA, 19 nt, Homo sapiens
  misc_RNA (1)...(19): siRNA sense strand
caagugagaguucugucaa

SEQ ID NO: 1979770 - RNA, 19 nt, Homo sapiens
  misc_RNA (1)...(19): siRNA sense strand
aaauaagagcucucaagaa

SEQ ID NO: 1979771 - RNA, 19 nt, Homo sapiens
  misc_RNA (1)...(19): siRNA sense strand
cagaagcuccagauaaaca

SEQ ID NO: 1979772 - RNA, 19 nt, Homo sapiens
  misc_RNA (1)...(19): siRNA sense strand
gacuagcaccucacaguug

SEQ ID NO: 1979773 - RNA, 19 nt, Homo sapiens
  misc_RNA (1)...(19): siRNA sense strand
agagggauaucgaguagca

SEQ ID NO: 1979774 - RNA, 19 nt, Homo sapiens
  misc_RNA (1)...(19): siRNA sense strand
agaggcaaguguuucauca

SEQ ID NO: 1979775 - RNA, 19 nt, Homo sapiens
  misc_RNA (1)...(19): siRNA sense strand
aaauacagaggcagugaaa

SEQ ID NO: 1979776 - RNA, 19 nt, Homo sapiens
  misc_RNA (1)...(19): siRNA sense strand
aaucgaggccuguaaacuu

SEQ ID NO: 1979777 - RNA, 19 nt, Homo sapiens
  misc_RNA (1)...(19): siRNA sense strand
gaucgaggugcccuuguug

SEQ ID NO: 1979778 - RNA, 19 nt, Homo sapiens
  misc_RNA (1)...(19): siRNA sense strand
caaaagcaguugcaucaag

SEQ ID NO: 1979779 - RNA, 19 nt, Homo sapiens
  misc_RNA (1)...(19): siRNA sense strand
gguagcuguugguggcuuu

SEQ ID NO: 1979780 - RNA, 19 nt, Homo sapiens
  misc_RNA (1)...(19): siRNA sense strand
gucaaauucucuugcaagu

SEQ ID NO: 1979781 - RNA, 19 nt, Homo sapiens
  misc_RNA (1)...(19): siRNA sense strand
ugucccaguuggcuucuaa

SEQ ID NO: 1979782 - RNA, 19 nt, Homo sapiens
  misc_RNA (1)...(19): siRNA sense strand
cagcguuuccucucaggua

SEQ ID NO: 1979783 - RNA, 19 nt, Homo sapiens
  misc_RNA (1)...(19): siRNA sense strand
caagaaaguauuguuugug

SEQ ID NO: 1979784 - RNA, 19 nt, Homo sapiens
  misc_RNA (1)...(19): siRNA sense strand
gaauugccacuauugucuu

SEQ ID NO: 1979785 - RNA, 19 nt, Homo sapiens
  misc_RNA (1)...(19): siRNA sense strand
caguuggcuucuaagagua

SEQ ID NO: 1979786 - RNA, 19 nt, Homo sapiens
  misc_RNA (1)...(19): siRNA sense strand
uaaaagaauuggcagaucu

SEQ ID NO: 1979787 - RNA, 19 nt, Homo sapiens
  misc_RNA (1)...(19): siRNA sense strand
gugagaguucugucaaauu

SEQ ID NO: 1979788 - RNA, 19 nt, Homo sapiens
  misc_RNA (1)...(19): siRNA sense strand
gaucaaugguuaccuguuc

SEQ ID NO: 1979789 - RNA, 19 nt, Homo sapiens
  misc_RNA (1)...(19): siRNA sense strand
ggacuacgccuacgucaca

SEQ ID NO: 1979790 - RNA, 19 nt, Homo sapiens
  misc_RNA (1)...(19): siRNA sense strand
cguacacgcucaucaacua

SEQ ID NO: 1979791 - RNA, 19 nt, Homo sapiens
  misc_RNA (1)...(19): siRNA sense strand
ucggagggaucaaugguua

SEQ ID NO: 1979792 - RNA, 19 nt, Homo sapiens
  misc_RNA (1)...(19): siRNA sense strand
gaagcaaaccaaagugugu

SEQ ID NO: 1979793 - RNA, 19 nt, Homo sapiens
  misc_RNA (1)...(19): siRNA sense strand
ucaccaacauugccuacuu

SEQ ID NO: 1979794 - RNA, 19 nt, Homo sapiens
  misc_RNA (1)...(19): siRNA sense strand
ggguggcgcucaagaagga

SEQ ID NO: 1979795 - RNA, 19 nt, Homo sapiens
  misc_RNA (1)...(19): siRNA sense strand
gcgccguccucaucaugua

SEQ ID NO: 1979796 - RNA, 19 nt, Homo sapiens
  misc_RNA (1)...(19): siRNA sense strand
ggaagcugcuggccuuguc

SEQ ID NO: 1979797 - RNA, 19 nt, Homo sapiens
  misc_RNA (1)...(19): siRNA sense strand
ggccacagccgucaucaug

SEQ ID NO: 1979798 - RNA, 19 nt, Homo sapiens
  misc_RNA (1)...(19): siRNA sense strand
gagaagcaaaccaaagugu

SEQ ID NO: 1979799 - RNA, 19 nt, Homo sapiens
  misc_RNA (1)...(19): siRNA sense strand
ccacagacaagcccucgaa

SEQ ID NO: 1979800 - RNA, 19 nt, Homo sapiens
  misc_RNA (1)...(19): siRNA sense strand
ucacagaguccaugacaca

SEQ ID NO: 1979801 - RNA, 19 nt, Homo sapiens
  misc_RNA (1)...(19): siRNA sense strand
ccaugaccuucuccaacua

SEQ ID NO: 1979802 - RNA, 19 nt, Homo sapiens
  misc_RNA (1)...(19): siRNA sense strand
ucaacuauguguccuucau

SEQ ID NO: 1979803 - RNA, 19 nt, Homo sapiens
  misc_RNA (1)...(19): siRNA sense strand
ggcgucaucaucauccuua

SEQ ID NO: 1979804 - RNA, 19 nt, Homo sapiens
  misc_RNA (1)...(19): siRNA sense strand
caccaacauugccuacuuc

SEQ ID NO: 1979805 - RNA, 19 nt, Homo sapiens
  misc_RNA (1)...(19): siRNA sense strand
gaagcugcugggcuacuuu

SEQ ID NO: 1979806 - RNA, 19 nt, Homo sapiens
  misc_RNA (1)...(19): siRNA sense strand
augguuaccuguucaccua

SEQ ID NO: 1979807 - RNA, 19 nt, Homo sapiens
  misc_RNA (1)...(19): siRNA sense strand
gcacuccacaggcccauca

SEQ ID NO: 1979808 - RNA, 19 nt, Homo sapiens
  misc_RNA (1)...(19): siRNA sense strand
gaucuuccaaggacacuuc

SEQ ID NO: 1979809 - RNA, 19 nt, Homo sapiens
  misc_RNA (1)...(19): siRNA sense strand
ggagaagcaaaccaaagug

SEQ ID NO: 1979810 - RNA, 19 nt, Homo sapiens
  misc_RNA (1)...(19): siRNA sense strand
ggucuucagcuucaucuca

SEQ ID NO: 1979811 - RNA, 19 nt, Homo sapiens
  misc_RNA (1)...(19): siRNA sense strand
guccauggccugccugaug

SEQ ID NO: 1979812 - RNA, 19 nt, Homo sapiens
  misc_RNA (1)...(19): siRNA sense strand
ccacagccgucaucaugcu

SEQ ID NO: 1979813 - RNA, 19 nt, Homo sapiens
  misc_RNA (1)...(19): siRNA sense strand
gaacuuccucaacuauguc

SEQ ID NO: 1979814 - RNA, 19 nt, Homo sapiens
  misc_RNA (1)...(19): siRNA sense strand
guacacguucaccaacauu

SEQ ID NO: 1979815 - RNA, 19 nt, Homo sapiens
  misc_RNA (1)...(19): siRNA sense strand
gccaggagcuguguuucgu

SEQ ID NO: 1979816 - RNA, 19 nt, Homo sapiens
  misc_RNA (1)...(19): siRNA sense strand
gcgcauccaggacauguuc

SEQ ID NO: 1979817 - RNA, 19 nt, Homo sapiens
  misc_RNA (1)...(19): siRNA sense strand
ccgaagaggaggagaaugg

SEQ ID NO: 1979818 - RNA, 19 nt, Homo sapiens
  misc_RNA (1)...(19): siRNA sense strand
ucaccgaggagaugguuga

SEQ ID NO: 1979819 - RNA, 19 nt, Homo sapiens
  misc_RNA (1)...(19): siRNA sense strand
gccugaugcuccugacaug

SEQ ID NO: 1979820 - RNA, 19 nt, Homo sapiens
  misc_RNA (1)...(19): siRNA sense strand
acacgcucaucaacuaugu

SEQ ID NO: 1979821 - RNA, 19 nt, Homo sapiens
  misc_RNA (1)...(19): siRNA sense strand
acacguacacgcucaucaa

SEQ ID NO: 1979822 - RNA, 19 nt, Homo sapiens
  misc_RNA (1)...(19): siRNA sense strand
gcgugggccuucuccagau

SEQ ID NO: 1979823 - RNA, 19 nt, Homo sapiens
  misc_RNA (1)...(19): siRNA sense strand
ggagcgccguccucaucau

SEQ ID NO: 1979824 - RNA, 19 nt, Homo sapiens
  misc_RNA (1)...(19): siRNA sense strand
guacacgcucaucaacuau

SEQ ID NO: 1979825 - RNA, 19 nt, Homo sapiens
  misc_RNA (1)...(19): siRNA sense strand
gcucgggcaucuucaucuc

SEQ ID NO: 1979826 - RNA, 19 nt, Homo sapiens
  misc_RNA (1)...(19): siRNA sense strand
gccuuugcuuucuggauga

SEQ ID NO: 1979827 - RNA, 19 nt, Homo sapiens
  misc_RNA (1)...(19): siRNA sense strand
guguacacguucaccaaca

SEQ ID NO: 1979828 - RNA, 19 nt, Homo sapiens
  misc_RNA (1)...(19): siRNA sense strand
gagcgccguccucaucaug

SEQ ID NO: 1979829 - RNA, 19 nt, Homo sapiens
  misc_RNA (1)...(19): siRNA sense strand
agaagcugcugggcuacuu

SEQ ID NO: 1979830 - RNA, 19 nt, Homo sapiens
  misc_RNA (1)...(19): siRNA sense strand
uccaugaccuucuccaacu

SEQ ID NO: 1979831 - RNA, 19 nt, Homo sapiens
  misc_RNA (1)...(19): siRNA sense strand
ggccuugucccucaucauc

SEQ ID NO: 1979832 - RNA, 19 nt, Homo sapiens
  misc_RNA (1)...(19): siRNA sense strand
uggagaagcaaaccaaagu

SEQ ID NO: 1979833 - RNA, 19 nt, Homo sapiens
  misc_RNA (1)...(19): siRNA sense strand
ggaucaaugguuaccuguu

SEQ ID NO: 1979834 - RNA, 19 nt, Homo sapiens
  misc_RNA (1)...(19): siRNA sense strand
caacuauguguccuucauc

SEQ ID NO: 1979835 - RNA, 19 nt, Homo sapiens
  misc_RNA (1)...(19): siRNA sense strand
caucggcucgggcaucuuc

SEQ ID NO: 1979836 - RNA, 19 nt, Homo sapiens
  misc_RNA (1)...(19): siRNA sense strand
ccacgcgcauccaggacau

SEQ ID NO: 1979837 - RNA, 19 nt, Homo sapiens
  misc_RNA (1)...(19): siRNA sense strand
gaacagaaauguagaaaga

SEQ ID NO: 1979838 - RNA, 19 nt, Homo sapiens
  misc_RNA (1)...(19): siRNA sense strand
uaacugaacuguaucauga

SEQ ID NO: 1979839 - RNA, 19 nt, Homo sapiens
  misc_RNA (1)...(19): siRNA sense strand
gaaagaaaguucccuaucu

SEQ ID NO: 1979840 - RNA, 19 nt, Homo sapiens
  misc_RNA (1)...(19): siRNA sense strand
aagaagagcuacucaaauu

SEQ ID NO: 1979841 - RNA, 19 nt, Homo sapiens
  misc_RNA (1)...(19): siRNA sense strand
ggaacugacucaccuggua

SEQ ID NO: 1979842 - RNA, 19 nt, Homo sapiens
  misc_RNA (1)...(19): siRNA sense strand
gaaaugacauaggaccuuu

SEQ ID NO: 1979843 - RNA, 19 nt, Homo sapiens
  misc_RNA (1)...(19): siRNA sense strand
gaagaaaggaggauuugaa

SEQ ID NO: 1979844 - RNA, 19 nt, Homo sapiens
  misc_RNA (1)...(19): siRNA sense strand
agaaagagcugucccugaa

SEQ ID NO: 1979845 - RNA, 19 nt, Homo sapiens
  misc_RNA (1)...(19): siRNA sense strand
gaaacuggugcuauauuua

SEQ ID NO: 1979846 - RNA, 19 nt, Homo sapiens
  misc_RNA (1)...(19): siRNA sense strand
gaugcucucuucuuuauug

SEQ ID NO: 1979847 - RNA, 19 nt, Homo sapiens
  misc_RNA (1)...(19): siRNA sense strand
ugaaacuggugcuauauuu

SEQ ID NO: 1979848 - RNA, 19 nt, Homo sapiens
  misc_RNA (1)...(19): siRNA sense strand
aauacaagcugaagugaaa

SEQ ID NO: 1979849 - RNA, 19 nt, Homo sapiens
  misc_RNA (1)...(19): siRNA sense strand
gacaaacucuuauguggau

SEQ ID NO: 1979850 - RNA, 19 nt, Homo sapiens
  misc_RNA (1)...(19): siRNA sense strand
gaagugaaauuggaguguu

SEQ ID NO: 1979851 - RNA, 19 nt, Homo sapiens
  misc_RNA (1)...(19): siRNA sense strand
cgggaucacuccauuagua

SEQ ID NO: 1979852 - RNA, 19 nt, Homo sapiens
  misc_RNA (1)...(19): siRNA sense strand
gauccaggcuguugacugu

SEQ ID NO: 1979853 - RNA, 19 nt, Homo sapiens
  misc_RNA (1)...(19): siRNA sense strand
ucaaauuacucgaucaaug

SEQ ID NO: 1979854 - RNA, 19 nt, Homo sapiens
  misc_RNA (1)...(19): siRNA sense strand
guacuacaauauccucauu

SEQ ID NO: 1979855 - RNA, 19 nt, Homo sapiens
  misc_RNA (1)...(19): siRNA sense strand
gaacgaguagcuuuaaaug

SEQ ID NO: 1979856 - RNA, 19 nt, Homo sapiens
  misc_RNA (1)...(19): siRNA sense strand
guaacacgauucagaggaa

SEQ ID NO: 1979857 - RNA, 19 nt, Homo sapiens
  misc_RNA (1)...(19): siRNA sense strand
agaugaaacuggugcuaua

SEQ ID NO: 1979858 - RNA, 19 nt, Homo sapiens
  misc_RNA (1)...(19): siRNA sense strand
gaagaagagcuacucaaau

SEQ ID NO: 1979859 - RNA, 19 nt, Homo sapiens
  misc_RNA (1)...(19): siRNA sense strand
uagaugcucucuucuuuau

SEQ ID NO: 1979860 - RNA, 19 nt, Homo sapiens
  misc_RNA (1)...(19): siRNA sense strand
gaggaaugaucucuacuca

SEQ ID NO: 1979861 - RNA, 19 nt, Homo sapiens
  misc_RNA (1)...(19): siRNA sense strand
gcucucuucuuuauuggua

SEQ ID NO: 1979862 - RNA, 19 nt, Homo sapiens
  misc_RNA (1)...(19): siRNA sense strand
acaaauggcaguauucaaa

SEQ ID NO: 1979863 - RNA, 19 nt, Homo sapiens
  misc_RNA (1)...(19): siRNA sense strand
aaacaagugucagugguaa

SEQ ID NO: 1979864 - RNA, 19 nt, Homo sapiens
  misc_RNA (1)...(19): siRNA sense strand
uguagaugcucucuucuuu

SEQ ID NO: 1979865 - RNA, 19 nt, Homo sapiens
  misc_RNA (1)...(19): siRNA sense strand
caugaggccuuacagagaa

SEQ ID NO: 1979866 - RNA, 19 nt, Homo sapiens
  misc_RNA (1)...(19): siRNA sense strand
caaauuacucgaucaaugu

SEQ ID NO: 1979867 - RNA, 19 nt, Homo sapiens
  misc_RNA (1)...(19): siRNA sense strand
cgaagaagagcuacucaaa

SEQ ID NO: 1979868 - RNA, 19 nt, Homo sapiens
  misc_RNA (1)...(19): siRNA sense strand
uuacugcucugaguguuua

SEQ ID NO: 1979869 - RNA, 19 nt, Homo sapiens
  misc_RNA (1)...(19): siRNA sense strand
gggagaauuucaacacuuc

SEQ ID NO: 1979870 - RNA, 19 nt, Homo sapiens
  misc_RNA (1)...(19): siRNA sense strand
uauagggacuuccagacua

SEQ ID NO: 1979871 - RNA, 19 nt, Homo sapiens
  misc_RNA (1)...(19): siRNA sense strand
uuuaguaccucaagacaaa

SEQ ID NO: 1979872 - RNA, 19 nt, Homo sapiens
  misc_RNA (1)...(19): siRNA sense strand
caagauguuguuccuauaa

SEQ ID NO: 1979873 - RNA, 19 nt, Homo sapiens
  misc_RNA (1)...(19): siRNA sense strand
gagaguagcaucaucuugu

SEQ ID NO: 1979874 - RNA, 19 nt, Homo sapiens
  misc_RNA (1)...(19): siRNA sense strand
ucaagauguuguuccuaua

SEQ ID NO: 1979875 - RNA, 19 nt, Homo sapiens
  misc_RNA (1)...(19): siRNA sense strand
guagaugcucucuucuuua

SEQ ID NO: 1979876 - RNA, 19 nt, Homo sapiens
  misc_RNA (1)...(19): siRNA sense strand
agaauuggauaguggauug

SEQ ID NO: 1979877 - RNA, 19 nt, Homo sapiens
  misc_RNA (1)...(19): siRNA sense strand
gaagagcuacucaaauuac

SEQ ID NO: 1979878 - RNA, 19 nt, Homo sapiens
  misc_RNA (1)...(19): siRNA sense strand
ugacacugcuggaucauuc

SEQ ID NO: 1979879 - RNA, 19 nt, Homo sapiens
  misc_RNA (1)...(19): siRNA sense strand
ggaaguggaagugaaauug

SEQ ID NO: 1979880 - RNA, 19 nt, Homo sapiens
  misc_RNA (1)...(19): siRNA sense strand
agagaagcaucuuguauca

SEQ ID NO: 1979881 - RNA, 19 nt, Homo sapiens
  misc_RNA (1)...(19): siRNA sense strand
gacaaaagaacuagacuua

SEQ ID NO: 1979882 - RNA, 19 nt, Homo sapiens
  misc_RNA (1)...(19): siRNA sense strand
aaagaaaguucccuaucug

SEQ ID NO: 1979883 - RNA, 19 nt, Homo sapiens
  misc_RNA (1)...(19): siRNA sense strand
caaaagaacuagacuuaag

SEQ ID NO: 1979884 - RNA, 19 nt, Homo sapiens
  misc_RNA (1)...(19): siRNA sense strand
ggagugaguauuaauguuc

SEQ ID NO: 1979885 - RNA, 19 nt, Homo sapiens
  misc_RNA (1)...(19): siRNA sense strand
gcuguugccucagagagua

SEQ ID NO: 1979886 - RNA, 19 nt, Homo sapiens
  misc_RNA (1)...(19): siRNA sense strand
gggaauguaauauaucuga

SEQ ID NO: 1979887 - RNA, 19 nt, Homo sapiens
  misc_RNA (1)...(19): siRNA sense strand
gaaagagcugucccugaaa

SEQ ID NO: 1979888 - RNA, 19 nt, Homo sapiens
  misc_RNA (1)...(19): siRNA sense strand
agaagcaucuuguaucagu

SEQ ID NO: 1979889 - RNA, 19 nt, Homo sapiens
  misc_RNA (1)...(19): siRNA sense strand
gccagguucuacuccuuua

SEQ ID NO: 1979890 - RNA, 19 nt, Homo sapiens
  misc_RNA (1)...(19): siRNA sense strand
uaacaucaguccagcaacu

SEQ ID NO: 1979891 - RNA, 19 nt, Homo sapiens
  misc_RNA (1)...(19): siRNA sense strand
gggagugaguauuaauguu

SEQ ID NO: 1979892 - RNA, 19 nt, Homo sapiens
  misc_RNA (1)...(19): siRNA sense strand
aagaaggacugagagcuuu

SEQ ID NO: 1979893 - RNA, 19 nt, Homo sapiens
  misc_RNA (1)...(19): siRNA sense strand
gaaagucaugguagcuauu

SEQ ID NO: 1979894 - RNA, 19 nt, Homo sapiens
  misc_RNA (1)...(19): siRNA sense strand
gacaguaacacgauucaga

SEQ ID NO: 1979895 - RNA, 19 nt, Homo sapiens
  misc_RNA (1)...(19): siRNA sense strand
ggauuggacuaucgaacga

SEQ ID NO: 1979896 - RNA, 19 nt, Homo sapiens
  misc_RNA (1)...(19): siRNA sense strand
cacgaaaggugcuaauagu

SEQ ID NO: 1979897 - RNA, 19 nt, Homo sapiens
  misc_RNA (1)...(19): siRNA sense strand
caagaaggacugagagcuu

SEQ ID NO: 1979898 - RNA, 19 nt, Homo sapiens
  misc_RNA (1)...(19): siRNA sense strand
acgaguagcuuuaaaugca

SEQ ID NO: 1979899 - RNA, 19 nt, Homo sapiens
  misc_RNA (1)...(19): siRNA sense strand
cauagccacuuacgagaau

SEQ ID NO: 1979900 - RNA, 19 nt, Homo sapiens
  misc_RNA (1)...(19): siRNA sense strand
cuauggauaugguuaacaa

SEQ ID NO: 1979901 - RNA, 19 nt, Homo sapiens
  misc_RNA (1)...(19): siRNA sense strand
ucuuguaacugaacuguau

SEQ ID NO: 1979902 - RNA, 19 nt, Homo sapiens
  misc_RNA (1)...(19): siRNA sense strand
cgaaaggugcuaauaguag

SEQ ID NO: 1979903 - RNA, 19 nt, Homo sapiens
  misc_RNA (1)...(19): siRNA sense strand
cugagagcuuucacaguua

SEQ ID NO: 1979904 - RNA, 19 nt, Homo sapiens
  misc_RNA (1)...(19): siRNA sense strand
agaagagcuacucaaauua

SEQ ID NO: 1979905 - RNA, 19 nt, Homo sapiens
  misc_RNA (1)...(19): siRNA sense strand
gaaugugagggauccagua

SEQ ID NO: 1979906 - RNA, 19 nt, Homo sapiens
  misc_RNA (1)...(19): siRNA sense strand
uaucgaacgaguagcuuua

SEQ ID NO: 1979907 - RNA, 19 nt, Homo sapiens
  misc_RNA (1)...(19): siRNA sense strand
ggaaaugacauaggaccuu

SEQ ID NO: 1979908 - RNA, 19 nt, Homo sapiens
  misc_RNA (1)...(19): siRNA sense strand
ucaccgaagucccguaaca

SEQ ID NO: 1979909 - RNA, 19 nt, Homo sapiens
  misc_RNA (1)...(19): siRNA sense strand
gauguuguuccuauaacua

SEQ ID NO: 1979910 - RNA, 19 nt, Homo sapiens
  misc_RNA (1)...(19): siRNA sense strand
gaucacuccauuaguaaga

SEQ ID NO: 1979911 - RNA, 19 nt, Homo sapiens
  misc_RNA (1)...(19): siRNA sense strand
gcauagccacuuacgagaa

SEQ ID NO: 1979912 - RNA, 19 nt, Homo sapiens
  misc_RNA (1)...(19): siRNA sense strand
caucaccaacaaacuauuu

SEQ ID NO: 1979913 - RNA, 19 nt, Homo sapiens
  misc_RNA (1)...(19): siRNA sense strand
caugauccuucaaaugaug

SEQ ID NO: 1979914 - RNA, 19 nt, Homo sapiens
  misc_RNA (1)...(19): siRNA sense strand
cagccuggguguuccugua

SEQ ID NO: 1979915 - RNA, 19 nt, Homo sapiens
  misc_RNA (1)...(19): siRNA sense strand
guacagaaucaaagaaucu

SEQ ID NO: 1979916 - RNA, 19 nt, Homo sapiens
  misc_RNA (1)...(19): siRNA sense strand
gggaucacuccauuaguaa

SEQ ID NO: 1979917 - RNA, 19 nt, Homo sapiens
  misc_RNA (1)...(19): siRNA sense strand
gaaaaggucaucagaagau

SEQ ID NO: 1979918 - RNA, 19 nt, Homo sapiens
  misc_RNA (1)...(19): siRNA sense strand
ugagagcuuucacaguuau

SEQ ID NO: 1979919 - RNA, 19 nt, Homo sapiens
  misc_RNA (1)...(19): siRNA sense strand
caaauggcaguauucaaau

SEQ ID NO: 1979920 - RNA, 19 nt, Homo sapiens
  misc_RNA (1)...(19): siRNA sense strand
agaaagucaugguagcuau

SEQ ID NO: 1979921 - RNA, 19 nt, Homo sapiens
  misc_RNA (1)...(19): siRNA sense strand
gaguagcuuuaaaugcaaa

SEQ ID NO: 1979922 - RNA, 19 nt, Homo sapiens
  misc_RNA (1)...(19): siRNA sense strand
gguacagaaucaaagaauc

SEQ ID NO: 1979923 - RNA, 19 nt, Homo sapiens
  misc_RNA (1)...(19): siRNA sense strand
ccacgaaaggugcuaauag

SEQ ID NO: 1979924 - RNA, 19 nt, Homo sapiens
  misc_RNA (1)...(19): siRNA sense strand
ccagguauuccuagucgua

SEQ ID NO: 1979925 - RNA, 19 nt, Homo sapiens
  misc_RNA (1)...(19): siRNA sense strand
ucucaggcaugaagcagaa

SEQ ID NO: 1979926 - RNA, 19 nt, Homo sapiens
  misc_RNA (1)...(19): siRNA sense strand
ggaagaaaggaggauuuga

SEQ ID NO: 1979927 - RNA, 19 nt, Homo sapiens
  misc_RNA (1)...(19): siRNA sense strand
ccacuuacgagaaucaaau

SEQ ID NO: 1979928 - RNA, 19 nt, Homo sapiens
  misc_RNA (1)...(19): siRNA sense strand
cgaguagcuuuaaaugcaa

SEQ ID NO: 1979929 - RNA, 19 nt, Homo sapiens
  misc_RNA (1)...(19): siRNA sense strand
ggcgagaucguccaacuga

SEQ ID NO: 1979930 - RNA, 19 nt, Homo sapiens
  misc_RNA (1)...(19): siRNA sense strand
ccacugcuauggauauggu

SEQ ID NO: 1979931 - RNA, 19 nt, Homo sapiens
  misc_RNA (1)...(19): siRNA sense strand
guucacaggccauacaaau

SEQ ID NO: 1979932 - RNA, 19 nt, Homo sapiens
  misc_RNA (1)...(19): siRNA sense strand
ucagagaagcaucuuguau

SEQ ID NO: 1979933 - RNA, 19 nt, Homo sapiens
  misc_RNA (1)...(19): siRNA sense strand
cugcuuggauguaacaaug

SEQ ID NO: 1979934 - RNA, 19 nt, Homo sapiens
  misc_RNA (1)...(19): siRNA sense strand
uuucaacacuucgagauga

SEQ ID NO: 1979935 - RNA, 19 nt, Homo sapiens
  misc_RNA (1)...(19): siRNA sense strand
aaauggcaguauucaaaug

SEQ ID NO: 1979936 - RNA, 19 nt, Homo sapiens
  misc_RNA (1)...(19): siRNA sense strand
ggucaggaguacagcuugu

SEQ ID NO: 1979937 - RNA, 19 nt, Homo sapiens
  misc_RNA (1)...(19): siRNA sense strand
ggaaagugcugucugcuaa

SEQ ID NO: 1979938 - RNA, 19 nt, Homo sapiens
  misc_RNA (1)...(19): siRNA sense strand
gcugagggcucucuguaua

SEQ ID NO: 1979939 - RNA, 19 nt, Homo sapiens
  misc_RNA (1)...(19): siRNA sense strand
gagcauaguucgagagaug

SEQ ID NO: 1979940 - RNA, 19 nt, Homo sapiens
  misc_RNA (1)...(19): siRNA sense strand
cagcacagcucauccauca

SEQ ID NO: 1979941 - RNA, 19 nt, Homo sapiens
  misc_RNA (1)...(19): siRNA sense strand
cgaacaggaugaugacauu

SEQ ID NO: 1979942 - RNA, 19 nt, Homo sapiens
  misc_RNA (1)...(19): siRNA sense strand
gcagaaagagcuugcagaa

SEQ ID NO: 1979943 - RNA, 19 nt, Homo sapiens
  misc_RNA (1)...(19): siRNA sense strand
gaagugaggguaccagcua

SEQ ID NO: 1979944 - RNA, 19 nt, Homo sapiens
  misc_RNA (1)...(19): siRNA sense strand
ggauccaguugcaaugaua

SEQ ID NO: 1979945 - RNA, 19 nt, Homo sapiens
  misc_RNA (1)...(19): siRNA sense strand
ggaauuacaagcauugaau

SEQ ID NO: 1979946 - RNA, 19 nt, Homo sapiens
  misc_RNA (1)...(19): siRNA sense strand
gcacagcucauccaucaau

SEQ ID NO: 1979947 - RNA, 19 nt, Homo sapiens
  misc_RNA (1)...(19): siRNA sense strand
uuacugcccuggacuuaaa

SEQ ID NO: 1979948 - RNA, 19 nt, Homo sapiens
  misc_RNA (1)...(19): siRNA sense strand
agauggagcuguugggaaa

SEQ ID NO: 1979949 - RNA, 19 nt, Homo sapiens
  misc_RNA (1)...(19): siRNA sense strand
uguggaugauuaucgauua

SEQ ID NO: 1979950 - RNA, 19 nt, Homo sapiens
  misc_RNA (1)...(19): siRNA sense strand
ggacuuaaacccagaaagg

SEQ ID NO: 1979951 - RNA, 19 nt, Homo sapiens
  misc_RNA (1)...(19): siRNA sense strand
ugcuggaucuuaccucuua

SEQ ID NO: 1979952 - RNA, 19 nt, Homo sapiens
  misc_RNA (1)...(19): siRNA sense strand
ggacaaaggaugcaaagcu

SEQ ID NO: 1979953 - RNA, 19 nt, Homo sapiens
  misc_RNA (1)...(19): siRNA sense strand
ucuggacuguggaugauua

SEQ ID NO: 1979954 - RNA, 19 nt, Homo sapiens
  misc_RNA (1)...(19): siRNA sense strand
gaaucuggacuguggauga

SEQ ID NO: 1979955 - RNA, 19 nt, Homo sapiens
  misc_RNA (1)...(19): siRNA sense strand
gagcuguugggaaagauua

SEQ ID NO: 1979956 - RNA, 19 nt, Homo sapiens
  misc_RNA (1)...(19): siRNA sense strand
acagagcaauguguaauga

SEQ ID NO: 1979957 - RNA, 19 nt, Homo sapiens
  misc_RNA (1)...(19): siRNA sense strand
agcaaagucugcauaaaga

SEQ ID NO: 1979958 - RNA, 19 nt, Homo sapiens
  misc_RNA (1)...(19): siRNA sense strand
ggaugaaacuucugaucac

SEQ ID NO: 1979959 - RNA, 19 nt, Homo sapiens
  misc_RNA (1)...(19): siRNA sense strand
gcaggaauuacaagcauug

SEQ ID NO: 1979960 - RNA, 19 nt, Homo sapiens
  misc_RNA (1)...(19): siRNA sense strand
gaugaaacuucugaucaca

SEQ ID NO: 1979961 - RNA, 19 nt, Homo sapiens
  misc_RNA (1)...(19): siRNA sense strand
ugaaacuucugaucacaca

SEQ ID NO: 1979962 - RNA, 19 nt, Homo sapiens
  misc_RNA (1)...(19): siRNA sense strand
gcucgcacguugucagugu

SEQ ID NO: 1979963 - RNA, 19 nt, Homo sapiens
  misc_RNA (1)...(19): siRNA sense strand
cagcaaagucugcauaaag

SEQ ID NO: 1979964 - RNA, 19 nt, Homo sapiens
  misc_RNA (1)...(19): siRNA sense strand
ggcauggaccgcaggguua

SEQ ID NO: 1979965 - RNA, 19 nt, Homo sapiens
  misc_RNA (1)...(19): siRNA sense strand
gggaaagugcugucugcua

SEQ ID NO: 1979966 - RNA, 19 nt, Homo sapiens
  misc_RNA (1)...(19): siRNA sense strand
uuauugaucuccgaacaaa

SEQ ID NO: 1979967 - RNA, 19 nt, Homo sapiens
  misc_RNA (1)...(19): siRNA sense strand
cuuagcagcuucaaaugau

SEQ ID NO: 1979968 - RNA, 19 nt, Homo sapiens
  misc_RNA (1)...(19): siRNA sense strand
ggguuaagcuuugggaagu

SEQ ID NO: 1979969 - RNA, 19 nt, Homo sapiens
  misc_RNA (1)...(19): siRNA sense strand
gaucuacgcagcaaagucu

SEQ ID NO: 1979970 - RNA, 19 nt, Homo sapiens
  misc_RNA (1)...(19): siRNA sense strand
gguuaagcuuugggaagua

SEQ ID NO: 1979971 - RNA, 19 nt, Homo sapiens
  misc_RNA (1)...(19): siRNA sense strand
gauuacugcccuggacuua

SEQ ID NO: 1979972 - RNA, 19 nt, Homo sapiens
  misc_RNA (1)...(19): siRNA sense strand
gcuacugccuugugugucu

SEQ ID NO: 1979973 - RNA, 19 nt, Homo sapiens
  misc_RNA (1)...(19): siRNA sense strand
ccgaacaaaugcuaucaag

SEQ ID NO: 1979974 - RNA, 19 nt, Homo sapiens
  misc_RNA (1)...(19): siRNA sense strand
gaucuccgaacaaaugcua

SEQ ID NO: 1979975 - RNA, 19 nt, Homo sapiens
  misc_RNA (1)...(19): siRNA sense strand
ccucuuagcagcuucaaau

SEQ ID NO: 1979976 - RNA, 19 nt, Homo sapiens
  misc_RNA (1)...(19): siRNA sense strand
caguccagguucccgguua

SEQ ID NO: 1979977 - RNA, 19 nt, Homo sapiens
  misc_RNA (1)...(19): siRNA sense strand
cuaaguuccugcuggacaa

SEQ ID NO: 1979978 - RNA, 19 nt, Homo sapiens
  misc_RNA (1)...(19): siRNA sense strand
gaccgcaggguuaagcuuu

SEQ ID NO: 1979979 - RNA, 19 nt, Homo sapiens
  misc_RNA (1)...(19): siRNA sense strand
gcauaaagacaguguuugc

SEQ ID NO: 1979980 - RNA, 19 nt, Homo sapiens
  misc_RNA (1)...(19): siRNA sense strand
gaacaggaugaugacauug

SEQ ID NO: 1979981 - RNA, 19 nt, Homo sapiens
  misc_RNA (1)...(19): siRNA sense strand
cgaccggacucucaaacuc

SEQ ID NO: 1979982 - RNA, 19 nt, Homo sapiens
  misc_RNA (1)...(19): siRNA sense strand
agucaacgcugugcaguuc

SEQ ID NO: 1979983 - RNA, 19 nt, Homo sapiens
  misc_RNA (1)...(19): siRNA sense strand
uggcaguaaugcaggaauu

SEQ ID NO: 1979984 - RNA, 19 nt, Homo sapiens
  misc_RNA (1)...(19): siRNA sense strand
guuaagcuuugggaaguau

SEQ ID NO: 1979985 - RNA, 19 nt, Homo sapiens
  misc_RNA (1)...(19): siRNA sense strand
gagagcauaguucgagaga

SEQ ID NO: 1979986 - RNA, 19 nt, Homo sapiens
  misc_RNA (1)...(19): siRNA sense strand
gcauggaccgcaggguuaa

SEQ ID NO: 1979987 - RNA, 19 nt, Homo sapiens
  misc_RNA (1)...(19): siRNA sense strand
ggaccagaguugucuucag

SEQ ID NO: 1979988 - RNA, 19 nt, Homo sapiens
  misc_RNA (1)...(19): siRNA sense strand
ugauagugcuggaucuuac

SEQ ID NO: 1979989 - RNA, 19 nt, Homo sapiens
  misc_RNA (1)...(19): siRNA sense strand
ugucuucgaugcacaugau

SEQ ID NO: 1979990 - RNA, 19 nt, Homo sapiens
  misc_RNA (1)...(19): siRNA sense strand
caaagcagcacagcucauc

SEQ ID NO: 1979991 - RNA, 19 nt, Homo sapiens
  misc_RNA (1)...(19): siRNA sense strand
gacuguggaugauuaucga

SEQ ID NO: 1979992 - RNA, 19 nt, Homo sapiens
  misc_RNA (1)...(19): siRNA sense strand
gcaggauccaguugcaaug

SEQ ID NO: 1979993 - RNA, 19 nt, Homo sapiens
  misc_RNA (1)...(19): siRNA sense strand
gcucacagggaaaguggaa

SEQ ID NO: 1979994 - RNA, 19 nt, Homo sapiens
  misc_RNA (1)...(19): siRNA sense strand
agagcaauguguaaugagu

SEQ ID NO: 1979995 - RNA, 19 nt, Homo sapiens
  misc_RNA (1)...(19): siRNA sense strand
ugggaaguauuuggagaaa

SEQ ID NO: 1979996 - RNA, 19 nt, Homo sapiens
  misc_RNA (1)...(19): siRNA sense strand
ugagggcucucuguauauc

SEQ ID NO: 1979997 - RNA, 19 nt, Homo sapiens
  misc_RNA (1)...(19): siRNA sense strand
uaagcuuugggaaguauuu

SEQ ID NO: 1979998 - RNA, 19 nt, Homo sapiens
  misc_RNA (1)...(19): siRNA sense strand
aaagugcugucugcuaagu

SEQ ID NO: 1979999 - RNA, 19 nt, Homo sapiens
  misc_RNA (1)...(19): siRNA sense strand
ggacuguggaugauuaucg

SEQ ID NO: 1980000 - RNA, 19 nt, Homo sapiens
  misc_RNA (1)...(19): siRNA sense strand
uggaugaaacuucugauca

SEQ ID NO: 1980001 - RNA, 19 nt, Homo sapiens
  misc_RNA (1)...(19): siRNA sense strand
cugcauaaagacaguguuu

SEQ ID NO: 1980002 - RNA, 19 nt, Homo sapiens
  misc_RNA (1)...(19): siRNA sense strand
aggacaauguggauacuca

SEQ ID NO: 1980003 - RNA, 19 nt, Homo sapiens
  misc_RNA (1)...(19): siRNA sense strand
uuagcagcuucaaaugauu

SEQ ID NO: 1980004 - RNA, 19 nt, Homo sapiens
  misc_RNA (1)...(19): siRNA sense strand
gaaagugcugucugcuaag

SEQ ID NO: 1980005 - RNA, 19 nt, Homo sapiens
  misc_RNA (1)...(19): siRNA sense strand
gcuggacaaugcgcggauu

SEQ ID NO: 1980006 - RNA, 19 nt, Homo sapiens
  misc_RNA (1)...(19): siRNA sense strand
gcuaucaagcagacauuca

SEQ ID NO: 1980007 - RNA, 19 nt, Homo sapiens
  misc_RNA (1)...(19): siRNA sense strand
gacuuaaacccagaaagga

SEQ ID NO: 1980008 - RNA, 19 nt, Homo sapiens
  misc_RNA (1)...(19): siRNA sense strand
cggauugucucaggaaguc

SEQ ID NO: 1980009 - RNA, 19 nt, Homo sapiens
  misc_RNA (1)...(19): siRNA sense strand
gauccaguugcaaugauau

SEQ ID NO: 1980010 - RNA, 19 nt, Homo sapiens
  misc_RNA (1)...(19): siRNA sense strand
cauuguggaugaaacuucu

SEQ ID NO: 1980011 - RNA, 19 nt, Homo sapiens
  misc_RNA (1)...(19): siRNA sense strand
ugcagaagcagcaaaggaa

SEQ ID NO: 1980012 - RNA, 19 nt, Homo sapiens
  misc_RNA (1)...(19): siRNA sense strand
gggacacagugggaaagug

SEQ ID NO: 1980013 - RNA, 19 nt, Homo sapiens
  misc_RNA (1)...(19): siRNA sense strand
gacgcucugucucuuccuu

SEQ ID NO: 1980014 - RNA, 19 nt, Homo sapiens
  misc_RNA (1)...(19): siRNA sense strand
ggagcuguugggaaagauu

SEQ ID NO: 1980015 - RNA, 19 nt, Homo sapiens
  misc_RNA (1)...(19): siRNA sense strand
ucuuagcagcuucaaauga

SEQ ID NO: 1980016 - RNA, 19 nt, Homo sapiens
  misc_RNA (1)...(19): siRNA sense strand
uucgagagauggagcuguu

SEQ ID NO: 1980017 - RNA, 19 nt, Homo sapiens
  misc_RNA (1)...(19): siRNA sense strand
gcgcggauugucucaggaa

SEQ ID NO: 1980018 - RNA, 19 nt, Homo sapiens
  misc_RNA (1)...(19): siRNA sense strand
aaucuggacuguggaugau

SEQ ID NO: 1980019 - RNA, 19 nt, Homo sapiens
  misc_RNA (1)...(19): siRNA sense strand
ggaccgcaggguuaagcuu

SEQ ID NO: 1980020 - RNA, 19 nt, Homo sapiens
  misc_RNA (1)...(19): siRNA sense strand
cagcuacugccuugugugu

SEQ ID NO: 1980021 - RNA, 19 nt, Homo sapiens
  misc_RNA (1)...(19): siRNA sense strand
guuauugaucuccgaacaa

SEQ ID NO: 1980022 - RNA, 19 nt, Homo sapiens
  misc_RNA (1)...(19): siRNA sense strand
ggaaagugcugucugcuaa

SEQ ID NO: 1980023 - RNA, 19 nt, Homo sapiens
  misc_RNA (1)...(19): siRNA sense strand
gcugagggcucucuguaua

SEQ ID NO: 1980024 - RNA, 19 nt, Homo sapiens
  misc_RNA (1)...(19): siRNA sense strand
gagcauaguucgagagaug

SEQ ID NO: 1980025 - RNA, 19 nt, Homo sapiens
  misc_RNA (1)...(19): siRNA sense strand
cagcacagcucauccauca

SEQ ID NO: 1980026 - RNA, 19 nt, Homo sapiens
  misc_RNA (1)...(19): siRNA sense strand
cgaacaggaugaugacauu

SEQ ID NO: 1980027 - RNA, 19 nt, Homo sapiens
  misc_RNA (1)...(19): siRNA sense strand
gcagaaagagcuugcagaa

SEQ ID NO: 1980028 - RNA, 19 nt, Homo sapiens
  misc_RNA (1)...(19): siRNA sense strand
gaagugaggguaccagcua

SEQ ID NO: 1980029 - RNA, 19 nt, Homo sapiens
  misc_RNA (1)...(19): siRNA sense strand
ggauccaguugcaaugaua

SEQ ID NO: 1980030 - RNA, 19 nt, Homo sapiens
  misc_RNA (1)...(19): siRNA sense strand
ggaauuacaagcauugaau

SEQ ID NO: 1980031 - RNA, 19 nt, Homo sapiens
  misc_RNA (1)...(19): siRNA sense strand
gcacagcucauccaucaau

SEQ ID NO: 1980032 - RNA, 19 nt, Homo sapiens
  misc_RNA (1)...(19): siRNA sense strand
uuacugcccuggacuuaaa

SEQ ID NO: 1980033 - RNA, 19 nt, Homo sapiens
  misc_RNA (1)...(19): siRNA sense strand
agauggagcuguugggaaa

SEQ ID NO: 1980034 - RNA, 19 nt, Homo sapiens
  misc_RNA (1)...(19): siRNA sense strand
uguggaugauuaucgauua

SEQ ID NO: 1980035 - RNA, 19 nt, Homo sapiens
  misc_RNA (1)...(19): siRNA sense strand
ggacuuaaacccagaaagg

SEQ ID NO: 1980036 - RNA, 19 nt, Homo sapiens
  misc_RNA (1)...(19): siRNA sense strand
ugcuggaucuuaccucuua

SEQ ID NO: 1980037 - RNA, 19 nt, Homo sapiens
  misc_RNA (1)...(19): siRNA sense strand
ggacaaaggaugcaaagcu

SEQ ID NO: 1980038 - RNA, 19 nt, Homo sapiens
  misc_RNA (1)...(19): siRNA sense strand
ucuggacuguggaugauua

SEQ ID NO: 1980039 - RNA, 19 nt, Homo sapiens
  misc_RNA (1)...(19): siRNA sense strand
gaaucuggacuguggauga

SEQ ID NO: 1980040 - RNA, 19 nt, Homo sapiens
  misc_RNA (1)...(19): siRNA sense strand
gagcuguugggaaagauua

SEQ ID NO: 1980041 - RNA, 19 nt, Homo sapiens
  misc_RNA (1)...(19): siRNA sense strand
acagagcaauguguaauga

SEQ ID NO: 1980042 - RNA, 19 nt, Homo sapiens
  misc_RNA (1)...(19): siRNA sense strand
agcaaagucugcauaaaga

SEQ ID NO: 1980043 - RNA, 19 nt, Homo sapiens
  misc_RNA (1)...(19): siRNA sense strand
ggaugaaacuucugaucac

SEQ ID NO: 1980044 - RNA, 19 nt, Homo sapiens
  misc_RNA (1)...(19): siRNA sense strand
gcaggaauuacaagcauug

SEQ ID NO: 1980045 - RNA, 19 nt, Homo sapiens
  misc_RNA (1)...(19): siRNA sense strand
gaugaaacuucugaucaca

SEQ ID NO: 1980046 - RNA, 19 nt, Homo sapiens
  misc_RNA (1)...(19): siRNA sense strand
ugaaacuucugaucacaca

SEQ ID NO: 1980047 - RNA, 19 nt, Homo sapiens
  misc_RNA (1)...(19): siRNA sense strand
gcucgcacguugucagugu

SEQ ID NO: 1980048 - RNA, 19 nt, Homo sapiens
  misc_RNA (1)...(19): siRNA sense strand
cagcaaagucugcauaaag

SEQ ID NO: 1980049 - RNA, 19 nt, Homo sapiens
  misc_RNA (1)...(19): siRNA sense strand
ggcauggaccgcaggguua

SEQ ID NO: 1980050 - RNA, 19 nt, Homo sapiens
  misc_RNA (1)...(19): siRNA sense strand
gggaaagugcugucugcua

SEQ ID NO: 1980051 - RNA, 19 nt, Homo sapiens
  misc_RNA (1)...(19): siRNA sense strand
uuauugaucuccgaacaaa

SEQ ID NO: 1980052 - RNA, 19 nt, Homo sapiens
  misc_RNA (1)...(19): siRNA sense strand
cuuagcagcuucaaaugau

SEQ ID NO: 1980053 - RNA, 19 nt, Homo sapiens
  misc_RNA (1)...(19): siRNA sense strand
ggguuaagcuuugggaagu

SEQ ID NO: 1980054 - RNA, 19 nt, Homo sapiens
  misc_RNA (1)...(19): siRNA sense strand
gaucuacgcagcaaagucu

SEQ ID NO: 1980055 - RNA, 19 nt, Homo sapiens
  misc_RNA (1)...(19): siRNA sense strand
gguuaagcuuugggaagua

SEQ ID NO: 1980056 - RNA, 19 nt, Homo sapiens
  misc_RNA (1)...(19): siRNA sense strand
gauuacugcccuggacuua

SEQ ID NO: 1980057 - RNA, 19 nt, Homo sapiens
  misc_RNA (1)...(19): siRNA sense strand
gcuacugccuugugugucu

SEQ ID NO: 1980058 - RNA, 19 nt, Homo sapiens
  misc_RNA (1)...(19): siRNA sense strand
ccgaacaaaugcuaucaag

SEQ ID NO: 1980059 - RNA, 19 nt, Homo sapiens
  misc_RNA (1)...(19): siRNA sense strand
gaucuccgaacaaaugcua

SEQ ID NO: 1980060 - RNA, 19 nt, Homo sapiens
  misc_RNA (1)...(19): siRNA sense strand
ccucuuagcagcuucaaau

SEQ ID NO: 1980061 - RNA, 19 nt, Homo sapiens
  misc_RNA (1)...(19): siRNA sense strand
caguccagguucccgguua

SEQ ID NO: 1980062 - RNA, 19 nt, Homo sapiens
  misc_RNA (1)...(19): siRNA sense strand
cuaaguuccugcuggacaa

SEQ ID NO: 1980063 - RNA, 19 nt, Homo sapiens
  misc_RNA (1)...(19): siRNA sense strand
gaccgcaggguuaagcuuu

SEQ ID NO: 1980064 - RNA, 19 nt, Homo sapiens
  misc_RNA (1)...(19): siRNA sense strand
gcauaaagacaguguuugc

SEQ ID NO: 1980065 - RNA, 19 nt, Homo sapiens
  misc_RNA (1)...(19): siRNA sense strand
gaacaggaugaugacauug

SEQ ID NO: 1980066 - RNA, 19 nt, Homo sapiens
  misc_RNA (1)...(19): siRNA sense strand
cgaccggacucucaaacuc

SEQ ID NO: 1980067 - RNA, 19 nt, Homo sapiens
  misc_RNA (1)...(19): siRNA sense strand
agucaacgcugugcaguuc

SEQ ID NO: 1980068 - RNA, 19 nt, Homo sapiens
  misc_RNA (1)...(19): siRNA sense strand
uggcaguaaugcaggaauu

SEQ ID NO: 1980069 - RNA, 19 nt, Homo sapiens
  misc_RNA (1)...(19): siRNA sense strand
guuaagcuuugggaaguau

SEQ ID NO: 1980070 - RNA, 19 nt, Homo sapiens
  misc_RNA (1)...(19): siRNA sense strand
gagagcauaguucgagaga

SEQ ID NO: 1980071 - RNA, 19 nt, Homo sapiens
  misc_RNA (1)...(19): siRNA sense strand
gcauggaccgcaggguuaa

SEQ ID NO: 1980072 - RNA, 19 nt, Homo sapiens
  misc_RNA (1)...(19): siRNA sense strand
ggaccagaguugucuucag

SEQ ID NO: 1980073 - RNA, 19 nt, Homo sapiens
  misc_RNA (1)...(19): siRNA sense strand
ugauagugcuggaucuuac

SEQ ID NO: 1980074 - RNA, 19 nt, Homo sapiens
  misc_RNA (1)...(19): siRNA sense strand
ugucuucgaugcacaugau

SEQ ID NO: 1980075 - RNA, 19 nt, Homo sapiens
  misc_RNA (1)...(19): siRNA sense strand
caaagcagcacagcucauc

SEQ ID NO: 1980076 - RNA, 19 nt, Homo sapiens
  misc_RNA (1)...(19): siRNA sense strand
gacuguggaugauuaucga

SEQ ID NO: 1980077 - RNA, 19 nt, Homo sapiens
  misc_RNA (1)...(19): siRNA sense strand
gcaggauccaguugcaaug

SEQ ID NO: 1980078 - RNA, 19 nt, Homo sapiens
  misc_RNA (1)...(19): siRNA sense strand
gcucacagggaaaguggaa

SEQ ID NO: 1980079 - RNA, 19 nt, Homo sapiens
  misc_RNA (1)...(19): siRNA sense strand
agagcaauguguaaugagu

SEQ ID NO: 1980080 - RNA, 19 nt, Homo sapiens
  misc_RNA (1)...(19): siRNA sense strand
ugggaaguauuuggagaaa

SEQ ID NO: 1980081 - RNA, 19 nt, Homo sapiens
  misc_RNA (1)...(19): siRNA sense strand
ugagggcucucuguauauc

SEQ ID NO: 1980082 - RNA, 19 nt, Homo sapiens
  misc_RNA (1)...(19): siRNA sense strand
uaagcuuugggaaguauuu

SEQ ID NO: 1980083 - RNA, 19 nt, Homo sapiens
  misc_RNA (1)...(19): siRNA sense strand
aaagugcugucugcuaagu

SEQ ID NO: 1980084 - RNA, 19 nt, Homo sapiens
  misc_RNA (1)...(19): siRNA sense strand
ggacuguggaugauuaucg

SEQ ID NO: 1980085 - RNA, 19 nt, Homo sapiens
  misc_RNA (1)...(19): siRNA sense strand
uggaugaaacuucugauca

SEQ ID NO: 1980086 - RNA, 19 nt, Homo sapiens
  misc_RNA (1)...(19): siRNA sense strand
cugcauaaagacaguguuu

SEQ ID NO: 1980087 - RNA, 19 nt, Homo sapiens
  misc_RNA (1)...(19): siRNA sense strand
aggacaauguggauacuca

SEQ ID NO: 1980088 - RNA, 19 nt, Homo sapiens
  misc_RNA (1)...(19): siRNA sense strand
uuagcagcuucaaaugauu

SEQ ID NO: 1980089 - RNA, 19 nt, Homo sapiens
  misc_RNA (1)...(19): siRNA sense strand
gaaagugcugucugcuaag

SEQ ID NO: 1980090 - RNA, 19 nt, Homo sapiens
  misc_RNA (1)...(19): siRNA sense strand
gcuggacaaugcgcggauu

SEQ ID NO: 1980091 - RNA, 19 nt, Homo sapiens
  misc_RNA (1)...(19): siRNA sense strand
gcuaucaagcagacauuca

SEQ ID NO: 1980092 - RNA, 19 nt, Homo sapiens
  misc_RNA (1)...(19): siRNA sense strand
gacuuaaacccagaaagga

SEQ ID NO: 1980093 - RNA, 19 nt, Homo sapiens
  misc_RNA (1)...(19): siRNA sense strand
cggauugucucaggaaguc

SEQ ID NO: 1980094 - RNA, 19 nt, Homo sapiens
  misc_RNA (1)...(19): siRNA sense strand
gauccaguugcaaugauau

SEQ ID NO: 1980095 - RNA, 19 nt, Homo sapiens
  misc_RNA (1)...(19): siRNA sense strand
cauuguggaugaaacuucu

SEQ ID NO: 1980096 - RNA, 19 nt, Homo sapiens
  misc_RNA (1)...(19): siRNA sense strand
ugcagaagcagcaaaggaa

SEQ ID NO: 1980097 - RNA, 19 nt, Homo sapiens
  misc_RNA (1)...(19): siRNA sense strand
gggacacagugggaaagug

SEQ ID NO: 1980098 - RNA, 19 nt, Homo sapiens
  misc_RNA (1)...(19): siRNA sense strand
gacgcucugucucuuccuu

SEQ ID NO: 1980099 - RNA, 19 nt, Homo sapiens
  misc_RNA (1)...(19): siRNA sense strand
ggagcuguugggaaagauu

SEQ ID NO: 1980100 - RNA, 19 nt, Homo sapiens
  misc_RNA (1)...(19): siRNA sense strand
ucuuagcagcuucaaauga

SEQ ID NO: 1980101 - RNA, 19 nt, Homo sapiens
  misc_RNA (1)...(19): siRNA sense strand
uucgagagauggagcuguu

SEQ ID NO: 1980102 - RNA, 19 nt, Homo sapiens
  misc_RNA (1)...(19): siRNA sense strand
gcgcggauugucucaggaa

SEQ ID NO: 1980103 - RNA, 19 nt, Homo sapiens
  misc_RNA (1)...(19): siRNA sense strand
aaucuggacuguggaugau

SEQ ID NO: 1980104 - RNA, 19 nt, Homo sapiens
  misc_RNA (1)...(19): siRNA sense strand
ggaccgcaggguuaagcuu

SEQ ID NO: 1980105 - RNA, 19 nt, Homo sapiens
  misc_RNA (1)...(19): siRNA sense strand
cagcuacugccuugugugu

SEQ ID NO: 1980106 - RNA, 19 nt, Homo sapiens
  misc_RNA (1)...(19): siRNA sense strand
guuauugaucuccgaacaa

SEQ ID NO: 1980107 - RNA, 19 nt, Homo sapiens
  misc_RNA (1)...(19): siRNA sense strand
ggaaagugcugucugcuaa

SEQ ID NO: 1980108 - RNA, 19 nt, Homo sapiens
  misc_RNA (1)...(19): siRNA sense strand
gcugagggcucucuguaua

SEQ ID NO: 1980109 - RNA, 19 nt, Homo sapiens
  misc_RNA (1)...(19): siRNA sense strand
gagcauaguucgagagaug

SEQ ID NO: 1980110 - RNA, 19 nt, Homo sapiens
  misc_RNA (1)...(19): siRNA sense strand
cagcacagcucauccauca

SEQ ID NO: 1980111 - RNA, 19 nt, Homo sapiens
  misc_RNA (1)...(19): siRNA sense strand
ggauccaguugcaaugaua

SEQ ID NO: 1980112 - RNA, 19 nt, Homo sapiens
  misc_RNA (1)...(19): siRNA sense strand
ggaauuacaagcauugaau

SEQ ID NO: 1980113 - RNA, 19 nt, Homo sapiens
  misc_RNA (1)...(19): siRNA sense strand
gcacagcucauccaucaau

SEQ ID NO: 1980114 - RNA, 19 nt, Homo sapiens
  misc_RNA (1)...(19): siRNA sense strand
uuacugcccuggacuuaaa

SEQ ID NO: 1980115 - RNA, 19 nt, Homo sapiens
  misc_RNA (1)...(19): siRNA sense strand
agauggagcuguugggaaa

SEQ ID NO: 1980116 - RNA, 19 nt, Homo sapiens
  misc_RNA (1)...(19): siRNA sense strand
uguggaugauuaucgauua

SEQ ID NO: 1980117 - RNA, 19 nt, Homo sapiens
  misc_RNA (1)...(19): siRNA sense strand
ggacuuaaacccagaaagg

SEQ ID NO: 1980118 - RNA, 19 nt, Homo sapiens
  misc_RNA (1)...(19): siRNA sense strand
ugcuggaucuuaccucuua

SEQ ID NO: 1980119 - RNA, 19 nt, Homo sapiens
  misc_RNA (1)...(19): siRNA sense strand
ggacaaaggaugcaaagcu

SEQ ID NO: 1980120 - RNA, 19 nt, Homo sapiens
  misc_RNA (1)...(19): siRNA sense strand
ucuggacuguggaugauua

SEQ ID NO: 1980121 - RNA, 19 nt, Homo sapiens
  misc_RNA (1)...(19): siRNA sense strand
gaaucuggacuguggauga

SEQ ID NO: 1980122 - RNA, 19 nt, Homo sapiens
  misc_RNA (1)...(19): siRNA sense strand
gagcuguugggaaagauua

SEQ ID NO: 1980123 - RNA, 19 nt, Homo sapiens
  misc_RNA (1)...(19): siRNA sense strand
acagagcaauguguaauga

SEQ ID NO: 1980124 - RNA, 19 nt, Homo sapiens
  misc_RNA (1)...(19): siRNA sense strand
agcaaagucugcauaaaga

SEQ ID NO: 1980125 - RNA, 19 nt, Homo sapiens
  misc_RNA (1)...(19): siRNA sense strand
gcaggaauuacaagcauug

SEQ ID NO: 1980126 - RNA, 19 nt, Homo sapiens
  misc_RNA (1)...(19): siRNA sense strand
cagcaaagucugcauaaag

SEQ ID NO: 1980127 - RNA, 19 nt, Homo sapiens
  misc_RNA (1)...(19): siRNA sense strand
gcucgcacguugucagugu

SEQ ID NO: 1980128 - RNA, 19 nt, Homo sapiens
  misc_RNA (1)...(19): siRNA sense strand
gggaaagugcugucugcua

SEQ ID NO: 1980129 - RNA, 19 nt, Homo sapiens
  misc_RNA (1)...(19): siRNA sense strand
uuauugaucuccgaacaaa

SEQ ID NO: 1980130 - RNA, 19 nt, Homo sapiens
  misc_RNA (1)...(19): siRNA sense strand
cuuagcagcuucaaaugau

SEQ ID NO: 1980131 - RNA, 19 nt, Homo sapiens
  misc_RNA (1)...(19): siRNA sense strand
gaucuacgcagcaaagucu

SEQ ID NO: 1980132 - RNA, 19 nt, Homo sapiens
  misc_RNA (1)...(19): siRNA sense strand
ggguuaagcuuugggaagu

SEQ ID NO: 1980133 - RNA, 19 nt, Homo sapiens
  misc_RNA (1)...(19): siRNA sense strand
gauuacugcccuggacuua

SEQ ID NO: 1980134 - RNA, 19 nt, Homo sapiens
  misc_RNA (1)...(19): siRNA sense strand
gguuaagcuuugggaagua

SEQ ID NO: 1980135 - RNA, 19 nt, Homo sapiens
  misc_RNA (1)...(19): siRNA sense strand
ccucuuagcagcuucaaau

SEQ ID NO: 1980136 - RNA, 19 nt, Homo sapiens
  misc_RNA (1)...(19): siRNA sense strand
ccgaacaaaugcuaucaag

SEQ ID NO: 1980137 - RNA, 19 nt, Homo sapiens
  misc_RNA (1)...(19): siRNA sense strand
gaucuccgaacaaaugcua

SEQ ID NO: 1980138 - RNA, 19 nt, Homo sapiens
  misc_RNA (1)...(19): siRNA sense strand
cuaaguuccugcuggacaa

SEQ ID NO: 1980139 - RNA, 19 nt, Homo sapiens
  misc_RNA (1)...(19): siRNA sense strand
cgaccggacucucaaacuc

SEQ ID NO: 1980140 - RNA, 19 nt, Homo sapiens
  misc_RNA (1)...(19): siRNA sense strand
gaccgcaggguuaagcuuu

SEQ ID NO: 1980141 - RNA, 19 nt, Homo sapiens
  misc_RNA (1)...(19): siRNA sense strand
gcauaaagacaguguuugc

SEQ ID NO: 1980142 - RNA, 19 nt, Homo sapiens
  misc_RNA (1)...(19): siRNA sense strand
uggcaguaaugcaggaauu

SEQ ID NO: 1980143 - RNA, 19 nt, Homo sapiens
  misc_RNA (1)...(19): siRNA sense strand
guuaagcuuugggaaguau

SEQ ID NO: 1980144 - RNA, 19 nt, Homo sapiens
  misc_RNA (1)...(19): siRNA sense strand
gagagcauaguucgagaga

SEQ ID NO: 1980145 - RNA, 19 nt, Homo sapiens
  misc_RNA (1)...(19): siRNA sense strand
ggaccagaguugucuucag

SEQ ID NO: 1980146 - RNA, 19 nt, Homo sapiens
  misc_RNA (1)...(19): siRNA sense strand
ugauagugcuggaucuuac

SEQ ID NO: 1980147 - RNA, 19 nt, Homo sapiens
  misc_RNA (1)...(19): siRNA sense strand
gacuguggaugauuaucga

SEQ ID NO: 1980148 - RNA, 19 nt, Homo sapiens
  misc_RNA (1)...(19): siRNA sense strand
caaagcagcacagcucauc

SEQ ID NO: 1980149 - RNA, 19 nt, Homo sapiens
  misc_RNA (1)...(19): siRNA sense strand
gcaggauccaguugcaaug

SEQ ID NO: 1980150 - RNA, 19 nt, Homo sapiens
  misc_RNA (1)...(19): siRNA sense strand
gcucacagggaaaguggaa

SEQ ID NO: 1980151 - RNA, 19 nt, Homo sapiens
  misc_RNA (1)...(19): siRNA sense strand
agagcaauguguaaugagu

SEQ ID NO: 1980152 - RNA, 19 nt, Homo sapiens
  misc_RNA (1)...(19): siRNA sense strand
ugggaaguauuuggagaaa

SEQ ID NO: 1980153 - RNA, 19 nt, Homo sapiens
  misc_RNA (1)...(19): siRNA sense strand
ugagggcucucuguauauc

SEQ ID NO: 1980154 - RNA, 19 nt, Homo sapiens
  misc_RNA (1)...(19): siRNA sense strand
ggacuguggaugauuaucg

SEQ ID NO: 1980155 - RNA, 19 nt, Homo sapiens
  misc_RNA (1)...(19): siRNA sense strand
uaagcuuugggaaguauuu

SEQ ID NO: 1980156 - RNA, 19 nt, Homo sapiens
  misc_RNA (1)...(19): siRNA sense strand
aaagugcugucugcuaagu

SEQ ID NO: 1980157 - RNA, 19 nt, Homo sapiens
  misc_RNA (1)...(19): siRNA sense strand
cugcauaaagacaguguuu

SEQ ID NO: 1980158 - RNA, 19 nt, Homo sapiens
  misc_RNA (1)...(19): siRNA sense strand
uuagcagcuucaaaugauu

SEQ ID NO: 1980159 - RNA, 19 nt, Homo sapiens
  misc_RNA (1)...(19): siRNA sense strand
gaaagugcugucugcuaag

SEQ ID NO: 1980160 - RNA, 19 nt, Homo sapiens
  misc_RNA (1)...(19): siRNA sense strand
gcuggacaaugcgcggauu

SEQ ID NO: 1980161 - RNA, 19 nt, Homo sapiens
  misc_RNA (1)...(19): siRNA sense strand
gcuaucaagcagacauuca

SEQ ID NO: 1980162 - RNA, 19 nt, Homo sapiens
  misc_RNA (1)...(19): siRNA sense strand
gacuuaaacccagaaagga

SEQ ID NO: 1980163 - RNA, 19 nt, Homo sapiens
  misc_RNA (1)...(19): siRNA sense strand
cggauugucucaggaaguc

SEQ ID NO: 1980164 - RNA, 19 nt, Homo sapiens
  misc_RNA (1)...(19): siRNA sense strand
gauccaguugcaaugauau

SEQ ID NO: 1980165 - RNA, 19 nt, Homo sapiens
  misc_RNA (1)...(19): siRNA sense strand
gggacacagugggaaagug

SEQ ID NO: 1980166 - RNA, 19 nt, Homo sapiens
  misc_RNA (1)...(19): siRNA sense strand
ggagcuguugggaaagauu

SEQ ID NO: 1980167 - RNA, 19 nt, Homo sapiens
  misc_RNA (1)...(19): siRNA sense strand
gcgcggauugucucaggaa

SEQ ID NO: 1980168 - RNA, 19 nt, Homo sapiens
  misc_RNA (1)...(19): siRNA sense strand
aaucuggacuguggaugau

SEQ ID NO: 1980169 - RNA, 19 nt, Homo sapiens
  misc_RNA (1)...(19): siRNA sense strand
uucgagagauggagcuguu

SEQ ID NO: 1980170 - RNA, 19 nt, Homo sapiens
  misc_RNA (1)...(19): siRNA sense strand
ucuuagcagcuucaaauga

SEQ ID NO: 1980171 - RNA, 19 nt, Homo sapiens
  misc_RNA (1)...(19): siRNA sense strand
ggaccgcaggguuaagcuu

SEQ ID NO: 1980172 - RNA, 19 nt, Homo sapiens
  misc_RNA (1)...(19): siRNA sense strand
guuauugaucuccgaacaa

SEQ ID NO: 1980173 - RNA, 19 nt, Homo sapiens
  misc_RNA (1)...(19): siRNA sense strand
ggaauaagcuucaaaguga

SEQ ID NO: 1980174 - RNA, 19 nt, Homo sapiens
  misc_RNA (1)...(19): siRNA sense strand
gaacauacauuucucaagu

SEQ ID NO: 1980175 - RNA, 19 nt, Homo sapiens
  misc_RNA (1)...(19): siRNA sense strand
gcauaaagcugaacgagaa

SEQ ID NO: 1980176 - RNA, 19 nt, Homo sapiens
  misc_RNA (1)...(19): siRNA sense strand
gagaaugacuugcugaauu

SEQ ID NO: 1980177 - RNA, 19 nt, Homo sapiens
  misc_RNA (1)...(19): siRNA sense strand
ggaaauaacagacaucaaa

SEQ ID NO: 1980178 - RNA, 19 nt, Homo sapiens
  misc_RNA (1)...(19): siRNA sense strand
aaacagaaaucaggucuua

SEQ ID NO: 1980179 - RNA, 19 nt, Homo sapiens
  misc_RNA (1)...(19): siRNA sense strand
gaaucuagaugaagaggua

SEQ ID NO: 1980180 - RNA, 19 nt, Homo sapiens
  misc_RNA (1)...(19): siRNA sense strand
ggaggaagauaaagaagaa

SEQ ID NO: 1980181 - RNA, 19 nt, Homo sapiens
  misc_RNA (1)...(19): siRNA sense strand
gaucgugaauuaauacgua

SEQ ID NO: 1980182 - RNA, 19 nt, Homo sapiens
  misc_RNA (1)...(19): siRNA sense strand
aaacaagaaugccgaaauu

SEQ ID NO: 1980183 - RNA, 19 nt, Homo sapiens
  misc_RNA (1)...(19): siRNA sense strand
guaaccagcugcuuaaugu

SEQ ID NO: 1980184 - RNA, 19 nt, Homo sapiens
  misc_RNA (1)...(19): siRNA sense strand
gagaacagauuagcagauu

SEQ ID NO: 1980185 - RNA, 19 nt, Homo sapiens
  misc_RNA (1)...(19): siRNA sense strand
cagaagagaucaccaggaa

SEQ ID NO: 1980186 - RNA, 19 nt, Homo sapiens
  misc_RNA (1)...(19): siRNA sense strand
ggaagaguaugcacguauu

SEQ ID NO: 1980187 - RNA, 19 nt, Homo sapiens
  misc_RNA (1)...(19): siRNA sense strand
gaacagauuagcagauuug

SEQ ID NO: 1980188 - RNA, 19 nt, Homo sapiens
  misc_RNA (1)...(19): siRNA sense strand
auaauaagcuucgcuauga

SEQ ID NO: 1980189 - RNA, 19 nt, Homo sapiens
  misc_RNA (1)...(19): siRNA sense strand
aaagugaacuggauggauu

SEQ ID NO: 1980190 - RNA, 19 nt, Homo sapiens
  misc_RNA (1)...(19): siRNA sense strand
agaaaaggaucgugaauua

SEQ ID NO: 1980191 - RNA, 19 nt, Homo sapiens
  misc_RNA (1)...(19): siRNA sense strand
caaacaaacuggaaauaac

SEQ ID NO: 1980192 - RNA, 19 nt, Homo sapiens
  misc_RNA (1)...(19): siRNA sense strand
ggaaaugguggagagauua

SEQ ID NO: 1980193 - RNA, 19 nt, Homo sapiens
  misc_RNA (1)...(19): siRNA sense strand
ggaacaacuugcucgagaa

SEQ ID NO: 1980194 - RNA, 19 nt, Homo sapiens
  misc_RNA (1)...(19): siRNA sense strand
gaaagaagaauuggaaaca

SEQ ID NO: 1980195 - RNA, 19 nt, Homo sapiens
  misc_RNA (1)...(19): siRNA sense strand
ucacaaagugcucuuagua

SEQ ID NO: 1980196 - RNA, 19 nt, Homo sapiens
  misc_RNA (1)...(19): siRNA sense strand
gaacaacuugcucgagaaa

SEQ ID NO: 1980197 - RNA, 19 nt, Homo sapiens
  misc_RNA (1)...(19): siRNA sense strand
gaaaugguggagagauuaa

SEQ ID NO: 1980198 - RNA, 19 nt, Homo sapiens
  misc_RNA (1)...(19): siRNA sense strand
gaauacaggugcggcaguu

SEQ ID NO: 1980199 - RNA, 19 nt, Homo sapiens
  misc_RNA (1)...(19): siRNA sense strand
ggaaaaugcccaaagaaua

SEQ ID NO: 1980200 - RNA, 19 nt, Homo sapiens
  misc_RNA (1)...(19): siRNA sense strand
aaaugaaaguggaacauga

SEQ ID NO: 1980201 - RNA, 19 nt, Homo sapiens
  misc_RNA (1)...(19): siRNA sense strand
gaaaagacauuggaagaga

SEQ ID NO: 1980202 - RNA, 19 nt, Homo sapiens
  misc_RNA (1)...(19): siRNA sense strand
agagugagcuagaaagaga

SEQ ID NO: 1980203 - RNA, 19 nt, Homo sapiens
  misc_RNA (1)...(19): siRNA sense strand
gagcugcaauugcccagaa

SEQ ID NO: 1980204 - RNA, 19 nt, Homo sapiens
  misc_RNA (1)...(19): siRNA sense strand
acaaagugcucuuaguaga

SEQ ID NO: 1980205 - RNA, 19 nt, Homo sapiens
  misc_RNA (1)...(19): siRNA sense strand
gaaaggaauaagcuucaaa

SEQ ID NO: 1980206 - RNA, 19 nt, Homo sapiens
  misc_RNA (1)...(19): siRNA sense strand
caaaccaaaugcugaagga

SEQ ID NO: 1980207 - RNA, 19 nt, Homo sapiens
  misc_RNA (1)...(19): siRNA sense strand
gcugaacgagaaauaaaua

SEQ ID NO: 1980208 - RNA, 19 nt, Homo sapiens
  misc_RNA (1)...(19): siRNA sense strand
caaagaagaagguuaucaa

SEQ ID NO: 1980209 - RNA, 19 nt, Homo sapiens
  misc_RNA (1)...(19): siRNA sense strand
gaagaguaugcacguauuu

SEQ ID NO: 1980210 - RNA, 19 nt, Homo sapiens
  misc_RNA (1)...(19): siRNA sense strand
agaaacagauacagugguu

SEQ ID NO: 1980211 - RNA, 19 nt, Homo sapiens
  misc_RNA (1)...(19): siRNA sense strand
gaagagaaacagauacagu

SEQ ID NO: 1980212 - RNA, 19 nt, Homo sapiens
  misc_RNA (1)...(19): siRNA sense strand
ggaucaguaugaagagaaa

SEQ ID NO: 1980213 - RNA, 19 nt, Homo sapiens
  misc_RNA (1)...(19): siRNA sense strand
aaagugcucuuaguagaaa

SEQ ID NO: 1980214 - RNA, 19 nt, Homo sapiens
  misc_RNA (1)...(19): siRNA sense strand
cuacguaaccagcugcuua

SEQ ID NO: 1980215 - RNA, 19 nt, Homo sapiens
  misc_RNA (1)...(19): siRNA sense strand
caaucaagcuaaggagaaa

SEQ ID NO: 1980216 - RNA, 19 nt, Homo sapiens
  misc_RNA (1)...(19): siRNA sense strand
caagaaugccgaaauuuua

SEQ ID NO: 1980217 - RNA, 19 nt, Homo sapiens
  misc_RNA (1)...(19): siRNA sense strand
aguacaagcugccaaagaa

SEQ ID NO: 1980218 - RNA, 19 nt, Homo sapiens
  misc_RNA (1)...(19): siRNA sense strand
ugaaguagcggaauuaaag

SEQ ID NO: 1980219 - RNA, 19 nt, Homo sapiens
  misc_RNA (1)...(19): siRNA sense strand
cuagaaagagaaaggaaua

SEQ ID NO: 1980220 - RNA, 19 nt, Homo sapiens
  misc_RNA (1)...(19): siRNA sense strand
gauaaagaagaacuacgua

SEQ ID NO: 1980221 - RNA, 19 nt, Homo sapiens
  misc_RNA (1)...(19): siRNA sense strand
aagaagaauuggaaacaga

SEQ ID NO: 1980222 - RNA, 19 nt, Homo sapiens
  misc_RNA (1)...(19): siRNA sense strand
gaugcaggcuacagucaga

SEQ ID NO: 1980223 - RNA, 19 nt, Homo sapiens
  misc_RNA (1)...(19): siRNA sense strand
uuaggaaucuagaugaaga

SEQ ID NO: 1980224 - RNA, 19 nt, Homo sapiens
  misc_RNA (1)...(19): siRNA sense strand
ggaagauaaagaagaacua

SEQ ID NO: 1980225 - RNA, 19 nt, Homo sapiens
  misc_RNA (1)...(19): siRNA sense strand
gcaaacgaguggaacaacu

SEQ ID NO: 1980226 - RNA, 19 nt, Homo sapiens
  misc_RNA (1)...(19): siRNA sense strand
caaagugcucuuaguagaa

SEQ ID NO: 1980227 - RNA, 19 nt, Homo sapiens
  misc_RNA (1)...(19): siRNA sense strand
auacauuucucaagucaga

SEQ ID NO: 1980228 - RNA, 19 nt, Homo sapiens
  misc_RNA (1)...(19): siRNA sense strand
uaaagcugaacgagaaaua

SEQ ID NO: 1980229 - RNA, 19 nt, Homo sapiens
  misc_RNA (1)...(19): siRNA sense strand
gaagaaaaguacaaucaag

SEQ ID NO: 1980230 - RNA, 19 nt, Homo sapiens
  misc_RNA (1)...(19): siRNA sense strand
caaugaaauucucaaagca

SEQ ID NO: 1980231 - RNA, 19 nt, Homo sapiens
  misc_RNA (1)...(19): siRNA sense strand
gagaaaggaauaagcuuca

SEQ ID NO: 1980232 - RNA, 19 nt, Homo sapiens
  misc_RNA (1)...(19): siRNA sense strand
uaauaagcuucgcuaugaa

SEQ ID NO: 1980233 - RNA, 19 nt, Homo sapiens
  misc_RNA (1)...(19): siRNA sense strand
caugaugucuggaggcaau

SEQ ID NO: 1980234 - RNA, 19 nt, Homo sapiens
  misc_RNA (1)...(19): siRNA sense strand
uaaaguacaagcugccaaa

SEQ ID NO: 1980235 - RNA, 19 nt, Homo sapiens
  misc_RNA (1)...(19): siRNA sense strand
gaagaauuggaaacagaaa

SEQ ID NO: 1980236 - RNA, 19 nt, Homo sapiens
  misc_RNA (1)...(19): siRNA sense strand
gaaaagacuacaagagaaa

SEQ ID NO: 1980237 - RNA, 19 nt, Homo sapiens
  misc_RNA (1)...(19): siRNA sense strand
aaacagcaaaucaguaguu

SEQ ID NO: 1980238 - RNA, 19 nt, Homo sapiens
  misc_RNA (1)...(19): siRNA sense strand
gcuucagaguguuagguua

SEQ ID NO: 1980239 - RNA, 19 nt, Homo sapiens
  misc_RNA (1)...(19): siRNA sense strand
acaaugaaauucucaaagc

SEQ ID NO: 1980240 - RNA, 19 nt, Homo sapiens
  misc_RNA (1)...(19): siRNA sense strand
gaaauaacagacaucaaac

SEQ ID NO: 1980241 - RNA, 19 nt, Homo sapiens
  misc_RNA (1)...(19): siRNA sense strand
aaacuucagcaacaaauug

SEQ ID NO: 1980242 - RNA, 19 nt, Homo sapiens
  misc_RNA (1)...(19): siRNA sense strand
gcuaagagugagcuagaaa

SEQ ID NO: 1980243 - RNA, 19 nt, Homo sapiens
  misc_RNA (1)...(19): siRNA sense strand
cagcaagagcuaagaguga

SEQ ID NO: 1980244 - RNA, 19 nt, Homo sapiens
  misc_RNA (1)...(19): siRNA sense strand
ggauuacagucagacaaug

SEQ ID NO: 1980245 - RNA, 19 nt, Homo sapiens
  misc_RNA (1)...(19): siRNA sense strand
ggcaaagaaagaagaauug

SEQ ID NO: 1980246 - RNA, 19 nt, Homo sapiens
  misc_RNA (1)...(19): siRNA sense strand
gauuacagucagacaauga

SEQ ID NO: 1980247 - RNA, 19 nt, Homo sapiens
  misc_RNA (1)...(19): siRNA sense strand
gaaaaugcccaaagaauac

SEQ ID NO: 1980248 - RNA, 19 nt, Homo sapiens
  misc_RNA (1)...(19): siRNA sense strand
uauaauaagcuucgcuaug

SEQ ID NO: 1980249 - RNA, 19 nt, Homo sapiens
  misc_RNA (1)...(19): siRNA sense strand
uaucacagacagagaagaa

SEQ ID NO: 1980250 - RNA, 19 nt, Homo sapiens
  misc_RNA (1)...(19): siRNA sense strand
uugcaagacuggaggaaga

SEQ ID NO: 1980251 - RNA, 19 nt, Homo sapiens
  misc_RNA (1)...(19): siRNA sense strand
gaaagagaaaggaauaagc

SEQ ID NO: 1980252 - RNA, 19 nt, Homo sapiens
  misc_RNA (1)...(19): siRNA sense strand
uaagagugagcuagaaaga

SEQ ID NO: 1980253 - RNA, 19 nt, Homo sapiens
  misc_RNA (1)...(19): siRNA sense strand
caagacuggaggaagauaa

SEQ ID NO: 1980254 - RNA, 19 nt, Homo sapiens
  misc_RNA (1)...(19): siRNA sense strand
caaacgaguggaacaacuu

SEQ ID NO: 1980255 - RNA, 19 nt, Homo sapiens
  misc_RNA (1)...(19): siRNA sense strand
caaagaaagaagaauugga

SEQ ID NO: 1980256 - RNA, 19 nt, Homo sapiens
  misc_RNA (1)...(19): siRNA sense strand
aggaaaugguggagagauu

SEQ ID NO: 1980257 - RNA, 19 nt, Homo sapiens
  misc_RNA (1)...(19): siRNA sense strand
ugaaaagacuacaagagaa

SEQ ID NO: 1980258 - RNA, 19 nt, Homo sapiens
  misc_RNA (1)...(19): siRNA sense strand
agagaaaguagaagucuug

SEQ ID NO: 1980259 - RNA, 19 nt, Homo sapiens
  misc_RNA (1)...(19): siRNA sense strand
gaagauaaagaagaacuac

SEQ ID NO: 1980260 - RNA, 19 nt, Homo sapiens
  misc_RNA (1)...(19): siRNA sense strand
gaaaaggaucgugaauuaa

SEQ ID NO: 1980261 - RNA, 19 nt, Homo sapiens
  misc_RNA (1)...(19): siRNA sense strand
gagagaacguuuuaggaau

SEQ ID NO: 1980262 - RNA, 19 nt, Homo sapiens
  misc_RNA (1)...(19): siRNA sense strand
gcaagacuggaggaagaua

SEQ ID NO: 1980263 - RNA, 19 nt, Homo sapiens
  misc_RNA (1)...(19): siRNA sense strand
uacauuguccaguaaagua

SEQ ID NO: 1980264 - RNA, 19 nt, Homo sapiens
  misc_RNA (1)...(19): siRNA sense strand
caaucaagcagugaacaaa

SEQ ID NO: 1980265 - RNA, 19 nt, Homo sapiens
  misc_RNA (1)...(19): siRNA sense strand
acagucagacaaugaaauu

SEQ ID NO: 1980266 - RNA, 19 nt, Homo sapiens
  misc_RNA (1)...(19): siRNA sense strand
ggaggcaaagaaagaagaa

SEQ ID NO: 1980267 - RNA, 19 nt, Homo sapiens
  misc_RNA (1)...(19): siRNA sense strand
auacagugguuggaagaaa

SEQ ID NO: 1980268 - RNA, 19 nt, Homo sapiens
  misc_RNA (1)...(19): siRNA sense strand
agaacagauuagcagauuu

SEQ ID NO: 1980269 - RNA, 19 nt, Homo sapiens
  misc_RNA (1)...(19): siRNA sense strand
agaacucgagaacagauua

SEQ ID NO: 1980270 - RNA, 19 nt, Homo sapiens
  misc_RNA (1)...(19): siRNA sense strand
aaaguacaaucaagcuaag

SEQ ID NO: 1980271 - RNA, 19 nt, Homo sapiens
  misc_RNA (1)...(19): siRNA sense strand
gagaagaaaaguacaauca

SEQ ID NO: 1980272 - RNA, 19 nt, Homo sapiens
  misc_RNA (1)...(19): siRNA sense strand
gcaaagaaagaagaauugg

SEQ ID NO: 1980273 - RNA, 19 nt, Homo sapiens
  misc_RNA (1)...(19): siRNA sense strand
gaagaaagcgcuaaguaaa

SEQ ID NO: 1980274 - RNA, 19 nt, Homo sapiens
  misc_RNA (1)...(19): siRNA sense strand
gcacagacccuuacccuuu

SEQ ID NO: 1980275 - RNA, 19 nt, Homo sapiens
  misc_RNA (1)...(19): siRNA sense strand
gcagagaacagaaauauga

SEQ ID NO: 1980276 - RNA, 19 nt, Homo sapiens
  misc_RNA (1)...(19): siRNA sense strand
gaacagaaauaugaagaug

SEQ ID NO: 1980277 - RNA, 19 nt, Homo sapiens
  misc_RNA (1)...(19): siRNA sense strand
ggaaugcugugaguaagua

SEQ ID NO: 1980278 - RNA, 19 nt, Homo sapiens
  misc_RNA (1)...(19): siRNA sense strand
gcucgcaccuugucgcuua

SEQ ID NO: 1980279 - RNA, 19 nt, Homo sapiens
  misc_RNA (1)...(19): siRNA sense strand
acaaagaacucccaaaaua

SEQ ID NO: 1980280 - RNA, 19 nt, Homo sapiens
  misc_RNA (1)...(19): siRNA sense strand
ggaacgcacuggcuaauca

SEQ ID NO: 1980281 - RNA, 19 nt, Homo sapiens
  misc_RNA (1)...(19): siRNA sense strand
gguaauggcuaacaacguu

SEQ ID NO: 1980282 - RNA, 19 nt, Homo sapiens
  misc_RNA (1)...(19): siRNA sense strand
gagauaacguggaccuauu

SEQ ID NO: 1980283 - RNA, 19 nt, Homo sapiens
  misc_RNA (1)...(19): siRNA sense strand
gcaauggaccaguauagua

SEQ ID NO: 1980284 - RNA, 19 nt, Homo sapiens
  misc_RNA (1)...(19): siRNA sense strand
ggagaaagccaaaacauua

SEQ ID NO: 1980285 - RNA, 19 nt, Homo sapiens
  misc_RNA (1)...(19): siRNA sense strand
cagauucucucuuucauga

SEQ ID NO: 1980286 - RNA, 19 nt, Homo sapiens
  misc_RNA (1)...(19): siRNA sense strand
gauucucucuuucaugaua

SEQ ID NO: 1980287 - RNA, 19 nt, Homo sapiens
  misc_RNA (1)...(19): siRNA sense strand
ggauguauauggcuaccua

SEQ ID NO: 1980288 - RNA, 19 nt, Homo sapiens
  misc_RNA (1)...(19): siRNA sense strand
uggcaaaccuguacaagaa

SEQ ID NO: 1980289 - RNA, 19 nt, Homo sapiens
  misc_RNA (1)...(19): siRNA sense strand
gcaaaugcacagacccuua

SEQ ID NO: 1980290 - RNA, 19 nt, Homo sapiens
  misc_RNA (1)...(19): siRNA sense strand
caaaauggcugaauguuau

SEQ ID NO: 1980291 - RNA, 19 nt, Homo sapiens
  misc_RNA (1)...(19): siRNA sense strand
guaaguauaccauggcuuu

SEQ ID NO: 1980292 - RNA, 19 nt, Homo sapiens
  misc_RNA (1)...(19): siRNA sense strand
cucagcagcuuguuacuua

SEQ ID NO: 1980293 - RNA, 19 nt, Homo sapiens
  misc_RNA (1)...(19): siRNA sense strand
gcacacuggugacaacuca

SEQ ID NO: 1980294 - RNA, 19 nt, Homo sapiens
  misc_RNA (1)...(19): siRNA sense strand
gauaaagcccugacccaaa

SEQ ID NO: 1980295 - RNA, 19 nt, Homo sapiens
  misc_RNA (1)...(19): siRNA sense strand
cuucagagcuggagacaau

SEQ ID NO: 1980296 - RNA, 19 nt, Homo sapiens
  misc_RNA (1)...(19): siRNA sense strand
ucaugcagauucucucuuu

SEQ ID NO: 1980297 - RNA, 19 nt, Homo sapiens
  misc_RNA (1)...(19): siRNA sense strand
ucgcuuagauuguuaugaa

SEQ ID NO: 1980298 - RNA, 19 nt, Homo sapiens
  misc_RNA (1)...(19): siRNA sense strand
caucugaaauugaagugaa

SEQ ID NO: 1980299 - RNA, 19 nt, Homo sapiens
  misc_RNA (1)...(19): siRNA sense strand
ggugacaacucaagagcaa

SEQ ID NO: 1980300 - RNA, 19 nt, Homo sapiens
  misc_RNA (1)...(19): siRNA sense strand
gaacaugggcagaguccaa

SEQ ID NO: 1980301 - RNA, 19 nt, Homo sapiens
  misc_RNA (1)...(19): siRNA sense strand
cagaagaaagcgcuaagua

SEQ ID NO: 1980302 - RNA, 19 nt, Homo sapiens
  misc_RNA (1)...(19): siRNA sense strand
caaaggccagauuacauua

SEQ ID NO: 1980303 - RNA, 19 nt, Homo sapiens
  misc_RNA (1)...(19): siRNA sense strand
ccaaaggccagauuacauu

SEQ ID NO: 1980304 - RNA, 19 nt, Homo sapiens
  misc_RNA (1)...(19): siRNA sense strand
gaauugcuuugcugaggaa

SEQ ID NO: 1980305 - RNA, 19 nt, Homo sapiens
  misc_RNA (1)...(19): siRNA sense strand
acagaaauaugaagaugga

SEQ ID NO: 1980306 - RNA, 19 nt, Homo sapiens
  misc_RNA (1)...(19): siRNA sense strand
uaaagaugccauugcuaua

SEQ ID NO: 1980307 - RNA, 19 nt, Homo sapiens
  misc_RNA (1)...(19): siRNA sense strand
gagcagcacuuaggaacau

SEQ ID NO: 1980308 - RNA, 19 nt, Homo sapiens
  misc_RNA (1)...(19): siRNA sense strand
agaagaaagcgcuaaguaa

SEQ ID NO: 1980309 - RNA, 19 nt, Homo sapiens
  misc_RNA (1)...(19): siRNA sense strand
ugucacagcuucuauagca

SEQ ID NO: 1980310 - RNA, 19 nt, Homo sapiens
  misc_RNA (1)...(19): siRNA sense strand
caauaucucugaucagcau

SEQ ID NO: 1980311 - RNA, 19 nt, Homo sapiens
  misc_RNA (1)...(19): siRNA sense strand
gauguuggaucuuuaucug

SEQ ID NO: 1980312 - RNA, 19 nt, Homo sapiens
  misc_RNA (1)...(19): siRNA sense strand
gggcagagguggcauccau

SEQ ID NO: 1980313 - RNA, 19 nt, Homo sapiens
  misc_RNA (1)...(19): siRNA sense strand
ccucagaaguaccagcuuu

SEQ ID NO: 1980314 - RNA, 19 nt, Homo sapiens
  misc_RNA (1)...(19): siRNA sense strand
cauuaaggcuguggugaaa

SEQ ID NO: 1980315 - RNA, 19 nt, Homo sapiens
  misc_RNA (1)...(19): siRNA sense strand
uaaacaugaugcuggcaaa

SEQ ID NO: 1980316 - RNA, 19 nt, Homo sapiens
  misc_RNA (1)...(19): siRNA sense strand
caaagucagugucuuccau

SEQ ID NO: 1980317 - RNA, 19 nt, Homo sapiens
  misc_RNA (1)...(19): siRNA sense strand
gagaacagaaauaugaaga

SEQ ID NO: 1980318 - RNA, 19 nt, Homo sapiens
  misc_RNA (1)...(19): siRNA sense strand
guucaagcucugcuacuua

SEQ ID NO: 1980319 - RNA, 19 nt, Homo sapiens
  misc_RNA (1)...(19): siRNA sense strand
uuaugaaggucuuaucgaa

SEQ ID NO: 1980320 - RNA, 19 nt, Homo sapiens
  misc_RNA (1)...(19): siRNA sense strand
guaauaacaacccugaguu

SEQ ID NO: 1980321 - RNA, 19 nt, Homo sapiens
  misc_RNA (1)...(19): siRNA sense strand
caauggaccaguauaguau

SEQ ID NO: 1980322 - RNA, 19 nt, Homo sapiens
  misc_RNA (1)...(19): siRNA sense strand
gaagugaaauacaaaaugg

SEQ ID NO: 1980323 - RNA, 19 nt, Homo sapiens
  misc_RNA (1)...(19): siRNA sense strand
gcagagguggcauccauga

SEQ ID NO: 1980324 - RNA, 19 nt, Homo sapiens
  misc_RNA (1)...(19): siRNA sense strand
caacaguauucgagaagca

SEQ ID NO: 1980325 - RNA, 19 nt, Homo sapiens
  misc_RNA (1)...(19): siRNA sense strand
ccacaaagucagugucuuc

SEQ ID NO: 1980326 - RNA, 19 nt, Homo sapiens
  misc_RNA (1)...(19): siRNA sense strand
gcuagaggauguugagaac

SEQ ID NO: 1980327 - RNA, 19 nt, Homo sapiens
  misc_RNA (1)...(19): siRNA sense strand
caaugaaugugauccaaac

SEQ ID NO: 1980328 - RNA, 19 nt, Homo sapiens
  misc_RNA (1)...(19): siRNA sense strand
gacaaugaaugugauccaa

SEQ ID NO: 1980329 - RNA, 19 nt, Homo sapiens
  misc_RNA (1)...(19): siRNA sense strand
caaagaacucccaaaauaa

SEQ ID NO: 1980330 - RNA, 19 nt, Homo sapiens
  misc_RNA (1)...(19): siRNA sense strand
gagguggcauccaugacaa

SEQ ID NO: 1980331 - RNA, 19 nt, Homo sapiens
  misc_RNA (1)...(19): siRNA sense strand
gauaaagaugccauugcua

SEQ ID NO: 1980332 - RNA, 19 nt, Homo sapiens
  misc_RNA (1)...(19): siRNA sense strand
uggcauccaugacaaugaa

SEQ ID NO: 1980333 - RNA, 19 nt, Homo sapiens
  misc_RNA (1)...(19): siRNA sense strand
uagcagagaacagaaauau

SEQ ID NO: 1980334 - RNA, 19 nt, Homo sapiens
  misc_RNA (1)...(19): siRNA sense strand
aagcaaugguaauggcuaa

SEQ ID NO: 1980335 - RNA, 19 nt, Homo sapiens
  misc_RNA (1)...(19): siRNA sense strand
uuacuuagccuccaacagu

SEQ ID NO: 1980336 - RNA, 19 nt, Homo sapiens
  misc_RNA (1)...(19): siRNA sense strand
gaagcaauaauccacuuuc

SEQ ID NO: 1980337 - RNA, 19 nt, Homo sapiens
  misc_RNA (1)...(19): siRNA sense strand
uucaagcucugcuacuuaa

SEQ ID NO: 1980338 - RNA, 19 nt, Homo sapiens
  misc_RNA (1)...(19): siRNA sense strand
cagcugaacaguaauagug

SEQ ID NO: 1980339 - RNA, 19 nt, Homo sapiens
  misc_RNA (1)...(19): siRNA sense strand
ggcugaauguuauacaaug

SEQ ID NO: 1980340 - RNA, 19 nt, Homo sapiens
  misc_RNA (1)...(19): siRNA sense strand
ugcagaagauggagaagga

SEQ ID NO: 1980341 - RNA, 19 nt, Homo sapiens
  misc_RNA (1)...(19): siRNA sense strand
auaaagcccugacccaaag

SEQ ID NO: 1980342 - RNA, 19 nt, Homo sapiens
  misc_RNA (1)...(19): siRNA sense strand
gcccuucagucaccagcua

SEQ ID NO: 1980343 - RNA, 19 nt, Homo sapiens
  misc_RNA (1)...(19): siRNA sense strand
gggaucccuucaagacaaa

SEQ ID NO: 1980344 - RNA, 19 nt, Homo sapiens
  misc_RNA (1)...(19): siRNA sense strand
caaugguaauggcuaacaa

SEQ ID NO: 1980345 - RNA, 19 nt, Homo sapiens
  misc_RNA (1)...(19): siRNA sense strand
caucggauccuaggagauu

SEQ ID NO: 1980346 - RNA, 19 nt, Homo sapiens
  misc_RNA (1)...(19): siRNA sense strand
aaagugagaccuucaacug

SEQ ID NO: 1980347 - RNA, 19 nt, Homo sapiens
  misc_RNA (1)...(19): siRNA sense strand
augaaggucuuaucgaaug

SEQ ID NO: 1980348 - RNA, 19 nt, Homo sapiens
  misc_RNA (1)...(19): siRNA sense strand
gcaaucaguaccaucuguu

SEQ ID NO: 1980349 - RNA, 19 nt, Homo sapiens
  misc_RNA (1)...(19): siRNA sense strand
gggcagaguccaagaagca

SEQ ID NO: 1980350 - RNA, 19 nt, Homo sapiens
  misc_RNA (1)...(19): siRNA sense strand
cagaguccaagaagcaaua

SEQ ID NO: 1980351 - RNA, 19 nt, Homo sapiens
  misc_RNA (1)...(19): siRNA sense strand
auaaagaugccauugcuau

SEQ ID NO: 1980352 - RNA, 19 nt, Homo sapiens
  misc_RNA (1)...(19): siRNA sense strand
ccaaugaccagaagucucu

SEQ ID NO: 1980353 - RNA, 19 nt, Homo sapiens
  misc_RNA (1)...(19): siRNA sense strand
guauagcacuaaguuugga

SEQ ID NO: 1980354 - RNA, 19 nt, Homo sapiens
  misc_RNA (1)...(19): siRNA sense strand
cuacuuagcagagaacaga

SEQ ID NO: 1980355 - RNA, 19 nt, Homo sapiens
  misc_RNA (1)...(19): siRNA sense strand
uaauggcuaacaacguuua

SEQ ID NO: 1980356 - RNA, 19 nt, Homo sapiens
  misc_RNA (1)...(19): siRNA sense strand
gaauaucggaaugcuguga

SEQ ID NO: 1980357 - RNA, 19 nt, Homo sapiens
  misc_RNA (1)...(19): siRNA sense strand
ugucuuccaucugaaauug

SEQ ID NO: 1980358 - RNA, 19 nt, Homo sapiens
  misc_RNA (1)...(19): siRNA sense strand
ugacccaaaggccagauua

SEQ ID NO: 1980359 - RNA, 19 nt, Homo sapiens
  misc_RNA (1)...(19): siRNA sense strand
aaggucuuaucgaauguua

SEQ ID NO: 1980360 - RNA, 19 nt, Homo sapiens
  misc_RNA (1)...(19): siRNA sense strand
gcaccuugucgcuuagauu

SEQ ID NO: 1980361 - RNA, 19 nt, Homo sapiens
  misc_RNA (1)...(19): siRNA sense strand
ucacagcuucuauagcaaa

SEQ ID NO: 1980362 - RNA, 19 nt, Homo sapiens
  misc_RNA (1)...(19): siRNA sense strand
aaccuuggaugccgccuuu

SEQ ID NO: 1980363 - RNA, 19 nt, Homo sapiens
  misc_RNA (1)...(19): siRNA sense strand
uggcagaucuguacuucag

SEQ ID NO: 1980364 - RNA, 19 nt, Homo sapiens
  misc_RNA (1)...(19): siRNA sense strand
caagagcaaucaguaccau

SEQ ID NO: 1980365 - RNA, 19 nt, Homo sapiens
  misc_RNA (1)...(19): siRNA sense strand
ugggaucccuucaagacaa

SEQ ID NO: 1980366 - RNA, 19 nt, Homo sapiens
  misc_RNA (1)...(19): siRNA sense strand
caagauaaagaugccauug

SEQ ID NO: 1980367 - RNA, 19 nt, Homo sapiens
  misc_RNA (1)...(19): siRNA sense strand
gaugggaucccuucaagac

SEQ ID NO: 1980368 - RNA, 19 nt, Homo sapiens
  misc_RNA (1)...(19): siRNA sense strand
ggaugcagaagauggagaa

SEQ ID NO: 1980369 - RNA, 19 nt, Homo sapiens
  misc_RNA (1)...(19): siRNA sense strand
gcuccucagcagcuuguua

SEQ ID NO: 1980370 - RNA, 19 nt, Homo sapiens
  misc_RNA (1)...(19): siRNA sense strand
ucagagcuggagacaauaa

SEQ ID NO: 1980371 - RNA, 19 nt, Homo sapiens
  misc_RNA (1)...(19): siRNA sense strand
gcagauucucucuuucaug

SEQ ID NO: 1980372 - RNA, 19 nt, Homo sapiens
  misc_RNA (1)...(19): siRNA sense strand
gugagaccuucaacuggaa

SEQ ID NO: 1980373 - RNA, 19 nt, Homo sapiens
  misc_RNA (1)...(19): siRNA sense strand
ggaaguggaucgcuaugau

SEQ ID NO: 1980374 - RNA, 19 nt, Homo sapiens
  misc_RNA (1)...(19): siRNA sense strand
ccagaaaguccaagauaua

SEQ ID NO: 1980375 - RNA, 19 nt, Homo sapiens
  misc_RNA (1)...(19): siRNA sense strand
agacaagugugguuaacua

SEQ ID NO: 1980376 - RNA, 19 nt, Homo sapiens
  misc_RNA (1)...(19): siRNA sense strand
gucaagaugucacugguaa

SEQ ID NO: 1980377 - RNA, 19 nt, Homo sapiens
  misc_RNA (1)...(19): siRNA sense strand
gaacacaauugcucuucuc

SEQ ID NO: 1980378 - RNA, 19 nt, Homo sapiens
  misc_RNA (1)...(19): siRNA sense strand
cacaauugcucuucucugu

SEQ ID NO: 1980379 - RNA, 19 nt, Homo sapiens
  misc_RNA (1)...(19): siRNA sense strand
gcaccugggucaagauguc

SEQ ID NO: 1980380 - RNA, 19 nt, Homo sapiens
  misc_RNA (1)...(19): siRNA sense strand
gaaaguccaagauauaguc

SEQ ID NO: 1980381 - RNA, 19 nt, Homo sapiens
  misc_RNA (1)...(19): siRNA sense strand
ccaagguccggguaucuua

SEQ ID NO: 1980382 - RNA, 19 nt, Homo sapiens
  misc_RNA (1)...(19): siRNA sense strand
ccaaucagacugugaaauc

SEQ ID NO: 1980383 - RNA, 19 nt, Homo sapiens
  misc_RNA (1)...(19): siRNA sense strand
caagugugguuaacuacau

SEQ ID NO: 1980384 - RNA, 19 nt, Homo sapiens
  misc_RNA (1)...(19): siRNA sense strand
ggaacacaauugcucuucu

SEQ ID NO: 1980385 - RNA, 19 nt, Homo sapiens
  misc_RNA (1)...(19): siRNA sense strand
gaaguggaucgcuaugaug

SEQ ID NO: 1980386 - RNA, 19 nt, Homo sapiens
  misc_RNA (1)...(19): siRNA sense strand
caagcacccugucaugucu

SEQ ID NO: 1980387 - RNA, 19 nt, Homo sapiens
  misc_RNA (1)...(19): siRNA sense strand
ggagcugagugaggaguug

SEQ ID NO: 1980388 - RNA, 19 nt, Homo sapiens
  misc_RNA (1)...(19): siRNA sense strand
gcaacgagccacauaagcu

SEQ ID NO: 1980389 - RNA, 19 nt, Homo sapiens
  misc_RNA (1)...(19): siRNA sense strand
uccagaaaguccaagauau

SEQ ID NO: 1980390 - RNA, 19 nt, Homo sapiens
  misc_RNA (1)...(19): siRNA sense strand
ggagacaagugugguuaac

SEQ ID NO: 1980391 - RNA, 19 nt, Homo sapiens
  misc_RNA (1)...(19): siRNA sense strand
gaacgucuucucgguccua

SEQ ID NO: 1980392 - RNA, 19 nt, Homo sapiens
  misc_RNA (1)...(19): siRNA sense strand
ggacuucagcgccauugau

SEQ ID NO: 1980393 - RNA, 19 nt, Homo sapiens
  misc_RNA (1)...(19): siRNA sense strand
caagaguagugaggacuuc

SEQ ID NO: 1980394 - RNA, 19 nt, Homo sapiens
  misc_RNA (1)...(19): siRNA sense strand
ucaugucugugucuuacaa

SEQ ID NO: 1980395 - RNA, 19 nt, Homo sapiens
  misc_RNA (1)...(19): siRNA sense strand
caaggaaguggaucgcuau

SEQ ID NO: 1980396 - RNA, 19 nt, Homo sapiens
  misc_RNA (1)...(19): siRNA sense strand
ggucaagaugucacuggua

SEQ ID NO: 1980397 - RNA, 19 nt, Homo sapiens
  misc_RNA (1)...(19): siRNA sense strand
ccacccagaggaucaacua

SEQ ID NO: 1980398 - RNA, 19 nt, Homo sapiens
  misc_RNA (1)...(19): siRNA sense strand
cccaguugcucagcuguaa

SEQ ID NO: 1980399 - RNA, 19 nt, Homo sapiens
  misc_RNA (1)...(19): siRNA sense strand
agagauaccuuaaaagaag

SEQ ID NO: 1980400 - RNA, 19 nt, Homo sapiens
  misc_RNA (1)...(19): siRNA sense strand
cagacgagcaggacaagga

SEQ ID NO: 1980401 - RNA, 19 nt, Homo sapiens
  misc_RNA (1)...(19): siRNA sense strand
gcaggagacaagugugguu

SEQ ID NO: 1980402 - RNA, 19 nt, Homo sapiens
  misc_RNA (1)...(19): siRNA sense strand
caaucagacugugaaaucu

SEQ ID NO: 1980403 - RNA, 19 nt, Homo sapiens
  misc_RNA (1)...(19): siRNA sense strand
ggacaaggagacggucaga

SEQ ID NO: 1980404 - RNA, 19 nt, Homo sapiens
  misc_RNA (1)...(19): siRNA sense strand
uugccaaacugaguauaaa

SEQ ID NO: 1980405 - RNA, 19 nt, Homo sapiens
  misc_RNA (1)...(19): siRNA sense strand
caggagacaagugugguua

SEQ ID NO: 1980406 - RNA, 19 nt, Homo sapiens
  misc_RNA (1)...(19): siRNA sense strand
caagaugucacugguaaag

SEQ ID NO: 1980407 - RNA, 19 nt, Homo sapiens
  misc_RNA (1)...(19): siRNA sense strand
gacuucagcgccauugauu

SEQ ID NO: 1980408 - RNA, 19 nt, Homo sapiens
  misc_RNA (1)...(19): siRNA sense strand
aaacaggguaggcuucaug

SEQ ID NO: 1980409 - RNA, 19 nt, Homo sapiens
  misc_RNA (1)...(19): siRNA sense strand
cagaaaguccaagauauag

SEQ ID NO: 1980410 - RNA, 19 nt, Homo sapiens
  misc_RNA (1)...(19): siRNA sense strand
ccagaggccagcugccaaa

SEQ ID NO: 1980411 - RNA, 19 nt, Homo sapiens
  misc_RNA (1)...(19): siRNA sense strand
acaaggagacggucagagu

SEQ ID NO: 1980412 - RNA, 19 nt, Homo sapiens
  misc_RNA (1)...(19): siRNA sense strand
ucagcuguaagcaccauua

SEQ ID NO: 1980413 - RNA, 19 nt, Homo sapiens
  misc_RNA (1)...(19): siRNA sense strand
gucugugucuuacaaggaa

SEQ ID NO: 1980414 - RNA, 19 nt, Homo sapiens
  misc_RNA (1)...(19): siRNA sense strand
ucaggcaacgagccacaua

SEQ ID NO: 1980415 - RNA, 19 nt, Homo sapiens
  misc_RNA (1)...(19): siRNA sense strand
auuuaaagcagcagaguuu

SEQ ID NO: 1980416 - RNA, 19 nt, Homo sapiens
  misc_RNA (1)...(19): siRNA sense strand
ccagccgggugacaugaau

SEQ ID NO: 1980417 - RNA, 19 nt, Homo sapiens
  misc_RNA (1)...(19): siRNA sense strand
gcgccuucuuggcauuauu

SEQ ID NO: 1980418 - RNA, 19 nt, Homo sapiens
  misc_RNA (1)...(19): siRNA sense strand
gauauagucacugccaauc

SEQ ID NO: 1980419 - RNA, 19 nt, Homo sapiens
  misc_RNA (1)...(19): siRNA sense strand
uaccuccucuucucuucuu

SEQ ID NO: 1980420 - RNA, 19 nt, Homo sapiens
  misc_RNA (1)...(19): siRNA sense strand
ucucuucuuuccaggaguu

SEQ ID NO: 1980421 - RNA, 19 nt, Homo sapiens
  misc_RNA (1)...(19): siRNA sense strand
ucaagcacccugucauguc

SEQ ID NO: 1980422 - RNA, 19 nt, Homo sapiens
  misc_RNA (1)...(19): siRNA sense strand
ggaguugguccaggugguu

SEQ ID NO: 1980423 - RNA, 19 nt, Homo sapiens
  misc_RNA (1)...(19): siRNA sense strand
gcgggaagcaguggaguuc

SEQ ID NO: 1980424 - RNA, 19 nt, Homo sapiens
  misc_RNA (1)...(19): siRNA sense strand
uugauuaccuccucuucuc

SEQ ID NO: 1980425 - RNA, 19 nt, Homo sapiens
  misc_RNA (1)...(19): siRNA sense strand
ugucaugucugugucuuac

SEQ ID NO: 1980426 - RNA, 19 nt, Homo sapiens
  misc_RNA (1)...(19): siRNA sense strand
gagauaccuuaaaagaaga

SEQ ID NO: 1980427 - RNA, 19 nt, Homo sapiens
  misc_RNA (1)...(19): siRNA sense strand
agaugucacugguaaagac

SEQ ID NO: 1980428 - RNA, 19 nt, Homo sapiens
  misc_RNA (1)...(19): siRNA sense strand
gauuaccuccucuucucuu

SEQ ID NO: 1980429 - RNA, 19 nt, Homo sapiens
  misc_RNA (1)...(19): siRNA sense strand
gcaccauuacgaggucauu

SEQ ID NO: 1980430 - RNA, 19 nt, Homo sapiens
  misc_RNA (1)...(19): siRNA sense strand
aaacucaagcacccuguca

SEQ ID NO: 1980431 - RNA, 19 nt, Homo sapiens
  misc_RNA (1)...(19): siRNA sense strand
caggcaacgagccacauaa

SEQ ID NO: 1980432 - RNA, 19 nt, Homo sapiens
  misc_RNA (1)...(19): siRNA sense strand
aagauccuuucauccagaa

SEQ ID NO: 1980433 - RNA, 19 nt, Homo sapiens
  misc_RNA (1)...(19): siRNA sense strand
uguggucuuugaauggaaa

SEQ ID NO: 1980434 - RNA, 19 nt, Homo sapiens
  misc_RNA (1)...(19): siRNA sense strand
caaacaggguaggcuucau

SEQ ID NO: 1980435 - RNA, 19 nt, Homo sapiens
  misc_RNA (1)...(19): siRNA sense strand
ccaaacaggguaggcuuca

SEQ ID NO: 1980436 - RNA, 19 nt, Homo sapiens
  misc_RNA (1)...(19): siRNA sense strand
aagugugguuaacuacauu

SEQ ID NO: 1980437 - RNA, 19 nt, Homo sapiens
  misc_RNA (1)...(19): siRNA sense strand
ggagacggucagaguccaa

SEQ ID NO: 1980438 - RNA, 19 nt, Homo sapiens
  misc_RNA (1)...(19): siRNA sense strand
caaacugaguauaaaaugg

SEQ ID NO: 1980439 - RNA, 19 nt, Homo sapiens
  misc_RNA (1)...(19): siRNA sense strand
uauagucacugccaauccu

SEQ ID NO: 1980440 - RNA, 19 nt, Homo sapiens
  misc_RNA (1)...(19): siRNA sense strand
gcaguuugaucaagaaaua

SEQ ID NO: 1980441 - RNA, 19 nt, Homo sapiens
  misc_RNA (1)...(19): siRNA sense strand
uuaggaagcugucagauuu

SEQ ID NO: 1980442 - RNA, 19 nt, Homo sapiens
  misc_RNA (1)...(19): siRNA sense strand
cuaauacacuaccuucuaa

SEQ ID NO: 1980443 - RNA, 19 nt, Homo sapiens
  misc_RNA (1)...(19): siRNA sense strand
gaacgacccauuucuguug

SEQ ID NO: 1980444 - RNA, 19 nt, Homo sapiens
  misc_RNA (1)...(19): siRNA sense strand
gaugaccucugcuuaguau

SEQ ID NO: 1980445 - RNA, 19 nt, Homo sapiens
  misc_RNA (1)...(19): siRNA sense strand
aauaagagcccagacauua

SEQ ID NO: 1980446 - RNA, 19 nt, Homo sapiens
  misc_RNA (1)...(19): siRNA sense strand
aaggagauuugaagcauua

SEQ ID NO: 1980447 - RNA, 19 nt, Homo sapiens
  misc_RNA (1)...(19): siRNA sense strand
caagaaggauggaagaagu

SEQ ID NO: 1980448 - RNA, 19 nt, Homo sapiens
  misc_RNA (1)...(19): siRNA sense strand
cacaugagaugcaagauug

SEQ ID NO: 1980449 - RNA, 19 nt, Homo sapiens
  misc_RNA (1)...(19): siRNA sense strand
gggaggauuuggaguugua

SEQ ID NO: 1980450 - RNA, 19 nt, Homo sapiens
  misc_RNA (1)...(19): siRNA sense strand
ugacauuacuacugaagaa

SEQ ID NO: 1980451 - RNA, 19 nt, Homo sapiens
  misc_RNA (1)...(19): siRNA sense strand
gaaauaacacccaaaucug

SEQ ID NO: 1980452 - RNA, 19 nt, Homo sapiens
  misc_RNA (1)...(19): siRNA sense strand
gcuaauacacuaccuucua

SEQ ID NO: 1980453 - RNA, 19 nt, Homo sapiens
  misc_RNA (1)...(19): siRNA sense strand
gcacaugagaugcaagauu

SEQ ID NO: 1980454 - RNA, 19 nt, Homo sapiens
  misc_RNA (1)...(19): siRNA sense strand
gagaugaccucugcuuagu

SEQ ID NO: 1980455 - RNA, 19 nt, Homo sapiens
  misc_RNA (1)...(19): siRNA sense strand
ccucaguuauugcuagaua

SEQ ID NO: 1980456 - RNA, 19 nt, Homo sapiens
  misc_RNA (1)...(19): siRNA sense strand
gaaauaauaacuggacuuc

SEQ ID NO: 1980457 - RNA, 19 nt, Homo sapiens
  misc_RNA (1)...(19): siRNA sense strand
ggagaaauaacacccaaau

SEQ ID NO: 1980458 - RNA, 19 nt, Homo sapiens
  misc_RNA (1)...(19): siRNA sense strand
gaugacaccugugcagaau

SEQ ID NO: 1980459 - RNA, 19 nt, Homo sapiens
  misc_RNA (1)...(19): siRNA sense strand
cagcuaauggcaucaauuu

SEQ ID NO: 1980460 - RNA, 19 nt, Homo sapiens
  misc_RNA (1)...(19): siRNA sense strand
ggcaaagugucaacaugaa

SEQ ID NO: 1980461 - RNA, 19 nt, Homo sapiens
  misc_RNA (1)...(19): siRNA sense strand
gacaaagacaggacauuga

SEQ ID NO: 1980462 - RNA, 19 nt, Homo sapiens
  misc_RNA (1)...(19): siRNA sense strand
gagggaggauuuggaguug

SEQ ID NO: 1980463 - RNA, 19 nt, Homo sapiens
  misc_RNA (1)...(19): siRNA sense strand
ccucaauguuggacuaauu

SEQ ID NO: 1980464 - RNA, 19 nt, Homo sapiens
  misc_RNA (1)...(19): siRNA sense strand
ccauaacaccaucaacaua

SEQ ID NO: 1980465 - RNA, 19 nt, Homo sapiens
  misc_RNA (1)...(19): siRNA sense strand
gcccagacauuaagaaggu

SEQ ID NO: 1980466 - RNA, 19 nt, Homo sapiens
  misc_RNA (1)...(19): siRNA sense strand
gcaaagugucaacaugaaa

SEQ ID NO: 1980467 - RNA, 19 nt, Homo sapiens
  misc_RNA (1)...(19): siRNA sense strand
gaaguuagugauacacguu

SEQ ID NO: 1980468 - RNA, 19 nt, Homo sapiens
  misc_RNA (1)...(19): siRNA sense strand
aaauaacacccaaaucuga

SEQ ID NO: 1980469 - RNA, 19 nt, Homo sapiens
  misc_RNA (1)...(19): siRNA sense strand
caaauaucuuacuggauga

SEQ ID NO: 1980470 - RNA, 19 nt, Homo sapiens
  misc_RNA (1)...(19): siRNA sense strand
ggagaugaccucugcuuag

SEQ ID NO: 1980471 - RNA, 19 nt, Homo sapiens
  misc_RNA (1)...(19): siRNA sense strand
guauauaaaggcuacguaa

SEQ ID NO: 1980472 - RNA, 19 nt, Homo sapiens
  misc_RNA (1)...(19): siRNA sense strand
cauaacaccaucaacauau

SEQ ID NO: 1980473 - RNA, 19 nt, Homo sapiens
  misc_RNA (1)...(19): siRNA sense strand
uaaggagauuugaagcauu

SEQ ID NO: 1980474 - RNA, 19 nt, Homo sapiens
  misc_RNA (1)...(19): siRNA sense strand
uaugugcgcugccucaaug

SEQ ID NO: 1980475 - RNA, 19 nt, Homo sapiens
  misc_RNA (1)...(19): siRNA sense strand
caccacaaauugcacaguu

SEQ ID NO: 1980476 - RNA, 19 nt, Homo sapiens
  misc_RNA (1)...(19): siRNA sense strand
agaaauaacacccaaaucu

SEQ ID NO: 1980477 - RNA, 19 nt, Homo sapiens
  misc_RNA (1)...(19): siRNA sense strand
aaagacaggacauugauga

SEQ ID NO: 1980478 - RNA, 19 nt, Homo sapiens
  misc_RNA (1)...(19): siRNA sense strand
gggaacaacagcuuauaug

SEQ ID NO: 1980479 - RNA, 19 nt, Homo sapiens
  misc_RNA (1)...(19): siRNA sense strand
ggauuuggaguuguauaua

SEQ ID NO: 1980480 - RNA, 19 nt, Homo sapiens
  misc_RNA (1)...(19): siRNA sense strand
uuacaugccuaaugguuca

SEQ ID NO: 1980481 - RNA, 19 nt, Homo sapiens
  misc_RNA (1)...(19): siRNA sense strand
ggaacaacagcuuauaugg

SEQ ID NO: 1980482 - RNA, 19 nt, Homo sapiens
  misc_RNA (1)...(19): siRNA sense strand
caaaacugcuaauacacua

SEQ ID NO: 1980483 - RNA, 19 nt, Homo sapiens
  misc_RNA (1)...(19): siRNA sense strand
aaagaugaaugaugcugau

SEQ ID NO: 1980484 - RNA, 19 nt, Homo sapiens
  misc_RNA (1)...(19): siRNA sense strand
ccacuuucuuggcacauga

SEQ ID NO: 1980485 - RNA, 19 nt, Homo sapiens
  misc_RNA (1)...(19): siRNA sense strand
ugacaaagacaggacauug

SEQ ID NO: 1980486 - RNA, 19 nt, Homo sapiens
  misc_RNA (1)...(19): siRNA sense strand
gcuauaacaguucagcaaa

SEQ ID NO: 1980487 - RNA, 19 nt, Homo sapiens
  misc_RNA (1)...(19): siRNA sense strand
cuaaagaagcuauaacagu

SEQ ID NO: 1980488 - RNA, 19 nt, Homo sapiens
  misc_RNA (1)...(19): siRNA sense strand
gcuauguacucuggugcua

SEQ ID NO: 1980489 - RNA, 19 nt, Homo sapiens
  misc_RNA (1)...(19): siRNA sense strand
acaaucaguuucacauaag

SEQ ID NO: 1980490 - RNA, 19 nt, Homo sapiens
  misc_RNA (1)...(19): siRNA sense strand
ugacaccugugcagaaucu

SEQ ID NO: 1980491 - RNA, 19 nt, Homo sapiens
  misc_RNA (1)...(19): siRNA sense strand
uuacagcuuuggugugguu

SEQ ID NO: 1980492 - RNA, 19 nt, Homo sapiens
  misc_RNA (1)...(19): siRNA sense strand
ccgugaaccucaguuauug

SEQ ID NO: 1980493 - RNA, 19 nt, Homo sapiens
  misc_RNA (1)...(19): siRNA sense strand
ucacauaaggagauuugaa

SEQ ID NO: 1980494 - RNA, 19 nt, Homo sapiens
  misc_RNA (1)...(19): siRNA sense strand
agagaugacagcuucuuaa

SEQ ID NO: 1980495 - RNA, 19 nt, Homo sapiens
  misc_RNA (1)...(19): siRNA sense strand
guacuccaccacuuucuug

SEQ ID NO: 1980496 - RNA, 19 nt, Homo sapiens
  misc_RNA (1)...(19): siRNA sense strand
gagauuugaagcauuacuu

SEQ ID NO: 1980497 - RNA, 19 nt, Homo sapiens
  misc_RNA (1)...(19): siRNA sense strand
ugcagaaucuugaacaaag

SEQ ID NO: 1980498 - RNA, 19 nt, Homo sapiens
  misc_RNA (1)...(19): siRNA sense strand
gaugaacgacccauuucug

SEQ ID NO: 1980499 - RNA, 19 nt, Homo sapiens
  misc_RNA (1)...(19): siRNA sense strand
cagacucucuugcuuggau

SEQ ID NO: 1980500 - RNA, 19 nt, Homo sapiens
  misc_RNA (1)...(19): siRNA sense strand
gaccucugcuuaguauaug

SEQ ID NO: 1980501 - RNA, 19 nt, Homo sapiens
  misc_RNA (1)...(19): siRNA sense strand
ugguugacauuacuacuga

SEQ ID NO: 1980502 - RNA, 19 nt, Homo sapiens
  misc_RNA (1)...(19): siRNA sense strand
gcagaaucuugaacaaagc

SEQ ID NO: 1980503 - RNA, 19 nt, Homo sapiens
  misc_RNA (1)...(19): siRNA sense strand
gcuaaaauaucugacuuug

SEQ ID NO: 1980504 - RNA, 19 nt, Homo sapiens
  misc_RNA (1)...(19): siRNA sense strand
gcagcuaauggcaucaauu

SEQ ID NO: 1980505 - RNA, 19 nt, Homo sapiens
  misc_RNA (1)...(19): siRNA sense strand
uagacagacucucuugcuu

SEQ ID NO: 1980506 - RNA, 19 nt, Homo sapiens
  misc_RNA (1)...(19): siRNA sense strand
gaacuacuugguuucucaa

SEQ ID NO: 1980507 - RNA, 19 nt, Homo sapiens
  misc_RNA (1)...(19): siRNA sense strand
gauacaaucaguuucacau

SEQ ID NO: 1980508 - RNA, 19 nt, Homo sapiens
  misc_RNA (1)...(19): siRNA sense strand
ccauuucuguuggugguaa

SEQ ID NO: 1980509 - RNA, 19 nt, Homo sapiens
  misc_RNA (1)...(19): siRNA sense strand
uggaagaaguuagcuguag

SEQ ID NO: 1980510 - RNA, 19 nt, Homo sapiens
  misc_RNA (1)...(19): siRNA sense strand
ugaccucugcuuaguauau

SEQ ID NO: 1980511 - RNA, 19 nt, Homo sapiens
  misc_RNA (1)...(19): siRNA sense strand
cuacguaaauaacacaacu

SEQ ID NO: 1980512 - RNA, 19 nt, Homo sapiens
  misc_RNA (1)...(19): siRNA sense strand
cuucugaauuacuguuuga

SEQ ID NO: 1980513 - RNA, 19 nt, Homo sapiens
  misc_RNA (1)...(19): siRNA sense strand
aaauaagagcccagacauu

SEQ ID NO: 1980514 - RNA, 19 nt, Homo sapiens
  misc_RNA (1)...(19): siRNA sense strand
cccagaugcuguucccaaa

SEQ ID NO: 1980515 - RNA, 19 nt, Homo sapiens
  misc_RNA (1)...(19): siRNA sense strand
uggcaaagugucaacauga

SEQ ID NO: 1980516 - RNA, 19 nt, Homo sapiens
  misc_RNA (1)...(19): siRNA sense strand
auaagagcccagacauuaa

SEQ ID NO: 1980517 - RNA, 19 nt, Homo sapiens
  misc_RNA (1)...(19): siRNA sense strand
gagaaauaacacccaaauc

SEQ ID NO: 1980518 - RNA, 19 nt, Homo sapiens
  misc_RNA (1)...(19): siRNA sense strand
agaaggauggaagaaguua

SEQ ID NO: 1980519 - RNA, 19 nt, Homo sapiens
  misc_RNA (1)...(19): siRNA sense strand
uaagagcccagacauuaag

SEQ ID NO: 1980520 - RNA, 19 nt, Homo sapiens
  misc_RNA (1)...(19): siRNA sense strand
ugagaaguuugcccagaca

SEQ ID NO: 1980521 - RNA, 19 nt, Homo sapiens
  misc_RNA (1)...(19): siRNA sense strand
gaugaagcuuuuacugcua

SEQ ID NO: 1980522 - RNA, 19 nt, Homo sapiens
  misc_RNA (1)...(19): siRNA sense strand
guucauugcuagacagacu

SEQ ID NO: 1980523 - RNA, 19 nt, Homo sapiens
  misc_RNA (1)...(19): siRNA sense strand
uaaaaguaauggcaaagug

SEQ ID NO: 1980524 - RNA, 19 nt, Homo sapiens
  misc_RNA (1)...(19): siRNA sense strand
aagaagcuauaacaguuca

SEQ ID NO: 1980525 - RNA, 19 nt, Homo sapiens
  misc_RNA (1)...(19): siRNA sense strand
gugcagaaucuugaacaaa

SEQ ID NO: 1980526 - RNA, 19 nt, Homo sapiens
  misc_RNA (1)...(19): siRNA sense strand
ucugauauuuacagcuuug

SEQ ID NO: 1980527 - RNA, 19 nt, Homo sapiens
  misc_RNA (1)...(19): siRNA sense strand
gcaucaauuuucuacauga

SEQ ID NO: 1980528 - RNA, 19 nt, Homo sapiens
  misc_RNA (1)...(19): siRNA sense strand
gcacaguuggugaucuugu

SEQ ID NO: 1980529 - RNA, 19 nt, Homo sapiens
  misc_RNA (1)...(19): siRNA sense strand
gaagaaaagacaauugaag

SEQ ID NO: 1980530 - RNA, 19 nt, Homo sapiens
  misc_RNA (1)...(19): siRNA sense strand
auaacaccaucaacauaug

SEQ ID NO: 1980531 - RNA, 19 nt, Homo sapiens
  misc_RNA (1)...(19): siRNA sense strand
aacagcaguuugaucaaga

SEQ ID NO: 1980532 - RNA, 19 nt, Homo sapiens
  misc_RNA (1)...(19): siRNA sense strand
aaugggagagggaggauuu

SEQ ID NO: 1980533 - RNA, 19 nt, Homo sapiens
  misc_RNA (1)...(19): siRNA sense strand
caaagacaggacauugaug

SEQ ID NO: 1980534 - RNA, 19 nt, Homo sapiens
  misc_RNA (1)...(19): siRNA sense strand
uaacaccaucaacauaugu

SEQ ID NO: 1980535 - RNA, 19 nt, Homo sapiens
  misc_RNA (1)...(19): siRNA sense strand
auaaggagauuugaagcau

SEQ ID NO: 1980536 - RNA, 19 nt, Homo sapiens
  misc_RNA (1)...(19): siRNA sense strand
uaacacccaaaucugauau

SEQ ID NO: 1980537 - RNA, 19 nt, Homo sapiens
  misc_RNA (1)...(19): siRNA sense strand
uagcagaauugugggaaca

SEQ ID NO: 1980538 - RNA, 19 nt, Homo sapiens
  misc_RNA (1)...(19): siRNA sense strand
acagcaguuugaucaagaa

SEQ ID NO: 1980539 - RNA, 19 nt, Homo sapiens
  misc_RNA (1)...(19): siRNA sense strand
uaaaggcuacguaaauaac

SEQ ID NO: 1980540 - RNA, 19 nt, Homo sapiens
  misc_RNA (1)...(19): siRNA sense strand
gaagaaaguuauggaagua

SEQ ID NO: 1980541 - RNA, 19 nt, Homo sapiens
  misc_RNA (1)...(19): siRNA sense strand
ugacacagcuuguuucaaa

SEQ ID NO: 1980542 - RNA, 19 nt, Homo sapiens
  misc_RNA (1)...(19): siRNA sense strand
gaaggaagcucagaaacuu

SEQ ID NO: 1980543 - RNA, 19 nt, Homo sapiens
  misc_RNA (1)...(19): siRNA sense strand
gaagauauaccaacauuug

SEQ ID NO: 1980544 - RNA, 19 nt, Homo sapiens
  misc_RNA (1)...(19): siRNA sense strand
ggauuaagcuggguacuuu

SEQ ID NO: 1980545 - RNA, 19 nt, Homo sapiens
  misc_RNA (1)...(19): siRNA sense strand
guacauggaucaaaccaaa

SEQ ID NO: 1980546 - RNA, 19 nt, Homo sapiens
  misc_RNA (1)...(19): siRNA sense strand
gcaaagaaguagacccaaa

SEQ ID NO: 1980547 - RNA, 19 nt, Homo sapiens
  misc_RNA (1)...(19): siRNA sense strand
gaaccaagccauucucaaa

SEQ ID NO: 1980548 - RNA, 19 nt, Homo sapiens
  misc_RNA (1)...(19): siRNA sense strand
gcaaguccaucuacaguga

SEQ ID NO: 1980549 - RNA, 19 nt, Homo sapiens
  misc_RNA (1)...(19): siRNA sense strand
guacagaguuucccuuuag

SEQ ID NO: 1980550 - RNA, 19 nt, Homo sapiens
  misc_RNA (1)...(19): siRNA sense strand
gaaaccaucuauuaccuau

SEQ ID NO: 1980551 - RNA, 19 nt, Homo sapiens
  misc_RNA (1)...(19): siRNA sense strand
gaaguagacccaaaugauu

SEQ ID NO: 1980552 - RNA, 19 nt, Homo sapiens
  misc_RNA (1)...(19): siRNA sense strand
aaugagagcucugauuaua

SEQ ID NO: 1980553 - RNA, 19 nt, Homo sapiens
  misc_RNA (1)...(19): siRNA sense strand
ucacaaagcugucugaaac

SEQ ID NO: 1980554 - RNA, 19 nt, Homo sapiens
  misc_RNA (1)...(19): siRNA sense strand
ugacagauauccaacaaau

SEQ ID NO: 1980555 - RNA, 19 nt, Homo sapiens
  misc_RNA (1)...(19): siRNA sense strand
ucugagagcuuuaguucua

SEQ ID NO: 1980556 - RNA, 19 nt, Homo sapiens
  misc_RNA (1)...(19): siRNA sense strand
aaagcugucugaaacaaua

SEQ ID NO: 1980557 - RNA, 19 nt, Homo sapiens
  misc_RNA (1)...(19): siRNA sense strand
cagaagauauaccaacauu

SEQ ID NO: 1980558 - RNA, 19 nt, Homo sapiens
  misc_RNA (1)...(19): siRNA sense strand
gaaguuaacaugucucuca

SEQ ID NO: 1980559 - RNA, 19 nt, Homo sapiens
  misc_RNA (1)...(19): siRNA sense strand
gaagaacagucuccagaag

SEQ ID NO: 1980560 - RNA, 19 nt, Homo sapiens
  misc_RNA (1)...(19): siRNA sense strand
agaaaucacuccaaucuca

SEQ ID NO: 1980561 - RNA, 19 nt, Homo sapiens
  misc_RNA (1)...(19): siRNA sense strand
cagaauacuucaagaauag

SEQ ID NO: 1980562 - RNA, 19 nt, Homo sapiens
  misc_RNA (1)...(19): siRNA sense strand
gaauggaagaagaaaguua

SEQ ID NO: 1980563 - RNA, 19 nt, Homo sapiens
  misc_RNA (1)...(19): siRNA sense strand
gaagagggcuuuaaaacga

SEQ ID NO: 1980564 - RNA, 19 nt, Homo sapiens
  misc_RNA (1)...(19): siRNA sense strand
uaaaugguguucaguuaga

SEQ ID NO: 1980565 - RNA, 19 nt, Homo sapiens
  misc_RNA (1)...(19): siRNA sense strand
ccaaagauccagaagauau

SEQ ID NO: 1980566 - RNA, 19 nt, Homo sapiens
  misc_RNA (1)...(19): siRNA sense strand
caaccacccuuacuacuuc

SEQ ID NO: 1980567 - RNA, 19 nt, Homo sapiens
  misc_RNA (1)...(19): siRNA sense strand
gccaggaacuauuugauga

SEQ ID NO: 1980568 - RNA, 19 nt, Homo sapiens
  misc_RNA (1)...(19): siRNA sense strand
caagagaguucuguugaga

SEQ ID NO: 1980569 - RNA, 19 nt, Homo sapiens
  misc_RNA (1)...(19): siRNA sense strand
gcacaucugcuauucuuau

SEQ ID NO: 1980570 - RNA, 19 nt, Homo sapiens
  misc_RNA (1)...(19): siRNA sense strand
gggcagcggugaacaggaa

SEQ ID NO: 1980571 - RNA, 19 nt, Homo sapiens
  misc_RNA (1)...(19): siRNA sense strand
gaagaagaaaguuauggaa

SEQ ID NO: 1980572 - RNA, 19 nt, Homo sapiens
  misc_RNA (1)...(19): siRNA sense strand
gcaugcaucuucuaaugga

SEQ ID NO: 1980573 - RNA, 19 nt, Homo sapiens
  misc_RNA (1)...(19): siRNA sense strand
caaagauccagaagauaua

SEQ ID NO: 1980574 - RNA, 19 nt, Homo sapiens
  misc_RNA (1)...(19): siRNA sense strand
caaaaggagucaguauuua

SEQ ID NO: 1980575 - RNA, 19 nt, Homo sapiens
  misc_RNA (1)...(19): siRNA sense strand
gaguuucccuuuagaugaa

SEQ ID NO: 1980576 - RNA, 19 nt, Homo sapiens
  misc_RNA (1)...(19): siRNA sense strand
gaaacugauugugauguug

SEQ ID NO: 1980577 - RNA, 19 nt, Homo sapiens
  misc_RNA (1)...(19): siRNA sense strand
gaucgauaaugaaacagaa

SEQ ID NO: 1980578 - RNA, 19 nt, Homo sapiens
  misc_RNA (1)...(19): siRNA sense strand
gaucuaggauaugcuaaug

SEQ ID NO: 1980579 - RNA, 19 nt, Homo sapiens
  misc_RNA (1)...(19): siRNA sense strand
ugagagcucugauuauaca

SEQ ID NO: 1980580 - RNA, 19 nt, Homo sapiens
  misc_RNA (1)...(19): siRNA sense strand
guauguaaccacugaagua

SEQ ID NO: 1980581 - RNA, 19 nt, Homo sapiens
  misc_RNA (1)...(19): siRNA sense strand
uaucugagucuguugaaua

SEQ ID NO: 1980582 - RNA, 19 nt, Homo sapiens
  misc_RNA (1)...(19): siRNA sense strand
gcacagcugaccaacauga

SEQ ID NO: 1980583 - RNA, 19 nt, Homo sapiens
  misc_RNA (1)...(19): siRNA sense strand
gaggacagcuacagauuuu

SEQ ID NO: 1980584 - RNA, 19 nt, Homo sapiens
  misc_RNA (1)...(19): siRNA sense strand
ugagaucgauaaugaaaca

SEQ ID NO: 1980585 - RNA, 19 nt, Homo sapiens
  misc_RNA (1)...(19): siRNA sense strand
aaagcuaucuugucauauc

SEQ ID NO: 1980586 - RNA, 19 nt, Homo sapiens
  misc_RNA (1)...(19): siRNA sense strand
uguggauucuucuucauua

SEQ ID NO: 1980587 - RNA, 19 nt, Homo sapiens
  misc_RNA (1)...(19): siRNA sense strand
gaacagauguaugcaaaau

SEQ ID NO: 1980588 - RNA, 19 nt, Homo sapiens
  misc_RNA (1)...(19): siRNA sense strand
gggagaaguuuaucacucu

SEQ ID NO: 1980589 - RNA, 19 nt, Homo sapiens
  misc_RNA (1)...(19): siRNA sense strand
aaccaucuauuaccuauga

SEQ ID NO: 1980590 - RNA, 19 nt, Homo sapiens
  misc_RNA (1)...(19): siRNA sense strand
caguagauguuucaguauu

SEQ ID NO: 1980591 - RNA, 19 nt, Homo sapiens
  misc_RNA (1)...(19): siRNA sense strand
acaaauaaguggauuaagc

SEQ ID NO: 1980592 - RNA, 19 nt, Homo sapiens
  misc_RNA (1)...(19): siRNA sense strand
aaacgaagacgaucuaaag

SEQ ID NO: 1980593 - RNA, 19 nt, Homo sapiens
  misc_RNA (1)...(19): siRNA sense strand
uaaagguccuccaucugaa

SEQ ID NO: 1980594 - RNA, 19 nt, Homo sapiens
  misc_RNA (1)...(19): siRNA sense strand
cauaaagccugaagaacca

SEQ ID NO: 1980595 - RNA, 19 nt, Homo sapiens
  misc_RNA (1)...(19): siRNA sense strand
auccaagucucuacaguua

SEQ ID NO: 1980596 - RNA, 19 nt, Homo sapiens
  misc_RNA (1)...(19): siRNA sense strand
gcuaucuugucauaucuuu

SEQ ID NO: 1980597 - RNA, 19 nt, Homo sapiens
  misc_RNA (1)...(19): siRNA sense strand
cagcaacaguagcagaauu

SEQ ID NO: 1980598 - RNA, 19 nt, Homo sapiens
  misc_RNA (1)...(19): siRNA sense strand
ugaaacugauugugauguu

SEQ ID NO: 1980599 - RNA, 19 nt, Homo sapiens
  misc_RNA (1)...(19): siRNA sense strand
gaccauaaagccugaagaa

SEQ ID NO: 1980600 - RNA, 19 nt, Homo sapiens
  misc_RNA (1)...(19): siRNA sense strand
ggacugaugcuuuguaugc

SEQ ID NO: 1980601 - RNA, 19 nt, Homo sapiens
  misc_RNA (1)...(19): siRNA sense strand
gaugacaacugcgcacuag

SEQ ID NO: 1980602 - RNA, 19 nt, Homo sapiens
  misc_RNA (1)...(19): siRNA sense strand
agaagaaaguuauggaagu

SEQ ID NO: 1980603 - RNA, 19 nt, Homo sapiens
  misc_RNA (1)...(19): siRNA sense strand
ggaagaagaaaguuaugga

SEQ ID NO: 1980604 - RNA, 19 nt, Homo sapiens
  misc_RNA (1)...(19): siRNA sense strand
gaaauaauuaugccucagu

SEQ ID NO: 1980605 - RNA, 19 nt, Homo sapiens
  misc_RNA (1)...(19): siRNA sense strand
aagggaagcugaaacuguu

SEQ ID NO: 1980606 - RNA, 19 nt, Homo sapiens
  misc_RNA (1)...(19): siRNA sense strand
gaacagggcgguggugauc

SEQ ID NO: 1980607 - RNA, 19 nt, Homo sapiens
  misc_RNA (1)...(19): siRNA sense strand
gagccugcaugacauaauc

SEQ ID NO: 1980608 - RNA, 19 nt, Homo sapiens
  misc_RNA (1)...(19): siRNA sense strand
gcaaaauucuacagaucua

SEQ ID NO: 1980609 - RNA, 19 nt, Homo sapiens
  misc_RNA (1)...(19): siRNA sense strand
acaauagugccaccaauaa

SEQ ID NO: 1980610 - RNA, 19 nt, Homo sapiens
  misc_RNA (1)...(19): siRNA sense strand
gaaucacacuguagaugca

SEQ ID NO: 1980611 - RNA, 19 nt, Homo sapiens
  misc_RNA (1)...(19): siRNA sense strand
ccucagaaaucacuccaau

SEQ ID NO: 1980612 - RNA, 19 nt, Homo sapiens
  misc_RNA (1)...(19): siRNA sense strand
agaagaagcgcugcaagua

SEQ ID NO: 1980613 - RNA, 19 nt, Homo sapiens
  misc_RNA (1)...(19): siRNA sense strand
gaacuucauucccacucau

SEQ ID NO: 1980614 - RNA, 19 nt, Homo sapiens
  misc_RNA (1)...(19): siRNA sense strand
gaaacaauagugccaccaa

SEQ ID NO: 1980615 - RNA, 19 nt, Homo sapiens
  misc_RNA (1)...(19): siRNA sense strand
gagaaaccaucuauuaccu

SEQ ID NO: 1980616 - RNA, 19 nt, Homo sapiens
  misc_RNA (1)...(19): siRNA sense strand
ugagagcuuuaguucuaua

SEQ ID NO: 1980617 - RNA, 19 nt, Homo sapiens
  misc_RNA (1)...(19): siRNA sense strand
agaaguaucugagucuguu

SEQ ID NO: 1980618 - RNA, 19 nt, Homo sapiens
  misc_RNA (1)...(19): siRNA sense strand
gaaguacacacacaugaca

SEQ ID NO: 1980619 - RNA, 19 nt, Homo sapiens
  misc_RNA (1)...(19): siRNA sense strand
gguggaagaauaugaagaa

SEQ ID NO: 1980620 - RNA, 19 nt, Homo sapiens
  misc_RNA (1)...(19): siRNA sense strand
gagaugagcggaauguaca

SEQ ID NO: 1980621 - RNA, 19 nt, Homo sapiens
  misc_RNA (1)...(19): siRNA sense strand
cacaucugcuauucuuaua

SEQ ID NO: 1980622 - RNA, 19 nt, Homo sapiens
  misc_RNA (1)...(19): siRNA sense strand
cagcucaucuaccucagaa

SEQ ID NO: 1980623 - RNA, 19 nt, Homo sapiens
  misc_RNA (1)...(19): siRNA sense strand
caaagaaguagacccaaau

SEQ ID NO: 1980624 - RNA, 19 nt, Homo sapiens
  misc_RNA (1)...(19): siRNA sense strand
augcagcguugucgaaaua

SEQ ID NO: 1980625 - RNA, 19 nt, Homo sapiens
  misc_RNA (1)...(19): siRNA sense strand
cuguugagaucgauaauga

SEQ ID NO: 1980626 - RNA, 19 nt, Homo sapiens
  misc_RNA (1)...(19): siRNA sense strand
ccacugaaguacacacaca

SEQ ID NO: 1980627 - RNA, 19 nt, Homo sapiens
  misc_RNA (1)...(19): siRNA sense strand
ucauauuacucucaagaug

SEQ ID NO: 1980628 - RNA, 19 nt, Homo sapiens
  misc_RNA (1)...(19): siRNA sense strand
gagacacucccuacaguug

SEQ ID NO: 1980629 - RNA, 19 nt, Homo sapiens
  misc_RNA (1)...(19): siRNA sense strand
gcucagaaacuucaucaca

SEQ ID NO: 1980630 - RNA, 19 nt, Homo sapiens
  misc_RNA (1)...(19): siRNA sense strand
gaagaagcgcugcaaguac

SEQ ID NO: 1980631 - RNA, 19 nt, Homo sapiens
  misc_RNA (1)...(19): siRNA sense strand
ugucauaucuuugguucuu

SEQ ID NO: 1980632 - RNA, 19 nt, Homo sapiens
  misc_RNA (1)...(19): siRNA sense strand
ccacuguacccgacaauga

SEQ ID NO: 1980633 - RNA, 19 nt, Homo sapiens
  misc_RNA (1)...(19): siRNA sense strand
cugagucuguugaauauga

SEQ ID NO: 1980634 - RNA, 19 nt, Homo sapiens
  misc_RNA (1)...(19): siRNA sense strand
ggaaucaguagauguuuca

SEQ ID NO: 1980635 - RNA, 19 nt, Homo sapiens
  misc_RNA (1)...(19): siRNA sense strand
uaaaacagcuugauauugc

SEQ ID NO: 1980636 - RNA, 19 nt, Homo sapiens
  misc_RNA (1)...(19): siRNA sense strand
gaaaguuauggaaguagaa

SEQ ID NO: 1980637 - RNA, 19 nt, Homo sapiens
  misc_RNA (1)...(19): siRNA sense strand
ucccaaagauccagaagau

SEQ ID NO: 1980638 - RNA, 19 nt, Homo sapiens
  misc_RNA (1)...(19): siRNA sense strand
aagaagcgcugcaaguaca

SEQ ID NO: 1980639 - RNA, 19 nt, Homo sapiens
  misc_RNA (1)...(19): siRNA sense strand
ucagaaacuucaucacagu

SEQ ID NO: 1980640 - RNA, 19 nt, Homo sapiens
  misc_RNA (1)...(19): siRNA sense strand
gaagaaaguuauggaagua

SEQ ID NO: 1980641 - RNA, 19 nt, Homo sapiens
  misc_RNA (1)...(19): siRNA sense strand
ugacacagcuuguuucaaa

SEQ ID NO: 1980642 - RNA, 19 nt, Homo sapiens
  misc_RNA (1)...(19): siRNA sense strand
gaaggaagcucagaaacuu

SEQ ID NO: 1980643 - RNA, 19 nt, Homo sapiens
  misc_RNA (1)...(19): siRNA sense strand
gaagauauaccaacauuug

SEQ ID NO: 1980644 - RNA, 19 nt, Homo sapiens
  misc_RNA (1)...(19): siRNA sense strand
ggauuaagcuggguacuuu

SEQ ID NO: 1980645 - RNA, 19 nt, Homo sapiens
  misc_RNA (1)...(19): siRNA sense strand
guacauggaucaaaccaaa

SEQ ID NO: 1980646 - RNA, 19 nt, Homo sapiens
  misc_RNA (1)...(19): siRNA sense strand
gcaaagaaguagacccaaa

SEQ ID NO: 1980647 - RNA, 19 nt, Homo sapiens
  misc_RNA (1)...(19): siRNA sense strand
gaaccaagccauucucaaa

SEQ ID NO: 1980648 - RNA, 19 nt, Homo sapiens
  misc_RNA (1)...(19): siRNA sense strand
gcaaguccaucuacaguga

SEQ ID NO: 1980649 - RNA, 19 nt, Homo sapiens
  misc_RNA (1)...(19): siRNA sense strand
guacagaguuucccuuuag

SEQ ID NO: 1980650 - RNA, 19 nt, Homo sapiens
  misc_RNA (1)...(19): siRNA sense strand
gaaaccaucuauuaccuau

SEQ ID NO: 1980651 - RNA, 19 nt, Homo sapiens
  misc_RNA (1)...(19): siRNA sense strand
gaaguagacccaaaugauu

SEQ ID NO: 1980652 - RNA, 19 nt, Homo sapiens
  misc_RNA (1)...(19): siRNA sense strand
aaugagagcucugauuaua

SEQ ID NO: 1980653 - RNA, 19 nt, Homo sapiens
  misc_RNA (1)...(19): siRNA sense strand
ucacaaagcugucugaaac

SEQ ID NO: 1980654 - RNA, 19 nt, Homo sapiens
  misc_RNA (1)...(19): siRNA sense strand
ugacagauauccaacaaau

SEQ ID NO: 1980655 - RNA, 19 nt, Homo sapiens
  misc_RNA (1)...(19): siRNA sense strand
ucugagagcuuuaguucua

SEQ ID NO: 1980656 - RNA, 19 nt, Homo sapiens
  misc_RNA (1)...(19): siRNA sense strand
aaagcugucugaaacaaua

SEQ ID NO: 1980657 - RNA, 19 nt, Homo sapiens
  misc_RNA (1)...(19): siRNA sense strand
cagaagauauaccaacauu

SEQ ID NO: 1980658 - RNA, 19 nt, Homo sapiens
  misc_RNA (1)...(19): siRNA sense strand
gaaguuaacaugucucuca

SEQ ID NO: 1980659 - RNA, 19 nt, Homo sapiens
  misc_RNA (1)...(19): siRNA sense strand
gaagaacagucuccagaag

SEQ ID NO: 1980660 - RNA, 19 nt, Homo sapiens
  misc_RNA (1)...(19): siRNA sense strand
agaaaucacuccaaucuca

SEQ ID NO: 1980661 - RNA, 19 nt, Homo sapiens
  misc_RNA (1)...(19): siRNA sense strand
cagaauacuucaagaauag

SEQ ID NO: 1980662 - RNA, 19 nt, Homo sapiens
  misc_RNA (1)...(19): siRNA sense strand
gaauggaagaagaaaguua

SEQ ID NO: 1980663 - RNA, 19 nt, Homo sapiens
  misc_RNA (1)...(19): siRNA sense strand
gaagagggcuuuaaaacga

SEQ ID NO: 1980664 - RNA, 19 nt, Homo sapiens
  misc_RNA (1)...(19): siRNA sense strand
uaaaugguguucaguuaga

SEQ ID NO: 1980665 - RNA, 19 nt, Homo sapiens
  misc_RNA (1)...(19): siRNA sense strand
ccaaagauccagaagauau

SEQ ID NO: 1980666 - RNA, 19 nt, Homo sapiens
  misc_RNA (1)...(19): siRNA sense strand
caaccacccuuacuacuuc

SEQ ID NO: 1980667 - RNA, 19 nt, Homo sapiens
  misc_RNA (1)...(19): siRNA sense strand
gccaggaacuauuugauga

SEQ ID NO: 1980668 - RNA, 19 nt, Homo sapiens
  misc_RNA (1)...(19): siRNA sense strand
caagagaguucuguugaga

SEQ ID NO: 1980669 - RNA, 19 nt, Homo sapiens
  misc_RNA (1)...(19): siRNA sense strand
gcacaucugcuauucuuau

SEQ ID NO: 1980670 - RNA, 19 nt, Homo sapiens
  misc_RNA (1)...(19): siRNA sense strand
gggcagcggugaacaggaa

SEQ ID NO: 1980671 - RNA, 19 nt, Homo sapiens
  misc_RNA (1)...(19): siRNA sense strand
gaagaagaaaguuauggaa

SEQ ID NO: 1980672 - RNA, 19 nt, Homo sapiens
  misc_RNA (1)...(19): siRNA sense strand
gcaugcaucuucuaaugga

SEQ ID NO: 1980673 - RNA, 19 nt, Homo sapiens
  misc_RNA (1)...(19): siRNA sense strand
caaagauccagaagauaua

SEQ ID NO: 1980674 - RNA, 19 nt, Homo sapiens
  misc_RNA (1)...(19): siRNA sense strand
caaaaggagucaguauuua

SEQ ID NO: 1980675 - RNA, 19 nt, Homo sapiens
  misc_RNA (1)...(19): siRNA sense strand
gaguuucccuuuagaugaa

SEQ ID NO: 1980676 - RNA, 19 nt, Homo sapiens
  misc_RNA (1)...(19): siRNA sense strand
gaaacugauugugauguug

SEQ ID NO: 1980677 - RNA, 19 nt, Homo sapiens
  misc_RNA (1)...(19): siRNA sense strand
gaucgauaaugaaacagaa

SEQ ID NO: 1980678 - RNA, 19 nt, Homo sapiens
  misc_RNA (1)...(19): siRNA sense strand
ggaagaaggaggagaagau

SEQ ID NO: 1980679 - RNA, 19 nt, Homo sapiens
  misc_RNA (1)...(19): siRNA sense strand
gaucuaggauaugcuaaug

SEQ ID NO: 1980680 - RNA, 19 nt, Homo sapiens
  misc_RNA (1)...(19): siRNA sense strand
ugagagcucugauuauaca

SEQ ID NO: 1980681 - RNA, 19 nt, Homo sapiens
  misc_RNA (1)...(19): siRNA sense strand
guauguaaccacugaagua

SEQ ID NO: 1980682 - RNA, 19 nt, Homo sapiens
  misc_RNA (1)...(19): siRNA sense strand
uaucugagucuguugaaua

SEQ ID NO: 1980683 - RNA, 19 nt, Homo sapiens
  misc_RNA (1)...(19): siRNA sense strand
gcacagcugaccaacauga

SEQ ID NO: 1980684 - RNA, 19 nt, Homo sapiens
  misc_RNA (1)...(19): siRNA sense strand
gaggacagcuacagauuuu

SEQ ID NO: 1980685 - RNA, 19 nt, Homo sapiens
  misc_RNA (1)...(19): siRNA sense strand
ugagaucgauaaugaaaca

SEQ ID NO: 1980686 - RNA, 19 nt, Homo sapiens
  misc_RNA (1)...(19): siRNA sense strand
aaagcuaucuugucauauc

SEQ ID NO: 1980687 - RNA, 19 nt, Homo sapiens
  misc_RNA (1)...(19): siRNA sense strand
uguggauucuucuucauua

SEQ ID NO: 1980688 - RNA, 19 nt, Homo sapiens
  misc_RNA (1)...(19): siRNA sense strand
gaacagauguaugcaaaau

SEQ ID NO: 1980689 - RNA, 19 nt, Homo sapiens
  misc_RNA (1)...(19): siRNA sense strand
gggagaaguuuaucacucu

SEQ ID NO: 1980690 - RNA, 19 nt, Homo sapiens
  misc_RNA (1)...(19): siRNA sense strand
aaccaucuauuaccuauga

SEQ ID NO: 1980691 - RNA, 19 nt, Homo sapiens
  misc_RNA (1)...(19): siRNA sense strand
caguagauguuucaguauu

SEQ ID NO: 1980692 - RNA, 19 nt, Homo sapiens
  misc_RNA (1)...(19): siRNA sense strand
acaaauaaguggauuaagc

SEQ ID NO: 1980693 - RNA, 19 nt, Homo sapiens
  misc_RNA (1)...(19): siRNA sense strand
aaacgaagacgaucuaaag

SEQ ID NO: 1980694 - RNA, 19 nt, Homo sapiens
  misc_RNA (1)...(19): siRNA sense strand
uaaagguccuccaucugaa

SEQ ID NO: 1980695 - RNA, 19 nt, Homo sapiens
  misc_RNA (1)...(19): siRNA sense strand
cauaaagccugaagaacca

SEQ ID NO: 1980696 - RNA, 19 nt, Homo sapiens
  misc_RNA (1)...(19): siRNA sense strand
auccaagucucuacaguua

SEQ ID NO: 1980697 - RNA, 19 nt, Homo sapiens
  misc_RNA (1)...(19): siRNA sense strand
gcuaucuugucauaucuuu

SEQ ID NO: 1980698 - RNA, 19 nt, Homo sapiens
  misc_RNA (1)...(19): siRNA sense strand
cagcaacaguagcagaauu

SEQ ID NO: 1980699 - RNA, 19 nt, Homo sapiens
  misc_RNA (1)...(19): siRNA sense strand
gaugacaacugcgcacuag

SEQ ID NO: 1980700 - RNA, 19 nt, Homo sapiens
  misc_RNA (1)...(19): siRNA sense strand
gaccauaaagccugaagaa

SEQ ID NO: 1980701 - RNA, 19 nt, Homo sapiens
  misc_RNA (1)...(19): siRNA sense strand
ggacugaugcuuuguaugc

SEQ ID NO: 1980702 - RNA, 19 nt, Homo sapiens
  misc_RNA (1)...(19): siRNA sense strand
agaagaaaguuauggaagu

SEQ ID NO: 1980703 - RNA, 19 nt, Homo sapiens
  misc_RNA (1)...(19): siRNA sense strand
ggaagaagaaaguuaugga

SEQ ID NO: 1980704 - RNA, 19 nt, Homo sapiens
  misc_RNA (1)...(19): siRNA sense strand
ugaaacugauugugauguu

SEQ ID NO: 1980705 - RNA, 19 nt, Homo sapiens
  misc_RNA (1)...(19): siRNA sense strand
gaaauaauuaugccucagu

SEQ ID NO: 1980706 - RNA, 19 nt, Homo sapiens
  misc_RNA (1)...(19): siRNA sense strand
aagggaagcugaaacuguu

SEQ ID NO: 1980707 - RNA, 19 nt, Homo sapiens
  misc_RNA (1)...(19): siRNA sense strand
gaacagggcgguggugauc

SEQ ID NO: 1980708 - RNA, 19 nt, Homo sapiens
  misc_RNA (1)...(19): siRNA sense strand
gagccugcaugacauaauc

SEQ ID NO: 1980709 - RNA, 19 nt, Homo sapiens
  misc_RNA (1)...(19): siRNA sense strand
gcaaaauucuacagaucua

SEQ ID NO: 1980710 - RNA, 19 nt, Homo sapiens
  misc_RNA (1)...(19): siRNA sense strand
acaauagugccaccaauaa

SEQ ID NO: 1980711 - RNA, 19 nt, Homo sapiens
  misc_RNA (1)...(19): siRNA sense strand
gaaucacacuguagaugca

SEQ ID NO: 1980712 - RNA, 19 nt, Homo sapiens
  misc_RNA (1)...(19): siRNA sense strand
ccucagaaaucacuccaau

SEQ ID NO: 1980713 - RNA, 19 nt, Homo sapiens
  misc_RNA (1)...(19): siRNA sense strand
agaagaagcgcugcaagua

SEQ ID NO: 1980714 - RNA, 19 nt, Homo sapiens
  misc_RNA (1)...(19): siRNA sense strand
gaacuucauucccacucau

SEQ ID NO: 1980715 - RNA, 19 nt, Homo sapiens
  misc_RNA (1)...(19): siRNA sense strand
gaaacaauagugccaccaa

SEQ ID NO: 1980716 - RNA, 19 nt, Homo sapiens
  misc_RNA (1)...(19): siRNA sense strand
gagaaaccaucuauuaccu

SEQ ID NO: 1980717 - RNA, 19 nt, Homo sapiens
  misc_RNA (1)...(19): siRNA sense strand
ugagagcuuuaguucuaua

SEQ ID NO: 1980718 - RNA, 19 nt, Homo sapiens
  misc_RNA (1)...(19): siRNA sense strand
agaaguaucugagucuguu

SEQ ID NO: 1980719 - RNA, 19 nt, Homo sapiens
  misc_RNA (1)...(19): siRNA sense strand
gaaguacacacacaugaca

SEQ ID NO: 1980720 - RNA, 19 nt, Homo sapiens
  misc_RNA (1)...(19): siRNA sense strand
gguggaagaauaugaagaa

SEQ ID NO: 1980721 - RNA, 19 nt, Homo sapiens
  misc_RNA (1)...(19): siRNA sense strand
gagaugagcggaauguaca

SEQ ID NO: 1980722 - RNA, 19 nt, Homo sapiens
  misc_RNA (1)...(19): siRNA sense strand
cacaucugcuauucuuaua

SEQ ID NO: 1980723 - RNA, 19 nt, Homo sapiens
  misc_RNA (1)...(19): siRNA sense strand
cagcucaucuaccucagaa

SEQ ID NO: 1980724 - RNA, 19 nt, Homo sapiens
  misc_RNA (1)...(19): siRNA sense strand
caaagaaguagacccaaau

SEQ ID NO: 1980725 - RNA, 19 nt, Homo sapiens
  misc_RNA (1)...(19): siRNA sense strand
augcagcguugucgaaaua

SEQ ID NO: 1980726 - RNA, 19 nt, Homo sapiens
  misc_RNA (1)...(19): siRNA sense strand
cuguugagaucgauaauga

SEQ ID NO: 1980727 - RNA, 19 nt, Homo sapiens
  misc_RNA (1)...(19): siRNA sense strand
ccacugaaguacacacaca

SEQ ID NO: 1980728 - RNA, 19 nt, Homo sapiens
  misc_RNA (1)...(19): siRNA sense strand
ucccaaagauccagaagau

SEQ ID NO: 1980729 - RNA, 19 nt, Homo sapiens
  misc_RNA (1)...(19): siRNA sense strand
gcucagaaacuucaucaca

SEQ ID NO: 1980730 - RNA, 19 nt, Homo sapiens
  misc_RNA (1)...(19): siRNA sense strand
gaagaagcgcugcaaguac

SEQ ID NO: 1980731 - RNA, 19 nt, Homo sapiens
  misc_RNA (1)...(19): siRNA sense strand
gagacacucccuacaguug

SEQ ID NO: 1980732 - RNA, 19 nt, Homo sapiens
  misc_RNA (1)...(19): siRNA sense strand
ucauauuacucucaagaug

SEQ ID NO: 1980733 - RNA, 19 nt, Homo sapiens
  misc_RNA (1)...(19): siRNA sense strand
ugucauaucuuugguucuu

SEQ ID NO: 1980734 - RNA, 19 nt, Homo sapiens
  misc_RNA (1)...(19): siRNA sense strand
ccacuguacccgacaauga

SEQ ID NO: 1980735 - RNA, 19 nt, Homo sapiens
  misc_RNA (1)...(19): siRNA sense strand
gaagaaggaggagaagaug

SEQ ID NO: 1980736 - RNA, 19 nt, Homo sapiens
  misc_RNA (1)...(19): siRNA sense strand
cugagucuguugaauauga

SEQ ID NO: 1980737 - RNA, 19 nt, Homo sapiens
  misc_RNA (1)...(19): siRNA sense strand
ggaaucaguagauguuuca

SEQ ID NO: 1980738 - RNA, 19 nt, Homo sapiens
  misc_RNA (1)...(19): siRNA sense strand
uaaaacagcuugauauugc

SEQ ID NO: 1980739 - RNA, 19 nt, Homo sapiens
  misc_RNA (1)...(19): siRNA sense strand
gaaaguuauggaaguagaa

SEQ ID NO: 1980740 - RNA, 19 nt, Homo sapiens
  misc_RNA (1)...(19): siRNA sense strand
gauagcaucucaaaugaua

SEQ ID NO: 1980741 - RNA, 19 nt, Homo sapiens
  misc_RNA (1)...(19): siRNA sense strand
gcacacaucuuccuaacuu

SEQ ID NO: 1980742 - RNA, 19 nt, Homo sapiens
  misc_RNA (1)...(19): siRNA sense strand
gaagaagauuggagaaaug

SEQ ID NO: 1980743 - RNA, 19 nt, Homo sapiens
  misc_RNA (1)...(19): siRNA sense strand
acaaugagcucucuuacaa

SEQ ID NO: 1980744 - RNA, 19 nt, Homo sapiens
  misc_RNA (1)...(19): siRNA sense strand
gcagguugcuuccauaaga

SEQ ID NO: 1980745 - RNA, 19 nt, Homo sapiens
  misc_RNA (1)...(19): siRNA sense strand
gaagauugcuaggcuauau

SEQ ID NO: 1980746 - RNA, 19 nt, Homo sapiens
  misc_RNA (1)...(19): siRNA sense strand
ccaaagaaaucuaucacuu

SEQ ID NO: 1980747 - RNA, 19 nt, Homo sapiens
  misc_RNA (1)...(19): siRNA sense strand
ccacgaaagugaaagacua

SEQ ID NO: 1980748 - RNA, 19 nt, Homo sapiens
  misc_RNA (1)...(19): siRNA sense strand
caucguugcuucagaauga

SEQ ID NO: 1980749 - RNA, 19 nt, Homo sapiens
  misc_RNA (1)...(19): siRNA sense strand
cagaacaacuagaagcuuu

SEQ ID NO: 1980750 - RNA, 19 nt, Homo sapiens
  misc_RNA (1)...(19): siRNA sense strand
ggcagaggcuuacauaaau

SEQ ID NO: 1980751 - RNA, 19 nt, Homo sapiens
  misc_RNA (1)...(19): siRNA sense strand
gacagcaucuugcaucuau

SEQ ID NO: 1980752 - RNA, 19 nt, Homo sapiens
  misc_RNA (1)...(19): siRNA sense strand
ggaaaucaacuucaagaau

SEQ ID NO: 1980753 - RNA, 19 nt, Homo sapiens
  misc_RNA (1)...(19): siRNA sense strand
ccagauugauggaauaguu

SEQ ID NO: 1980754 - RNA, 19 nt, Homo sapiens
  misc_RNA (1)...(19): siRNA sense strand
gagacuuacuugaagauug

SEQ ID NO: 1980755 - RNA, 19 nt, Homo sapiens
  misc_RNA (1)...(19): siRNA sense strand
ggcuauaucuggaggauga

SEQ ID NO: 1980756 - RNA, 19 nt, Homo sapiens
  misc_RNA (1)...(19): siRNA sense strand
gaaaggugccagcaacuug

SEQ ID NO: 1980757 - RNA, 19 nt, Homo sapiens
  misc_RNA (1)...(19): siRNA sense strand
cagaaugaaucaaccaaug

SEQ ID NO: 1980758 - RNA, 19 nt, Homo sapiens
  misc_RNA (1)...(19): siRNA sense strand
aaacaugcuuugcacugua

SEQ ID NO: 1980759 - RNA, 19 nt, Homo sapiens
  misc_RNA (1)...(19): siRNA sense strand
uggaagcaaugguaaauga

SEQ ID NO: 1980760 - RNA, 19 nt, Homo sapiens
  misc_RNA (1)...(19): siRNA sense strand
cuuccuaacuugccugaua

SEQ ID NO: 1980761 - RNA, 19 nt, Homo sapiens
  misc_RNA (1)...(19): siRNA sense strand
ggacguaugaauggauuua

SEQ ID NO: 1980762 - RNA, 19 nt, Homo sapiens
  misc_RNA (1)...(19): siRNA sense strand
gauaggaucaucagaggaa

SEQ ID NO: 1980763 - RNA, 19 nt, Homo sapiens
  misc_RNA (1)...(19): siRNA sense strand
gauccagccuagagucauu

SEQ ID NO: 1980764 - RNA, 19 nt, Homo sapiens
  misc_RNA (1)...(19): siRNA sense strand
caaagaaaucuaucacuuc

SEQ ID NO: 1980765 - RNA, 19 nt, Homo sapiens
  misc_RNA (1)...(19): siRNA sense strand
cagaggaaaucaacuucaa

SEQ ID NO: 1980766 - RNA, 19 nt, Homo sapiens
  misc_RNA (1)...(19): siRNA sense strand
gaaugucagucucgugauc

SEQ ID NO: 1980767 - RNA, 19 nt, Homo sapiens
  misc_RNA (1)...(19): siRNA sense strand
gcagaggcuuacauaaauc

SEQ ID NO: 1980768 - RNA, 19 nt, Homo sapiens
  misc_RNA (1)...(19): siRNA sense strand
caucuugcaucuauauaug

SEQ ID NO: 1980769 - RNA, 19 nt, Homo sapiens
  misc_RNA (1)...(19): siRNA sense strand
agaagaagauuggagaaau

SEQ ID NO: 1980770 - RNA, 19 nt, Homo sapiens
  misc_RNA (1)...(19): siRNA sense strand
ugaccagauugauggaaua

SEQ ID NO: 1980771 - RNA, 19 nt, Homo sapiens
  misc_RNA (1)...(19): siRNA sense strand
gaaugaaucaaccaaugaa

SEQ ID NO: 1980772 - RNA, 19 nt, Homo sapiens
  misc_RNA (1)...(19): siRNA sense strand
gaaaugcagcccaaguguu

SEQ ID NO: 1980773 - RNA, 19 nt, Homo sapiens
  misc_RNA (1)...(19): siRNA sense strand
gguacaaugagcucucuua

SEQ ID NO: 1980774 - RNA, 19 nt, Homo sapiens
  misc_RNA (1)...(19): siRNA sense strand
aagcagauccaaucacuuu

SEQ ID NO: 1980775 - RNA, 19 nt, Homo sapiens
  misc_RNA (1)...(19): siRNA sense strand
gaagcaaugguaaaugaga

SEQ ID NO: 1980776 - RNA, 19 nt, Homo sapiens
  misc_RNA (1)...(19): siRNA sense strand
gaggaaaucaacuucaaga

SEQ ID NO: 1980777 - RNA, 19 nt, Homo sapiens
  misc_RNA (1)...(19): siRNA sense strand
gcacguguucuugauuaua

SEQ ID NO: 1980778 - RNA, 19 nt, Homo sapiens
  misc_RNA (1)...(19): siRNA sense strand
ugaauaaccuuuuggagaa

SEQ ID NO: 1980779 - RNA, 19 nt, Homo sapiens
  misc_RNA (1)...(19): siRNA sense strand
cuagagucauuucauuuga

SEQ ID NO: 1980780 - RNA, 19 nt, Homo sapiens
  misc_RNA (1)...(19): siRNA sense strand
gaacaacuagaagcuuuga

SEQ ID NO: 1980781 - RNA, 19 nt, Homo sapiens
  misc_RNA (1)...(19): siRNA sense strand
gacaauaguccacgaaagu

SEQ ID NO: 1980782 - RNA, 19 nt, Homo sapiens
  misc_RNA (1)...(19): siRNA sense strand
cauugaagcugcacaaagg

SEQ ID NO: 1980783 - RNA, 19 nt, Homo sapiens
  misc_RNA (1)...(19): siRNA sense strand
ccuaugggauccuagagaa

SEQ ID NO: 1980784 - RNA, 19 nt, Homo sapiens
  misc_RNA (1)...(19): siRNA sense strand
gcacagccaaagaaaucua

SEQ ID NO: 1980785 - RNA, 19 nt, Homo sapiens
  misc_RNA (1)...(19): siRNA sense strand
ccaaucacuuuguuuccaa

SEQ ID NO: 1980786 - RNA, 19 nt, Homo sapiens
  misc_RNA (1)...(19): siRNA sense strand
gagaaaugcagcccaagug

SEQ ID NO: 1980787 - RNA, 19 nt, Homo sapiens
  misc_RNA (1)...(19): siRNA sense strand
ucaaacagcaccagaaugg

SEQ ID NO: 1980788 - RNA, 19 nt, Homo sapiens
  misc_RNA (1)...(19): siRNA sense strand
gguaugcuaugcacguguu

SEQ ID NO: 1980789 - RNA, 19 nt, Homo sapiens
  misc_RNA (1)...(19): siRNA sense strand
uaaaugagaaugucagucu

SEQ ID NO: 1980790 - RNA, 19 nt, Homo sapiens
  misc_RNA (1)...(19): siRNA sense strand
gauagcacagccaaagaaa

SEQ ID NO: 1980791 - RNA, 19 nt, Homo sapiens
  misc_RNA (1)...(19): siRNA sense strand
ccaggcagaggcuuacaua

SEQ ID NO: 1980792 - RNA, 19 nt, Homo sapiens
  misc_RNA (1)...(19): siRNA sense strand
uggcccagcucaugaauuc

SEQ ID NO: 1980793 - RNA, 19 nt, Homo sapiens
  misc_RNA (1)...(19): siRNA sense strand
gauccaaucacuuuguuuc

SEQ ID NO: 1980794 - RNA, 19 nt, Homo sapiens
  misc_RNA (1)...(19): siRNA sense strand
aggcagaggcuuacauaaa

SEQ ID NO: 1980795 - RNA, 19 nt, Homo sapiens
  misc_RNA (1)...(19): siRNA sense strand
gcagauccaaucacuuugu

SEQ ID NO: 1980796 - RNA, 19 nt, Homo sapiens
  misc_RNA (1)...(19): siRNA sense strand
augcacguguucuugauua

SEQ ID NO: 1980797 - RNA, 19 nt, Homo sapiens
  misc_RNA (1)...(19): siRNA sense strand
gcaucuugcaucuauauau

SEQ ID NO: 1980798 - RNA, 19 nt, Homo sapiens
  misc_RNA (1)...(19): siRNA sense strand
cagauccaaucacuuuguu

SEQ ID NO: 1980799 - RNA, 19 nt, Homo sapiens
  misc_RNA (1)...(19): siRNA sense strand
aaaugcagcccaaguguug

SEQ ID NO: 1980800 - RNA, 19 nt, Homo sapiens
  misc_RNA (1)...(19): siRNA sense strand
uagcacagccaaagaaauc

SEQ ID NO: 1980801 - RNA, 19 nt, Homo sapiens
  misc_RNA (1)...(19): siRNA sense strand
ggacagcacaagccaugga

SEQ ID NO: 1980802 - RNA, 19 nt, Homo sapiens
  misc_RNA (1)...(19): siRNA sense strand
caucagaggaaaucaacuu

SEQ ID NO: 1980803 - RNA, 19 nt, Homo sapiens
  misc_RNA (1)...(19): siRNA sense strand
gaucaucagaggaaaucaa

SEQ ID NO: 1980804 - RNA, 19 nt, Homo sapiens
  misc_RNA (1)...(19): siRNA sense strand
acaacuagaagcuuugaaa

SEQ ID NO: 1980805 - RNA, 19 nt, Homo sapiens
  misc_RNA (1)...(19): siRNA sense strand
ugaaucaaccaaugaacaa

SEQ ID NO: 1980806 - RNA, 19 nt, Homo sapiens
  misc_RNA (1)...(19): siRNA sense strand
gaaaagauccagccuagag

SEQ ID NO: 1980807 - RNA, 19 nt, Homo sapiens
  misc_RNA (1)...(19): siRNA sense strand
ggagaaaauuagucaaaca

SEQ ID NO: 1980808 - RNA, 19 nt, Homo sapiens
  misc_RNA (1)...(19): siRNA sense strand
ggagaaaugcagcccaagu

SEQ ID NO: 1980809 - RNA, 19 nt, Homo sapiens
  misc_RNA (1)...(19): siRNA sense strand
aagcaaugguaaaugagaa

SEQ ID NO: 1980810 - RNA, 19 nt, Homo sapiens
  misc_RNA (1)...(19): siRNA sense strand
gaaagacuagaggccuuaa

SEQ ID NO: 1980811 - RNA, 19 nt, Homo sapiens
  misc_RNA (1)...(19): siRNA sense strand
gcuaugcacguguucuuga

SEQ ID NO: 1980812 - RNA, 19 nt, Homo sapiens
  misc_RNA (1)...(19): siRNA sense strand
ccaaugaacaauuacagau

SEQ ID NO: 1980813 - RNA, 19 nt, Homo sapiens
  misc_RNA (1)...(19): siRNA sense strand
agaaugaaucaaccaauga

SEQ ID NO: 1980814 - RNA, 19 nt, Homo sapiens
  misc_RNA (1)...(19): siRNA sense strand
agaucuggcuggcaaguau

SEQ ID NO: 1980815 - RNA, 19 nt, Homo sapiens
  misc_RNA (1)...(19): siRNA sense strand
ugaaagacuagaggccuua

SEQ ID NO: 1980816 - RNA, 19 nt, Homo sapiens
  misc_RNA (1)...(19): siRNA sense strand
ugagaaagaagaagauugg

SEQ ID NO: 1980817 - RNA, 19 nt, Homo sapiens
  misc_RNA (1)...(19): siRNA sense strand
gaaggacguaugaauggau

SEQ ID NO: 1980818 - RNA, 19 nt, Homo sapiens
  misc_RNA (1)...(19): siRNA sense strand
cgaaggacguaugaaugga

SEQ ID NO: 1980819 - RNA, 19 nt, Homo sapiens
  misc_RNA (1)...(19): siRNA sense strand
gcagcguucucggaugcua

SEQ ID NO: 1980820 - RNA, 19 nt, Homo sapiens
  misc_RNA (1)...(19): siRNA sense strand
caauaguccacgaaaguga

SEQ ID NO: 1980821 - RNA, 19 nt, Homo sapiens
  misc_RNA (1)...(19): siRNA sense strand
cacguguucuugauuauag

SEQ ID NO: 1980822 - RNA, 19 nt, Homo sapiens
  misc_RNA (1)...(19): siRNA sense strand
caacgugggauaagcagau

SEQ ID NO: 1980823 - RNA, 19 nt, Homo sapiens
  misc_RNA (1)...(19): siRNA sense strand
ggauuuggcccagcucaug

SEQ ID NO: 1980824 - RNA, 19 nt, Homo sapiens
  misc_RNA (1)...(19): siRNA sense strand
cguaugaauggauuuauug

SEQ ID NO: 1980825 - RNA, 19 nt, Homo sapiens
  misc_RNA (1)...(19): siRNA sense strand
agagaucccugcagcuaag

SEQ ID NO: 1980826 - RNA, 19 nt, Homo sapiens
  misc_RNA (1)...(19): siRNA sense strand
gcagaacaacuagaagcuu

SEQ ID NO: 1980827 - RNA, 19 nt, Homo sapiens
  misc_RNA (1)...(19): siRNA sense strand
gcuuugcacuguacgaucu

SEQ ID NO: 1980828 - RNA, 19 nt, Homo sapiens
  misc_RNA (1)...(19): siRNA sense strand
gcuggcaaguaucgucaga

SEQ ID NO: 1980829 - RNA, 19 nt, Homo sapiens
  misc_RNA (1)...(19): siRNA sense strand
gauaaccgaaggacguaug

SEQ ID NO: 1980830 - RNA, 19 nt, Homo sapiens
  misc_RNA (1)...(19): siRNA sense strand
agacuuacuugaagauugc

SEQ ID NO: 1980831 - RNA, 19 nt, Homo sapiens
  misc_RNA (1)...(19): siRNA sense strand
cagcaucuugcaucuauau

SEQ ID NO: 1980832 - RNA, 19 nt, Homo sapiens
  misc_RNA (1)...(19): siRNA sense strand
ccuagagucauuucauuug

SEQ ID NO: 1980833 - RNA, 19 nt, Homo sapiens
  misc_RNA (1)...(19): siRNA sense strand
gccuagagucauuucauuu

SEQ ID NO: 1980834 - RNA, 19 nt, Homo sapiens
  misc_RNA (1)...(19): siRNA sense strand
ugauagcacagccaaagaa

SEQ ID NO: 1980835 - RNA, 19 nt, Homo sapiens
  misc_RNA (1)...(19): siRNA sense strand
gaauaaccuuuuggagaaa

SEQ ID NO: 1980836 - RNA, 19 nt, Homo sapiens
  misc_RNA (1)...(19): siRNA sense strand
aauauuaccuucgaagaac

SEQ ID NO: 1980837 - RNA, 19 nt, Homo sapiens
  misc_RNA (1)...(19): siRNA sense strand
uggcaaguaucgucagauc

SEQ ID NO: 1980838 - RNA, 19 nt, Homo sapiens
  misc_RNA (1)...(19): siRNA sense strand
agacaauaguccacgaaag

SEQ ID NO: 1980839 - RNA, 19 nt, Homo sapiens
  misc_RNA (1)...(19): siRNA sense strand
uaaacuggagacuuacuug

SEQ ID NO: 1980840 - RNA, 19 nt, Homo sapiens
  misc_RNA (1)...(19): siRNA sense strand
gaaaugagcucaagaaaga

SEQ ID NO: 1980841 - RNA, 19 nt, Homo sapiens
  misc_RNA (1)...(19): siRNA sense strand
aaagaaagcuccagaagua

SEQ ID NO: 1980842 - RNA, 19 nt, Homo sapiens
  misc_RNA (1)...(19): siRNA sense strand
guaaagagguuaaggaaau

SEQ ID NO: 1980843 - RNA, 19 nt, Homo sapiens
  misc_RNA (1)...(19): siRNA sense strand
ggaaauacuugcugauuau

SEQ ID NO: 1980844 - RNA, 19 nt, Homo sapiens
  misc_RNA (1)...(19): siRNA sense strand
ccacaucccuugagauuaa

SEQ ID NO: 1980845 - RNA, 19 nt, Homo sapiens
  misc_RNA (1)...(19): siRNA sense strand
gaagaaauauuugccauug

SEQ ID NO: 1980846 - RNA, 19 nt, Homo sapiens
  misc_RNA (1)...(19): siRNA sense strand
guacagaacuuuaccaaca

SEQ ID NO: 1980847 - RNA, 19 nt, Homo sapiens
  misc_RNA (1)...(19): siRNA sense strand
gaugaagccuacuugaaua

SEQ ID NO: 1980848 - RNA, 19 nt, Homo sapiens
  misc_RNA (1)...(19): siRNA sense strand
ggaugggacuuaaugauaa

SEQ ID NO: 1980849 - RNA, 19 nt, Homo sapiens
  misc_RNA (1)...(19): siRNA sense strand
gcauguggauguuugcuua

SEQ ID NO: 1980850 - RNA, 19 nt, Homo sapiens
  misc_RNA (1)...(19): siRNA sense strand
guagaacuguuaccauuaa

SEQ ID NO: 1980851 - RNA, 19 nt, Homo sapiens
  misc_RNA (1)...(19): siRNA sense strand
caacaaaggagcauuauug

SEQ ID NO: 1980852 - RNA, 19 nt, Homo sapiens
  misc_RNA (1)...(19): siRNA sense strand
gaagaugaaugagaauuug

SEQ ID NO: 1980853 - RNA, 19 nt, Homo sapiens
  misc_RNA (1)...(19): siRNA sense strand
gaagccuacuugaauauaa

SEQ ID NO: 1980854 - RNA, 19 nt, Homo sapiens
  misc_RNA (1)...(19): siRNA sense strand
gaaauggagucaccaagau

SEQ ID NO: 1980855 - RNA, 19 nt, Homo sapiens
  misc_RNA (1)...(19): siRNA sense strand
uaacaaagcacuuagaaga

SEQ ID NO: 1980856 - RNA, 19 nt, Homo sapiens
  misc_RNA (1)...(19): siRNA sense strand
gcaaggagauuugguguuc

SEQ ID NO: 1980857 - RNA, 19 nt, Homo sapiens
  misc_RNA (1)...(19): siRNA sense strand
ucacaaccauuccaaguuu

SEQ ID NO: 1980858 - RNA, 19 nt, Homo sapiens
  misc_RNA (1)...(19): siRNA sense strand
ugacauggaugcuuucuau

SEQ ID NO: 1980859 - RNA, 19 nt, Homo sapiens
  misc_RNA (1)...(19): siRNA sense strand
gaagauguuggaucauuua

SEQ ID NO: 1980860 - RNA, 19 nt, Homo sapiens
  misc_RNA (1)...(19): siRNA sense strand
gcaauggaauuagaacaaa

SEQ ID NO: 1980861 - RNA, 19 nt, Homo sapiens
  misc_RNA (1)...(19): siRNA sense strand
gcaaaaguaugcagugaua

SEQ ID NO: 1980862 - RNA, 19 nt, Homo sapiens
  misc_RNA (1)...(19): siRNA sense strand
auacuuaccuguccuguuu

SEQ ID NO: 1980863 - RNA, 19 nt, Homo sapiens
  misc_RNA (1)...(19): siRNA sense strand
agaagaagaugaaugagaa

SEQ ID NO: 1980864 - RNA, 19 nt, Homo sapiens
  misc_RNA (1)...(19): siRNA sense strand
gagaggacauucagugaga

SEQ ID NO: 1980865 - RNA, 19 nt, Homo sapiens
  misc_RNA (1)...(19): siRNA sense strand
caacagagggcauugcuuu

SEQ ID NO: 1980866 - RNA, 19 nt, Homo sapiens
  misc_RNA (1)...(19): siRNA sense strand
cuagaaaugucucauaaga

SEQ ID NO: 1980867 - RNA, 19 nt, Homo sapiens
  misc_RNA (1)...(19): siRNA sense strand
ggagauccuuuccaaguga

SEQ ID NO: 1980868 - RNA, 19 nt, Homo sapiens
  misc_RNA (1)...(19): siRNA sense strand
caucaaggauuuacccauu

SEQ ID NO: 1980869 - RNA, 19 nt, Homo sapiens
  misc_RNA (1)...(19): siRNA sense strand
gaagagcaauacagccuau

SEQ ID NO: 1980870 - RNA, 19 nt, Homo sapiens
  misc_RNA (1)...(19): siRNA sense strand
gcuguaggaucaaugagua

SEQ ID NO: 1980871 - RNA, 19 nt, Homo sapiens
  misc_RNA (1)...(19): siRNA sense strand
uaacucaucuaaagcagaa

SEQ ID NO: 1980872 - RNA, 19 nt, Homo sapiens
  misc_RNA (1)...(19): siRNA sense strand
ggaauggaaggauuagaua

SEQ ID NO: 1980873 - RNA, 19 nt, Homo sapiens
  misc_RNA (1)...(19): siRNA sense strand
guagaugaaugucuugaug

SEQ ID NO: 1980874 - RNA, 19 nt, Homo sapiens
  misc_RNA (1)...(19): siRNA sense strand
caggauugaugacaaagua

SEQ ID NO: 1980875 - RNA, 19 nt, Homo sapiens
  misc_RNA (1)...(19): siRNA sense strand
gaucuaacccuguucaaug

SEQ ID NO: 1980876 - RNA, 19 nt, Homo sapiens
  misc_RNA (1)...(19): siRNA sense strand
ugacagauuugcaauggaa

SEQ ID NO: 1980877 - RNA, 19 nt, Homo sapiens
  misc_RNA (1)...(19): siRNA sense strand
guggauguuugcuuaaaua

SEQ ID NO: 1980878 - RNA, 19 nt, Homo sapiens
  misc_RNA (1)...(19): siRNA sense strand
ugaaacaucuuggcauuau

SEQ ID NO: 1980879 - RNA, 19 nt, Homo sapiens
  misc_RNA (1)...(19): siRNA sense strand
aggaaauacuugcugauua

SEQ ID NO: 1980880 - RNA, 19 nt, Homo sapiens
  misc_RNA (1)...(19): siRNA sense strand
acaaagcacuuagaagaaa

SEQ ID NO: 1980881 - RNA, 19 nt, Homo sapiens
  misc_RNA (1)...(19): siRNA sense strand
gcuuauggguguucggaua

SEQ ID NO: 1980882 - RNA, 19 nt, Homo sapiens
  misc_RNA (1)...(19): siRNA sense strand
gcacuuagaagaaagacaa

SEQ ID NO: 1980883 - RNA, 19 nt, Homo sapiens
  misc_RNA (1)...(19): siRNA sense strand
ggaaauggagucaccaaga

SEQ ID NO: 1980884 - RNA, 19 nt, Homo sapiens
  misc_RNA (1)...(19): siRNA sense strand
gaaacaucuuggcauuauu

SEQ ID NO: 1980885 - RNA, 19 nt, Homo sapiens
  misc_RNA (1)...(19): siRNA sense strand
gcaagucaaccaacgaauu

SEQ ID NO: 1980886 - RNA, 19 nt, Homo sapiens
  misc_RNA (1)...(19): siRNA sense strand
ggauaaauuuaacccaguu

SEQ ID NO: 1980887 - RNA, 19 nt, Homo sapiens
  misc_RNA (1)...(19): siRNA sense strand
cuaccaaaguuaacaagaa

SEQ ID NO: 1980888 - RNA, 19 nt, Homo sapiens
  misc_RNA (1)...(19): siRNA sense strand
agaaaugucucauaagaag

SEQ ID NO: 1980889 - RNA, 19 nt, Homo sapiens
  misc_RNA (1)...(19): siRNA sense strand
ggauaaacccauugcugua

SEQ ID NO: 1980890 - RNA, 19 nt, Homo sapiens
  misc_RNA (1)...(19): siRNA sense strand
gcucuaguuuguccuguuu

SEQ ID NO: 1980891 - RNA, 19 nt, Homo sapiens
  misc_RNA (1)...(19): siRNA sense strand
cuacagaaagaaagacuua

SEQ ID NO: 1980892 - RNA, 19 nt, Homo sapiens
  misc_RNA (1)...(19): siRNA sense strand
caaacauacccuugauaua

SEQ ID NO: 1980893 - RNA, 19 nt, Homo sapiens
  misc_RNA (1)...(19): siRNA sense strand
ccaaacaaucccaaacaua

SEQ ID NO: 1980894 - RNA, 19 nt, Homo sapiens
  misc_RNA (1)...(19): siRNA sense strand
guacucaacaucaaagaaa

SEQ ID NO: 1980895 - RNA, 19 nt, Homo sapiens
  misc_RNA (1)...(19): siRNA sense strand
uaauaaagcaggaauggaa

SEQ ID NO: 1980896 - RNA, 19 nt, Homo sapiens
  misc_RNA (1)...(19): siRNA sense strand
gucaagaacuuugcaguga

SEQ ID NO: 1980897 - RNA, 19 nt, Homo sapiens
  misc_RNA (1)...(19): siRNA sense strand
ccaagcaagucuuuuaaua

SEQ ID NO: 1980898 - RNA, 19 nt, Homo sapiens
  misc_RNA (1)...(19): siRNA sense strand
gcccacaacuuauaauagu

SEQ ID NO: 1980899 - RNA, 19 nt, Homo sapiens
  misc_RNA (1)...(19): siRNA sense strand
gaauggaaggauuagauaa

SEQ ID NO: 1980900 - RNA, 19 nt, Homo sapiens
  misc_RNA (1)...(19): siRNA sense strand
cuaugcagcuguagaaaug

SEQ ID NO: 1980901 - RNA, 19 nt, Homo sapiens
  misc_RNA (1)...(19): siRNA sense strand
ggcauuauuuccuucauau

SEQ ID NO: 1980902 - RNA, 19 nt, Homo sapiens
  misc_RNA (1)...(19): siRNA sense strand
gaacaaaacaauccucaaa

SEQ ID NO: 1980903 - RNA, 19 nt, Homo sapiens
  misc_RNA (1)...(19): siRNA sense strand
caggaaaggaaguuaauaa

SEQ ID NO: 1980904 - RNA, 19 nt, Homo sapiens
  misc_RNA (1)...(19): siRNA sense strand
gaacaucagcccaggaagu

SEQ ID NO: 1980905 - RNA, 19 nt, Homo sapiens
  misc_RNA (1)...(19): siRNA sense strand
guaauaagcauagcaagga

SEQ ID NO: 1980906 - RNA, 19 nt, Homo sapiens
  misc_RNA (1)...(19): siRNA sense strand
uaucagagaauucagauga

SEQ ID NO: 1980907 - RNA, 19 nt, Homo sapiens
  misc_RNA (1)...(19): siRNA sense strand
ggacaauaccaaauucuuc

SEQ ID NO: 1980908 - RNA, 19 nt, Homo sapiens
  misc_RNA (1)...(19): siRNA sense strand
gaauaaaccaaauggacaa

SEQ ID NO: 1980909 - RNA, 19 nt, Homo sapiens
  misc_RNA (1)...(19): siRNA sense strand
caagucaaccaacgaauug

SEQ ID NO: 1980910 - RNA, 19 nt, Homo sapiens
  misc_RNA (1)...(19): siRNA sense strand
ccaaacauacccuugauau

SEQ ID NO: 1980911 - RNA, 19 nt, Homo sapiens
  misc_RNA (1)...(19): siRNA sense strand
gugagaagcaagauuauga

SEQ ID NO: 1980912 - RNA, 19 nt, Homo sapiens
  misc_RNA (1)...(19): siRNA sense strand
gcauugcuuucucuccuuu

SEQ ID NO: 1980913 - RNA, 19 nt, Homo sapiens
  misc_RNA (1)...(19): siRNA sense strand
ggagaagugugacaguuac

SEQ ID NO: 1980914 - RNA, 19 nt, Homo sapiens
  misc_RNA (1)...(19): siRNA sense strand
ggaaaugagcucaagaaag

SEQ ID NO: 1980915 - RNA, 19 nt, Homo sapiens
  misc_RNA (1)...(19): siRNA sense strand
aagaauaccgccagccuua

SEQ ID NO: 1980916 - RNA, 19 nt, Homo sapiens
  misc_RNA (1)...(19): siRNA sense strand
aaacaauccucaaauacuc

SEQ ID NO: 1980917 - RNA, 19 nt, Homo sapiens
  misc_RNA (1)...(19): siRNA sense strand
gcuaagaaaagcacaauua

SEQ ID NO: 1980918 - RNA, 19 nt, Homo sapiens
  misc_RNA (1)...(19): siRNA sense strand
caaacaaucccaaacauac

SEQ ID NO: 1980919 - RNA, 19 nt, Homo sapiens
  misc_RNA (1)...(19): siRNA sense strand
caaaguacucaacaucaaa

SEQ ID NO: 1980920 - RNA, 19 nt, Homo sapiens
  misc_RNA (1)...(19): siRNA sense strand
acaaaguacucaacaucaa

SEQ ID NO: 1980921 - RNA, 19 nt, Homo sapiens
  misc_RNA (1)...(19): siRNA sense strand
caaaagacuucagaucuaa

SEQ ID NO: 1980922 - RNA, 19 nt, Homo sapiens
  misc_RNA (1)...(19): siRNA sense strand
gaauucuucuucuacuguu

SEQ ID NO: 1980923 - RNA, 19 nt, Homo sapiens
  misc_RNA (1)...(19): siRNA sense strand
gaagugugacaguuacaaa

SEQ ID NO: 1980924 - RNA, 19 nt, Homo sapiens
  misc_RNA (1)...(19): siRNA sense strand
ggacauucagugagauaaa

SEQ ID NO: 1980925 - RNA, 19 nt, Homo sapiens
  misc_RNA (1)...(19): siRNA sense strand
gacaagcugugauggacuu

SEQ ID NO: 1980926 - RNA, 19 nt, Homo sapiens
  misc_RNA (1)...(19): siRNA sense strand
uaaaccaaauggacaauac

SEQ ID NO: 1980927 - RNA, 19 nt, Homo sapiens
  misc_RNA (1)...(19): siRNA sense strand
gauuugcaauggaauuaga

SEQ ID NO: 1980928 - RNA, 19 nt, Homo sapiens
  misc_RNA (1)...(19): siRNA sense strand
ggccaugagucuugaugaa

SEQ ID NO: 1980929 - RNA, 19 nt, Homo sapiens
  misc_RNA (1)...(19): siRNA sense strand
gauguuggaucauuuagac

SEQ ID NO: 1980930 - RNA, 19 nt, Homo sapiens
  misc_RNA (1)...(19): siRNA sense strand
gugaagccgugaauaaaca

SEQ ID NO: 1980931 - RNA, 19 nt, Homo sapiens
  misc_RNA (1)...(19): siRNA sense strand
ggacaggaaacaccaacaa

SEQ ID NO: 1980932 - RNA, 19 nt, Homo sapiens
  misc_RNA (1)...(19): siRNA sense strand
ccaaauggacaauaccaaa

SEQ ID NO: 1980933 - RNA, 19 nt, Homo sapiens
  misc_RNA (1)...(19): siRNA sense strand
gaguaaagagguuaaggaa

SEQ ID NO: 1980934 - RNA, 19 nt, Homo sapiens
  misc_RNA (1)...(19): siRNA sense strand
ggaaaggaaguuaauaaac

SEQ ID NO: 1980935 - RNA, 19 nt, Homo sapiens
  misc_RNA (1)...(19): siRNA sense strand
ccaaauacaauguuagcaa

SEQ ID NO: 1980936 - RNA, 19 nt, Homo sapiens
  misc_RNA (1)...(19): siRNA sense strand
ggccaggauugaugacaaa

SEQ ID NO: 1980937 - RNA, 19 nt, Homo sapiens
  misc_RNA (1)...(19): siRNA sense strand
aaagguuucuggaauagga

SEQ ID NO: 1980938 - RNA, 19 nt, Homo sapiens
  misc_RNA (1)...(19): siRNA sense strand
ccaaauucuucccaauaga

SEQ ID NO: 1980939 - RNA, 19 nt, Homo sapiens
  misc_RNA (1)...(19): siRNA sense strand
caaagaaagcuccagaagu

SEQ ID NO: 1980940 - RNA, 19 nt, Homo sapiens
  misc_RNA (1)...(19): siRNA sense strand
ggauuucgauaacaacaua

SEQ ID NO: 1980941 - RNA, 19 nt, Homo sapiens
  misc_RNA (1)...(19): siRNA sense strand
ucacucaacugcuaguaua

SEQ ID NO: 1980942 - RNA, 19 nt, Homo sapiens
  misc_RNA (1)...(19): siRNA sense strand
ggagaaccacauaaauuua

SEQ ID NO: 1980943 - RNA, 19 nt, Homo sapiens
  misc_RNA (1)...(19): siRNA sense strand
ugacagacaucuaggagaa

SEQ ID NO: 1980944 - RNA, 19 nt, Homo sapiens
  misc_RNA (1)...(19): siRNA sense strand
uggaguauuucuugcauua

SEQ ID NO: 1980945 - RNA, 19 nt, Homo sapiens
  misc_RNA (1)...(19): siRNA sense strand
gcccauauauuucaucugu

SEQ ID NO: 1980946 - RNA, 19 nt, Homo sapiens
  misc_RNA (1)...(19): siRNA sense strand
guacgaauguaaaguuauc

SEQ ID NO: 1980947 - RNA, 19 nt, Homo sapiens
  misc_RNA (1)...(19): siRNA sense strand
uaaaguggauuucgauaac

SEQ ID NO: 1980948 - RNA, 19 nt, Homo sapiens
  misc_RNA (1)...(19): siRNA sense strand
ccauauauuucaucuguca

SEQ ID NO: 1980949 - RNA, 19 nt, Homo sapiens
  misc_RNA (1)...(19): siRNA sense strand
gcuaguauauaaugguguu

SEQ ID NO: 1980950 - RNA, 19 nt, Homo sapiens
  misc_RNA (1)...(19): siRNA sense strand
agagagugguccaguguaa

SEQ ID NO: 1980951 - RNA, 19 nt, Homo sapiens
  misc_RNA (1)...(19): siRNA sense strand
guagcagucuuuguuggua

SEQ ID NO: 1980952 - RNA, 19 nt, Homo sapiens
  misc_RNA (1)...(19): siRNA sense strand
gucgacaacuggcaaugua

SEQ ID NO: 1980953 - RNA, 19 nt, Homo sapiens
  misc_RNA (1)...(19): siRNA sense strand
uaggagaaccacauaaauu

SEQ ID NO: 1980954 - RNA, 19 nt, Homo sapiens
  misc_RNA (1)...(19): siRNA sense strand
aaacauuggucgacaacug

SEQ ID NO: 1980955 - RNA, 19 nt, Homo sapiens
  misc_RNA (1)...(19): siRNA sense strand
caacugcuaguauauaaug

SEQ ID NO: 1980956 - RNA, 19 nt, Homo sapiens
  misc_RNA (1)...(19): siRNA sense strand
gaguauuucuugcauuagu

SEQ ID NO: 1980957 - RNA, 19 nt, Homo sapiens
  misc_RNA (1)...(19): siRNA sense strand
uuugauagaucuagaagug

SEQ ID NO: 1980958 - RNA, 19 nt, Homo sapiens
  misc_RNA (1)...(19): siRNA sense strand
aggagaaccacauaaauuu

SEQ ID NO: 1980959 - RNA, 19 nt, Homo sapiens
  misc_RNA (1)...(19): siRNA sense strand
gggaaacauuggucgacaa

SEQ ID NO: 1980960 - RNA, 19 nt, Homo sapiens
  misc_RNA (1)...(19): siRNA sense strand
gaguaggaauugccuucuu

SEQ ID NO: 1980961 - RNA, 19 nt, Homo sapiens
  misc_RNA (1)...(19): siRNA sense strand
cuaaaguggauuucgauaa

SEQ ID NO: 1980962 - RNA, 19 nt, Homo sapiens
  misc_RNA (1)...(19): siRNA sense strand
agugugaacuugaugauuc

SEQ ID NO: 1980963 - RNA, 19 nt, Homo sapiens
  misc_RNA (1)...(19): siRNA sense strand
gugcuaaaguggauuucga

SEQ ID NO: 1980964 - RNA, 19 nt, Homo sapiens
  misc_RNA (1)...(19): siRNA sense strand
guaaaguuaucgcagaaaa

SEQ ID NO: 1980965 - RNA, 19 nt, Homo sapiens
  misc_RNA (1)...(19): siRNA sense strand
gcauaacaaugggaaacau

SEQ ID NO: 1980966 - RNA, 19 nt, Homo sapiens
  misc_RNA (1)...(19): siRNA sense strand
cucaacugcuaguauauaa

SEQ ID NO: 1980967 - RNA, 19 nt, Homo sapiens
  misc_RNA (1)...(19): siRNA sense strand
caacuguggucacucaacu

SEQ ID NO: 1980968 - RNA, 19 nt, Homo sapiens
  misc_RNA (1)...(19): siRNA sense strand
gcaagcaucuuuucuucug

SEQ ID NO: 1980969 - RNA, 19 nt, Homo sapiens
  misc_RNA (1)...(19): siRNA sense strand
aaguguggcccauauauuu

SEQ ID NO: 1980970 - RNA, 19 nt, Homo sapiens
  misc_RNA (1)...(19): siRNA sense strand
ggacugugguggacuuuug

SEQ ID NO: 1980971 - RNA, 19 nt, Homo sapiens
  misc_RNA (1)...(19): siRNA sense strand
gcuaaaguggauuucgaua

SEQ ID NO: 1980972 - RNA, 19 nt, Homo sapiens
  misc_RNA (1)...(19): siRNA sense strand
ccagauuuccucuauguuc

SEQ ID NO: 1980973 - RNA, 19 nt, Homo sapiens
  misc_RNA (1)...(19): siRNA sense strand
cuauguucguucuugguua

SEQ ID NO: 1980974 - RNA, 19 nt, Homo sapiens
  misc_RNA (1)...(19): siRNA sense strand
caucuaggagaaccacaua

SEQ ID NO: 1980975 - RNA, 19 nt, Homo sapiens
  misc_RNA (1)...(19): siRNA sense strand
ggcaauguacgaauguaaa

SEQ ID NO: 1980976 - RNA, 19 nt, Homo sapiens
  misc_RNA (1)...(19): siRNA sense strand
uguggucacucaacugcua

SEQ ID NO: 1980977 - RNA, 19 nt, Homo sapiens
  misc_RNA (1)...(19): siRNA sense strand
uaaaucaugccagugcuaa

SEQ ID NO: 1980978 - RNA, 19 nt, Homo sapiens
  misc_RNA (1)...(19): siRNA sense strand
cagcugugauuggguuauu

SEQ ID NO: 1980979 - RNA, 19 nt, Homo sapiens
  misc_RNA (1)...(19): siRNA sense strand
uacuucagauucagagaaa

SEQ ID NO: 1980980 - RNA, 19 nt, Homo sapiens
  misc_RNA (1)...(19): siRNA sense strand
aguaggaauugccuucuug

SEQ ID NO: 1980981 - RNA, 19 nt, Homo sapiens
  misc_RNA (1)...(19): siRNA sense strand
uggcaacuguggucacuca

SEQ ID NO: 1980982 - RNA, 19 nt, Homo sapiens
  misc_RNA (1)...(19): siRNA sense strand
gcaauguacgaauguaaag

SEQ ID NO: 1980983 - RNA, 19 nt, Homo sapiens
  misc_RNA (1)...(19): siRNA sense strand
ucuaggagaaccacauaaa

SEQ ID NO: 1980984 - RNA, 19 nt, Homo sapiens
  misc_RNA (1)...(19): siRNA sense strand
cagauucagagaaauguga

SEQ ID NO: 1980985 - RNA, 19 nt, Homo sapiens
  misc_RNA (1)...(19): siRNA sense strand
cuugaugauucgaggagua

SEQ ID NO: 1980986 - RNA, 19 nt, Homo sapiens
  misc_RNA (1)...(19): siRNA sense strand
aaaguguggcccauauauu

SEQ ID NO: 1980987 - RNA, 19 nt, Homo sapiens
  misc_RNA (1)...(19): siRNA sense strand
cuccagauuuccucuaugu

SEQ ID NO: 1980988 - RNA, 19 nt, Homo sapiens
  misc_RNA (1)...(19): siRNA sense strand
gccagagugugaacuugau

SEQ ID NO: 1980989 - RNA, 19 nt, Homo sapiens
  misc_RNA (1)...(19): siRNA sense strand
aaagagagugguccagugu

SEQ ID NO: 1980990 - RNA, 19 nt, Homo sapiens
  misc_RNA (1)...(19): siRNA sense strand
gcuggaggcauaacaaugg

SEQ ID NO: 1980991 - RNA, 19 nt, Homo sapiens
  misc_RNA (1)...(19): siRNA sense strand
gcagaaggagagacagagu

SEQ ID NO: 1980992 - RNA, 19 nt, Homo sapiens
  misc_RNA (1)...(19): siRNA sense strand
uagcagucuuuguugguau

SEQ ID NO: 1980993 - RNA, 19 nt, Homo sapiens
  misc_RNA (1)...(19): siRNA sense strand
caacuggcaauguacgaau

SEQ ID NO: 1980994 - RNA, 19 nt, Homo sapiens
  misc_RNA (1)...(19): siRNA sense strand
guguguagcagucuuuguu

SEQ ID NO: 1980995 - RNA, 19 nt, Homo sapiens
  misc_RNA (1)...(19): siRNA sense strand
gauucgaggaguagugcua

SEQ ID NO: 1980996 - RNA, 19 nt, Homo sapiens
  misc_RNA (1)...(19): siRNA sense strand
aacauacaguugucucuca

SEQ ID NO: 1980997 - RNA, 19 nt, Homo sapiens
  misc_RNA (1)...(19): siRNA sense strand
gcugugauuggguuauuau

SEQ ID NO: 1980998 - RNA, 19 nt, Homo sapiens
  misc_RNA (1)...(19): siRNA sense strand
aaaguggauuucgauaaca

SEQ ID NO: 1980999 - RNA, 19 nt, Homo sapiens
  misc_RNA (1)...(19): siRNA sense strand
agagucaccugggcccaaa

SEQ ID NO: 1981000 - RNA, 19 nt, Homo sapiens
  misc_RNA (1)...(19): siRNA sense strand
cuaggagaaccacauaaau

SEQ ID NO: 1981001 - RNA, 19 nt, Homo sapiens
  misc_RNA (1)...(19): siRNA sense strand
ggaaacauuggucgacaac

SEQ ID NO: 1981002 - RNA, 19 nt, Homo sapiens
  misc_RNA (1)...(19): siRNA sense strand
gauuuccucuauguucguu

SEQ ID NO: 1981003 - RNA, 19 nt, Homo sapiens
  misc_RNA (1)...(19): siRNA sense strand
ccagugcuaaaguggauuu

SEQ ID NO: 1981004 - RNA, 19 nt, Homo sapiens
  misc_RNA (1)...(19): siRNA sense strand
aaguggauuucgauaacaa

SEQ ID NO: 1981005 - RNA, 19 nt, Homo sapiens
  misc_RNA (1)...(19): siRNA sense strand
acucaacugcuaguauaua

SEQ ID NO: 1981006 - RNA, 19 nt, Homo sapiens
  misc_RNA (1)...(19): siRNA sense strand
gugauuggguuauuauacc

SEQ ID NO: 1981007 - RNA, 19 nt, Homo sapiens
  misc_RNA (1)...(19): siRNA sense strand
agaaggagagacagaguca

SEQ ID NO: 1981008 - RNA, 19 nt, Homo sapiens
  misc_RNA (1)...(19): siRNA sense strand
agagugguccaguguaaug

SEQ ID NO: 1981009 - RNA, 19 nt, Homo sapiens
  misc_RNA (1)...(19): siRNA sense strand
gagaaaugugacgcucuuu

SEQ ID NO: 1981010 - RNA, 19 nt, Homo sapiens
  misc_RNA (1)...(19): siRNA sense strand
uagccagagugugaacuug

SEQ ID NO: 1981011 - RNA, 19 nt, Homo sapiens
  misc_RNA (1)...(19): siRNA sense strand
gagugugaacuugaugauu

SEQ ID NO: 1981012 - RNA, 19 nt, Homo sapiens
  misc_RNA (1)...(19): siRNA sense strand
ucgauaacaacauacaguu

SEQ ID NO: 1981013 - RNA, 19 nt, Homo sapiens
  misc_RNA (1)...(19): siRNA sense strand
agcagucuuuguugguaua

SEQ ID NO: 1981014 - RNA, 19 nt, Homo sapiens
  misc_RNA (1)...(19): siRNA sense strand
ucaugccagugcuaaagug

SEQ ID NO: 1981015 - RNA, 19 nt, Homo sapiens
  misc_RNA (1)...(19): siRNA sense strand
ucgaggaguagugcuauuu

SEQ ID NO: 1981016 - RNA, 19 nt, Homo sapiens
  misc_RNA (1)...(19): siRNA sense strand
ggccuuggaguaggaauug

SEQ ID NO: 1981017 - RNA, 19 nt, Homo sapiens
  misc_RNA (1)...(19): siRNA sense strand
cacacuggcugcacuaucc

SEQ ID NO: 1981018 - RNA, 19 nt, Homo sapiens
  misc_RNA (1)...(19): siRNA sense strand
gaugauucgaggaguagug

SEQ ID NO: 1981019 - RNA, 19 nt, Homo sapiens
  misc_RNA (1)...(19): siRNA sense strand
uuacuucagauucagagaa

SEQ ID NO: 1981020 - RNA, 19 nt, Homo sapiens
  misc_RNA (1)...(19): siRNA sense strand
ggucgacaacuggcaaugu

SEQ ID NO: 1981021 - RNA, 19 nt, Homo sapiens
  misc_RNA (1)...(19): siRNA sense strand
ugugauugcaagcaucuuu

SEQ ID NO: 1981022 - RNA, 19 nt, Homo sapiens
  misc_RNA (1)...(19): siRNA sense strand
uauguucguucuugguuac

SEQ ID NO: 1981023 - RNA, 19 nt, Homo sapiens
  misc_RNA (1)...(19): siRNA sense strand
agacaggguuaauggaaga

SEQ ID NO: 1981024 - RNA, 19 nt, Homo sapiens
  misc_RNA (1)...(19): siRNA sense strand
ccagacaggguuaauggaa

SEQ ID NO: 1981025 - RNA, 19 nt, Homo sapiens
  misc_RNA (1)...(19): siRNA sense strand
gaccagacaggguuaaugg

SEQ ID NO: 1981026 - RNA, 19 nt, Homo sapiens
  misc_RNA (1)...(19): siRNA sense strand
ggaccagacaggguuaaug

SEQ ID NO: 1981027 - RNA, 19 nt, Homo sapiens
  misc_RNA (1)...(19): siRNA sense strand
gaaccgaaaugcuacacua

SEQ ID NO: 1981028 - RNA, 19 nt, Homo sapiens
  misc_RNA (1)...(19): siRNA sense strand
caacugaagucaaguaugu

SEQ ID NO: 1981029 - RNA, 19 nt, Homo sapiens
  misc_RNA (1)...(19): siRNA sense strand
ccagaaaccuuuguuagaa

SEQ ID NO: 1981030 - RNA, 19 nt, Homo sapiens
  misc_RNA (1)...(19): siRNA sense strand
ccaagaaagugaaauaaag

SEQ ID NO: 1981031 - RNA, 19 nt, Homo sapiens
  misc_RNA (1)...(19): siRNA sense strand
ucaaagaaauggcagaugu

SEQ ID NO: 1981032 - RNA, 19 nt, Homo sapiens
  misc_RNA (1)...(19): siRNA sense strand
ccagugaucuugagacuuc

SEQ ID NO: 1981033 - RNA, 19 nt, Homo sapiens
  misc_RNA (1)...(19): siRNA sense strand
ggagaugcuuucccaagaa

SEQ ID NO: 1981034 - RNA, 19 nt, Homo sapiens
  misc_RNA (1)...(19): siRNA sense strand
gauaauguuuccaaagaug

SEQ ID NO: 1981035 - RNA, 19 nt, Homo sapiens
  misc_RNA (1)...(19): siRNA sense strand
ggaaagaguguuauaagug

SEQ ID NO: 1981036 - RNA, 19 nt, Homo sapiens
  misc_RNA (1)...(19): siRNA sense strand
ggugaaaucuauccuuaau

SEQ ID NO: 1981037 - RNA, 19 nt, Homo sapiens
  misc_RNA (1)...(19): siRNA sense strand
gaaggagaaagaagagaua

SEQ ID NO: 1981038 - RNA, 19 nt, Homo sapiens
  misc_RNA (1)...(19): siRNA sense strand
caaaacagcugcauugguu

SEQ ID NO: 1981039 - RNA, 19 nt, Homo sapiens
  misc_RNA (1)...(19): siRNA sense strand
gaagugacagccauagaaa

SEQ ID NO: 1981040 - RNA, 19 nt, Homo sapiens
  misc_RNA (1)...(19): siRNA sense strand
gaccaaaccuuccagugau

SEQ ID NO: 1981041 - RNA, 19 nt, Homo sapiens
  misc_RNA (1)...(19): siRNA sense strand
gcuacucuuugaugaauuu

SEQ ID NO: 1981042 - RNA, 19 nt, Homo sapiens
  misc_RNA (1)...(19): siRNA sense strand
gaaccaagggucugaugaa

SEQ ID NO: 1981043 - RNA, 19 nt, Homo sapiens
  misc_RNA (1)...(19): siRNA sense strand
ggaagugacagccauagaa

SEQ ID NO: 1981044 - RNA, 19 nt, Homo sapiens
  misc_RNA (1)...(19): siRNA sense strand
caauugaacuauuccacaa

SEQ ID NO: 1981045 - RNA, 19 nt, Homo sapiens
  misc_RNA (1)...(19): siRNA sense strand
ugaauuagagcaacucaaa

SEQ ID NO: 1981046 - RNA, 19 nt, Homo sapiens
  misc_RNA (1)...(19): siRNA sense strand
gaaauaccgcccacgaaug

SEQ ID NO: 1981047 - RNA, 19 nt, Homo sapiens
  misc_RNA (1)...(19): siRNA sense strand
caaacucuuucccagauga

SEQ ID NO: 1981048 - RNA, 19 nt, Homo sapiens
  misc_RNA (1)...(19): siRNA sense strand
gaaaugcuacacuaucuca

SEQ ID NO: 1981049 - RNA, 19 nt, Homo sapiens
  misc_RNA (1)...(19): siRNA sense strand
gcaacucaaagaaacauuu

SEQ ID NO: 1981050 - RNA, 19 nt, Homo sapiens
  misc_RNA (1)...(19): siRNA sense strand
gaguaaaucagaaccugua

SEQ ID NO: 1981051 - RNA, 19 nt, Homo sapiens
  misc_RNA (1)...(19): siRNA sense strand
ggauaauguuuccaaagau

SEQ ID NO: 1981052 - RNA, 19 nt, Homo sapiens
  misc_RNA (1)...(19): siRNA sense strand
uaaaucagaaccuguaguu

SEQ ID NO: 1981053 - RNA, 19 nt, Homo sapiens
  misc_RNA (1)...(19): siRNA sense strand
gcuacacuaucucagguuu

SEQ ID NO: 1981054 - RNA, 19 nt, Homo sapiens
  misc_RNA (1)...(19): siRNA sense strand
agacuccacugcuaacuga

SEQ ID NO: 1981055 - RNA, 19 nt, Homo sapiens
  misc_RNA (1)...(19): siRNA sense strand
gccaaacucuuucccagau

SEQ ID NO: 1981056 - RNA, 19 nt, Homo sapiens
  misc_RNA (1)...(19): siRNA sense strand
aggauaauguuuccaaaga

SEQ ID NO: 1981057 - RNA, 19 nt, Homo sapiens
  misc_RNA (1)...(19): siRNA sense strand
ggguuuggaugccuuagaa

SEQ ID NO: 1981058 - RNA, 19 nt, Homo sapiens
  misc_RNA (1)...(19): siRNA sense strand
agacaaaugccaaagagaa

SEQ ID NO: 1981059 - RNA, 19 nt, Homo sapiens
  misc_RNA (1)...(19): siRNA sense strand
gaaauggcagauguccuua

SEQ ID NO: 1981060 - RNA, 19 nt, Homo sapiens
  misc_RNA (1)...(19): siRNA sense strand
gggcuacucuuugaugaau

SEQ ID NO: 1981061 - RNA, 19 nt, Homo sapiens
  misc_RNA (1)...(19): siRNA sense strand
gacaauggaugugauagca

SEQ ID NO: 1981062 - RNA, 19 nt, Homo sapiens
  misc_RNA (1)...(19): siRNA sense strand
caaaaguucucucuauuca

SEQ ID NO: 1981063 - RNA, 19 nt, Homo sapiens
  misc_RNA (1)...(19): siRNA sense strand
gccagaaaccuuuguuaga

SEQ ID NO: 1981064 - RNA, 19 nt, Homo sapiens
  misc_RNA (1)...(19): siRNA sense strand
cagauguccuuaacccauu

SEQ ID NO: 1981065 - RNA, 19 nt, Homo sapiens
  misc_RNA (1)...(19): siRNA sense strand
uuucaaaugucaucgagaa

SEQ ID NO: 1981066 - RNA, 19 nt, Homo sapiens
  misc_RNA (1)...(19): siRNA sense strand
caagaauucugagucuguu

SEQ ID NO: 1981067 - RNA, 19 nt, Homo sapiens
  misc_RNA (1)...(19): siRNA sense strand
ucuagaagcucuggagaug

SEQ ID NO: 1981068 - RNA, 19 nt, Homo sapiens
  misc_RNA (1)...(19): siRNA sense strand
ccaggacgccuuucagcua

SEQ ID NO: 1981069 - RNA, 19 nt, Homo sapiens
  misc_RNA (1)...(19): siRNA sense strand
caaaugccaaagagaauga

SEQ ID NO: 1981070 - RNA, 19 nt, Homo sapiens
  misc_RNA (1)...(19): siRNA sense strand
ucaaggccuuucacaucua

SEQ ID NO: 1981071 - RNA, 19 nt, Homo sapiens
  misc_RNA (1)...(19): siRNA sense strand
gagaggcgaaggagaaaga

SEQ ID NO: 1981072 - RNA, 19 nt, Homo sapiens
  misc_RNA (1)...(19): siRNA sense strand
guucagagcacaggaaaga

SEQ ID NO: 1981073 - RNA, 19 nt, Homo sapiens
  misc_RNA (1)...(19): siRNA sense strand
gcaggaagugacagccaua

SEQ ID NO: 1981074 - RNA, 19 nt, Homo sapiens
  misc_RNA (1)...(19): siRNA sense strand
agaccaaaccuuccaguga

SEQ ID NO: 1981075 - RNA, 19 nt, Homo sapiens
  misc_RNA (1)...(19): siRNA sense strand
gagagacaaaugccaaaga

SEQ ID NO: 1981076 - RNA, 19 nt, Homo sapiens
  misc_RNA (1)...(19): siRNA sense strand
aaucagaaccuguaguuuc

SEQ ID NO: 1981077 - RNA, 19 nt, Homo sapiens
  misc_RNA (1)...(19): siRNA sense strand
uguccucucugucuaaaga

SEQ ID NO: 1981078 - RNA, 19 nt, Homo sapiens
  misc_RNA (1)...(19): siRNA sense strand
ggcagagacuucccuugga

SEQ ID NO: 1981079 - RNA, 19 nt, Homo sapiens
  misc_RNA (1)...(19): siRNA sense strand
aaagacaauggaugugaua

SEQ ID NO: 1981080 - RNA, 19 nt, Homo sapiens
  misc_RNA (1)...(19): siRNA sense strand
aaacagugccuccuacauc

SEQ ID NO: 1981081 - RNA, 19 nt, Homo sapiens
  misc_RNA (1)...(19): siRNA sense strand
caucaaacagugccuccua

SEQ ID NO: 1981082 - RNA, 19 nt, Homo sapiens
  misc_RNA (1)...(19): siRNA sense strand
ccgaaaugcuacacuaucu

SEQ ID NO: 1981083 - RNA, 19 nt, Homo sapiens
  misc_RNA (1)...(19): siRNA sense strand
gacaaaugccaaagagaau

SEQ ID NO: 1981084 - RNA, 19 nt, Homo sapiens
  misc_RNA (1)...(19): siRNA sense strand
uggagaugcuuucccaaga

SEQ ID NO: 1981085 - RNA, 19 nt, Homo sapiens
  misc_RNA (1)...(19): siRNA sense strand
gaaaagaccagagaccaaa

SEQ ID NO: 1981086 - RNA, 19 nt, Homo sapiens
  misc_RNA (1)...(19): siRNA sense strand
ugaccaaggugccaaacca

SEQ ID NO: 1981087 - RNA, 19 nt, Homo sapiens
  misc_RNA (1)...(19): siRNA sense strand
ucaggauaauguuuccaaa

SEQ ID NO: 1981088 - RNA, 19 nt, Homo sapiens
  misc_RNA (1)...(19): siRNA sense strand
gggccagaaaccuuuguua

SEQ ID NO: 1981089 - RNA, 19 nt, Homo sapiens
  misc_RNA (1)...(19): siRNA sense strand
ucacugcaguauuucuaga

SEQ ID NO: 1981090 - RNA, 19 nt, Homo sapiens
  misc_RNA (1)...(19): siRNA sense strand
agaaauggcagauguccuu

SEQ ID NO: 1981091 - RNA, 19 nt, Homo sapiens
  misc_RNA (1)...(19): siRNA sense strand
gaguuguccucucugucua

SEQ ID NO: 1981092 - RNA, 19 nt, Homo sapiens
  misc_RNA (1)...(19): siRNA sense strand
ccagaugacaauuguguug

SEQ ID NO: 1981093 - RNA, 19 nt, Homo sapiens
  misc_RNA (1)...(19): siRNA sense strand
gaggauauccaugcguuug

SEQ ID NO: 1981094 - RNA, 19 nt, Homo sapiens
  misc_RNA (1)...(19): siRNA sense strand
uagagcaacucaaagaaac

SEQ ID NO: 1981095 - RNA, 19 nt, Homo sapiens
  misc_RNA (1)...(19): siRNA sense strand
gagauacggaccuccaaug

SEQ ID NO: 1981096 - RNA, 19 nt, Homo sapiens
  misc_RNA (1)...(19): siRNA sense strand
ccuugaagauggaaacugu

SEQ ID NO: 1981097 - RNA, 19 nt, Homo sapiens
  misc_RNA (1)...(19): siRNA sense strand
uauugagacuccacugcua

SEQ ID NO: 1981098 - RNA, 19 nt, Homo sapiens
  misc_RNA (1)...(19): siRNA sense strand
ccuuagaauucauuggaaa

SEQ ID NO: 1981099 - RNA, 19 nt, Homo sapiens
  misc_RNA (1)...(19): siRNA sense strand
aggaaagaguguuauaagu

SEQ ID NO: 1981100 - RNA, 19 nt, Homo sapiens
  misc_RNA (1)...(19): siRNA sense strand
ucauugagaacaagauuga

SEQ ID NO: 1981101 - RNA, 19 nt, Homo sapiens
  misc_RNA (1)...(19): siRNA sense strand
gugccaaaccagagaguaa

SEQ ID NO: 1981102 - RNA, 19 nt, Homo sapiens
  misc_RNA (1)...(19): siRNA sense strand
cugacugccugcucaauug

SEQ ID NO: 1981103 - RNA, 19 nt, Homo sapiens
  misc_RNA (1)...(19): siRNA sense strand
ccaagaauucugagucugu

SEQ ID NO: 1981104 - RNA, 19 nt, Homo sapiens
  misc_RNA (1)...(19): siRNA sense strand
caaugagguuaccguggaa

SEQ ID NO: 1981105 - RNA, 19 nt, Homo sapiens
  misc_RNA (1)...(19): siRNA sense strand
caaaccagagaguaaauca

SEQ ID NO: 1981106 - RNA, 19 nt, Homo sapiens
  misc_RNA (1)...(19): siRNA sense strand
gaacugacugccugcucaa

SEQ ID NO: 1981107 - RNA, 19 nt, Homo sapiens
  misc_RNA (1)...(19): siRNA sense strand
agaagaggaagaagagaaa

SEQ ID NO: 1981108 - RNA, 19 nt, Homo sapiens
  misc_RNA (1)...(19): siRNA sense strand
auuaugggcuacucuuuga

SEQ ID NO: 1981109 - RNA, 19 nt, Homo sapiens
  misc_RNA (1)...(19): siRNA sense strand
guauguagcaggagagaca

SEQ ID NO: 1981110 - RNA, 19 nt, Homo sapiens
  misc_RNA (1)...(19): siRNA sense strand
agauguccuuaacccauua

SEQ ID NO: 1981111 - RNA, 19 nt, Homo sapiens
  misc_RNA (1)...(19): siRNA sense strand
caauuguguuguguaaaga

SEQ ID NO: 1981112 - RNA, 19 nt, Homo sapiens
  misc_RNA (1)...(19): siRNA sense strand
gugaagaagaggaagaaga

SEQ ID NO: 1981113 - RNA, 19 nt, Homo sapiens
  misc_RNA (1)...(19): siRNA sense strand
ucugaguggagaagaauua

SEQ ID NO: 1981114 - RNA, 19 nt, Homo sapiens
  misc_RNA (1)...(19): siRNA sense strand
caagaaagugaaauaaagg

SEQ ID NO: 1981115 - RNA, 19 nt, Homo sapiens
  misc_RNA (1)...(19): siRNA sense strand
cugaugaaccgaaaugcua

SEQ ID NO: 1981116 - RNA, 19 nt, Homo sapiens
  misc_RNA (1)...(19): siRNA sense strand
gcacaggaaagaguguuau

SEQ ID NO: 1981117 - RNA, 19 nt, Homo sapiens
  misc_RNA (1)...(19): siRNA sense strand
agagacaaaugccaaagag

SEQ ID NO: 1981118 - RNA, 19 nt, Homo sapiens
  misc_RNA (1)...(19): siRNA sense strand
gguguauucucuaccaucu

SEQ ID NO: 1981119 - RNA, 19 nt, Homo sapiens
  misc_RNA (1)...(19): siRNA sense strand
agaaauaccgcccacgaau

SEQ ID NO: 1981120 - RNA, 19 nt, Homo sapiens
  misc_RNA (1)...(19): siRNA sense strand
uuagagcaacucaaagaaa

SEQ ID NO: 1981121 - RNA, 19 nt, Homo sapiens
  misc_RNA (1)...(19): siRNA sense strand
uaccaucucuacugcuguu

SEQ ID NO: 1981122 - RNA, 19 nt, Homo sapiens
  misc_RNA (1)...(19): siRNA sense strand
cagaaaccuuuguuagaac

SEQ ID NO: 1981123 - RNA, 19 nt, Homo sapiens
  misc_RNA (1)...(19): siRNA sense strand
ccacaaaacagcugcauug

SEQ ID NO: 1981124 - RNA, 19 nt, Homo sapiens
  misc_RNA (1)...(19): siRNA sense strand
ugaagaagaggaagaagag

SEQ ID NO: 1981125 - RNA, 19 nt, Homo sapiens
  misc_RNA (1)...(19): siRNA sense strand
cccaagaaagugaaauaaa

SEQ ID NO: 1981126 - RNA, 19 nt, Homo sapiens
  misc_RNA (1)...(19): siRNA sense strand
caaggccuuucacaucuag

SEQ ID NO: 1981127 - RNA, 19 nt, Homo sapiens
  misc_RNA (1)...(19): siRNA sense strand
ggugguaucuugucuguuu

SEQ ID NO: 1981128 - RNA, 19 nt, Homo sapiens
  misc_RNA (1)...(19): siRNA sense strand
gauaucaguuccauguaua

SEQ ID NO: 1981129 - RNA, 19 nt, Homo sapiens
  misc_RNA (1)...(19): siRNA sense strand
ggauuuguuucguuuguua

SEQ ID NO: 1981130 - RNA, 19 nt, Homo sapiens
  misc_RNA (1)...(19): siRNA sense strand
gauaucaguugccuguaua

SEQ ID NO: 1981131 - RNA, 19 nt, Homo sapiens
  misc_RNA (1)...(19): siRNA sense strand
gauaucaguucccuguaua

SEQ ID NO: 1981132 - RNA, 19 nt, Homo sapiens
  misc_RNA (1)...(19): siRNA sense strand
gauaucaguugccuguaua

SEQ ID NO: 1981133 - RNA, 19 nt, Homo sapiens
  misc_RNA (1)...(19): siRNA sense strand
gauaucaguucccuguaua

SEQ ID NO: 1981134 - RNA, 19 nt, Homo sapiens
  misc_RNA (1)...(19): siRNA sense strand
gauaucaguugccuguaua

SEQ ID NO: 1981135 - RNA, 19 nt, Homo sapiens
  misc_RNA (1)...(19): siRNA sense strand
gauaucaguucccuguaua

SEQ ID NO: 1981136 - RNA, 19 nt, Homo sapiens
  misc_RNA (1)...(19): siRNA sense strand
gauaucaguugccuguaua

SEQ ID NO: 1981137 - RNA, 19 nt, Homo sapiens
  misc_RNA (1)...(19): siRNA sense strand
gauaucaguucccuguaua

SEQ ID NO: 1981138 - RNA, 19 nt, Homo sapiens
  misc_RNA (1)...(19): siRNA sense strand
gauaucaguugccuguaua

SEQ ID NO: 1981139 - RNA, 19 nt, Homo sapiens
  misc_RNA (1)...(19): siRNA sense strand
gauaucaguugccuguaua

SEQ ID NO: 1981140 - RNA, 19 nt, Homo sapiens
  misc_RNA (1)...(19): siRNA sense strand
gauaguaggaucacagaua

SEQ ID NO: 1981141 - RNA, 19 nt, Homo sapiens
  misc_RNA (1)...(19): siRNA sense strand
ggauaucaguuccauguau

SEQ ID NO: 1981142 - RNA, 19 nt, Homo sapiens
  misc_RNA (1)...(19): siRNA sense strand
gaugucaguugcuuguaua

SEQ ID NO: 1981143 - RNA, 19 nt, Homo sapiens
  misc_RNA (1)...(19): siRNA sense strand
gucaguugcuuguauauaa

SEQ ID NO: 1981144 - RNA, 19 nt, Homo sapiens
  misc_RNA (1)...(19): siRNA sense strand
ggauaucaguugccuguau

SEQ ID NO: 1981145 - RNA, 19 nt, Homo sapiens
  misc_RNA (1)...(19): siRNA sense strand
ggauaucaguugccuguau

SEQ ID NO: 1981146 - RNA, 19 nt, Homo sapiens
  misc_RNA (1)...(19): siRNA sense strand
ggauaucaguucccuguau

SEQ ID NO: 1981147 - RNA, 19 nt, Homo sapiens
  misc_RNA (1)...(19): siRNA sense strand
ggauaucaguugccuguau

SEQ ID NO: 1981148 - RNA, 19 nt, Homo sapiens
  misc_RNA (1)...(19): siRNA sense strand
ggauaucaguucccuguau

SEQ ID NO: 1981149 - RNA, 19 nt, Homo sapiens
  misc_RNA (1)...(19): siRNA sense strand
ggauaucaguugccuguau

SEQ ID NO: 1981150 - RNA, 19 nt, Homo sapiens
  misc_RNA (1)...(19): siRNA sense strand
ggauaucaguucccuguau

SEQ ID NO: 1981151 - RNA, 19 nt, Homo sapiens
  misc_RNA (1)...(19): siRNA sense strand
ggauaucaguugccuguau

SEQ ID NO: 1981152 - RNA, 19 nt, Homo sapiens
  misc_RNA (1)...(19): siRNA sense strand
ggauaucaguucccuguau

SEQ ID NO: 1981153 - RNA, 19 nt, Homo sapiens
  misc_RNA (1)...(19): siRNA sense strand
ggauaucaguugccuguau

SEQ ID NO: 1981154 - RNA, 19 nt, Homo sapiens
  misc_RNA (1)...(19): siRNA sense strand
gaacugguguguccaaagg

SEQ ID NO: 1981155 - RNA, 19 nt, Homo sapiens
  misc_RNA (1)...(19): siRNA sense strand
gagcaaaggagaaaucugu

SEQ ID NO: 1981156 - RNA, 19 nt, Homo sapiens
  misc_RNA (1)...(19): siRNA sense strand
ggaugucaguugcuuguau

SEQ ID NO: 1981157 - RNA, 19 nt, Homo sapiens
  misc_RNA (1)...(19): siRNA sense strand
gcagccacguccuuuggua

SEQ ID NO: 1981158 - RNA, 19 nt, Homo sapiens
  misc_RNA (1)...(19): siRNA sense strand
ggaugaaacugagauugga

SEQ ID NO: 1981159 - RNA, 19 nt, Homo sapiens
  misc_RNA (1)...(19): siRNA sense strand
ccacguccuuugguaguua

SEQ ID NO: 1981160 - RNA, 19 nt, Homo sapiens
  misc_RNA (1)...(19): siRNA sense strand
ucaguugccuguauauaau

SEQ ID NO: 1981161 - RNA, 19 nt, Homo sapiens
  misc_RNA (1)...(19): siRNA sense strand
ucaguugccuguauauaau

SEQ ID NO: 1981162 - RNA, 19 nt, Homo sapiens
  misc_RNA (1)...(19): siRNA sense strand
ucaguugccuguauauaau

SEQ ID NO: 1981163 - RNA, 19 nt, Homo sapiens
  misc_RNA (1)...(19): siRNA sense strand
ucaggucacugcuggauau

SEQ ID NO: 1981164 - RNA, 19 nt, Homo sapiens
  misc_RNA (1)...(19): siRNA sense strand
ucaggucacugcuggauau

SEQ ID NO: 1981165 - RNA, 19 nt, Homo sapiens
  misc_RNA (1)...(19): siRNA sense strand
cagauacauuuccauggua

SEQ ID NO: 1981166 - RNA, 19 nt, Homo sapiens
  misc_RNA (1)...(19): siRNA sense strand
ucaguugccuguauacaau

SEQ ID NO: 1981167 - RNA, 19 nt, Homo sapiens
  misc_RNA (1)...(19): siRNA sense strand
ucaguucccuguauacaau

SEQ ID NO: 1981168 - RNA, 19 nt, Homo sapiens
  misc_RNA (1)...(19): siRNA sense strand
ucaguugccuguauacaau

SEQ ID NO: 1981169 - RNA, 19 nt, Homo sapiens
  misc_RNA (1)...(19): siRNA sense strand
ucaguucccuguauacaau

SEQ ID NO: 1981170 - RNA, 19 nt, Homo sapiens
  misc_RNA (1)...(19): siRNA sense strand
ucaguugccuguauacaau

SEQ ID NO: 1981171 - RNA, 19 nt, Homo sapiens
  misc_RNA (1)...(19): siRNA sense strand
ucaguucccuguauacaau

SEQ ID NO: 1981172 - RNA, 19 nt, Homo sapiens
  misc_RNA (1)...(19): siRNA sense strand
ucaguucccuguauacaau

SEQ ID NO: 1981173 - RNA, 19 nt, Homo sapiens
  misc_RNA (1)...(19): siRNA sense strand
uauccaagaucaccauuuc

SEQ ID NO: 1981174 - RNA, 19 nt, Homo sapiens
  misc_RNA (1)...(19): siRNA sense strand
gaucacagauacauuucca

SEQ ID NO: 1981175 - RNA, 19 nt, Homo sapiens
  misc_RNA (1)...(19): siRNA sense strand
gcuauggauuuguuucguu

SEQ ID NO: 1981176 - RNA, 19 nt, Homo sapiens
  misc_RNA (1)...(19): siRNA sense strand
gaccgaagcauacaaaugg

SEQ ID NO: 1981177 - RNA, 19 nt, Homo sapiens
  misc_RNA (1)...(19): siRNA sense strand
ggaccgaagcauacaaaug

SEQ ID NO: 1981178 - RNA, 19 nt, Homo sapiens
  misc_RNA (1)...(19): siRNA sense strand
uacaaauggugguaucuug

SEQ ID NO: 1981179 - RNA, 19 nt, Homo sapiens
  misc_RNA (1)...(19): siRNA sense strand
gugaaagaagugaagauaa

SEQ ID NO: 1981180 - RNA, 19 nt, Homo sapiens
  misc_RNA (1)...(19): siRNA sense strand
ucaguuccauguauacaau

SEQ ID NO: 1981181 - RNA, 19 nt, Homo sapiens
  misc_RNA (1)...(19): siRNA sense strand
gaaagaagugaagauaauc

SEQ ID NO: 1981182 - RNA, 19 nt, Homo sapiens
  misc_RNA (1)...(19): siRNA sense strand
cuauggauuuguuucguuu

SEQ ID NO: 1981183 - RNA, 19 nt, Homo sapiens
  misc_RNA (1)...(19): siRNA sense strand
uauccaaguucaccauuuc

SEQ ID NO: 1981184 - RNA, 19 nt, Homo sapiens
  misc_RNA (1)...(19): siRNA sense strand
uaggaucacagauacauuu

SEQ ID NO: 1981185 - RNA, 19 nt, Homo sapiens
  misc_RNA (1)...(19): siRNA sense strand
guuaugugcucgucaugug

SEQ ID NO: 1981186 - RNA, 19 nt, Homo sapiens
  misc_RNA (1)...(19): siRNA sense strand
ucaagucgccacuggauau

SEQ ID NO: 1981187 - RNA, 19 nt, Homo sapiens
  misc_RNA (1)...(19): siRNA sense strand
ucaagucgccacuggauau

SEQ ID NO: 1981188 - RNA, 19 nt, Homo sapiens
  misc_RNA (1)...(19): siRNA sense strand
ucaagucgccacuggauau

SEQ ID NO: 1981189 - RNA, 19 nt, Homo sapiens
  misc_RNA (1)...(19): siRNA sense strand
uaucagccauuuccugcuu

SEQ ID NO: 1981190 - RNA, 19 nt, Homo sapiens
  misc_RNA (1)...(19): siRNA sense strand
ucaagucgccacuggauau

SEQ ID NO: 1981191 - RNA, 19 nt, Homo sapiens
  misc_RNA (1)...(19): siRNA sense strand
uaucagccauuuccugcuu

SEQ ID NO: 1981192 - RNA, 19 nt, Homo sapiens
  misc_RNA (1)...(19): siRNA sense strand
acagauacauuuccauggu

SEQ ID NO: 1981193 - RNA, 19 nt, Homo sapiens
  misc_RNA (1)...(19): siRNA sense strand
agauacauuuccaugguaa

SEQ ID NO: 1981194 - RNA, 19 nt, Homo sapiens
  misc_RNA (1)...(19): siRNA sense strand
uguauacaauuaccagaug

SEQ ID NO: 1981195 - RNA, 19 nt, Homo sapiens
  misc_RNA (1)...(19): siRNA sense strand
uaucuugucuguuuaaucc

SEQ ID NO: 1981196 - RNA, 19 nt, Homo sapiens
  misc_RNA (1)...(19): siRNA sense strand
gguguuaccagaaggcaaa

SEQ ID NO: 1981197 - RNA, 19 nt, Homo sapiens
  misc_RNA (1)...(19): siRNA sense strand
aagauaaucacgaaucgaa

SEQ ID NO: 1981198 - RNA, 19 nt, Homo sapiens
  misc_RNA (1)...(19): siRNA sense strand
gugguaucuugucuguuua

SEQ ID NO: 1981199 - RNA, 19 nt, Homo sapiens
  misc_RNA (1)...(19): siRNA sense strand
uauccaaauucaccaguuc

SEQ ID NO: 1981200 - RNA, 19 nt, Homo sapiens
  misc_RNA (1)...(19): siRNA sense strand
uauccaaauucaccaguuc

SEQ ID NO: 1981201 - RNA, 19 nt, Homo sapiens
  misc_RNA (1)...(19): siRNA sense strand
uauccaaauucaccaguuc

SEQ ID NO: 1981202 - RNA, 19 nt, Homo sapiens
  misc_RNA (1)...(19): siRNA sense strand
gaagcugggcccugcaauc

SEQ ID NO: 1981203 - RNA, 19 nt, Homo sapiens
  misc_RNA (1)...(19): siRNA sense strand
ggucaccacuggauaucag

SEQ ID NO: 1981204 - RNA, 19 nt, Homo sapiens
  misc_RNA (1)...(19): siRNA sense strand
ggucaccacuggauaucag

SEQ ID NO: 1981205 - RNA, 19 nt, Homo sapiens
  misc_RNA (1)...(19): siRNA sense strand
ggucaccacuggauaucag

SEQ ID NO: 1981206 - RNA, 19 nt, Homo sapiens
  misc_RNA (1)...(19): siRNA sense strand
ggucaccacuggauaucag

SEQ ID NO: 1981207 - RNA, 19 nt, Homo sapiens
  misc_RNA (1)...(19): siRNA sense strand
gaauugaugcuaggaugga

SEQ ID NO: 1981208 - RNA, 19 nt, Homo sapiens
  misc_RNA (1)...(19): siRNA sense strand
ggucaccacuggauaucag

SEQ ID NO: 1981209 - RNA, 19 nt, Homo sapiens
  misc_RNA (1)...(19): siRNA sense strand
aaaguuaugugcucgucau

SEQ ID NO: 1981210 - RNA, 19 nt, Homo sapiens
  misc_RNA (1)...(19): siRNA sense strand
gguagauacgguucaguga

SEQ ID NO: 1981211 - RNA, 19 nt, Homo sapiens
  misc_RNA (1)...(19): siRNA sense strand
ggcggaauccaaacacuga

SEQ ID NO: 1981212 - RNA, 19 nt, Homo sapiens
  misc_RNA (1)...(19): siRNA sense strand
gaugaaacugagauuggaa

SEQ ID NO: 1981213 - RNA, 19 nt, Homo sapiens
  misc_RNA (1)...(19): siRNA sense strand
ggucacugcuggauaucag

SEQ ID NO: 1981214 - RNA, 19 nt, Homo sapiens
  misc_RNA (1)...(19): siRNA sense strand
uuauccaaguucaccauuu

SEQ ID NO: 1981215 - RNA, 19 nt, Homo sapiens
  misc_RNA (1)...(19): siRNA sense strand
ggucacugcuggauaucag

SEQ ID NO: 1981216 - RNA, 19 nt, Homo sapiens
  misc_RNA (1)...(19): siRNA sense strand
cucagcacguucaggcuua

SEQ ID NO: 1981217 - RNA, 19 nt, Homo sapiens
  misc_RNA (1)...(19): siRNA sense strand
ggucaggucaucacuggau

SEQ ID NO: 1981218 - RNA, 19 nt, Homo sapiens
  misc_RNA (1)...(19): siRNA sense strand
ugaagauaaucacgaaucg

SEQ ID NO: 1981219 - RNA, 19 nt, Homo sapiens
  misc_RNA (1)...(19): siRNA sense strand
gauaaucacgaaucgaacu

SEQ ID NO: 1981220 - RNA, 19 nt, Homo sapiens
  misc_RNA (1)...(19): siRNA sense strand
caaauccugagacuccaaa

SEQ ID NO: 1981221 - RNA, 19 nt, Homo sapiens
  misc_RNA (1)...(19): siRNA sense strand
gaugcuaggauggaugaaa

SEQ ID NO: 1981222 - RNA, 19 nt, Homo sapiens
  misc_RNA (1)...(19): siRNA sense strand
gaagauaaucacgaaucga

SEQ ID NO: 1981223 - RNA, 19 nt, Homo sapiens
  misc_RNA (1)...(19): siRNA sense strand
auaguaggaucacagauac

SEQ ID NO: 1981224 - RNA, 19 nt, Homo sapiens
  misc_RNA (1)...(19): siRNA sense strand
uuaucccgauucagcauuu

SEQ ID NO: 1981225 - RNA, 19 nt, Homo sapiens
  misc_RNA (1)...(19): siRNA sense strand
agugaaagaagugaagaua

SEQ ID NO: 1981226 - RNA, 19 nt, Homo sapiens
  misc_RNA (1)...(19): siRNA sense strand
gcaaauccugagacuccaa

SEQ ID NO: 1981227 - RNA, 19 nt, Homo sapiens
  misc_RNA (1)...(19): siRNA sense strand
agaagagccugaccuauua

SEQ ID NO: 1981228 - RNA, 19 nt, Homo sapiens
  misc_RNA (1)...(19): siRNA sense strand
gagaagagccugaccuauu

SEQ ID NO: 1981229 - RNA, 19 nt, Homo sapiens
  misc_RNA (1)...(19): siRNA sense strand
gcaggaaugucaagcagaa

SEQ ID NO: 1981230 - RNA, 19 nt, Homo sapiens
  misc_RNA (1)...(19): siRNA sense strand
acaaagacccguauaguuu

SEQ ID NO: 1981231 - RNA, 19 nt, Homo sapiens
  misc_RNA (1)...(19): siRNA sense strand
gaggacaucugcuggaaga

SEQ ID NO: 1981232 - RNA, 19 nt, Homo sapiens
  misc_RNA (1)...(19): siRNA sense strand
cagaagagccugcaaguga

SEQ ID NO: 1981233 - RNA, 19 nt, Homo sapiens
  misc_RNA (1)...(19): siRNA sense strand
ggaagaaccucucuaucca

SEQ ID NO: 1981234 - RNA, 19 nt, Homo sapiens
  misc_RNA (1)...(19): siRNA sense strand
uagcaaaccuacagacuga

SEQ ID NO: 1981235 - RNA, 19 nt, Homo sapiens
  misc_RNA (1)...(19): siRNA sense strand
ccaccuacauccugaaaga

SEQ ID NO: 1981236 - RNA, 19 nt, Homo sapiens
  misc_RNA (1)...(19): siRNA sense strand
ugaccaaagucuacauauu

SEQ ID NO: 1981237 - RNA, 19 nt, Homo sapiens
  misc_RNA (1)...(19): siRNA sense strand
gaccaaagucuacauauuc

SEQ ID NO: 1981238 - RNA, 19 nt, Homo sapiens
  misc_RNA (1)...(19): siRNA sense strand
gacaaagacccguauaguu

SEQ ID NO: 1981239 - RNA, 19 nt, Homo sapiens
  misc_RNA (1)...(19): siRNA sense strand
gcauugcccuggugucaga

SEQ ID NO: 1981240 - RNA, 19 nt, Homo sapiens
  misc_RNA (1)...(19): siRNA sense strand
gcucacaccugcuuuggau

SEQ ID NO: 1981241 - RNA, 19 nt, Homo sapiens
  misc_RNA (1)...(19): siRNA sense strand
gcacaucaucuuccuguug

SEQ ID NO: 1981242 - RNA, 19 nt, Homo sapiens
  misc_RNA (1)...(19): siRNA sense strand
ugaccagggugccuucuuu

SEQ ID NO: 1981243 - RNA, 19 nt, Homo sapiens
  misc_RNA (1)...(19): siRNA sense strand
gcaccacacucaguccauu

SEQ ID NO: 1981244 - RNA, 19 nt, Homo sapiens
  misc_RNA (1)...(19): siRNA sense strand
caacaagacuuugaaaaug

SEQ ID NO: 1981245 - RNA, 19 nt, Homo sapiens
  misc_RNA (1)...(19): siRNA sense strand
gaaccaggccuuccaguac

SEQ ID NO: 1981246 - RNA, 19 nt, Homo sapiens
  misc_RNA (1)...(19): siRNA sense strand
cagggugccuucuuuguga

SEQ ID NO: 1981247 - RNA, 19 nt, Homo sapiens
  misc_RNA (1)...(19): siRNA sense strand
caaguuuaaugucaccaaa

SEQ ID NO: 1981248 - RNA, 19 nt, Homo sapiens
  misc_RNA (1)...(19): siRNA sense strand
ggacaaagacccguauagu

SEQ ID NO: 1981249 - RNA, 19 nt, Homo sapiens
  misc_RNA (1)...(19): siRNA sense strand
ccacuguccugcucauaga

SEQ ID NO: 1981250 - RNA, 19 nt, Homo sapiens
  misc_RNA (1)...(19): siRNA sense strand
caaagucuacauauucuug

SEQ ID NO: 1981251 - RNA, 19 nt, Homo sapiens
  misc_RNA (1)...(19): siRNA sense strand
caucuuugcugucauuuac

SEQ ID NO: 1981252 - RNA, 19 nt, Homo sapiens
  misc_RNA (1)...(19): siRNA sense strand
acacucaguccauuaagua

SEQ ID NO: 1981253 - RNA, 19 nt, Homo sapiens
  misc_RNA (1)...(19): siRNA sense strand
cuacacugcuggagucuca

SEQ ID NO: 1981254 - RNA, 19 nt, Homo sapiens
  misc_RNA (1)...(19): siRNA sense strand
agacagcgaguccagauuu

SEQ ID NO: 1981255 - RNA, 19 nt, Homo sapiens
  misc_RNA (1)...(19): siRNA sense strand
gaugaccaaagucuacaua

SEQ ID NO: 1981256 - RNA, 19 nt, Homo sapiens
  misc_RNA (1)...(19): siRNA sense strand
caaguggacagucaccuuu

SEQ ID NO: 1981257 - RNA, 19 nt, Homo sapiens
  misc_RNA (1)...(19): siRNA sense strand
ccuacauccugaaagauuu

SEQ ID NO: 1981258 - RNA, 19 nt, Homo sapiens
  misc_RNA (1)...(19): siRNA sense strand
gugaagugcugggcuguga

SEQ ID NO: 1981259 - RNA, 19 nt, Homo sapiens
  misc_RNA (1)...(19): siRNA sense strand
ggacaacaauagcaaaccu

SEQ ID NO: 1981260 - RNA, 19 nt, Homo sapiens
  misc_RNA (1)...(19): siRNA sense strand
caacguggccaaacugauc

SEQ ID NO: 1981261 - RNA, 19 nt, Homo sapiens
  misc_RNA (1)...(19): siRNA sense strand
caccaucuuugcugucauu

SEQ ID NO: 1981262 - RNA, 19 nt, Homo sapiens
  misc_RNA (1)...(19): siRNA sense strand
agaaguccauggccaccua

SEQ ID NO: 1981263 - RNA, 19 nt, Homo sapiens
  misc_RNA (1)...(19): siRNA sense strand
cgugugaggugguugaugu

SEQ ID NO: 1981264 - RNA, 19 nt, Homo sapiens
  misc_RNA (1)...(19): siRNA sense strand
caagcccuguggccaguuu

SEQ ID NO: 1981265 - RNA, 19 nt, Homo sapiens
  misc_RNA (1)...(19): siRNA sense strand
gaauggccuucgucaccuu

SEQ ID NO: 1981266 - RNA, 19 nt, Homo sapiens
  misc_RNA (1)...(19): siRNA sense strand
ggucucaccagucuagauu

SEQ ID NO: 1981267 - RNA, 19 nt, Homo sapiens
  misc_RNA (1)...(19): siRNA sense strand
ccaggucucauccucuaua

SEQ ID NO: 1981268 - RNA, 19 nt, Homo sapiens
  misc_RNA (1)...(19): siRNA sense strand
uuucagagauugucaucga

SEQ ID NO: 1981269 - RNA, 19 nt, Homo sapiens
  misc_RNA (1)...(19): siRNA sense strand
gggaggacgccauccacua

SEQ ID NO: 1981270 - RNA, 19 nt, Homo sapiens
  misc_RNA (1)...(19): siRNA sense strand
cugaauaacccgaucauca

SEQ ID NO: 1981271 - RNA, 19 nt, Homo sapiens
  misc_RNA (1)...(19): siRNA sense strand
gcuggaagaaccucucuau

SEQ ID NO: 1981272 - RNA, 19 nt, Homo sapiens
  misc_RNA (1)...(19): siRNA sense strand
cgccaucucuuacuacaca

SEQ ID NO: 1981273 - RNA, 19 nt, Homo sapiens
  misc_RNA (1)...(19): siRNA sense strand
gcagacagcgaguccagau

SEQ ID NO: 1981274 - RNA, 19 nt, Homo sapiens
  misc_RNA (1)...(19): siRNA sense strand
gaccacacccuccaucauc

SEQ ID NO: 1981275 - RNA, 19 nt, Homo sapiens
  misc_RNA (1)...(19): siRNA sense strand
ggaggacaacaauagcaaa

SEQ ID NO: 1981276 - RNA, 19 nt, Homo sapiens
  misc_RNA (1)...(19): siRNA sense strand
gacagcgaguccagauuuc

SEQ ID NO: 1981277 - RNA, 19 nt, Homo sapiens
  misc_RNA (1)...(19): siRNA sense strand
gaggaucacagaggaagaa

SEQ ID NO: 1981278 - RNA, 19 nt, Homo sapiens
  misc_RNA (1)...(19): siRNA sense strand
gcuacaacguggccaaacu

SEQ ID NO: 1981279 - RNA, 19 nt, Homo sapiens
  misc_RNA (1)...(19): siRNA sense strand
guccagauuucagagauug

SEQ ID NO: 1981280 - RNA, 19 nt, Homo sapiens
  misc_RNA (1)...(19): siRNA sense strand
gaucaucagccaguucuuc

SEQ ID NO: 1981281 - RNA, 19 nt, Homo sapiens
  misc_RNA (1)...(19): siRNA sense strand
cucuauaccuuccgcauga

SEQ ID NO: 1981282 - RNA, 19 nt, Homo sapiens
  misc_RNA (1)...(19): siRNA sense strand
gaguccagauuucagagau

SEQ ID NO: 1981283 - RNA, 19 nt, Homo sapiens
  misc_RNA (1)...(19): siRNA sense strand
gagccugaccuauuacaca

SEQ ID NO: 1981284 - RNA, 19 nt, Homo sapiens
  misc_RNA (1)...(19): siRNA sense strand
ggaggacgccauccacuac

SEQ ID NO: 1981285 - RNA, 19 nt, Homo sapiens
  misc_RNA (1)...(19): siRNA sense strand
gucagagccuucagugcaa

SEQ ID NO: 1981286 - RNA, 19 nt, Homo sapiens
  misc_RNA (1)...(19): siRNA sense strand
ugccaggucucauccucua

SEQ ID NO: 1981287 - RNA, 19 nt, Homo sapiens
  misc_RNA (1)...(19): siRNA sense strand
ucacaggacuccccagaga

SEQ ID NO: 1981288 - RNA, 19 nt, Homo sapiens
  misc_RNA (1)...(19): siRNA sense strand
gacaacaauagcaaaccua

SEQ ID NO: 1981289 - RNA, 19 nt, Homo sapiens
  misc_RNA (1)...(19): siRNA sense strand
gaagagccugcaagugaca

SEQ ID NO: 1981290 - RNA, 19 nt, Homo sapiens
  misc_RNA (1)...(19): siRNA sense strand
ccaacgacuccuauugcua

SEQ ID NO: 1981291 - RNA, 19 nt, Homo sapiens
  misc_RNA (1)...(19): siRNA sense strand
gcugcuuccuguucuuaau

SEQ ID NO: 1981292 - RNA, 19 nt, Homo sapiens
  misc_RNA (1)...(19): siRNA sense strand
guucuuaaucuugguguuu

SEQ ID NO: 1981293 - RNA, 19 nt, Homo sapiens
  misc_RNA (1)...(19): siRNA sense strand
gcaaaccuacagacugaca

SEQ ID NO: 1981294 - RNA, 19 nt, Homo sapiens
  misc_RNA (1)...(19): siRNA sense strand
ggagaggaucacagaggaa

SEQ ID NO: 1981295 - RNA, 19 nt, Homo sapiens
  misc_RNA (1)...(19): siRNA sense strand
cauuuggccucaucuacau

SEQ ID NO: 1981296 - RNA, 19 nt, Homo sapiens
  misc_RNA (1)...(19): siRNA sense strand
agaaccaggccuuccagua

SEQ ID NO: 1981297 - RNA, 19 nt, Homo sapiens
  misc_RNA (1)...(19): siRNA sense strand
gagucucacuggaccaagu

SEQ ID NO: 1981298 - RNA, 19 nt, Homo sapiens
  misc_RNA (1)...(19): siRNA sense strand
ccaccauggacaaguuuaa

SEQ ID NO: 1981299 - RNA, 19 nt, Homo sapiens
  misc_RNA (1)...(19): siRNA sense strand
caaagacccguauaguuuu

SEQ ID NO: 1981300 - RNA, 19 nt, Homo sapiens
  misc_RNA (1)...(19): siRNA sense strand
gcaagugacaaaggaagug

SEQ ID NO: 1981301 - RNA, 19 nt, Homo sapiens
  misc_RNA (1)...(19): siRNA sense strand
cuacauauucuugaucuuc

SEQ ID NO: 1981302 - RNA, 19 nt, Homo sapiens
  misc_RNA (1)...(19): siRNA sense strand
ugaauaacccgaucaucag

SEQ ID NO: 1981303 - RNA, 19 nt, Homo sapiens
  misc_RNA (1)...(19): siRNA sense strand
gcaucaacuucacccucuu

SEQ ID NO: 1981304 - RNA, 19 nt, Homo sapiens
  misc_RNA (1)...(19): siRNA sense strand
caccacacucaguccauua

SEQ ID NO: 1981305 - RNA, 19 nt, Homo sapiens
  misc_RNA (1)...(19): siRNA sense strand
cagagauugucaucgacuu

SEQ ID NO: 1981306 - RNA, 19 nt, Homo sapiens
  misc_RNA (1)...(19): siRNA sense strand
cgacuccuauugcuacaac

SEQ ID NO: 1981307 - RNA, 19 nt, Homo sapiens
  misc_RNA (1)...(19): siRNA sense strand
ccauccaugcgcugaauaa

SEQ ID NO: 1981308 - RNA, 19 nt, Homo sapiens
  misc_RNA (1)...(19): siRNA sense strand
ccauggacaaguuuaaugu

SEQ ID NO: 1981309 - RNA, 19 nt, Homo sapiens
  misc_RNA (1)...(19): siRNA sense strand
gcaagugucagagccuuca

SEQ ID NO: 1981310 - RNA, 19 nt, Homo sapiens
  misc_RNA (1)...(19): siRNA sense strand
gacgccaucucuuacuaca

SEQ ID NO: 1981311 - RNA, 19 nt, Homo sapiens
  misc_RNA (1)...(19): siRNA sense strand
ugaucuaccugugcaagga

SEQ ID NO: 1981312 - RNA, 19 nt, Homo sapiens
  misc_RNA (1)...(19): siRNA sense strand
acgcguaucccacguguga

SEQ ID NO: 1981313 - RNA, 19 nt, Homo sapiens
  misc_RNA (1)...(19): siRNA sense strand
gggaggacaacaauagcaa

SEQ ID NO: 1981314 - RNA, 19 nt, Homo sapiens
  misc_RNA (1)...(19): siRNA sense strand
ccagagaugccaggaagga

SEQ ID NO: 1981315 - RNA, 19 nt, Homo sapiens
  misc_RNA (1)...(19): siRNA sense strand
cagcugcuuccuguucuua

SEQ ID NO: 1981316 - RNA, 19 nt, Homo sapiens
  misc_RNA (1)...(19): siRNA sense strand
ucauagacgucagcugcuu

SEQ ID NO: 1981317 - RNA, 19 nt, Homo sapiens
  misc_RNA (1)...(19): siRNA sense strand
gaagauucugggacuaugg

SEQ ID NO: 1981318 - RNA, 19 nt, Homo sapiens
  misc_RNA (1)...(19): siRNA sense strand
gaagugcugggcugugagu

SEQ ID NO: 1981319 - RNA, 19 nt, Homo sapiens
  misc_RNA (1)...(19): siRNA sense strand
ucauuuaccucuucuucac

SEQ ID NO: 1981320 - RNA, 19 nt, Homo sapiens
  misc_RNA (1)...(19): siRNA sense strand
ggcacaaccucuacuucgu

SEQ ID NO: 1981321 - RNA, 19 nt, Homo sapiens
  misc_RNA (1)...(19): siRNA sense strand
ucagagccuucagugcaaa

SEQ ID NO: 1981322 - RNA, 19 nt, Homo sapiens
  misc_RNA (1)...(19): siRNA sense strand
ccaaguggacagucaccuu

SEQ ID NO: 1981323 - RNA, 19 nt, Homo sapiens
  misc_RNA (1)...(19): siRNA sense strand
ccgccacucuguucaccuu

SEQ ID NO: 1981324 - RNA, 19 nt, Homo sapiens
  misc_RNA (1)...(19): siRNA sense strand
ggccuuccaguacgaguuu

SEQ ID NO: 1981325 - RNA, 19 nt, Homo sapiens
  misc_RNA (1)...(19): siRNA sense strand
gaccagggugccuucuuug

SEQ ID NO: 1981326 - RNA, 19 nt, Homo sapiens
  misc_RNA (1)...(19): siRNA sense strand
ggacaucugcuggaagaac

SEQ ID NO: 1981327 - RNA, 19 nt, Homo sapiens
  misc_RNA (1)...(19): siRNA sense strand
caagaaaucuccaccagaa

SEQ ID NO: 1981328 - RNA, 19 nt, Homo sapiens
  misc_RNA (1)...(19): siRNA sense strand
gagggaagaugucucagua

SEQ ID NO: 1981329 - RNA, 19 nt, Homo sapiens
  misc_RNA (1)...(19): siRNA sense strand
aaacugggcuacucacaaa

SEQ ID NO: 1981330 - RNA, 19 nt, Homo sapiens
  misc_RNA (1)...(19): siRNA sense strand
gaaagucccugaagaucca

SEQ ID NO: 1981331 - RNA, 19 nt, Homo sapiens
  misc_RNA (1)...(19): siRNA sense strand
caagcggguugcucacuua

SEQ ID NO: 1981332 - RNA, 19 nt, Homo sapiens
  misc_RNA (1)...(19): siRNA sense strand
gaagaaacugggaaugauu

SEQ ID NO: 1981333 - RNA, 19 nt, Homo sapiens
  misc_RNA (1)...(19): siRNA sense strand
cgaagaaacugggaaugau

SEQ ID NO: 1981334 - RNA, 19 nt, Homo sapiens
  misc_RNA (1)...(19): siRNA sense strand
gcgaagaaacugggaauga

SEQ ID NO: 1981335 - RNA, 19 nt, Homo sapiens
  misc_RNA (1)...(19): siRNA sense strand
ggacaaacugggcuacuca

SEQ ID NO: 1981336 - RNA, 19 nt, Homo sapiens
  misc_RNA (1)...(19): siRNA sense strand
ccaagcggguugcucacuu

SEQ ID NO: 1981337 - RNA, 19 nt, Homo sapiens
  misc_RNA (1)...(19): siRNA sense strand
ggccugccaucccaacuug

SEQ ID NO: 1981338 - RNA, 19 nt, Homo sapiens
  misc_RNA (1)...(19): siRNA sense strand
accaagagguuccgcuuug

SEQ ID NO: 1981339 - RNA, 19 nt, Homo sapiens
  misc_RNA (1)...(19): siRNA sense strand
acccagugcuuucugcuuu

SEQ ID NO: 1981340 - RNA, 19 nt, Homo sapiens
  misc_RNA (1)...(19): siRNA sense strand
caaacugggcuacucacaa

SEQ ID NO: 1981341 - RNA, 19 nt, Homo sapiens
  misc_RNA (1)...(19): siRNA sense strand
guaccuggauagccugaag

SEQ ID NO: 1981342 - RNA, 19 nt, Homo sapiens
  misc_RNA (1)...(19): siRNA sense strand
agaaaaggauaucaucuug

SEQ ID NO: 1981343 - RNA, 19 nt, Homo sapiens
  misc_RNA (1)...(19): siRNA sense strand
ggacaggaaucaccccaau

SEQ ID NO: 1981344 - RNA, 19 nt, Homo sapiens
  misc_RNA (1)...(19): siRNA sense strand
acauucagcccaacaagaa

SEQ ID NO: 1981345 - RNA, 19 nt, Homo sapiens
  misc_RNA (1)...(19): siRNA sense strand
ggaucaaggcuauguggau

SEQ ID NO: 1981346 - RNA, 19 nt, Homo sapiens
  misc_RNA (1)...(19): siRNA sense strand
gauccaacccagugcuuuc

SEQ ID NO: 1981347 - RNA, 19 nt, Homo sapiens
  misc_RNA (1)...(19): siRNA sense strand
cuauguggaucuugucauc

SEQ ID NO: 1981348 - RNA, 19 nt, Homo sapiens
  misc_RNA (1)...(19): siRNA sense strand
ggagggaagaugucucagu

SEQ ID NO: 1981349 - RNA, 19 nt, Homo sapiens
  misc_RNA (1)...(19): siRNA sense strand
ucaaggcuauguggaucuu

SEQ ID NO: 1981350 - RNA, 19 nt, Homo sapiens
  misc_RNA (1)...(19): siRNA sense strand
gcgggaggacuuagaggaa

SEQ ID NO: 1981351 - RNA, 19 nt, Homo sapiens
  misc_RNA (1)...(19): siRNA sense strand
aagaaacugggaaugauug

SEQ ID NO: 1981352 - RNA, 19 nt, Homo sapiens
  misc_RNA (1)...(19): siRNA sense strand
caucuugcgggaggacuua

SEQ ID NO: 1981353 - RNA, 19 nt, Homo sapiens
  misc_RNA (1)...(19): siRNA sense strand
ccugaaagucccugaagau

SEQ ID NO: 1981354 - RNA, 19 nt, Homo sapiens
  misc_RNA (1)...(19): siRNA sense strand
gcggguugcucacuuacac

SEQ ID NO: 1981355 - RNA, 19 nt, Homo sapiens
  misc_RNA (1)...(19): siRNA sense strand
gaugcgauucaccuacuga

SEQ ID NO: 1981356 - RNA, 19 nt, Homo sapiens
  misc_RNA (1)...(19): siRNA sense strand
gggaggacuuagaggaacu

SEQ ID NO: 1981357 - RNA, 19 nt, Homo sapiens
  misc_RNA (1)...(19): siRNA sense strand
cagcaagggcuuugugacu

SEQ ID NO: 1981358 - RNA, 19 nt, Homo sapiens
  misc_RNA (1)...(19): siRNA sense strand
gccugaagguugggcaugu

SEQ ID NO: 1981359 - RNA, 19 nt, Homo sapiens
  misc_RNA (1)...(19): siRNA sense strand
gccacaacaccaagagguu

SEQ ID NO: 1981360 - RNA, 19 nt, Homo sapiens
  misc_RNA (1)...(19): siRNA sense strand
caccaagagguuccgcuuu

SEQ ID NO: 1981361 - RNA, 19 nt, Homo sapiens
  misc_RNA (1)...(19): siRNA sense strand
cuaccucuccacccgaauu

SEQ ID NO: 1981362 - RNA, 19 nt, Homo sapiens
  misc_RNA (1)...(19): siRNA sense strand
gauccucuccuuagucuua

SEQ ID NO: 1981363 - RNA, 19 nt, Homo sapiens
  misc_RNA (1)...(19): siRNA sense strand
ggacaugauccucuccuua

SEQ ID NO: 1981364 - RNA, 19 nt, Homo sapiens
  misc_RNA (1)...(19): siRNA sense strand
gguguucagugguguauau

SEQ ID NO: 1981365 - RNA, 19 nt, Homo sapiens
  misc_RNA (1)...(19): siRNA sense strand
guucagugguguauauuuc

SEQ ID NO: 1981366 - RNA, 19 nt, Homo sapiens
  misc_RNA (1)...(19): siRNA sense strand
gacaugauccucuccuuag

SEQ ID NO: 1981367 - RNA, 19 nt, Homo sapiens
  misc_RNA (1)...(19): siRNA sense strand
gacaacuccucgcccucua

SEQ ID NO: 1981368 - RNA, 19 nt, Homo sapiens
  misc_RNA (1)...(19): siRNA sense strand
ucagugguguauauuucuu

SEQ ID NO: 1981369 - RNA, 19 nt, Homo sapiens
  misc_RNA (1)...(19): siRNA sense strand
gggacaugauccucuccuu

SEQ ID NO: 1981370 - RNA, 19 nt, Homo sapiens
  misc_RNA (1)...(19): siRNA sense strand
cccuuugguuguaugauuu

SEQ ID NO: 1981371 - RNA, 19 nt, Homo sapiens
  misc_RNA (1)...(19): siRNA sense strand
gcucauggggcucuuuaua

SEQ ID NO: 1981372 - RNA, 19 nt, Homo sapiens
  misc_RNA (1)...(19): siRNA sense strand
ucccuucccucucccaugu

SEQ ID NO: 1981373 - RNA, 19 nt, Homo sapiens
  misc_RNA (1)...(19): siRNA sense strand
gaagaggauuggaauauuu

SEQ ID NO: 1981374 - RNA, 19 nt, Homo sapiens
  misc_RNA (1)...(19): siRNA sense strand
gaaagaacaugacuacaga

SEQ ID NO: 1981375 - RNA, 19 nt, Homo sapiens
  misc_RNA (1)...(19): siRNA sense strand
gaacaugacuacagagaug

SEQ ID NO: 1981376 - RNA, 19 nt, Homo sapiens
  misc_RNA (1)...(19): siRNA sense strand
gaucagguguuucuuauga

SEQ ID NO: 1981377 - RNA, 19 nt, Homo sapiens
  misc_RNA (1)...(19): siRNA sense strand
gcaaauuucuucaacaguu

SEQ ID NO: 1981378 - RNA, 19 nt, Homo sapiens
  misc_RNA (1)...(19): siRNA sense strand
ggaaaaggaugcaguauuu

SEQ ID NO: 1981379 - RNA, 19 nt, Homo sapiens
  misc_RNA (1)...(19): siRNA sense strand
agacaaagaugacagugua

SEQ ID NO: 1981380 - RNA, 19 nt, Homo sapiens
  misc_RNA (1)...(19): siRNA sense strand
ggacugcuuuggauucuuu

SEQ ID NO: 1981381 - RNA, 19 nt, Homo sapiens
  misc_RNA (1)...(19): siRNA sense strand
gaaaaucccuccugaagaa

SEQ ID NO: 1981382 - RNA, 19 nt, Homo sapiens
  misc_RNA (1)...(19): siRNA sense strand
ggaagaggauuggaauauu

SEQ ID NO: 1981383 - RNA, 19 nt, Homo sapiens
  misc_RNA (1)...(19): siRNA sense strand
gaauagaggaguauaagaa

SEQ ID NO: 1981384 - RNA, 19 nt, Homo sapiens
  misc_RNA (1)...(19): siRNA sense strand
gaaggauacucuaguuaug

SEQ ID NO: 1981385 - RNA, 19 nt, Homo sapiens
  misc_RNA (1)...(19): siRNA sense strand
gcagaacuagacagaauua

SEQ ID NO: 1981386 - RNA, 19 nt, Homo sapiens
  misc_RNA (1)...(19): siRNA sense strand
cggauacacuuacacauaa

SEQ ID NO: 1981387 - RNA, 19 nt, Homo sapiens
  misc_RNA (1)...(19): siRNA sense strand
gaaaguuuguacaugagaa

SEQ ID NO: 1981388 - RNA, 19 nt, Homo sapiens
  misc_RNA (1)...(19): siRNA sense strand
gaucaaacaagauguaaug

SEQ ID NO: 1981389 - RNA, 19 nt, Homo sapiens
  misc_RNA (1)...(19): siRNA sense strand
gaacaaaaguugauuagag

SEQ ID NO: 1981390 - RNA, 19 nt, Homo sapiens
  misc_RNA (1)...(19): siRNA sense strand
gaaaggaagaggauuggaa

SEQ ID NO: 1981391 - RNA, 19 nt, Homo sapiens
  misc_RNA (1)...(19): siRNA sense strand
gaagaaauacugcgucaca

SEQ ID NO: 1981392 - RNA, 19 nt, Homo sapiens
  misc_RNA (1)...(19): siRNA sense strand
uuagagacuuccaagaaua

SEQ ID NO: 1981393 - RNA, 19 nt, Homo sapiens
  misc_RNA (1)...(19): siRNA sense strand
uagagaacauguugacaaa

SEQ ID NO: 1981394 - RNA, 19 nt, Homo sapiens
  misc_RNA (1)...(19): siRNA sense strand
gauuagagacuuccaagaa

SEQ ID NO: 1981395 - RNA, 19 nt, Homo sapiens
  misc_RNA (1)...(19): siRNA sense strand
gaugaucagguguuucuua

SEQ ID NO: 1981396 - RNA, 19 nt, Homo sapiens
  misc_RNA (1)...(19): siRNA sense strand
gcggauacacuuacacaua

SEQ ID NO: 1981397 - RNA, 19 nt, Homo sapiens
  misc_RNA (1)...(19): siRNA sense strand
gaaauacugcgucacaaga

SEQ ID NO: 1981398 - RNA, 19 nt, Homo sapiens
  misc_RNA (1)...(19): siRNA sense strand
gaaaugggcaaguguuguu

SEQ ID NO: 1981399 - RNA, 19 nt, Homo sapiens
  misc_RNA (1)...(19): siRNA sense strand
ccagaagccugucuuagau

SEQ ID NO: 1981400 - RNA, 19 nt, Homo sapiens
  misc_RNA (1)...(19): siRNA sense strand
cuacagagaugaacauuuu

SEQ ID NO: 1981401 - RNA, 19 nt, Homo sapiens
  misc_RNA (1)...(19): siRNA sense strand
gggcaaguguuguuagaga

SEQ ID NO: 1981402 - RNA, 19 nt, Homo sapiens
  misc_RNA (1)...(19): siRNA sense strand
gagaacauguugacaaacu

SEQ ID NO: 1981403 - RNA, 19 nt, Homo sapiens
  misc_RNA (1)...(19): siRNA sense strand
agacagggaugaucaaaca

SEQ ID NO: 1981404 - RNA, 19 nt, Homo sapiens
  misc_RNA (1)...(19): siRNA sense strand
uaagauuccugcuguuguu

SEQ ID NO: 1981405 - RNA, 19 nt, Homo sapiens
  misc_RNA (1)...(19): siRNA sense strand
acacauaacuugggcauuc

SEQ ID NO: 1981406 - RNA, 19 nt, Homo sapiens
  misc_RNA (1)...(19): siRNA sense strand
ggauuucccuauaagauuc

SEQ ID NO: 1981407 - RNA, 19 nt, Homo sapiens
  misc_RNA (1)...(19): siRNA sense strand
ccaaauagaucuguaucau

SEQ ID NO: 1981408 - RNA, 19 nt, Homo sapiens
  misc_RNA (1)...(19): siRNA sense strand
gaagacaucauaacuaaac

SEQ ID NO: 1981409 - RNA, 19 nt, Homo sapiens
  misc_RNA (1)...(19): siRNA sense strand
gaagaaaugaaacaaaugg

SEQ ID NO: 1981410 - RNA, 19 nt, Homo sapiens
  misc_RNA (1)...(19): siRNA sense strand
gaacauguugacaaacuga

SEQ ID NO: 1981411 - RNA, 19 nt, Homo sapiens
  misc_RNA (1)...(19): siRNA sense strand
gaaggaaauuauggcagaa

SEQ ID NO: 1981412 - RNA, 19 nt, Homo sapiens
  misc_RNA (1)...(19): siRNA sense strand
guacaugagaaggaaauua

SEQ ID NO: 1981413 - RNA, 19 nt, Homo sapiens
  misc_RNA (1)...(19): siRNA sense strand
ggagaaagaacaugacuac

SEQ ID NO: 1981414 - RNA, 19 nt, Homo sapiens
  misc_RNA (1)...(19): siRNA sense strand
guacuuaaaugugcaugau

SEQ ID NO: 1981415 - RNA, 19 nt, Homo sapiens
  misc_RNA (1)...(19): siRNA sense strand
gaaauuauggcagaagaug

SEQ ID NO: 1981416 - RNA, 19 nt, Homo sapiens
  misc_RNA (1)...(19): siRNA sense strand
gaugaucaaacaagaugua

SEQ ID NO: 1981417 - RNA, 19 nt, Homo sapiens
  misc_RNA (1)...(19): siRNA sense strand
uaagaaaggaagaggauug

SEQ ID NO: 1981418 - RNA, 19 nt, Homo sapiens
  misc_RNA (1)...(19): siRNA sense strand
gccagaagccugucuuaga

SEQ ID NO: 1981419 - RNA, 19 nt, Homo sapiens
  misc_RNA (1)...(19): siRNA sense strand
uaaaccaccuguucgaaag

SEQ ID NO: 1981420 - RNA, 19 nt, Homo sapiens
  misc_RNA (1)...(19): siRNA sense strand
uaacuugggcauuccagua

SEQ ID NO: 1981421 - RNA, 19 nt, Homo sapiens
  misc_RNA (1)...(19): siRNA sense strand
gauguaauguuuggaucuu

SEQ ID NO: 1981422 - RNA, 19 nt, Homo sapiens
  misc_RNA (1)...(19): siRNA sense strand
gcaaagcaaccaccaacug

SEQ ID NO: 1981423 - RNA, 19 nt, Homo sapiens
  misc_RNA (1)...(19): siRNA sense strand
gggcauuccaguacuagua

SEQ ID NO: 1981424 - RNA, 19 nt, Homo sapiens
  misc_RNA (1)...(19): siRNA sense strand
gugaaggcguucuggcaaa

SEQ ID NO: 1981425 - RNA, 19 nt, Homo sapiens
  misc_RNA (1)...(19): siRNA sense strand
uaaaugugcaugaugaaga

SEQ ID NO: 1981426 - RNA, 19 nt, Homo sapiens
  misc_RNA (1)...(19): siRNA sense strand
ggaauagaggaguauaaga

SEQ ID NO: 1981427 - RNA, 19 nt, Homo sapiens
  misc_RNA (1)...(19): siRNA sense strand
gaagacagggaugaucaaa

SEQ ID NO: 1981428 - RNA, 19 nt, Homo sapiens
  misc_RNA (1)...(19): siRNA sense strand
ccacgaacaccaaauagau

SEQ ID NO: 1981429 - RNA, 19 nt, Homo sapiens
  misc_RNA (1)...(19): siRNA sense strand
ugaaggauacucuaguuau

SEQ ID NO: 1981430 - RNA, 19 nt, Homo sapiens
  misc_RNA (1)...(19): siRNA sense strand
agaagaugaucagguguuu

SEQ ID NO: 1981431 - RNA, 19 nt, Homo sapiens
  misc_RNA (1)...(19): siRNA sense strand
auacaucguucagaaacua

SEQ ID NO: 1981432 - RNA, 19 nt, Homo sapiens
  misc_RNA (1)...(19): siRNA sense strand
uuacagaaaugggcaagug

SEQ ID NO: 1981433 - RNA, 19 nt, Homo sapiens
  misc_RNA (1)...(19): siRNA sense strand
ggagaccuauaucacaaag

SEQ ID NO: 1981434 - RNA, 19 nt, Homo sapiens
  misc_RNA (1)...(19): siRNA sense strand
gaacuagacagaauuacac

SEQ ID NO: 1981435 - RNA, 19 nt, Homo sapiens
  misc_RNA (1)...(19): siRNA sense strand
guucgaaaguuuguacaug

SEQ ID NO: 1981436 - RNA, 19 nt, Homo sapiens
  misc_RNA (1)...(19): siRNA sense strand
gcacuuauuuacacuucag

SEQ ID NO: 1981437 - RNA, 19 nt, Homo sapiens
  misc_RNA (1)...(19): siRNA sense strand
caaagaugacaguguaguu

SEQ ID NO: 1981438 - RNA, 19 nt, Homo sapiens
  misc_RNA (1)...(19): siRNA sense strand
ggcaaguguuguuagagaa

SEQ ID NO: 1981439 - RNA, 19 nt, Homo sapiens
  misc_RNA (1)...(19): siRNA sense strand
ucugaaggauacucuaguu

SEQ ID NO: 1981440 - RNA, 19 nt, Homo sapiens
  misc_RNA (1)...(19): siRNA sense strand
acuuaaaugugcaugauga

SEQ ID NO: 1981441 - RNA, 19 nt, Homo sapiens
  misc_RNA (1)...(19): siRNA sense strand
agaugacaguguaguugua

SEQ ID NO: 1981442 - RNA, 19 nt, Homo sapiens
  misc_RNA (1)...(19): siRNA sense strand
ugucuuagauguucaugca

SEQ ID NO: 1981443 - RNA, 19 nt, Homo sapiens
  misc_RNA (1)...(19): siRNA sense strand
ucacauauccggaaguuuu

SEQ ID NO: 1981444 - RNA, 19 nt, Homo sapiens
  misc_RNA (1)...(19): siRNA sense strand
gauggagaccuauaucaca

SEQ ID NO: 1981445 - RNA, 19 nt, Homo sapiens
  misc_RNA (1)...(19): siRNA sense strand
gaagcuacagucccuuuua

SEQ ID NO: 1981446 - RNA, 19 nt, Homo sapiens
  misc_RNA (1)...(19): siRNA sense strand
ggugggauaaugauaagaa

SEQ ID NO: 1981447 - RNA, 19 nt, Homo sapiens
  misc_RNA (1)...(19): siRNA sense strand
gcagggugggauaaugaua

SEQ ID NO: 1981448 - RNA, 19 nt, Homo sapiens
  misc_RNA (1)...(19): siRNA sense strand
guucagaaacuauauggau

SEQ ID NO: 1981449 - RNA, 19 nt, Homo sapiens
  misc_RNA (1)...(19): siRNA sense strand
cacaagaagacaaagauga

SEQ ID NO: 1981450 - RNA, 19 nt, Homo sapiens
  misc_RNA (1)...(19): siRNA sense strand
gggaugaucaaacaagaug

SEQ ID NO: 1981451 - RNA, 19 nt, Homo sapiens
  misc_RNA (1)...(19): siRNA sense strand
uagacagaauuacacgaaa

SEQ ID NO: 1981452 - RNA, 19 nt, Homo sapiens
  misc_RNA (1)...(19): siRNA sense strand
cuaaaccaccuguucgaaa

SEQ ID NO: 1981453 - RNA, 19 nt, Homo sapiens
  misc_RNA (1)...(19): siRNA sense strand
gaaaaggaugcaguauuua

SEQ ID NO: 1981454 - RNA, 19 nt, Homo sapiens
  misc_RNA (1)...(19): siRNA sense strand
cagggaugaucaaacaaga

SEQ ID NO: 1981455 - RNA, 19 nt, Homo sapiens
  misc_RNA (1)...(19): siRNA sense strand
gaggauuggaauauuugua

SEQ ID NO: 1981456 - RNA, 19 nt, Homo sapiens
  misc_RNA (1)...(19): siRNA sense strand
cagcacuuauuuacacuuc

SEQ ID NO: 1981457 - RNA, 19 nt, Homo sapiens
  misc_RNA (1)...(19): siRNA sense strand
ggagguggaagcagugguu

SEQ ID NO: 1981458 - RNA, 19 nt, Homo sapiens
  misc_RNA (1)...(19): siRNA sense strand
caaauagaucuguaucauc

SEQ ID NO: 1981459 - RNA, 19 nt, Homo sapiens
  misc_RNA (1)...(19): siRNA sense strand
gaacaccaaauagaucugu

SEQ ID NO: 1981460 - RNA, 19 nt, Homo sapiens
  misc_RNA (1)...(19): siRNA sense strand
gugggauaaugauaagaaa

SEQ ID NO: 1981461 - RNA, 19 nt, Homo sapiens
  misc_RNA (1)...(19): siRNA sense strand
cagcagggugggauaauga

SEQ ID NO: 1981462 - RNA, 19 nt, Homo sapiens
  misc_RNA (1)...(19): siRNA sense strand
uucgaaaguuuguacauga

SEQ ID NO: 1981463 - RNA, 19 nt, Homo sapiens
  misc_RNA (1)...(19): siRNA sense strand
guggaugccucaccaagag

SEQ ID NO: 1981464 - RNA, 19 nt, Homo sapiens
  misc_RNA (1)...(19): siRNA sense strand
uaguuaugcugguuguuga

SEQ ID NO: 1981465 - RNA, 19 nt, Homo sapiens
  misc_RNA (1)...(19): siRNA sense strand
aaggcguucuggcaaauuu

SEQ ID NO: 1981466 - RNA, 19 nt, Homo sapiens
  misc_RNA (1)...(19): siRNA sense strand
cagggugggauaaugauaa

SEQ ID NO: 1981467 - RNA, 19 nt, Homo sapiens
  misc_RNA (1)...(19): siRNA sense strand
caaagugugaugccauuag

SEQ ID NO: 1981468 - RNA, 19 nt, Homo sapiens
  misc_RNA (1)...(19): siRNA sense strand
augcagaacuagacagaau

SEQ ID NO: 1981469 - RNA, 19 nt, Homo sapiens
  misc_RNA (1)...(19): siRNA sense strand
caagauguaauguuuggau

SEQ ID NO: 1981470 - RNA, 19 nt, Homo sapiens
  misc_RNA (1)...(19): siRNA sense strand
gaaguuuuguuuacgguau

SEQ ID NO: 1981471 - RNA, 19 nt, Homo sapiens
  misc_RNA (1)...(19): siRNA sense strand
ccauuaguguauuggagaa

SEQ ID NO: 1981472 - RNA, 19 nt, Homo sapiens
  misc_RNA (1)...(19): siRNA sense strand
aaagugugaugccauuagu

SEQ ID NO: 1981473 - RNA, 19 nt, Homo sapiens
  misc_RNA (1)...(19): siRNA sense strand
gaaaucggcaucuuaguga

SEQ ID NO: 1981474 - RNA, 19 nt, Homo sapiens
  misc_RNA (1)...(19): siRNA sense strand
caagaaccauugcuguuga

SEQ ID NO: 1981475 - RNA, 19 nt, Homo sapiens
  misc_RNA (1)...(19): siRNA sense strand
ucucaaaccugccuucuug

SEQ ID NO: 1981476 - RNA, 19 nt, Homo sapiens
  misc_RNA (1)...(19): siRNA sense strand
ggauaaacuugaccagguu

SEQ ID NO: 1981477 - RNA, 19 nt, Homo sapiens
  misc_RNA (1)...(19): siRNA sense strand
uaagaugacacaauuggua

SEQ ID NO: 1981478 - RNA, 19 nt, Homo sapiens
  misc_RNA (1)...(19): siRNA sense strand
aaccauugcuguugacuuu

SEQ ID NO: 1981479 - RNA, 19 nt, Homo sapiens
  misc_RNA (1)...(19): siRNA sense strand
ugugaagucugcaauuaaa

SEQ ID NO: 1981480 - RNA, 19 nt, Homo sapiens
  misc_RNA (1)...(19): siRNA sense strand
guagauuucuucucucagu

SEQ ID NO: 1981481 - RNA, 19 nt, Homo sapiens
  misc_RNA (1)...(19): siRNA sense strand
aaaccugccuucuuggauu

SEQ ID NO: 1981482 - RNA, 19 nt, Homo sapiens
  misc_RNA (1)...(19): siRNA sense strand
cuacaaaacuggcuaaaau

SEQ ID NO: 1981483 - RNA, 19 nt, Homo sapiens
  misc_RNA (1)...(19): siRNA sense strand
gggcuauucugaacauuuc

SEQ ID NO: 1981484 - RNA, 19 nt, Homo sapiens
  misc_RNA (1)...(19): siRNA sense strand
gggaaugucguaugaguau

SEQ ID NO: 1981485 - RNA, 19 nt, Homo sapiens
  misc_RNA (1)...(19): siRNA sense strand
gcaguugucacagguagua

SEQ ID NO: 1981486 - RNA, 19 nt, Homo sapiens
  misc_RNA (1)...(19): siRNA sense strand
cagaagaguuagcaaagca

SEQ ID NO: 1981487 - RNA, 19 nt, Homo sapiens
  misc_RNA (1)...(19): siRNA sense strand
gacaagaaccauugcuguu

SEQ ID NO: 1981488 - RNA, 19 nt, Homo sapiens
  misc_RNA (1)...(19): siRNA sense strand
uuugugaagucugcaauua

SEQ ID NO: 1981489 - RNA, 19 nt, Homo sapiens
  misc_RNA (1)...(19): siRNA sense strand
gagcaagggcgucuuugug

SEQ ID NO: 1981490 - RNA, 19 nt, Homo sapiens
  misc_RNA (1)...(19): siRNA sense strand
uggacaaugugaucaagaa

SEQ ID NO: 1981491 - RNA, 19 nt, Homo sapiens
  misc_RNA (1)...(19): siRNA sense strand
cguaugaguauccugaaua

SEQ ID NO: 1981492 - RNA, 19 nt, Homo sapiens
  misc_RNA (1)...(19): siRNA sense strand
ggacaaugugaucaagaaa

SEQ ID NO: 1981493 - RNA, 19 nt, Homo sapiens
  misc_RNA (1)...(19): siRNA sense strand
gacuuugcaucagaagaua

SEQ ID NO: 1981494 - RNA, 19 nt, Homo sapiens
  misc_RNA (1)...(19): siRNA sense strand
aggcuuggcuggucuugaa

SEQ ID NO: 1981495 - RNA, 19 nt, Homo sapiens
  misc_RNA (1)...(19): siRNA sense strand
uagcaaagcauggaaugaa

SEQ ID NO: 1981496 - RNA, 19 nt, Homo sapiens
  misc_RNA (1)...(19): siRNA sense strand
guacugauggaauuggaaa

SEQ ID NO: 1981497 - RNA, 19 nt, Homo sapiens
  misc_RNA (1)...(19): siRNA sense strand
uaccuagcccugcguauuu

SEQ ID NO: 1981498 - RNA, 19 nt, Homo sapiens
  misc_RNA (1)...(19): siRNA sense strand
ugaaaucggcaucuuagug

SEQ ID NO: 1981499 - RNA, 19 nt, Homo sapiens
  misc_RNA (1)...(19): siRNA sense strand
gcagaagaguuagcaaagc

SEQ ID NO: 1981500 - RNA, 19 nt, Homo sapiens
  misc_RNA (1)...(19): siRNA sense strand
ccaagacuuuuguagauuu

SEQ ID NO: 1981501 - RNA, 19 nt, Homo sapiens
  misc_RNA (1)...(19): siRNA sense strand
ccugauccaugcucuuaug

SEQ ID NO: 1981502 - RNA, 19 nt, Homo sapiens
  misc_RNA (1)...(19): siRNA sense strand
gcagaucaaaggauaaacu

SEQ ID NO: 1981503 - RNA, 19 nt, Homo sapiens
  misc_RNA (1)...(19): siRNA sense strand
cagcagaucaaaggauaaa

SEQ ID NO: 1981504 - RNA, 19 nt, Homo sapiens
  misc_RNA (1)...(19): siRNA sense strand
ggagcaagggcgucuuugu

SEQ ID NO: 1981505 - RNA, 19 nt, Homo sapiens
  misc_RNA (1)...(19): siRNA sense strand
gaaccauugcuguugacuu

SEQ ID NO: 1981506 - RNA, 19 nt, Homo sapiens
  misc_RNA (1)...(19): siRNA sense strand
uaccugauccaugcucuua

SEQ ID NO: 1981507 - RNA, 19 nt, Homo sapiens
  misc_RNA (1)...(19): siRNA sense strand
gugggaaugucguaugagu

SEQ ID NO: 1981508 - RNA, 19 nt, Homo sapiens
  misc_RNA (1)...(19): siRNA sense strand
ugaccagguuuccagugaa

SEQ ID NO: 1981509 - RNA, 19 nt, Homo sapiens
  misc_RNA (1)...(19): siRNA sense strand
agaguguccugccauacuu

SEQ ID NO: 1981510 - RNA, 19 nt, Homo sapiens
  misc_RNA (1)...(19): siRNA sense strand
acaagaaccauugcuguug

SEQ ID NO: 1981511 - RNA, 19 nt, Homo sapiens
  misc_RNA (1)...(19): siRNA sense strand
aaucauaugcagaagaguu

SEQ ID NO: 1981512 - RNA, 19 nt, Homo sapiens
  misc_RNA (1)...(19): siRNA sense strand
ugacuuugcaucagaagau

SEQ ID NO: 1981513 - RNA, 19 nt, Homo sapiens
  misc_RNA (1)...(19): siRNA sense strand
guggagacaagaaccauug

SEQ ID NO: 1981514 - RNA, 19 nt, Homo sapiens
  misc_RNA (1)...(19): siRNA sense strand
gaaaaucauaugcagaaga

SEQ ID NO: 1981515 - RNA, 19 nt, Homo sapiens
  misc_RNA (1)...(19): siRNA sense strand
aaccugccuucuuggauuu

SEQ ID NO: 1981516 - RNA, 19 nt, Homo sapiens
  misc_RNA (1)...(19): siRNA sense strand
aucagcagaucaaaggaua

SEQ ID NO: 1981517 - RNA, 19 nt, Homo sapiens
  misc_RNA (1)...(19): siRNA sense strand
guuccugacuuggacaaug

SEQ ID NO: 1981518 - RNA, 19 nt, Homo sapiens
  misc_RNA (1)...(19): siRNA sense strand
cuaccuagcccugcguauu

SEQ ID NO: 1981519 - RNA, 19 nt, Homo sapiens
  misc_RNA (1)...(19): siRNA sense strand
gaaccaauggauaccugau

SEQ ID NO: 1981520 - RNA, 19 nt, Homo sapiens
  misc_RNA (1)...(19): siRNA sense strand
cggagacguuugugaaguc

SEQ ID NO: 1981521 - RNA, 19 nt, Homo sapiens
  misc_RNA (1)...(19): siRNA sense strand
cagaucaaaggauaaacuu

SEQ ID NO: 1981522 - RNA, 19 nt, Homo sapiens
  misc_RNA (1)...(19): siRNA sense strand
cauacuucguagcuacaaa

SEQ ID NO: 1981523 - RNA, 19 nt, Homo sapiens
  misc_RNA (1)...(19): siRNA sense strand
caaaggggcuauucugaac

SEQ ID NO: 1981524 - RNA, 19 nt, Homo sapiens
  misc_RNA (1)...(19): siRNA sense strand
uugaccagguuuccaguga

SEQ ID NO: 1981525 - RNA, 19 nt, Homo sapiens
  misc_RNA (1)...(19): siRNA sense strand
agguaguacugauggaauu

SEQ ID NO: 1981526 - RNA, 19 nt, Homo sapiens
  misc_RNA (1)...(19): siRNA sense strand
ugaagaaaaccaagaagaa

SEQ ID NO: 1981527 - RNA, 19 nt, Homo sapiens
  misc_RNA (1)...(19): siRNA sense strand
ucuugaaaucggcaucuua

SEQ ID NO: 1981528 - RNA, 19 nt, Homo sapiens
  misc_RNA (1)...(19): siRNA sense strand
ugacuuggacaaugugauc

SEQ ID NO: 1981529 - RNA, 19 nt, Homo sapiens
  misc_RNA (1)...(19): siRNA sense strand
ggaaugucguaugaguauc

SEQ ID NO: 1981530 - RNA, 19 nt, Homo sapiens
  misc_RNA (1)...(19): siRNA sense strand
cuacacgggcucacuaucu

SEQ ID NO: 1981531 - RNA, 19 nt, Homo sapiens
  misc_RNA (1)...(19): siRNA sense strand
ugucacagguaguacugau

SEQ ID NO: 1981532 - RNA, 19 nt, Homo sapiens
  misc_RNA (1)...(19): siRNA sense strand
caaccaagacuuuuguaga

SEQ ID NO: 1981533 - RNA, 19 nt, Homo sapiens
  misc_RNA (1)...(19): siRNA sense strand
aaaucggcaucuuagugaa

SEQ ID NO: 1981534 - RNA, 19 nt, Homo sapiens
  misc_RNA (1)...(19): siRNA sense strand
gggcucacuaucugaagaa

SEQ ID NO: 1981535 - RNA, 19 nt, Homo sapiens
  misc_RNA (1)...(19): siRNA sense strand
caaaccugccuucuuggau

SEQ ID NO: 1981536 - RNA, 19 nt, Homo sapiens
  misc_RNA (1)...(19): siRNA sense strand
gugaacaacgugggaaugu

SEQ ID NO: 1981537 - RNA, 19 nt, Homo sapiens
  misc_RNA (1)...(19): siRNA sense strand
gcucggagagugggcaguu

SEQ ID NO: 1981538 - RNA, 19 nt, Homo sapiens
  misc_RNA (1)...(19): siRNA sense strand
uacacgggcucacuaucug

SEQ ID NO: 1981539 - RNA, 19 nt, Homo sapiens
  misc_RNA (1)...(19): siRNA sense strand
ucaaaccugccuucuugga

SEQ ID NO: 1981540 - RNA, 19 nt, Homo sapiens
  misc_RNA (1)...(19): siRNA sense strand
ugggcucgauaaucucaaa

SEQ ID NO: 1981541 - RNA, 19 nt, Homo sapiens
  misc_RNA (1)...(19): siRNA sense strand
uaggagcaagggcgucuuu

SEQ ID NO: 1981542 - RNA, 19 nt, Homo sapiens
  misc_RNA (1)...(19): siRNA sense strand
guccuuaucagcagaucaa

SEQ ID NO: 1981543 - RNA, 19 nt, Homo sapiens
  misc_RNA (1)...(19): siRNA sense strand
ccggagacguuugugaagu

SEQ ID NO: 1981544 - RNA, 19 nt, Homo sapiens
  misc_RNA (1)...(19): siRNA sense strand
acgugggaaugucguauga

SEQ ID NO: 1981545 - RNA, 19 nt, Homo sapiens
  misc_RNA (1)...(19): siRNA sense strand
ugaacaacgugggaauguc

SEQ ID NO: 1981546 - RNA, 19 nt, Homo sapiens
  misc_RNA (1)...(19): siRNA sense strand
ccauugcuguugacuuugc

SEQ ID NO: 1981547 - RNA, 19 nt, Homo sapiens
  misc_RNA (1)...(19): siRNA sense strand
aaaaucauaugcagaagag

SEQ ID NO: 1981548 - RNA, 19 nt, Homo sapiens
  misc_RNA (1)...(19): siRNA sense strand
gaauaugaacaagucuaca

SEQ ID NO: 1981549 - RNA, 19 nt, Homo sapiens
  misc_RNA (1)...(19): siRNA sense strand
ggaauuggaaaaucauaug

SEQ ID NO: 1981550 - RNA, 19 nt, Homo sapiens
  misc_RNA (1)...(19): siRNA sense strand
caaagcauggaaugaaggu

SEQ ID NO: 1981551 - RNA, 19 nt, Homo sapiens
  misc_RNA (1)...(19): siRNA sense strand
ggagagugggcaguuguca

SEQ ID NO: 1981552 - RNA, 19 nt, Homo sapiens
  misc_RNA (1)...(19): siRNA sense strand
gaacugaaauuuguggauu

SEQ ID NO: 1981553 - RNA, 19 nt, Homo sapiens
  misc_RNA (1)...(19): siRNA sense strand
agacagacuuuaaaccuua

SEQ ID NO: 1981554 - RNA, 19 nt, Homo sapiens
  misc_RNA (1)...(19): siRNA sense strand
guacauguguuccagguuu

SEQ ID NO: 1981555 - RNA, 19 nt, Homo sapiens
  misc_RNA (1)...(19): siRNA sense strand
caacagaccuacuccacuu

SEQ ID NO: 1981556 - RNA, 19 nt, Homo sapiens
  misc_RNA (1)...(19): siRNA sense strand
gaugggacaugaaagaaga

SEQ ID NO: 1981557 - RNA, 19 nt, Homo sapiens
  misc_RNA (1)...(19): siRNA sense strand
gaugccaacuuuagcaauu

SEQ ID NO: 1981558 - RNA, 19 nt, Homo sapiens
  misc_RNA (1)...(19): siRNA sense strand
gagaagaucacaccacuca

SEQ ID NO: 1981559 - RNA, 19 nt, Homo sapiens
  misc_RNA (1)...(19): siRNA sense strand
gagcgucuauggcgauuuc

SEQ ID NO: 1981560 - RNA, 19 nt, Homo sapiens
  misc_RNA (1)...(19): siRNA sense strand
caaauuagacucucuucug

SEQ ID NO: 1981561 - RNA, 19 nt, Homo sapiens
  misc_RNA (1)...(19): siRNA sense strand
uguagcagaugccaacuuu

SEQ ID NO: 1981562 - RNA, 19 nt, Homo sapiens
  misc_RNA (1)...(19): siRNA sense strand
ggacaugaaagaagacaga

SEQ ID NO: 1981563 - RNA, 19 nt, Homo sapiens
  misc_RNA (1)...(19): siRNA sense strand
gggcauugcuuggacuauu

SEQ ID NO: 1981564 - RNA, 19 nt, Homo sapiens
  misc_RNA (1)...(19): siRNA sense strand
ccacuuggcuacccugcaa

SEQ ID NO: 1981565 - RNA, 19 nt, Homo sapiens
  misc_RNA (1)...(19): siRNA sense strand
ucugaccgauggagucuua

SEQ ID NO: 1981566 - RNA, 19 nt, Homo sapiens
  misc_RNA (1)...(19): siRNA sense strand
gaacaaagagaagaucaca

SEQ ID NO: 1981567 - RNA, 19 nt, Homo sapiens
  misc_RNA (1)...(19): siRNA sense strand
gguguuagcugaccaaaau

SEQ ID NO: 1981568 - RNA, 19 nt, Homo sapiens
  misc_RNA (1)...(19): siRNA sense strand
gaagacagacuuuaaaccu

SEQ ID NO: 1981569 - RNA, 19 nt, Homo sapiens
  misc_RNA (1)...(19): siRNA sense strand
gcuaaugucacuugcuauu

SEQ ID NO: 1981570 - RNA, 19 nt, Homo sapiens
  misc_RNA (1)...(19): siRNA sense strand
uuauaucccugucaaacaa

SEQ ID NO: 1981571 - RNA, 19 nt, Homo sapiens
  misc_RNA (1)...(19): siRNA sense strand
uggcuaaugucacuugcua

SEQ ID NO: 1981572 - RNA, 19 nt, Homo sapiens
  misc_RNA (1)...(19): siRNA sense strand
uggaagaccgcaaguauga

SEQ ID NO: 1981573 - RNA, 19 nt, Homo sapiens
  misc_RNA (1)...(19): siRNA sense strand
ggcauugcuuggacuauug

SEQ ID NO: 1981574 - RNA, 19 nt, Homo sapiens
  misc_RNA (1)...(19): siRNA sense strand
cagagaacccaaugacuga

SEQ ID NO: 1981575 - RNA, 19 nt, Homo sapiens
  misc_RNA (1)...(19): siRNA sense strand
ggaccuggaccucaucuuc

SEQ ID NO: 1981576 - RNA, 19 nt, Homo sapiens
  misc_RNA (1)...(19): siRNA sense strand
ggggaggccugcuuaagua

SEQ ID NO: 1981577 - RNA, 19 nt, Homo sapiens
  misc_RNA (1)...(19): siRNA sense strand
ggaagccuuugaucaccuu

SEQ ID NO: 1981578 - RNA, 19 nt, Homo sapiens
  misc_RNA (1)...(19): siRNA sense strand
ggaagcuuaugugcagaaa

SEQ ID NO: 1981579 - RNA, 19 nt, Homo sapiens
  misc_RNA (1)...(19): siRNA sense strand
cuucaaagguacauguguu

SEQ ID NO: 1981580 - RNA, 19 nt, Homo sapiens
  misc_RNA (1)...(19): siRNA sense strand
ucacaccacucacgcucaa

SEQ ID NO: 1981581 - RNA, 19 nt, Homo sapiens
  misc_RNA (1)...(19): siRNA sense strand
gcaguuugaauucagugua

SEQ ID NO: 1981582 - RNA, 19 nt, Homo sapiens
  misc_RNA (1)...(19): siRNA sense strand
agagaaaacuggaguccua

SEQ ID NO: 1981583 - RNA, 19 nt, Homo sapiens
  misc_RNA (1)...(19): siRNA sense strand
gcacagguucagccaguau

SEQ ID NO: 1981584 - RNA, 19 nt, Homo sapiens
  misc_RNA (1)...(19): siRNA sense strand
gaagaccgcaaguaugagu

SEQ ID NO: 1981585 - RNA, 19 nt, Homo sapiens
  misc_RNA (1)...(19): siRNA sense strand
gaaaacuggaguccuauuu

SEQ ID NO: 1981586 - RNA, 19 nt, Homo sapiens
  misc_RNA (1)...(19): siRNA sense strand
gugagaccauuccgauuca

SEQ ID NO: 1981587 - RNA, 19 nt, Homo sapiens
  misc_RNA (1)...(19): siRNA sense strand
guaaaugagagcacagugu

SEQ ID NO: 1981588 - RNA, 19 nt, Homo sapiens
  misc_RNA (1)...(19): siRNA sense strand
ggaggcaguuugaauucag

SEQ ID NO: 1981589 - RNA, 19 nt, Homo sapiens
  misc_RNA (1)...(19): siRNA sense strand
acaaggaccuggaccucau

SEQ ID NO: 1981590 - RNA, 19 nt, Homo sapiens
  misc_RNA (1)...(19): siRNA sense strand
uagcagaugccaacuuuag

SEQ ID NO: 1981591 - RNA, 19 nt, Homo sapiens
  misc_RNA (1)...(19): siRNA sense strand
gacagacuuuaaaccuuau

SEQ ID NO: 1981592 - RNA, 19 nt, Homo sapiens
  misc_RNA (1)...(19): siRNA sense strand
gacccuucauggaguggua

SEQ ID NO: 1981593 - RNA, 19 nt, Homo sapiens
  misc_RNA (1)...(19): siRNA sense strand
aaacuggaguccuauuugc

SEQ ID NO: 1981594 - RNA, 19 nt, Homo sapiens
  misc_RNA (1)...(19): siRNA sense strand
guuaaagugugcaaugacu

SEQ ID NO: 1981595 - RNA, 19 nt, Homo sapiens
  misc_RNA (1)...(19): siRNA sense strand
caugaaagaagacagacuu

SEQ ID NO: 1981596 - RNA, 19 nt, Homo sapiens
  misc_RNA (1)...(19): siRNA sense strand
gcagaugccaacuuuagca

SEQ ID NO: 1981597 - RNA, 19 nt, Homo sapiens
  misc_RNA (1)...(19): siRNA sense strand
uaauguggcuaaugucacu

SEQ ID NO: 1981598 - RNA, 19 nt, Homo sapiens
  misc_RNA (1)...(19): siRNA sense strand
aagacagacuuuaaaccuu

SEQ ID NO: 1981599 - RNA, 19 nt, Homo sapiens
  misc_RNA (1)...(19): siRNA sense strand
gcucaaggaagcuuaugug

SEQ ID NO: 1981600 - RNA, 19 nt, Homo sapiens
  misc_RNA (1)...(19): siRNA sense strand
uuacuacauugcacagguu

SEQ ID NO: 1981601 - RNA, 19 nt, Homo sapiens
  misc_RNA (1)...(19): siRNA sense strand
gagagcgucuauggcgauu

SEQ ID NO: 1981602 - RNA, 19 nt, Homo sapiens
  misc_RNA (1)...(19): siRNA sense strand
ccuuugaucaccuuuguaa

SEQ ID NO: 1981603 - RNA, 19 nt, Homo sapiens
  misc_RNA (1)...(19): siRNA sense strand
cgacuucucagacauugga

SEQ ID NO: 1981604 - RNA, 19 nt, Homo sapiens
  misc_RNA (1)...(19): siRNA sense strand
ccaggaacccagaggaaau

SEQ ID NO: 1981605 - RNA, 19 nt, Homo sapiens
  misc_RNA (1)...(19): siRNA sense strand
gaccgauggagucuuauau

SEQ ID NO: 1981606 - RNA, 19 nt, Homo sapiens
  misc_RNA (1)...(19): siRNA sense strand
gagaacccaaugacugaga

SEQ ID NO: 1981607 - RNA, 19 nt, Homo sapiens
  misc_RNA (1)...(19): siRNA sense strand
ugaccgauggagucuuaua

SEQ ID NO: 1981608 - RNA, 19 nt, Homo sapiens
  misc_RNA (1)...(19): siRNA sense strand
gaggccugcuuaaguacug

SEQ ID NO: 1981609 - RNA, 19 nt, Homo sapiens
  misc_RNA (1)...(19): siRNA sense strand
caguuugaauucaguguag

SEQ ID NO: 1981610 - RNA, 19 nt, Homo sapiens
  misc_RNA (1)...(19): siRNA sense strand
gacggcauccugagugaga

SEQ ID NO: 1981611 - RNA, 19 nt, Homo sapiens
  misc_RNA (1)...(19): siRNA sense strand
augccaacuuuagcaauua

SEQ ID NO: 1981612 - RNA, 19 nt, Homo sapiens
  misc_RNA (1)...(19): siRNA sense strand
cuuuaaaccuuaucaccau

SEQ ID NO: 1981613 - RNA, 19 nt, Homo sapiens
  misc_RNA (1)...(19): siRNA sense strand
uaaguacugcaaccucuug

SEQ ID NO: 1981614 - RNA, 19 nt, Homo sapiens
  misc_RNA (1)...(19): siRNA sense strand
ugguuaaagugugcaauga

SEQ ID NO: 1981615 - RNA, 19 nt, Homo sapiens
  misc_RNA (1)...(19): siRNA sense strand
uuccuaauguggcuaaugu

SEQ ID NO: 1981616 - RNA, 19 nt, Homo sapiens
  misc_RNA (1)...(19): siRNA sense strand
uuggagagcagcagagaaa

SEQ ID NO: 1981617 - RNA, 19 nt, Homo sapiens
  misc_RNA (1)...(19): siRNA sense strand
uagacucucuucugcucuu

SEQ ID NO: 1981618 - RNA, 19 nt, Homo sapiens
  misc_RNA (1)...(19): siRNA sense strand
ggaacugaaauuuguggau

SEQ ID NO: 1981619 - RNA, 19 nt, Homo sapiens
  misc_RNA (1)...(19): siRNA sense strand
agucuuauaucccugucaa

SEQ ID NO: 1981620 - RNA, 19 nt, Homo sapiens
  misc_RNA (1)...(19): siRNA sense strand
gauuggaagaccgcaagua

SEQ ID NO: 1981621 - RNA, 19 nt, Homo sapiens
  misc_RNA (1)...(19): siRNA sense strand
gaggcaguuugaauucagu

SEQ ID NO: 1981622 - RNA, 19 nt, Homo sapiens
  misc_RNA (1)...(19): siRNA sense strand
caucgacuucucagacauu

SEQ ID NO: 1981623 - RNA, 19 nt, Homo sapiens
  misc_RNA (1)...(19): siRNA sense strand
ccugaugggacaugaaaga

SEQ ID NO: 1981624 - RNA, 19 nt, Homo sapiens
  misc_RNA (1)...(19): siRNA sense strand
ccaacuuuagcaauuacua

SEQ ID NO: 1981625 - RNA, 19 nt, Homo sapiens
  misc_RNA (1)...(19): siRNA sense strand
guagcagaugccaacuuua

SEQ ID NO: 1981626 - RNA, 19 nt, Homo sapiens
  misc_RNA (1)...(19): siRNA sense strand
ccaggaagccuuugaucac

SEQ ID NO: 1981627 - RNA, 19 nt, Homo sapiens
  misc_RNA (1)...(19): siRNA sense strand
gagugagaccauuccgauu

SEQ ID NO: 1981628 - RNA, 19 nt, Homo sapiens
  misc_RNA (1)...(19): siRNA sense strand
aagcuuaugugcagaaaau

SEQ ID NO: 1981629 - RNA, 19 nt, Homo sapiens
  misc_RNA (1)...(19): siRNA sense strand
uggacggcauccugaguga

SEQ ID NO: 1981630 - RNA, 19 nt, Homo sapiens
  misc_RNA (1)...(19): siRNA sense strand
uaaagugugcaaugacucu

SEQ ID NO: 1981631 - RNA, 19 nt, Homo sapiens
  misc_RNA (1)...(19): siRNA sense strand
caacuuuagcaauuacuac

SEQ ID NO: 1981632 - RNA, 19 nt, Homo sapiens
  misc_RNA (1)...(19): siRNA sense strand
cauccugagugagaccauu

SEQ ID NO: 1981633 - RNA, 19 nt, Homo sapiens
  misc_RNA (1)...(19): siRNA sense strand
ggaguccuauuugcagaac

SEQ ID NO: 1981634 - RNA, 19 nt, Homo sapiens
  misc_RNA (1)...(19): siRNA sense strand
uggacugccuguuggacuu

SEQ ID NO: 1981635 - RNA, 19 nt, Homo sapiens
  misc_RNA (1)...(19): siRNA sense strand
cggaggcaguuugaauuca

SEQ ID NO: 1981636 - RNA, 19 nt, Homo sapiens
  misc_RNA (1)...(19): siRNA sense strand
auguggaacugaaauuugu

SEQ ID NO: 1981637 - RNA, 19 nt, Homo sapiens
  misc_RNA (1)...(19): siRNA sense strand
gcagaaaaugguuaaagug

SEQ ID NO: 1981638 - RNA, 19 nt, Homo sapiens
  misc_RNA (1)...(19): siRNA sense strand
ccuaauguggcuaauguca

SEQ ID NO: 1981639 - RNA, 19 nt, Homo sapiens
  misc_RNA (1)...(19): siRNA sense strand
aauguggaacugaaauuug

SEQ ID NO: 1981640 - RNA, 19 nt, Homo sapiens
  misc_RNA (1)...(19): siRNA sense strand
gaccuggaccucaucuucu

SEQ ID NO: 1981641 - RNA, 19 nt, Homo sapiens
  misc_RNA (1)...(19): siRNA sense strand
cuacggcgcacugcaaugu

SEQ ID NO: 1981642 - RNA, 19 nt, Homo sapiens
  misc_RNA (1)...(19): siRNA sense strand
uuggcuacccugcaauuaa

SEQ ID NO: 1981643 - RNA, 19 nt, Homo sapiens
  misc_RNA (1)...(19): siRNA sense strand
caccaggaacccagaggaa

SEQ ID NO: 1981644 - RNA, 19 nt, Homo sapiens
  misc_RNA (1)...(19): siRNA sense strand
gcaaagagcucaaugcauu

SEQ ID NO: 1981645 - RNA, 19 nt, Homo sapiens
  misc_RNA (1)...(19): siRNA sense strand
caucagaacuugacaauaa

SEQ ID NO: 1981646 - RNA, 19 nt, Homo sapiens
  misc_RNA (1)...(19): siRNA sense strand
ggaaaucgcucucgcuuug

SEQ ID NO: 1981647 - RNA, 19 nt, Homo sapiens
  misc_RNA (1)...(19): siRNA sense strand
ugagaaagcugcccaacua

SEQ ID NO: 1981648 - RNA, 19 nt, Homo sapiens
  misc_RNA (1)...(19): siRNA sense strand
caacagaacagauacagua

SEQ ID NO: 1981649 - RNA, 19 nt, Homo sapiens
  misc_RNA (1)...(19): siRNA sense strand
gaaagaagcccaagaaagg

SEQ ID NO: 1981650 - RNA, 19 nt, Homo sapiens
  misc_RNA (1)...(19): siRNA sense strand
gaagauaguucaaauucuc

SEQ ID NO: 1981651 - RNA, 19 nt, Homo sapiens
  misc_RNA (1)...(19): siRNA sense strand
ggauaaacaucacagaaau

SEQ ID NO: 1981652 - RNA, 19 nt, Homo sapiens
  misc_RNA (1)...(19): siRNA sense strand
ggagaaagaagcccaagaa

SEQ ID NO: 1981653 - RNA, 19 nt, Homo sapiens
  misc_RNA (1)...(19): siRNA sense strand
guagagaguuucacaucaa

SEQ ID NO: 1981654 - RNA, 19 nt, Homo sapiens
  misc_RNA (1)...(19): siRNA sense strand
ucacagaaaugaauaagca

SEQ ID NO: 1981655 - RNA, 19 nt, Homo sapiens
  misc_RNA (1)...(19): siRNA sense strand
caagaaauccccaaacuua

SEQ ID NO: 1981656 - RNA, 19 nt, Homo sapiens
  misc_RNA (1)...(19): siRNA sense strand
ccagagagcuugagagcau

SEQ ID NO: 1981657 - RNA, 19 nt, Homo sapiens
  misc_RNA (1)...(19): siRNA sense strand
gagacagaaugaucuuaaa

SEQ ID NO: 1981658 - RNA, 19 nt, Homo sapiens
  misc_RNA (1)...(19): siRNA sense strand
gaacuacucagcaagcaaa

SEQ ID NO: 1981659 - RNA, 19 nt, Homo sapiens
  misc_RNA (1)...(19): siRNA sense strand
gagagaaacuccagcugau

SEQ ID NO: 1981660 - RNA, 19 nt, Homo sapiens
  misc_RNA (1)...(19): siRNA sense strand
gaaagcugcccaacuaaga

SEQ ID NO: 1981661 - RNA, 19 nt, Homo sapiens
  misc_RNA (1)...(19): siRNA sense strand
gagacagucaguaaucuua

SEQ ID NO: 1981662 - RNA, 19 nt, Homo sapiens
  misc_RNA (1)...(19): siRNA sense strand
gaucagugcucuuacaaac

SEQ ID NO: 1981663 - RNA, 19 nt, Homo sapiens
  misc_RNA (1)...(19): siRNA sense strand
gaacaauggaaucuaauca

SEQ ID NO: 1981664 - RNA, 19 nt, Homo sapiens
  misc_RNA (1)...(19): siRNA sense strand
gaacaaagucuggauaaac

SEQ ID NO: 1981665 - RNA, 19 nt, Homo sapiens
  misc_RNA (1)...(19): siRNA sense strand
caaagccaauguuaaguca

SEQ ID NO: 1981666 - RNA, 19 nt, Homo sapiens
  misc_RNA (1)...(19): siRNA sense strand
ucagugcucuuacaaacaa

SEQ ID NO: 1981667 - RNA, 19 nt, Homo sapiens
  misc_RNA (1)...(19): siRNA sense strand
caucaaagccaucagcauu

SEQ ID NO: 1981668 - RNA, 19 nt, Homo sapiens
  misc_RNA (1)...(19): siRNA sense strand
ggaauucggugugguugga

SEQ ID NO: 1981669 - RNA, 19 nt, Homo sapiens
  misc_RNA (1)...(19): siRNA sense strand
gaucaagucaccaacagaa

SEQ ID NO: 1981670 - RNA, 19 nt, Homo sapiens
  misc_RNA (1)...(19): siRNA sense strand
gaauuacugcagagugaua

SEQ ID NO: 1981671 - RNA, 19 nt, Homo sapiens
  misc_RNA (1)...(19): siRNA sense strand
gauagaaagcgaugugguu

SEQ ID NO: 1981672 - RNA, 19 nt, Homo sapiens
  misc_RNA (1)...(19): siRNA sense strand
ggaaugaacgagacaguca

SEQ ID NO: 1981673 - RNA, 19 nt, Homo sapiens
  misc_RNA (1)...(19): siRNA sense strand
ccagagagucaaccugaua

SEQ ID NO: 1981674 - RNA, 19 nt, Homo sapiens
  misc_RNA (1)...(19): siRNA sense strand
gaacgagacagucaguaau

SEQ ID NO: 1981675 - RNA, 19 nt, Homo sapiens
  misc_RNA (1)...(19): siRNA sense strand
caagggagacuauuuacga

SEQ ID NO: 1981676 - RNA, 19 nt, Homo sapiens
  misc_RNA (1)...(19): siRNA sense strand
caaacaaaccugagagcaa

SEQ ID NO: 1981677 - RNA, 19 nt, Homo sapiens
  misc_RNA (1)...(19): siRNA sense strand
ggaagcaaccagaucauuc

SEQ ID NO: 1981678 - RNA, 19 nt, Homo sapiens
  misc_RNA (1)...(19): siRNA sense strand
gaaaagcucauuccaagaa

SEQ ID NO: 1981679 - RNA, 19 nt, Homo sapiens
  misc_RNA (1)...(19): siRNA sense strand
acaauggaaucuaaucaga

SEQ ID NO: 1981680 - RNA, 19 nt, Homo sapiens
  misc_RNA (1)...(19): siRNA sense strand
gagaaagaagcccaagaaa

SEQ ID NO: 1981681 - RNA, 19 nt, Homo sapiens
  misc_RNA (1)...(19): siRNA sense strand
gaagcugaccuaccaggaa

SEQ ID NO: 1981682 - RNA, 19 nt, Homo sapiens
  misc_RNA (1)...(19): siRNA sense strand
ugaacaaagucuggauaaa

SEQ ID NO: 1981683 - RNA, 19 nt, Homo sapiens
  misc_RNA (1)...(19): siRNA sense strand
gagaaacuccagcugauca

SEQ ID NO: 1981684 - RNA, 19 nt, Homo sapiens
  misc_RNA (1)...(19): siRNA sense strand
ucucagguauccaagcuaa

SEQ ID NO: 1981685 - RNA, 19 nt, Homo sapiens
  misc_RNA (1)...(19): siRNA sense strand
aacaaagucuggauaaaca

SEQ ID NO: 1981686 - RNA, 19 nt, Homo sapiens
  misc_RNA (1)...(19): siRNA sense strand
cagcugaucagugcucuua

SEQ ID NO: 1981687 - RNA, 19 nt, Homo sapiens
  misc_RNA (1)...(19): siRNA sense strand
uggaauuacugcagaguga

SEQ ID NO: 1981688 - RNA, 19 nt, Homo sapiens
  misc_RNA (1)...(19): siRNA sense strand
uuaaacagcguccaucuug

SEQ ID NO: 1981689 - RNA, 19 nt, Homo sapiens
  misc_RNA (1)...(19): siRNA sense strand
ugaauaagcagauuucucu

SEQ ID NO: 1981690 - RNA, 19 nt, Homo sapiens
  misc_RNA (1)...(19): siRNA sense strand
gcaaguagagaguuucaca

SEQ ID NO: 1981691 - RNA, 19 nt, Homo sapiens
  misc_RNA (1)...(19): siRNA sense strand
gcauaaagaaagaagauag

SEQ ID NO: 1981692 - RNA, 19 nt, Homo sapiens
  misc_RNA (1)...(19): siRNA sense strand
ugaaucagcacuucuugaa

SEQ ID NO: 1981693 - RNA, 19 nt, Homo sapiens
  misc_RNA (1)...(19): siRNA sense strand
cgauggagauggaagauac

SEQ ID NO: 1981694 - RNA, 19 nt, Homo sapiens
  misc_RNA (1)...(19): siRNA sense strand
gagaaagcugcccaacuaa

SEQ ID NO: 1981695 - RNA, 19 nt, Homo sapiens
  misc_RNA (1)...(19): siRNA sense strand
caaauucucagguauccaa

SEQ ID NO: 1981696 - RNA, 19 nt, Homo sapiens
  misc_RNA (1)...(19): siRNA sense strand
gagucaaccugauagaaag

SEQ ID NO: 1981697 - RNA, 19 nt, Homo sapiens
  misc_RNA (1)...(19): siRNA sense strand
ggaugcagguugcucucaa

SEQ ID NO: 1981698 - RNA, 19 nt, Homo sapiens
  misc_RNA (1)...(19): siRNA sense strand
uagagaguuucacaucaaa

SEQ ID NO: 1981699 - RNA, 19 nt, Homo sapiens
  misc_RNA (1)...(19): siRNA sense strand
caugaugggugauagaucu

SEQ ID NO: 1981700 - RNA, 19 nt, Homo sapiens
  misc_RNA (1)...(19): siRNA sense strand
ugaacgagacagucaguaa

SEQ ID NO: 1981701 - RNA, 19 nt, Homo sapiens
  misc_RNA (1)...(19): siRNA sense strand
gauaaacaucacagaaaug

SEQ ID NO: 1981702 - RNA, 19 nt, Homo sapiens
  misc_RNA (1)...(19): siRNA sense strand
ggagagauggguuugaaca

SEQ ID NO: 1981703 - RNA, 19 nt, Homo sapiens
  misc_RNA (1)...(19): siRNA sense strand
guuauccgcucugugguuu

SEQ ID NO: 1981704 - RNA, 19 nt, Homo sapiens
  misc_RNA (1)...(19): siRNA sense strand
aagcugaccuaccaggaaa

SEQ ID NO: 1981705 - RNA, 19 nt, Homo sapiens
  misc_RNA (1)...(19): siRNA sense strand
cagaacagauacaguaaaa

SEQ ID NO: 1981706 - RNA, 19 nt, Homo sapiens
  misc_RNA (1)...(19): siRNA sense strand
gcugaucagugcucuuaca

SEQ ID NO: 1981707 - RNA, 19 nt, Homo sapiens
  misc_RNA (1)...(19): siRNA sense strand
aaggguagcuuuagguauc

SEQ ID NO: 1981708 - RNA, 19 nt, Homo sapiens
  misc_RNA (1)...(19): siRNA sense strand
gccaaaauuuucacaguuu

SEQ ID NO: 1981709 - RNA, 19 nt, Homo sapiens
  misc_RNA (1)...(19): siRNA sense strand
caagaaaacgauggaauua

SEQ ID NO: 1981710 - RNA, 19 nt, Homo sapiens
  misc_RNA (1)...(19): siRNA sense strand
aaagcgaugugguugcuau

SEQ ID NO: 1981711 - RNA, 19 nt, Homo sapiens
  misc_RNA (1)...(19): siRNA sense strand
agauuucucuguugacuuc

SEQ ID NO: 1981712 - RNA, 19 nt, Homo sapiens
  misc_RNA (1)...(19): siRNA sense strand
gaugcugcaagaucuguua

SEQ ID NO: 1981713 - RNA, 19 nt, Homo sapiens
  misc_RNA (1)...(19): siRNA sense strand
aagagcaaguagagaguuu

SEQ ID NO: 1981714 - RNA, 19 nt, Homo sapiens
  misc_RNA (1)...(19): siRNA sense strand
uauccaagcuaagagagaa

SEQ ID NO: 1981715 - RNA, 19 nt, Homo sapiens
  misc_RNA (1)...(19): siRNA sense strand
gcagugaaccaccucaaag

SEQ ID NO: 1981716 - RNA, 19 nt, Homo sapiens
  misc_RNA (1)...(19): siRNA sense strand
gcuaugagcaagguagaaa

SEQ ID NO: 1981717 - RNA, 19 nt, Homo sapiens
  misc_RNA (1)...(19): siRNA sense strand
gaagagcaaguagagaguu

SEQ ID NO: 1981718 - RNA, 19 nt, Homo sapiens
  misc_RNA (1)...(19): siRNA sense strand
uaguucaaauucucaggua

SEQ ID NO: 1981719 - RNA, 19 nt, Homo sapiens
  misc_RNA (1)...(19): siRNA sense strand
uggauaaacaucacagaaa

SEQ ID NO: 1981720 - RNA, 19 nt, Homo sapiens
  misc_RNA (1)...(19): siRNA sense strand
agagucaaccugauagaaa

SEQ ID NO: 1981721 - RNA, 19 nt, Homo sapiens
  misc_RNA (1)...(19): siRNA sense strand
agagacagaaugaucuuaa

SEQ ID NO: 1981722 - RNA, 19 nt, Homo sapiens
  misc_RNA (1)...(19): siRNA sense strand
ccucaaagccaauguuaag

SEQ ID NO: 1981723 - RNA, 19 nt, Homo sapiens
  misc_RNA (1)...(19): siRNA sense strand
gagaauuugaaacaggaua

SEQ ID NO: 1981724 - RNA, 19 nt, Homo sapiens
  misc_RNA (1)...(19): siRNA sense strand
aaacccacagugagaauuu

SEQ ID NO: 1981725 - RNA, 19 nt, Homo sapiens
  misc_RNA (1)...(19): siRNA sense strand
caauggaaucuaaucagaa

SEQ ID NO: 1981726 - RNA, 19 nt, Homo sapiens
  misc_RNA (1)...(19): siRNA sense strand
caggauuuauuccgcaaga

SEQ ID NO: 1981727 - RNA, 19 nt, Homo sapiens
  misc_RNA (1)...(19): siRNA sense strand
gaccgccgaugaagagcaa

SEQ ID NO: 1981728 - RNA, 19 nt, Homo sapiens
  misc_RNA (1)...(19): siRNA sense strand
aagcaaaccuguccuucag

SEQ ID NO: 1981729 - RNA, 19 nt, Homo sapiens
  misc_RNA (1)...(19): siRNA sense strand
gagagucaaccugauagaa

SEQ ID NO: 1981730 - RNA, 19 nt, Homo sapiens
  misc_RNA (1)...(19): siRNA sense strand
uuacgaugcugcaagaucu

SEQ ID NO: 1981731 - RNA, 19 nt, Homo sapiens
  misc_RNA (1)...(19): siRNA sense strand
uauuuacgaugcugcaaga

SEQ ID NO: 1981732 - RNA, 19 nt, Homo sapiens
  misc_RNA (1)...(19): siRNA sense strand
ccacagugagaauuugaaa

SEQ ID NO: 1981733 - RNA, 19 nt, Homo sapiens
  misc_RNA (1)...(19): siRNA sense strand
ggaucuggaugcccucaag

SEQ ID NO: 1981734 - RNA, 19 nt, Homo sapiens
  misc_RNA (1)...(19): siRNA sense strand
gagauggaagauacucauu

SEQ ID NO: 1981735 - RNA, 19 nt, Homo sapiens
  misc_RNA (1)...(19): siRNA sense strand
ugccaagggagacuauuua

SEQ ID NO: 1981736 - RNA, 19 nt, Homo sapiens
  misc_RNA (1)...(19): siRNA sense strand
gauauccuguaccuucaca

SEQ ID NO: 1981737 - RNA, 19 nt, Homo sapiens
  misc_RNA (1)...(19): siRNA sense strand
caccucaaagccaauguua

SEQ ID NO: 1981738 - RNA, 19 nt, Homo sapiens
  misc_RNA (1)...(19): siRNA sense strand
uguggaagcacuacagaaa

SEQ ID NO: 1981739 - RNA, 19 nt, Homo sapiens
  misc_RNA (1)...(19): siRNA sense strand
agaaagaagcccaagaaag

SEQ ID NO: 1981740 - RNA, 19 nt, Homo sapiens
  misc_RNA (1)...(19): siRNA sense strand
uccaaagcauaaagaaaga

SEQ ID NO: 1981741 - RNA, 19 nt, Homo sapiens
  misc_RNA (1)...(19): siRNA sense strand
gcgcaaagagcucaaugca

SEQ ID NO: 1981742 - RNA, 19 nt, Homo sapiens
  misc_RNA (1)...(19): siRNA sense strand
gacagucuuuggaucaagu

SEQ ID NO: 1981743 - RNA, 19 nt, Homo sapiens
  misc_RNA (1)...(19): siRNA sense strand
acagaaugaucuuaaacuc

SEQ ID NO: 1981744 - RNA, 19 nt, Homo sapiens
  misc_RNA (1)...(19): siRNA sense strand
gaagaaauauggaguuuag

SEQ ID NO: 1981745 - RNA, 19 nt, Homo sapiens
  misc_RNA (1)...(19): siRNA sense strand
ccaccaggauguccauuua

SEQ ID NO: 1981746 - RNA, 19 nt, Homo sapiens
  misc_RNA (1)...(19): siRNA sense strand
gagaaggaccgauugauuu

SEQ ID NO: 1981747 - RNA, 19 nt, Homo sapiens
  misc_RNA (1)...(19): siRNA sense strand
gaaggaagcauaauuaucu

SEQ ID NO: 1981748 - RNA, 19 nt, Homo sapiens
  misc_RNA (1)...(19): siRNA sense strand
gaagauagcagaguuacaa

SEQ ID NO: 1981749 - RNA, 19 nt, Homo sapiens
  misc_RNA (1)...(19): siRNA sense strand
ucagaaggaagcauaauua

SEQ ID NO: 1981750 - RNA, 19 nt, Homo sapiens
  misc_RNA (1)...(19): siRNA sense strand
guuuagagccugagaauuu

SEQ ID NO: 1981751 - RNA, 19 nt, Homo sapiens
  misc_RNA (1)...(19): siRNA sense strand
ucaguuauguuccuguuaa

SEQ ID NO: 1981752 - RNA, 19 nt, Homo sapiens
  misc_RNA (1)...(19): siRNA sense strand
gcuaagcagguaauuaaua

SEQ ID NO: 1981753 - RNA, 19 nt, Homo sapiens
  misc_RNA (1)...(19): siRNA sense strand
gcaaagaaagcucaggaaa

SEQ ID NO: 1981754 - RNA, 19 nt, Homo sapiens
  misc_RNA (1)...(19): siRNA sense strand
ggauacagaucaagguaau

SEQ ID NO: 1981755 - RNA, 19 nt, Homo sapiens
  misc_RNA (1)...(19): siRNA sense strand
guucaggacucccgacuug

SEQ ID NO: 1981756 - RNA, 19 nt, Homo sapiens
  misc_RNA (1)...(19): siRNA sense strand
gcagaagauagcagaguua

SEQ ID NO: 1981757 - RNA, 19 nt, Homo sapiens
  misc_RNA (1)...(19): siRNA sense strand
gcagaacaccagcaguuaa

SEQ ID NO: 1981758 - RNA, 19 nt, Homo sapiens
  misc_RNA (1)...(19): siRNA sense strand
ucaccgagcucauuaaagg

SEQ ID NO: 1981759 - RNA, 19 nt, Homo sapiens
  misc_RNA (1)...(19): siRNA sense strand
guuaauaccacuaguagaa

SEQ ID NO: 1981760 - RNA, 19 nt, Homo sapiens
  misc_RNA (1)...(19): siRNA sense strand
gcaguuaauaccacuagua

SEQ ID NO: 1981761 - RNA, 19 nt, Homo sapiens
  misc_RNA (1)...(19): siRNA sense strand
gaagaagaaguacagaaau

SEQ ID NO: 1981762 - RNA, 19 nt, Homo sapiens
  misc_RNA (1)...(19): siRNA sense strand
gagacuguaugaauuagau

SEQ ID NO: 1981763 - RNA, 19 nt, Homo sapiens
  misc_RNA (1)...(19): siRNA sense strand
ugaagaagaaguacagaaa

SEQ ID NO: 1981764 - RNA, 19 nt, Homo sapiens
  misc_RNA (1)...(19): siRNA sense strand
uaagugcuauucagucaga

SEQ ID NO: 1981765 - RNA, 19 nt, Homo sapiens
  misc_RNA (1)...(19): siRNA sense strand
gauagcagaguuacaaaga

SEQ ID NO: 1981766 - RNA, 19 nt, Homo sapiens
  misc_RNA (1)...(19): siRNA sense strand
agaaggaccgauugauuua

SEQ ID NO: 1981767 - RNA, 19 nt, Homo sapiens
  misc_RNA (1)...(19): siRNA sense strand
guacagugaaggugaaauu

SEQ ID NO: 1981768 - RNA, 19 nt, Homo sapiens
  misc_RNA (1)...(19): siRNA sense strand
aaagccaguucauggguua

SEQ ID NO: 1981769 - RNA, 19 nt, Homo sapiens
  misc_RNA (1)...(19): siRNA sense strand
aguaaggccugucauagaa

SEQ ID NO: 1981770 - RNA, 19 nt, Homo sapiens
  misc_RNA (1)...(19): siRNA sense strand
guuaagugcuauucaguca

SEQ ID NO: 1981771 - RNA, 19 nt, Homo sapiens
  misc_RNA (1)...(19): siRNA sense strand
gagcaauucagaugugauu

SEQ ID NO: 1981772 - RNA, 19 nt, Homo sapiens
  misc_RNA (1)...(19): siRNA sense strand
gguaauaguauguuaagug

SEQ ID NO: 1981773 - RNA, 19 nt, Homo sapiens
  misc_RNA (1)...(19): siRNA sense strand
ccauuuaggcgagacauua

SEQ ID NO: 1981774 - RNA, 19 nt, Homo sapiens
  misc_RNA (1)...(19): siRNA sense strand
gagacauuaucagaguuua

SEQ ID NO: 1981775 - RNA, 19 nt, Homo sapiens
  misc_RNA (1)...(19): siRNA sense strand
ccaaguagaagaaauaugg

SEQ ID NO: 1981776 - RNA, 19 nt, Homo sapiens
  misc_RNA (1)...(19): siRNA sense strand
gaggaggaacccauggaua

SEQ ID NO: 1981777 - RNA, 19 nt, Homo sapiens
  misc_RNA (1)...(19): siRNA sense strand
ccgaggagcccaaguagaa

SEQ ID NO: 1981778 - RNA, 19 nt, Homo sapiens
  misc_RNA (1)...(19): siRNA sense strand
gacaaguacacaacaguuu

SEQ ID NO: 1981779 - RNA, 19 nt, Homo sapiens
  misc_RNA (1)...(19): siRNA sense strand
aaacagaacgcaaagaaag

SEQ ID NO: 1981780 - RNA, 19 nt, Homo sapiens
  misc_RNA (1)...(19): siRNA sense strand
gcuauucagucagaaguug

SEQ ID NO: 1981781 - RNA, 19 nt, Homo sapiens
  misc_RNA (1)...(19): siRNA sense strand
gaacaccagcaguuaauac

SEQ ID NO: 1981782 - RNA, 19 nt, Homo sapiens
  misc_RNA (1)...(19): siRNA sense strand
gaacuguacccaccaggau

SEQ ID NO: 1981783 - RNA, 19 nt, Homo sapiens
  misc_RNA (1)...(19): siRNA sense strand
ucagaugcuuauugaagaa

SEQ ID NO: 1981784 - RNA, 19 nt, Homo sapiens
  misc_RNA (1)...(19): siRNA sense strand
ugauuuaggugcaugcaau

SEQ ID NO: 1981785 - RNA, 19 nt, Homo sapiens
  misc_RNA (1)...(19): siRNA sense strand
uuagauggauuaagagaag

SEQ ID NO: 1981786 - RNA, 19 nt, Homo sapiens
  misc_RNA (1)...(19): siRNA sense strand
gaagaugcuuuucacuuug

SEQ ID NO: 1981787 - RNA, 19 nt, Homo sapiens
  misc_RNA (1)...(19): siRNA sense strand
gaagacaucagcaaaagaa

SEQ ID NO: 1981788 - RNA, 19 nt, Homo sapiens
  misc_RNA (1)...(19): siRNA sense strand
uagcagaguuacaaagaca

SEQ ID NO: 1981789 - RNA, 19 nt, Homo sapiens
  misc_RNA (1)...(19): siRNA sense strand
aaagaaagcucaggaaacc

SEQ ID NO: 1981790 - RNA, 19 nt, Homo sapiens
  misc_RNA (1)...(19): siRNA sense strand
ggcgagacauuaucagagu

SEQ ID NO: 1981791 - RNA, 19 nt, Homo sapiens
  misc_RNA (1)...(19): siRNA sense strand
gaucaagguaauaguaugu

SEQ ID NO: 1981792 - RNA, 19 nt, Homo sapiens
  misc_RNA (1)...(19): siRNA sense strand
gauauaugagcagaagaua

SEQ ID NO: 1981793 - RNA, 19 nt, Homo sapiens
  misc_RNA (1)...(19): siRNA sense strand
aaaguacagugaaggugaa

SEQ ID NO: 1981794 - RNA, 19 nt, Homo sapiens
  misc_RNA (1)...(19): siRNA sense strand
gcaguaaggccugucauag

SEQ ID NO: 1981795 - RNA, 19 nt, Homo sapiens
  misc_RNA (1)...(19): siRNA sense strand
agaagaugcuuuucacuuu

SEQ ID NO: 1981796 - RNA, 19 nt, Homo sapiens
  misc_RNA (1)...(19): siRNA sense strand
agagaaggaccgauugauu

SEQ ID NO: 1981797 - RNA, 19 nt, Homo sapiens
  misc_RNA (1)...(19): siRNA sense strand
acagaucaagguaauagua

SEQ ID NO: 1981798 - RNA, 19 nt, Homo sapiens
  misc_RNA (1)...(19): siRNA sense strand
ugggagacuguaugaauua

SEQ ID NO: 1981799 - RNA, 19 nt, Homo sapiens
  misc_RNA (1)...(19): siRNA sense strand
caaagaaagcucaggaaac

SEQ ID NO: 1981800 - RNA, 19 nt, Homo sapiens
  misc_RNA (1)...(19): siRNA sense strand
guagaagaaauauggaguu

SEQ ID NO: 1981801 - RNA, 19 nt, Homo sapiens
  misc_RNA (1)...(19): siRNA sense strand
uaagagaaggaccgauuga

SEQ ID NO: 1981802 - RNA, 19 nt, Homo sapiens
  misc_RNA (1)...(19): siRNA sense strand
uagcagaacaccagcaguu

SEQ ID NO: 1981803 - RNA, 19 nt, Homo sapiens
  misc_RNA (1)...(19): siRNA sense strand
gagcccaaguagaagaaau

SEQ ID NO: 1981804 - RNA, 19 nt, Homo sapiens
  misc_RNA (1)...(19): siRNA sense strand
ggaguggugccucauggaa

SEQ ID NO: 1981805 - RNA, 19 nt, Homo sapiens
  misc_RNA (1)...(19): siRNA sense strand
gauuggaucagugcaguaa

SEQ ID NO: 1981806 - RNA, 19 nt, Homo sapiens
  misc_RNA (1)...(19): siRNA sense strand
agaugugauucgacaagua

SEQ ID NO: 1981807 - RNA, 19 nt, Homo sapiens
  misc_RNA (1)...(19): siRNA sense strand
uaauaaugcuugugcuacu

SEQ ID NO: 1981808 - RNA, 19 nt, Homo sapiens
  misc_RNA (1)...(19): siRNA sense strand
cagaaggaagcauaauuau

SEQ ID NO: 1981809 - RNA, 19 nt, Homo sapiens
  misc_RNA (1)...(19): siRNA sense strand
gcuuauugaagaagaagua

SEQ ID NO: 1981810 - RNA, 19 nt, Homo sapiens
  misc_RNA (1)...(19): siRNA sense strand
gaugcuuauugaagaagaa

SEQ ID NO: 1981811 - RNA, 19 nt, Homo sapiens
  misc_RNA (1)...(19): siRNA sense strand
cgacaaguacacaacaguu

SEQ ID NO: 1981812 - RNA, 19 nt, Homo sapiens
  misc_RNA (1)...(19): siRNA sense strand
cgagacauuaucagaguuu

SEQ ID NO: 1981813 - RNA, 19 nt, Homo sapiens
  misc_RNA (1)...(19): siRNA sense strand
gcgagacauuaucagaguu

SEQ ID NO: 1981814 - RNA, 19 nt, Homo sapiens
  misc_RNA (1)...(19): siRNA sense strand
cagugaaggugaaauucga

SEQ ID NO: 1981815 - RNA, 19 nt, Homo sapiens
  misc_RNA (1)...(19): siRNA sense strand
caguaaggccugucauaga

SEQ ID NO: 1981816 - RNA, 19 nt, Homo sapiens
  misc_RNA (1)...(19): siRNA sense strand
ccaguucauggguuaauuu

SEQ ID NO: 1981817 - RNA, 19 nt, Homo sapiens
  misc_RNA (1)...(19): siRNA sense strand
augaaaggcuuggcacuga

SEQ ID NO: 1981818 - RNA, 19 nt, Homo sapiens
  misc_RNA (1)...(19): siRNA sense strand
gcuuggcacugagcaauuc

SEQ ID NO: 1981819 - RNA, 19 nt, Homo sapiens
  misc_RNA (1)...(19): siRNA sense strand
cagaacaccagcaguuaau

SEQ ID NO: 1981820 - RNA, 19 nt, Homo sapiens
  misc_RNA (1)...(19): siRNA sense strand
caauucagaugugauucga

SEQ ID NO: 1981821 - RNA, 19 nt, Homo sapiens
  misc_RNA (1)...(19): siRNA sense strand
gaaagcucaggaaaccaaa

SEQ ID NO: 1981822 - RNA, 19 nt, Homo sapiens
  misc_RNA (1)...(19): siRNA sense strand
gaguuuagagccugagaau

SEQ ID NO: 1981823 - RNA, 19 nt, Homo sapiens
  misc_RNA (1)...(19): siRNA sense strand
gcauaauuaucugccuuuc

SEQ ID NO: 1981824 - RNA, 19 nt, Homo sapiens
  misc_RNA (1)...(19): siRNA sense strand
aauaucagaaggaagcaua

SEQ ID NO: 1981825 - RNA, 19 nt, Homo sapiens
  misc_RNA (1)...(19): siRNA sense strand
caagauugagaauaucaga

SEQ ID NO: 1981826 - RNA, 19 nt, Homo sapiens
  misc_RNA (1)...(19): siRNA sense strand
guaaggccugucauagaaa

SEQ ID NO: 1981827 - RNA, 19 nt, Homo sapiens
  misc_RNA (1)...(19): siRNA sense strand
ggucuucaccgagcucauu

SEQ ID NO: 1981828 - RNA, 19 nt, Homo sapiens
  misc_RNA (1)...(19): siRNA sense strand
gugcaugcaaucaagauga

SEQ ID NO: 1981829 - RNA, 19 nt, Homo sapiens
  misc_RNA (1)...(19): siRNA sense strand
uaucugccuuucauuaugg

SEQ ID NO: 1981830 - RNA, 19 nt, Homo sapiens
  misc_RNA (1)...(19): siRNA sense strand
cgccagacagcaaauguuu

SEQ ID NO: 1981831 - RNA, 19 nt, Homo sapiens
  misc_RNA (1)...(19): siRNA sense strand
gaggagcccaaguagaaga

SEQ ID NO: 1981832 - RNA, 19 nt, Homo sapiens
  misc_RNA (1)...(19): siRNA sense strand
gccaguucauggguuaauu

SEQ ID NO: 1981833 - RNA, 19 nt, Homo sapiens
  misc_RNA (1)...(19): siRNA sense strand
gauacagaucaagguaaua

SEQ ID NO: 1981834 - RNA, 19 nt, Homo sapiens
  misc_RNA (1)...(19): siRNA sense strand
agaaagcucaggaaaccaa

SEQ ID NO: 1981835 - RNA, 19 nt, Homo sapiens
  misc_RNA (1)...(19): siRNA sense strand
aaucagaugcuuauugaag

SEQ ID NO: 1981836 - RNA, 19 nt, Homo sapiens
  misc_RNA (1)...(19): siRNA sense strand
cagaucaagguaauaguau

SEQ ID NO: 1981837 - RNA, 19 nt, Homo sapiens
  misc_RNA (1)...(19): siRNA sense strand
gauacgaagacaucagcaa

SEQ ID NO: 1981838 - RNA, 19 nt, Homo sapiens
  misc_RNA (1)...(19): siRNA sense strand
gaguggugccucauggaaa

SEQ ID NO: 1981839 - RNA, 19 nt, Homo sapiens
  misc_RNA (1)...(19): siRNA sense strand
uuaaugggagacuguauga

SEQ ID NO: 1981840 - RNA, 19 nt, Homo sapiens
  misc_RNA (1)...(19): siRNA sense strand
augggagacuguaugaauu

SEQ ID NO: 1981841 - RNA, 19 nt, Homo sapiens
  misc_RNA (1)...(19): siRNA sense strand
guagaaaaggcaaaagaaa

SEQ ID NO: 1981842 - RNA, 19 nt, Homo sapiens
  misc_RNA (1)...(19): siRNA sense strand
uuaucugccuuucauuaug

SEQ ID NO: 1981843 - RNA, 19 nt, Homo sapiens
  misc_RNA (1)...(19): siRNA sense strand
ggaggaacccauggauaca

SEQ ID NO: 1981844 - RNA, 19 nt, Homo sapiens
  misc_RNA (1)...(19): siRNA sense strand
gcacauaucuguagcaucu

SEQ ID NO: 1981845 - RNA, 19 nt, Homo sapiens
  misc_RNA (1)...(19): siRNA sense strand
gaaccacccucgcugcaaa

SEQ ID NO: 1981846 - RNA, 19 nt, Homo sapiens
  misc_RNA (1)...(19): siRNA sense strand
gaacagagaccacaauguc

SEQ ID NO: 1981847 - RNA, 19 nt, Homo sapiens
  misc_RNA (1)...(19): siRNA sense strand
gggaaggacuggaaaggaa

SEQ ID NO: 1981848 - RNA, 19 nt, Homo sapiens
  misc_RNA (1)...(19): siRNA sense strand
gaaaauagcagaacagaga

SEQ ID NO: 1981849 - RNA, 19 nt, Homo sapiens
  misc_RNA (1)...(19): siRNA sense strand
ggaguucucuaaccucaug

SEQ ID NO: 1981850 - RNA, 19 nt, Homo sapiens
  misc_RNA (1)...(19): siRNA sense strand
aaggaaggaugccaguuua

SEQ ID NO: 1981851 - RNA, 19 nt, Homo sapiens
  misc_RNA (1)...(19): siRNA sense strand
gaaccacucucgacugcau

SEQ ID NO: 1981852 - RNA, 19 nt, Homo sapiens
  misc_RNA (1)...(19): siRNA sense strand
acaguggccuggaggaaua

SEQ ID NO: 1981853 - RNA, 19 nt, Homo sapiens
  misc_RNA (1)...(19): siRNA sense strand
ucgagaagcuccaggaaga

SEQ ID NO: 1981854 - RNA, 19 nt, Homo sapiens
  misc_RNA (1)...(19): siRNA sense strand
caaugcggcugcccucaaa

SEQ ID NO: 1981855 - RNA, 19 nt, Homo sapiens
  misc_RNA (1)...(19): siRNA sense strand
caagacagaccgacacuau

SEQ ID NO: 1981856 - RNA, 19 nt, Homo sapiens
  misc_RNA (1)...(19): siRNA sense strand
ggacaucccaggugaggaa

SEQ ID NO: 1981857 - RNA, 19 nt, Homo sapiens
  misc_RNA (1)...(19): siRNA sense strand
cuaagcagcuguucaaugc

SEQ ID NO: 1981858 - RNA, 19 nt, Homo sapiens
  misc_RNA (1)...(19): siRNA sense strand
ggacaaaugugggcuugag

SEQ ID NO: 1981859 - RNA, 19 nt, Homo sapiens
  misc_RNA (1)...(19): siRNA sense strand
gcacacagaucaggaccau

SEQ ID NO: 1981860 - RNA, 19 nt, Homo sapiens
  misc_RNA (1)...(19): siRNA sense strand
gugagacgguguccacuga

SEQ ID NO: 1981861 - RNA, 19 nt, Homo sapiens
  misc_RNA (1)...(19): siRNA sense strand
gugcaaacaugaagaagag

SEQ ID NO: 1981862 - RNA, 19 nt, Homo sapiens
  misc_RNA (1)...(19): siRNA sense strand
gugcacagaugcugaaugg

SEQ ID NO: 1981863 - RNA, 19 nt, Homo sapiens
  misc_RNA (1)...(19): siRNA sense strand
ccaaugggcacacagauga

SEQ ID NO: 1981864 - RNA, 19 nt, Homo sapiens
  misc_RNA (1)...(19): siRNA sense strand
ggcaaggacuucuccaauc

SEQ ID NO: 1981865 - RNA, 19 nt, Homo sapiens
  misc_RNA (1)...(19): siRNA sense strand
ggcacucacuucugcgaua

SEQ ID NO: 1981866 - RNA, 19 nt, Homo sapiens
  misc_RNA (1)...(19): siRNA sense strand
gaaggaugccaguuuacuu

SEQ ID NO: 1981867 - RNA, 19 nt, Homo sapiens
  misc_RNA (1)...(19): siRNA sense strand
gucccaaacuucucccuaa

SEQ ID NO: 1981868 - RNA, 19 nt, Homo sapiens
  misc_RNA (1)...(19): siRNA sense strand
gcaaggacuucuccaaucc

SEQ ID NO: 1981869 - RNA, 19 nt, Homo sapiens
  misc_RNA (1)...(19): siRNA sense strand
ccaaggaguucuuaaaucc

SEQ ID NO: 1981870 - RNA, 19 nt, Homo sapiens
  misc_RNA (1)...(19): siRNA sense strand
gaaaggcgacucgggaaga

SEQ ID NO: 1981871 - RNA, 19 nt, Homo sapiens
  misc_RNA (1)...(19): siRNA sense strand
caacuccucuucccacucu

SEQ ID NO: 1981872 - RNA, 19 nt, Homo sapiens
  misc_RNA (1)...(19): siRNA sense strand
aaaggaaggaugccaguuu

SEQ ID NO: 1981873 - RNA, 19 nt, Homo sapiens
  misc_RNA (1)...(19): siRNA sense strand
aaagagcuaucgccacuca

SEQ ID NO: 1981874 - RNA, 19 nt, Homo sapiens
  misc_RNA (1)...(19): siRNA sense strand
ggaaguggccagggugaaa

SEQ ID NO: 1981875 - RNA, 19 nt, Homo sapiens
  misc_RNA (1)...(19): siRNA sense strand
ccacagccacaaccacaua

SEQ ID NO: 1981876 - RNA, 19 nt, Homo sapiens
  misc_RNA (1)...(19): siRNA sense strand
agagacaccugacugugaa

SEQ ID NO: 1981877 - RNA, 19 nt, Homo sapiens
  misc_RNA (1)...(19): siRNA sense strand
agacagaccgacacuauug

SEQ ID NO: 1981878 - RNA, 19 nt, Homo sapiens
  misc_RNA (1)...(19): siRNA sense strand
caagacagcagcacauauc

SEQ ID NO: 1981879 - RNA, 19 nt, Homo sapiens
  misc_RNA (1)...(19): siRNA sense strand
ccagccagcagccuucuua

SEQ ID NO: 1981880 - RNA, 19 nt, Homo sapiens
  misc_RNA (1)...(19): siRNA sense strand
ucugugggcugcucuuuga

SEQ ID NO: 1981881 - RNA, 19 nt, Homo sapiens
  misc_RNA (1)...(19): siRNA sense strand
ggagcuagaagacaaugaa

SEQ ID NO: 1981882 - RNA, 19 nt, Homo sapiens
  misc_RNA (1)...(19): siRNA sense strand
gaaggcaaccuggaaagug

SEQ ID NO: 1981883 - RNA, 19 nt, Homo sapiens
  misc_RNA (1)...(19): siRNA sense strand
gaaaaccagacaaaacaua

SEQ ID NO: 1981884 - RNA, 19 nt, Homo sapiens
  misc_RNA (1)...(19): siRNA sense strand
gacaagcggugacguccau

SEQ ID NO: 1981885 - RNA, 19 nt, Homo sapiens
  misc_RNA (1)...(19): siRNA sense strand
gacaagacagcagcacaua

SEQ ID NO: 1981886 - RNA, 19 nt, Homo sapiens
  misc_RNA (1)...(19): siRNA sense strand
aaggcaaccuggaaaguga

SEQ ID NO: 1981887 - RNA, 19 nt, Homo sapiens
  misc_RNA (1)...(19): siRNA sense strand
cuaaccugcugucucuuaa

SEQ ID NO: 1981888 - RNA, 19 nt, Homo sapiens
  misc_RNA (1)...(19): siRNA sense strand
gaccaucggcccuauaagu

SEQ ID NO: 1981889 - RNA, 19 nt, Homo sapiens
  misc_RNA (1)...(19): siRNA sense strand
ccaccagaccggccacuuu

SEQ ID NO: 1981890 - RNA, 19 nt, Homo sapiens
  misc_RNA (1)...(19): siRNA sense strand
guaaucaucugcggaacca

SEQ ID NO: 1981891 - RNA, 19 nt, Homo sapiens
  misc_RNA (1)...(19): siRNA sense strand
gcacucacuucugcgauag

SEQ ID NO: 1981892 - RNA, 19 nt, Homo sapiens
  misc_RNA (1)...(19): siRNA sense strand
ggaacaguaucuggcugaa

SEQ ID NO: 1981893 - RNA, 19 nt, Homo sapiens
  misc_RNA (1)...(19): siRNA sense strand
ccuaaccugcugucucuua

SEQ ID NO: 1981894 - RNA, 19 nt, Homo sapiens
  misc_RNA (1)...(19): siRNA sense strand
gggaggagaccacugugaa

SEQ ID NO: 1981895 - RNA, 19 nt, Homo sapiens
  misc_RNA (1)...(19): siRNA sense strand
gacaggagacuucaguugu

SEQ ID NO: 1981896 - RNA, 19 nt, Homo sapiens
  misc_RNA (1)...(19): siRNA sense strand
gaagaggccacggacauca

SEQ ID NO: 1981897 - RNA, 19 nt, Homo sapiens
  misc_RNA (1)...(19): siRNA sense strand
acacagaucaggaccaugu

SEQ ID NO: 1981898 - RNA, 19 nt, Homo sapiens
  misc_RNA (1)...(19): siRNA sense strand
ccagcagccuucuuagcaa

SEQ ID NO: 1981899 - RNA, 19 nt, Homo sapiens
  misc_RNA (1)...(19): siRNA sense strand
gaaagggagccagccaaug

SEQ ID NO: 1981900 - RNA, 19 nt, Homo sapiens
  misc_RNA (1)...(19): siRNA sense strand
cauagugaauucugucucu

SEQ ID NO: 1981901 - RNA, 19 nt, Homo sapiens
  misc_RNA (1)...(19): siRNA sense strand
uggaggacauagugaauuc

SEQ ID NO: 1981902 - RNA, 19 nt, Homo sapiens
  misc_RNA (1)...(19): siRNA sense strand
guucuaagcagcuguucaa

SEQ ID NO: 1981903 - RNA, 19 nt, Homo sapiens
  misc_RNA (1)...(19): siRNA sense strand
aacaguaucuggcugaauc

SEQ ID NO: 1981904 - RNA, 19 nt, Homo sapiens
  misc_RNA (1)...(19): siRNA sense strand
gcaaggaguuggggaaaau

SEQ ID NO: 1981905 - RNA, 19 nt, Homo sapiens
  misc_RNA (1)...(19): siRNA sense strand
gagcaugaggagacagaaa

SEQ ID NO: 1981906 - RNA, 19 nt, Homo sapiens
  misc_RNA (1)...(19): siRNA sense strand
gcuccaagggcuucucaaa

SEQ ID NO: 1981907 - RNA, 19 nt, Homo sapiens
  misc_RNA (1)...(19): siRNA sense strand
gcaagcagaagucgagaag

SEQ ID NO: 1981908 - RNA, 19 nt, Homo sapiens
  misc_RNA (1)...(19): siRNA sense strand
gcucacacaugcucugacu

SEQ ID NO: 1981909 - RNA, 19 nt, Homo sapiens
  misc_RNA (1)...(19): siRNA sense strand
acaggagacuucaguugug

SEQ ID NO: 1981910 - RNA, 19 nt, Homo sapiens
  misc_RNA (1)...(19): siRNA sense strand
gcagaacagagaccacaau

SEQ ID NO: 1981911 - RNA, 19 nt, Homo sapiens
  misc_RNA (1)...(19): siRNA sense strand
uuagcaacuuggaacagua

SEQ ID NO: 1981912 - RNA, 19 nt, Homo sapiens
  misc_RNA (1)...(19): siRNA sense strand
ccacaacaccaacaagaca

SEQ ID NO: 1981913 - RNA, 19 nt, Homo sapiens
  misc_RNA (1)...(19): siRNA sense strand
gaugccaguuuacuugaca

SEQ ID NO: 1981914 - RNA, 19 nt, Homo sapiens
  misc_RNA (1)...(19): siRNA sense strand
gaaaggaaggaugccaguu

SEQ ID NO: 1981915 - RNA, 19 nt, Homo sapiens
  misc_RNA (1)...(19): siRNA sense strand
guaucggccuuaccacugu

SEQ ID NO: 1981916 - RNA, 19 nt, Homo sapiens
  misc_RNA (1)...(19): siRNA sense strand
cauagacgcccagaccuuu

SEQ ID NO: 1981917 - RNA, 19 nt, Homo sapiens
  misc_RNA (1)...(19): siRNA sense strand
gaacugcuccauccaucuc

SEQ ID NO: 1981918 - RNA, 19 nt, Homo sapiens
  misc_RNA (1)...(19): siRNA sense strand
ucaaggaguucucuaaccu

SEQ ID NO: 1981919 - RNA, 19 nt, Homo sapiens
  misc_RNA (1)...(19): siRNA sense strand
ggguggagaugccaagucu

SEQ ID NO: 1981920 - RNA, 19 nt, Homo sapiens
  misc_RNA (1)...(19): siRNA sense strand
gcuggacagugcaggguau

SEQ ID NO: 1981921 - RNA, 19 nt, Homo sapiens
  misc_RNA (1)...(19): siRNA sense strand
ggacaguggccuggaggaa

SEQ ID NO: 1981922 - RNA, 19 nt, Homo sapiens
  misc_RNA (1)...(19): siRNA sense strand
gggacuagagacccaauug

SEQ ID NO: 1981923 - RNA, 19 nt, Homo sapiens
  misc_RNA (1)...(19): siRNA sense strand
aaagggagccagccaaugg

SEQ ID NO: 1981924 - RNA, 19 nt, Homo sapiens
  misc_RNA (1)...(19): siRNA sense strand
ucacacaugcucugacugu

SEQ ID NO: 1981925 - RNA, 19 nt, Homo sapiens
  misc_RNA (1)...(19): siRNA sense strand
caaggcugcucgccgaagu

SEQ ID NO: 1981926 - RNA, 19 nt, Homo sapiens
  misc_RNA (1)...(19): siRNA sense strand
cagcagcacauaucuguag

SEQ ID NO: 1981927 - RNA, 19 nt, Homo sapiens
  misc_RNA (1)...(19): siRNA sense strand
uccaaggaguucuuaaauc

SEQ ID NO: 1981928 - RNA, 19 nt, Homo sapiens
  misc_RNA (1)...(19): siRNA sense strand
gccacacgcugggcaucua

SEQ ID NO: 1981929 - RNA, 19 nt, Homo sapiens
  misc_RNA (1)...(19): siRNA sense strand
aaccugcugucucuuaaga

SEQ ID NO: 1981930 - RNA, 19 nt, Homo sapiens
  misc_RNA (1)...(19): siRNA sense strand
gcuccaggaagaacuuaaa

SEQ ID NO: 1981931 - RNA, 19 nt, Homo sapiens
  misc_RNA (1)...(19): siRNA sense strand
gaagcuccaggaagaacuu

SEQ ID NO: 1981932 - RNA, 19 nt, Homo sapiens
  misc_RNA (1)...(19): siRNA sense strand
aagagacaccugacuguga

SEQ ID NO: 1981933 - RNA, 19 nt, Homo sapiens
  misc_RNA (1)...(19): siRNA sense strand
gcugaaggcaaccuggaaa

SEQ ID NO: 1981934 - RNA, 19 nt, Homo sapiens
  misc_RNA (1)...(19): siRNA sense strand
gaacaguaucuggcugaau

SEQ ID NO: 1981935 - RNA, 19 nt, Homo sapiens
  misc_RNA (1)...(19): siRNA sense strand
ggauagcugggacaacaga

SEQ ID NO: 1981936 - RNA, 19 nt, Homo sapiens
  misc_RNA (1)...(19): siRNA sense strand
aagcagaagucgagaagcu

SEQ ID NO: 1981937 - RNA, 19 nt, Homo sapiens
  misc_RNA (1)...(19): siRNA sense strand
aggcuuggcucuagugaag

SEQ ID NO: 1981938 - RNA, 19 nt, Homo sapiens
  misc_RNA (1)...(19): siRNA sense strand
ccucauggcucugaagaac

SEQ ID NO: 1981939 - RNA, 19 nt, Homo sapiens
  misc_RNA (1)...(19): siRNA sense strand
ccugcucacucuguucuaa

SEQ ID NO: 1981940 - RNA, 19 nt, Homo sapiens
  misc_RNA (1)...(19): siRNA sense strand
ggguggugcugagccagua

SEQ ID NO: 1981941 - RNA, 19 nt, Homo sapiens
  misc_RNA (1)...(19): siRNA sense strand
gccagcagccuucuuagca

SEQ ID NO: 1981942 - RNA, 19 nt, Homo sapiens
  misc_RNA (1)...(19): siRNA sense strand
ccacgagacuggccuuuuc

SEQ ID NO: 1981943 - RNA, 19 nt, Homo sapiens
  misc_RNA (1)...(19): siRNA sense strand
ccaaucccauggcucucaa

SEQ ID NO: 1981944 - RNA, 19 nt, Homo sapiens
  misc_RNA (1)...(19): siRNA sense strand
auaaagaccucaucaacua

SEQ ID NO: 1981945 - RNA, 19 nt, Homo sapiens
  misc_RNA (1)...(19): siRNA sense strand
gcacaggucuuccacaucu

SEQ ID NO: 1981946 - RNA, 19 nt, Homo sapiens
  misc_RNA (1)...(19): siRNA sense strand
aagauaagguguccuauga

SEQ ID NO: 1981947 - RNA, 19 nt, Homo sapiens
  misc_RNA (1)...(19): siRNA sense strand
cgacagccauguucagauu

SEQ ID NO: 1981948 - RNA, 19 nt, Homo sapiens
  misc_RNA (1)...(19): siRNA sense strand
guugacaucucucuggauu

SEQ ID NO: 1981949 - RNA, 19 nt, Homo sapiens
  misc_RNA (1)...(19): siRNA sense strand
uaagguguccuaugaggua

SEQ ID NO: 1981950 - RNA, 19 nt, Homo sapiens
  misc_RNA (1)...(19): siRNA sense strand
gacaggaacuuuguagaca

SEQ ID NO: 1981951 - RNA, 19 nt, Homo sapiens
  misc_RNA (1)...(19): siRNA sense strand
cugcagcccucuuugauga

SEQ ID NO: 1981952 - RNA, 19 nt, Homo sapiens
  misc_RNA (1)...(19): siRNA sense strand
ggcagagugugacaucauu

SEQ ID NO: 1981953 - RNA, 19 nt, Homo sapiens
  misc_RNA (1)...(19): siRNA sense strand
gggcacaggucuuccacau

SEQ ID NO: 1981954 - RNA, 19 nt, Homo sapiens
  misc_RNA (1)...(19): siRNA sense strand
gaccucaucaacuacaaua

SEQ ID NO: 1981955 - RNA, 19 nt, Homo sapiens
  misc_RNA (1)...(19): siRNA sense strand
ggauuucccuuacaaaaga

SEQ ID NO: 1981956 - RNA, 19 nt, Homo sapiens
  misc_RNA (1)...(19): siRNA sense strand
gaacugugaccgugaugau

SEQ ID NO: 1981957 - RNA, 19 nt, Homo sapiens
  misc_RNA (1)...(19): siRNA sense strand
cagaaauguuugaggucua

SEQ ID NO: 1981958 - RNA, 19 nt, Homo sapiens
  misc_RNA (1)...(19): siRNA sense strand
caggugcucuccaauaaag

SEQ ID NO: 1981959 - RNA, 19 nt, Homo sapiens
  misc_RNA (1)...(19): siRNA sense strand
ucaagaccaucuccaucaa

SEQ ID NO: 1981960 - RNA, 19 nt, Homo sapiens
  misc_RNA (1)...(19): siRNA sense strand
gcugcaagcugaccaucug

SEQ ID NO: 1981961 - RNA, 19 nt, Homo sapiens
  misc_RNA (1)...(19): siRNA sense strand
ggacaggaacuuuguagac

SEQ ID NO: 1981962 - RNA, 19 nt, Homo sapiens
  misc_RNA (1)...(19): siRNA sense strand
caauaaagaccucaucaac

SEQ ID NO: 1981963 - RNA, 19 nt, Homo sapiens
  misc_RNA (1)...(19): siRNA sense strand
accaggugcucuccaauaa

SEQ ID NO: 1981964 - RNA, 19 nt, Homo sapiens
  misc_RNA (1)...(19): siRNA sense strand
caagauaagguguccuaug

SEQ ID NO: 1981965 - RNA, 19 nt, Homo sapiens
  misc_RNA (1)...(19): siRNA sense strand
gcaucuugcuggugaacug

SEQ ID NO: 1981966 - RNA, 19 nt, Homo sapiens
  misc_RNA (1)...(19): siRNA sense strand
ugagggcacagaaauguuu

SEQ ID NO: 1981967 - RNA, 19 nt, Homo sapiens
  misc_RNA (1)...(19): siRNA sense strand
agaaauguuugaggucuau

SEQ ID NO: 1981968 - RNA, 19 nt, Homo sapiens
  misc_RNA (1)...(19): siRNA sense strand
ggaugaguuucugagcuuu

SEQ ID NO: 1981969 - RNA, 19 nt, Homo sapiens
  misc_RNA (1)...(19): siRNA sense strand
ucaaccaggugcucuccaa

SEQ ID NO: 1981970 - RNA, 19 nt, Homo sapiens
  misc_RNA (1)...(19): siRNA sense strand
gcugcugccuggaggagaa

SEQ ID NO: 1981971 - RNA, 19 nt, Homo sapiens
  misc_RNA (1)...(19): siRNA sense strand
uugaugacuucacuccaua

SEQ ID NO: 1981972 - RNA, 19 nt, Homo sapiens
  misc_RNA (1)...(19): siRNA sense strand
ugacaucucucuggauugc

SEQ ID NO: 1981973 - RNA, 19 nt, Homo sapiens
  misc_RNA (1)...(19): siRNA sense strand
ccacugcaccuucauugau

SEQ ID NO: 1981974 - RNA, 19 nt, Homo sapiens
  misc_RNA (1)...(19): siRNA sense strand
ccaauaaagaccucaucaa

SEQ ID NO: 1981975 - RNA, 19 nt, Homo sapiens
  misc_RNA (1)...(19): siRNA sense strand
uggaugaguuucugagcuu

SEQ ID NO: 1981976 - RNA, 19 nt, Homo sapiens
  misc_RNA (1)...(19): siRNA sense strand
guguaugugugccguguga

SEQ ID NO: 1981977 - RNA, 19 nt, Homo sapiens
  misc_RNA (1)...(19): siRNA sense strand
guggcacccuggaucauga

SEQ ID NO: 1981978 - RNA, 19 nt, Homo sapiens
  misc_RNA (1)...(19): siRNA sense strand
ggacgacuccaacgaggau

SEQ ID NO: 1981979 - RNA, 19 nt, Homo sapiens
  misc_RNA (1)...(19): siRNA sense strand
gccaagauaagguguccua

SEQ ID NO: 1981980 - RNA, 19 nt, Homo sapiens
  misc_RNA (1)...(19): siRNA sense strand
gcaggacaggaacuuugua

SEQ ID NO: 1981981 - RNA, 19 nt, Homo sapiens
  misc_RNA (1)...(19): siRNA sense strand
gugaugauccgagcuguga

SEQ ID NO: 1981982 - RNA, 19 nt, Homo sapiens
  misc_RNA (1)...(19): siRNA sense strand
caaccugccugggucaagu

SEQ ID NO: 1981983 - RNA, 19 nt, Homo sapiens
  misc_RNA (1)...(19): siRNA sense strand
agacccucguggacauuua

SEQ ID NO: 1981984 - RNA, 19 nt, Homo sapiens
  misc_RNA (1)...(19): siRNA sense strand
gaaggcaggacaggaacuu

SEQ ID NO: 1981985 - RNA, 19 nt, Homo sapiens
  misc_RNA (1)...(19): siRNA sense strand
ggugaacugugaccgugau

SEQ ID NO: 1981986 - RNA, 19 nt, Homo sapiens
  misc_RNA (1)...(19): siRNA sense strand
gcaggauuucccuuacaaa

SEQ ID NO: 1981987 - RNA, 19 nt, Homo sapiens
  misc_RNA (1)...(19): siRNA sense strand
ggccuguccuucccugaug

SEQ ID NO: 1981988 - RNA, 19 nt, Homo sapiens
  misc_RNA (1)...(19): siRNA sense strand
ggaugugugugaggccuau

SEQ ID NO: 1981989 - RNA, 19 nt, Homo sapiens
  misc_RNA (1)...(19): siRNA sense strand
ugcaagaccuggaagacau

SEQ ID NO: 1981990 - RNA, 19 nt, Homo sapiens
  misc_RNA (1)...(19): siRNA sense strand
gcaagaccuggaagacaug

SEQ ID NO: 1981991 - RNA, 19 nt, Homo sapiens
  misc_RNA (1)...(19): siRNA sense strand
gucaagaccaucuccauca

SEQ ID NO: 1981992 - RNA, 19 nt, Homo sapiens
  misc_RNA (1)...(19): siRNA sense strand
gaugauccgagcugugaug

SEQ ID NO: 1981993 - RNA, 19 nt, Homo sapiens
  misc_RNA (1)...(19): siRNA sense strand
ggcaugugcugggccaaga

SEQ ID NO: 1981994 - RNA, 19 nt, Homo sapiens
  misc_RNA (1)...(19): siRNA sense strand
cacugcaccuucauugaug

SEQ ID NO: 1981995 - RNA, 19 nt, Homo sapiens
  misc_RNA (1)...(19): siRNA sense strand
gcagagugugacaucauug

SEQ ID NO: 1981996 - RNA, 19 nt, Homo sapiens
  misc_RNA (1)...(19): siRNA sense strand
aaccaggugcucuccaaua

SEQ ID NO: 1981997 - RNA, 19 nt, Homo sapiens
  misc_RNA (1)...(19): siRNA sense strand
ggaugaggagcgcuucuuc

SEQ ID NO: 1981998 - RNA, 19 nt, Homo sapiens
  misc_RNA (1)...(19): siRNA sense strand
cagagugugacaucauuga

SEQ ID NO: 1981999 - RNA, 19 nt, Homo sapiens
  misc_RNA (1)...(19): siRNA sense strand
acagccauguucagauuuc

SEQ ID NO: 1982000 - RNA, 19 nt, Homo sapiens
  misc_RNA (1)...(19): siRNA sense strand
ggccuccacugcaccuuca

SEQ ID NO: 1982001 - RNA, 19 nt, Homo sapiens
  misc_RNA (1)...(19): siRNA sense strand
ccucaccuguguugacauc

SEQ ID NO: 1982002 - RNA, 19 nt, Homo sapiens
  misc_RNA (1)...(19): siRNA sense strand
gcacuguggcaccaaugug

SEQ ID NO: 1982003 - RNA, 19 nt, Homo sapiens
  misc_RNA (1)...(19): siRNA sense strand
ugacgcgacuuuggagauc

SEQ ID NO: 1982004 - RNA, 19 nt, Homo sapiens
  misc_RNA (1)...(19): siRNA sense strand
ccaggugcucuccaauaaa

SEQ ID NO: 1982005 - RNA, 19 nt, Homo sapiens
  misc_RNA (1)...(19): siRNA sense strand
ggagaucaucguggucaug

SEQ ID NO: 1982006 - RNA, 19 nt, Homo sapiens
  misc_RNA (1)...(19): siRNA sense strand
caaacgggcacaggucuuc

SEQ ID NO: 1982007 - RNA, 19 nt, Homo sapiens
  misc_RNA (1)...(19): siRNA sense strand
cuccagcuaugaugccaaa

SEQ ID NO: 1982008 - RNA, 19 nt, Homo sapiens
  misc_RNA (1)...(19): siRNA sense strand
auugcgaccugaacuguga

SEQ ID NO: 1982009 - RNA, 19 nt, Homo sapiens
  misc_RNA (1)...(19): siRNA sense strand
ugcaggauuucccuuacaa

SEQ ID NO: 1982010 - RNA, 19 nt, Homo sapiens
  misc_RNA (1)...(19): siRNA sense strand
caugugcugggccaagaua

SEQ ID NO: 1982011 - RNA, 19 nt, Homo sapiens
  misc_RNA (1)...(19): siRNA sense strand
gaugaguuucugagcuuug

SEQ ID NO: 1982012 - RNA, 19 nt, Homo sapiens
  misc_RNA (1)...(19): siRNA sense strand
ggauugcgaccugaacugu

SEQ ID NO: 1982013 - RNA, 19 nt, Homo sapiens
  misc_RNA (1)...(19): siRNA sense strand
ugacaucccacagcucuuc

SEQ ID NO: 1982014 - RNA, 19 nt, Homo sapiens
  misc_RNA (1)...(19): siRNA sense strand
agagcugcaucgacuggaa

SEQ ID NO: 1982015 - RNA, 19 nt, Homo sapiens
  misc_RNA (1)...(19): siRNA sense strand
cucaucaacuacaauaagu

SEQ ID NO: 1982016 - RNA, 19 nt, Homo sapiens
  misc_RNA (1)...(19): siRNA sense strand
aauaaagaccucaucaacu

SEQ ID NO: 1982017 - RNA, 19 nt, Homo sapiens
  misc_RNA (1)...(19): siRNA sense strand
gcccugcagcccucuuuga

SEQ ID NO: 1982018 - RNA, 19 nt, Homo sapiens
  misc_RNA (1)...(19): siRNA sense strand
ccucaucaacuacaauaag

SEQ ID NO: 1982019 - RNA, 19 nt, Homo sapiens
  misc_RNA (1)...(19): siRNA sense strand
ccucaacgacagccauguu

SEQ ID NO: 1982020 - RNA, 19 nt, Homo sapiens
  misc_RNA (1)...(19): siRNA sense strand
gccauguucagauuuccua

SEQ ID NO: 1982021 - RNA, 19 nt, Homo sapiens
  misc_RNA (1)...(19): siRNA sense strand
gagugugacaucauugaca

SEQ ID NO: 1982022 - RNA, 19 nt, Homo sapiens
  misc_RNA (1)...(19): siRNA sense strand
gagacccucguggacauuu

SEQ ID NO: 1982023 - RNA, 19 nt, Homo sapiens
  misc_RNA (1)...(19): siRNA sense strand
gacagccauguucagauuu

SEQ ID NO: 1982024 - RNA, 19 nt, Homo sapiens
  misc_RNA (1)...(19): siRNA sense strand
aaacuuguccuccauaccu

SEQ ID NO: 1982025 - RNA, 19 nt, Homo sapiens
  misc_RNA (1)...(19): siRNA sense strand
ggagcgcuucuucguggaa

SEQ ID NO: 1982026 - RNA, 19 nt, Homo sapiens
  misc_RNA (1)...(19): siRNA sense strand
caauauacuuugcugcuua

SEQ ID NO: 1982027 - RNA, 19 nt, Homo sapiens
  misc_RNA (1)...(19): siRNA sense strand
gaacaagacuacgugaaga

SEQ ID NO: 1982028 - RNA, 19 nt, Homo sapiens
  misc_RNA (1)...(19): siRNA sense strand
gggcaugucugcuucauau

SEQ ID NO: 1982029 - RNA, 19 nt, Homo sapiens
  misc_RNA (1)...(19): siRNA sense strand
gaaagaagcaucagauuuu

SEQ ID NO: 1982030 - RNA, 19 nt, Homo sapiens
  misc_RNA (1)...(19): siRNA sense strand
caucuucugugacgcuuua

SEQ ID NO: 1982031 - RNA, 19 nt, Homo sapiens
  misc_RNA (1)...(19): siRNA sense strand
cagagacuguuauccauuu

SEQ ID NO: 1982032 - RNA, 19 nt, Homo sapiens
  misc_RNA (1)...(19): siRNA sense strand
ccuaugaauuggugguuua

SEQ ID NO: 1982033 - RNA, 19 nt, Homo sapiens
  misc_RNA (1)...(19): siRNA sense strand
uaagacugcuucuacaaug

SEQ ID NO: 1982034 - RNA, 19 nt, Homo sapiens
  misc_RNA (1)...(19): siRNA sense strand
ugaaagaagcaucagauuu

SEQ ID NO: 1982035 - RNA, 19 nt, Homo sapiens
  misc_RNA (1)...(19): siRNA sense strand
ugaagagucugugaaagaa

SEQ ID NO: 1982036 - RNA, 19 nt, Homo sapiens
  misc_RNA (1)...(19): siRNA sense strand
gggccucguuccuuguuua

SEQ ID NO: 1982037 - RNA, 19 nt, Homo sapiens
  misc_RNA (1)...(19): siRNA sense strand
aaacacagccauuaugaug

SEQ ID NO: 1982038 - RNA, 19 nt, Homo sapiens
  misc_RNA (1)...(19): siRNA sense strand
ccaaacacagccauuauga

SEQ ID NO: 1982039 - RNA, 19 nt, Homo sapiens
  misc_RNA (1)...(19): siRNA sense strand
gugaagagucugugaaaga

SEQ ID NO: 1982040 - RNA, 19 nt, Homo sapiens
  misc_RNA (1)...(19): siRNA sense strand
ccaaguacauaugauuuca

SEQ ID NO: 1982041 - RNA, 19 nt, Homo sapiens
  misc_RNA (1)...(19): siRNA sense strand
gaauauaagacugcuucua

SEQ ID NO: 1982042 - RNA, 19 nt, Homo sapiens
  misc_RNA (1)...(19): siRNA sense strand
gauggccaccuaugaauug

SEQ ID NO: 1982043 - RNA, 19 nt, Homo sapiens
  misc_RNA (1)...(19): siRNA sense strand
auacuuugcugcuuauuca

SEQ ID NO: 1982044 - RNA, 19 nt, Homo sapiens
  misc_RNA (1)...(19): siRNA sense strand
gguuaugggucucuuuauc

SEQ ID NO: 1982045 - RNA, 19 nt, Homo sapiens
  misc_RNA (1)...(19): siRNA sense strand
uauagcauauccacauguu

SEQ ID NO: 1982046 - RNA, 19 nt, Homo sapiens
  misc_RNA (1)...(19): siRNA sense strand
ucagacagauggacuaaaa

SEQ ID NO: 1982047 - RNA, 19 nt, Homo sapiens
  misc_RNA (1)...(19): siRNA sense strand
ccauuuggcuuauaaagac

SEQ ID NO: 1982048 - RNA, 19 nt, Homo sapiens
  misc_RNA (1)...(19): siRNA sense strand
gccuaaaggugaucuugga

SEQ ID NO: 1982049 - RNA, 19 nt, Homo sapiens
  misc_RNA (1)...(19): siRNA sense strand
ucugacaacucaucuagug

SEQ ID NO: 1982050 - RNA, 19 nt, Homo sapiens
  misc_RNA (1)...(19): siRNA sense strand
gcaaggaaaaguugaauga

SEQ ID NO: 1982051 - RNA, 19 nt, Homo sapiens
  misc_RNA (1)...(19): siRNA sense strand
ugaauguguucguaaagug

SEQ ID NO: 1982052 - RNA, 19 nt, Homo sapiens
  misc_RNA (1)...(19): siRNA sense strand
ucugugacgcuuuauauuu

SEQ ID NO: 1982053 - RNA, 19 nt, Homo sapiens
  misc_RNA (1)...(19): siRNA sense strand
gggacacgcuggugcaucu

SEQ ID NO: 1982054 - RNA, 19 nt, Homo sapiens
  misc_RNA (1)...(19): siRNA sense strand
uaaaguguaucagacagau

SEQ ID NO: 1982055 - RNA, 19 nt, Homo sapiens
  misc_RNA (1)...(19): siRNA sense strand
uauucaaacugcaaggaaa

SEQ ID NO: 1982056 - RNA, 19 nt, Homo sapiens
  misc_RNA (1)...(19): siRNA sense strand
uaaaggugaucuuggaaaa

SEQ ID NO: 1982057 - RNA, 19 nt, Homo sapiens
  misc_RNA (1)...(19): siRNA sense strand
gcgaaugggugcuuuugaa

SEQ ID NO: 1982058 - RNA, 19 nt, Homo sapiens
  misc_RNA (1)...(19): siRNA sense strand
gcuuauaaagacucgguua

SEQ ID NO: 1982059 - RNA, 19 nt, Homo sapiens
  misc_RNA (1)...(19): siRNA sense strand
ugccacaacuauagcauau

SEQ ID NO: 1982060 - RNA, 19 nt, Homo sapiens
  misc_RNA (1)...(19): siRNA sense strand
gaagguuaugggucucuuu

SEQ ID NO: 1982061 - RNA, 19 nt, Homo sapiens
  misc_RNA (1)...(19): siRNA sense strand
ccacaacuauagcauaucc

SEQ ID NO: 1982062 - RNA, 19 nt, Homo sapiens
  misc_RNA (1)...(19): siRNA sense strand
gcauauccacauguuguaa

SEQ ID NO: 1982063 - RNA, 19 nt, Homo sapiens
  misc_RNA (1)...(19): siRNA sense strand
ggaaaauggugaagagucu

SEQ ID NO: 1982064 - RNA, 19 nt, Homo sapiens
  misc_RNA (1)...(19): siRNA sense strand
gagacagauuccaaacaca

SEQ ID NO: 1982065 - RNA, 19 nt, Homo sapiens
  misc_RNA (1)...(19): siRNA sense strand
ugagacagauuccaaacac

SEQ ID NO: 1982066 - RNA, 19 nt, Homo sapiens
  misc_RNA (1)...(19): siRNA sense strand
gaaaggcgaaugggugcuu

SEQ ID NO: 1982067 - RNA, 19 nt, Homo sapiens
  misc_RNA (1)...(19): siRNA sense strand
gaauguguucguaaagugu

SEQ ID NO: 1982068 - RNA, 19 nt, Homo sapiens
  misc_RNA (1)...(19): siRNA sense strand
ggacuaggccccaauuuag

SEQ ID NO: 1982069 - RNA, 19 nt, Homo sapiens
  misc_RNA (1)...(19): siRNA sense strand
gacucuaucuuugcuuguu

SEQ ID NO: 1982070 - RNA, 19 nt, Homo sapiens
  misc_RNA (1)...(19): siRNA sense strand
uagcauauccacauguugu

SEQ ID NO: 1982071 - RNA, 19 nt, Homo sapiens
  misc_RNA (1)...(19): siRNA sense strand
gugaaagaagcaucagauu

SEQ ID NO: 1982072 - RNA, 19 nt, Homo sapiens
  misc_RNA (1)...(19): siRNA sense strand
guaaaguguaucagacaga

SEQ ID NO: 1982073 - RNA, 19 nt, Homo sapiens
  misc_RNA (1)...(19): siRNA sense strand
gauucuacccaaguacaua

SEQ ID NO: 1982074 - RNA, 19 nt, Homo sapiens
  misc_RNA (1)...(19): siRNA sense strand
cugugacgcuuuauauuuc

SEQ ID NO: 1982075 - RNA, 19 nt, Homo sapiens
  misc_RNA (1)...(19): siRNA sense strand
gguauaucagagacuguua

SEQ ID NO: 1982076 - RNA, 19 nt, Homo sapiens
  misc_RNA (1)...(19): siRNA sense strand
cauaugauuucagcugcaa

SEQ ID NO: 1982077 - RNA, 19 nt, Homo sapiens
  misc_RNA (1)...(19): siRNA sense strand
uaugauggccaccuaugaa

SEQ ID NO: 1982078 - RNA, 19 nt, Homo sapiens
  misc_RNA (1)...(19): siRNA sense strand
uauaaagacucgguuacag

SEQ ID NO: 1982079 - RNA, 19 nt, Homo sapiens
  misc_RNA (1)...(19): siRNA sense strand
cuaaaggugaucuuggaaa

SEQ ID NO: 1982080 - RNA, 19 nt, Homo sapiens
  misc_RNA (1)...(19): siRNA sense strand
ugaauuggugguuuaccua

SEQ ID NO: 1982081 - RNA, 19 nt, Homo sapiens
  misc_RNA (1)...(19): siRNA sense strand
gccggaggaugugguggua

SEQ ID NO: 1982082 - RNA, 19 nt, Homo sapiens
  misc_RNA (1)...(19): siRNA sense strand
ggucugacaacucaucuag

SEQ ID NO: 1982083 - RNA, 19 nt, Homo sapiens
  misc_RNA (1)...(19): siRNA sense strand
ggaacaaaauacagaucuu

SEQ ID NO: 1982084 - RNA, 19 nt, Homo sapiens
  misc_RNA (1)...(19): siRNA sense strand
aauauaagacugcuucuac

SEQ ID NO: 1982085 - RNA, 19 nt, Homo sapiens
  misc_RNA (1)...(19): siRNA sense strand
guucguaaaguguaucaga

SEQ ID NO: 1982086 - RNA, 19 nt, Homo sapiens
  misc_RNA (1)...(19): siRNA sense strand
uuccagagcaauauacuuu

SEQ ID NO: 1982087 - RNA, 19 nt, Homo sapiens
  misc_RNA (1)...(19): siRNA sense strand
ugggagcuauucugacaug

SEQ ID NO: 1982088 - RNA, 19 nt, Homo sapiens
  misc_RNA (1)...(19): siRNA sense strand
ggaccucuucauugccuaa

SEQ ID NO: 1982089 - RNA, 19 nt, Homo sapiens
  misc_RNA (1)...(19): siRNA sense strand
aagguuaugggucucuuua

SEQ ID NO: 1982090 - RNA, 19 nt, Homo sapiens
  misc_RNA (1)...(19): siRNA sense strand
gugaagagggaacaaaaua

SEQ ID NO: 1982091 - RNA, 19 nt, Homo sapiens
  misc_RNA (1)...(19): siRNA sense strand
uaucagagacuguuaucca

SEQ ID NO: 1982092 - RNA, 19 nt, Homo sapiens
  misc_RNA (1)...(19): siRNA sense strand
cugcagucaucuucuguga

SEQ ID NO: 1982093 - RNA, 19 nt, Homo sapiens
  misc_RNA (1)...(19): siRNA sense strand
uauaagacugcuucuacaa

SEQ ID NO: 1982094 - RNA, 19 nt, Homo sapiens
  misc_RNA (1)...(19): siRNA sense strand
caaacacagccauuaugau

SEQ ID NO: 1982095 - RNA, 19 nt, Homo sapiens
  misc_RNA (1)...(19): siRNA sense strand
agugggagcuauucugaca

SEQ ID NO: 1982096 - RNA, 19 nt, Homo sapiens
  misc_RNA (1)...(19): siRNA sense strand
ggugaagagucugugaaag

SEQ ID NO: 1982097 - RNA, 19 nt, Homo sapiens
  misc_RNA (1)...(19): siRNA sense strand
ucagagacuguuauccauu

SEQ ID NO: 1982098 - RNA, 19 nt, Homo sapiens
  misc_RNA (1)...(19): siRNA sense strand
guauaucagagacuguuau

SEQ ID NO: 1982099 - RNA, 19 nt, Homo sapiens
  misc_RNA (1)...(19): siRNA sense strand
cggaggauguggugguaca

SEQ ID NO: 1982100 - RNA, 19 nt, Homo sapiens
  misc_RNA (1)...(19): siRNA sense strand
gaagagggaacaaaauaca

SEQ ID NO: 1982101 - RNA, 19 nt, Homo sapiens
  misc_RNA (1)...(19): siRNA sense strand
gugccacaacuauagcaua

SEQ ID NO: 1982102 - RNA, 19 nt, Homo sapiens
  misc_RNA (1)...(19): siRNA sense strand
ccucguuccuuguuuagag

SEQ ID NO: 1982103 - RNA, 19 nt, Homo sapiens
  misc_RNA (1)...(19): siRNA sense strand
auauaagacugcuucuaca

SEQ ID NO: 1982104 - RNA, 19 nt, Homo sapiens
  misc_RNA (1)...(19): siRNA sense strand
uaucagacagauggacuaa

SEQ ID NO: 1982105 - RNA, 19 nt, Homo sapiens
  misc_RNA (1)...(19): siRNA sense strand
agaacaagacuacgugaag

SEQ ID NO: 1982106 - RNA, 19 nt, Homo sapiens
  misc_RNA (1)...(19): siRNA sense strand
acagugggagcuauucuga

SEQ ID NO: 1982107 - RNA, 19 nt, Homo sapiens
  misc_RNA (1)...(19): siRNA sense strand
ugauguauuugauccugau

SEQ ID NO: 1982108 - RNA, 19 nt, Homo sapiens
  misc_RNA (1)...(19): siRNA sense strand
ugguuuaccuacucaaugg

SEQ ID NO: 1982109 - RNA, 19 nt, Homo sapiens
  misc_RNA (1)...(19): siRNA sense strand
cuagugagacagauuccaa

SEQ ID NO: 1982110 - RNA, 19 nt, Homo sapiens
  misc_RNA (1)...(19): siRNA sense strand
uagcugcugccaccucaaa

SEQ ID NO: 1982111 - RNA, 19 nt, Homo sapiens
  misc_RNA (1)...(19): siRNA sense strand
gaagagucugugaaagaag

SEQ ID NO: 1982112 - RNA, 19 nt, Homo sapiens
  misc_RNA (1)...(19): siRNA sense strand
agacucgguuacagcuuga

SEQ ID NO: 1982113 - RNA, 19 nt, Homo sapiens
  misc_RNA (1)...(19): siRNA sense strand
uguauuugauccugauucu

SEQ ID NO: 1982114 - RNA, 19 nt, Homo sapiens
  misc_RNA (1)...(19): siRNA sense strand
cagauggacuaaaaggauu

SEQ ID NO: 1982115 - RNA, 19 nt, Homo sapiens
  misc_RNA (1)...(19): siRNA sense strand
aaggaaaaguugaaugaug

SEQ ID NO: 1982116 - RNA, 19 nt, Homo sapiens
  misc_RNA (1)...(19): siRNA sense strand
aaagaagcaucagauuuug

SEQ ID NO: 1982117 - RNA, 19 nt, Homo sapiens
  misc_RNA (1)...(19): siRNA sense strand
guaucagacagauggacua

SEQ ID NO: 1982118 - RNA, 19 nt, Homo sapiens
  misc_RNA (1)...(19): siRNA sense strand
uauuugauccugauucuac

SEQ ID NO: 1982119 - RNA, 19 nt, Homo sapiens
  misc_RNA (1)...(19): siRNA sense strand
ggaaaaguugaaugaugua

SEQ ID NO: 1982120 - RNA, 19 nt, Homo sapiens
  misc_RNA (1)...(19): siRNA sense strand
caucagauuuugugggaau

SEQ ID NO: 1982121 - RNA, 19 nt, Homo sapiens
  misc_RNA (1)...(19): siRNA sense strand
ugauggccaccuaugaauu

SEQ ID NO: 1982122 - RNA, 19 nt, Homo sapiens
  misc_RNA (1)...(19): siRNA sense strand
ggagcuauucugacauguc

SEQ ID NO: 1982123 - RNA, 19 nt, Homo sapiens
  misc_RNA (1)...(19): siRNA sense strand
acuauagcauauccacaug

SEQ ID NO: 1982124 - RNA, 19 nt, Homo sapiens
  misc_RNA (1)...(19): siRNA sense strand
acacgcuggugcaucuguu

SEQ ID NO: 1982125 - RNA, 19 nt, Homo sapiens
  misc_RNA (1)...(19): siRNA sense strand
auauccacauguuguaaga

SEQ ID NO: 1982126 - RNA, 19 nt, Homo sapiens
  misc_RNA (1)...(19): siRNA sense strand
ggaagaagauagagaaguu

SEQ ID NO: 1982127 - RNA, 19 nt, Homo sapiens
  misc_RNA (1)...(19): siRNA sense strand
uuaaggagcucuauaauga

SEQ ID NO: 1982128 - RNA, 19 nt, Homo sapiens
  misc_RNA (1)...(19): siRNA sense strand
gaaggaagauauuguugaa

SEQ ID NO: 1982129 - RNA, 19 nt, Homo sapiens
  misc_RNA (1)...(19): siRNA sense strand
caacaucgcugccgacaga

SEQ ID NO: 1982130 - RNA, 19 nt, Homo sapiens
  misc_RNA (1)...(19): siRNA sense strand
ggaagugauuucugccuua

SEQ ID NO: 1982131 - RNA, 19 nt, Homo sapiens
  misc_RNA (1)...(19): siRNA sense strand
gaaaccagcuucucugcuu

SEQ ID NO: 1982132 - RNA, 19 nt, Homo sapiens
  misc_RNA (1)...(19): siRNA sense strand
cgacauggcccugaaauua

SEQ ID NO: 1982133 - RNA, 19 nt, Homo sapiens
  misc_RNA (1)...(19): siRNA sense strand
gcaaagcccuguccacauc

SEQ ID NO: 1982134 - RNA, 19 nt, Homo sapiens
  misc_RNA (1)...(19): siRNA sense strand
guacugaccucauuguuca

SEQ ID NO: 1982135 - RNA, 19 nt, Homo sapiens
  misc_RNA (1)...(19): siRNA sense strand
ggaaugagagacaucuuua

SEQ ID NO: 1982136 - RNA, 19 nt, Homo sapiens
  misc_RNA (1)...(19): siRNA sense strand
gaugcugccuuuauuauug

SEQ ID NO: 1982137 - RNA, 19 nt, Homo sapiens
  misc_RNA (1)...(19): siRNA sense strand
gaggagaaauugcccagaa

SEQ ID NO: 1982138 - RNA, 19 nt, Homo sapiens
  misc_RNA (1)...(19): siRNA sense strand
uggcugagcugcugauaaa

SEQ ID NO: 1982139 - RNA, 19 nt, Homo sapiens
  misc_RNA (1)...(19): siRNA sense strand
gagaugcagucccuucauu

SEQ ID NO: 1982140 - RNA, 19 nt, Homo sapiens
  misc_RNA (1)...(19): siRNA sense strand
ccuaucaugugcauuauuu

SEQ ID NO: 1982141 - RNA, 19 nt, Homo sapiens
  misc_RNA (1)...(19): siRNA sense strand
ugagagacaucuuuaagga

SEQ ID NO: 1982142 - RNA, 19 nt, Homo sapiens
  misc_RNA (1)...(19): siRNA sense strand
guaguagguuccuuauuga

SEQ ID NO: 1982143 - RNA, 19 nt, Homo sapiens
  misc_RNA (1)...(19): siRNA sense strand
uguauaagcucuuucuaga

SEQ ID NO: 1982144 - RNA, 19 nt, Homo sapiens
  misc_RNA (1)...(19): siRNA sense strand
gauaaaccaugcacaagca

SEQ ID NO: 1982145 - RNA, 19 nt, Homo sapiens
  misc_RNA (1)...(19): siRNA sense strand
gaggugcgaugcugccuuu

SEQ ID NO: 1982146 - RNA, 19 nt, Homo sapiens
  misc_RNA (1)...(19): siRNA sense strand
ggaauuccuccaagugaua

SEQ ID NO: 1982147 - RNA, 19 nt, Homo sapiens
  misc_RNA (1)...(19): siRNA sense strand
aguaguagguuccuuauug

SEQ ID NO: 1982148 - RNA, 19 nt, Homo sapiens
  misc_RNA (1)...(19): siRNA sense strand
gaaccuagaggagaaauug

SEQ ID NO: 1982149 - RNA, 19 nt, Homo sapiens
  misc_RNA (1)...(19): siRNA sense strand
ucaguggccuugcuguaua

SEQ ID NO: 1982150 - RNA, 19 nt, Homo sapiens
  misc_RNA (1)...(19): siRNA sense strand
cuacugaacugcccacuca

SEQ ID NO: 1982151 - RNA, 19 nt, Homo sapiens
  misc_RNA (1)...(19): siRNA sense strand
ggacuuuaaugcaaacuag

SEQ ID NO: 1982152 - RNA, 19 nt, Homo sapiens
  misc_RNA (1)...(19): siRNA sense strand
gcagagugaugccgacaug

SEQ ID NO: 1982153 - RNA, 19 nt, Homo sapiens
  misc_RNA (1)...(19): siRNA sense strand
uaacagaguuucgaaccaa

SEQ ID NO: 1982154 - RNA, 19 nt, Homo sapiens
  misc_RNA (1)...(19): siRNA sense strand
gaaggagccauccaaaguu

SEQ ID NO: 1982155 - RNA, 19 nt, Homo sapiens
  misc_RNA (1)...(19): siRNA sense strand
uccaaagccuuccuucaua

SEQ ID NO: 1982156 - RNA, 19 nt, Homo sapiens
  misc_RNA (1)...(19): siRNA sense strand
gcacgccucugcccauugu

SEQ ID NO: 1982157 - RNA, 19 nt, Homo sapiens
  misc_RNA (1)...(19): siRNA sense strand
ggacaaaggaagcauagau

SEQ ID NO: 1982158 - RNA, 19 nt, Homo sapiens
  misc_RNA (1)...(19): siRNA sense strand
caguucagcucucuuggua

SEQ ID NO: 1982159 - RNA, 19 nt, Homo sapiens
  misc_RNA (1)...(19): siRNA sense strand
guagcugaguucucucuuu

SEQ ID NO: 1982160 - RNA, 19 nt, Homo sapiens
  misc_RNA (1)...(19): siRNA sense strand
gaacugaaggaagauauug

SEQ ID NO: 1982161 - RNA, 19 nt, Homo sapiens
  misc_RNA (1)...(19): siRNA sense strand
gaaaagauauacggccuaa

SEQ ID NO: 1982162 - RNA, 19 nt, Homo sapiens
  misc_RNA (1)...(19): siRNA sense strand
gaaggacaaaggaagcaua

SEQ ID NO: 1982163 - RNA, 19 nt, Homo sapiens
  misc_RNA (1)...(19): siRNA sense strand
ccagauagucacagcuuua

SEQ ID NO: 1982164 - RNA, 19 nt, Homo sapiens
  misc_RNA (1)...(19): siRNA sense strand
ggacgcugcucucccaugu

SEQ ID NO: 1982165 - RNA, 19 nt, Homo sapiens
  misc_RNA (1)...(19): siRNA sense strand
uauagaaccuagaggagaa

SEQ ID NO: 1982166 - RNA, 19 nt, Homo sapiens
  misc_RNA (1)...(19): siRNA sense strand
gcacgaagaggcucaguuc

SEQ ID NO: 1982167 - RNA, 19 nt, Homo sapiens
  misc_RNA (1)...(19): siRNA sense strand
guggaucgaugccgaggua

SEQ ID NO: 1982168 - RNA, 19 nt, Homo sapiens
  misc_RNA (1)...(19): siRNA sense strand
gcuaguaguagguuccuua

SEQ ID NO: 1982169 - RNA, 19 nt, Homo sapiens
  misc_RNA (1)...(19): siRNA sense strand
agaaauugcccagaacuua

SEQ ID NO: 1982170 - RNA, 19 nt, Homo sapiens
  misc_RNA (1)...(19): siRNA sense strand
aaacaucugugcuguccuu

SEQ ID NO: 1982171 - RNA, 19 nt, Homo sapiens
  misc_RNA (1)...(19): siRNA sense strand
ccacaaggccaaacaugaa

SEQ ID NO: 1982172 - RNA, 19 nt, Homo sapiens
  misc_RNA (1)...(19): siRNA sense strand
gaaugagagacaucuuuaa

SEQ ID NO: 1982173 - RNA, 19 nt, Homo sapiens
  misc_RNA (1)...(19): siRNA sense strand
ccugggaccuuuccucaaa

SEQ ID NO: 1982174 - RNA, 19 nt, Homo sapiens
  misc_RNA (1)...(19): siRNA sense strand
ggacucacauacccuguag

SEQ ID NO: 1982175 - RNA, 19 nt, Homo sapiens
  misc_RNA (1)...(19): siRNA sense strand
gugcgaugcugccuuuauu

SEQ ID NO: 1982176 - RNA, 19 nt, Homo sapiens
  misc_RNA (1)...(19): siRNA sense strand
ccacagagcuuuugguugu

SEQ ID NO: 1982177 - RNA, 19 nt, Homo sapiens
  misc_RNA (1)...(19): siRNA sense strand
ggucgggccugucuuagau

SEQ ID NO: 1982178 - RNA, 19 nt, Homo sapiens
  misc_RNA (1)...(19): siRNA sense strand
caacaacaauaucuacaac

SEQ ID NO: 1982179 - RNA, 19 nt, Homo sapiens
  misc_RNA (1)...(19): siRNA sense strand
guuccagucuuuagucuug

SEQ ID NO: 1982180 - RNA, 19 nt, Homo sapiens
  misc_RNA (1)...(19): siRNA sense strand
gacgcuauguucaguuuga

SEQ ID NO: 1982181 - RNA, 19 nt, Homo sapiens
  misc_RNA (1)...(19): siRNA sense strand
ugcagaaucuccucaagaa

SEQ ID NO: 1982182 - RNA, 19 nt, Homo sapiens
  misc_RNA (1)...(19): siRNA sense strand
ggagcucuauaaugacuau

SEQ ID NO: 1982183 - RNA, 19 nt, Homo sapiens
  misc_RNA (1)...(19): siRNA sense strand
uagaggagcuaaugcagau

SEQ ID NO: 1982184 - RNA, 19 nt, Homo sapiens
  misc_RNA (1)...(19): siRNA sense strand
ccaaagccuuccuucauag

SEQ ID NO: 1982185 - RNA, 19 nt, Homo sapiens
  misc_RNA (1)...(19): siRNA sense strand
guagcacacuggcacuuga

SEQ ID NO: 1982186 - RNA, 19 nt, Homo sapiens
  misc_RNA (1)...(19): siRNA sense strand
ggagagaaagcaagucugu

SEQ ID NO: 1982187 - RNA, 19 nt, Homo sapiens
  misc_RNA (1)...(19): siRNA sense strand
uaaacucaguggccaacaa

SEQ ID NO: 1982188 - RNA, 19 nt, Homo sapiens
  misc_RNA (1)...(19): siRNA sense strand
ugaagccgcuggaguaugg

SEQ ID NO: 1982189 - RNA, 19 nt, Homo sapiens
  misc_RNA (1)...(19): siRNA sense strand
gaagaagauagagaaguuu

SEQ ID NO: 1982190 - RNA, 19 nt, Homo sapiens
  misc_RNA (1)...(19): siRNA sense strand
aaacacagcauuggaagaa

SEQ ID NO: 1982191 - RNA, 19 nt, Homo sapiens
  misc_RNA (1)...(19): siRNA sense strand
cagaaucuccucaagaaug

SEQ ID NO: 1982192 - RNA, 19 nt, Homo sapiens
  misc_RNA (1)...(19): siRNA sense strand
gggaaugagagacaucuuu

SEQ ID NO: 1982193 - RNA, 19 nt, Homo sapiens
  misc_RNA (1)...(19): siRNA sense strand
aaggagccauccaaaguuu

SEQ ID NO: 1982194 - RNA, 19 nt, Homo sapiens
  misc_RNA (1)...(19): siRNA sense strand
ggagaaguuccagucuuua

SEQ ID NO: 1982195 - RNA, 19 nt, Homo sapiens
  misc_RNA (1)...(19): siRNA sense strand
ggacaucaggagucagauu

SEQ ID NO: 1982196 - RNA, 19 nt, Homo sapiens
  misc_RNA (1)...(19): siRNA sense strand
ugaggaguuugcuguguuu

SEQ ID NO: 1982197 - RNA, 19 nt, Homo sapiens
  misc_RNA (1)...(19): siRNA sense strand
gauagucacagcuuuaaca

SEQ ID NO: 1982198 - RNA, 19 nt, Homo sapiens
  misc_RNA (1)...(19): siRNA sense strand
gcauacaucacacuggaaa

SEQ ID NO: 1982199 - RNA, 19 nt, Homo sapiens
  misc_RNA (1)...(19): siRNA sense strand
ucagcucucuugguacaua

SEQ ID NO: 1982200 - RNA, 19 nt, Homo sapiens
  misc_RNA (1)...(19): siRNA sense strand
gaagauagagaaguuuaca

SEQ ID NO: 1982201 - RNA, 19 nt, Homo sapiens
  misc_RNA (1)...(19): siRNA sense strand
guagguuccuuauugagau

SEQ ID NO: 1982202 - RNA, 19 nt, Homo sapiens
  misc_RNA (1)...(19): siRNA sense strand
gaaauugcccagaacuuac

SEQ ID NO: 1982203 - RNA, 19 nt, Homo sapiens
  misc_RNA (1)...(19): siRNA sense strand
gagcuacugucauccuaca

SEQ ID NO: 1982204 - RNA, 19 nt, Homo sapiens
  misc_RNA (1)...(19): siRNA sense strand
ucaggucacucaggauauu

SEQ ID NO: 1982205 - RNA, 19 nt, Homo sapiens
  misc_RNA (1)...(19): siRNA sense strand
caccagugcuuucuuccaa

SEQ ID NO: 1982206 - RNA, 19 nt, Homo sapiens
  misc_RNA (1)...(19): siRNA sense strand
cacccuaucaugugcauua

SEQ ID NO: 1982207 - RNA, 19 nt, Homo sapiens
  misc_RNA (1)...(19): siRNA sense strand
ggagagcaguuggaaagca

SEQ ID NO: 1982208 - RNA, 19 nt, Homo sapiens
  misc_RNA (1)...(19): siRNA sense strand
ugaaggagccauccaaagu

SEQ ID NO: 1982209 - RNA, 19 nt, Homo sapiens
  misc_RNA (1)...(19): siRNA sense strand
guucagcucucuugguaca

SEQ ID NO: 1982210 - RNA, 19 nt, Homo sapiens
  misc_RNA (1)...(19): siRNA sense strand
acacagcauuggaagaaga

SEQ ID NO: 1982211 - RNA, 19 nt, Homo sapiens
  misc_RNA (1)...(19): siRNA sense strand
ggaagauauuguugaaagg

SEQ ID NO: 1982212 - RNA, 19 nt, Homo sapiens
  misc_RNA (1)...(19): siRNA sense strand
uagcugaguucucucuuuc

SEQ ID NO: 1982213 - RNA, 19 nt, Homo sapiens
  misc_RNA (1)...(19): siRNA sense strand
agagaaagcaagucuguug

SEQ ID NO: 1982214 - RNA, 19 nt, Homo sapiens
  misc_RNA (1)...(19): siRNA sense strand
gaaguuuacagcucaguuc

SEQ ID NO: 1982215 - RNA, 19 nt, Homo sapiens
  misc_RNA (1)...(19): siRNA sense strand
ggcauuucccuuaagcuua

SEQ ID NO: 1982216 - RNA, 19 nt, Homo sapiens
  misc_RNA (1)...(19): siRNA sense strand
guucaggucacucaggaua

SEQ ID NO: 1982217 - RNA, 19 nt, Homo sapiens
  misc_RNA (1)...(19): siRNA sense strand
gaagugauuucugccuuac

SEQ ID NO: 1982218 - RNA, 19 nt, Homo sapiens
  misc_RNA (1)...(19): siRNA sense strand
gagagcaguuggaaagcau

SEQ ID NO: 1982219 - RNA, 19 nt, Homo sapiens
  misc_RNA (1)...(19): siRNA sense strand
cagcgugacucaggucuug

SEQ ID NO: 1982220 - RNA, 19 nt, Homo sapiens
  misc_RNA (1)...(19): siRNA sense strand
ggacacagugcaugaugga

SEQ ID NO: 1982221 - RNA, 19 nt, Homo sapiens
  misc_RNA (1)...(19): siRNA sense strand
gacaaaggaagcauagaug

SEQ ID NO: 1982222 - RNA, 19 nt, Homo sapiens
  misc_RNA (1)...(19): siRNA sense strand
acucaggucuugucaguca

SEQ ID NO: 1982223 - RNA, 19 nt, Homo sapiens
  misc_RNA (1)...(19): siRNA sense strand
caauagaugaagaggcaua

SEQ ID NO: 1982224 - RNA, 19 nt, Homo sapiens
  misc_RNA (1)...(19): siRNA sense strand
ugggauaccuggccagugu

SEQ ID NO: 1982225 - RNA, 19 nt, Homo sapiens
  misc_RNA (1)...(19): siRNA sense strand
guacauauugcuuagaaca

SEQ ID NO: 1982226 - RNA, 19 nt, Homo sapiens
  misc_RNA (1)...(19): siRNA sense strand
gcaagaagaagccacugaa

SEQ ID NO: 1982227 - RNA, 19 nt, Homo sapiens
  misc_RNA (1)...(19): siRNA sense strand
ccaagaagcaggccaagga

SEQ ID NO: 1982228 - RNA, 19 nt, Homo sapiens
  misc_RNA (1)...(19): siRNA sense strand
gaagaaacucgaggagcua

SEQ ID NO: 1982229 - RNA, 19 nt, Homo sapiens
  misc_RNA (1)...(19): siRNA sense strand
ugaaacagcccaagaagca

SEQ ID NO: 1982230 - RNA, 19 nt, Homo sapiens
  misc_RNA (1)...(19): siRNA sense strand
caagaagaagccacugaaa

SEQ ID NO: 1982231 - RNA, 19 nt, Homo sapiens
  misc_RNA (1)...(19): siRNA sense strand
agaagaagccacugaaaca

SEQ ID NO: 1982232 - RNA, 19 nt, Homo sapiens
  misc_RNA (1)...(19): siRNA sense strand
cagguggaauuaagaaauc

SEQ ID NO: 1982233 - RNA, 19 nt, Homo sapiens
  misc_RNA (1)...(19): siRNA sense strand
ggagauggacgaggaagau

SEQ ID NO: 1982234 - RNA, 19 nt, Homo sapiens
  misc_RNA (1)...(19): siRNA sense strand
gagauggacgaggaagaua

SEQ ID NO: 1982235 - RNA, 19 nt, Homo sapiens
  misc_RNA (1)...(19): siRNA sense strand
cgaggaagauaaggcuuuc

SEQ ID NO: 1982236 - RNA, 19 nt, Homo sapiens
  misc_RNA (1)...(19): siRNA sense strand
ccacugaaacagcccaaga

SEQ ID NO: 1982237 - RNA, 19 nt, Homo sapiens
  misc_RNA (1)...(19): siRNA sense strand
gaagcaggccaaggagaug

SEQ ID NO: 1982238 - RNA, 19 nt, Homo sapiens
  misc_RNA (1)...(19): siRNA sense strand
gaagaagccacugaaacag

SEQ ID NO: 1982239 - RNA, 19 nt, Homo sapiens
  misc_RNA (1)...(19): siRNA sense strand
ggcaagaagaagccacuga

SEQ ID NO: 1982240 - RNA, 19 nt, Homo sapiens
  misc_RNA (1)...(19): siRNA sense strand
ggaagauaaggcuuucaag

SEQ ID NO: 1982241 - RNA, 19 nt, Homo sapiens
  misc_RNA (1)...(19): siRNA sense strand
aagaggagcagaagaaacu

SEQ ID NO: 1982242 - RNA, 19 nt, Homo sapiens
  misc_RNA (1)...(19): siRNA sense strand
agauggacgaggaagauaa

SEQ ID NO: 1982243 - RNA, 19 nt, Homo sapiens
  misc_RNA (1)...(19): siRNA sense strand
gauggacgaggaagauaag

SEQ ID NO: 1982244 - RNA, 19 nt, Homo sapiens
  misc_RNA (1)...(19): siRNA sense strand
gaaacucgaggagcuaaaa

SEQ ID NO: 1982245 - RNA, 19 nt, Homo sapiens
  misc_RNA (1)...(19): siRNA sense strand
acagguggaauuaagaaau

SEQ ID NO: 1982246 - RNA, 19 nt, Homo sapiens
  misc_RNA (1)...(19): siRNA sense strand
agaagcaggccaaggagau

SEQ ID NO: 1982247 - RNA, 19 nt, Homo sapiens
  misc_RNA (1)...(19): siRNA sense strand
gaaagggucgucccaauug

SEQ ID NO: 1982248 - RNA, 19 nt, Homo sapiens
  misc_RNA (1)...(19): siRNA sense strand
cucaaugggugaccaguua

SEQ ID NO: 1982249 - RNA, 19 nt, Homo sapiens
  misc_RNA (1)...(19): siRNA sense strand
aagaaagggucgucccaau

SEQ ID NO: 1982250 - RNA, 19 nt, Homo sapiens
  misc_RNA (1)...(19): siRNA sense strand
gugggcaacucgcugcaaa

SEQ ID NO: 1982251 - RNA, 19 nt, Homo sapiens
  misc_RNA (1)...(19): siRNA sense strand
ccaauuggagcguucgaaa

SEQ ID NO: 1982252 - RNA, 19 nt, Homo sapiens
  misc_RNA (1)...(19): siRNA sense strand
agaaagggucgucccaauu

SEQ ID NO: 1982253 - RNA, 19 nt, Homo sapiens
  misc_RNA (1)...(19): siRNA sense strand
gccaaucgcaaagcgcuua

SEQ ID NO: 1982254 - RNA, 19 nt, Homo sapiens
  misc_RNA (1)...(19): siRNA sense strand
gugggaaccuguggucuca

SEQ ID NO: 1982255 - RNA, 19 nt, Homo sapiens
  misc_RNA (1)...(19): siRNA sense strand
gacagcuccuggugcacuu

SEQ ID NO: 1982256 - RNA, 19 nt, Homo sapiens
  misc_RNA (1)...(19): siRNA sense strand
ucaaugggugaccaguuaa

SEQ ID NO: 1982257 - RNA, 19 nt, Homo sapiens
  misc_RNA (1)...(19): siRNA sense strand
uuggagcguucgaaagguu

SEQ ID NO: 1982258 - RNA, 19 nt, Homo sapiens
  misc_RNA (1)...(19): siRNA sense strand
gcacaaggcuuucaggaua

SEQ ID NO: 1982259 - RNA, 19 nt, Homo sapiens
  misc_RNA (1)...(19): siRNA sense strand
ggaagaagcuggaacacuu

SEQ ID NO: 1982260 - RNA, 19 nt, Homo sapiens
  misc_RNA (1)...(19): siRNA sense strand
uaacagagauagagcguuu

SEQ ID NO: 1982261 - RNA, 19 nt, Homo sapiens
  misc_RNA (1)...(19): siRNA sense strand
gcagaugauugacagaaua

SEQ ID NO: 1982262 - RNA, 19 nt, Homo sapiens
  misc_RNA (1)...(19): siRNA sense strand
gaagaacccuccucaccaa

SEQ ID NO: 1982263 - RNA, 19 nt, Homo sapiens
  misc_RNA (1)...(19): siRNA sense strand
caacaagaauccuuagaga

SEQ ID NO: 1982264 - RNA, 19 nt, Homo sapiens
  misc_RNA (1)...(19): siRNA sense strand
cagaauaugugugaaagua

SEQ ID NO: 1982265 - RNA, 19 nt, Homo sapiens
  misc_RNA (1)...(19): siRNA sense strand
ggaguuugaucuagauaaa

SEQ ID NO: 1982266 - RNA, 19 nt, Homo sapiens
  misc_RNA (1)...(19): siRNA sense strand
ggaugaagguguagaugaa

SEQ ID NO: 1982267 - RNA, 19 nt, Homo sapiens
  misc_RNA (1)...(19): siRNA sense strand
ggucugugcugccaacaua

SEQ ID NO: 1982268 - RNA, 19 nt, Homo sapiens
  misc_RNA (1)...(19): siRNA sense strand
gagaguggaugaaggugua

SEQ ID NO: 1982269 - RNA, 19 nt, Homo sapiens
  misc_RNA (1)...(19): siRNA sense strand
gcaagacccuuccucaaca

SEQ ID NO: 1982270 - RNA, 19 nt, Homo sapiens
  misc_RNA (1)...(19): siRNA sense strand
gcucaggacuguaauaugg

SEQ ID NO: 1982271 - RNA, 19 nt, Homo sapiens
  misc_RNA (1)...(19): siRNA sense strand
aagcggagcucgggauuua

SEQ ID NO: 1982272 - RNA, 19 nt, Homo sapiens
  misc_RNA (1)...(19): siRNA sense strand
uaaacuggcugaccauuuc

SEQ ID NO: 1982273 - RNA, 19 nt, Homo sapiens
  misc_RNA (1)...(19): siRNA sense strand
ccaaagcacugcagaucaa

SEQ ID NO: 1982274 - RNA, 19 nt, Homo sapiens
  misc_RNA (1)...(19): siRNA sense strand
guaguggcuuucucaauuu

SEQ ID NO: 1982275 - RNA, 19 nt, Homo sapiens
  misc_RNA (1)...(19): siRNA sense strand
gaaauggaguuugaucuag

SEQ ID NO: 1982276 - RNA, 19 nt, Homo sapiens
  misc_RNA (1)...(19): siRNA sense strand
caacauagucucacaagau

SEQ ID NO: 1982277 - RNA, 19 nt, Homo sapiens
  misc_RNA (1)...(19): siRNA sense strand
gaaaucacgagacuagaaa

SEQ ID NO: 1982278 - RNA, 19 nt, Homo sapiens
  misc_RNA (1)...(19): siRNA sense strand
ggaaaagaacuacacauua

SEQ ID NO: 1982279 - RNA, 19 nt, Homo sapiens
  misc_RNA (1)...(19): siRNA sense strand
gagaaucuuugucccaaug

SEQ ID NO: 1982280 - RNA, 19 nt, Homo sapiens
  misc_RNA (1)...(19): siRNA sense strand
gaauaugugugaaaguaca

SEQ ID NO: 1982281 - RNA, 19 nt, Homo sapiens
  misc_RNA (1)...(19): siRNA sense strand
caucucaacuccuuacgaa

SEQ ID NO: 1982282 - RNA, 19 nt, Homo sapiens
  misc_RNA (1)...(19): siRNA sense strand
gaagaagcuggaacacuuu

SEQ ID NO: 1982283 - RNA, 19 nt, Homo sapiens
  misc_RNA (1)...(19): siRNA sense strand
gggagacgcuauccaggaa

SEQ ID NO: 1982284 - RNA, 19 nt, Homo sapiens
  misc_RNA (1)...(19): siRNA sense strand
aagcaacgguccuccagua

SEQ ID NO: 1982285 - RNA, 19 nt, Homo sapiens
  misc_RNA (1)...(19): siRNA sense strand
ccaaauuuauaccauguug

SEQ ID NO: 1982286 - RNA, 19 nt, Homo sapiens
  misc_RNA (1)...(19): siRNA sense strand
aguaguggcuuucucaauu

SEQ ID NO: 1982287 - RNA, 19 nt, Homo sapiens
  misc_RNA (1)...(19): siRNA sense strand
acucgaaacucaagacuga

SEQ ID NO: 1982288 - RNA, 19 nt, Homo sapiens
  misc_RNA (1)...(19): siRNA sense strand
acacuaagcucaggacugu

SEQ ID NO: 1982289 - RNA, 19 nt, Homo sapiens
  misc_RNA (1)...(19): siRNA sense strand
caacgguccuccaguaaag

SEQ ID NO: 1982290 - RNA, 19 nt, Homo sapiens
  misc_RNA (1)...(19): siRNA sense strand
guuccugucugauagaauu

SEQ ID NO: 1982291 - RNA, 19 nt, Homo sapiens
  misc_RNA (1)...(19): siRNA sense strand
gaacggauagaggagauaa

SEQ ID NO: 1982292 - RNA, 19 nt, Homo sapiens
  misc_RNA (1)...(19): siRNA sense strand
gaagagguaccaauucaca

SEQ ID NO: 1982293 - RNA, 19 nt, Homo sapiens
  misc_RNA (1)...(19): siRNA sense strand
guuaaacguuccaucauca

SEQ ID NO: 1982294 - RNA, 19 nt, Homo sapiens
  misc_RNA (1)...(19): siRNA sense strand
caagaaauggucaacaaga

SEQ ID NO: 1982295 - RNA, 19 nt, Homo sapiens
  misc_RNA (1)...(19): siRNA sense strand
uuacaagaguaguagauga

SEQ ID NO: 1982296 - RNA, 19 nt, Homo sapiens
  misc_RNA (1)...(19): siRNA sense strand
ggagcagucuggaauugau

SEQ ID NO: 1982297 - RNA, 19 nt, Homo sapiens
  misc_RNA (1)...(19): siRNA sense strand
ccacguaccuuuguuaaaa

SEQ ID NO: 1982298 - RNA, 19 nt, Homo sapiens
  misc_RNA (1)...(19): siRNA sense strand
caucaaggcagcaaaucua

SEQ ID NO: 1982299 - RNA, 19 nt, Homo sapiens
  misc_RNA (1)...(19): siRNA sense strand
uggcaauucugaacggaua

SEQ ID NO: 1982300 - RNA, 19 nt, Homo sapiens
  misc_RNA (1)...(19): siRNA sense strand
gcucgggauuuaucucuga

SEQ ID NO: 1982301 - RNA, 19 nt, Homo sapiens
  misc_RNA (1)...(19): siRNA sense strand
ugaaauggaguuugaucua

SEQ ID NO: 1982302 - RNA, 19 nt, Homo sapiens
  misc_RNA (1)...(19): siRNA sense strand
ccaggaguaucaagaacaa

SEQ ID NO: 1982303 - RNA, 19 nt, Homo sapiens
  misc_RNA (1)...(19): siRNA sense strand
ccaagaaggugaccaaaau

SEQ ID NO: 1982304 - RNA, 19 nt, Homo sapiens
  misc_RNA (1)...(19): siRNA sense strand
gcaacgguccuccaguaaa

SEQ ID NO: 1982305 - RNA, 19 nt, Homo sapiens
  misc_RNA (1)...(19): siRNA sense strand
gaacggagugacagcaaga

SEQ ID NO: 1982306 - RNA, 19 nt, Homo sapiens
  misc_RNA (1)...(19): siRNA sense strand
gagacgcuauccaggaaga

SEQ ID NO: 1982307 - RNA, 19 nt, Homo sapiens
  misc_RNA (1)...(19): siRNA sense strand
agagagagauggccagagu

SEQ ID NO: 1982308 - RNA, 19 nt, Homo sapiens
  misc_RNA (1)...(19): siRNA sense strand
uggaagagguaccaauuca

SEQ ID NO: 1982309 - RNA, 19 nt, Homo sapiens
  misc_RNA (1)...(19): siRNA sense strand
gaagaucuggauaccugua

SEQ ID NO: 1982310 - RNA, 19 nt, Homo sapiens
  misc_RNA (1)...(19): siRNA sense strand
uggaugcacucucacauug

SEQ ID NO: 1982311 - RNA, 19 nt, Homo sapiens
  misc_RNA (1)...(19): siRNA sense strand
cgaaaucacgagacuagaa

SEQ ID NO: 1982312 - RNA, 19 nt, Homo sapiens
  misc_RNA (1)...(19): siRNA sense strand
ugaccaaaguggacauuag

SEQ ID NO: 1982313 - RNA, 19 nt, Homo sapiens
  misc_RNA (1)...(19): siRNA sense strand
uggagaaguuacaagagua

SEQ ID NO: 1982314 - RNA, 19 nt, Homo sapiens
  misc_RNA (1)...(19): siRNA sense strand
gcacugcagaucaacacua

SEQ ID NO: 1982315 - RNA, 19 nt, Homo sapiens
  misc_RNA (1)...(19): siRNA sense strand
caaggcagcaaaucuaaug

SEQ ID NO: 1982316 - RNA, 19 nt, Homo sapiens
  misc_RNA (1)...(19): siRNA sense strand
caacgaucuugaugacaga

SEQ ID NO: 1982317 - RNA, 19 nt, Homo sapiens
  misc_RNA (1)...(19): siRNA sense strand
gacccuuccucaacaagaa

SEQ ID NO: 1982318 - RNA, 19 nt, Homo sapiens
  misc_RNA (1)...(19): siRNA sense strand
gaacaacaucacugcacaa

SEQ ID NO: 1982319 - RNA, 19 nt, Homo sapiens
  misc_RNA (1)...(19): siRNA sense strand
gaaaguugcccuucuucca

SEQ ID NO: 1982320 - RNA, 19 nt, Homo sapiens
  misc_RNA (1)...(19): siRNA sense strand
ucucugaguugcccucuga

SEQ ID NO: 1982321 - RNA, 19 nt, Homo sapiens
  misc_RNA (1)...(19): siRNA sense strand
aaauggaguuugaucuaga

SEQ ID NO: 1982322 - RNA, 19 nt, Homo sapiens
  misc_RNA (1)...(19): siRNA sense strand
gauagagcguuuggaagau

SEQ ID NO: 1982323 - RNA, 19 nt, Homo sapiens
  misc_RNA (1)...(19): siRNA sense strand
ugacagaauaugugugaaa

SEQ ID NO: 1982324 - RNA, 19 nt, Homo sapiens
  misc_RNA (1)...(19): siRNA sense strand
caagacccuuccucaacaa

SEQ ID NO: 1982325 - RNA, 19 nt, Homo sapiens
  misc_RNA (1)...(19): siRNA sense strand
uccaagaaauggucaacaa

SEQ ID NO: 1982326 - RNA, 19 nt, Homo sapiens
  misc_RNA (1)...(19): siRNA sense strand
gagaagccaguuaaacguu

SEQ ID NO: 1982327 - RNA, 19 nt, Homo sapiens
  misc_RNA (1)...(19): siRNA sense strand
acaagaauccuuagagauc

SEQ ID NO: 1982328 - RNA, 19 nt, Homo sapiens
  misc_RNA (1)...(19): siRNA sense strand
cacugcagaucaacacuaa

SEQ ID NO: 1982329 - RNA, 19 nt, Homo sapiens
  misc_RNA (1)...(19): siRNA sense strand
gcacaauggcaauucugaa

SEQ ID NO: 1982330 - RNA, 19 nt, Homo sapiens
  misc_RNA (1)...(19): siRNA sense strand
uaguggcuuucucaauuua

SEQ ID NO: 1982331 - RNA, 19 nt, Homo sapiens
  misc_RNA (1)...(19): siRNA sense strand
agacugaggucaccaucau

SEQ ID NO: 1982332 - RNA, 19 nt, Homo sapiens
  misc_RNA (1)...(19): siRNA sense strand
cgaaugcugcggccuguuu

SEQ ID NO: 1982333 - RNA, 19 nt, Homo sapiens
  misc_RNA (1)...(19): siRNA sense strand
gacagaauaugugugaaag

SEQ ID NO: 1982334 - RNA, 19 nt, Homo sapiens
  misc_RNA (1)...(19): siRNA sense strand
ccaucuagcccgaaaguug

SEQ ID NO: 1982335 - RNA, 19 nt, Homo sapiens
  misc_RNA (1)...(19): siRNA sense strand
uaccaaagcagaacccaaa

SEQ ID NO: 1982336 - RNA, 19 nt, Homo sapiens
  misc_RNA (1)...(19): siRNA sense strand
gcuggaagagguaccaauu

SEQ ID NO: 1982337 - RNA, 19 nt, Homo sapiens
  misc_RNA (1)...(19): siRNA sense strand
cuaaaggcguugcuugagu

SEQ ID NO: 1982338 - RNA, 19 nt, Homo sapiens
  misc_RNA (1)...(19): siRNA sense strand
acaaggcuuucaggauaua

SEQ ID NO: 1982339 - RNA, 19 nt, Homo sapiens
  misc_RNA (1)...(19): siRNA sense strand
ugaacagaauggucucaug

SEQ ID NO: 1982340 - RNA, 19 nt, Homo sapiens
  misc_RNA (1)...(19): siRNA sense strand
acaagauggugaacagaau

SEQ ID NO: 1982341 - RNA, 19 nt, Homo sapiens
  misc_RNA (1)...(19): siRNA sense strand
gaaguuacaagaguaguag

SEQ ID NO: 1982342 - RNA, 19 nt, Homo sapiens
  misc_RNA (1)...(19): siRNA sense strand
ccacccagcagaugauuga

SEQ ID NO: 1982343 - RNA, 19 nt, Homo sapiens
  misc_RNA (1)...(19): siRNA sense strand
gaugauugacagaauaugu

SEQ ID NO: 1982344 - RNA, 19 nt, Homo sapiens
  misc_RNA (1)...(19): siRNA sense strand
caggaaguuucaaggagaa

SEQ ID NO: 1982345 - RNA, 19 nt, Homo sapiens
  misc_RNA (1)...(19): siRNA sense strand
gaguauccauagccgaaug

SEQ ID NO: 1982346 - RNA, 19 nt, Homo sapiens
  misc_RNA (1)...(19): siRNA sense strand
cgaagaugcuggccaaagc

SEQ ID NO: 1982347 - RNA, 19 nt, Homo sapiens
  misc_RNA (1)...(19): siRNA sense strand
uggaggagcuaacagagau

SEQ ID NO: 1982348 - RNA, 19 nt, Homo sapiens
  misc_RNA (1)...(19): siRNA sense strand
ccaguuaaacguuccauca

SEQ ID NO: 1982349 - RNA, 19 nt, Homo sapiens
  misc_RNA (1)...(19): siRNA sense strand
cugauagaauuguggauga

SEQ ID NO: 1982350 - RNA, 19 nt, Homo sapiens
  misc_RNA (1)...(19): siRNA sense strand
ggaauugauauccuuaaca

SEQ ID NO: 1982351 - RNA, 19 nt, Homo sapiens
  misc_RNA (1)...(19): siRNA sense strand
gagcagucuggaauugaua

SEQ ID NO: 1982352 - RNA, 19 nt, Homo sapiens
  misc_RNA (1)...(19): siRNA sense strand
aucaauggcuggagaaguu

SEQ ID NO: 1982353 - RNA, 19 nt, Homo sapiens
  misc_RNA (1)...(19): siRNA sense strand
gcuaagaacucuaaaacgu

SEQ ID NO: 1982354 - RNA, 19 nt, Homo sapiens
  misc_RNA (1)...(19): siRNA sense strand
cacaaggcuuucaggauau

SEQ ID NO: 1982355 - RNA, 19 nt, Homo sapiens
  misc_RNA (1)...(19): siRNA sense strand
gcucaugcgugaugcuaag

SEQ ID NO: 1982356 - RNA, 19 nt, Homo sapiens
  misc_RNA (1)...(19): siRNA sense strand
ucaaaucccgguccaaauc

SEQ ID NO: 1982357 - RNA, 19 nt, Homo sapiens
  misc_RNA (1)...(19): siRNA sense strand
ggacaugggagcgaagaug

SEQ ID NO: 1982358 - RNA, 19 nt, Homo sapiens
  misc_RNA (1)...(19): siRNA sense strand
gaccagauguaccgaguuu

SEQ ID NO: 1982359 - RNA, 19 nt, Homo sapiens
  misc_RNA (1)...(19): siRNA sense strand
ggagucuucuguucucuaa

SEQ ID NO: 1982360 - RNA, 19 nt, Homo sapiens
  misc_RNA (1)...(19): siRNA sense strand
gaaaauuagccagguauua

SEQ ID NO: 1982361 - RNA, 19 nt, Homo sapiens
  misc_RNA (1)...(19): siRNA sense strand
ggaaaagacuguccaaagg

SEQ ID NO: 1982362 - RNA, 19 nt, Homo sapiens
  misc_RNA (1)...(19): siRNA sense strand
gaaaccccaucuuuacuaa

SEQ ID NO: 1982363 - RNA, 19 nt, Homo sapiens
  misc_RNA (1)...(19): siRNA sense strand
gaggaagaaugagaguuau

SEQ ID NO: 1982364 - RNA, 19 nt, Homo sapiens
  misc_RNA (1)...(19): siRNA sense strand
gaggaugugucuccaagag

SEQ ID NO: 1982365 - RNA, 19 nt, Homo sapiens
  misc_RNA (1)...(19): siRNA sense strand
ccagauguaccgaguuuga

SEQ ID NO: 1982366 - RNA, 19 nt, Homo sapiens
  misc_RNA (1)...(19): siRNA sense strand
uagccagguauuagaauua

SEQ ID NO: 1982367 - RNA, 19 nt, Homo sapiens
  misc_RNA (1)...(19): siRNA sense strand
ggaagaaugagaguuaucu

SEQ ID NO: 1982368 - RNA, 19 nt, Homo sapiens
  misc_RNA (1)...(19): siRNA sense strand
gaauuaucagucucucauu

SEQ ID NO: 1982369 - RNA, 19 nt, Homo sapiens
  misc_RNA (1)...(19): siRNA sense strand
uuagccagguauuagaauu

SEQ ID NO: 1982370 - RNA, 19 nt, Homo sapiens
  misc_RNA (1)...(19): siRNA sense strand
cccagaagcccaagaggaa

SEQ ID NO: 1982371 - RNA, 19 nt, Homo sapiens
  misc_RNA (1)...(19): siRNA sense strand
ggccaaggcaggcagauca

SEQ ID NO: 1982372 - RNA, 19 nt, Homo sapiens
  misc_RNA (1)...(19): siRNA sense strand
ggucaggaguucgaaacca

SEQ ID NO: 1982373 - RNA, 19 nt, Homo sapiens
  misc_RNA (1)...(19): siRNA sense strand
ugaauuaucagucucucau

SEQ ID NO: 1982374 - RNA, 19 nt, Homo sapiens
  misc_RNA (1)...(19): siRNA sense strand
gauguaccgaguuugaaau

SEQ ID NO: 1982375 - RNA, 19 nt, Homo sapiens
  misc_RNA (1)...(19): siRNA sense strand
gccagguauuagaauuauu

SEQ ID NO: 1982376 - RNA, 19 nt, Homo sapiens
  misc_RNA (1)...(19): siRNA sense strand
uuaucagucucucauuugu

SEQ ID NO: 1982377 - RNA, 19 nt, Homo sapiens
  misc_RNA (1)...(19): siRNA sense strand
aaauuagccagguauuaga

SEQ ID NO: 1982378 - RNA, 19 nt, Homo sapiens
  misc_RNA (1)...(19): siRNA sense strand
gagcuuccagggaggaugu

SEQ ID NO: 1982379 - RNA, 19 nt, Homo sapiens
  misc_RNA (1)...(19): siRNA sense strand
agauguaccgaguuugaaa

SEQ ID NO: 1982380 - RNA, 19 nt, Homo sapiens
  misc_RNA (1)...(19): siRNA sense strand
ccagaagcccaagaggaaa

SEQ ID NO: 1982381 - RNA, 19 nt, Homo sapiens
  misc_RNA (1)...(19): siRNA sense strand
ucuguucucuaaccuugga

SEQ ID NO: 1982382 - RNA, 19 nt, Homo sapiens
  misc_RNA (1)...(19): siRNA sense strand
uggcgaaaccccaucuuua

SEQ ID NO: 1982383 - RNA, 19 nt, Homo sapiens
  misc_RNA (1)...(19): siRNA sense strand
agccagguauuagaauuau

SEQ ID NO: 1982384 - RNA, 19 nt, Homo sapiens
  misc_RNA (1)...(19): siRNA sense strand
cgaaaccccaucuuuacua

SEQ ID NO: 1982385 - RNA, 19 nt, Homo sapiens
  misc_RNA (1)...(19): siRNA sense strand
gaaauacgguggcaucuac

SEQ ID NO: 1982386 - RNA, 19 nt, Homo sapiens
  misc_RNA (1)...(19): siRNA sense strand
gaacauauccuucuuacac

SEQ ID NO: 1982387 - RNA, 19 nt, Homo sapiens
  misc_RNA (1)...(19): siRNA sense strand
gagccaagcuucaaugucu

SEQ ID NO: 1982388 - RNA, 19 nt, Homo sapiens
  misc_RNA (1)...(19): siRNA sense strand
gguguaaacuugaagacuu

SEQ ID NO: 1982389 - RNA, 19 nt, Homo sapiens
  misc_RNA (1)...(19): siRNA sense strand
ccacaccgaugcccucaaa

SEQ ID NO: 1982390 - RNA, 19 nt, Homo sapiens
  misc_RNA (1)...(19): siRNA sense strand
ugaagggucuuacugauuc

SEQ ID NO: 1982391 - RNA, 19 nt, Homo sapiens
  misc_RNA (1)...(19): siRNA sense strand
gaaacuggcuccacaucag

SEQ ID NO: 1982392 - RNA, 19 nt, Homo sapiens
  misc_RNA (1)...(19): siRNA sense strand
ccagcugccucuucuguuu

SEQ ID NO: 1982393 - RNA, 19 nt, Homo sapiens
  misc_RNA (1)...(19): siRNA sense strand
cuagagaccucagagagaa

SEQ ID NO: 1982394 - RNA, 19 nt, Homo sapiens
  misc_RNA (1)...(19): siRNA sense strand
acaaggauguugaggguau

SEQ ID NO: 1982395 - RNA, 19 nt, Homo sapiens
  misc_RNA (1)...(19): siRNA sense strand
ugaaaaggcugcuugaaga

SEQ ID NO: 1982396 - RNA, 19 nt, Homo sapiens
  misc_RNA (1)...(19): siRNA sense strand
ggaaauacgguggcaucua

SEQ ID NO: 1982397 - RNA, 19 nt, Homo sapiens
  misc_RNA (1)...(19): siRNA sense strand
ugaagacacaccauuguuu

SEQ ID NO: 1982398 - RNA, 19 nt, Homo sapiens
  misc_RNA (1)...(19): siRNA sense strand
gguaugguguaaacuugaa

SEQ ID NO: 1982399 - RNA, 19 nt, Homo sapiens
  misc_RNA (1)...(19): siRNA sense strand
gcaacacacugguggaaaa

SEQ ID NO: 1982400 - RNA, 19 nt, Homo sapiens
  misc_RNA (1)...(19): siRNA sense strand
ggcauuguguuucuagaga

SEQ ID NO: 1982401 - RNA, 19 nt, Homo sapiens
  misc_RNA (1)...(19): siRNA sense strand
ggguccagguaacaaauaa

SEQ ID NO: 1982402 - RNA, 19 nt, Homo sapiens
  misc_RNA (1)...(19): siRNA sense strand
ccaaggcccugaguugaug

SEQ ID NO: 1982403 - RNA, 19 nt, Homo sapiens
  misc_RNA (1)...(19): siRNA sense strand
ccugugguguucuuuauga

SEQ ID NO: 1982404 - RNA, 19 nt, Homo sapiens
  misc_RNA (1)...(19): siRNA sense strand
ggccugugguguucuuuau

SEQ ID NO: 1982405 - RNA, 19 nt, Homo sapiens
  misc_RNA (1)...(19): siRNA sense strand
gaagacacaccauuguuuu

SEQ ID NO: 1982406 - RNA, 19 nt, Homo sapiens
  misc_RNA (1)...(19): siRNA sense strand
gcccugaguugaugacaag

SEQ ID NO: 1982407 - RNA, 19 nt, Homo sapiens
  misc_RNA (1)...(19): siRNA sense strand
agagucugcugccaagauu

SEQ ID NO: 1982408 - RNA, 19 nt, Homo sapiens
  misc_RNA (1)...(19): siRNA sense strand
gaggguaugguguaaacuu

SEQ ID NO: 1982409 - RNA, 19 nt, Homo sapiens
  misc_RNA (1)...(19): siRNA sense strand
aagcuucaaugucucuuau

SEQ ID NO: 1982410 - RNA, 19 nt, Homo sapiens
  misc_RNA (1)...(19): siRNA sense strand
uaugaagggucuuacugau

SEQ ID NO: 1982411 - RNA, 19 nt, Homo sapiens
  misc_RNA (1)...(19): siRNA sense strand
caagcuucaaugucucuua

SEQ ID NO: 1982412 - RNA, 19 nt, Homo sapiens
  misc_RNA (1)...(19): siRNA sense strand
gccaagauuuauccugagu

SEQ ID NO: 1982413 - RNA, 19 nt, Homo sapiens
  misc_RNA (1)...(19): siRNA sense strand
ccucuucccuuuggauaug

SEQ ID NO: 1982414 - RNA, 19 nt, Homo sapiens
  misc_RNA (1)...(19): siRNA sense strand
gggaaugcauggaaaacuu

SEQ ID NO: 1982415 - RNA, 19 nt, Homo sapiens
  misc_RNA (1)...(19): siRNA sense strand
gagaguggaggcgcuacua

SEQ ID NO: 1982416 - RNA, 19 nt, Homo sapiens
  misc_RNA (1)...(19): siRNA sense strand
agucugcugccaagauuua

SEQ ID NO: 1982417 - RNA, 19 nt, Homo sapiens
  misc_RNA (1)...(19): siRNA sense strand
gagaaacuggcuccacauc

SEQ ID NO: 1982418 - RNA, 19 nt, Homo sapiens
  misc_RNA (1)...(19): siRNA sense strand
gcuugaagacacaccauug

SEQ ID NO: 1982419 - RNA, 19 nt, Homo sapiens
  misc_RNA (1)...(19): siRNA sense strand
ugaguggccugugguguuc

SEQ ID NO: 1982420 - RNA, 19 nt, Homo sapiens
  misc_RNA (1)...(19): siRNA sense strand
gacguggcauuguguuucu

SEQ ID NO: 1982421 - RNA, 19 nt, Homo sapiens
  misc_RNA (1)...(19): siRNA sense strand
gaguggaggcgcuacuaug

SEQ ID NO: 1982422 - RNA, 19 nt, Homo sapiens
  misc_RNA (1)...(19): siRNA sense strand
gugauuagaggaagcaaca

SEQ ID NO: 1982423 - RNA, 19 nt, Homo sapiens
  misc_RNA (1)...(19): siRNA sense strand
gccaucaucuggaaauacg

SEQ ID NO: 1982424 - RNA, 19 nt, Homo sapiens
  misc_RNA (1)...(19): siRNA sense strand
gcuucaaugucucuuaugc

SEQ ID NO: 1982425 - RNA, 19 nt, Homo sapiens
  misc_RNA (1)...(19): siRNA sense strand
uggaggcgcuacuaugaag

SEQ ID NO: 1982426 - RNA, 19 nt, Homo sapiens
  misc_RNA (1)...(19): siRNA sense strand
gcaaccaaggcccugaguu

SEQ ID NO: 1982427 - RNA, 19 nt, Homo sapiens
  misc_RNA (1)...(19): siRNA sense strand
ggucuccuguuccguagag

SEQ ID NO: 1982428 - RNA, 19 nt, Homo sapiens
  misc_RNA (1)...(19): siRNA sense strand
gauuagaggaagcaacaca

SEQ ID NO: 1982429 - RNA, 19 nt, Homo sapiens
  misc_RNA (1)...(19): siRNA sense strand
ucugaacauauccuucuua

SEQ ID NO: 1982430 - RNA, 19 nt, Homo sapiens
  misc_RNA (1)...(19): siRNA sense strand
caacgccagcgcagagaga

SEQ ID NO: 1982431 - RNA, 19 nt, Homo sapiens
  misc_RNA (1)...(19): siRNA sense strand
uuaugaagggucuuacuga

SEQ ID NO: 1982432 - RNA, 19 nt, Homo sapiens
  misc_RNA (1)...(19): siRNA sense strand
gaguugaugacaaggaugu

SEQ ID NO: 1982433 - RNA, 19 nt, Homo sapiens
  misc_RNA (1)...(19): siRNA sense strand
agacaacguuuuccucuuc

SEQ ID NO: 1982434 - RNA, 19 nt, Homo sapiens
  misc_RNA (1)...(19): siRNA sense strand
gauacagagccaagcuuca

SEQ ID NO: 1982435 - RNA, 19 nt, Homo sapiens
  misc_RNA (1)...(19): siRNA sense strand
cugaacauauccuucuuac

SEQ ID NO: 1982436 - RNA, 19 nt, Homo sapiens
  misc_RNA (1)...(19): siRNA sense strand
aggguaugguguaaacuug

SEQ ID NO: 1982437 - RNA, 19 nt, Homo sapiens
  misc_RNA (1)...(19): siRNA sense strand
ucuagagaccucagagaga

SEQ ID NO: 1982438 - RNA, 19 nt, Homo sapiens
  misc_RNA (1)...(19): siRNA sense strand
ggcccugaguugaugacaa

SEQ ID NO: 1982439 - RNA, 19 nt, Homo sapiens
  misc_RNA (1)...(19): siRNA sense strand
ggaaugcauggaaaacuuu

SEQ ID NO: 1982440 - RNA, 19 nt, Homo sapiens
  misc_RNA (1)...(19): siRNA sense strand
caaggauguugaggguaug

SEQ ID NO: 1982441 - RNA, 19 nt, Homo sapiens
  misc_RNA (1)...(19): siRNA sense strand
auacagagccaagcuucaa

SEQ ID NO: 1982442 - RNA, 19 nt, Homo sapiens
  misc_RNA (1)...(19): siRNA sense strand
caugguacaaucaaaucaa

SEQ ID NO: 1982443 - RNA, 19 nt, Homo sapiens
  misc_RNA (1)...(19): siRNA sense strand
cccauuuggucuccuguuc

SEQ ID NO: 1982444 - RNA, 19 nt, Homo sapiens
  misc_RNA (1)...(19): siRNA sense strand
gauuuuaccccaucuccua

SEQ ID NO: 1982445 - RNA, 19 nt, Homo sapiens
  misc_RNA (1)...(19): siRNA sense strand
gcccaucccugaggagaac

SEQ ID NO: 1982446 - RNA, 19 nt, Homo sapiens
  misc_RNA (1)...(19): siRNA sense strand
uggccaucaucuggaaaua

SEQ ID NO: 1982447 - RNA, 19 nt, Homo sapiens
  misc_RNA (1)...(19): siRNA sense strand
gaggcgcuacuaugaagug

SEQ ID NO: 1982448 - RNA, 19 nt, Homo sapiens
  misc_RNA (1)...(19): siRNA sense strand
aguggaggcgcuacuauga

SEQ ID NO: 1982449 - RNA, 19 nt, Homo sapiens
  misc_RNA (1)...(19): siRNA sense strand
gccuggccaucaucuggaa

SEQ ID NO: 1982450 - RNA, 19 nt, Homo sapiens
  misc_RNA (1)...(19): siRNA sense strand
guggaggcgcuacuaugaa

SEQ ID NO: 1982451 - RNA, 19 nt, Homo sapiens
  misc_RNA (1)...(19): siRNA sense strand
guggcuuccucuaccaguu

SEQ ID NO: 1982452 - RNA, 19 nt, Homo sapiens
  misc_RNA (1)...(19): siRNA sense strand
ggguaugguguaaacuuga

SEQ ID NO: 1982453 - RNA, 19 nt, Homo sapiens
  misc_RNA (1)...(19): siRNA sense strand
gcaggcuucucgguacucu

SEQ ID NO: 1982454 - RNA, 19 nt, Homo sapiens
  misc_RNA (1)...(19): siRNA sense strand
gaacaaaucgaaagagaug

SEQ ID NO: 1982455 - RNA, 19 nt, Homo sapiens
  misc_RNA (1)...(19): siRNA sense strand
aaagaaagcuagaacugaa

SEQ ID NO: 1982456 - RNA, 19 nt, Homo sapiens
  misc_RNA (1)...(19): siRNA sense strand
gagaagacccugagagcua

SEQ ID NO: 1982457 - RNA, 19 nt, Homo sapiens
  misc_RNA (1)...(19): siRNA sense strand
gacaggaacuaacggaauu

SEQ ID NO: 1982458 - RNA, 19 nt, Homo sapiens
  misc_RNA (1)...(19): siRNA sense strand
gggauaaccuguacuaugg

SEQ ID NO: 1982459 - RNA, 19 nt, Homo sapiens
  misc_RNA (1)...(19): siRNA sense strand
cuauaacaauggcaucuua

SEQ ID NO: 1982460 - RNA, 19 nt, Homo sapiens
  misc_RNA (1)...(19): siRNA sense strand
ucagaagacuuuggaguaa

SEQ ID NO: 1982461 - RNA, 19 nt, Homo sapiens
  misc_RNA (1)...(19): siRNA sense strand
gggaacaaaucgaaagaga

SEQ ID NO: 1982462 - RNA, 19 nt, Homo sapiens
  misc_RNA (1)...(19): siRNA sense strand
gaaagcaucccagaacuga

SEQ ID NO: 1982463 - RNA, 19 nt, Homo sapiens
  misc_RNA (1)...(19): siRNA sense strand
gcucaaagcuuggauucug

SEQ ID NO: 1982464 - RNA, 19 nt, Homo sapiens
  misc_RNA (1)...(19): siRNA sense strand
cagaauguauuuccuaauc

SEQ ID NO: 1982465 - RNA, 19 nt, Homo sapiens
  misc_RNA (1)...(19): siRNA sense strand
agaagacgaugcugacaaa

SEQ ID NO: 1982466 - RNA, 19 nt, Homo sapiens
  misc_RNA (1)...(19): siRNA sense strand
ggaggacucagaagacuuu

SEQ ID NO: 1982467 - RNA, 19 nt, Homo sapiens
  misc_RNA (1)...(19): siRNA sense strand
ggaauuagcaguggauuag

SEQ ID NO: 1982468 - RNA, 19 nt, Homo sapiens
  misc_RNA (1)...(19): siRNA sense strand
caucugaaccauuucuaua

SEQ ID NO: 1982469 - RNA, 19 nt, Homo sapiens
  misc_RNA (1)...(19): siRNA sense strand
ggacugaggagccagagaa

SEQ ID NO: 1982470 - RNA, 19 nt, Homo sapiens
  misc_RNA (1)...(19): siRNA sense strand
gcacguugauagggaguuu

SEQ ID NO: 1982471 - RNA, 19 nt, Homo sapiens
  misc_RNA (1)...(19): siRNA sense strand
gauagggaguuugcuguug

SEQ ID NO: 1982472 - RNA, 19 nt, Homo sapiens
  misc_RNA (1)...(19): siRNA sense strand
ggccagugcuugacaggaa

SEQ ID NO: 1982473 - RNA, 19 nt, Homo sapiens
  misc_RNA (1)...(19): siRNA sense strand
gagcuaacccugaguugug

SEQ ID NO: 1982474 - RNA, 19 nt, Homo sapiens
  misc_RNA (1)...(19): siRNA sense strand
caagcaggagccaacauua

SEQ ID NO: 1982475 - RNA, 19 nt, Homo sapiens
  misc_RNA (1)...(19): siRNA sense strand
uaaagaaagcuagaacuga

SEQ ID NO: 1982476 - RNA, 19 nt, Homo sapiens
  misc_RNA (1)...(19): siRNA sense strand
ucuugaaccuccagaauug

SEQ ID NO: 1982477 - RNA, 19 nt, Homo sapiens
  misc_RNA (1)...(19): siRNA sense strand
guaaagaaagcuagaacug

SEQ ID NO: 1982478 - RNA, 19 nt, Homo sapiens
  misc_RNA (1)...(19): siRNA sense strand
agaagacccugagagcuaa

SEQ ID NO: 1982479 - RNA, 19 nt, Homo sapiens
  misc_RNA (1)...(19): siRNA sense strand
cagcagacauugcacaaac

SEQ ID NO: 1982480 - RNA, 19 nt, Homo sapiens
  misc_RNA (1)...(19): siRNA sense strand
cagaagacuuuggaguaaa

SEQ ID NO: 1982481 - RNA, 19 nt, Homo sapiens
  misc_RNA (1)...(19): siRNA sense strand
acaauggcaucuuaaaugg

SEQ ID NO: 1982482 - RNA, 19 nt, Homo sapiens
  misc_RNA (1)...(19): siRNA sense strand
ggacucagaagacuuugga

SEQ ID NO: 1982483 - RNA, 19 nt, Homo sapiens
  misc_RNA (1)...(19): siRNA sense strand
ccaggguucucucugcauu

SEQ ID NO: 1982484 - RNA, 19 nt, Homo sapiens
  misc_RNA (1)...(19): siRNA sense strand
gcgguucucugcaccugaa

SEQ ID NO: 1982485 - RNA, 19 nt, Homo sapiens
  misc_RNA (1)...(19): siRNA sense strand
gcagacgccagcccacauu

SEQ ID NO: 1982486 - RNA, 19 nt, Homo sapiens
  misc_RNA (1)...(19): siRNA sense strand
caucagaauguauuuccua

SEQ ID NO: 1982487 - RNA, 19 nt, Homo sapiens
  misc_RNA (1)...(19): siRNA sense strand
auugucaucugaaccauuu

SEQ ID NO: 1982488 - RNA, 19 nt, Homo sapiens
  misc_RNA (1)...(19): siRNA sense strand
ggaacaaaucgaaagagau

SEQ ID NO: 1982489 - RNA, 19 nt, Homo sapiens
  misc_RNA (1)...(19): siRNA sense strand
aagcaggagccaacauuaa

SEQ ID NO: 1982490 - RNA, 19 nt, Homo sapiens
  misc_RNA (1)...(19): siRNA sense strand
caaguuggagugcuuagug

SEQ ID NO: 1982491 - RNA, 19 nt, Homo sapiens
  misc_RNA (1)...(19): siRNA sense strand
aacaauggcaucuuaaaug

SEQ ID NO: 1982492 - RNA, 19 nt, Homo sapiens
  misc_RNA (1)...(19): siRNA sense strand
ccaagagugugcccagucu

SEQ ID NO: 1982493 - RNA, 19 nt, Homo sapiens
  misc_RNA (1)...(19): siRNA sense strand
gagccaacauuaacaaacc

SEQ ID NO: 1982494 - RNA, 19 nt, Homo sapiens
  misc_RNA (1)...(19): siRNA sense strand
ucaagcaggagccaacauu

SEQ ID NO: 1982495 - RNA, 19 nt, Homo sapiens
  misc_RNA (1)...(19): siRNA sense strand
gguucucucugcauuagug

SEQ ID NO: 1982496 - RNA, 19 nt, Homo sapiens
  misc_RNA (1)...(19): siRNA sense strand
uagggaguuugcuguugua

SEQ ID NO: 1982497 - RNA, 19 nt, Homo sapiens
  misc_RNA (1)...(19): siRNA sense strand
gcugaaagcaucccagaac

SEQ ID NO: 1982498 - RNA, 19 nt, Homo sapiens
  misc_RNA (1)...(19): siRNA sense strand
ggaguaaagaaagcuagaa

SEQ ID NO: 1982499 - RNA, 19 nt, Homo sapiens
  misc_RNA (1)...(19): siRNA sense strand
gaguccaaguagcugcaua

SEQ ID NO: 1982500 - RNA, 19 nt, Homo sapiens
  misc_RNA (1)...(19): siRNA sense strand
gcaggagccaacauuaaca

SEQ ID NO: 1982501 - RNA, 19 nt, Homo sapiens
  misc_RNA (1)...(19): siRNA sense strand
ccugacagcagcagacauu

SEQ ID NO: 1982502 - RNA, 19 nt, Homo sapiens
  misc_RNA (1)...(19): siRNA sense strand
gcaggaauggccagugcuu

SEQ ID NO: 1982503 - RNA, 19 nt, Homo sapiens
  misc_RNA (1)...(19): siRNA sense strand
gagccuagaaugcaucagu

SEQ ID NO: 1982504 - RNA, 19 nt, Homo sapiens
  misc_RNA (1)...(19): siRNA sense strand
cggaauuagcaguggauua

SEQ ID NO: 1982505 - RNA, 19 nt, Homo sapiens
  misc_RNA (1)...(19): siRNA sense strand
cucagaagacuuuggagua

SEQ ID NO: 1982506 - RNA, 19 nt, Homo sapiens
  misc_RNA (1)...(19): siRNA sense strand
ugacaggaacuaacggaau

SEQ ID NO: 1982507 - RNA, 19 nt, Homo sapiens
  misc_RNA (1)...(19): siRNA sense strand
ucacgaauggcgacacaga

SEQ ID NO: 1982508 - RNA, 19 nt, Homo sapiens
  misc_RNA (1)...(19): siRNA sense strand
agacgaugcugacaaaaug

SEQ ID NO: 1982509 - RNA, 19 nt, Homo sapiens
  misc_RNA (1)...(19): siRNA sense strand
cagaagacgaugcugacaa

SEQ ID NO: 1982510 - RNA, 19 nt, Homo sapiens
  misc_RNA (1)...(19): siRNA sense strand
gcagcagacauugcacaaa

SEQ ID NO: 1982511 - RNA, 19 nt, Homo sapiens
  misc_RNA (1)...(19): siRNA sense strand
acaguguggucgagcauuc

SEQ ID NO: 1982512 - RNA, 19 nt, Homo sapiens
  misc_RNA (1)...(19): siRNA sense strand
gaacaguguggucgagcau

SEQ ID NO: 1982513 - RNA, 19 nt, Homo sapiens
  misc_RNA (1)...(19): siRNA sense strand
auagggaguuugcuguugu

SEQ ID NO: 1982514 - RNA, 19 nt, Homo sapiens
  misc_RNA (1)...(19): siRNA sense strand
cgaauggcgacacagaaga

SEQ ID NO: 1982515 - RNA, 19 nt, Homo sapiens
  misc_RNA (1)...(19): siRNA sense strand
guagcugcauagccaguag

SEQ ID NO: 1982516 - RNA, 19 nt, Homo sapiens
  misc_RNA (1)...(19): siRNA sense strand
ugccuggucuggcugauuc

SEQ ID NO: 1982517 - RNA, 19 nt, Homo sapiens
  misc_RNA (1)...(19): siRNA sense strand
aacaguagcuccguaucga

SEQ ID NO: 1982518 - RNA, 19 nt, Homo sapiens
  misc_RNA (1)...(19): siRNA sense strand
gacagcagcagacauugca

SEQ ID NO: 1982519 - RNA, 19 nt, Homo sapiens
  misc_RNA (1)...(19): siRNA sense strand
gaauugucaucugaaccau

SEQ ID NO: 1982520 - RNA, 19 nt, Homo sapiens
  misc_RNA (1)...(19): siRNA sense strand
gagagcuaacccugaguug

SEQ ID NO: 1982521 - RNA, 19 nt, Homo sapiens
  misc_RNA (1)...(19): siRNA sense strand
gcuuggaggacucagaaga

SEQ ID NO: 1982522 - RNA, 19 nt, Homo sapiens
  misc_RNA (1)...(19): siRNA sense strand
cugaaccauuucuauaaca

SEQ ID NO: 1982523 - RNA, 19 nt, Homo sapiens
  misc_RNA (1)...(19): siRNA sense strand
gaauggccagugcuugaca

SEQ ID NO: 1982524 - RNA, 19 nt, Homo sapiens
  misc_RNA (1)...(19): siRNA sense strand
ucugaaccauuucuauaac

SEQ ID NO: 1982525 - RNA, 19 nt, Homo sapiens
  misc_RNA (1)...(19): siRNA sense strand
ugaaagcaucccagaacug

SEQ ID NO: 1982526 - RNA, 19 nt, Homo sapiens
  misc_RNA (1)...(19): siRNA sense strand
ggauaaccuguacuaugga

SEQ ID NO: 1982527 - RNA, 19 nt, Homo sapiens
  misc_RNA (1)...(19): siRNA sense strand
uggaagacauuggggauaa

SEQ ID NO: 1982528 - RNA, 19 nt, Homo sapiens
  misc_RNA (1)...(19): siRNA sense strand
caggguucucucugcauua

SEQ ID NO: 1982529 - RNA, 19 nt, Homo sapiens
  misc_RNA (1)...(19): siRNA sense strand
aggaauggccagugcuuga

SEQ ID NO: 1982530 - RNA, 19 nt, Homo sapiens
  misc_RNA (1)...(19): siRNA sense strand
gggauggaaagcaggaaug

SEQ ID NO: 1982531 - RNA, 19 nt, Homo sapiens
  misc_RNA (1)...(19): siRNA sense strand
ggagccaacauuaacaaac

SEQ ID NO: 1982532 - RNA, 19 nt, Homo sapiens
  misc_RNA (1)...(19): siRNA sense strand
gagggugaaacucccauuc

SEQ ID NO: 1982533 - RNA, 19 nt, Homo sapiens
  misc_RNA (1)...(19): siRNA sense strand
caggagccaacauuaacaa

SEQ ID NO: 1982534 - RNA, 19 nt, Homo sapiens
  misc_RNA (1)...(19): siRNA sense strand
ucacgucgaccugagaaau

SEQ ID NO: 1982535 - RNA, 19 nt, Homo sapiens
  misc_RNA (1)...(19): siRNA sense strand
ugagagcuaacccugaguu

SEQ ID NO: 1982536 - RNA, 19 nt, Homo sapiens
  misc_RNA (1)...(19): siRNA sense strand
gaauggcgacacagaagac

SEQ ID NO: 1982537 - RNA, 19 nt, Homo sapiens
  misc_RNA (1)...(19): siRNA sense strand
gaguaaagaaagcuagaac

SEQ ID NO: 1982538 - RNA, 19 nt, Homo sapiens
  misc_RNA (1)...(19): siRNA sense strand
cauauuagugugggaacaa

SEQ ID NO: 1982539 - RNA, 19 nt, Homo sapiens
  misc_RNA (1)...(19): siRNA sense strand
gagcgggagccacacucaa

SEQ ID NO: 1982540 - RNA, 19 nt, Homo sapiens
  misc_RNA (1)...(19): siRNA sense strand
ccuguacuauggacacuac

SEQ ID NO: 1982541 - RNA, 19 nt, Homo sapiens
  misc_RNA (1)...(19): siRNA sense strand
cugaacgggaguccaagua

SEQ ID NO: 1982542 - RNA, 19 nt, Homo sapiens
  misc_RNA (1)...(19): siRNA sense strand
acaggaacuaacggaauua

SEQ ID NO: 1982543 - RNA, 19 nt, Homo sapiens
  misc_RNA (1)...(19): siRNA sense strand
gggaagaaauguaauacua

SEQ ID NO: 1982544 - RNA, 19 nt, Homo sapiens
  misc_RNA (1)...(19): siRNA sense strand
gaagaaacaucaucugaag

SEQ ID NO: 1982545 - RNA, 19 nt, Homo sapiens
  misc_RNA (1)...(19): siRNA sense strand
gaggaaagcacaugugaua

SEQ ID NO: 1982546 - RNA, 19 nt, Homo sapiens
  misc_RNA (1)...(19): siRNA sense strand
gaacaaaccacucaagauc

SEQ ID NO: 1982547 - RNA, 19 nt, Homo sapiens
  misc_RNA (1)...(19): siRNA sense strand
cagauaaccuggcuacuug

SEQ ID NO: 1982548 - RNA, 19 nt, Homo sapiens
  misc_RNA (1)...(19): siRNA sense strand
gaaacucucuauccucuca

SEQ ID NO: 1982549 - RNA, 19 nt, Homo sapiens
  misc_RNA (1)...(19): siRNA sense strand
caucggagauugacaagga

SEQ ID NO: 1982550 - RNA, 19 nt, Homo sapiens
  misc_RNA (1)...(19): siRNA sense strand
gaacacacacuagaaaguu

SEQ ID NO: 1982551 - RNA, 19 nt, Homo sapiens
  misc_RNA (1)...(19): siRNA sense strand
gaaagcacaugugauaugg

SEQ ID NO: 1982552 - RNA, 19 nt, Homo sapiens
  misc_RNA (1)...(19): siRNA sense strand
ggaaagcacaugugauaug

SEQ ID NO: 1982553 - RNA, 19 nt, Homo sapiens
  misc_RNA (1)...(19): siRNA sense strand
caaaggaagugaaagugau

SEQ ID NO: 1982554 - RNA, 19 nt, Homo sapiens
  misc_RNA (1)...(19): siRNA sense strand
gaucaaggucaaauaauga

SEQ ID NO: 1982555 - RNA, 19 nt, Homo sapiens
  misc_RNA (1)...(19): siRNA sense strand
cgaagcaaauccucaguau

SEQ ID NO: 1982556 - RNA, 19 nt, Homo sapiens
  misc_RNA (1)...(19): siRNA sense strand
gccagacgcucacucuaaa

SEQ ID NO: 1982557 - RNA, 19 nt, Homo sapiens
  misc_RNA (1)...(19): siRNA sense strand
aaaugaguauccugcuuua

SEQ ID NO: 1982558 - RNA, 19 nt, Homo sapiens
  misc_RNA (1)...(19): siRNA sense strand
gcacaaaggaagugaaagu

SEQ ID NO: 1982559 - RNA, 19 nt, Homo sapiens
  misc_RNA (1)...(19): siRNA sense strand
gcagauaaccuggcuacuu

SEQ ID NO: 1982560 - RNA, 19 nt, Homo sapiens
  misc_RNA (1)...(19): siRNA sense strand
gaugggaagaaauguaaua

SEQ ID NO: 1982561 - RNA, 19 nt, Homo sapiens
  misc_RNA (1)...(19): siRNA sense strand
uaaaugaguauccugcuuu

SEQ ID NO: 1982562 - RNA, 19 nt, Homo sapiens
  misc_RNA (1)...(19): siRNA sense strand
gcacaugugauauggaaga

SEQ ID NO: 1982563 - RNA, 19 nt, Homo sapiens
  misc_RNA (1)...(19): siRNA sense strand
ccaaauaccagcuucuuca

SEQ ID NO: 1982564 - RNA, 19 nt, Homo sapiens
  misc_RNA (1)...(19): siRNA sense strand
ccuggaagcuucaguuauc

SEQ ID NO: 1982565 - RNA, 19 nt, Homo sapiens
  misc_RNA (1)...(19): siRNA sense strand
gaacgcuccaugaauuuga

SEQ ID NO: 1982566 - RNA, 19 nt, Homo sapiens
  misc_RNA (1)...(19): siRNA sense strand
aacaucaucugaagagaaa

SEQ ID NO: 1982567 - RNA, 19 nt, Homo sapiens
  misc_RNA (1)...(19): siRNA sense strand
gaaacaucaucugaagaga

SEQ ID NO: 1982568 - RNA, 19 nt, Homo sapiens
  misc_RNA (1)...(19): siRNA sense strand
ggccagacgcucacucuaa

SEQ ID NO: 1982569 - RNA, 19 nt, Homo sapiens
  misc_RNA (1)...(19): siRNA sense strand
uaccagcacucucauaauc

SEQ ID NO: 1982570 - RNA, 19 nt, Homo sapiens
  misc_RNA (1)...(19): siRNA sense strand
aagcuucaguuaucagaaa

SEQ ID NO: 1982571 - RNA, 19 nt, Homo sapiens
  misc_RNA (1)...(19): siRNA sense strand
agaucaaggucaaauaaug

SEQ ID NO: 1982572 - RNA, 19 nt, Homo sapiens
  misc_RNA (1)...(19): siRNA sense strand
aauaccagcuucuucauca

SEQ ID NO: 1982573 - RNA, 19 nt, Homo sapiens
  misc_RNA (1)...(19): siRNA sense strand
aagcacaugugauauggaa

SEQ ID NO: 1982574 - RNA, 19 nt, Homo sapiens
  misc_RNA (1)...(19): siRNA sense strand
gaagcaaauccucaguauu

SEQ ID NO: 1982575 - RNA, 19 nt, Homo sapiens
  misc_RNA (1)...(19): siRNA sense strand
guagcacccuuccgguuug

SEQ ID NO: 1982576 - RNA, 19 nt, Homo sapiens
  misc_RNA (1)...(19): siRNA sense strand
cuagaaaguuacagaucaa

SEQ ID NO: 1982577 - RNA, 19 nt, Homo sapiens
  misc_RNA (1)...(19): siRNA sense strand
aacacacacuagaaaguua

SEQ ID NO: 1982578 - RNA, 19 nt, Homo sapiens
  misc_RNA (1)...(19): siRNA sense strand
ccacagcagcccaccagua

SEQ ID NO: 1982579 - RNA, 19 nt, Homo sapiens
  misc_RNA (1)...(19): siRNA sense strand
aagauuugguuacugauga

SEQ ID NO: 1982580 - RNA, 19 nt, Homo sapiens
  misc_RNA (1)...(19): siRNA sense strand
gggaauagcauggaagugu

SEQ ID NO: 1982581 - RNA, 19 nt, Homo sapiens
  misc_RNA (1)...(19): siRNA sense strand
gaaaguuacagaucaaggu

SEQ ID NO: 1982582 - RNA, 19 nt, Homo sapiens
  misc_RNA (1)...(19): siRNA sense strand
guacaucggagauugacaa

SEQ ID NO: 1982583 - RNA, 19 nt, Homo sapiens
  misc_RNA (1)...(19): siRNA sense strand
gaagauuugguuacugaug

SEQ ID NO: 1982584 - RNA, 19 nt, Homo sapiens
  misc_RNA (1)...(19): siRNA sense strand
uugaagauuugguuacuga

SEQ ID NO: 1982585 - RNA, 19 nt, Homo sapiens
  misc_RNA (1)...(19): siRNA sense strand
aaacugaugggaagaaaug

SEQ ID NO: 1982586 - RNA, 19 nt, Homo sapiens
  misc_RNA (1)...(19): siRNA sense strand
uacaagugcuuacauuaca

SEQ ID NO: 1982587 - RNA, 19 nt, Homo sapiens
  misc_RNA (1)...(19): siRNA sense strand
ugaagaaacaucaucugaa

SEQ ID NO: 1982588 - RNA, 19 nt, Homo sapiens
  misc_RNA (1)...(19): siRNA sense strand
acagaucaaggucaaauaa

SEQ ID NO: 1982589 - RNA, 19 nt, Homo sapiens
  misc_RNA (1)...(19): siRNA sense strand
ucagaacacacacuagaaa

SEQ ID NO: 1982590 - RNA, 19 nt, Homo sapiens
  misc_RNA (1)...(19): siRNA sense strand
agaagaacauguuguacuc

SEQ ID NO: 1982591 - RNA, 19 nt, Homo sapiens
  misc_RNA (1)...(19): siRNA sense strand
uaacguaacccugcaagau

SEQ ID NO: 1982592 - RNA, 19 nt, Homo sapiens
  misc_RNA (1)...(19): siRNA sense strand
gaaagaacaaaccacucaa

SEQ ID NO: 1982593 - RNA, 19 nt, Homo sapiens
  misc_RNA (1)...(19): siRNA sense strand
caaggaagagaaagaacaa

SEQ ID NO: 1982594 - RNA, 19 nt, Homo sapiens
  misc_RNA (1)...(19): siRNA sense strand
ggaagaaauguaauacuac

SEQ ID NO: 1982595 - RNA, 19 nt, Homo sapiens
  misc_RNA (1)...(19): siRNA sense strand
ucaguuaucagaaagcaaa

SEQ ID NO: 1982596 - RNA, 19 nt, Homo sapiens
  misc_RNA (1)...(19): siRNA sense strand
guacaagugcuuacauuac

SEQ ID NO: 1982597 - RNA, 19 nt, Homo sapiens
  misc_RNA (1)...(19): siRNA sense strand
gaugaaggcguguacaagu

SEQ ID NO: 1982598 - RNA, 19 nt, Homo sapiens
  misc_RNA (1)...(19): siRNA sense strand
gcuggcaacuccuuucaag

SEQ ID NO: 1982599 - RNA, 19 nt, Homo sapiens
  misc_RNA (1)...(19): siRNA sense strand
acuagaaaguuacagauca

SEQ ID NO: 1982600 - RNA, 19 nt, Homo sapiens
  misc_RNA (1)...(19): siRNA sense strand
gaagagaaagaacaaacca

SEQ ID NO: 1982601 - RNA, 19 nt, Homo sapiens
  misc_RNA (1)...(19): siRNA sense strand
ugaaacugaugggaagaaa

SEQ ID NO: 1982602 - RNA, 19 nt, Homo sapiens
  misc_RNA (1)...(19): siRNA sense strand
gagaagaacauguuguacu

SEQ ID NO: 1982603 - RNA, 19 nt, Homo sapiens
  misc_RNA (1)...(19): siRNA sense strand
gaagagagaaaacgaaguu

SEQ ID NO: 1982604 - RNA, 19 nt, Homo sapiens
  misc_RNA (1)...(19): siRNA sense strand
ccaaucagcucuccaucac

SEQ ID NO: 1982605 - RNA, 19 nt, Homo sapiens
  misc_RNA (1)...(19): siRNA sense strand
aauccacacuuauggcaaa

SEQ ID NO: 1982606 - RNA, 19 nt, Homo sapiens
  misc_RNA (1)...(19): siRNA sense strand
aaacaucaucugaagagaa

SEQ ID NO: 1982607 - RNA, 19 nt, Homo sapiens
  misc_RNA (1)...(19): siRNA sense strand
gcugguguccuuccucauu

SEQ ID NO: 1982608 - RNA, 19 nt, Homo sapiens
  misc_RNA (1)...(19): siRNA sense strand
uccaugaauuugaaacuga

SEQ ID NO: 1982609 - RNA, 19 nt, Homo sapiens
  misc_RNA (1)...(19): siRNA sense strand
uaccagagaguauugugua

SEQ ID NO: 1982610 - RNA, 19 nt, Homo sapiens
  misc_RNA (1)...(19): siRNA sense strand
gcaugaacuacaucacaaa

SEQ ID NO: 1982611 - RNA, 19 nt, Homo sapiens
  misc_RNA (1)...(19): siRNA sense strand
agaaagaacaaaccacuca

SEQ ID NO: 1982612 - RNA, 19 nt, Homo sapiens
  misc_RNA (1)...(19): siRNA sense strand
acaaaggaagugaaaguga

SEQ ID NO: 1982613 - RNA, 19 nt, Homo sapiens
  misc_RNA (1)...(19): siRNA sense strand
caaggucaaauaaugaaga

SEQ ID NO: 1982614 - RNA, 19 nt, Homo sapiens
  misc_RNA (1)...(19): siRNA sense strand
uuaaaugaguauccugcuu

SEQ ID NO: 1982615 - RNA, 19 nt, Homo sapiens
  misc_RNA (1)...(19): siRNA sense strand
uggagaagaacauguugua

SEQ ID NO: 1982616 - RNA, 19 nt, Homo sapiens
  misc_RNA (1)...(19): siRNA sense strand
caacuccuuucaagccaau

SEQ ID NO: 1982617 - RNA, 19 nt, Homo sapiens
  misc_RNA (1)...(19): siRNA sense strand
agagacagcuucagaugcu

SEQ ID NO: 1982618 - RNA, 19 nt, Homo sapiens
  misc_RNA (1)...(19): siRNA sense strand
ccaaguaccagagaguauu

SEQ ID NO: 1982619 - RNA, 19 nt, Homo sapiens
  misc_RNA (1)...(19): siRNA sense strand
aaacaaagaggaaggaaaa

SEQ ID NO: 1982620 - RNA, 19 nt, Homo sapiens
  misc_RNA (1)...(19): siRNA sense strand
ugacaaggaagagaaagaa

SEQ ID NO: 1982621 - RNA, 19 nt, Homo sapiens
  misc_RNA (1)...(19): siRNA sense strand
ucuaguacaucggagauug

SEQ ID NO: 1982622 - RNA, 19 nt, Homo sapiens
  misc_RNA (1)...(19): siRNA sense strand
ggaagcuucaguuaucaga

SEQ ID NO: 1982623 - RNA, 19 nt, Homo sapiens
  misc_RNA (1)...(19): siRNA sense strand
guaacggaagauucuagua

SEQ ID NO: 1982624 - RNA, 19 nt, Homo sapiens
  misc_RNA (1)...(19): siRNA sense strand
ggaacgcuccaugaauuug

SEQ ID NO: 1982625 - RNA, 19 nt, Homo sapiens
  misc_RNA (1)...(19): siRNA sense strand
caaguaccagagaguauug

SEQ ID NO: 1982626 - RNA, 19 nt, Homo sapiens
  misc_RNA (1)...(19): siRNA sense strand
ggucaaauaaugaagaaac

SEQ ID NO: 1982627 - RNA, 19 nt, Homo sapiens
  misc_RNA (1)...(19): siRNA sense strand
uaacggaagauucuaguac

SEQ ID NO: 1982628 - RNA, 19 nt, Homo sapiens
  misc_RNA (1)...(19): siRNA sense strand
gaaacugaugggaagaaau

SEQ ID NO: 1982629 - RNA, 19 nt, Homo sapiens
  misc_RNA (1)...(19): siRNA sense strand
acguaacccugcaagauga

SEQ ID NO: 1982630 - RNA, 19 nt, Homo sapiens
  misc_RNA (1)...(19): siRNA sense strand
gaagaacauguuguacuca

SEQ ID NO: 1982631 - RNA, 19 nt, Homo sapiens
  misc_RNA (1)...(19): siRNA sense strand
gaaaagcacauccaaguac

SEQ ID NO: 1982632 - RNA, 19 nt, Homo sapiens
  misc_RNA (1)...(19): siRNA sense strand
aaauggagaagaacauguu

SEQ ID NO: 1982633 - RNA, 19 nt, Homo sapiens
  misc_RNA (1)...(19): siRNA sense strand
ugcaugaacuacaucacaa

SEQ ID NO: 1982634 - RNA, 19 nt, Homo sapiens
  misc_RNA (1)...(19): siRNA sense strand
ugaguauccugcuuuaaaa

SEQ ID NO: 1982635 - RNA, 19 nt, Homo sapiens
  misc_RNA (1)...(19): siRNA sense strand
augaguauccugcuuuaaa

SEQ ID NO: 1982636 - RNA, 19 nt, Homo sapiens
  misc_RNA (1)...(19): siRNA sense strand
caucauaguccagcucuuc

SEQ ID NO: 1982637 - RNA, 19 nt, Homo sapiens
  misc_RNA (1)...(19): siRNA sense strand
cugguguccuuccucauuu

SEQ ID NO: 1982638 - RNA, 19 nt, Homo sapiens
  misc_RNA (1)...(19): siRNA sense strand
ccaugaauuugaaacugau

SEQ ID NO: 1982639 - RNA, 19 nt, Homo sapiens
  misc_RNA (1)...(19): siRNA sense strand
aaaggaagugaaagugauu

SEQ ID NO: 1982640 - RNA, 19 nt, Homo sapiens
  misc_RNA (1)...(19): siRNA sense strand
ucaugaagcugaggaaagc

SEQ ID NO: 1982641 - RNA, 19 nt, Homo sapiens
  misc_RNA (1)...(19): siRNA sense strand
agaaacaucaucugaagag

SEQ ID NO: 1982642 - RNA, 19 nt, Homo sapiens
  misc_RNA (1)...(19): siRNA sense strand
ccgaagcaaauccucagua

SEQ ID NO: 1982643 - RNA, 19 nt, Homo sapiens
  misc_RNA (1)...(19): siRNA sense strand
gaacccaccuauugccuuu

SEQ ID NO: 1982644 - RNA, 19 nt, Homo sapiens
  misc_RNA (1)...(19): siRNA sense strand
acacagaccuggcccguuu

SEQ ID NO: 1982645 - RNA, 19 nt, Homo sapiens
  misc_RNA (1)...(19): siRNA sense strand
ugacagcucuuccagcaaa

SEQ ID NO: 1982646 - RNA, 19 nt, Homo sapiens
  misc_RNA (1)...(19): siRNA sense strand
gcacaaguccugaguaugg

SEQ ID NO: 1982647 - RNA, 19 nt, Homo sapiens
  misc_RNA (1)...(19): siRNA sense strand
gcgcacaaguccugaguau

SEQ ID NO: 1982648 - RNA, 19 nt, Homo sapiens
  misc_RNA (1)...(19): siRNA sense strand
aaaccuucccuuugaauua

SEQ ID NO: 1982649 - RNA, 19 nt, Homo sapiens
  misc_RNA (1)...(19): siRNA sense strand
ggaauuuggugacgacaag

SEQ ID NO: 1982650 - RNA, 19 nt, Homo sapiens
  misc_RNA (1)...(19): siRNA sense strand
ccaacgaacccaccuauug

SEQ ID NO: 1982651 - RNA, 19 nt, Homo sapiens
  misc_RNA (1)...(19): siRNA sense strand
aacauuaucuggacaguau

SEQ ID NO: 1982652 - RNA, 19 nt, Homo sapiens
  misc_RNA (1)...(19): siRNA sense strand
ccucugauguguuggauau

SEQ ID NO: 1982653 - RNA, 19 nt, Homo sapiens
  misc_RNA (1)...(19): siRNA sense strand
ggaccuagaccaaagaaca

SEQ ID NO: 1982654 - RNA, 19 nt, Homo sapiens
  misc_RNA (1)...(19): siRNA sense strand
gagagaugauuggcuguga

SEQ ID NO: 1982655 - RNA, 19 nt, Homo sapiens
  misc_RNA (1)...(19): siRNA sense strand
ccuaugagaugguggacaa

SEQ ID NO: 1982656 - RNA, 19 nt, Homo sapiens
  misc_RNA (1)...(19): siRNA sense strand
caaguuggccacugaguau

SEQ ID NO: 1982657 - RNA, 19 nt, Homo sapiens
  misc_RNA (1)...(19): siRNA sense strand
gaacauuaucuggacagua

SEQ ID NO: 1982658 - RNA, 19 nt, Homo sapiens
  misc_RNA (1)...(19): siRNA sense strand
aggcugaaauugacaaguu

SEQ ID NO: 1982659 - RNA, 19 nt, Homo sapiens
  misc_RNA (1)...(19): siRNA sense strand
ggagaaacagauugaguca

SEQ ID NO: 1982660 - RNA, 19 nt, Homo sapiens
  misc_RNA (1)...(19): siRNA sense strand
caacccugauuguuccauu

SEQ ID NO: 1982661 - RNA, 19 nt, Homo sapiens
  misc_RNA (1)...(19): siRNA sense strand
aagaacggaagaagaaaua

SEQ ID NO: 1982662 - RNA, 19 nt, Homo sapiens
  misc_RNA (1)...(19): siRNA sense strand
gaugguggacaaacacauu

SEQ ID NO: 1982663 - RNA, 19 nt, Homo sapiens
  misc_RNA (1)...(19): siRNA sense strand
ccaagacugcccagaagaa

SEQ ID NO: 1982664 - RNA, 19 nt, Homo sapiens
  misc_RNA (1)...(19): siRNA sense strand
ugagggaccuagaccaaag

SEQ ID NO: 1982665 - RNA, 19 nt, Homo sapiens
  misc_RNA (1)...(19): siRNA sense strand
ccacugaguauaugaguag

SEQ ID NO: 1982666 - RNA, 19 nt, Homo sapiens
  misc_RNA (1)...(19): siRNA sense strand
uaucuggacaguauugaaa

SEQ ID NO: 1982667 - RNA, 19 nt, Homo sapiens
  misc_RNA (1)...(19): siRNA sense strand
gccacugaguauaugagua

SEQ ID NO: 1982668 - RNA, 19 nt, Homo sapiens
  misc_RNA (1)...(19): siRNA sense strand
caagaacggaagaagaaau

SEQ ID NO: 1982669 - RNA, 19 nt, Homo sapiens
  misc_RNA (1)...(19): siRNA sense strand
cccaagaacggaagaagaa

SEQ ID NO: 1982670 - RNA, 19 nt, Homo sapiens
  misc_RNA (1)...(19): siRNA sense strand
ccauugagugguuccauuu

SEQ ID NO: 1982671 - RNA, 19 nt, Homo sapiens
  misc_RNA (1)...(19): siRNA sense strand
ggcugaaauugacaaguug

SEQ ID NO: 1982672 - RNA, 19 nt, Homo sapiens
  misc_RNA (1)...(19): siRNA sense strand
caacgaacccaccuauugc

SEQ ID NO: 1982673 - RNA, 19 nt, Homo sapiens
  misc_RNA (1)...(19): siRNA sense strand
aaaauuggcccuucucaaa

SEQ ID NO: 1982674 - RNA, 19 nt, Homo sapiens
  misc_RNA (1)...(19): siRNA sense strand
ccugaaggcugaaauugac

SEQ ID NO: 1982675 - RNA, 19 nt, Homo sapiens
  misc_RNA (1)...(19): siRNA sense strand
gaccugaaggcugaaauug

SEQ ID NO: 1982676 - RNA, 19 nt, Homo sapiens
  misc_RNA (1)...(19): siRNA sense strand
gcaagugcaaggaauuugg

SEQ ID NO: 1982677 - RNA, 19 nt, Homo sapiens
  misc_RNA (1)...(19): siRNA sense strand
uugaaaaccuucccuuuga

SEQ ID NO: 1982678 - RNA, 19 nt, Homo sapiens
  misc_RNA (1)...(19): siRNA sense strand
agacugcccagaagaaguu

SEQ ID NO: 1982679 - RNA, 19 nt, Homo sapiens
  misc_RNA (1)...(19): siRNA sense strand
acaaguuggccacugagua

SEQ ID NO: 1982680 - RNA, 19 nt, Homo sapiens
  misc_RNA (1)...(19): siRNA sense strand
gcugugacaacccugauug

SEQ ID NO: 1982681 - RNA, 19 nt, Homo sapiens
  misc_RNA (1)...(19): siRNA sense strand
gccuguggaucccaacgaa

SEQ ID NO: 1982682 - RNA, 19 nt, Homo sapiens
  misc_RNA (1)...(19): siRNA sense strand
uugacaaguuggccacuga

SEQ ID NO: 1982683 - RNA, 19 nt, Homo sapiens
  misc_RNA (1)...(19): siRNA sense strand
ccacgcugcucccaagaac

SEQ ID NO: 1982684 - RNA, 19 nt, Homo sapiens
  misc_RNA (1)...(19): siRNA sense strand
ggaacauuaucuggacagu

SEQ ID NO: 1982685 - RNA, 19 nt, Homo sapiens
  misc_RNA (1)...(19): siRNA sense strand
aauuggcccuucucaaaca

SEQ ID NO: 1982686 - RNA, 19 nt, Homo sapiens
  misc_RNA (1)...(19): siRNA sense strand
ggacaguauugaaaaccuu

SEQ ID NO: 1982687 - RNA, 19 nt, Homo sapiens
  misc_RNA (1)...(19): siRNA sense strand
caugagggaccuagaccaa

SEQ ID NO: 1982688 - RNA, 19 nt, Homo sapiens
  misc_RNA (1)...(19): siRNA sense strand
gagaugauuggcugugaca

SEQ ID NO: 1982689 - RNA, 19 nt, Homo sapiens
  misc_RNA (1)...(19): siRNA sense strand
uaugggaugcccucaguga

SEQ ID NO: 1982690 - RNA, 19 nt, Homo sapiens
  misc_RNA (1)...(19): siRNA sense strand
ccuuugaauuacagagaaa

SEQ ID NO: 1982691 - RNA, 19 nt, Homo sapiens
  misc_RNA (1)...(19): siRNA sense strand
agccugagcuccgaggaaa

SEQ ID NO: 1982692 - RNA, 19 nt, Homo sapiens
  misc_RNA (1)...(19): siRNA sense strand
ccaagaacggaagaagaaa

SEQ ID NO: 1982693 - RNA, 19 nt, Homo sapiens
  misc_RNA (1)...(19): siRNA sense strand
uauggcaagugcaaggaau

SEQ ID NO: 1982694 - RNA, 19 nt, Homo sapiens
  misc_RNA (1)...(19): siRNA sense strand
uccauugagugguuccauu

SEQ ID NO: 1982695 - RNA, 19 nt, Homo sapiens
  misc_RNA (1)...(19): siRNA sense strand
uuaaagcucgugcgcacaa

SEQ ID NO: 1982696 - RNA, 19 nt, Homo sapiens
  misc_RNA (1)...(19): siRNA sense strand
ugaaaaccuucccuuugaa

SEQ ID NO: 1982697 - RNA, 19 nt, Homo sapiens
  misc_RNA (1)...(19): siRNA sense strand
ggacucaaaaggagaagaa

SEQ ID NO: 1982698 - RNA, 19 nt, Homo sapiens
  misc_RNA (1)...(19): siRNA sense strand
gucaccaggucuccuaugg

SEQ ID NO: 1982699 - RNA, 19 nt, Homo sapiens
  misc_RNA (1)...(19): siRNA sense strand
gaugauuggcugugacaac

SEQ ID NO: 1982700 - RNA, 19 nt, Homo sapiens
  misc_RNA (1)...(19): siRNA sense strand
gaaaaccuucccuuugaau

SEQ ID NO: 1982701 - RNA, 19 nt, Homo sapiens
  misc_RNA (1)...(19): siRNA sense strand
aguaugggaugcccucagu

SEQ ID NO: 1982702 - RNA, 19 nt, Homo sapiens
  misc_RNA (1)...(19): siRNA sense strand
guuggccacugaguauaug

SEQ ID NO: 1982703 - RNA, 19 nt, Homo sapiens
  misc_RNA (1)...(19): siRNA sense strand
gagggaccuagaccaaaga

SEQ ID NO: 1982704 - RNA, 19 nt, Homo sapiens
  misc_RNA (1)...(19): siRNA sense strand
caugcagaccuaugagaug

SEQ ID NO: 1982705 - RNA, 19 nt, Homo sapiens
  misc_RNA (1)...(19): siRNA sense strand
caggaagccuauggcaagu

SEQ ID NO: 1982706 - RNA, 19 nt, Homo sapiens
  misc_RNA (1)...(19): siRNA sense strand
aaaccuucccuuugaauua

SEQ ID NO: 1982707 - RNA, 19 nt, Homo sapiens
  misc_RNA (1)...(19): siRNA sense strand
aacauuaucuggacaguau

SEQ ID NO: 1982708 - RNA, 19 nt, Homo sapiens
  misc_RNA (1)...(19): siRNA sense strand
ggaccuagaccaaagaaca

SEQ ID NO: 1982709 - RNA, 19 nt, Homo sapiens
  misc_RNA (1)...(19): siRNA sense strand
gaacauuaucuggacagua

SEQ ID NO: 1982710 - RNA, 19 nt, Homo sapiens
  misc_RNA (1)...(19): siRNA sense strand
ugagggaccuagaccaaag

SEQ ID NO: 1982711 - RNA, 19 nt, Homo sapiens
  misc_RNA (1)...(19): siRNA sense strand
uaucuggacaguauugaaa

SEQ ID NO: 1982712 - RNA, 19 nt, Homo sapiens
  misc_RNA (1)...(19): siRNA sense strand
uugaaaaccuucccuuuga

SEQ ID NO: 1982713 - RNA, 19 nt, Homo sapiens
  misc_RNA (1)...(19): siRNA sense strand
ggaacauuaucuggacagu

SEQ ID NO: 1982714 - RNA, 19 nt, Homo sapiens
  misc_RNA (1)...(19): siRNA sense strand
ggacaguauugaaaaccuu

SEQ ID NO: 1982715 - RNA, 19 nt, Homo sapiens
  misc_RNA (1)...(19): siRNA sense strand
caugagggaccuagaccaa

SEQ ID NO: 1982716 - RNA, 19 nt, Homo sapiens
  misc_RNA (1)...(19): siRNA sense strand
ccuuugaauuacagagaaa

SEQ ID NO: 1982717 - RNA, 19 nt, Homo sapiens
  misc_RNA (1)...(19): siRNA sense strand
ugaaaaccuucccuuugaa

SEQ ID NO: 1982718 - RNA, 19 nt, Homo sapiens
  misc_RNA (1)...(19): siRNA sense strand
gaaaaccuucccuuugaau

SEQ ID NO: 1982719 - RNA, 19 nt, Homo sapiens
  misc_RNA (1)...(19): siRNA sense strand
gagggaccuagaccaaaga

SEQ ID NO: 1982720 - RNA, 19 nt, Homo sapiens
  misc_RNA (1)...(19): siRNA sense strand
gcuggaagauuacgacaaa

SEQ ID NO: 1982721 - RNA, 19 nt, Homo sapiens
  misc_RNA (1)...(19): siRNA sense strand
guucaaauguggagacuac

SEQ ID NO: 1982722 - RNA, 19 nt, Homo sapiens
  misc_RNA (1)...(19): siRNA sense strand
accucaagcuggaagauua

SEQ ID NO: 1982723 - RNA, 19 nt, Homo sapiens
  misc_RNA (1)...(19): siRNA sense strand
agaaacagaggcauccaaa

SEQ ID NO: 1982724 - RNA, 19 nt, Homo sapiens
  misc_RNA (1)...(19): siRNA sense strand
ggaagauuacgacaaagca

SEQ ID NO: 1982725 - RNA, 19 nt, Homo sapiens
  misc_RNA (1)...(19): siRNA sense strand
gaaacagaggcauccaaag

SEQ ID NO: 1982726 - RNA, 19 nt, Homo sapiens
  misc_RNA (1)...(19): siRNA sense strand
cagaaacagaggcauccaa

SEQ ID NO: 1982727 - RNA, 19 nt, Homo sapiens
  misc_RNA (1)...(19): siRNA sense strand
gcaaugagcuguucaaaug

SEQ ID NO: 1982728 - RNA, 19 nt, Homo sapiens
  misc_RNA (1)...(19): siRNA sense strand
gcuggaagauuacgacaaa

SEQ ID NO: 1982729 - RNA, 19 nt, Homo sapiens
  misc_RNA (1)...(19): siRNA sense strand
guucagcucuugcaacguu

SEQ ID NO: 1982730 - RNA, 19 nt, Homo sapiens
  misc_RNA (1)...(19): siRNA sense strand
gaagagaagggcacugaga

SEQ ID NO: 1982731 - RNA, 19 nt, Homo sapiens
  misc_RNA (1)...(19): siRNA sense strand
gggagagacugaccucaug

SEQ ID NO: 1982732 - RNA, 19 nt, Homo sapiens
  misc_RNA (1)...(19): siRNA sense strand
guucaaauguggagacuac

SEQ ID NO: 1982733 - RNA, 19 nt, Homo sapiens
  misc_RNA (1)...(19): siRNA sense strand
gagaaggugcgauacaugu

SEQ ID NO: 1982734 - RNA, 19 nt, Homo sapiens
  misc_RNA (1)...(19): siRNA sense strand
gagccaagcccuagagaag

SEQ ID NO: 1982735 - RNA, 19 nt, Homo sapiens
  misc_RNA (1)...(19): siRNA sense strand
accucaagcuggaagauua

SEQ ID NO: 1982736 - RNA, 19 nt, Homo sapiens
  misc_RNA (1)...(19): siRNA sense strand
ggagggcaaugagcuguuc

SEQ ID NO: 1982737 - RNA, 19 nt, Homo sapiens
  misc_RNA (1)...(19): siRNA sense strand
ggagaaggugcgauacaug

SEQ ID NO: 1982738 - RNA, 19 nt, Homo sapiens
  misc_RNA (1)...(19): siRNA sense strand
caggaggccuugcggaaca

SEQ ID NO: 1982739 - RNA, 19 nt, Homo sapiens
  misc_RNA (1)...(19): siRNA sense strand
agaaacagaggcauccaaa

SEQ ID NO: 1982740 - RNA, 19 nt, Homo sapiens
  misc_RNA (1)...(19): siRNA sense strand
cagaagagaagggcacuga

SEQ ID NO: 1982741 - RNA, 19 nt, Homo sapiens
  misc_RNA (1)...(19): siRNA sense strand
guacgcugguuggcauuug

SEQ ID NO: 1982742 - RNA, 19 nt, Homo sapiens
  misc_RNA (1)...(19): siRNA sense strand
ggaagauuacgacaaagca

SEQ ID NO: 1982743 - RNA, 19 nt, Homo sapiens
  misc_RNA (1)...(19): siRNA sense strand
gaaacagaggcauccaaag

SEQ ID NO: 1982744 - RNA, 19 nt, Homo sapiens
  misc_RNA (1)...(19): siRNA sense strand
aaugagcuguucaaaugug

SEQ ID NO: 1982745 - RNA, 19 nt, Homo sapiens
  misc_RNA (1)...(19): siRNA sense strand
ggcaaugagcuguucaaau

SEQ ID NO: 1982746 - RNA, 19 nt, Homo sapiens
  misc_RNA (1)...(19): siRNA sense strand
agagaagggcacugagaaa

SEQ ID NO: 1982747 - RNA, 19 nt, Homo sapiens
  misc_RNA (1)...(19): siRNA sense strand
ggagccaagcccuagagaa

SEQ ID NO: 1982748 - RNA, 19 nt, Homo sapiens
  misc_RNA (1)...(19): siRNA sense strand
uggagcagcugcggaagga

SEQ ID NO: 1982749 - RNA, 19 nt, Homo sapiens
  misc_RNA (1)...(19): siRNA sense strand
gagcccaagaacaaaguuu

SEQ ID NO: 1982750 - RNA, 19 nt, Homo sapiens
  misc_RNA (1)...(19): siRNA sense strand
gaccugcagagauguguga

SEQ ID NO: 1982751 - RNA, 19 nt, Homo sapiens
  misc_RNA (1)...(19): siRNA sense strand
gccaagcccuagagaagcu

SEQ ID NO: 1982752 - RNA, 19 nt, Homo sapiens
  misc_RNA (1)...(19): siRNA sense strand
aagagaagggcacugagaa

SEQ ID NO: 1982753 - RNA, 19 nt, Homo sapiens
  misc_RNA (1)...(19): siRNA sense strand
guaaugggguucagcucuu

SEQ ID NO: 1982754 - RNA, 19 nt, Homo sapiens
  misc_RNA (1)...(19): siRNA sense strand
gggcaaugagcuguucaaa

SEQ ID NO: 1982755 - RNA, 19 nt, Homo sapiens
  misc_RNA (1)...(19): siRNA sense strand
gagaagggcacugagaaaa

SEQ ID NO: 1982756 - RNA, 19 nt, Homo sapiens
  misc_RNA (1)...(19): siRNA sense strand
agagaugugugagcuugga

SEQ ID NO: 1982757 - RNA, 19 nt, Homo sapiens
  misc_RNA (1)...(19): siRNA sense strand
uccuugaccugcagagaug

SEQ ID NO: 1982758 - RNA, 19 nt, Homo sapiens
  misc_RNA (1)...(19): siRNA sense strand
cagaaacagaggcauccaa

SEQ ID NO: 1982759 - RNA, 19 nt, Homo sapiens
  misc_RNA (1)...(19): siRNA sense strand
gacggaugccaaaguggaa

SEQ ID NO: 1982760 - RNA, 19 nt, Homo sapiens
  misc_RNA (1)...(19): siRNA sense strand
gcacaggccucaagagaag

SEQ ID NO: 1982761 - RNA, 19 nt, Homo sapiens
  misc_RNA (1)...(19): siRNA sense strand
gagcacaggccucaagaga

SEQ ID NO: 1982762 - RNA, 19 nt, Homo sapiens
  misc_RNA (1)...(19): siRNA sense strand
cagccaaggucucuucaga

SEQ ID NO: 1982763 - RNA, 19 nt, Homo sapiens
  misc_RNA (1)...(19): siRNA sense strand
cuaugugaccucuuuauaa

SEQ ID NO: 1982764 - RNA, 19 nt, Homo sapiens
  misc_RNA (1)...(19): siRNA sense strand
agacuucgaugaugaugug

SEQ ID NO: 1982765 - RNA, 19 nt, Homo sapiens
  misc_RNA (1)...(19): siRNA sense strand
uaugugaccucuuuauaac

SEQ ID NO: 1982766 - RNA, 19 nt, Homo sapiens
  misc_RNA (1)...(19): siRNA sense strand
acgacuaugugaccucuuu

SEQ ID NO: 1982767 - RNA, 19 nt, Homo sapiens
  misc_RNA (1)...(19): siRNA sense strand
gagcagccaaggucucuuc

SEQ ID NO: 1982768 - RNA, 19 nt, Homo sapiens
  misc_RNA (1)...(19): siRNA sense strand
cuucgaugaugauguguga

SEQ ID NO: 1982769 - RNA, 19 nt, Homo sapiens
  misc_RNA (1)...(19): siRNA sense strand
uuacagccacauccucuaa

SEQ ID NO: 1982770 - RNA, 19 nt, Homo sapiens
  misc_RNA (1)...(19): siRNA sense strand
cgauuuguccugccaccua

SEQ ID NO: 1982771 - RNA, 19 nt, Homo sapiens
  misc_RNA (1)...(19): siRNA sense strand
ugugaccucuuuauaacug

SEQ ID NO: 1982772 - RNA, 19 nt, Homo sapiens
  misc_RNA (1)...(19): siRNA sense strand
caggagaacucugcagacu

SEQ ID NO: 1982773 - RNA, 19 nt, Homo sapiens
  misc_RNA (1)...(19): siRNA sense strand
acagccacauccucuaaau

SEQ ID NO: 1982774 - RNA, 19 nt, Homo sapiens
  misc_RNA (1)...(19): siRNA sense strand
gagaggccuugcgggaaga

SEQ ID NO: 1982775 - RNA, 19 nt, Homo sapiens
  misc_RNA (1)...(19): siRNA sense strand
acuaugugaccucuuuaua

SEQ ID NO: 1982776 - RNA, 19 nt, Homo sapiens
  misc_RNA (1)...(19): siRNA sense strand
cgacuaugugaccucuuua

SEQ ID NO: 1982777 - RNA, 19 nt, Homo sapiens
  misc_RNA (1)...(19): siRNA sense strand
gacuaugugaccucuuuau

SEQ ID NO: 1982778 - RNA, 19 nt, Homo sapiens
  misc_RNA (1)...(19): siRNA sense strand
ccagagcacaggccucaag

SEQ ID NO: 1982779 - RNA, 19 nt, Homo sapiens
  misc_RNA (1)...(19): siRNA sense strand
caacaucuaucaacagaag

SEQ ID NO: 1982780 - RNA, 19 nt, Homo sapiens
  misc_RNA (1)...(19): siRNA sense strand
gacaacaucuaucaacaga

SEQ ID NO: 1982781 - RNA, 19 nt, Homo sapiens
  misc_RNA (1)...(19): siRNA sense strand
gaucaaggaccuccacaaa

SEQ ID NO: 1982782 - RNA, 19 nt, Homo sapiens
  misc_RNA (1)...(19): siRNA sense strand
uuaacugucuggccuauga

SEQ ID NO: 1982783 - RNA, 19 nt, Homo sapiens
  misc_RNA (1)...(19): siRNA sense strand
acgauauccucuacaaaua

SEQ ID NO: 1982784 - RNA, 19 nt, Homo sapiens
  misc_RNA (1)...(19): siRNA sense strand
caaggaguaugcugaagau

SEQ ID NO: 1982785 - RNA, 19 nt, Homo sapiens
  misc_RNA (1)...(19): siRNA sense strand
gaccacauccacaucauug

SEQ ID NO: 1982786 - RNA, 19 nt, Homo sapiens
  misc_RNA (1)...(19): siRNA sense strand
ggaguaugcugaagaugac

SEQ ID NO: 1982787 - RNA, 19 nt, Homo sapiens
  misc_RNA (1)...(19): siRNA sense strand
uggaggcacugcuggauga

SEQ ID NO: 1982788 - RNA, 19 nt, Homo sapiens
  misc_RNA (1)...(19): siRNA sense strand
ccgacuaccuuguggucua

SEQ ID NO: 1982789 - RNA, 19 nt, Homo sapiens
  misc_RNA (1)...(19): siRNA sense strand
gacggcaacuguuucuauc

SEQ ID NO: 1982790 - RNA, 19 nt, Homo sapiens
  misc_RNA (1)...(19): siRNA sense strand
gcaaggagagcgaccacau

SEQ ID NO: 1982791 - RNA, 19 nt, Homo sapiens
  misc_RNA (1)...(19): siRNA sense strand
gacggacugucaaggaguu

SEQ ID NO: 1982792 - RNA, 19 nt, Homo sapiens
  misc_RNA (1)...(19): siRNA sense strand
gagcaccuccgacuaccuu

SEQ ID NO: 1982793 - RNA, 19 nt, Homo sapiens
  misc_RNA (1)...(19): siRNA sense strand
caauugaggauuuccacaa

SEQ ID NO: 1982794 - RNA, 19 nt, Homo sapiens
  misc_RNA (1)...(19): siRNA sense strand
ccaccaauccgcacaucuu

SEQ ID NO: 1982795 - RNA, 19 nt, Homo sapiens
  misc_RNA (1)...(19): siRNA sense strand
ugacggcaacuguuucuau

SEQ ID NO: 1982796 - RNA, 19 nt, Homo sapiens
  misc_RNA (1)...(19): siRNA sense strand
uacgauauccucuacaaau

SEQ ID NO: 1982797 - RNA, 19 nt, Homo sapiens
  misc_RNA (1)...(19): siRNA sense strand
ggaccgaauucagcaagag

SEQ ID NO: 1982798 - RNA, 19 nt, Homo sapiens
  misc_RNA (1)...(19): siRNA sense strand
acacuacgauauccucuac

SEQ ID NO: 1982799 - RNA, 19 nt, Homo sapiens
  misc_RNA (1)...(19): siRNA sense strand
cuaucgggcuuucggauuc

SEQ ID NO: 1982800 - RNA, 19 nt, Homo sapiens
  misc_RNA (1)...(19): siRNA sense strand
ccgaagguguuaacugucu

SEQ ID NO: 1982801 - RNA, 19 nt, Homo sapiens
  misc_RNA (1)...(19): siRNA sense strand
ggccugacggcaacuguuu

SEQ ID NO: 1982802 - RNA, 19 nt, Homo sapiens
  misc_RNA (1)...(19): siRNA sense strand
gaggguggacggacuguca

SEQ ID NO: 1982803 - RNA, 19 nt, Homo sapiens
  misc_RNA (1)...(19): siRNA sense strand
cuccgaagguguuaacugu

SEQ ID NO: 1982804 - RNA, 19 nt, Homo sapiens
  misc_RNA (1)...(19): siRNA sense strand
cugcuggccuccuucaaug

SEQ ID NO: 1982805 - RNA, 19 nt, Homo sapiens
  misc_RNA (1)...(19): siRNA sense strand
acuacgauauccucuacaa

SEQ ID NO: 1982806 - RNA, 19 nt, Homo sapiens
  misc_RNA (1)...(19): siRNA sense strand
acaaggaguaugcugaaga

SEQ ID NO: 1982807 - RNA, 19 nt, Homo sapiens
  misc_RNA (1)...(19): siRNA sense strand
ccagagcaccuccgacuac

SEQ ID NO: 1982808 - RNA, 19 nt, Homo sapiens
  misc_RNA (1)...(19): siRNA sense strand
ggagcucucgguccuauac

SEQ ID NO: 1982809 - RNA, 19 nt, Homo sapiens
  misc_RNA (1)...(19): siRNA sense strand
cgauauccucuacaaauag

SEQ ID NO: 1982810 - RNA, 19 nt, Homo sapiens
  misc_RNA (1)...(19): siRNA sense strand
cuaccggccuggacacuac

SEQ ID NO: 1982811 - RNA, 19 nt, Homo sapiens
  misc_RNA (1)...(19): siRNA sense strand
aggaguaugcugaagauga

SEQ ID NO: 1982812 - RNA, 19 nt, Homo sapiens
  misc_RNA (1)...(19): siRNA sense strand
ggccuggacacuacgauau

SEQ ID NO: 1982813 - RNA, 19 nt, Homo sapiens
  misc_RNA (1)...(19): siRNA sense strand
cagcgacuccgaagguguu

SEQ ID NO: 1982814 - RNA, 19 nt, Homo sapiens
  misc_RNA (1)...(19): siRNA sense strand
gcucagcaggaccgaauuc

SEQ ID NO: 1982815 - RNA, 19 nt, Homo sapiens
  misc_RNA (1)...(19): siRNA sense strand
cgaccacauccacaucauu

SEQ ID NO: 1982816 - RNA, 19 nt, Homo sapiens
  misc_RNA (1)...(19): siRNA sense strand
caaggagagcgaccacauc

SEQ ID NO: 1982817 - RNA, 19 nt, Homo sapiens
  misc_RNA (1)...(19): siRNA sense strand
gaccgaauucagcaagaga

SEQ ID NO: 1982818 - RNA, 19 nt, Homo sapiens
  misc_RNA (1)...(19): siRNA sense strand
cgaauucagcaagagauug

SEQ ID NO: 1982819 - RNA, 19 nt, Homo sapiens
  misc_RNA (1)...(19): siRNA sense strand
gacacuacgauauccucua

SEQ ID NO: 1982820 - RNA, 19 nt, Homo sapiens
  misc_RNA (1)...(19): siRNA sense strand
gcgaccacauccacaucau

SEQ ID NO: 1982821 - RNA, 19 nt, Homo sapiens
  misc_RNA (1)...(19): siRNA sense strand
cgacuaccuuguggucuac

SEQ ID NO: 1982822 - RNA, 19 nt, Homo sapiens
  misc_RNA (1)...(19): siRNA sense strand
agagauugcugugcagaac

SEQ ID NO: 1982823 - RNA, 19 nt, Homo sapiens
  misc_RNA (1)...(19): siRNA sense strand
gaaauaaggccgugagaua

SEQ ID NO: 1982824 - RNA, 19 nt, Homo sapiens
  misc_RNA (1)...(19): siRNA sense strand
gaaggaaucuggaaauaag

SEQ ID NO: 1982825 - RNA, 19 nt, Homo sapiens
  misc_RNA (1)...(19): siRNA sense strand
caacaacuuuccugacuuu

SEQ ID NO: 1982826 - RNA, 19 nt, Homo sapiens
  misc_RNA (1)...(19): siRNA sense strand
caacagggacucagccuua

SEQ ID NO: 1982827 - RNA, 19 nt, Homo sapiens
  misc_RNA (1)...(19): siRNA sense strand
gagagaagcccaugugguu

SEQ ID NO: 1982828 - RNA, 19 nt, Homo sapiens
  misc_RNA (1)...(19): siRNA sense strand
gacagugacuccagagaga

SEQ ID NO: 1982829 - RNA, 19 nt, Homo sapiens
  misc_RNA (1)...(19): siRNA sense strand
ugaauaauuugcagaagga

SEQ ID NO: 1982830 - RNA, 19 nt, Homo sapiens
  misc_RNA (1)...(19): siRNA sense strand
ggacucagccuuaaaucau

SEQ ID NO: 1982831 - RNA, 19 nt, Homo sapiens
  misc_RNA (1)...(19): siRNA sense strand
gacucagccuuaaaucaua

SEQ ID NO: 1982832 - RNA, 19 nt, Homo sapiens
  misc_RNA (1)...(19): siRNA sense strand
gagcgaaccagcuacaaug

SEQ ID NO: 1982833 - RNA, 19 nt, Homo sapiens
  misc_RNA (1)...(19): siRNA sense strand
cagcauugccaacaacuuu

SEQ ID NO: 1982834 - RNA, 19 nt, Homo sapiens
  misc_RNA (1)...(19): siRNA sense strand
ugaagaggcugcgcaucaa

SEQ ID NO: 1982835 - RNA, 19 nt, Homo sapiens
  misc_RNA (1)...(19): siRNA sense strand
uccaagaccugaagcuuuc

SEQ ID NO: 1982836 - RNA, 19 nt, Homo sapiens
  misc_RNA (1)...(19): siRNA sense strand
ccaacaacuuuccugacuu

SEQ ID NO: 1982837 - RNA, 19 nt, Homo sapiens
  misc_RNA (1)...(19): siRNA sense strand
gccaacaacuuuccugacu

SEQ ID NO: 1982838 - RNA, 19 nt, Homo sapiens
  misc_RNA (1)...(19): siRNA sense strand
gcacugucuucuucugauc

SEQ ID NO: 1982839 - RNA, 19 nt, Homo sapiens
  misc_RNA (1)...(19): siRNA sense strand
gggauugugacuacaguuu

SEQ ID NO: 1982840 - RNA, 19 nt, Homo sapiens
  misc_RNA (1)...(19): siRNA sense strand
cugggugucuuugcacuua

SEQ ID NO: 1982841 - RNA, 19 nt, Homo sapiens
  misc_RNA (1)...(19): siRNA sense strand
agaaggaaucuggaaauaa

SEQ ID NO: 1982842 - RNA, 19 nt, Homo sapiens
  misc_RNA (1)...(19): siRNA sense strand
caaaagcuauguugucaca

SEQ ID NO: 1982843 - RNA, 19 nt, Homo sapiens
  misc_RNA (1)...(19): siRNA sense strand
gaacuucacgcugguccaa

SEQ ID NO: 1982844 - RNA, 19 nt, Homo sapiens
  misc_RNA (1)...(19): siRNA sense strand
aaccugaugugcaacugua

SEQ ID NO: 1982845 - RNA, 19 nt, Homo sapiens
  misc_RNA (1)...(19): siRNA sense strand
guccaagaccugaagcuuu

SEQ ID NO: 1982846 - RNA, 19 nt, Homo sapiens
  misc_RNA (1)...(19): siRNA sense strand
ggaaauaaggccgugagau

SEQ ID NO: 1982847 - RNA, 19 nt, Homo sapiens
  misc_RNA (1)...(19): siRNA sense strand
gauugugacuacaguuugg

SEQ ID NO: 1982848 - RNA, 19 nt, Homo sapiens
  misc_RNA (1)...(19): siRNA sense strand
ggauugugacuacaguuug

SEQ ID NO: 1982849 - RNA, 19 nt, Homo sapiens
  misc_RNA (1)...(19): siRNA sense strand
gaugaauaauuugcagaag

SEQ ID NO: 1982850 - RNA, 19 nt, Homo sapiens
  misc_RNA (1)...(19): siRNA sense strand
uuuagaaccuucccaaugc

SEQ ID NO: 1982851 - RNA, 19 nt, Homo sapiens
  misc_RNA (1)...(19): siRNA sense strand
ccagagagaagcccaugug

SEQ ID NO: 1982852 - RNA, 19 nt, Homo sapiens
  misc_RNA (1)...(19): siRNA sense strand
uggccaaccugaugugcaa

SEQ ID NO: 1982853 - RNA, 19 nt, Homo sapiens
  misc_RNA (1)...(19): siRNA sense strand
ucaccaaaggucagaagaa

SEQ ID NO: 1982854 - RNA, 19 nt, Homo sapiens
  misc_RNA (1)...(19): siRNA sense strand
gagaagcccaugugguuac

SEQ ID NO: 1982855 - RNA, 19 nt, Homo sapiens
  misc_RNA (1)...(19): siRNA sense strand
caccaaaggucagaagaac

SEQ ID NO: 1982856 - RNA, 19 nt, Homo sapiens
  misc_RNA (1)...(19): siRNA sense strand
uuaccagcauugccaacaa

SEQ ID NO: 1982857 - RNA, 19 nt, Homo sapiens
  misc_RNA (1)...(19): siRNA sense strand
ccaaaggucagaagaacag

SEQ ID NO: 1982858 - RNA, 19 nt, Homo sapiens
  misc_RNA (1)...(19): siRNA sense strand
caguagagcgaaccagcua

SEQ ID NO: 1982859 - RNA, 19 nt, Homo sapiens
  misc_RNA (1)...(19): siRNA sense strand
cagcuacaauggccaucug

SEQ ID NO: 1982860 - RNA, 19 nt, Homo sapiens
  misc_RNA (1)...(19): siRNA sense strand
gggacucagccuuaaauca

SEQ ID NO: 1982861 - RNA, 19 nt, Homo sapiens
  misc_RNA (1)...(19): siRNA sense strand
agagaagcccaugugguua

SEQ ID NO: 1982862 - RNA, 19 nt, Homo sapiens
  misc_RNA (1)...(19): siRNA sense strand
uccaggcacugucuucuuc

SEQ ID NO: 1982863 - RNA, 19 nt, Homo sapiens
  misc_RNA (1)...(19): siRNA sense strand
ccaacacucuccccacuga

SEQ ID NO: 1982864 - RNA, 19 nt, Homo sapiens
  misc_RNA (1)...(19): siRNA sense strand
auucggaacugcagcuguu

SEQ ID NO: 1982865 - RNA, 19 nt, Homo sapiens
  misc_RNA (1)...(19): siRNA sense strand
aaauaaggccgugagauag

SEQ ID NO: 1982866 - RNA, 19 nt, Homo sapiens
  misc_RNA (1)...(19): siRNA sense strand
cugaagaggcugcgcauca

SEQ ID NO: 1982867 - RNA, 19 nt, Homo sapiens
  misc_RNA (1)...(19): siRNA sense strand
aacagggacucagccuuaa

SEQ ID NO: 1982868 - RNA, 19 nt, Homo sapiens
  misc_RNA (1)...(19): siRNA sense strand
ggcacugucuucuucugau

SEQ ID NO: 1982869 - RNA, 19 nt, Homo sapiens
  misc_RNA (1)...(19): siRNA sense strand
ccacugaauaccuggcuau

SEQ ID NO: 1982870 - RNA, 19 nt, Homo sapiens
  misc_RNA (1)...(19): siRNA sense strand
caacuuuccugacuuuucu

SEQ ID NO: 1982871 - RNA, 19 nt, Homo sapiens
  misc_RNA (1)...(19): siRNA sense strand
acucagccuuaaaucauau

SEQ ID NO: 1982872 - RNA, 19 nt, Homo sapiens
  misc_RNA (1)...(19): siRNA sense strand
cuuaacugcuucaccaaag

SEQ ID NO: 1982873 - RNA, 19 nt, Homo sapiens
  misc_RNA (1)...(19): siRNA sense strand
ccagagcagagcuuacuca

SEQ ID NO: 1982874 - RNA, 19 nt, Homo sapiens
  misc_RNA (1)...(19): siRNA sense strand
gcagccauguauguauauc

SEQ ID NO: 1982875 - RNA, 19 nt, Homo sapiens
  misc_RNA (1)...(19): siRNA sense strand
agagcuuacucauccauag

SEQ ID NO: 1982876 - RNA, 19 nt, Homo sapiens
  misc_RNA (1)...(19): siRNA sense strand
gaaaacaccauucggaacu

SEQ ID NO: 1982877 - RNA, 19 nt, Homo sapiens
  misc_RNA (1)...(19): siRNA sense strand
ucuuugcacuuaacugcuu

SEQ ID NO: 1982878 - RNA, 19 nt, Homo sapiens
  misc_RNA (1)...(19): siRNA sense strand
ugaaaacguuaccagcauu

SEQ ID NO: 1982879 - RNA, 19 nt, Homo sapiens
  misc_RNA (1)...(19): siRNA sense strand
cagggacucagccuuaaau

SEQ ID NO: 1982880 - RNA, 19 nt, Homo sapiens
  misc_RNA (1)...(19): siRNA sense strand
ccauguauguauaucucau

SEQ ID NO: 1982881 - RNA, 19 nt, Homo sapiens
  misc_RNA (1)...(19): siRNA sense strand
cuuuagaaccuucccaaug

SEQ ID NO: 1982882 - RNA, 19 nt, Homo sapiens
  misc_RNA (1)...(19): siRNA sense strand
gaagaggcugcgcaucaac

SEQ ID NO: 1982883 - RNA, 19 nt, Homo sapiens
  misc_RNA (1)...(19): siRNA sense strand
gaaaacguuaccagcauug

SEQ ID NO: 1982884 - RNA, 19 nt, Homo sapiens
  misc_RNA (1)...(19): siRNA sense strand
gaacacaggucauuuguaa

SEQ ID NO: 1982885 - RNA, 19 nt, Homo sapiens
  misc_RNA (1)...(19): siRNA sense strand
caacacaucuucucaccuu

SEQ ID NO: 1982886 - RNA, 19 nt, Homo sapiens
  misc_RNA (1)...(19): siRNA sense strand
ggucauuuguaaaguugua

SEQ ID NO: 1982887 - RNA, 19 nt, Homo sapiens
  misc_RNA (1)...(19): siRNA sense strand
ggaacacaggucauuugua

SEQ ID NO: 1982888 - RNA, 19 nt, Homo sapiens
  misc_RNA (1)...(19): siRNA sense strand
caggucauuuguaaaguug

SEQ ID NO: 1982889 - RNA, 19 nt, Homo sapiens
  misc_RNA (1)...(19): siRNA sense strand
acaggucauuuguaaaguu

SEQ ID NO: 1982890 - RNA, 19 nt, Homo sapiens
  misc_RNA (1)...(19): siRNA sense strand
acacaggucauuuguaaag

SEQ ID NO: 1982891 - RNA, 19 nt, Homo sapiens
  misc_RNA (1)...(19): siRNA sense strand
guauuggauucaacacauc

SEQ ID NO: 1982892 - RNA, 19 nt, Homo sapiens
  misc_RNA (1)...(19): siRNA sense strand
guggaacacaggucauuug

SEQ ID NO: 1982893 - RNA, 19 nt, Homo sapiens
  misc_RNA (1)...(19): siRNA sense strand
caagcaguauuggauucaa

SEQ ID NO: 1982894 - RNA, 19 nt, Homo sapiens
  misc_RNA (1)...(19): siRNA sense strand
aguauuggauucaacacau

SEQ ID NO: 1982895 - RNA, 19 nt, Homo sapiens
  misc_RNA (1)...(19): siRNA sense strand
gguggaacacaggucauuu

SEQ ID NO: 1982896 - RNA, 19 nt, Homo sapiens
  misc_RNA (1)...(19): siRNA sense strand
cacuuucccugcagaugga

SEQ ID NO: 1982897 - RNA, 19 nt, Homo sapiens
  misc_RNA (1)...(19): siRNA sense strand
ccaaaucucuccugcugaa

SEQ ID NO: 1982898 - RNA, 19 nt, Homo sapiens
  misc_RNA (1)...(19): siRNA sense strand
gagaggagccuugcuguuu

SEQ ID NO: 1982899 - RNA, 19 nt, Homo sapiens
  misc_RNA (1)...(19): siRNA sense strand
gagccuugcuguuuccaaa

SEQ ID NO: 1982900 - RNA, 19 nt, Homo sapiens
  misc_RNA (1)...(19): siRNA sense strand
guucgaaguuugauaccuu

SEQ ID NO: 1982901 - RNA, 19 nt, Homo sapiens
  misc_RNA (1)...(19): siRNA sense strand
ggagaggagccuugcuguu

SEQ ID NO: 1982902 - RNA, 19 nt, Homo sapiens
  misc_RNA (1)...(19): siRNA sense strand
cggcuaguuucaccuggua

SEQ ID NO: 1982903 - RNA, 19 nt, Homo sapiens
  misc_RNA (1)...(19): siRNA sense strand
agaggagccuugcuguuuc

SEQ ID NO: 1982904 - RNA, 19 nt, Homo sapiens
  misc_RNA (1)...(19): siRNA sense strand
gaacucccggaacgguuga

SEQ ID NO: 1982905 - RNA, 19 nt, Homo sapiens
  misc_RNA (1)...(19): siRNA sense strand
ugaagagacauuggagcua

SEQ ID NO: 1982906 - RNA, 19 nt, Homo sapiens
  misc_RNA (1)...(19): siRNA sense strand
gccuugcuguuuccaaauc

SEQ ID NO: 1982907 - RNA, 19 nt, Homo sapiens
  misc_RNA (1)...(19): siRNA sense strand
ugucauguucgaaguuuga

SEQ ID NO: 1982908 - RNA, 19 nt, Homo sapiens
  misc_RNA (1)...(19): siRNA sense strand
cuugucauguucgaaguuu

SEQ ID NO: 1982909 - RNA, 19 nt, Homo sapiens
  misc_RNA (1)...(19): siRNA sense strand
uccucgagcugcaggcuuu

SEQ ID NO: 1982910 - RNA, 19 nt, Homo sapiens
  misc_RNA (1)...(19): siRNA sense strand
ggaccagacaccagaacuc

SEQ ID NO: 1982911 - RNA, 19 nt, Homo sapiens
  misc_RNA (1)...(19): siRNA sense strand
gaggagccuugcuguuucc

SEQ ID NO: 1982912 - RNA, 19 nt, Homo sapiens
  misc_RNA (1)...(19): siRNA sense strand
aguuucaccugguaauugu

SEQ ID NO: 1982913 - RNA, 19 nt, Homo sapiens
  misc_RNA (1)...(19): siRNA sense strand
ccaaaucucuccugcugaa

SEQ ID NO: 1982914 - RNA, 19 nt, Homo sapiens
  misc_RNA (1)...(19): siRNA sense strand
gagaggagccuugcuguuu

SEQ ID NO: 1982915 - RNA, 19 nt, Homo sapiens
  misc_RNA (1)...(19): siRNA sense strand
gagccuugcuguuuccaaa

SEQ ID NO: 1982916 - RNA, 19 nt, Homo sapiens
  misc_RNA (1)...(19): siRNA sense strand
guucgaaguuugauaccuu

SEQ ID NO: 1982917 - RNA, 19 nt, Homo sapiens
  misc_RNA (1)...(19): siRNA sense strand
ggagaggagccuugcuguu

SEQ ID NO: 1982918 - RNA, 19 nt, Homo sapiens
  misc_RNA (1)...(19): siRNA sense strand
cggcuaguuucaccuggua

SEQ ID NO: 1982919 - RNA, 19 nt, Homo sapiens
  misc_RNA (1)...(19): siRNA sense strand
agaggagccuugcuguuuc

SEQ ID NO: 1982920 - RNA, 19 nt, Homo sapiens
  misc_RNA (1)...(19): siRNA sense strand
gaacucccggaacgguuga

SEQ ID NO: 1982921 - RNA, 19 nt, Homo sapiens
  misc_RNA (1)...(19): siRNA sense strand
ugaagagacauuggagcua

SEQ ID NO: 1982922 - RNA, 19 nt, Homo sapiens
  misc_RNA (1)...(19): siRNA sense strand
gccuugcuguuuccaaauc

SEQ ID NO: 1982923 - RNA, 19 nt, Homo sapiens
  misc_RNA (1)...(19): siRNA sense strand
ugucauguucgaaguuuga

SEQ ID NO: 1982924 - RNA, 19 nt, Homo sapiens
  misc_RNA (1)...(19): siRNA sense strand
cuugucauguucgaaguuu

SEQ ID NO: 1982925 - RNA, 19 nt, Homo sapiens
  misc_RNA (1)...(19): siRNA sense strand
uccucgagcugcaggcuuu

SEQ ID NO: 1982926 - RNA, 19 nt, Homo sapiens
  misc_RNA (1)...(19): siRNA sense strand
ggaccagacaccagaacuc

SEQ ID NO: 1982927 - RNA, 19 nt, Homo sapiens
  misc_RNA (1)...(19): siRNA sense strand
gaggagccuugcuguuucc

SEQ ID NO: 1982928 - RNA, 19 nt, Homo sapiens
  misc_RNA (1)...(19): siRNA sense strand
aguuucaccugguaauugu

SEQ ID NO: 1982929 - RNA, 19 nt, Homo sapiens
  misc_RNA (1)...(19): siRNA sense strand
ggaaacaggugcagaauuu

SEQ ID NO: 1982930 - RNA, 19 nt, Homo sapiens
  misc_RNA (1)...(19): siRNA sense strand
gcauugggauuaucaaaua

SEQ ID NO: 1982931 - RNA, 19 nt, Homo sapiens
  misc_RNA (1)...(19): siRNA sense strand
gguaugaccugaaauguuu

SEQ ID NO: 1982932 - RNA, 19 nt, Homo sapiens
  misc_RNA (1)...(19): siRNA sense strand
gacaucagauccugcauua

SEQ ID NO: 1982933 - RNA, 19 nt, Homo sapiens
  misc_RNA (1)...(19): siRNA sense strand
caauaaaugugcacuguaa

SEQ ID NO: 1982934 - RNA, 19 nt, Homo sapiens
  misc_RNA (1)...(19): siRNA sense strand
gcacgguuaugaaauauuu

SEQ ID NO: 1982935 - RNA, 19 nt, Homo sapiens
  misc_RNA (1)...(19): siRNA sense strand
gaggagcuguuaacuagua

SEQ ID NO: 1982936 - RNA, 19 nt, Homo sapiens
  misc_RNA (1)...(19): siRNA sense strand
gaucgaaccuggucauugu

SEQ ID NO: 1982937 - RNA, 19 nt, Homo sapiens
  misc_RNA (1)...(19): siRNA sense strand
ggaaacagaauacaguuaa

SEQ ID NO: 1982938 - RNA, 19 nt, Homo sapiens
  misc_RNA (1)...(19): siRNA sense strand
uuacaaagaugguguccua

SEQ ID NO: 1982939 - RNA, 19 nt, Homo sapiens
  misc_RNA (1)...(19): siRNA sense strand
gaucauugcucaugcuuuc

SEQ ID NO: 1982940 - RNA, 19 nt, Homo sapiens
  misc_RNA (1)...(19): siRNA sense strand
gaagaggagcuguuaacua

SEQ ID NO: 1982941 - RNA, 19 nt, Homo sapiens
  misc_RNA (1)...(19): siRNA sense strand
gacaaucacugaaucaugu

SEQ ID NO: 1982942 - RNA, 19 nt, Homo sapiens
  misc_RNA (1)...(19): siRNA sense strand
guggaaagauuugcuuaua

SEQ ID NO: 1982943 - RNA, 19 nt, Homo sapiens
  misc_RNA (1)...(19): siRNA sense strand
gaucagacaacuagacuuu

SEQ ID NO: 1982944 - RNA, 19 nt, Homo sapiens
  misc_RNA (1)...(19): siRNA sense strand
uaaugugccuucagacuuu

SEQ ID NO: 1982945 - RNA, 19 nt, Homo sapiens
  misc_RNA (1)...(19): siRNA sense strand
ugaaucaugugcucuguaa

SEQ ID NO: 1982946 - RNA, 19 nt, Homo sapiens
  misc_RNA (1)...(19): siRNA sense strand
ggacaugaggauuggauua

SEQ ID NO: 1982947 - RNA, 19 nt, Homo sapiens
  misc_RNA (1)...(19): siRNA sense strand
ucacaagauugccugauaa

SEQ ID NO: 1982948 - RNA, 19 nt, Homo sapiens
  misc_RNA (1)...(19): siRNA sense strand
ucacauauuugcucaacaa

SEQ ID NO: 1982949 - RNA, 19 nt, Homo sapiens
  misc_RNA (1)...(19): siRNA sense strand
ccagaaggagaauuuauua

SEQ ID NO: 1982950 - RNA, 19 nt, Homo sapiens
  misc_RNA (1)...(19): siRNA sense strand
caagauugccugauaagaa

SEQ ID NO: 1982951 - RNA, 19 nt, Homo sapiens
  misc_RNA (1)...(19): siRNA sense strand
uuucagcccuccauacuua

SEQ ID NO: 1982952 - RNA, 19 nt, Homo sapiens
  misc_RNA (1)...(19): siRNA sense strand
gaauacaguuaacccaaga

SEQ ID NO: 1982953 - RNA, 19 nt, Homo sapiens
  misc_RNA (1)...(19): siRNA sense strand
ggaugacgauaacauaaga

SEQ ID NO: 1982954 - RNA, 19 nt, Homo sapiens
  misc_RNA (1)...(19): siRNA sense strand
gaaagagcaugcagcuauc

SEQ ID NO: 1982955 - RNA, 19 nt, Homo sapiens
  misc_RNA (1)...(19): siRNA sense strand
gaugaagagucaggaguuu

SEQ ID NO: 1982956 - RNA, 19 nt, Homo sapiens
  misc_RNA (1)...(19): siRNA sense strand
ugaucaaguuccagaaaua

SEQ ID NO: 1982957 - RNA, 19 nt, Homo sapiens
  misc_RNA (1)...(19): siRNA sense strand
aagaggagcuguuaacuag

SEQ ID NO: 1982958 - RNA, 19 nt, Homo sapiens
  misc_RNA (1)...(19): siRNA sense strand
gaagauacacagagucaau

SEQ ID NO: 1982959 - RNA, 19 nt, Homo sapiens
  misc_RNA (1)...(19): siRNA sense strand
caacaucuuuagaaacuca

SEQ ID NO: 1982960 - RNA, 19 nt, Homo sapiens
  misc_RNA (1)...(19): siRNA sense strand
gaagcuguauauaaaguca

SEQ ID NO: 1982961 - RNA, 19 nt, Homo sapiens
  misc_RNA (1)...(19): siRNA sense strand
caucagauccugcauuaug

SEQ ID NO: 1982962 - RNA, 19 nt, Homo sapiens
  misc_RNA (1)...(19): siRNA sense strand
cagauggccuucucaccua

SEQ ID NO: 1982963 - RNA, 19 nt, Homo sapiens
  misc_RNA (1)...(19): siRNA sense strand
gcaugcagcuaucauucuu

SEQ ID NO: 1982964 - RNA, 19 nt, Homo sapiens
  misc_RNA (1)...(19): siRNA sense strand
gacgauaacauaagacuga

SEQ ID NO: 1982965 - RNA, 19 nt, Homo sapiens
  misc_RNA (1)...(19): siRNA sense strand
gcaagcuguucacaagauu

SEQ ID NO: 1982966 - RNA, 19 nt, Homo sapiens
  misc_RNA (1)...(19): siRNA sense strand
gaaacaggugcagaauuua

SEQ ID NO: 1982967 - RNA, 19 nt, Homo sapiens
  misc_RNA (1)...(19): siRNA sense strand
agucaaagccaaagucaua

SEQ ID NO: 1982968 - RNA, 19 nt, Homo sapiens
  misc_RNA (1)...(19): siRNA sense strand
gaaacaagucaaagccaaa

SEQ ID NO: 1982969 - RNA, 19 nt, Homo sapiens
  misc_RNA (1)...(19): siRNA sense strand
gaucaaguuccagaaauaa

SEQ ID NO: 1982970 - RNA, 19 nt, Homo sapiens
  misc_RNA (1)...(19): siRNA sense strand
gaacacuacaucuuggaaa

SEQ ID NO: 1982971 - RNA, 19 nt, Homo sapiens
  misc_RNA (1)...(19): siRNA sense strand
agaaggugcugagugguua

SEQ ID NO: 1982972 - RNA, 19 nt, Homo sapiens
  misc_RNA (1)...(19): siRNA sense strand
uuacugagccucccacuga

SEQ ID NO: 1982973 - RNA, 19 nt, Homo sapiens
  misc_RNA (1)...(19): siRNA sense strand
ggaaauagaggauaaucag

SEQ ID NO: 1982974 - RNA, 19 nt, Homo sapiens
  misc_RNA (1)...(19): siRNA sense strand
agaaagagcaugcagcuau

SEQ ID NO: 1982975 - RNA, 19 nt, Homo sapiens
  misc_RNA (1)...(19): siRNA sense strand
guacugaucagacaacuag

SEQ ID NO: 1982976 - RNA, 19 nt, Homo sapiens
  misc_RNA (1)...(19): siRNA sense strand
aaacucaggaugacgauaa

SEQ ID NO: 1982977 - RNA, 19 nt, Homo sapiens
  misc_RNA (1)...(19): siRNA sense strand
gaaauugcaaggccucaga

SEQ ID NO: 1982978 - RNA, 19 nt, Homo sapiens
  misc_RNA (1)...(19): siRNA sense strand
ggacaucagauccugcauu

SEQ ID NO: 1982979 - RNA, 19 nt, Homo sapiens
  misc_RNA (1)...(19): siRNA sense strand
guaaggcagcuaagaaaga

SEQ ID NO: 1982980 - RNA, 19 nt, Homo sapiens
  misc_RNA (1)...(19): siRNA sense strand
ggacaaucacugaaucaug

SEQ ID NO: 1982981 - RNA, 19 nt, Homo sapiens
  misc_RNA (1)...(19): siRNA sense strand
ggaauacuuugggauuuua

SEQ ID NO: 1982982 - RNA, 19 nt, Homo sapiens
  misc_RNA (1)...(19): siRNA sense strand
guagaauuauuuggucuug

SEQ ID NO: 1982983 - RNA, 19 nt, Homo sapiens
  misc_RNA (1)...(19): siRNA sense strand
gugcacaguagaauuauuu

SEQ ID NO: 1982984 - RNA, 19 nt, Homo sapiens
  misc_RNA (1)...(19): siRNA sense strand
gaaacagaauacaguuaac

SEQ ID NO: 1982985 - RNA, 19 nt, Homo sapiens
  misc_RNA (1)...(19): siRNA sense strand
aagauugccugauaagaau

SEQ ID NO: 1982986 - RNA, 19 nt, Homo sapiens
  misc_RNA (1)...(19): siRNA sense strand
gcagccagugagauuauua

SEQ ID NO: 1982987 - RNA, 19 nt, Homo sapiens
  misc_RNA (1)...(19): siRNA sense strand
gcuccguggugcucuauga

SEQ ID NO: 1982988 - RNA, 19 nt, Homo sapiens
  misc_RNA (1)...(19): siRNA sense strand
ugggcacgguuaugaaaua

SEQ ID NO: 1982989 - RNA, 19 nt, Homo sapiens
  misc_RNA (1)...(19): siRNA sense strand
cuagcaagcuguucacaag

SEQ ID NO: 1982990 - RNA, 19 nt, Homo sapiens
  misc_RNA (1)...(19): siRNA sense strand
gucaacaucuuuagaaacu

SEQ ID NO: 1982991 - RNA, 19 nt, Homo sapiens
  misc_RNA (1)...(19): siRNA sense strand
cuccagagauugucauuuc

SEQ ID NO: 1982992 - RNA, 19 nt, Homo sapiens
  misc_RNA (1)...(19): siRNA sense strand
ggauuggaguguggaaaga

SEQ ID NO: 1982993 - RNA, 19 nt, Homo sapiens
  misc_RNA (1)...(19): siRNA sense strand
agaauuauuuggucuugug

SEQ ID NO: 1982994 - RNA, 19 nt, Homo sapiens
  misc_RNA (1)...(19): siRNA sense strand
gaaauguuuggcaaugauu

SEQ ID NO: 1982995 - RNA, 19 nt, Homo sapiens
  misc_RNA (1)...(19): siRNA sense strand
ugaaauguuuggcaaugau

SEQ ID NO: 1982996 - RNA, 19 nt, Homo sapiens
  misc_RNA (1)...(19): siRNA sense strand
caggugacuuggcaugaaa

SEQ ID NO: 1982997 - RNA, 19 nt, Homo sapiens
  misc_RNA (1)...(19): siRNA sense strand
ggauccagaaggagaauuu

SEQ ID NO: 1982998 - RNA, 19 nt, Homo sapiens
  misc_RNA (1)...(19): siRNA sense strand
guaaugugccuucagacuu

SEQ ID NO: 1982999 - RNA, 19 nt, Homo sapiens
  misc_RNA (1)...(19): siRNA sense strand
gagccacugucccugcauu

SEQ ID NO: 1983000 - RNA, 19 nt, Homo sapiens
  misc_RNA (1)...(19): siRNA sense strand
ggcaaugauuaaucgguuu

SEQ ID NO: 1983001 - RNA, 19 nt, Homo sapiens
  misc_RNA (1)...(19): siRNA sense strand
guaccaauauuagcaugug

SEQ ID NO: 1983002 - RNA, 19 nt, Homo sapiens
  misc_RNA (1)...(19): siRNA sense strand
cuucagacuuuaaacuuug

SEQ ID NO: 1983003 - RNA, 19 nt, Homo sapiens
  misc_RNA (1)...(19): siRNA sense strand
caaagaugguguccuacag

SEQ ID NO: 1983004 - RNA, 19 nt, Homo sapiens
  misc_RNA (1)...(19): siRNA sense strand
acacagagucaauaaaugu

SEQ ID NO: 1983005 - RNA, 19 nt, Homo sapiens
  misc_RNA (1)...(19): siRNA sense strand
uggaagaauugcaguggaa

SEQ ID NO: 1983006 - RNA, 19 nt, Homo sapiens
  misc_RNA (1)...(19): siRNA sense strand
ccuucagacuuuaaacuuu

SEQ ID NO: 1983007 - RNA, 19 nt, Homo sapiens
  misc_RNA (1)...(19): siRNA sense strand
gcagcuaucauucuuugga

SEQ ID NO: 1983008 - RNA, 19 nt, Homo sapiens
  misc_RNA (1)...(19): siRNA sense strand
gaaugggcagccuuuggua

SEQ ID NO: 1983009 - RNA, 19 nt, Homo sapiens
  misc_RNA (1)...(19): siRNA sense strand
gcuccacccuucucaacga

SEQ ID NO: 1983010 - RNA, 19 nt, Homo sapiens
  misc_RNA (1)...(19): siRNA sense strand
gagcaugcagcuaucauuc

SEQ ID NO: 1983011 - RNA, 19 nt, Homo sapiens
  misc_RNA (1)...(19): siRNA sense strand
caugugcucuguaaucaag

SEQ ID NO: 1983012 - RNA, 19 nt, Homo sapiens
  misc_RNA (1)...(19): siRNA sense strand
gaagagaaaagaccaauca

SEQ ID NO: 1983013 - RNA, 19 nt, Homo sapiens
  misc_RNA (1)...(19): siRNA sense strand
ucaggaugacgauaacaua

SEQ ID NO: 1983014 - RNA, 19 nt, Homo sapiens
  misc_RNA (1)...(19): siRNA sense strand
uucacaagauugccugaua

SEQ ID NO: 1983015 - RNA, 19 nt, Homo sapiens
  misc_RNA (1)...(19): siRNA sense strand
uauguacacugaucguuuc

SEQ ID NO: 1983016 - RNA, 19 nt, Homo sapiens
  misc_RNA (1)...(19): siRNA sense strand
cagcaaguauuucuucacu

SEQ ID NO: 1983017 - RNA, 19 nt, Homo sapiens
  misc_RNA (1)...(19): siRNA sense strand
gaaccuggucauuguggaa

SEQ ID NO: 1983018 - RNA, 19 nt, Homo sapiens
  misc_RNA (1)...(19): siRNA sense strand
cagcuaucauucuuuggaa

SEQ ID NO: 1983019 - RNA, 19 nt, Homo sapiens
  misc_RNA (1)...(19): siRNA sense strand
ugcuuuggcucucugcuua

SEQ ID NO: 1983020 - RNA, 19 nt, Homo sapiens
  misc_RNA (1)...(19): siRNA sense strand
ggaaugggcagccuuuggu

SEQ ID NO: 1983021 - RNA, 19 nt, Homo sapiens
  misc_RNA (1)...(19): siRNA sense strand
gaauuuaguuuuccacagu

SEQ ID NO: 1983022 - RNA, 19 nt, Homo sapiens
  misc_RNA (1)...(19): siRNA sense strand
auuaaucgguuucaguuug

SEQ ID NO: 1983023 - RNA, 19 nt, Homo sapiens
  misc_RNA (1)...(19): siRNA sense strand
ucgaguaggugaaguaggu

SEQ ID NO: 1983024 - RNA, 19 nt, Homo sapiens
  misc_RNA (1)...(19): siRNA sense strand
gauaacauaagacugaaag

SEQ ID NO: 1983025 - RNA, 19 nt, Homo sapiens
  misc_RNA (1)...(19): siRNA sense strand
caggaugacgauaacauaa

SEQ ID NO: 1983026 - RNA, 19 nt, Homo sapiens
  misc_RNA (1)...(19): siRNA sense strand
gggcacgguuaugaaauau

SEQ ID NO: 1983027 - RNA, 19 nt, Homo sapiens
  misc_RNA (1)...(19): siRNA sense strand
gucaauaaaugugcacugu

SEQ ID NO: 1983028 - RNA, 19 nt, Homo sapiens
  misc_RNA (1)...(19): siRNA sense strand
gacagcaaguauuucuuca

SEQ ID NO: 1983029 - RNA, 19 nt, Homo sapiens
  misc_RNA (1)...(19): siRNA sense strand
aggaauagcucccgaguuu

SEQ ID NO: 1983030 - RNA, 19 nt, Homo sapiens
  misc_RNA (1)...(19): siRNA sense strand
gaagggagaaggugauauu

SEQ ID NO: 1983031 - RNA, 19 nt, Homo sapiens
  misc_RNA (1)...(19): siRNA sense strand
ggagacuucuuagaucuga

SEQ ID NO: 1983032 - RNA, 19 nt, Homo sapiens
  misc_RNA (1)...(19): siRNA sense strand
gggagaaggugauauucau

SEQ ID NO: 1983033 - RNA, 19 nt, Homo sapiens
  misc_RNA (1)...(19): siRNA sense strand
gagaaggugauauucauga

SEQ ID NO: 1983034 - RNA, 19 nt, Homo sapiens
  misc_RNA (1)...(19): siRNA sense strand
gaacaaccugugaggaaga

SEQ ID NO: 1983035 - RNA, 19 nt, Homo sapiens
  misc_RNA (1)...(19): siRNA sense strand
ccagugccauccagaagaa

SEQ ID NO: 1983036 - RNA, 19 nt, Homo sapiens
  misc_RNA (1)...(19): siRNA sense strand
gaagcaagcuccggagacu

SEQ ID NO: 1983037 - RNA, 19 nt, Homo sapiens
  misc_RNA (1)...(19): siRNA sense strand
gaaggugauauucaugaaa

SEQ ID NO: 1983038 - RNA, 19 nt, Homo sapiens
  misc_RNA (1)...(19): siRNA sense strand
cagaacaaccugugaggaa

SEQ ID NO: 1983039 - RNA, 19 nt, Homo sapiens
  misc_RNA (1)...(19): siRNA sense strand
caaaauggccucuaauauc

SEQ ID NO: 1983040 - RNA, 19 nt, Homo sapiens
  misc_RNA (1)...(19): siRNA sense strand
agaaggugauauucaugaa

SEQ ID NO: 1983041 - RNA, 19 nt, Homo sapiens
  misc_RNA (1)...(19): siRNA sense strand
aauggccucuaauaucuuu

SEQ ID NO: 1983042 - RNA, 19 nt, Homo sapiens
  misc_RNA (1)...(19): siRNA sense strand
gaauagcucccgaguuuug

SEQ ID NO: 1983043 - RNA, 19 nt, Homo sapiens
  misc_RNA (1)...(19): siRNA sense strand
ggagaaggugauauucaug

SEQ ID NO: 1983044 - RNA, 19 nt, Homo sapiens
  misc_RNA (1)...(19): siRNA sense strand
aaaauggccucuaauaucu

SEQ ID NO: 1983045 - RNA, 19 nt, Homo sapiens
  misc_RNA (1)...(19): siRNA sense strand
ccacaaccaccaccuucaa

SEQ ID NO: 1983046 - RNA, 19 nt, Homo sapiens
  misc_RNA (1)...(19): siRNA sense strand
agaacaaaauggccucuaa

SEQ ID NO: 1983047 - RNA, 19 nt, Homo sapiens
  misc_RNA (1)...(19): siRNA sense strand
gcaggugccaagucuagug

SEQ ID NO: 1983048 - RNA, 19 nt, Homo sapiens
  misc_RNA (1)...(19): siRNA sense strand
aagcuccggagacuucuua

SEQ ID NO: 1983049 - RNA, 19 nt, Homo sapiens
  misc_RNA (1)...(19): siRNA sense strand
ccagccucgucuuggguua

SEQ ID NO: 1983050 - RNA, 19 nt, Homo sapiens
  misc_RNA (1)...(19): siRNA sense strand
ccggagacuucuuagaucu

SEQ ID NO: 1983051 - RNA, 19 nt, Homo sapiens
  misc_RNA (1)...(19): siRNA sense strand
gaacaaaauggccucuaau

SEQ ID NO: 1983052 - RNA, 19 nt, Homo sapiens
  misc_RNA (1)...(19): siRNA sense strand
cagcaggugccaagucuag

SEQ ID NO: 1983053 - RNA, 19 nt, Homo sapiens
  misc_RNA (1)...(19): siRNA sense strand
ccaggugguggauccaauu

SEQ ID NO: 1983054 - RNA, 19 nt, Homo sapiens
  misc_RNA (1)...(19): siRNA sense strand
gcaaguccagccucgucuu

SEQ ID NO: 1983055 - RNA, 19 nt, Homo sapiens
  misc_RNA (1)...(19): siRNA sense strand
gucagcaggugccaagucu

SEQ ID NO: 1983056 - RNA, 19 nt, Homo sapiens
  misc_RNA (1)...(19): siRNA sense strand
ggacugcagagaaggaacu

SEQ ID NO: 1983057 - RNA, 19 nt, Homo sapiens
  misc_RNA (1)...(19): siRNA sense strand
caggugguggauccaauuu

SEQ ID NO: 1983058 - RNA, 19 nt, Homo sapiens
  misc_RNA (1)...(19): siRNA sense strand
gagacuucuuagaucugaa

SEQ ID NO: 1983059 - RNA, 19 nt, Homo sapiens
  misc_RNA (1)...(19): siRNA sense strand
ugaugaaccaacagaacaa

SEQ ID NO: 1983060 - RNA, 19 nt, Homo sapiens
  misc_RNA (1)...(19): siRNA sense strand
gcaggaaucuugucagaaa

SEQ ID NO: 1983061 - RNA, 19 nt, Homo sapiens
  misc_RNA (1)...(19): siRNA sense strand
gaagaaaucuccaaguauc

SEQ ID NO: 1983062 - RNA, 19 nt, Homo sapiens
  misc_RNA (1)...(19): siRNA sense strand
gaacagugauugaaguuga

SEQ ID NO: 1983063 - RNA, 19 nt, Homo sapiens
  misc_RNA (1)...(19): siRNA sense strand
ugucagaaauuacugcuua

SEQ ID NO: 1983064 - RNA, 19 nt, Homo sapiens
  misc_RNA (1)...(19): siRNA sense strand
gaagaaaccucuggaaugc

SEQ ID NO: 1983065 - RNA, 19 nt, Homo sapiens
  misc_RNA (1)...(19): siRNA sense strand
gaauccgacucuccuauaa

SEQ ID NO: 1983066 - RNA, 19 nt, Homo sapiens
  misc_RNA (1)...(19): siRNA sense strand
ggaaucuugucagaaauua

SEQ ID NO: 1983067 - RNA, 19 nt, Homo sapiens
  misc_RNA (1)...(19): siRNA sense strand
caaggagacuucaaacuuc

SEQ ID NO: 1983068 - RNA, 19 nt, Homo sapiens
  misc_RNA (1)...(19): siRNA sense strand
ccaaaaggcucaugaauca

SEQ ID NO: 1983069 - RNA, 19 nt, Homo sapiens
  misc_RNA (1)...(19): siRNA sense strand
ggaagaaaucuccaaguau

SEQ ID NO: 1983070 - RNA, 19 nt, Homo sapiens
  misc_RNA (1)...(19): siRNA sense strand
gcuccugccuucccucuuu

SEQ ID NO: 1983071 - RNA, 19 nt, Homo sapiens
  misc_RNA (1)...(19): siRNA sense strand
gauuacaucuuguucaaag

SEQ ID NO: 1983072 - RNA, 19 nt, Homo sapiens
  misc_RNA (1)...(19): siRNA sense strand
gauuaauccugaaaccaaa

SEQ ID NO: 1983073 - RNA, 19 nt, Homo sapiens
  misc_RNA (1)...(19): siRNA sense strand
caagcuagaucagaaguau

SEQ ID NO: 1983074 - RNA, 19 nt, Homo sapiens
  misc_RNA (1)...(19): siRNA sense strand
ccaaggagacuucaaacuu

SEQ ID NO: 1983075 - RNA, 19 nt, Homo sapiens
  misc_RNA (1)...(19): siRNA sense strand
ugaagaaaccucuggaaug

SEQ ID NO: 1983076 - RNA, 19 nt, Homo sapiens
  misc_RNA (1)...(19): siRNA sense strand
aaacugcccuaccaaggaa

SEQ ID NO: 1983077 - RNA, 19 nt, Homo sapiens
  misc_RNA (1)...(19): siRNA sense strand
caaguuugccuccaccuuu

SEQ ID NO: 1983078 - RNA, 19 nt, Homo sapiens
  misc_RNA (1)...(19): siRNA sense strand
gacaaguacaagaccauua

SEQ ID NO: 1983079 - RNA, 19 nt, Homo sapiens
  misc_RNA (1)...(19): siRNA sense strand
caaaguggaccggccauuu

SEQ ID NO: 1983080 - RNA, 19 nt, Homo sapiens
  misc_RNA (1)...(19): siRNA sense strand
aaagaacagugauugaagu

SEQ ID NO: 1983081 - RNA, 19 nt, Homo sapiens
  misc_RNA (1)...(19): siRNA sense strand
guggagacauggcucagaa

SEQ ID NO: 1983082 - RNA, 19 nt, Homo sapiens
  misc_RNA (1)...(19): siRNA sense strand
agacauggcucagaaacau

SEQ ID NO: 1983083 - RNA, 19 nt, Homo sapiens
  misc_RNA (1)...(19): siRNA sense strand
gaccggccauuucauuuca

SEQ ID NO: 1983084 - RNA, 19 nt, Homo sapiens
  misc_RNA (1)...(19): siRNA sense strand
gauugaaguugaugaaagg

SEQ ID NO: 1983085 - RNA, 19 nt, Homo sapiens
  misc_RNA (1)...(19): siRNA sense strand
agaaaccucuggaaugcuu

SEQ ID NO: 1983086 - RNA, 19 nt, Homo sapiens
  misc_RNA (1)...(19): siRNA sense strand
acaaguacaagaccauuaa

SEQ ID NO: 1983087 - RNA, 19 nt, Homo sapiens
  misc_RNA (1)...(19): siRNA sense strand
ccauuaaggugcccaugau

SEQ ID NO: 1983088 - RNA, 19 nt, Homo sapiens
  misc_RNA (1)...(19): siRNA sense strand
gaggcacgauggcaacaug

SEQ ID NO: 1983089 - RNA, 19 nt, Homo sapiens
  misc_RNA (1)...(19): siRNA sense strand
aagacuaccugaccacaga

SEQ ID NO: 1983090 - RNA, 19 nt, Homo sapiens
  misc_RNA (1)...(19): siRNA sense strand
caaacugcccuaccaagga

SEQ ID NO: 1983091 - RNA, 19 nt, Homo sapiens
  misc_RNA (1)...(19): siRNA sense strand
cagagugcgugccuaugaa

SEQ ID NO: 1983092 - RNA, 19 nt, Homo sapiens
  misc_RNA (1)...(19): siRNA sense strand
caaagaacagugauugaag

SEQ ID NO: 1983093 - RNA, 19 nt, Homo sapiens
  misc_RNA (1)...(19): siRNA sense strand
gcagaugggaaucagaaga

SEQ ID NO: 1983094 - RNA, 19 nt, Homo sapiens
  misc_RNA (1)...(19): siRNA sense strand
uggauuacaucuuguucaa

SEQ ID NO: 1983095 - RNA, 19 nt, Homo sapiens
  misc_RNA (1)...(19): siRNA sense strand
agagagggcuccacuugca

SEQ ID NO: 1983096 - RNA, 19 nt, Homo sapiens
  misc_RNA (1)...(19): siRNA sense strand
ugaauccgacucuccuaua

SEQ ID NO: 1983097 - RNA, 19 nt, Homo sapiens
  misc_RNA (1)...(19): siRNA sense strand
gaugagauuaauccugaaa

SEQ ID NO: 1983098 - RNA, 19 nt, Homo sapiens
  misc_RNA (1)...(19): siRNA sense strand
ggaccggccauuucauuuc

SEQ ID NO: 1983099 - RNA, 19 nt, Homo sapiens
  misc_RNA (1)...(19): siRNA sense strand
gaaauuacugcuuauucca

SEQ ID NO: 1983100 - RNA, 19 nt, Homo sapiens
  misc_RNA (1)...(19): siRNA sense strand
cgacugaaacccagaucaa

SEQ ID NO: 1983101 - RNA, 19 nt, Homo sapiens
  misc_RNA (1)...(19): siRNA sense strand
uggcaggaaucuugucaga

SEQ ID NO: 1983102 - RNA, 19 nt, Homo sapiens
  misc_RNA (1)...(19): siRNA sense strand
ugauugaaguugaugaaag

SEQ ID NO: 1983103 - RNA, 19 nt, Homo sapiens
  misc_RNA (1)...(19): siRNA sense strand
uuaaggugcccaugaugua

SEQ ID NO: 1983104 - RNA, 19 nt, Homo sapiens
  misc_RNA (1)...(19): siRNA sense strand
ccacagggccgacugaaac

SEQ ID NO: 1983105 - RNA, 19 nt, Homo sapiens
  misc_RNA (1)...(19): siRNA sense strand
acaaagaacagugauugaa

SEQ ID NO: 1983106 - RNA, 19 nt, Homo sapiens
  misc_RNA (1)...(19): siRNA sense strand
uuacaaagaacagugauug

SEQ ID NO: 1983107 - RNA, 19 nt, Homo sapiens
  misc_RNA (1)...(19): siRNA sense strand
agaaguaugagaugcauga

SEQ ID NO: 1983108 - RNA, 19 nt, Homo sapiens
  misc_RNA (1)...(19): siRNA sense strand
ggacaaguacaagaccauu

SEQ ID NO: 1983109 - RNA, 19 nt, Homo sapiens
  misc_RNA (1)...(19): siRNA sense strand
cagaaauuacugcuuauuc

SEQ ID NO: 1983110 - RNA, 19 nt, Homo sapiens
  misc_RNA (1)...(19): siRNA sense strand
cagaugggaaucagaagaa

SEQ ID NO: 1983111 - RNA, 19 nt, Homo sapiens
  misc_RNA (1)...(19): siRNA sense strand
ccugaaaccaaauuaauuc

SEQ ID NO: 1983112 - RNA, 19 nt, Homo sapiens
  misc_RNA (1)...(19): siRNA sense strand
ggcaguggcaggaaucuug

SEQ ID NO: 1983113 - RNA, 19 nt, Homo sapiens
  misc_RNA (1)...(19): siRNA sense strand
acucucagcuacuggaaga

SEQ ID NO: 1983114 - RNA, 19 nt, Homo sapiens
  misc_RNA (1)...(19): siRNA sense strand
gaaguuuucuuuccgaagu

SEQ ID NO: 1983115 - RNA, 19 nt, Homo sapiens
  misc_RNA (1)...(19): siRNA sense strand
acagagugcgugccuauga

SEQ ID NO: 1983116 - RNA, 19 nt, Homo sapiens
  misc_RNA (1)...(19): siRNA sense strand
ggaggaagaggaagaugag

SEQ ID NO: 1983117 - RNA, 19 nt, Homo sapiens
  misc_RNA (1)...(19): siRNA sense strand
gugaccaccucgcccuuga

SEQ ID NO: 1983118 - RNA, 19 nt, Homo sapiens
  misc_RNA (1)...(19): siRNA sense strand
ucuuguggauuacaucuug

SEQ ID NO: 1983119 - RNA, 19 nt, Homo sapiens
  misc_RNA (1)...(19): siRNA sense strand
uccaagagguauuuugaua

SEQ ID NO: 1983120 - RNA, 19 nt, Homo sapiens
  misc_RNA (1)...(19): siRNA sense strand
gagaugcaugagcugcuua

SEQ ID NO: 1983121 - RNA, 19 nt, Homo sapiens
  misc_RNA (1)...(19): siRNA sense strand
agaaauuacugcuuauucc

SEQ ID NO: 1983122 - RNA, 19 nt, Homo sapiens
  misc_RNA (1)...(19): siRNA sense strand
ccacaaggauuuugauguc

SEQ ID NO: 1983123 - RNA, 19 nt, Homo sapiens
  misc_RNA (1)...(19): siRNA sense strand
cuccaaguauccaggguuu

SEQ ID NO: 1983124 - RNA, 19 nt, Homo sapiens
  misc_RNA (1)...(19): siRNA sense strand
ccaccuuugacaagaauuu

SEQ ID NO: 1983125 - RNA, 19 nt, Homo sapiens
  misc_RNA (1)...(19): siRNA sense strand
ccucuggaaugcuucuguu

SEQ ID NO: 1983126 - RNA, 19 nt, Homo sapiens
  misc_RNA (1)...(19): siRNA sense strand
aaaguggaccggccauuuc

SEQ ID NO: 1983127 - RNA, 19 nt, Homo sapiens
  misc_RNA (1)...(19): siRNA sense strand
gaacucucagcuacuggaa

SEQ ID NO: 1983128 - RNA, 19 nt, Homo sapiens
  misc_RNA (1)...(19): siRNA sense strand
agauuaauccugaaaccaa

SEQ ID NO: 1983129 - RNA, 19 nt, Homo sapiens
  misc_RNA (1)...(19): siRNA sense strand
ccaaguauccaggguuuua

SEQ ID NO: 1983130 - RNA, 19 nt, Homo sapiens
  misc_RNA (1)...(19): siRNA sense strand
cagacuugguggagacaug

SEQ ID NO: 1983131 - RNA, 19 nt, Homo sapiens
  misc_RNA (1)...(19): siRNA sense strand
caauuuauccaagagguau

SEQ ID NO: 1983132 - RNA, 19 nt, Homo sapiens
  misc_RNA (1)...(19): siRNA sense strand
ugaccuuagugaacucuca

SEQ ID NO: 1983133 - RNA, 19 nt, Homo sapiens
  misc_RNA (1)...(19): siRNA sense strand
ucaauuuauccaagaggua

SEQ ID NO: 1983134 - RNA, 19 nt, Homo sapiens
  misc_RNA (1)...(19): siRNA sense strand
ggccaugacaggcuugaug

SEQ ID NO: 1983135 - RNA, 19 nt, Homo sapiens
  misc_RNA (1)...(19): siRNA sense strand
gucagaaauuacugcuuau

SEQ ID NO: 1983136 - RNA, 19 nt, Homo sapiens
  misc_RNA (1)...(19): siRNA sense strand
ugagaugcaugagcugcuu

SEQ ID NO: 1983137 - RNA, 19 nt, Homo sapiens
  misc_RNA (1)...(19): siRNA sense strand
ggauuacaucuuguucaaa

SEQ ID NO: 1983138 - RNA, 19 nt, Homo sapiens
  misc_RNA (1)...(19): siRNA sense strand
caggaaucuugucagaaau

SEQ ID NO: 1983139 - RNA, 19 nt, Homo sapiens
  misc_RNA (1)...(19): siRNA sense strand
gagacauggcucagaaaca

SEQ ID NO: 1983140 - RNA, 19 nt, Homo sapiens
  misc_RNA (1)...(19): siRNA sense strand
aaguuugccuccaccuuug

SEQ ID NO: 1983141 - RNA, 19 nt, Homo sapiens
  misc_RNA (1)...(19): siRNA sense strand
caugaucuaugaagaaacc

SEQ ID NO: 1983142 - RNA, 19 nt, Homo sapiens
  misc_RNA (1)...(19): siRNA sense strand
ccuccaccuuugacaagaa

SEQ ID NO: 1983143 - RNA, 19 nt, Homo sapiens
  misc_RNA (1)...(19): siRNA sense strand
guggaccggccauuucauu

SEQ ID NO: 1983144 - RNA, 19 nt, Homo sapiens
  misc_RNA (1)...(19): siRNA sense strand
cuggaaugcuucuguuucu

SEQ ID NO: 1983145 - RNA, 19 nt, Homo sapiens
  misc_RNA (1)...(19): siRNA sense strand
guugucauguccucaaacu

SEQ ID NO: 1983146 - RNA, 19 nt, Homo sapiens
  misc_RNA (1)...(19): siRNA sense strand
caugccuccugucaucaaa

SEQ ID NO: 1983147 - RNA, 19 nt, Homo sapiens
  misc_RNA (1)...(19): siRNA sense strand
uacaaagaacagugauuga

SEQ ID NO: 1983148 - RNA, 19 nt, Homo sapiens
  misc_RNA (1)...(19): siRNA sense strand
ucagaaguaugagaugcau

SEQ ID NO: 1983149 - RNA, 19 nt, Homo sapiens
  misc_RNA (1)...(19): siRNA sense strand
aguucaagcuagaucagaa

SEQ ID NO: 1983150 - RNA, 19 nt, Homo sapiens
  misc_RNA (1)...(19): siRNA sense strand
ggagacauggcucagaaac

SEQ ID NO: 1983151 - RNA, 19 nt, Homo sapiens
  misc_RNA (1)...(19): siRNA sense strand
gaaguucaagcuagaucag

SEQ ID NO: 1983152 - RNA, 19 nt, Homo sapiens
  misc_RNA (1)...(19): siRNA sense strand
gcaguggcaggaaucuugu

SEQ ID NO: 1983153 - RNA, 19 nt, Homo sapiens
  misc_RNA (1)...(19): siRNA sense strand
cuccugccuucccucuuua

SEQ ID NO: 1983154 - RNA, 19 nt, Homo sapiens
  misc_RNA (1)...(19): siRNA sense strand
ucaagcuagaucagaagua

SEQ ID NO: 1983155 - RNA, 19 nt, Homo sapiens
  misc_RNA (1)...(19): siRNA sense strand
uuuaagggacucagagaga

SEQ ID NO: 1983156 - RNA, 19 nt, Homo sapiens
  misc_RNA (1)...(19): siRNA sense strand
cuaccugaccacagacuug

SEQ ID NO: 1983157 - RNA, 19 nt, Homo sapiens
  misc_RNA (1)...(19): siRNA sense strand
acugaaacccagaucaaga

SEQ ID NO: 1983158 - RNA, 19 nt, Homo sapiens
  misc_RNA (1)...(19): siRNA sense strand
gaugggaaucagaagaauc

SEQ ID NO: 1983159 - RNA, 19 nt, Homo sapiens
  misc_RNA (1)...(19): siRNA sense strand
gccacagggccgacugaaa

SEQ ID NO: 1983160 - RNA, 19 nt, Homo sapiens
  misc_RNA (1)...(19): siRNA sense strand
ggaaugggaucuaaucuaa

SEQ ID NO: 1983161 - RNA, 19 nt, Homo sapiens
  misc_RNA (1)...(19): siRNA sense strand
aaacaaagcaguccuauaa

SEQ ID NO: 1983162 - RNA, 19 nt, Homo sapiens
  misc_RNA (1)...(19): siRNA sense strand
ggcaguagaucauggaaua

SEQ ID NO: 1983163 - RNA, 19 nt, Homo sapiens
  misc_RNA (1)...(19): siRNA sense strand
caaacgagcuugucagaag

SEQ ID NO: 1983164 - RNA, 19 nt, Homo sapiens
  misc_RNA (1)...(19): siRNA sense strand
gagcaugugugucggauau

SEQ ID NO: 1983165 - RNA, 19 nt, Homo sapiens
  misc_RNA (1)...(19): siRNA sense strand
ccaacagacucuuauguga

SEQ ID NO: 1983166 - RNA, 19 nt, Homo sapiens
  misc_RNA (1)...(19): siRNA sense strand
gaaacaaagcaguccuaua

SEQ ID NO: 1983167 - RNA, 19 nt, Homo sapiens
  misc_RNA (1)...(19): siRNA sense strand
caaggaguauaaacaugua

SEQ ID NO: 1983168 - RNA, 19 nt, Homo sapiens
  misc_RNA (1)...(19): siRNA sense strand
gcucucggcuggcagaauu

SEQ ID NO: 1983169 - RNA, 19 nt, Homo sapiens
  misc_RNA (1)...(19): siRNA sense strand
gaaacaagaggaaacuaga

SEQ ID NO: 1983170 - RNA, 19 nt, Homo sapiens
  misc_RNA (1)...(19): siRNA sense strand
cagaaaggguggacacaga

SEQ ID NO: 1983171 - RNA, 19 nt, Homo sapiens
  misc_RNA (1)...(19): siRNA sense strand
cagaauuccucccugcuuu

SEQ ID NO: 1983172 - RNA, 19 nt, Homo sapiens
  misc_RNA (1)...(19): siRNA sense strand
gagccugacuucucccaaa

SEQ ID NO: 1983173 - RNA, 19 nt, Homo sapiens
  misc_RNA (1)...(19): siRNA sense strand
ccaaagccaaggaguauaa

SEQ ID NO: 1983174 - RNA, 19 nt, Homo sapiens
  misc_RNA (1)...(19): siRNA sense strand
caaagcaguccuauaaaga

SEQ ID NO: 1983175 - RNA, 19 nt, Homo sapiens
  misc_RNA (1)...(19): siRNA sense strand
gcaccauacuggcuagaga

SEQ ID NO: 1983176 - RNA, 19 nt, Homo sapiens
  misc_RNA (1)...(19): siRNA sense strand
ggacacagauuuuaugcaa

SEQ ID NO: 1983177 - RNA, 19 nt, Homo sapiens
  misc_RNA (1)...(19): siRNA sense strand
gcaguccuauaaagagaaa

SEQ ID NO: 1983178 - RNA, 19 nt, Homo sapiens
  misc_RNA (1)...(19): siRNA sense strand
uaggugaaauugaguguga

SEQ ID NO: 1983179 - RNA, 19 nt, Homo sapiens
  misc_RNA (1)...(19): siRNA sense strand
caacagacucuuaugugaa

SEQ ID NO: 1983180 - RNA, 19 nt, Homo sapiens
  misc_RNA (1)...(19): siRNA sense strand
gaccacaagauucaguuua

SEQ ID NO: 1983181 - RNA, 19 nt, Homo sapiens
  misc_RNA (1)...(19): siRNA sense strand
acaaagcaguccuauaaag

SEQ ID NO: 1983182 - RNA, 19 nt, Homo sapiens
  misc_RNA (1)...(19): siRNA sense strand
cauacuggcuagagaaugu

SEQ ID NO: 1983183 - RNA, 19 nt, Homo sapiens
  misc_RNA (1)...(19): siRNA sense strand
gcaugugugucggauauau

SEQ ID NO: 1983184 - RNA, 19 nt, Homo sapiens
  misc_RNA (1)...(19): siRNA sense strand
gaaacgaggaggcuuugug

SEQ ID NO: 1983185 - RNA, 19 nt, Homo sapiens
  misc_RNA (1)...(19): siRNA sense strand
gaaaaugacucaggcacuu

SEQ ID NO: 1983186 - RNA, 19 nt, Homo sapiens
  misc_RNA (1)...(19): siRNA sense strand
agaagacaaucaagugaga

SEQ ID NO: 1983187 - RNA, 19 nt, Homo sapiens
  misc_RNA (1)...(19): siRNA sense strand
gaaacuagagcuggcagaa

SEQ ID NO: 1983188 - RNA, 19 nt, Homo sapiens
  misc_RNA (1)...(19): siRNA sense strand
gaaaggguggacacagauu

SEQ ID NO: 1983189 - RNA, 19 nt, Homo sapiens
  misc_RNA (1)...(19): siRNA sense strand
gagaaggagccuacagaug

SEQ ID NO: 1983190 - RNA, 19 nt, Homo sapiens
  misc_RNA (1)...(19): siRNA sense strand
gcaggaaugggaucuaauc

SEQ ID NO: 1983191 - RNA, 19 nt, Homo sapiens
  misc_RNA (1)...(19): siRNA sense strand
aauaacagccaaagaguug

SEQ ID NO: 1983192 - RNA, 19 nt, Homo sapiens
  misc_RNA (1)...(19): siRNA sense strand
gccaaggaguauaaacaug

SEQ ID NO: 1983193 - RNA, 19 nt, Homo sapiens
  misc_RNA (1)...(19): siRNA sense strand
ccggugcucuugcaacuga

SEQ ID NO: 1983194 - RNA, 19 nt, Homo sapiens
  misc_RNA (1)...(19): siRNA sense strand
gguaggcgcugugguugug

SEQ ID NO: 1983195 - RNA, 19 nt, Homo sapiens
  misc_RNA (1)...(19): siRNA sense strand
gcaggugcagguuaucauu

SEQ ID NO: 1983196 - RNA, 19 nt, Homo sapiens
  misc_RNA (1)...(19): siRNA sense strand
gaaugggaucuaaucuaaa

SEQ ID NO: 1983197 - RNA, 19 nt, Homo sapiens
  misc_RNA (1)...(19): siRNA sense strand
gguuucggcugguaaaaua

SEQ ID NO: 1983198 - RNA, 19 nt, Homo sapiens
  misc_RNA (1)...(19): siRNA sense strand
gaaagccaagacucacauu

SEQ ID NO: 1983199 - RNA, 19 nt, Homo sapiens
  misc_RNA (1)...(19): siRNA sense strand
aaagaagacaaucaaguga

SEQ ID NO: 1983200 - RNA, 19 nt, Homo sapiens
  misc_RNA (1)...(19): siRNA sense strand
ccaaggaguauaaacaugu

SEQ ID NO: 1983201 - RNA, 19 nt, Homo sapiens
  misc_RNA (1)...(19): siRNA sense strand
ggagaaggagccuacagau

SEQ ID NO: 1983202 - RNA, 19 nt, Homo sapiens
  misc_RNA (1)...(19): siRNA sense strand
caccuuuccuugccaguga

SEQ ID NO: 1983203 - RNA, 19 nt, Homo sapiens
  misc_RNA (1)...(19): siRNA sense strand
gaaaauacuggagcucaua

SEQ ID NO: 1983204 - RNA, 19 nt, Homo sapiens
  misc_RNA (1)...(19): siRNA sense strand
cagcacugguggaacuuga

SEQ ID NO: 1983205 - RNA, 19 nt, Homo sapiens
  misc_RNA (1)...(19): siRNA sense strand
cgacggagagcaugugugu

SEQ ID NO: 1983206 - RNA, 19 nt, Homo sapiens
  misc_RNA (1)...(19): siRNA sense strand
caucaugaccacaagauuc

SEQ ID NO: 1983207 - RNA, 19 nt, Homo sapiens
  misc_RNA (1)...(19): siRNA sense strand
gaucauggaauacccucuu

SEQ ID NO: 1983208 - RNA, 19 nt, Homo sapiens
  misc_RNA (1)...(19): siRNA sense strand
ggaaacaaagcaguccuau

SEQ ID NO: 1983209 - RNA, 19 nt, Homo sapiens
  misc_RNA (1)...(19): siRNA sense strand
gaaaagaagacaaucaagu

SEQ ID NO: 1983210 - RNA, 19 nt, Homo sapiens
  misc_RNA (1)...(19): siRNA sense strand
aagcaguccuauaaagaga

SEQ ID NO: 1983211 - RNA, 19 nt, Homo sapiens
  misc_RNA (1)...(19): siRNA sense strand
cagugaagauggcgugcuu

SEQ ID NO: 1983212 - RNA, 19 nt, Homo sapiens
  misc_RNA (1)...(19): siRNA sense strand
caagugagaaggaaaauga

SEQ ID NO: 1983213 - RNA, 19 nt, Homo sapiens
  misc_RNA (1)...(19): siRNA sense strand
gcaaacgagcuugucagaa

SEQ ID NO: 1983214 - RNA, 19 nt, Homo sapiens
  misc_RNA (1)...(19): siRNA sense strand
gacaaucaagugagaagga

SEQ ID NO: 1983215 - RNA, 19 nt, Homo sapiens
  misc_RNA (1)...(19): siRNA sense strand
acaaucaagugagaaggaa

SEQ ID NO: 1983216 - RNA, 19 nt, Homo sapiens
  misc_RNA (1)...(19): siRNA sense strand
ugucagaaggcaauugaaa

SEQ ID NO: 1983217 - RNA, 19 nt, Homo sapiens
  misc_RNA (1)...(19): siRNA sense strand
agccaagacucacauuuca

SEQ ID NO: 1983218 - RNA, 19 nt, Homo sapiens
  misc_RNA (1)...(19): siRNA sense strand
gagcuugucagaaggcaau

SEQ ID NO: 1983219 - RNA, 19 nt, Homo sapiens
  misc_RNA (1)...(19): siRNA sense strand
ggaaagccaagacucacau

SEQ ID NO: 1983220 - RNA, 19 nt, Homo sapiens
  misc_RNA (1)...(19): siRNA sense strand
gaagacaaucaagugagaa

SEQ ID NO: 1983221 - RNA, 19 nt, Homo sapiens
  misc_RNA (1)...(19): siRNA sense strand
gagaaacgaggaggcuuug

SEQ ID NO: 1983222 - RNA, 19 nt, Homo sapiens
  misc_RNA (1)...(19): siRNA sense strand
gccaacagacucuuaugug

SEQ ID NO: 1983223 - RNA, 19 nt, Homo sapiens
  misc_RNA (1)...(19): siRNA sense strand
ugguggaacuugaggauuc

SEQ ID NO: 1983224 - RNA, 19 nt, Homo sapiens
  misc_RNA (1)...(19): siRNA sense strand
aacuagagcuggcagaaag

SEQ ID NO: 1983225 - RNA, 19 nt, Homo sapiens
  misc_RNA (1)...(19): siRNA sense strand
gaggaggcuuuguguuggu

SEQ ID NO: 1983226 - RNA, 19 nt, Homo sapiens
  misc_RNA (1)...(19): siRNA sense strand
ccaagacucacauuucaag

SEQ ID NO: 1983227 - RNA, 19 nt, Homo sapiens
  misc_RNA (1)...(19): siRNA sense strand
agagaaacgaggaggcuuu

SEQ ID NO: 1983228 - RNA, 19 nt, Homo sapiens
  misc_RNA (1)...(19): siRNA sense strand
ucaguuuagcugcauuuaa

SEQ ID NO: 1983229 - RNA, 19 nt, Homo sapiens
  misc_RNA (1)...(19): siRNA sense strand
ggaucuaaucuaaaucugu

SEQ ID NO: 1983230 - RNA, 19 nt, Homo sapiens
  misc_RNA (1)...(19): siRNA sense strand
aaauaacagccaaagaguu

SEQ ID NO: 1983231 - RNA, 19 nt, Homo sapiens
  misc_RNA (1)...(19): siRNA sense strand
guuuaucaguucaccuuuc

SEQ ID NO: 1983232 - RNA, 19 nt, Homo sapiens
  misc_RNA (1)...(19): siRNA sense strand
ucuguuaggugaaauugag

SEQ ID NO: 1983233 - RNA, 19 nt, Homo sapiens
  misc_RNA (1)...(19): siRNA sense strand
ccagcauaauggauggaaa

SEQ ID NO: 1983234 - RNA, 19 nt, Homo sapiens
  misc_RNA (1)...(19): siRNA sense strand
acucacauuucaagacuuc

SEQ ID NO: 1983235 - RNA, 19 nt, Homo sapiens
  misc_RNA (1)...(19): siRNA sense strand
agacucacauuucaagacu

SEQ ID NO: 1983236 - RNA, 19 nt, Homo sapiens
  misc_RNA (1)...(19): siRNA sense strand
aaacgaggaggcuuugugu

SEQ ID NO: 1983237 - RNA, 19 nt, Homo sapiens
  misc_RNA (1)...(19): siRNA sense strand
aacagacucuuaugugaag

SEQ ID NO: 1983238 - RNA, 19 nt, Homo sapiens
  misc_RNA (1)...(19): siRNA sense strand
acgaggaggcuuuguguug

SEQ ID NO: 1983239 - RNA, 19 nt, Homo sapiens
  misc_RNA (1)...(19): siRNA sense strand
caaaauaagcagacacuuc

SEQ ID NO: 1983240 - RNA, 19 nt, Homo sapiens
  misc_RNA (1)...(19): siRNA sense strand
aaacuagagcuggcagaaa

SEQ ID NO: 1983241 - RNA, 19 nt, Homo sapiens
  misc_RNA (1)...(19): siRNA sense strand
aauccaaagccaaggagua

SEQ ID NO: 1983242 - RNA, 19 nt, Homo sapiens
  misc_RNA (1)...(19): siRNA sense strand
aaaggguggacacagauuu

SEQ ID NO: 1983243 - RNA, 19 nt, Homo sapiens
  misc_RNA (1)...(19): siRNA sense strand
uaaaauaacagccaaagag

SEQ ID NO: 1983244 - RNA, 19 nt, Homo sapiens
  misc_RNA (1)...(19): siRNA sense strand
ccuaacaucaugaccacaa

SEQ ID NO: 1983245 - RNA, 19 nt, Homo sapiens
  misc_RNA (1)...(19): siRNA sense strand
ggcuuggccuugaaacauc

SEQ ID NO: 1983246 - RNA, 19 nt, Homo sapiens
  misc_RNA (1)...(19): siRNA sense strand
gaccacgaagggaauguug

SEQ ID NO: 1983247 - RNA, 19 nt, Homo sapiens
  misc_RNA (1)...(19): siRNA sense strand
agaaacaagaggaaacuag

SEQ ID NO: 1983248 - RNA, 19 nt, Homo sapiens
  misc_RNA (1)...(19): siRNA sense strand
accacaagauucaguuuag

SEQ ID NO: 1983249 - RNA, 19 nt, Homo sapiens
  misc_RNA (1)...(19): siRNA sense strand
uaacaucaugaccacaaga

SEQ ID NO: 1983250 - RNA, 19 nt, Homo sapiens
  misc_RNA (1)...(19): siRNA sense strand
augcaggaaugggaucuaa

SEQ ID NO: 1983251 - RNA, 19 nt, Homo sapiens
  misc_RNA (1)...(19): siRNA sense strand
aagccaagacucacauuuc

SEQ ID NO: 1983252 - RNA, 19 nt, Homo sapiens
  misc_RNA (1)...(19): siRNA sense strand
caaagccaaggaguauaaa

SEQ ID NO: 1983253 - RNA, 19 nt, Homo sapiens
  misc_RNA (1)...(19): siRNA sense strand
ucucagguuucggcuggua

SEQ ID NO: 1983254 - RNA, 19 nt, Homo sapiens
  misc_RNA (1)...(19): siRNA sense strand
gugcagguuaucauucuga

SEQ ID NO: 1983255 - RNA, 19 nt, Homo sapiens
  misc_RNA (1)...(19): siRNA sense strand
aaagccaagacucacauuu

SEQ ID NO: 1983256 - RNA, 19 nt, Homo sapiens
  misc_RNA (1)...(19): siRNA sense strand
ggaccacgaagggaauguu

SEQ ID NO: 1983257 - RNA, 19 nt, Homo sapiens
  misc_RNA (1)...(19): siRNA sense strand
caaagaguuggaaacaaag

SEQ ID NO: 1983258 - RNA, 19 nt, Homo sapiens
  misc_RNA (1)...(19): siRNA sense strand
gggaaagccaagacucaca

SEQ ID NO: 1983259 - RNA, 19 nt, Homo sapiens
  misc_RNA (1)...(19): siRNA sense strand
ggccggugcucuugcaacu

SEQ ID NO: 1983260 - RNA, 19 nt, Homo sapiens
  misc_RNA (1)...(19): siRNA sense strand
gaaacaaguucaagaagaa

SEQ ID NO: 1983261 - RNA, 19 nt, Homo sapiens
  misc_RNA (1)...(19): siRNA sense strand
guaaagcucugaaggauga

SEQ ID NO: 1983262 - RNA, 19 nt, Homo sapiens
  misc_RNA (1)...(19): siRNA sense strand
guugaagaaugcugaaaua

SEQ ID NO: 1983263 - RNA, 19 nt, Homo sapiens
  misc_RNA (1)...(19): siRNA sense strand
gaagaaugcugaaauagcu

SEQ ID NO: 1983264 - RNA, 19 nt, Homo sapiens
  misc_RNA (1)...(19): siRNA sense strand
caacuucagucuauucaug

SEQ ID NO: 1983265 - RNA, 19 nt, Homo sapiens
  misc_RNA (1)...(19): siRNA sense strand
caauaaaccugcagcaucu

SEQ ID NO: 1983266 - RNA, 19 nt, Homo sapiens
  misc_RNA (1)...(19): siRNA sense strand
ugaagcagcuccugucguu

SEQ ID NO: 1983267 - RNA, 19 nt, Homo sapiens
  misc_RNA (1)...(19): siRNA sense strand
gcagaaacaaguucaagaa

SEQ ID NO: 1983268 - RNA, 19 nt, Homo sapiens
  misc_RNA (1)...(19): siRNA sense strand
gaacaagaccagaggauag

SEQ ID NO: 1983269 - RNA, 19 nt, Homo sapiens
  misc_RNA (1)...(19): siRNA sense strand
caacaggccucucuuuagg

SEQ ID NO: 1983270 - RNA, 19 nt, Homo sapiens
  misc_RNA (1)...(19): siRNA sense strand
agaaacaaguucaagaaga

SEQ ID NO: 1983271 - RNA, 19 nt, Homo sapiens
  misc_RNA (1)...(19): siRNA sense strand
gcucaggaguugaagaaug

SEQ ID NO: 1983272 - RNA, 19 nt, Homo sapiens
  misc_RNA (1)...(19): siRNA sense strand
uucaguagcuccucagaua

SEQ ID NO: 1983273 - RNA, 19 nt, Homo sapiens
  misc_RNA (1)...(19): siRNA sense strand
cggcacaacuucagucuau

SEQ ID NO: 1983274 - RNA, 19 nt, Homo sapiens
  misc_RNA (1)...(19): siRNA sense strand
gaaucuugguucagcaauu

SEQ ID NO: 1983275 - RNA, 19 nt, Homo sapiens
  misc_RNA (1)...(19): siRNA sense strand
ccaauggaauacagagaaa

SEQ ID NO: 1983276 - RNA, 19 nt, Homo sapiens
  misc_RNA (1)...(19): siRNA sense strand
cagaacacacccagaguua

SEQ ID NO: 1983277 - RNA, 19 nt, Homo sapiens
  misc_RNA (1)...(19): siRNA sense strand
ggaacaagaccagaggaua

SEQ ID NO: 1983278 - RNA, 19 nt, Homo sapiens
  misc_RNA (1)...(19): siRNA sense strand
gcagcagauugaagaacua

SEQ ID NO: 1983279 - RNA, 19 nt, Homo sapiens
  misc_RNA (1)...(19): siRNA sense strand
gagcagaagccaagaagug

SEQ ID NO: 1983280 - RNA, 19 nt, Homo sapiens
  misc_RNA (1)...(19): siRNA sense strand
gagaugcuguugauguguu

SEQ ID NO: 1983281 - RNA, 19 nt, Homo sapiens
  misc_RNA (1)...(19): siRNA sense strand
caccuggacuucaacauga

SEQ ID NO: 1983282 - RNA, 19 nt, Homo sapiens
  misc_RNA (1)...(19): siRNA sense strand
gcagauugaagaacuagaa

SEQ ID NO: 1983283 - RNA, 19 nt, Homo sapiens
  misc_RNA (1)...(19): siRNA sense strand
acaacaggcuucaguuuag

SEQ ID NO: 1983284 - RNA, 19 nt, Homo sapiens
  misc_RNA (1)...(19): siRNA sense strand
gaagacaccaccuggacuu

SEQ ID NO: 1983285 - RNA, 19 nt, Homo sapiens
  misc_RNA (1)...(19): siRNA sense strand
gcugaaauagcuuuaagaa

SEQ ID NO: 1983286 - RNA, 19 nt, Homo sapiens
  misc_RNA (1)...(19): siRNA sense strand
caucaggacuuggacagaa

SEQ ID NO: 1983287 - RNA, 19 nt, Homo sapiens
  misc_RNA (1)...(19): siRNA sense strand
gggagaugcuguugaugug

SEQ ID NO: 1983288 - RNA, 19 nt, Homo sapiens
  misc_RNA (1)...(19): siRNA sense strand
gcagaacacacccagaguu

SEQ ID NO: 1983289 - RNA, 19 nt, Homo sapiens
  misc_RNA (1)...(19): siRNA sense strand
uacaacaggcuucaguuua

SEQ ID NO: 1983290 - RNA, 19 nt, Homo sapiens
  misc_RNA (1)...(19): siRNA sense strand
gcacaacuucagucuauuc

SEQ ID NO: 1983291 - RNA, 19 nt, Homo sapiens
  misc_RNA (1)...(19): siRNA sense strand
ugaaggccuuggugguaua

SEQ ID NO: 1983292 - RNA, 19 nt, Homo sapiens
  misc_RNA (1)...(19): siRNA sense strand
gaacuacagcagcuacuuc

SEQ ID NO: 1983293 - RNA, 19 nt, Homo sapiens
  misc_RNA (1)...(19): siRNA sense strand
gcaacuacaucugcuccuu

SEQ ID NO: 1983294 - RNA, 19 nt, Homo sapiens
  misc_RNA (1)...(19): siRNA sense strand
aggaacaaauacaggaaua

SEQ ID NO: 1983295 - RNA, 19 nt, Homo sapiens
  misc_RNA (1)...(19): siRNA sense strand
gaacacacccagaguuacu

SEQ ID NO: 1983296 - RNA, 19 nt, Homo sapiens
  misc_RNA (1)...(19): siRNA sense strand
gaacgggagcgucuagcaa

SEQ ID NO: 1983297 - RNA, 19 nt, Homo sapiens
  misc_RNA (1)...(19): siRNA sense strand
ggaaaucuuggaaguacuu

SEQ ID NO: 1983298 - RNA, 19 nt, Homo sapiens
  misc_RNA (1)...(19): siRNA sense strand
ggacaacagccacaacuac

SEQ ID NO: 1983299 - RNA, 19 nt, Homo sapiens
  misc_RNA (1)...(19): siRNA sense strand
aaucuugguucagcaauuu

SEQ ID NO: 1983300 - RNA, 19 nt, Homo sapiens
  misc_RNA (1)...(19): siRNA sense strand
ccauuugcucuaccuauua

SEQ ID NO: 1983301 - RNA, 19 nt, Homo sapiens
  misc_RNA (1)...(19): siRNA sense strand
gucaauggcuaugcagaaa

SEQ ID NO: 1983302 - RNA, 19 nt, Homo sapiens
  misc_RNA (1)...(19): siRNA sense strand
agguacagcuucagcagua

SEQ ID NO: 1983303 - RNA, 19 nt, Homo sapiens
  misc_RNA (1)...(19): siRNA sense strand
gaagauauuaaagcucuga

SEQ ID NO: 1983304 - RNA, 19 nt, Homo sapiens
  misc_RNA (1)...(19): siRNA sense strand
ggacuuggacagaaugcuu

SEQ ID NO: 1983305 - RNA, 19 nt, Homo sapiens
  misc_RNA (1)...(19): siRNA sense strand
ugaaggagcagaaacaagu

SEQ ID NO: 1983306 - RNA, 19 nt, Homo sapiens
  misc_RNA (1)...(19): siRNA sense strand
caagaccagaggauaguaa

SEQ ID NO: 1983307 - RNA, 19 nt, Homo sapiens
  misc_RNA (1)...(19): siRNA sense strand
gaaggagcagaaacaaguu

SEQ ID NO: 1983308 - RNA, 19 nt, Homo sapiens
  misc_RNA (1)...(19): siRNA sense strand
caacuauaacuacaggauu

SEQ ID NO: 1983309 - RNA, 19 nt, Homo sapiens
  misc_RNA (1)...(19): siRNA sense strand
gaaacaaggcgagcagaag

SEQ ID NO: 1983310 - RNA, 19 nt, Homo sapiens
  misc_RNA (1)...(19): siRNA sense strand
gacaccaccuggacuucaa

SEQ ID NO: 1983311 - RNA, 19 nt, Homo sapiens
  misc_RNA (1)...(19): siRNA sense strand
cuacaacaggcuucaguuu

SEQ ID NO: 1983312 - RNA, 19 nt, Homo sapiens
  misc_RNA (1)...(19): siRNA sense strand
uaguaaagcucugaaggau

SEQ ID NO: 1983313 - RNA, 19 nt, Homo sapiens
  misc_RNA (1)...(19): siRNA sense strand
cuacuggacccacuccuuu

SEQ ID NO: 1983314 - RNA, 19 nt, Homo sapiens
  misc_RNA (1)...(19): siRNA sense strand
uccacaggauuuacucuaa

SEQ ID NO: 1983315 - RNA, 19 nt, Homo sapiens
  misc_RNA (1)...(19): siRNA sense strand
aaaucuaccuccugucauc

SEQ ID NO: 1983316 - RNA, 19 nt, Homo sapiens
  misc_RNA (1)...(19): siRNA sense strand
gaaaaucuaccuccuguca

SEQ ID NO: 1983317 - RNA, 19 nt, Homo sapiens
  misc_RNA (1)...(19): siRNA sense strand
caucaacaggccucucuuu

SEQ ID NO: 1983318 - RNA, 19 nt, Homo sapiens
  misc_RNA (1)...(19): siRNA sense strand
ggaggaacaaauacaggaa

SEQ ID NO: 1983319 - RNA, 19 nt, Homo sapiens
  misc_RNA (1)...(19): siRNA sense strand
ugccauggcugcaacacuu

SEQ ID NO: 1983320 - RNA, 19 nt, Homo sapiens
  misc_RNA (1)...(19): siRNA sense strand
auguaaagguucugaaaga

SEQ ID NO: 1983321 - RNA, 19 nt, Homo sapiens
  misc_RNA (1)...(19): siRNA sense strand
ccacucaagcaaauaauuc

SEQ ID NO: 1983322 - RNA, 19 nt, Homo sapiens
  misc_RNA (1)...(19): siRNA sense strand
acaggaacaucaggacuug

SEQ ID NO: 1983323 - RNA, 19 nt, Homo sapiens
  misc_RNA (1)...(19): siRNA sense strand
gaacaguaccuuggcuaca

SEQ ID NO: 1983324 - RNA, 19 nt, Homo sapiens
  misc_RNA (1)...(19): siRNA sense strand
acaaauacaggaauagcaa

SEQ ID NO: 1983325 - RNA, 19 nt, Homo sapiens
  misc_RNA (1)...(19): siRNA sense strand
ccucaagauuugucaaugg

SEQ ID NO: 1983326 - RNA, 19 nt, Homo sapiens
  misc_RNA (1)...(19): siRNA sense strand
gcaauuugagguacagcuu

SEQ ID NO: 1983327 - RNA, 19 nt, Homo sapiens
  misc_RNA (1)...(19): siRNA sense strand
caguagcuccucagauaaa

SEQ ID NO: 1983328 - RNA, 19 nt, Homo sapiens
  misc_RNA (1)...(19): siRNA sense strand
gaacgccagccacuacauc

SEQ ID NO: 1983329 - RNA, 19 nt, Homo sapiens
  misc_RNA (1)...(19): siRNA sense strand
gaacaaauacaggaauagc

SEQ ID NO: 1983330 - RNA, 19 nt, Homo sapiens
  misc_RNA (1)...(19): siRNA sense strand
gaaugcugaaauagcuuua

SEQ ID NO: 1983331 - RNA, 19 nt, Homo sapiens
  misc_RNA (1)...(19): siRNA sense strand
agaaacacucucaacauug

SEQ ID NO: 1983332 - RNA, 19 nt, Homo sapiens
  misc_RNA (1)...(19): siRNA sense strand
gccaauggaauacagagaa

SEQ ID NO: 1983333 - RNA, 19 nt, Homo sapiens
  misc_RNA (1)...(19): siRNA sense strand
acucuaggaggaacaaaua

SEQ ID NO: 1983334 - RNA, 19 nt, Homo sapiens
  misc_RNA (1)...(19): siRNA sense strand
ucaacaggccucucuuuag

SEQ ID NO: 1983335 - RNA, 19 nt, Homo sapiens
  misc_RNA (1)...(19): siRNA sense strand
gacaacagccacaacuaca

SEQ ID NO: 1983336 - RNA, 19 nt, Homo sapiens
  misc_RNA (1)...(19): siRNA sense strand
ggugguauagauuucagua

SEQ ID NO: 1983337 - RNA, 19 nt, Homo sapiens
  misc_RNA (1)...(19): siRNA sense strand
cagaaugcuuuaggguuga

SEQ ID NO: 1983338 - RNA, 19 nt, Homo sapiens
  misc_RNA (1)...(19): siRNA sense strand
acaggaauagcaacaacua

SEQ ID NO: 1983339 - RNA, 19 nt, Homo sapiens
  misc_RNA (1)...(19): siRNA sense strand
gcuuuaggguugacuuugg

SEQ ID NO: 1983340 - RNA, 19 nt, Homo sapiens
  misc_RNA (1)...(19): siRNA sense strand
gcuagcggucugacucuuu

SEQ ID NO: 1983341 - RNA, 19 nt, Homo sapiens
  misc_RNA (1)...(19): siRNA sense strand
gggacaacagccacaacua

SEQ ID NO: 1983342 - RNA, 19 nt, Homo sapiens
  misc_RNA (1)...(19): siRNA sense strand
gccacuggguucacucuag

SEQ ID NO: 1983343 - RNA, 19 nt, Homo sapiens
  misc_RNA (1)...(19): siRNA sense strand
ggcagcagauugaagaacu

SEQ ID NO: 1983344 - RNA, 19 nt, Homo sapiens
  misc_RNA (1)...(19): siRNA sense strand
ccaccuggacuucaacaug

SEQ ID NO: 1983345 - RNA, 19 nt, Homo sapiens
  misc_RNA (1)...(19): siRNA sense strand
caacaggcuucaguuuagg

SEQ ID NO: 1983346 - RNA, 19 nt, Homo sapiens
  misc_RNA (1)...(19): siRNA sense strand
ggguugacuuugggaacua

SEQ ID NO: 1983347 - RNA, 19 nt, Homo sapiens
  misc_RNA (1)...(19): siRNA sense strand
cagcaucugccacaccauu

SEQ ID NO: 1983348 - RNA, 19 nt, Homo sapiens
  misc_RNA (1)...(19): siRNA sense strand
caacuacaacugcaucaac

SEQ ID NO: 1983349 - RNA, 19 nt, Homo sapiens
  misc_RNA (1)...(19): siRNA sense strand
ugaaacaaggcgagcagaa

SEQ ID NO: 1983350 - RNA, 19 nt, Homo sapiens
  misc_RNA (1)...(19): siRNA sense strand
gguauagauuucaguagcu

SEQ ID NO: 1983351 - RNA, 19 nt, Homo sapiens
  misc_RNA (1)...(19): siRNA sense strand
aaugaaggccuugguggua

SEQ ID NO: 1983352 - RNA, 19 nt, Homo sapiens
  misc_RNA (1)...(19): siRNA sense strand
guacaaacacaggaacauc

SEQ ID NO: 1983353 - RNA, 19 nt, Homo sapiens
  misc_RNA (1)...(19): siRNA sense strand
gguuugggagguucacuuu

SEQ ID NO: 1983354 - RNA, 19 nt, Homo sapiens
  misc_RNA (1)...(19): siRNA sense strand
uauaaccccucaagauuug

SEQ ID NO: 1983355 - RNA, 19 nt, Homo sapiens
  misc_RNA (1)...(19): siRNA sense strand
cauauaaccccucaagauu

SEQ ID NO: 1983356 - RNA, 19 nt, Homo sapiens
  misc_RNA (1)...(19): siRNA sense strand
gcuuuaagaacccagaaga

SEQ ID NO: 1983357 - RNA, 19 nt, Homo sapiens
  misc_RNA (1)...(19): siRNA sense strand
gaggauaguaaagcucuga

SEQ ID NO: 1983358 - RNA, 19 nt, Homo sapiens
  misc_RNA (1)...(19): siRNA sense strand
gccacuacaucugcagcua

SEQ ID NO: 1983359 - RNA, 19 nt, Homo sapiens
  misc_RNA (1)...(19): siRNA sense strand
ucaguagcuccucagauaa

SEQ ID NO: 1983360 - RNA, 19 nt, Homo sapiens
  misc_RNA (1)...(19): siRNA sense strand
gaaacaaguucaagaagaa

SEQ ID NO: 1983361 - RNA, 19 nt, Homo sapiens
  misc_RNA (1)...(19): siRNA sense strand
guaaagcucugaaggauga

SEQ ID NO: 1983362 - RNA, 19 nt, Homo sapiens
  misc_RNA (1)...(19): siRNA sense strand
guugaagaaugcugaaaua

SEQ ID NO: 1983363 - RNA, 19 nt, Homo sapiens
  misc_RNA (1)...(19): siRNA sense strand
gaagaaugcugaaauagcu

SEQ ID NO: 1983364 - RNA, 19 nt, Homo sapiens
  misc_RNA (1)...(19): siRNA sense strand
caacuucagucuauucaug

SEQ ID NO: 1983365 - RNA, 19 nt, Homo sapiens
  misc_RNA (1)...(19): siRNA sense strand
caauaaaccugcagcaucu

SEQ ID NO: 1983366 - RNA, 19 nt, Homo sapiens
  misc_RNA (1)...(19): siRNA sense strand
ugaagcagcuccugucguu

SEQ ID NO: 1983367 - RNA, 19 nt, Homo sapiens
  misc_RNA (1)...(19): siRNA sense strand
gcagaaacaaguucaagaa

SEQ ID NO: 1983368 - RNA, 19 nt, Homo sapiens
  misc_RNA (1)...(19): siRNA sense strand
gaacaagaccagaggauag

SEQ ID NO: 1983369 - RNA, 19 nt, Homo sapiens
  misc_RNA (1)...(19): siRNA sense strand
caacaggccucucuuuagg

SEQ ID NO: 1983370 - RNA, 19 nt, Homo sapiens
  misc_RNA (1)...(19): siRNA sense strand
agaaacaaguucaagaaga

SEQ ID NO: 1983371 - RNA, 19 nt, Homo sapiens
  misc_RNA (1)...(19): siRNA sense strand
gcucaggaguugaagaaug

SEQ ID NO: 1983372 - RNA, 19 nt, Homo sapiens
  misc_RNA (1)...(19): siRNA sense strand
uucaguagcuccucagaua

SEQ ID NO: 1983373 - RNA, 19 nt, Homo sapiens
  misc_RNA (1)...(19): siRNA sense strand
cggcacaacuucagucuau

SEQ ID NO: 1983374 - RNA, 19 nt, Homo sapiens
  misc_RNA (1)...(19): siRNA sense strand
gaaucuugguucagcaauu

SEQ ID NO: 1983375 - RNA, 19 nt, Homo sapiens
  misc_RNA (1)...(19): siRNA sense strand
ccaauggaauacagagaaa

SEQ ID NO: 1983376 - RNA, 19 nt, Homo sapiens
  misc_RNA (1)...(19): siRNA sense strand
cagaacacacccagaguua

SEQ ID NO: 1983377 - RNA, 19 nt, Homo sapiens
  misc_RNA (1)...(19): siRNA sense strand
ggaacaagaccagaggaua

SEQ ID NO: 1983378 - RNA, 19 nt, Homo sapiens
  misc_RNA (1)...(19): siRNA sense strand
gcagcagauugaagaacua

SEQ ID NO: 1983379 - RNA, 19 nt, Homo sapiens
  misc_RNA (1)...(19): siRNA sense strand
gagcagaagccaagaagug

SEQ ID NO: 1983380 - RNA, 19 nt, Homo sapiens
  misc_RNA (1)...(19): siRNA sense strand
gagaugcuguugauguguu

SEQ ID NO: 1983381 - RNA, 19 nt, Homo sapiens
  misc_RNA (1)...(19): siRNA sense strand
caccuggacuucaacauga

SEQ ID NO: 1983382 - RNA, 19 nt, Homo sapiens
  misc_RNA (1)...(19): siRNA sense strand
gcagauugaagaacuagaa

SEQ ID NO: 1983383 - RNA, 19 nt, Homo sapiens
  misc_RNA (1)...(19): siRNA sense strand
acaacaggcuucaguuuag

SEQ ID NO: 1983384 - RNA, 19 nt, Homo sapiens
  misc_RNA (1)...(19): siRNA sense strand
gaagacaccaccuggacuu

SEQ ID NO: 1983385 - RNA, 19 nt, Homo sapiens
  misc_RNA (1)...(19): siRNA sense strand
gcugaaauagcuuuaagaa

SEQ ID NO: 1983386 - RNA, 19 nt, Homo sapiens
  misc_RNA (1)...(19): siRNA sense strand
caucaggacuuggacagaa

SEQ ID NO: 1983387 - RNA, 19 nt, Homo sapiens
  misc_RNA (1)...(19): siRNA sense strand
gggagaugcuguugaugug

SEQ ID NO: 1983388 - RNA, 19 nt, Homo sapiens
  misc_RNA (1)...(19): siRNA sense strand
gcagaacacacccagaguu

SEQ ID NO: 1983389 - RNA, 19 nt, Homo sapiens
  misc_RNA (1)...(19): siRNA sense strand
uacaacaggcuucaguuua

SEQ ID NO: 1983390 - RNA, 19 nt, Homo sapiens
  misc_RNA (1)...(19): siRNA sense strand
gcacaacuucagucuauuc

SEQ ID NO: 1983391 - RNA, 19 nt, Homo sapiens
  misc_RNA (1)...(19): siRNA sense strand
ugaaggccuuggugguaua

SEQ ID NO: 1983392 - RNA, 19 nt, Homo sapiens
  misc_RNA (1)...(19): siRNA sense strand
gaacuacagcagcuacuuc

SEQ ID NO: 1983393 - RNA, 19 nt, Homo sapiens
  misc_RNA (1)...(19): siRNA sense strand
gcaacuacaucugcuccuu

SEQ ID NO: 1983394 - RNA, 19 nt, Homo sapiens
  misc_RNA (1)...(19): siRNA sense strand
aggaacaaauacaggaaua

SEQ ID NO: 1983395 - RNA, 19 nt, Homo sapiens
  misc_RNA (1)...(19): siRNA sense strand
gaacacacccagaguuacu

SEQ ID NO: 1983396 - RNA, 19 nt, Homo sapiens
  misc_RNA (1)...(19): siRNA sense strand
gaacgggagcgucuagcaa

SEQ ID NO: 1983397 - RNA, 19 nt, Homo sapiens
  misc_RNA (1)...(19): siRNA sense strand
ggaaaucuuggaaguacuu

SEQ ID NO: 1983398 - RNA, 19 nt, Homo sapiens
  misc_RNA (1)...(19): siRNA sense strand
ggacaacagccacaacuac

SEQ ID NO: 1983399 - RNA, 19 nt, Homo sapiens
  misc_RNA (1)...(19): siRNA sense strand
aaucuugguucagcaauuu

SEQ ID NO: 1983400 - RNA, 19 nt, Homo sapiens
  misc_RNA (1)...(19): siRNA sense strand
ccauuugcucuaccuauua

SEQ ID NO: 1983401 - RNA, 19 nt, Homo sapiens
  misc_RNA (1)...(19): siRNA sense strand
gucaauggcuaugcagaaa

SEQ ID NO: 1983402 - RNA, 19 nt, Homo sapiens
  misc_RNA (1)...(19): siRNA sense strand
agguacagcuucagcagua

SEQ ID NO: 1983403 - RNA, 19 nt, Homo sapiens
  misc_RNA (1)...(19): siRNA sense strand
gaagauauuaaagcucuga

SEQ ID NO: 1983404 - RNA, 19 nt, Homo sapiens
  misc_RNA (1)...(19): siRNA sense strand
ggacuuggacagaaugcuu

SEQ ID NO: 1983405 - RNA, 19 nt, Homo sapiens
  misc_RNA (1)...(19): siRNA sense strand
ugaaggagcagaaacaagu

SEQ ID NO: 1983406 - RNA, 19 nt, Homo sapiens
  misc_RNA (1)...(19): siRNA sense strand
caagaccagaggauaguaa

SEQ ID NO: 1983407 - RNA, 19 nt, Homo sapiens
  misc_RNA (1)...(19): siRNA sense strand
gaaggagcagaaacaaguu

SEQ ID NO: 1983408 - RNA, 19 nt, Homo sapiens
  misc_RNA (1)...(19): siRNA sense strand
caacuauaacuacaggauu

SEQ ID NO: 1983409 - RNA, 19 nt, Homo sapiens
  misc_RNA (1)...(19): siRNA sense strand
gaaacaaggcgagcagaag

SEQ ID NO: 1983410 - RNA, 19 nt, Homo sapiens
  misc_RNA (1)...(19): siRNA sense strand
gacaccaccuggacuucaa

SEQ ID NO: 1983411 - RNA, 19 nt, Homo sapiens
  misc_RNA (1)...(19): siRNA sense strand
cuacaacaggcuucaguuu

SEQ ID NO: 1983412 - RNA, 19 nt, Homo sapiens
  misc_RNA (1)...(19): siRNA sense strand
uaguaaagcucugaaggau

SEQ ID NO: 1983413 - RNA, 19 nt, Homo sapiens
  misc_RNA (1)...(19): siRNA sense strand
cuacuggacccacuccuuu

SEQ ID NO: 1983414 - RNA, 19 nt, Homo sapiens
  misc_RNA (1)...(19): siRNA sense strand
uccacaggauuuacucuaa

SEQ ID NO: 1983415 - RNA, 19 nt, Homo sapiens
  misc_RNA (1)...(19): siRNA sense strand
aaaucuaccuccugucauc

SEQ ID NO: 1983416 - RNA, 19 nt, Homo sapiens
  misc_RNA (1)...(19): siRNA sense strand
gaaaaucuaccuccuguca

SEQ ID NO: 1983417 - RNA, 19 nt, Homo sapiens
  misc_RNA (1)...(19): siRNA sense strand
caucaacaggccucucuuu

SEQ ID NO: 1983418 - RNA, 19 nt, Homo sapiens
  misc_RNA (1)...(19): siRNA sense strand
ggaggaacaaauacaggaa

SEQ ID NO: 1983419 - RNA, 19 nt, Homo sapiens
  misc_RNA (1)...(19): siRNA sense strand
ugccauggcugcaacacuu

SEQ ID NO: 1983420 - RNA, 19 nt, Homo sapiens
  misc_RNA (1)...(19): siRNA sense strand
auguaaagguucugaaaga

SEQ ID NO: 1983421 - RNA, 19 nt, Homo sapiens
  misc_RNA (1)...(19): siRNA sense strand
ccacucaagcaaauaauuc

SEQ ID NO: 1983422 - RNA, 19 nt, Homo sapiens
  misc_RNA (1)...(19): siRNA sense strand
acaggaacaucaggacuug

SEQ ID NO: 1983423 - RNA, 19 nt, Homo sapiens
  misc_RNA (1)...(19): siRNA sense strand
gaacaguaccuuggcuaca

SEQ ID NO: 1983424 - RNA, 19 nt, Homo sapiens
  misc_RNA (1)...(19): siRNA sense strand
acaaauacaggaauagcaa

SEQ ID NO: 1983425 - RNA, 19 nt, Homo sapiens
  misc_RNA (1)...(19): siRNA sense strand
ccucaagauuugucaaugg

SEQ ID NO: 1983426 - RNA, 19 nt, Homo sapiens
  misc_RNA (1)...(19): siRNA sense strand
gcaauuugagguacagcuu

SEQ ID NO: 1983427 - RNA, 19 nt, Homo sapiens
  misc_RNA (1)...(19): siRNA sense strand
caguagcuccucagauaaa

SEQ ID NO: 1983428 - RNA, 19 nt, Homo sapiens
  misc_RNA (1)...(19): siRNA sense strand
gaacgccagccacuacauc

SEQ ID NO: 1983429 - RNA, 19 nt, Homo sapiens
  misc_RNA (1)...(19): siRNA sense strand
gaacaaauacaggaauagc

SEQ ID NO: 1983430 - RNA, 19 nt, Homo sapiens
  misc_RNA (1)...(19): siRNA sense strand
gaaugcugaaauagcuuua

SEQ ID NO: 1983431 - RNA, 19 nt, Homo sapiens
  misc_RNA (1)...(19): siRNA sense strand
agaaacacucucaacauug

SEQ ID NO: 1983432 - RNA, 19 nt, Homo sapiens
  misc_RNA (1)...(19): siRNA sense strand
gccaauggaauacagagaa

SEQ ID NO: 1983433 - RNA, 19 nt, Homo sapiens
  misc_RNA (1)...(19): siRNA sense strand
acucuaggaggaacaaaua

SEQ ID NO: 1983434 - RNA, 19 nt, Homo sapiens
  misc_RNA (1)...(19): siRNA sense strand
ucaacaggccucucuuuag

SEQ ID NO: 1983435 - RNA, 19 nt, Homo sapiens
  misc_RNA (1)...(19): siRNA sense strand
gacaacagccacaacuaca

SEQ ID NO: 1983436 - RNA, 19 nt, Homo sapiens
  misc_RNA (1)...(19): siRNA sense strand
ggugguauagauuucagua

SEQ ID NO: 1983437 - RNA, 19 nt, Homo sapiens
  misc_RNA (1)...(19): siRNA sense strand
cagaaugcuuuaggguuga

SEQ ID NO: 1983438 - RNA, 19 nt, Homo sapiens
  misc_RNA (1)...(19): siRNA sense strand
acaggaauagcaacaacua

SEQ ID NO: 1983439 - RNA, 19 nt, Homo sapiens
  misc_RNA (1)...(19): siRNA sense strand
gcuuuaggguugacuuugg

SEQ ID NO: 1983440 - RNA, 19 nt, Homo sapiens
  misc_RNA (1)...(19): siRNA sense strand
gcuagcggucugacucuuu

SEQ ID NO: 1983441 - RNA, 19 nt, Homo sapiens
  misc_RNA (1)...(19): siRNA sense strand
gggacaacagccacaacua

SEQ ID NO: 1983442 - RNA, 19 nt, Homo sapiens
  misc_RNA (1)...(19): siRNA sense strand
gccacuggguucacucuag

SEQ ID NO: 1983443 - RNA, 19 nt, Homo sapiens
  misc_RNA (1)...(19): siRNA sense strand
ggcagcagauugaagaacu

SEQ ID NO: 1983444 - RNA, 19 nt, Homo sapiens
  misc_RNA (1)...(19): siRNA sense strand
ccaccuggacuucaacaug

SEQ ID NO: 1983445 - RNA, 19 nt, Homo sapiens
  misc_RNA (1)...(19): siRNA sense strand
caacaggcuucaguuuagg

SEQ ID NO: 1983446 - RNA, 19 nt, Homo sapiens
  misc_RNA (1)...(19): siRNA sense strand
ggguugacuuugggaacua

SEQ ID NO: 1983447 - RNA, 19 nt, Homo sapiens
  misc_RNA (1)...(19): siRNA sense strand
cagcaucugccacaccauu

SEQ ID NO: 1983448 - RNA, 19 nt, Homo sapiens
  misc_RNA (1)...(19): siRNA sense strand
caacuacaacugcaucaac

SEQ ID NO: 1983449 - RNA, 19 nt, Homo sapiens
  misc_RNA (1)...(19): siRNA sense strand
ugaaacaaggcgagcagaa

SEQ ID NO: 1983450 - RNA, 19 nt, Homo sapiens
  misc_RNA (1)...(19): siRNA sense strand
gguauagauuucaguagcu

SEQ ID NO: 1983451 - RNA, 19 nt, Homo sapiens
  misc_RNA (1)...(19): siRNA sense strand
aaugaaggccuugguggua

SEQ ID NO: 1983452 - RNA, 19 nt, Homo sapiens
  misc_RNA (1)...(19): siRNA sense strand
guacaaacacaggaacauc

SEQ ID NO: 1983453 - RNA, 19 nt, Homo sapiens
  misc_RNA (1)...(19): siRNA sense strand
gguuugggagguucacuuu

SEQ ID NO: 1983454 - RNA, 19 nt, Homo sapiens
  misc_RNA (1)...(19): siRNA sense strand
uauaaccccucaagauuug

SEQ ID NO: 1983455 - RNA, 19 nt, Homo sapiens
  misc_RNA (1)...(19): siRNA sense strand
cauauaaccccucaagauu

SEQ ID NO: 1983456 - RNA, 19 nt, Homo sapiens
  misc_RNA (1)...(19): siRNA sense strand
gcuuuaagaacccagaaga

SEQ ID NO: 1983457 - RNA, 19 nt, Homo sapiens
  misc_RNA (1)...(19): siRNA sense strand
gaggauaguaaagcucuga

SEQ ID NO: 1983458 - RNA, 19 nt, Homo sapiens
  misc_RNA (1)...(19): siRNA sense strand
gccacuacaucugcagcua

SEQ ID NO: 1983459 - RNA, 19 nt, Homo sapiens
  misc_RNA (1)...(19): siRNA sense strand
ucaguagcuccucagauaa

SEQ ID NO: 1983460 - RNA, 19 nt, Homo sapiens
  misc_RNA (1)...(19): siRNA sense strand
gaaauaugcuuuacaguca

SEQ ID NO: 1983461 - RNA, 19 nt, Homo sapiens
  misc_RNA (1)...(19): siRNA sense strand
ugaaagaucuucucaugaa

SEQ ID NO: 1983462 - RNA, 19 nt, Homo sapiens
  misc_RNA (1)...(19): siRNA sense strand
ugauaaagauguucgcuua

SEQ ID NO: 1983463 - RNA, 19 nt, Homo sapiens
  misc_RNA (1)...(19): siRNA sense strand
gaacggaucuuugcucaau

SEQ ID NO: 1983464 - RNA, 19 nt, Homo sapiens
  misc_RNA (1)...(19): siRNA sense strand
gaugaaugcuaucaaguaa

SEQ ID NO: 1983465 - RNA, 19 nt, Homo sapiens
  misc_RNA (1)...(19): siRNA sense strand
gaaauuugcuagccauugu

SEQ ID NO: 1983466 - RNA, 19 nt, Homo sapiens
  misc_RNA (1)...(19): siRNA sense strand
ggauuuaaaugcugugaaa

SEQ ID NO: 1983467 - RNA, 19 nt, Homo sapiens
  misc_RNA (1)...(19): siRNA sense strand
guuagaagaugaugagaaa

SEQ ID NO: 1983468 - RNA, 19 nt, Homo sapiens
  misc_RNA (1)...(19): siRNA sense strand
gaagaaagacaaaguggaa

SEQ ID NO: 1983469 - RNA, 19 nt, Homo sapiens
  misc_RNA (1)...(19): siRNA sense strand
caugaaccauccugauuua

SEQ ID NO: 1983470 - RNA, 19 nt, Homo sapiens
  misc_RNA (1)...(19): siRNA sense strand
gaacuucuaccuuaagauu

SEQ ID NO: 1983471 - RNA, 19 nt, Homo sapiens
  misc_RNA (1)...(19): siRNA sense strand
gaucuuugcucaauacaug

SEQ ID NO: 1983472 - RNA, 19 nt, Homo sapiens
  misc_RNA (1)...(19): siRNA sense strand
ggacuugcccaaauuuaua

SEQ ID NO: 1983473 - RNA, 19 nt, Homo sapiens
  misc_RNA (1)...(19): siRNA sense strand
gauuaaagaugguugugaa

SEQ ID NO: 1983474 - RNA, 19 nt, Homo sapiens
  misc_RNA (1)...(19): siRNA sense strand
gaacaaaucaauagaugga

SEQ ID NO: 1983475 - RNA, 19 nt, Homo sapiens
  misc_RNA (1)...(19): siRNA sense strand
gcuauugagccauauauua

SEQ ID NO: 1983476 - RNA, 19 nt, Homo sapiens
  misc_RNA (1)...(19): siRNA sense strand
aaaccuagcuuuacaucuu

SEQ ID NO: 1983477 - RNA, 19 nt, Homo sapiens
  misc_RNA (1)...(19): siRNA sense strand
gaucaaagacaaauugcua

SEQ ID NO: 1983478 - RNA, 19 nt, Homo sapiens
  misc_RNA (1)...(19): siRNA sense strand
ggucaagucauauaacaua

SEQ ID NO: 1983479 - RNA, 19 nt, Homo sapiens
  misc_RNA (1)...(19): siRNA sense strand
gaccuuaugagcucuauua

SEQ ID NO: 1983480 - RNA, 19 nt, Homo sapiens
  misc_RNA (1)...(19): siRNA sense strand
gaaagacaaaguggaaaua

SEQ ID NO: 1983481 - RNA, 19 nt, Homo sapiens
  misc_RNA (1)...(19): siRNA sense strand
ccaaauaugccauucauug

SEQ ID NO: 1983482 - RNA, 19 nt, Homo sapiens
  misc_RNA (1)...(19): siRNA sense strand
caacaauauugcauaguga

SEQ ID NO: 1983483 - RNA, 19 nt, Homo sapiens
  misc_RNA (1)...(19): siRNA sense strand
aaacaucuaucagcgauuu

SEQ ID NO: 1983484 - RNA, 19 nt, Homo sapiens
  misc_RNA (1)...(19): siRNA sense strand
agacgacucugaucuugua

SEQ ID NO: 1983485 - RNA, 19 nt, Homo sapiens
  misc_RNA (1)...(19): siRNA sense strand
gacaagaauuucaguaaca

SEQ ID NO: 1983486 - RNA, 19 nt, Homo sapiens
  misc_RNA (1)...(19): siRNA sense strand
gcaugcagcuguuagugaa

SEQ ID NO: 1983487 - RNA, 19 nt, Homo sapiens
  misc_RNA (1)...(19): siRNA sense strand
gaagcugcacuacaaauuu

SEQ ID NO: 1983488 - RNA, 19 nt, Homo sapiens
  misc_RNA (1)...(19): siRNA sense strand
ccaggacucugaagaagaa

SEQ ID NO: 1983489 - RNA, 19 nt, Homo sapiens
  misc_RNA (1)...(19): siRNA sense strand
caugguuccucacaauuua

SEQ ID NO: 1983490 - RNA, 19 nt, Homo sapiens
  misc_RNA (1)...(19): siRNA sense strand
gcauagugauggagacuug

SEQ ID NO: 1983491 - RNA, 19 nt, Homo sapiens
  misc_RNA (1)...(19): siRNA sense strand
ugaaugcuaucaaguaaga

SEQ ID NO: 1983492 - RNA, 19 nt, Homo sapiens
  misc_RNA (1)...(19): siRNA sense strand
ggaggaagaagaagaaaga

SEQ ID NO: 1983493 - RNA, 19 nt, Homo sapiens
  misc_RNA (1)...(19): siRNA sense strand
gcaauugaauccacacagu

SEQ ID NO: 1983494 - RNA, 19 nt, Homo sapiens
  misc_RNA (1)...(19): siRNA sense strand
gaggagcgccuacaaguug

SEQ ID NO: 1983495 - RNA, 19 nt, Homo sapiens
  misc_RNA (1)...(19): siRNA sense strand
gaaagaucuucucaugaau

SEQ ID NO: 1983496 - RNA, 19 nt, Homo sapiens
  misc_RNA (1)...(19): siRNA sense strand
gaacagcagaugaugaaga

SEQ ID NO: 1983497 - RNA, 19 nt, Homo sapiens
  misc_RNA (1)...(19): siRNA sense strand
gacaucaaguaaaggauuu

SEQ ID NO: 1983498 - RNA, 19 nt, Homo sapiens
  misc_RNA (1)...(19): siRNA sense strand
ggucaaugaucacuuacuu

SEQ ID NO: 1983499 - RNA, 19 nt, Homo sapiens
  misc_RNA (1)...(19): siRNA sense strand
gaaccauccugauuuagca

SEQ ID NO: 1983500 - RNA, 19 nt, Homo sapiens
  misc_RNA (1)...(19): siRNA sense strand
uaaacaagcaagcauauga

SEQ ID NO: 1983501 - RNA, 19 nt, Homo sapiens
  misc_RNA (1)...(19): siRNA sense strand
gaacagaaguccaaaagca

SEQ ID NO: 1983502 - RNA, 19 nt, Homo sapiens
  misc_RNA (1)...(19): siRNA sense strand
ggaagaagaagaaagacaa

SEQ ID NO: 1983503 - RNA, 19 nt, Homo sapiens
  misc_RNA (1)...(19): siRNA sense strand
uaucaacgaugaaugcuau

SEQ ID NO: 1983504 - RNA, 19 nt, Homo sapiens
  misc_RNA (1)...(19): siRNA sense strand
cggaugaaaugcuuauauu

SEQ ID NO: 1983505 - RNA, 19 nt, Homo sapiens
  misc_RNA (1)...(19): siRNA sense strand
gaugaucgacuacuuguug

SEQ ID NO: 1983506 - RNA, 19 nt, Homo sapiens
  misc_RNA (1)...(19): siRNA sense strand
gaauuucaguaacaccaaa

SEQ ID NO: 1983507 - RNA, 19 nt, Homo sapiens
  misc_RNA (1)...(19): siRNA sense strand
guuagaagauagcaaugaa

SEQ ID NO: 1983508 - RNA, 19 nt, Homo sapiens
  misc_RNA (1)...(19): siRNA sense strand
ucaauuugcugcuccuuug

SEQ ID NO: 1983509 - RNA, 19 nt, Homo sapiens
  misc_RNA (1)...(19): siRNA sense strand
gaaucuaucagugcucuua

SEQ ID NO: 1983510 - RNA, 19 nt, Homo sapiens
  misc_RNA (1)...(19): siRNA sense strand
uaaaggauuugcuugacuu

SEQ ID NO: 1983511 - RNA, 19 nt, Homo sapiens
  misc_RNA (1)...(19): siRNA sense strand
ugaaugaaauguggaaaug

SEQ ID NO: 1983512 - RNA, 19 nt, Homo sapiens
  misc_RNA (1)...(19): siRNA sense strand
caagcaagcauaugauuug

SEQ ID NO: 1983513 - RNA, 19 nt, Homo sapiens
  misc_RNA (1)...(19): siRNA sense strand
gcaguuagaaguacuuguu

SEQ ID NO: 1983514 - RNA, 19 nt, Homo sapiens
  misc_RNA (1)...(19): siRNA sense strand
gcaagcagcagcucaaauc

SEQ ID NO: 1983515 - RNA, 19 nt, Homo sapiens
  misc_RNA (1)...(19): siRNA sense strand
gaacaucucauaacaccau

SEQ ID NO: 1983516 - RNA, 19 nt, Homo sapiens
  misc_RNA (1)...(19): siRNA sense strand
caucccaucucauuucauu

SEQ ID NO: 1983517 - RNA, 19 nt, Homo sapiens
  misc_RNA (1)...(19): siRNA sense strand
gugaacaaaucaauagaug

SEQ ID NO: 1983518 - RNA, 19 nt, Homo sapiens
  misc_RNA (1)...(19): siRNA sense strand
ucagugcucuuauuaaaca

SEQ ID NO: 1983519 - RNA, 19 nt, Homo sapiens
  misc_RNA (1)...(19): siRNA sense strand
gaaaguccauaugcacaug

SEQ ID NO: 1983520 - RNA, 19 nt, Homo sapiens
  misc_RNA (1)...(19): siRNA sense strand
gaagaagaagaaagacaaa

SEQ ID NO: 1983521 - RNA, 19 nt, Homo sapiens
  misc_RNA (1)...(19): siRNA sense strand
cacaaugucuucaccuuug

SEQ ID NO: 1983522 - RNA, 19 nt, Homo sapiens
  misc_RNA (1)...(19): siRNA sense strand
gaaugucuuugguuuguuc

SEQ ID NO: 1983523 - RNA, 19 nt, Homo sapiens
  misc_RNA (1)...(19): siRNA sense strand
uaagaaagcaguuagaagu

SEQ ID NO: 1983524 - RNA, 19 nt, Homo sapiens
  misc_RNA (1)...(19): siRNA sense strand
gacaaacgauggagaguac

SEQ ID NO: 1983525 - RNA, 19 nt, Homo sapiens
  misc_RNA (1)...(19): siRNA sense strand
ggagauggugagacgauua

SEQ ID NO: 1983526 - RNA, 19 nt, Homo sapiens
  misc_RNA (1)...(19): siRNA sense strand
guagcuacuuucauuguga

SEQ ID NO: 1983527 - RNA, 19 nt, Homo sapiens
  misc_RNA (1)...(19): siRNA sense strand
gaagaagaaagacaaagug

SEQ ID NO: 1983528 - RNA, 19 nt, Homo sapiens
  misc_RNA (1)...(19): siRNA sense strand
gaggagaaauuagguaugg

SEQ ID NO: 1983529 - RNA, 19 nt, Homo sapiens
  misc_RNA (1)...(19): siRNA sense strand
caagcaaucucagaccaaa

SEQ ID NO: 1983530 - RNA, 19 nt, Homo sapiens
  misc_RNA (1)...(19): siRNA sense strand
ugucaaagaguacuacaua

SEQ ID NO: 1983531 - RNA, 19 nt, Homo sapiens
  misc_RNA (1)...(19): siRNA sense strand
gagagaagagcucaugcua

SEQ ID NO: 1983532 - RNA, 19 nt, Homo sapiens
  misc_RNA (1)...(19): siRNA sense strand
gcaaaagacuuaacagagu

SEQ ID NO: 1983533 - RNA, 19 nt, Homo sapiens
  misc_RNA (1)...(19): siRNA sense strand
gaaauuagguauggaugac

SEQ ID NO: 1983534 - RNA, 19 nt, Homo sapiens
  misc_RNA (1)...(19): siRNA sense strand
caaaguacaggauauugaa

SEQ ID NO: 1983535 - RNA, 19 nt, Homo sapiens
  misc_RNA (1)...(19): siRNA sense strand
gcacaugacccagauuaug

SEQ ID NO: 1983536 - RNA, 19 nt, Homo sapiens
  misc_RNA (1)...(19): siRNA sense strand
ugugaaagaucuucucaug

SEQ ID NO: 1983537 - RNA, 19 nt, Homo sapiens
  misc_RNA (1)...(19): siRNA sense strand
caucagagcaggucuugaa

SEQ ID NO: 1983538 - RNA, 19 nt, Homo sapiens
  misc_RNA (1)...(19): siRNA sense strand
gcucaggauuucaugaaga

SEQ ID NO: 1983539 - RNA, 19 nt, Homo sapiens
  misc_RNA (1)...(19): siRNA sense strand
ggauuugcuugacuugauu

SEQ ID NO: 1983540 - RNA, 19 nt, Homo sapiens
  misc_RNA (1)...(19): siRNA sense strand
cuacagaacggaugaaaug

SEQ ID NO: 1983541 - RNA, 19 nt, Homo sapiens
  misc_RNA (1)...(19): siRNA sense strand
uagcauggaucaaagacaa

SEQ ID NO: 1983542 - RNA, 19 nt, Homo sapiens
  misc_RNA (1)...(19): siRNA sense strand
ggaccaggacucugaagaa

SEQ ID NO: 1983543 - RNA, 19 nt, Homo sapiens
  misc_RNA (1)...(19): siRNA sense strand
gaccaaaucaucacgaaug

SEQ ID NO: 1983544 - RNA, 19 nt, Homo sapiens
  misc_RNA (1)...(19): siRNA sense strand
ucaggaacuucuaccuuaa

SEQ ID NO: 1983545 - RNA, 19 nt, Homo sapiens
  misc_RNA (1)...(19): siRNA sense strand
caaccuggaacaucucaua

SEQ ID NO: 1983546 - RNA, 19 nt, Homo sapiens
  misc_RNA (1)...(19): siRNA sense strand
caagcaaccuggaacaucu

SEQ ID NO: 1983547 - RNA, 19 nt, Homo sapiens
  misc_RNA (1)...(19): siRNA sense strand
gaaauguggaaaugucaaa

SEQ ID NO: 1983548 - RNA, 19 nt, Homo sapiens
  misc_RNA (1)...(19): siRNA sense strand
caaaucaucacgaauggaa

SEQ ID NO: 1983549 - RNA, 19 nt, Homo sapiens
  misc_RNA (1)...(19): siRNA sense strand
ucuaggagcuguuaacaag

SEQ ID NO: 1983550 - RNA, 19 nt, Homo sapiens
  misc_RNA (1)...(19): siRNA sense strand
ucagaaagaugguagaaaa

SEQ ID NO: 1983551 - RNA, 19 nt, Homo sapiens
  misc_RNA (1)...(19): siRNA sense strand
caaagacuaggaccaauga

SEQ ID NO: 1983552 - RNA, 19 nt, Homo sapiens
  misc_RNA (1)...(19): siRNA sense strand
gaaaucaucacauuagaac

SEQ ID NO: 1983553 - RNA, 19 nt, Homo sapiens
  misc_RNA (1)...(19): siRNA sense strand
gguuccagaugaagaagua

SEQ ID NO: 1983554 - RNA, 19 nt, Homo sapiens
  misc_RNA (1)...(19): siRNA sense strand
ucaagcauccugauaaaga

SEQ ID NO: 1983555 - RNA, 19 nt, Homo sapiens
  misc_RNA (1)...(19): siRNA sense strand
gaacggaugaaaugcuuau

SEQ ID NO: 1983556 - RNA, 19 nt, Homo sapiens
  misc_RNA (1)...(19): siRNA sense strand
uaacaagccacuuucauca

SEQ ID NO: 1983557 - RNA, 19 nt, Homo sapiens
  misc_RNA (1)...(19): siRNA sense strand
ucaaguaagacaaguguuu

SEQ ID NO: 1983558 - RNA, 19 nt, Homo sapiens
  misc_RNA (1)...(19): siRNA sense strand
ccuugcaccugaucaauuu

SEQ ID NO: 1983559 - RNA, 19 nt, Homo sapiens
  misc_RNA (1)...(19): siRNA sense strand
caagcaggcugaagguugu

SEQ ID NO: 1983560 - RNA, 19 nt, Homo sapiens
  misc_RNA (1)...(19): siRNA sense strand
gaaauaugcuuuacaguca

SEQ ID NO: 1983561 - RNA, 19 nt, Homo sapiens
  misc_RNA (1)...(19): siRNA sense strand
ugaaagaucuucucaugaa

SEQ ID NO: 1983562 - RNA, 19 nt, Homo sapiens
  misc_RNA (1)...(19): siRNA sense strand
ugauaaagauguucgcuua

SEQ ID NO: 1983563 - RNA, 19 nt, Homo sapiens
  misc_RNA (1)...(19): siRNA sense strand
gaacggaucuuugcucaau

SEQ ID NO: 1983564 - RNA, 19 nt, Homo sapiens
  misc_RNA (1)...(19): siRNA sense strand
gaugaaugcuaucaaguaa

SEQ ID NO: 1983565 - RNA, 19 nt, Homo sapiens
  misc_RNA (1)...(19): siRNA sense strand
gaaauuugcuagccauugu

SEQ ID NO: 1983566 - RNA, 19 nt, Homo sapiens
  misc_RNA (1)...(19): siRNA sense strand
ggauuuaaaugcugugaaa

SEQ ID NO: 1983567 - RNA, 19 nt, Homo sapiens
  misc_RNA (1)...(19): siRNA sense strand
guuagaagaugaugagaaa

SEQ ID NO: 1983568 - RNA, 19 nt, Homo sapiens
  misc_RNA (1)...(19): siRNA sense strand
gaagaaagacaaaguggaa

SEQ ID NO: 1983569 - RNA, 19 nt, Homo sapiens
  misc_RNA (1)...(19): siRNA sense strand
caugaaccauccugauuua

SEQ ID NO: 1983570 - RNA, 19 nt, Homo sapiens
  misc_RNA (1)...(19): siRNA sense strand
gaacuucuaccuuaagauu

SEQ ID NO: 1983571 - RNA, 19 nt, Homo sapiens
  misc_RNA (1)...(19): siRNA sense strand
gaucuuugcucaauacaug

SEQ ID NO: 1983572 - RNA, 19 nt, Homo sapiens
  misc_RNA (1)...(19): siRNA sense strand
ggacuugcccaaauuuaua

SEQ ID NO: 1983573 - RNA, 19 nt, Homo sapiens
  misc_RNA (1)...(19): siRNA sense strand
gauuaaagaugguugugaa

SEQ ID NO: 1983574 - RNA, 19 nt, Homo sapiens
  misc_RNA (1)...(19): siRNA sense strand
gaacaaaucaauagaugga

SEQ ID NO: 1983575 - RNA, 19 nt, Homo sapiens
  misc_RNA (1)...(19): siRNA sense strand
gcuauugagccauauauua

SEQ ID NO: 1983576 - RNA, 19 nt, Homo sapiens
  misc_RNA (1)...(19): siRNA sense strand
aaaccuagcuuuacaucuu

SEQ ID NO: 1983577 - RNA, 19 nt, Homo sapiens
  misc_RNA (1)...(19): siRNA sense strand
gaucaaagacaaauugcua

SEQ ID NO: 1983578 - RNA, 19 nt, Homo sapiens
  misc_RNA (1)...(19): siRNA sense strand
ggucaagucauauaacaua

SEQ ID NO: 1983579 - RNA, 19 nt, Homo sapiens
  misc_RNA (1)...(19): siRNA sense strand
gaccuuaugagcucuauua

SEQ ID NO: 1983580 - RNA, 19 nt, Homo sapiens
  misc_RNA (1)...(19): siRNA sense strand
gaaagacaaaguggaaaua

SEQ ID NO: 1983581 - RNA, 19 nt, Homo sapiens
  misc_RNA (1)...(19): siRNA sense strand
ccaaauaugccauucauug

SEQ ID NO: 1983582 - RNA, 19 nt, Homo sapiens
  misc_RNA (1)...(19): siRNA sense strand
caacaauauugcauaguga

SEQ ID NO: 1983583 - RNA, 19 nt, Homo sapiens
  misc_RNA (1)...(19): siRNA sense strand
aaacaucuaucagcgauuu

SEQ ID NO: 1983584 - RNA, 19 nt, Homo sapiens
  misc_RNA (1)...(19): siRNA sense strand
agacgacucugaucuugua

SEQ ID NO: 1983585 - RNA, 19 nt, Homo sapiens
  misc_RNA (1)...(19): siRNA sense strand
gacaagaauuucaguaaca

SEQ ID NO: 1983586 - RNA, 19 nt, Homo sapiens
  misc_RNA (1)...(19): siRNA sense strand
gcaugcagcuguuagugaa

SEQ ID NO: 1983587 - RNA, 19 nt, Homo sapiens
  misc_RNA (1)...(19): siRNA sense strand
gaagcugcacuacaaauuu

SEQ ID NO: 1983588 - RNA, 19 nt, Homo sapiens
  misc_RNA (1)...(19): siRNA sense strand
ccaggacucugaagaagaa

SEQ ID NO: 1983589 - RNA, 19 nt, Homo sapiens
  misc_RNA (1)...(19): siRNA sense strand
caugguuccucacaauuua

SEQ ID NO: 1983590 - RNA, 19 nt, Homo sapiens
  misc_RNA (1)...(19): siRNA sense strand
gcauagugauggagacuug

SEQ ID NO: 1983591 - RNA, 19 nt, Homo sapiens
  misc_RNA (1)...(19): siRNA sense strand
ugaaugcuaucaaguaaga

SEQ ID NO: 1983592 - RNA, 19 nt, Homo sapiens
  misc_RNA (1)...(19): siRNA sense strand
ggaggaagaagaagaaaga

SEQ ID NO: 1983593 - RNA, 19 nt, Homo sapiens
  misc_RNA (1)...(19): siRNA sense strand
gcaauugaauccacacagu

SEQ ID NO: 1983594 - RNA, 19 nt, Homo sapiens
  misc_RNA (1)...(19): siRNA sense strand
gaggagcgccuacaaguug

SEQ ID NO: 1983595 - RNA, 19 nt, Homo sapiens
  misc_RNA (1)...(19): siRNA sense strand
gaaagaucuucucaugaau

SEQ ID NO: 1983596 - RNA, 19 nt, Homo sapiens
  misc_RNA (1)...(19): siRNA sense strand
gaacagcagaugaugaaga

SEQ ID NO: 1983597 - RNA, 19 nt, Homo sapiens
  misc_RNA (1)...(19): siRNA sense strand
gacaucaaguaaaggauuu

SEQ ID NO: 1983598 - RNA, 19 nt, Homo sapiens
  misc_RNA (1)...(19): siRNA sense strand
ggucaaugaucacuuacuu

SEQ ID NO: 1983599 - RNA, 19 nt, Homo sapiens
  misc_RNA (1)...(19): siRNA sense strand
gaaccauccugauuuagca

SEQ ID NO: 1983600 - RNA, 19 nt, Homo sapiens
  misc_RNA (1)...(19): siRNA sense strand
uaaacaagcaagcauauga

SEQ ID NO: 1983601 - RNA, 19 nt, Homo sapiens
  misc_RNA (1)...(19): siRNA sense strand
gaacagaaguccaaaagca

SEQ ID NO: 1983602 - RNA, 19 nt, Homo sapiens
  misc_RNA (1)...(19): siRNA sense strand
ggaagaagaagaaagacaa

SEQ ID NO: 1983603 - RNA, 19 nt, Homo sapiens
  misc_RNA (1)...(19): siRNA sense strand
uaucaacgaugaaugcuau

SEQ ID NO: 1983604 - RNA, 19 nt, Homo sapiens
  misc_RNA (1)...(19): siRNA sense strand
cggaugaaaugcuuauauu

SEQ ID NO: 1983605 - RNA, 19 nt, Homo sapiens
  misc_RNA (1)...(19): siRNA sense strand
gaugaucgacuacuuguug

SEQ ID NO: 1983606 - RNA, 19 nt, Homo sapiens
  misc_RNA (1)...(19): siRNA sense strand
gaauuucaguaacaccaaa

SEQ ID NO: 1983607 - RNA, 19 nt, Homo sapiens
  misc_RNA (1)...(19): siRNA sense strand
guuagaagauagcaaugaa

SEQ ID NO: 1983608 - RNA, 19 nt, Homo sapiens
  misc_RNA (1)...(19): siRNA sense strand
ucaauuugcugcuccuuug

SEQ ID NO: 1983609 - RNA, 19 nt, Homo sapiens
  misc_RNA (1)...(19): siRNA sense strand
gaaucuaucagugcucuua

SEQ ID NO: 1983610 - RNA, 19 nt, Homo sapiens
  misc_RNA (1)...(19): siRNA sense strand
uaaaggauuugcuugacuu

SEQ ID NO: 1983611 - RNA, 19 nt, Homo sapiens
  misc_RNA (1)...(19): siRNA sense strand
ugaaugaaauguggaaaug

SEQ ID NO: 1983612 - RNA, 19 nt, Homo sapiens
  misc_RNA (1)...(19): siRNA sense strand
caagcaagcauaugauuug

SEQ ID NO: 1983613 - RNA, 19 nt, Homo sapiens
  misc_RNA (1)...(19): siRNA sense strand
gcaguuagaaguacuuguu

SEQ ID NO: 1983614 - RNA, 19 nt, Homo sapiens
  misc_RNA (1)...(19): siRNA sense strand
gcaagcagcagcucaaauc

SEQ ID NO: 1983615 - RNA, 19 nt, Homo sapiens
  misc_RNA (1)...(19): siRNA sense strand
gaacaucucauaacaccau

SEQ ID NO: 1983616 - RNA, 19 nt, Homo sapiens
  misc_RNA (1)...(19): siRNA sense strand
caucccaucucauuucauu

SEQ ID NO: 1983617 - RNA, 19 nt, Homo sapiens
  misc_RNA (1)...(19): siRNA sense strand
gugaacaaaucaauagaug

SEQ ID NO: 1983618 - RNA, 19 nt, Homo sapiens
  misc_RNA (1)...(19): siRNA sense strand
ucagugcucuuauuaaaca

SEQ ID NO: 1983619 - RNA, 19 nt, Homo sapiens
  misc_RNA (1)...(19): siRNA sense strand
gaaaguccauaugcacaug

SEQ ID NO: 1983620 - RNA, 19 nt, Homo sapiens
  misc_RNA (1)...(19): siRNA sense strand
gaagaagaagaaagacaaa

SEQ ID NO: 1983621 - RNA, 19 nt, Homo sapiens
  misc_RNA (1)...(19): siRNA sense strand
cacaaugucuucaccuuug

SEQ ID NO: 1983622 - RNA, 19 nt, Homo sapiens
  misc_RNA (1)...(19): siRNA sense strand
gaaugucuuugguuuguuc

SEQ ID NO: 1983623 - RNA, 19 nt, Homo sapiens
  misc_RNA (1)...(19): siRNA sense strand
uaagaaagcaguuagaagu

SEQ ID NO: 1983624 - RNA, 19 nt, Homo sapiens
  misc_RNA (1)...(19): siRNA sense strand
gacaaacgauggagaguac

SEQ ID NO: 1983625 - RNA, 19 nt, Homo sapiens
  misc_RNA (1)...(19): siRNA sense strand
ggagauggugagacgauua

SEQ ID NO: 1983626 - RNA, 19 nt, Homo sapiens
  misc_RNA (1)...(19): siRNA sense strand
guagcuacuuucauuguga

SEQ ID NO: 1983627 - RNA, 19 nt, Homo sapiens
  misc_RNA (1)...(19): siRNA sense strand
gaagaagaaagacaaagug

SEQ ID NO: 1983628 - RNA, 19 nt, Homo sapiens
  misc_RNA (1)...(19): siRNA sense strand
gaggagaaauuagguaugg

SEQ ID NO: 1983629 - RNA, 19 nt, Homo sapiens
  misc_RNA (1)...(19): siRNA sense strand
caagcaaucucagaccaaa

SEQ ID NO: 1983630 - RNA, 19 nt, Homo sapiens
  misc_RNA (1)...(19): siRNA sense strand
ugucaaagaguacuacaua

SEQ ID NO: 1983631 - RNA, 19 nt, Homo sapiens
  misc_RNA (1)...(19): siRNA sense strand
gagagaagagcucaugcua

SEQ ID NO: 1983632 - RNA, 19 nt, Homo sapiens
  misc_RNA (1)...(19): siRNA sense strand
gcaaaagacuuaacagagu

SEQ ID NO: 1983633 - RNA, 19 nt, Homo sapiens
  misc_RNA (1)...(19): siRNA sense strand
gaaauuagguauggaugac

SEQ ID NO: 1983634 - RNA, 19 nt, Homo sapiens
  misc_RNA (1)...(19): siRNA sense strand
caaaguacaggauauugaa

SEQ ID NO: 1983635 - RNA, 19 nt, Homo sapiens
  misc_RNA (1)...(19): siRNA sense strand
gcacaugacccagauuaug

SEQ ID NO: 1983636 - RNA, 19 nt, Homo sapiens
  misc_RNA (1)...(19): siRNA sense strand
ugugaaagaucuucucaug

SEQ ID NO: 1983637 - RNA, 19 nt, Homo sapiens
  misc_RNA (1)...(19): siRNA sense strand
caucagagcaggucuugaa

SEQ ID NO: 1983638 - RNA, 19 nt, Homo sapiens
  misc_RNA (1)...(19): siRNA sense strand
gcucaggauuucaugaaga

SEQ ID NO: 1983639 - RNA, 19 nt, Homo sapiens
  misc_RNA (1)...(19): siRNA sense strand
ggauuugcuugacuugauu

SEQ ID NO: 1983640 - RNA, 19 nt, Homo sapiens
  misc_RNA (1)...(19): siRNA sense strand
cuacagaacggaugaaaug

SEQ ID NO: 1983641 - RNA, 19 nt, Homo sapiens
  misc_RNA (1)...(19): siRNA sense strand
uagcauggaucaaagacaa

SEQ ID NO: 1983642 - RNA, 19 nt, Homo sapiens
  misc_RNA (1)...(19): siRNA sense strand
ggaccaggacucugaagaa

SEQ ID NO: 1983643 - RNA, 19 nt, Homo sapiens
  misc_RNA (1)...(19): siRNA sense strand
gaccaaaucaucacgaaug

SEQ ID NO: 1983644 - RNA, 19 nt, Homo sapiens
  misc_RNA (1)...(19): siRNA sense strand
ucaggaacuucuaccuuaa

SEQ ID NO: 1983645 - RNA, 19 nt, Homo sapiens
  misc_RNA (1)...(19): siRNA sense strand
caaccuggaacaucucaua

SEQ ID NO: 1983646 - RNA, 19 nt, Homo sapiens
  misc_RNA (1)...(19): siRNA sense strand
caagcaaccuggaacaucu

SEQ ID NO: 1983647 - RNA, 19 nt, Homo sapiens
  misc_RNA (1)...(19): siRNA sense strand
gaaauguggaaaugucaaa

SEQ ID NO: 1983648 - RNA, 19 nt, Homo sapiens
  misc_RNA (1)...(19): siRNA sense strand
caaaucaucacgaauggaa

SEQ ID NO: 1983649 - RNA, 19 nt, Homo sapiens
  misc_RNA (1)...(19): siRNA sense strand
ucuaggagcuguuaacaag

SEQ ID NO: 1983650 - RNA, 19 nt, Homo sapiens
  misc_RNA (1)...(19): siRNA sense strand
ucagaaagaugguagaaaa

SEQ ID NO: 1983651 - RNA, 19 nt, Homo sapiens
  misc_RNA (1)...(19): siRNA sense strand
caaagacuaggaccaauga

SEQ ID NO: 1983652 - RNA, 19 nt, Homo sapiens
  misc_RNA (1)...(19): siRNA sense strand
gaaaucaucacauuagaac

SEQ ID NO: 1983653 - RNA, 19 nt, Homo sapiens
  misc_RNA (1)...(19): siRNA sense strand
gguuccagaugaagaagua

SEQ ID NO: 1983654 - RNA, 19 nt, Homo sapiens
  misc_RNA (1)...(19): siRNA sense strand
ucaagcauccugauaaaga

SEQ ID NO: 1983655 - RNA, 19 nt, Homo sapiens
  misc_RNA (1)...(19): siRNA sense strand
gaacggaugaaaugcuuau

SEQ ID NO: 1983656 - RNA, 19 nt, Homo sapiens
  misc_RNA (1)...(19): siRNA sense strand
uaacaagccacuuucauca

SEQ ID NO: 1983657 - RNA, 19 nt, Homo sapiens
  misc_RNA (1)...(19): siRNA sense strand
ucaaguaagacaaguguuu

SEQ ID NO: 1983658 - RNA, 19 nt, Homo sapiens
  misc_RNA (1)...(19): siRNA sense strand
ccuugcaccugaucaauuu

SEQ ID NO: 1983659 - RNA, 19 nt, Homo sapiens
  misc_RNA (1)...(19): siRNA sense strand
caagcaggcugaagguugu

SEQ ID NO: 1983660 - RNA, 19 nt, Homo sapiens
  misc_RNA (1)...(19): siRNA sense strand
guggagacaguauuucuuu

SEQ ID NO: 1983661 - RNA, 19 nt, Homo sapiens
  misc_RNA (1)...(19): siRNA sense strand
gagacaguauuucuuucug

SEQ ID NO: 1983662 - RNA, 19 nt, Homo sapiens
  misc_RNA (1)...(19): siRNA sense strand
gcuccucccuaggcuguuu

SEQ ID NO: 1983663 - RNA, 19 nt, Homo sapiens
  misc_RNA (1)...(19): siRNA sense strand
gacccagccugaccaacga

SEQ ID NO: 1983664 - RNA, 19 nt, Homo sapiens
  misc_RNA (1)...(19): siRNA sense strand
ggagacaguauuucuuucu

SEQ ID NO: 1983665 - RNA, 19 nt, Homo sapiens
  misc_RNA (1)...(19): siRNA sense strand
ucccuaggcuguuuuagua

SEQ ID NO: 1983666 - RNA, 19 nt, Homo sapiens
  misc_RNA (1)...(19): siRNA sense strand
gggcgcuccuuucuguuuc

SEQ ID NO: 1983667 - RNA, 19 nt, Homo sapiens
  misc_RNA (1)...(19): siRNA sense strand
uggagacaguauuucuuuc

SEQ ID NO: 1983668 - RNA, 19 nt, Homo sapiens
  misc_RNA (1)...(19): siRNA sense strand
gcacgugcgccuccacuaa

SEQ ID NO: 1983669 - RNA, 19 nt, Homo sapiens
  misc_RNA (1)...(19): siRNA sense strand
uaugagagcuuucuagaga

SEQ ID NO: 1983670 - RNA, 19 nt, Homo sapiens
  misc_RNA (1)...(19): siRNA sense strand
uggaaaggcuucaucuuaa

SEQ ID NO: 1983671 - RNA, 19 nt, Homo sapiens
  misc_RNA (1)...(19): siRNA sense strand
cggcagagcuacagaagaa

SEQ ID NO: 1983672 - RNA, 19 nt, Homo sapiens
  misc_RNA (1)...(19): siRNA sense strand
guggaaaggcuucaucuua

SEQ ID NO: 1983673 - RNA, 19 nt, Homo sapiens
  misc_RNA (1)...(19): siRNA sense strand
caugaugucugaagucuug

SEQ ID NO: 1983674 - RNA, 19 nt, Homo sapiens
  misc_RNA (1)...(19): siRNA sense strand
ccaaguacgugaucgaugu

SEQ ID NO: 1983675 - RNA, 19 nt, Homo sapiens
  misc_RNA (1)...(19): siRNA sense strand
gcccagcuguugacuauga

SEQ ID NO: 1983676 - RNA, 19 nt, Homo sapiens
  misc_RNA (1)...(19): siRNA sense strand
ggaaucaggagaucaaguu

SEQ ID NO: 1983677 - RNA, 19 nt, Homo sapiens
  misc_RNA (1)...(19): siRNA sense strand
ggagaucaaguucaaggua

SEQ ID NO: 1983678 - RNA, 19 nt, Homo sapiens
  misc_RNA (1)...(19): siRNA sense strand
ccaaagaaguugccaaagc

SEQ ID NO: 1983679 - RNA, 19 nt, Homo sapiens
  misc_RNA (1)...(19): siRNA sense strand
ggagauggcccagcuguug

SEQ ID NO: 1983680 - RNA, 19 nt, Homo sapiens
  misc_RNA (1)...(19): siRNA sense strand
ugcagggucucaccauuua

SEQ ID NO: 1983681 - RNA, 19 nt, Homo sapiens
  misc_RNA (1)...(19): siRNA sense strand
ggaaaggcuucaucuuaac

SEQ ID NO: 1983682 - RNA, 19 nt, Homo sapiens
  misc_RNA (1)...(19): siRNA sense strand
gauguggcuuccucuaguu

SEQ ID NO: 1983683 - RNA, 19 nt, Homo sapiens
  misc_RNA (1)...(19): siRNA sense strand
gcuggugccauuccuguua

SEQ ID NO: 1983684 - RNA, 19 nt, Homo sapiens
  misc_RNA (1)...(19): siRNA sense strand
gagaauggcgagaaugugu

SEQ ID NO: 1983685 - RNA, 19 nt, Homo sapiens
  misc_RNA (1)...(19): siRNA sense strand
uaaggagaauggcgagaau

SEQ ID NO: 1983686 - RNA, 19 nt, Homo sapiens
  misc_RNA (1)...(19): siRNA sense strand
ccucaucugucuucucuuc

SEQ ID NO: 1983687 - RNA, 19 nt, Homo sapiens
  misc_RNA (1)...(19): siRNA sense strand
ggaagccgauaaggagaau

SEQ ID NO: 1983688 - RNA, 19 nt, Homo sapiens
  misc_RNA (1)...(19): siRNA sense strand
acacuacuaugagagcuuu

SEQ ID NO: 1983689 - RNA, 19 nt, Homo sapiens
  misc_RNA (1)...(19): siRNA sense strand
uggcccagcuguugacuau

SEQ ID NO: 1983690 - RNA, 19 nt, Homo sapiens
  misc_RNA (1)...(19): siRNA sense strand
caauagcaaucgggacuuc

SEQ ID NO: 1983691 - RNA, 19 nt, Homo sapiens
  misc_RNA (1)...(19): siRNA sense strand
gacccaagccaguagagaa

SEQ ID NO: 1983692 - RNA, 19 nt, Homo sapiens
  misc_RNA (1)...(19): siRNA sense strand
caccacaccuggccucauc

SEQ ID NO: 1983693 - RNA, 19 nt, Homo sapiens
  misc_RNA (1)...(19): siRNA sense strand
ggccucaucugucuucucu

SEQ ID NO: 1983694 - RNA, 19 nt, Homo sapiens
  misc_RNA (1)...(19): siRNA sense strand
ugaccgggauuacaagaag

SEQ ID NO: 1983695 - RNA, 19 nt, Homo sapiens
  misc_RNA (1)...(19): siRNA sense strand
gaacuccugaccucaagug

SEQ ID NO: 1983696 - RNA, 19 nt, Homo sapiens
  misc_RNA (1)...(19): siRNA sense strand
gagauggcccagcuguuga

SEQ ID NO: 1983697 - RNA, 19 nt, Homo sapiens
  misc_RNA (1)...(19): siRNA sense strand
aaaaggcgcuggugccauu

SEQ ID NO: 1983698 - RNA, 19 nt, Homo sapiens
  misc_RNA (1)...(19): siRNA sense strand
agacaugacggcagagcua

SEQ ID NO: 1983699 - RNA, 19 nt, Homo sapiens
  misc_RNA (1)...(19): siRNA sense strand
caagauguggcuuccucua

SEQ ID NO: 1983700 - RNA, 19 nt, Homo sapiens
  misc_RNA (1)...(19): siRNA sense strand
ggaagcugccagucaguuc

SEQ ID NO: 1983701 - RNA, 19 nt, Homo sapiens
  misc_RNA (1)...(19): siRNA sense strand
guacgugaucgauguggaa

SEQ ID NO: 1983702 - RNA, 19 nt, Homo sapiens
  misc_RNA (1)...(19): siRNA sense strand
gaagcugccagucaguuca

SEQ ID NO: 1983703 - RNA, 19 nt, Homo sapiens
  misc_RNA (1)...(19): siRNA sense strand
cuugggagcauuugagaaa

SEQ ID NO: 1983704 - RNA, 19 nt, Homo sapiens
  misc_RNA (1)...(19): siRNA sense strand
gaagggguuucaccauguu

SEQ ID NO: 1983705 - RNA, 19 nt, Homo sapiens
  misc_RNA (1)...(19): siRNA sense strand
acgccguggucaacuauuu

SEQ ID NO: 1983706 - RNA, 19 nt, Homo sapiens
  misc_RNA (1)...(19): siRNA sense strand
ggacgccguggucaacuau

SEQ ID NO: 1983707 - RNA, 19 nt, Homo sapiens
  misc_RNA (1)...(19): siRNA sense strand
ggacuacgagaaggugcua

SEQ ID NO: 1983708 - RNA, 19 nt, Homo sapiens
  misc_RNA (1)...(19): siRNA sense strand
ggugcuaggcuacguggaa

SEQ ID NO: 1983709 - RNA, 19 nt, Homo sapiens
  misc_RNA (1)...(19): siRNA sense strand
cagggucucaccauuuauu

SEQ ID NO: 1983710 - RNA, 19 nt, Homo sapiens
  misc_RNA (1)...(19): siRNA sense strand
caccuggccucaucugucu

SEQ ID NO: 1983711 - RNA, 19 nt, Homo sapiens
  misc_RNA (1)...(19): siRNA sense strand
ggucucaccauuuauuucu

SEQ ID NO: 1983712 - RNA, 19 nt, Homo sapiens
  misc_RNA (1)...(19): siRNA sense strand
caacuugggagcauuugag

SEQ ID NO: 1983713 - RNA, 19 nt, Homo sapiens
  misc_RNA (1)...(19): siRNA sense strand
cuccugaccucaagugauc

SEQ ID NO: 1983714 - RNA, 19 nt, Homo sapiens
  misc_RNA (1)...(19): siRNA sense strand
agauguggcuuccucuagu

SEQ ID NO: 1983715 - RNA, 19 nt, Homo sapiens
  misc_RNA (1)...(19): siRNA sense strand
ccugggcaccuauacauga

SEQ ID NO: 1983716 - RNA, 19 nt, Homo sapiens
  misc_RNA (1)...(19): siRNA sense strand
caccucagccucccaaagu

SEQ ID NO: 1983717 - RNA, 19 nt, Homo sapiens
  misc_RNA (1)...(19): siRNA sense strand
cgaaccaggaagagaacua

SEQ ID NO: 1983718 - RNA, 19 nt, Homo sapiens
  misc_RNA (1)...(19): siRNA sense strand
gaaucaggagaucaaguuc

SEQ ID NO: 1983719 - RNA, 19 nt, Homo sapiens
  misc_RNA (1)...(19): siRNA sense strand
cugcagggucucaccauuu

SEQ ID NO: 1983720 - RNA, 19 nt, Homo sapiens
  misc_RNA (1)...(19): siRNA sense strand
gaaccaggaagagaacuac

SEQ ID NO: 1983721 - RNA, 19 nt, Homo sapiens
  misc_RNA (1)...(19): siRNA sense strand
agaucaaguucaagguaga

SEQ ID NO: 1983722 - RNA, 19 nt, Homo sapiens
  misc_RNA (1)...(19): siRNA sense strand
ggagaauggcgagaaugug

SEQ ID NO: 1983723 - RNA, 19 nt, Homo sapiens
  misc_RNA (1)...(19): siRNA sense strand
uggacgccguggucaacua

SEQ ID NO: 1983724 - RNA, 19 nt, Homo sapiens
  misc_RNA (1)...(19): siRNA sense strand
gaaaggcuucaucuuaacg

SEQ ID NO: 1983725 - RNA, 19 nt, Homo sapiens
  misc_RNA (1)...(19): siRNA sense strand
gguagagaccuuggagugu

SEQ ID NO: 1983726 - RNA, 19 nt, Homo sapiens
  misc_RNA (1)...(19): siRNA sense strand
uacagaagaagcuggagaa

SEQ ID NO: 1983727 - RNA, 19 nt, Homo sapiens
  misc_RNA (1)...(19): siRNA sense strand
ccacgcggcagaugcacaa

SEQ ID NO: 1983728 - RNA, 19 nt, Homo sapiens
  misc_RNA (1)...(19): siRNA sense strand
ggacccaagccaguagaga

SEQ ID NO: 1983729 - RNA, 19 nt, Homo sapiens
  misc_RNA (1)...(19): siRNA sense strand
uaccgaaccaggaagagaa

SEQ ID NO: 1983730 - RNA, 19 nt, Homo sapiens
  misc_RNA (1)...(19): siRNA sense strand
ccugcagggucucaccauu

SEQ ID NO: 1983731 - RNA, 19 nt, Homo sapiens
  misc_RNA (1)...(19): siRNA sense strand
aucaggagaucaaguucaa

SEQ ID NO: 1983732 - RNA, 19 nt, Homo sapiens
  misc_RNA (1)...(19): siRNA sense strand
gaccgggauuacaagaagu

SEQ ID NO: 1983733 - RNA, 19 nt, Homo sapiens
  misc_RNA (1)...(19): siRNA sense strand
ccaaagugcugggauuacc

SEQ ID NO: 1983734 - RNA, 19 nt, Homo sapiens
  misc_RNA (1)...(19): siRNA sense strand
uagacgaggacuacgagaa

SEQ ID NO: 1983735 - RNA, 19 nt, Homo sapiens
  misc_RNA (1)...(19): siRNA sense strand
ccugugaccgggauuacaa

SEQ ID NO: 1983736 - RNA, 19 nt, Homo sapiens
  misc_RNA (1)...(19): siRNA sense strand
caaagccuccugccaagcu

SEQ ID NO: 1983737 - RNA, 19 nt, Homo sapiens
  misc_RNA (1)...(19): siRNA sense strand
ugccuucacacuacuauga

SEQ ID NO: 1983738 - RNA, 19 nt, Homo sapiens
  misc_RNA (1)...(19): siRNA sense strand
agacgaggacuacgagaag

SEQ ID NO: 1983739 - RNA, 19 nt, Homo sapiens
  misc_RNA (1)...(19): siRNA sense strand
gaacaaccaaguaggauua

SEQ ID NO: 1983740 - RNA, 19 nt, Homo sapiens
  misc_RNA (1)...(19): siRNA sense strand
gaaugcugcugaucaaaua

SEQ ID NO: 1983741 - RNA, 19 nt, Homo sapiens
  misc_RNA (1)...(19): siRNA sense strand
gaaaauggcuacaugaaaa

SEQ ID NO: 1983742 - RNA, 19 nt, Homo sapiens
  misc_RNA (1)...(19): siRNA sense strand
auaaugagcugcagacuuu

SEQ ID NO: 1983743 - RNA, 19 nt, Homo sapiens
  misc_RNA (1)...(19): siRNA sense strand
guauuggacuucaucauuu

SEQ ID NO: 1983744 - RNA, 19 nt, Homo sapiens
  misc_RNA (1)...(19): siRNA sense strand
caucauaucguauaccuua

SEQ ID NO: 1983745 - RNA, 19 nt, Homo sapiens
  misc_RNA (1)...(19): siRNA sense strand
guugaaagcuuaagaaucu

SEQ ID NO: 1983746 - RNA, 19 nt, Homo sapiens
  misc_RNA (1)...(19): siRNA sense strand
gcaugacacucuauccuuu

SEQ ID NO: 1983747 - RNA, 19 nt, Homo sapiens
  misc_RNA (1)...(19): siRNA sense strand
ggguuuaucuucauucauu

SEQ ID NO: 1983748 - RNA, 19 nt, Homo sapiens
  misc_RNA (1)...(19): siRNA sense strand
gagaacaggucaucaugug

SEQ ID NO: 1983749 - RNA, 19 nt, Homo sapiens
  misc_RNA (1)...(19): siRNA sense strand
aaacaacacucaagcacaa

SEQ ID NO: 1983750 - RNA, 19 nt, Homo sapiens
  misc_RNA (1)...(19): siRNA sense strand
uccaaaggguuauguguua

SEQ ID NO: 1983751 - RNA, 19 nt, Homo sapiens
  misc_RNA (1)...(19): siRNA sense strand
gguuauguguuacuuauga

SEQ ID NO: 1983752 - RNA, 19 nt, Homo sapiens
  misc_RNA (1)...(19): siRNA sense strand
ggaaaacuguuauggaaaa

SEQ ID NO: 1983753 - RNA, 19 nt, Homo sapiens
  misc_RNA (1)...(19): siRNA sense strand
caaaaucuguuccccuuua

SEQ ID NO: 1983754 - RNA, 19 nt, Homo sapiens
  misc_RNA (1)...(19): siRNA sense strand
gaucuuugcuuugcacuug

SEQ ID NO: 1983755 - RNA, 19 nt, Homo sapiens
  misc_RNA (1)...(19): siRNA sense strand
gaaaauuccugucacuauu

SEQ ID NO: 1983756 - RNA, 19 nt, Homo sapiens
  misc_RNA (1)...(19): siRNA sense strand
caacagaggauuuaauauc

SEQ ID NO: 1983757 - RNA, 19 nt, Homo sapiens
  misc_RNA (1)...(19): siRNA sense strand
cacauugacuuaauagcua

SEQ ID NO: 1983758 - RNA, 19 nt, Homo sapiens
  misc_RNA (1)...(19): siRNA sense strand
ggacuuggagccauuauuc

SEQ ID NO: 1983759 - RNA, 19 nt, Homo sapiens
  misc_RNA (1)...(19): siRNA sense strand
caaaugagcuauguauggu

SEQ ID NO: 1983760 - RNA, 19 nt, Homo sapiens
  misc_RNA (1)...(19): siRNA sense strand
caaccaaguaggauuaauu

SEQ ID NO: 1983761 - RNA, 19 nt, Homo sapiens
  misc_RNA (1)...(19): siRNA sense strand
ugacugaaaugaagaacau

SEQ ID NO: 1983762 - RNA, 19 nt, Homo sapiens
  misc_RNA (1)...(19): siRNA sense strand
gcuuauacacauugacuua

SEQ ID NO: 1983763 - RNA, 19 nt, Homo sapiens
  misc_RNA (1)...(19): siRNA sense strand
gcucaagguucuuaauuac

SEQ ID NO: 1983764 - RNA, 19 nt, Homo sapiens
  misc_RNA (1)...(19): siRNA sense strand
cagaggauuuaauaucuug

SEQ ID NO: 1983765 - RNA, 19 nt, Homo sapiens
  misc_RNA (1)...(19): siRNA sense strand
ccaaguaggauuaauuugu

SEQ ID NO: 1983766 - RNA, 19 nt, Homo sapiens
  misc_RNA (1)...(19): siRNA sense strand
cuaaauaugaccacauuga

SEQ ID NO: 1983767 - RNA, 19 nt, Homo sapiens
  misc_RNA (1)...(19): siRNA sense strand
gacacucuauccuuucuug

SEQ ID NO: 1983768 - RNA, 19 nt, Homo sapiens
  misc_RNA (1)...(19): siRNA sense strand
ggaaugcugcugaucaaau

SEQ ID NO: 1983769 - RNA, 19 nt, Homo sapiens
  misc_RNA (1)...(19): siRNA sense strand
aaugagcuauguaugguuu

SEQ ID NO: 1983770 - RNA, 19 nt, Homo sapiens
  misc_RNA (1)...(19): siRNA sense strand
gcacaacuguuuuacuuuc

SEQ ID NO: 1983771 - RNA, 19 nt, Homo sapiens
  misc_RNA (1)...(19): siRNA sense strand
gcagagagccaaauauagc

SEQ ID NO: 1983772 - RNA, 19 nt, Homo sapiens
  misc_RNA (1)...(19): siRNA sense strand
ggaacaaccaaguaggauu

SEQ ID NO: 1983773 - RNA, 19 nt, Homo sapiens
  misc_RNA (1)...(19): siRNA sense strand
caucuuauuugaccugcuu

SEQ ID NO: 1983774 - RNA, 19 nt, Homo sapiens
  misc_RNA (1)...(19): siRNA sense strand
guagcaagucauaauguuu

SEQ ID NO: 1983775 - RNA, 19 nt, Homo sapiens
  misc_RNA (1)...(19): siRNA sense strand
ggaguagcaagucauaaug

SEQ ID NO: 1983776 - RNA, 19 nt, Homo sapiens
  misc_RNA (1)...(19): siRNA sense strand
gggaguagcaagucauaau

SEQ ID NO: 1983777 - RNA, 19 nt, Homo sapiens
  misc_RNA (1)...(19): siRNA sense strand
cuaccuacaacaauuagua

SEQ ID NO: 1983778 - RNA, 19 nt, Homo sapiens
  misc_RNA (1)...(19): siRNA sense strand
uauuugaccugcuuauaca

SEQ ID NO: 1983779 - RNA, 19 nt, Homo sapiens
  misc_RNA (1)...(19): siRNA sense strand
gcaacagaggauuuaauau

SEQ ID NO: 1983780 - RNA, 19 nt, Homo sapiens
  misc_RNA (1)...(19): siRNA sense strand
uugcagagagccaaauaua

SEQ ID NO: 1983781 - RNA, 19 nt, Homo sapiens
  misc_RNA (1)...(19): siRNA sense strand
caaguuuggcugugacuga

SEQ ID NO: 1983782 - RNA, 19 nt, Homo sapiens
  misc_RNA (1)...(19): siRNA sense strand
ggagaacaggucaucaugu

SEQ ID NO: 1983783 - RNA, 19 nt, Homo sapiens
  misc_RNA (1)...(19): siRNA sense strand
acaguaacauauucaaugg

SEQ ID NO: 1983784 - RNA, 19 nt, Homo sapiens
  misc_RNA (1)...(19): siRNA sense strand
ucaaaugagcuauguaugg

SEQ ID NO: 1983785 - RNA, 19 nt, Homo sapiens
  misc_RNA (1)...(19): siRNA sense strand
guggaaaacuguuauggaa

SEQ ID NO: 1983786 - RNA, 19 nt, Homo sapiens
  misc_RNA (1)...(19): siRNA sense strand
aaaagaaaauggcuacaug

SEQ ID NO: 1983787 - RNA, 19 nt, Homo sapiens
  misc_RNA (1)...(19): siRNA sense strand
uauagcaacagaggauuua

SEQ ID NO: 1983788 - RNA, 19 nt, Homo sapiens
  misc_RNA (1)...(19): siRNA sense strand
cugcagacuuuguucgaaa

SEQ ID NO: 1983789 - RNA, 19 nt, Homo sapiens
  misc_RNA (1)...(19): siRNA sense strand
aaucgagaacggacuauuu

SEQ ID NO: 1983790 - RNA, 19 nt, Homo sapiens
  misc_RNA (1)...(19): siRNA sense strand
uagcaagucauaauguuug

SEQ ID NO: 1983791 - RNA, 19 nt, Homo sapiens
  misc_RNA (1)...(19): siRNA sense strand
cuccaagcaucuuauuuga

SEQ ID NO: 1983792 - RNA, 19 nt, Homo sapiens
  misc_RNA (1)...(19): siRNA sense strand
agcaacagaggauuuaaua

SEQ ID NO: 1983793 - RNA, 19 nt, Homo sapiens
  misc_RNA (1)...(19): siRNA sense strand
ucuccaagcaucuuauuug

SEQ ID NO: 1983794 - RNA, 19 nt, Homo sapiens
  misc_RNA (1)...(19): siRNA sense strand
gcuuuaaacuccccuauuc

SEQ ID NO: 1983795 - RNA, 19 nt, Homo sapiens
  misc_RNA (1)...(19): siRNA sense strand
gaguagcaagucauaaugu

SEQ ID NO: 1983796 - RNA, 19 nt, Homo sapiens
  misc_RNA (1)...(19): siRNA sense strand
gcugcagacuuuguucgaa

SEQ ID NO: 1983797 - RNA, 19 nt, Homo sapiens
  misc_RNA (1)...(19): siRNA sense strand
cuccaucugcuaucaguua

SEQ ID NO: 1983798 - RNA, 19 nt, Homo sapiens
  misc_RNA (1)...(19): siRNA sense strand
gaaucacuccaucugcuau

SEQ ID NO: 1983799 - RNA, 19 nt, Homo sapiens
  misc_RNA (1)...(19): siRNA sense strand
gagaacggacuauuucacu

SEQ ID NO: 1983800 - RNA, 19 nt, Homo sapiens
  misc_RNA (1)...(19): siRNA sense strand
aguagcaagucauaauguu

SEQ ID NO: 1983801 - RNA, 19 nt, Homo sapiens
  misc_RNA (1)...(19): siRNA sense strand
aggguuauguguuacuuau

SEQ ID NO: 1983802 - RNA, 19 nt, Homo sapiens
  misc_RNA (1)...(19): siRNA sense strand
aaauauagcaacagaggau

SEQ ID NO: 1983803 - RNA, 19 nt, Homo sapiens
  misc_RNA (1)...(19): siRNA sense strand
uguaaagaagguauccaua

SEQ ID NO: 1983804 - RNA, 19 nt, Homo sapiens
  misc_RNA (1)...(19): siRNA sense strand
ugaccugcuuauacacauu

SEQ ID NO: 1983805 - RNA, 19 nt, Homo sapiens
  misc_RNA (1)...(19): siRNA sense strand
gccauuauucuaccuacaa

SEQ ID NO: 1983806 - RNA, 19 nt, Homo sapiens
  misc_RNA (1)...(19): siRNA sense strand
guacaagagacuauuugca

SEQ ID NO: 1983807 - RNA, 19 nt, Homo sapiens
  misc_RNA (1)...(19): siRNA sense strand
agcuaaauaugaccacauu

SEQ ID NO: 1983808 - RNA, 19 nt, Homo sapiens
  misc_RNA (1)...(19): siRNA sense strand
agccaaauauagcaacaga

SEQ ID NO: 1983809 - RNA, 19 nt, Homo sapiens
  misc_RNA (1)...(19): siRNA sense strand
aguauuggacuucaucauu

SEQ ID NO: 1983810 - RNA, 19 nt, Homo sapiens
  misc_RNA (1)...(19): siRNA sense strand
aagcacaacuguuuuacuu

SEQ ID NO: 1983811 - RNA, 19 nt, Homo sapiens
  misc_RNA (1)...(19): siRNA sense strand
gauaagaaaauuccuguca

SEQ ID NO: 1983812 - RNA, 19 nt, Homo sapiens
  misc_RNA (1)...(19): siRNA sense strand
caucaugugcagauucuuc

SEQ ID NO: 1983813 - RNA, 19 nt, Homo sapiens
  misc_RNA (1)...(19): siRNA sense strand
ccuauuccuucuguugaaa

SEQ ID NO: 1983814 - RNA, 19 nt, Homo sapiens
  misc_RNA (1)...(19): siRNA sense strand
ucuuguggaucuugcuaaa

SEQ ID NO: 1983815 - RNA, 19 nt, Homo sapiens
  misc_RNA (1)...(19): siRNA sense strand
cuggaaugcugcugaucaa

SEQ ID NO: 1983816 - RNA, 19 nt, Homo sapiens
  misc_RNA (1)...(19): siRNA sense strand
ugaaucacuccaucugcua

SEQ ID NO: 1983817 - RNA, 19 nt, Homo sapiens
  misc_RNA (1)...(19): siRNA sense strand
ggaacuuagacccaucuug

SEQ ID NO: 1983818 - RNA, 19 nt, Homo sapiens
  misc_RNA (1)...(19): siRNA sense strand
caagguucuuaauuacauc

SEQ ID NO: 1983819 - RNA, 19 nt, Homo sapiens
  misc_RNA (1)...(19): siRNA sense strand
uucagaauccaaaggguua

SEQ ID NO: 1983820 - RNA, 19 nt, Homo sapiens
  misc_RNA (1)...(19): siRNA sense strand
cacaauguuuaccuauauc

SEQ ID NO: 1983821 - RNA, 19 nt, Homo sapiens
  misc_RNA (1)...(19): siRNA sense strand
aagagacuauuugcagaga

SEQ ID NO: 1983822 - RNA, 19 nt, Homo sapiens
  misc_RNA (1)...(19): siRNA sense strand
ggcugugacugaaaugaag

SEQ ID NO: 1983823 - RNA, 19 nt, Homo sapiens
  misc_RNA (1)...(19): siRNA sense strand
cacucaagcacaacuguuu

SEQ ID NO: 1983824 - RNA, 19 nt, Homo sapiens
  misc_RNA (1)...(19): siRNA sense strand
ccaaaggguuauguguuac

SEQ ID NO: 1983825 - RNA, 19 nt, Homo sapiens
  misc_RNA (1)...(19): siRNA sense strand
aaaggguuauguguuacuu

SEQ ID NO: 1983826 - RNA, 19 nt, Homo sapiens
  misc_RNA (1)...(19): siRNA sense strand
ucuguccaguguuaucauu

SEQ ID NO: 1983827 - RNA, 19 nt, Homo sapiens
  misc_RNA (1)...(19): siRNA sense strand
ggucaucaugugcagauuc

SEQ ID NO: 1983828 - RNA, 19 nt, Homo sapiens
  misc_RNA (1)...(19): siRNA sense strand
gaccugcuuauacacauug

SEQ ID NO: 1983829 - RNA, 19 nt, Homo sapiens
  misc_RNA (1)...(19): siRNA sense strand
ucacucuuguaaucgagaa

SEQ ID NO: 1983830 - RNA, 19 nt, Homo sapiens
  misc_RNA (1)...(19): siRNA sense strand
gugguaaagcuuaacacuu

SEQ ID NO: 1983831 - RNA, 19 nt, Homo sapiens
  misc_RNA (1)...(19): siRNA sense strand
uguccuaagucuccaagca

SEQ ID NO: 1983832 - RNA, 19 nt, Homo sapiens
  misc_RNA (1)...(19): siRNA sense strand
uagcaacagaggauuuaau

SEQ ID NO: 1983833 - RNA, 19 nt, Homo sapiens
  misc_RNA (1)...(19): siRNA sense strand
ggagccauuauucuaccua

SEQ ID NO: 1983834 - RNA, 19 nt, Homo sapiens
  misc_RNA (1)...(19): siRNA sense strand
guuuggcugugacugaaau

SEQ ID NO: 1983835 - RNA, 19 nt, Homo sapiens
  misc_RNA (1)...(19): siRNA sense strand
gucaucaugugcagauucu

SEQ ID NO: 1983836 - RNA, 19 nt, Homo sapiens
  misc_RNA (1)...(19): siRNA sense strand
uccaucugcuaucaguuaa

SEQ ID NO: 1983837 - RNA, 19 nt, Homo sapiens
  misc_RNA (1)...(19): siRNA sense strand
aauaaugagcugcagacuu

SEQ ID NO: 1983838 - RNA, 19 nt, Homo sapiens
  misc_RNA (1)...(19): siRNA sense strand
aaaaucuguuccccuuuaa

SEQ ID NO: 1983839 - RNA, 19 nt, Homo sapiens
  misc_RNA (1)...(19): siRNA sense strand
gaaagaaguuggugacauu

SEQ ID NO: 1983840 - RNA, 19 nt, Homo sapiens
  misc_RNA (1)...(19): siRNA sense strand
ggaagaagcuaaacuggaa

SEQ ID NO: 1983841 - RNA, 19 nt, Homo sapiens
  misc_RNA (1)...(19): siRNA sense strand
ggauagagccugagaaauu

SEQ ID NO: 1983842 - RNA, 19 nt, Homo sapiens
  misc_RNA (1)...(19): siRNA sense strand
gagaagaaguuaucagaga

SEQ ID NO: 1983843 - RNA, 19 nt, Homo sapiens
  misc_RNA (1)...(19): siRNA sense strand
gagaugagguuaagaagau

SEQ ID NO: 1983844 - RNA, 19 nt, Homo sapiens
  misc_RNA (1)...(19): siRNA sense strand
guacaaaucucgaaauaac

SEQ ID NO: 1983845 - RNA, 19 nt, Homo sapiens
  misc_RNA (1)...(19): siRNA sense strand
aaagaagacucgaguuauu

SEQ ID NO: 1983846 - RNA, 19 nt, Homo sapiens
  misc_RNA (1)...(19): siRNA sense strand
cgucacagcuuaacucaaa

SEQ ID NO: 1983847 - RNA, 19 nt, Homo sapiens
  misc_RNA (1)...(19): siRNA sense strand
gauagagccugagaaauug

SEQ ID NO: 1983848 - RNA, 19 nt, Homo sapiens
  misc_RNA (1)...(19): siRNA sense strand
cgaaauaacagucauguga

SEQ ID NO: 1983849 - RNA, 19 nt, Homo sapiens
  misc_RNA (1)...(19): siRNA sense strand
gaaauuggugcaucauauu

SEQ ID NO: 1983850 - RNA, 19 nt, Homo sapiens
  misc_RNA (1)...(19): siRNA sense strand
ugugaaagauuacauguug

SEQ ID NO: 1983851 - RNA, 19 nt, Homo sapiens
  misc_RNA (1)...(19): siRNA sense strand
aaagggacauuucagauug

SEQ ID NO: 1983852 - RNA, 19 nt, Homo sapiens
  misc_RNA (1)...(19): siRNA sense strand
caaauaacguugucuucau

SEQ ID NO: 1983853 - RNA, 19 nt, Homo sapiens
  misc_RNA (1)...(19): siRNA sense strand
gaaauaacagucaugugaa

SEQ ID NO: 1983854 - RNA, 19 nt, Homo sapiens
  misc_RNA (1)...(19): siRNA sense strand
guguacaaaucucgaaaua

SEQ ID NO: 1983855 - RNA, 19 nt, Homo sapiens
  misc_RNA (1)...(19): siRNA sense strand
uaaaguggaucucaccaau

SEQ ID NO: 1983856 - RNA, 19 nt, Homo sapiens
  misc_RNA (1)...(19): siRNA sense strand
ugaguguugugaaagauua

SEQ ID NO: 1983857 - RNA, 19 nt, Homo sapiens
  misc_RNA (1)...(19): siRNA sense strand
gaauagagaagaaguuauc

SEQ ID NO: 1983858 - RNA, 19 nt, Homo sapiens
  misc_RNA (1)...(19): siRNA sense strand
agaaauuggugcaucauau

SEQ ID NO: 1983859 - RNA, 19 nt, Homo sapiens
  misc_RNA (1)...(19): siRNA sense strand
ggacauuucagauugugua

SEQ ID NO: 1983860 - RNA, 19 nt, Homo sapiens
  misc_RNA (1)...(19): siRNA sense strand
caaagggacauuucagauu

SEQ ID NO: 1983861 - RNA, 19 nt, Homo sapiens
  misc_RNA (1)...(19): siRNA sense strand
gcaaaggcaaggcucagua

SEQ ID NO: 1983862 - RNA, 19 nt, Homo sapiens
  misc_RNA (1)...(19): siRNA sense strand
gaagugagggagaggauga

SEQ ID NO: 1983863 - RNA, 19 nt, Homo sapiens
  misc_RNA (1)...(19): siRNA sense strand
gcaaauaacguugucuuca

SEQ ID NO: 1983864 - RNA, 19 nt, Homo sapiens
  misc_RNA (1)...(19): siRNA sense strand
ggauccaagucaaaugaaa

SEQ ID NO: 1983865 - RNA, 19 nt, Homo sapiens
  misc_RNA (1)...(19): siRNA sense strand
gagaaauuggugcaucaua

SEQ ID NO: 1983866 - RNA, 19 nt, Homo sapiens
  misc_RNA (1)...(19): siRNA sense strand
agaagaaguuaucagagaa

SEQ ID NO: 1983867 - RNA, 19 nt, Homo sapiens
  misc_RNA (1)...(19): siRNA sense strand
caucauauucuccaggaua

SEQ ID NO: 1983868 - RNA, 19 nt, Homo sapiens
  misc_RNA (1)...(19): siRNA sense strand
gugaauagagaagaaguua

SEQ ID NO: 1983869 - RNA, 19 nt, Homo sapiens
  misc_RNA (1)...(19): siRNA sense strand
aaggauccgucacagcuua

SEQ ID NO: 1983870 - RNA, 19 nt, Homo sapiens
  misc_RNA (1)...(19): siRNA sense strand
guacacagugguaguagaa

SEQ ID NO: 1983871 - RNA, 19 nt, Homo sapiens
  misc_RNA (1)...(19): siRNA sense strand
cuacagagaugagguuaag

SEQ ID NO: 1983872 - RNA, 19 nt, Homo sapiens
  misc_RNA (1)...(19): siRNA sense strand
gguaguagaaaucaucaaa

SEQ ID NO: 1983873 - RNA, 19 nt, Homo sapiens
  misc_RNA (1)...(19): siRNA sense strand
cgacauguaugggccagaa

SEQ ID NO: 1983874 - RNA, 19 nt, Homo sapiens
  misc_RNA (1)...(19): siRNA sense strand
uaacagucaugugaauaga

SEQ ID NO: 1983875 - RNA, 19 nt, Homo sapiens
  misc_RNA (1)...(19): siRNA sense strand
caucaggacacuugggaua

SEQ ID NO: 1983876 - RNA, 19 nt, Homo sapiens
  misc_RNA (1)...(19): siRNA sense strand
gaagaaguuaucagagaau

SEQ ID NO: 1983877 - RNA, 19 nt, Homo sapiens
  misc_RNA (1)...(19): siRNA sense strand
ggaaucugcggacaaauca

SEQ ID NO: 1983878 - RNA, 19 nt, Homo sapiens
  misc_RNA (1)...(19): siRNA sense strand
gaaguuaucagagaauugg

SEQ ID NO: 1983879 - RNA, 19 nt, Homo sapiens
  misc_RNA (1)...(19): siRNA sense strand
aaacaacacagcagaagga

SEQ ID NO: 1983880 - RNA, 19 nt, Homo sapiens
  misc_RNA (1)...(19): siRNA sense strand
gaaaguggagcaaauaacg

SEQ ID NO: 1983881 - RNA, 19 nt, Homo sapiens
  misc_RNA (1)...(19): siRNA sense strand
uaagaagauuccagucagu

SEQ ID NO: 1983882 - RNA, 19 nt, Homo sapiens
  misc_RNA (1)...(19): siRNA sense strand
caacacagcagaaggaaaa

SEQ ID NO: 1983883 - RNA, 19 nt, Homo sapiens
  misc_RNA (1)...(19): siRNA sense strand
gagcaaauaacguugucuu

SEQ ID NO: 1983884 - RNA, 19 nt, Homo sapiens
  misc_RNA (1)...(19): siRNA sense strand
ucagagaauuggcaggaau

SEQ ID NO: 1983885 - RNA, 19 nt, Homo sapiens
  misc_RNA (1)...(19): siRNA sense strand
aaauaacguugucuucauc

SEQ ID NO: 1983886 - RNA, 19 nt, Homo sapiens
  misc_RNA (1)...(19): siRNA sense strand
acagucaugugaauagaga

SEQ ID NO: 1983887 - RNA, 19 nt, Homo sapiens
  misc_RNA (1)...(19): siRNA sense strand
acagaaggauccaagucaa

SEQ ID NO: 1983888 - RNA, 19 nt, Homo sapiens
  misc_RNA (1)...(19): siRNA sense strand
gggaggagccaaaccugaa

SEQ ID NO: 1983889 - RNA, 19 nt, Homo sapiens
  misc_RNA (1)...(19): siRNA sense strand
cuacagggcauccucauca

SEQ ID NO: 1983890 - RNA, 19 nt, Homo sapiens
  misc_RNA (1)...(19): siRNA sense strand
gaaggauccaagucaaaug

SEQ ID NO: 1983891 - RNA, 19 nt, Homo sapiens
  misc_RNA (1)...(19): siRNA sense strand
caaacaaagggacauuuca

SEQ ID NO: 1983892 - RNA, 19 nt, Homo sapiens
  misc_RNA (1)...(19): siRNA sense strand
caaaggcaaggcucaguau

SEQ ID NO: 1983893 - RNA, 19 nt, Homo sapiens
  misc_RNA (1)...(19): siRNA sense strand
gcggacaaaucagaccaaa

SEQ ID NO: 1983894 - RNA, 19 nt, Homo sapiens
  misc_RNA (1)...(19): siRNA sense strand
acacagugguaguagaaau

SEQ ID NO: 1983895 - RNA, 19 nt, Homo sapiens
  misc_RNA (1)...(19): siRNA sense strand
cagagaauuggcaggaaua

SEQ ID NO: 1983896 - RNA, 19 nt, Homo sapiens
  misc_RNA (1)...(19): siRNA sense strand
uagagaagaaguuaucaga

SEQ ID NO: 1983897 - RNA, 19 nt, Homo sapiens
  misc_RNA (1)...(19): siRNA sense strand
cgaauacggcgacgacaug

SEQ ID NO: 1983898 - RNA, 19 nt, Homo sapiens
  misc_RNA (1)...(19): siRNA sense strand
ccaaacaaagggacauuuc

SEQ ID NO: 1983899 - RNA, 19 nt, Homo sapiens
  misc_RNA (1)...(19): siRNA sense strand
acagagaugagguuaagaa

SEQ ID NO: 1983900 - RNA, 19 nt, Homo sapiens
  misc_RNA (1)...(19): siRNA sense strand
cagcagguaccagagaaua

SEQ ID NO: 1983901 - RNA, 19 nt, Homo sapiens
  misc_RNA (1)...(19): siRNA sense strand
agaauuggcaggaauagug

SEQ ID NO: 1983902 - RNA, 19 nt, Homo sapiens
  misc_RNA (1)...(19): siRNA sense strand
ucaggacacuugggauaga

SEQ ID NO: 1983903 - RNA, 19 nt, Homo sapiens
  misc_RNA (1)...(19): siRNA sense strand
guuaagaagauuccaguca

SEQ ID NO: 1983904 - RNA, 19 nt, Homo sapiens
  misc_RNA (1)...(19): siRNA sense strand
ucaugugaauagagaagaa

SEQ ID NO: 1983905 - RNA, 19 nt, Homo sapiens
  misc_RNA (1)...(19): siRNA sense strand
aagaagacucgaguuauuu

SEQ ID NO: 1983906 - RNA, 19 nt, Homo sapiens
  misc_RNA (1)...(19): siRNA sense strand
ccucaucaccugcaauaug

SEQ ID NO: 1983907 - RNA, 19 nt, Homo sapiens
  misc_RNA (1)...(19): siRNA sense strand
cagaaaaguuuacagacaa

SEQ ID NO: 1983908 - RNA, 19 nt, Homo sapiens
  misc_RNA (1)...(19): siRNA sense strand
guggaaaguggagcaaaua

SEQ ID NO: 1983909 - RNA, 19 nt, Homo sapiens
  misc_RNA (1)...(19): siRNA sense strand
agaaagaaguuggugacau

SEQ ID NO: 1983910 - RNA, 19 nt, Homo sapiens
  misc_RNA (1)...(19): siRNA sense strand
cagaaggauccaagucaaa

SEQ ID NO: 1983911 - RNA, 19 nt, Homo sapiens
  misc_RNA (1)...(19): siRNA sense strand
agaaguuggugacauuaag

SEQ ID NO: 1983912 - RNA, 19 nt, Homo sapiens
  misc_RNA (1)...(19): siRNA sense strand
aaagaaguuggugacauua

SEQ ID NO: 1983913 - RNA, 19 nt, Homo sapiens
  misc_RNA (1)...(19): siRNA sense strand
ggacaaaucagaccaaaac

SEQ ID NO: 1983914 - RNA, 19 nt, Homo sapiens
  misc_RNA (1)...(19): siRNA sense strand
gaaaauaaaguggaucuca

SEQ ID NO: 1983915 - RNA, 19 nt, Homo sapiens
  misc_RNA (1)...(19): siRNA sense strand
gaauuggcaggaauagugu

SEQ ID NO: 1983916 - RNA, 19 nt, Homo sapiens
  misc_RNA (1)...(19): siRNA sense strand
ccagaaaaguuuacagaca

SEQ ID NO: 1983917 - RNA, 19 nt, Homo sapiens
  misc_RNA (1)...(19): siRNA sense strand
ggaaaguggagcaaauaac

SEQ ID NO: 1983918 - RNA, 19 nt, Homo sapiens
  misc_RNA (1)...(19): siRNA sense strand
gcagggaaauggggaagaa

SEQ ID NO: 1983919 - RNA, 19 nt, Homo sapiens
  misc_RNA (1)...(19): siRNA sense strand
gaaaucaucaaagcugucu

SEQ ID NO: 1983920 - RNA, 19 nt, Homo sapiens
  misc_RNA (1)...(19): siRNA sense strand
gccugaguguugugaaaga

SEQ ID NO: 1983921 - RNA, 19 nt, Homo sapiens
  misc_RNA (1)...(19): siRNA sense strand
acagccuccucaacgaaua

SEQ ID NO: 1983922 - RNA, 19 nt, Homo sapiens
  misc_RNA (1)...(19): siRNA sense strand
gcaagucaagccacagaag

SEQ ID NO: 1983923 - RNA, 19 nt, Homo sapiens
  misc_RNA (1)...(19): siRNA sense strand
acuggaaucugcggacaaa

SEQ ID NO: 1983924 - RNA, 19 nt, Homo sapiens
  misc_RNA (1)...(19): siRNA sense strand
gaaauggggaagaagcuaa

SEQ ID NO: 1983925 - RNA, 19 nt, Homo sapiens
  misc_RNA (1)...(19): siRNA sense strand
uaguagaaaucaucaaagc

SEQ ID NO: 1983926 - RNA, 19 nt, Homo sapiens
  misc_RNA (1)...(19): siRNA sense strand
ugggauagagccugagaaa

SEQ ID NO: 1983927 - RNA, 19 nt, Homo sapiens
  misc_RNA (1)...(19): siRNA sense strand
gugaaagauuacauguugu

SEQ ID NO: 1983928 - RNA, 19 nt, Homo sapiens
  misc_RNA (1)...(19): siRNA sense strand
cugagaaauuggugcauca

SEQ ID NO: 1983929 - RNA, 19 nt, Homo sapiens
  misc_RNA (1)...(19): siRNA sense strand
aggcaaggcucaguaugug

SEQ ID NO: 1983930 - RNA, 19 nt, Homo sapiens
  misc_RNA (1)...(19): siRNA sense strand
agccaaaccugaacuugca

SEQ ID NO: 1983931 - RNA, 19 nt, Homo sapiens
  misc_RNA (1)...(19): siRNA sense strand
auuaaggcaucuacagaga

SEQ ID NO: 1983932 - RNA, 19 nt, Homo sapiens
  misc_RNA (1)...(19): siRNA sense strand
uggaaaguggagcaaauaa

SEQ ID NO: 1983933 - RNA, 19 nt, Homo sapiens
  misc_RNA (1)...(19): siRNA sense strand
gaagaagcuaaacuggaau

SEQ ID NO: 1983934 - RNA, 19 nt, Homo sapiens
  misc_RNA (1)...(19): siRNA sense strand
cgaguuauuuugcgaaugu

SEQ ID NO: 1983935 - RNA, 19 nt, Homo sapiens
  misc_RNA (1)...(19): siRNA sense strand
acaaagggacauuucagau

SEQ ID NO: 1983936 - RNA, 19 nt, Homo sapiens
  misc_RNA (1)...(19): siRNA sense strand
ccacagaaggauccaaguc

SEQ ID NO: 1983937 - RNA, 19 nt, Homo sapiens
  misc_RNA (1)...(19): siRNA sense strand
gaagcuaaacuggaaucug

SEQ ID NO: 1983938 - RNA, 19 nt, Homo sapiens
  misc_RNA (1)...(19): siRNA sense strand
ccuacagccuccucaacga

SEQ ID NO: 1983939 - RNA, 19 nt, Homo sapiens
  misc_RNA (1)...(19): siRNA sense strand
gacaaaugcuuaccacaua

SEQ ID NO: 1983940 - RNA, 19 nt, Homo sapiens
  misc_RNA (1)...(19): siRNA sense strand
ccauguaacuuuaguguaa

SEQ ID NO: 1983941 - RNA, 19 nt, Homo sapiens
  misc_RNA (1)...(19): siRNA sense strand
gcacauaguggcaugaaua

SEQ ID NO: 1983942 - RNA, 19 nt, Homo sapiens
  misc_RNA (1)...(19): siRNA sense strand
ggaggaaucaagccauuua

SEQ ID NO: 1983943 - RNA, 19 nt, Homo sapiens
  misc_RNA (1)...(19): siRNA sense strand
gaguauauaucaugugaga

SEQ ID NO: 1983944 - RNA, 19 nt, Homo sapiens
  misc_RNA (1)...(19): siRNA sense strand
cggaugaucuuauuaaugu

SEQ ID NO: 1983945 - RNA, 19 nt, Homo sapiens
  misc_RNA (1)...(19): siRNA sense strand
gauauugaauggcucacua

SEQ ID NO: 1983946 - RNA, 19 nt, Homo sapiens
  misc_RNA (1)...(19): siRNA sense strand
ugaucaagcuucugaguuu

SEQ ID NO: 1983947 - RNA, 19 nt, Homo sapiens
  misc_RNA (1)...(19): siRNA sense strand
uggaaucucugguaucuuu

SEQ ID NO: 1983948 - RNA, 19 nt, Homo sapiens
  misc_RNA (1)...(19): siRNA sense strand
uaaccaaggugccauugaa

SEQ ID NO: 1983949 - RNA, 19 nt, Homo sapiens
  misc_RNA (1)...(19): siRNA sense strand
gauauauucuugucucaug

SEQ ID NO: 1983950 - RNA, 19 nt, Homo sapiens
  misc_RNA (1)...(19): siRNA sense strand
gacaagaaguggaaaauaa

SEQ ID NO: 1983951 - RNA, 19 nt, Homo sapiens
  misc_RNA (1)...(19): siRNA sense strand
gagaagaccagagugaaua

SEQ ID NO: 1983952 - RNA, 19 nt, Homo sapiens
  misc_RNA (1)...(19): siRNA sense strand
caaaugcagcugauucaua

SEQ ID NO: 1983953 - RNA, 19 nt, Homo sapiens
  misc_RNA (1)...(19): siRNA sense strand
gaacaugaaccugaacaaa

SEQ ID NO: 1983954 - RNA, 19 nt, Homo sapiens
  misc_RNA (1)...(19): siRNA sense strand
gaccagagugaauauaaua

SEQ ID NO: 1983955 - RNA, 19 nt, Homo sapiens
  misc_RNA (1)...(19): siRNA sense strand
gaagaugaagauaguauug

SEQ ID NO: 1983956 - RNA, 19 nt, Homo sapiens
  misc_RNA (1)...(19): siRNA sense strand
caucugcucugucuucuau

SEQ ID NO: 1983957 - RNA, 19 nt, Homo sapiens
  misc_RNA (1)...(19): siRNA sense strand
ugaagaggcugagugauga

SEQ ID NO: 1983958 - RNA, 19 nt, Homo sapiens
  misc_RNA (1)...(19): siRNA sense strand
gauuguaucuucugaugau

SEQ ID NO: 1983959 - RNA, 19 nt, Homo sapiens
  misc_RNA (1)...(19): siRNA sense strand
gaggaggaaucaagccauu

SEQ ID NO: 1983960 - RNA, 19 nt, Homo sapiens
  misc_RNA (1)...(19): siRNA sense strand
agaagaagaugaagauagu

SEQ ID NO: 1983961 - RNA, 19 nt, Homo sapiens
  misc_RNA (1)...(19): siRNA sense strand
ugaagcagccuauagauau

SEQ ID NO: 1983962 - RNA, 19 nt, Homo sapiens
  misc_RNA (1)...(19): siRNA sense strand
acaugaaccugaacaaaga

SEQ ID NO: 1983963 - RNA, 19 nt, Homo sapiens
  misc_RNA (1)...(19): siRNA sense strand
gaaguuugccgccuugaug

SEQ ID NO: 1983964 - RNA, 19 nt, Homo sapiens
  misc_RNA (1)...(19): siRNA sense strand
ggacaaaugcuuaccacau

SEQ ID NO: 1983965 - RNA, 19 nt, Homo sapiens
  misc_RNA (1)...(19): siRNA sense strand
gcucuaugauuguaucuuc

SEQ ID NO: 1983966 - RNA, 19 nt, Homo sapiens
  misc_RNA (1)...(19): siRNA sense strand
gaagauaguauuguaagug

SEQ ID NO: 1983967 - RNA, 19 nt, Homo sapiens
  misc_RNA (1)...(19): siRNA sense strand
aaaugcagcugauucauag

SEQ ID NO: 1983968 - RNA, 19 nt, Homo sapiens
  misc_RNA (1)...(19): siRNA sense strand
agaagaagguaugaaagaa

SEQ ID NO: 1983969 - RNA, 19 nt, Homo sapiens
  misc_RNA (1)...(19): siRNA sense strand
gaagaagaagaugaagaua

SEQ ID NO: 1983970 - RNA, 19 nt, Homo sapiens
  misc_RNA (1)...(19): siRNA sense strand
gaaucaugaucucaagguu

SEQ ID NO: 1983971 - RNA, 19 nt, Homo sapiens
  misc_RNA (1)...(19): siRNA sense strand
gcugagugaugaacaugaa

SEQ ID NO: 1983972 - RNA, 19 nt, Homo sapiens
  misc_RNA (1)...(19): siRNA sense strand
gaaccugaacaaagaaaga

SEQ ID NO: 1983973 - RNA, 19 nt, Homo sapiens
  misc_RNA (1)...(19): siRNA sense strand
caugcaaggugggauuaua

SEQ ID NO: 1983974 - RNA, 19 nt, Homo sapiens
  misc_RNA (1)...(19): siRNA sense strand
aggaugauguggagaguaa

SEQ ID NO: 1983975 - RNA, 19 nt, Homo sapiens
  misc_RNA (1)...(19): siRNA sense strand
cugauuacuuggaauauga

SEQ ID NO: 1983976 - RNA, 19 nt, Homo sapiens
  misc_RNA (1)...(19): siRNA sense strand
caacuuggcaucauagaca

SEQ ID NO: 1983977 - RNA, 19 nt, Homo sapiens
  misc_RNA (1)...(19): siRNA sense strand
aagguuccauguaacuuua

SEQ ID NO: 1983978 - RNA, 19 nt, Homo sapiens
  misc_RNA (1)...(19): siRNA sense strand
ggacagacagccagagcaa

SEQ ID NO: 1983979 - RNA, 19 nt, Homo sapiens
  misc_RNA (1)...(19): siRNA sense strand
cagaagaagguaugaaaga

SEQ ID NO: 1983980 - RNA, 19 nt, Homo sapiens
  misc_RNA (1)...(19): siRNA sense strand
cuacggaugaucuuauuaa

SEQ ID NO: 1983981 - RNA, 19 nt, Homo sapiens
  misc_RNA (1)...(19): siRNA sense strand
ucugcucugucuucuauua

SEQ ID NO: 1983982 - RNA, 19 nt, Homo sapiens
  misc_RNA (1)...(19): siRNA sense strand
gaagaccagagugaauaua

SEQ ID NO: 1983983 - RNA, 19 nt, Homo sapiens
  misc_RNA (1)...(19): siRNA sense strand
ggagaagaccagagugaau

SEQ ID NO: 1983984 - RNA, 19 nt, Homo sapiens
  misc_RNA (1)...(19): siRNA sense strand
ggaauaugccagaaaauaa

SEQ ID NO: 1983985 - RNA, 19 nt, Homo sapiens
  misc_RNA (1)...(19): siRNA sense strand
ggauuauagugcaacagaa

SEQ ID NO: 1983986 - RNA, 19 nt, Homo sapiens
  misc_RNA (1)...(19): siRNA sense strand
gcccaaguaucgucacaug

SEQ ID NO: 1983987 - RNA, 19 nt, Homo sapiens
  misc_RNA (1)...(19): siRNA sense strand
gaagaagguaugaaagaag

SEQ ID NO: 1983988 - RNA, 19 nt, Homo sapiens
  misc_RNA (1)...(19): siRNA sense strand
gaucucaagguuccaugua

SEQ ID NO: 1983989 - RNA, 19 nt, Homo sapiens
  misc_RNA (1)...(19): siRNA sense strand
gguggaaucucugguaucu

SEQ ID NO: 1983990 - RNA, 19 nt, Homo sapiens
  misc_RNA (1)...(19): siRNA sense strand
ucauguguguggugaauau

SEQ ID NO: 1983991 - RNA, 19 nt, Homo sapiens
  misc_RNA (1)...(19): siRNA sense strand
caagguuccauguaacuuu

SEQ ID NO: 1983992 - RNA, 19 nt, Homo sapiens
  misc_RNA (1)...(19): siRNA sense strand
ucucaaaccuacuuauugg

SEQ ID NO: 1983993 - RNA, 19 nt, Homo sapiens
  misc_RNA (1)...(19): siRNA sense strand
gaaucucugguaucuuuaa

SEQ ID NO: 1983994 - RNA, 19 nt, Homo sapiens
  misc_RNA (1)...(19): siRNA sense strand
ugaagaagaagaugaagau

SEQ ID NO: 1983995 - RNA, 19 nt, Homo sapiens
  misc_RNA (1)...(19): siRNA sense strand
gaagaagaugaagauagua

SEQ ID NO: 1983996 - RNA, 19 nt, Homo sapiens
  misc_RNA (1)...(19): siRNA sense strand
caugauuggccaagaagua

SEQ ID NO: 1983997 - RNA, 19 nt, Homo sapiens
  misc_RNA (1)...(19): siRNA sense strand
gagcaucucaaaccuacuu

SEQ ID NO: 1983998 - RNA, 19 nt, Homo sapiens
  misc_RNA (1)...(19): siRNA sense strand
aggaguauauaucauguga

SEQ ID NO: 1983999 - RNA, 19 nt, Homo sapiens
  misc_RNA (1)...(19): siRNA sense strand
gagaggacuuaaccaaggu

SEQ ID NO: 1984000 - RNA, 19 nt, Homo sapiens
  misc_RNA (1)...(19): siRNA sense strand
gaucaagcuucugaguuuc

SEQ ID NO: 1984001 - RNA, 19 nt, Homo sapiens
  misc_RNA (1)...(19): siRNA sense strand
gccaagaaguauauaucau

SEQ ID NO: 1984002 - RNA, 19 nt, Homo sapiens
  misc_RNA (1)...(19): siRNA sense strand
caucuacaaucaggaguau

SEQ ID NO: 1984003 - RNA, 19 nt, Homo sapiens
  misc_RNA (1)...(19): siRNA sense strand
ugaugaacaugaaccugaa

SEQ ID NO: 1984004 - RNA, 19 nt, Homo sapiens
  misc_RNA (1)...(19): siRNA sense strand
gauccuagcaagccacaga

SEQ ID NO: 1984005 - RNA, 19 nt, Homo sapiens
  misc_RNA (1)...(19): siRNA sense strand
gaagguaugaaagaaguau

SEQ ID NO: 1984006 - RNA, 19 nt, Homo sapiens
  misc_RNA (1)...(19): siRNA sense strand
gaaaccaugaagccucaaa

SEQ ID NO: 1984007 - RNA, 19 nt, Homo sapiens
  misc_RNA (1)...(19): siRNA sense strand
caaguaucgucacaugcaa

SEQ ID NO: 1984008 - RNA, 19 nt, Homo sapiens
  misc_RNA (1)...(19): siRNA sense strand
caucucaaaccuacuuauu

SEQ ID NO: 1984009 - RNA, 19 nt, Homo sapiens
  misc_RNA (1)...(19): siRNA sense strand
ucucaugauuggccaagaa

SEQ ID NO: 1984010 - RNA, 19 nt, Homo sapiens
  misc_RNA (1)...(19): siRNA sense strand
gccaggcucuaugauugua

SEQ ID NO: 1984011 - RNA, 19 nt, Homo sapiens
  misc_RNA (1)...(19): siRNA sense strand
cuucugaguuucugcaguu

SEQ ID NO: 1984012 - RNA, 19 nt, Homo sapiens
  misc_RNA (1)...(19): siRNA sense strand
uggcaccaaacauuuauua

SEQ ID NO: 1984013 - RNA, 19 nt, Homo sapiens
  misc_RNA (1)...(19): siRNA sense strand
gcaagccacagacacaaau

SEQ ID NO: 1984014 - RNA, 19 nt, Homo sapiens
  misc_RNA (1)...(19): siRNA sense strand
aagaagguaugaaagaagu

SEQ ID NO: 1984015 - RNA, 19 nt, Homo sapiens
  misc_RNA (1)...(19): siRNA sense strand
gggauuauagugcaacaga

SEQ ID NO: 1984016 - RNA, 19 nt, Homo sapiens
  misc_RNA (1)...(19): siRNA sense strand
ggcuacggaugaucuuauu

SEQ ID NO: 1984017 - RNA, 19 nt, Homo sapiens
  misc_RNA (1)...(19): siRNA sense strand
ucucugguaucuuuaaauc

SEQ ID NO: 1984018 - RNA, 19 nt, Homo sapiens
  misc_RNA (1)...(19): siRNA sense strand
caucauguguguggugaau

SEQ ID NO: 1984019 - RNA, 19 nt, Homo sapiens
  misc_RNA (1)...(19): siRNA sense strand
aauaauggccugcaugcaa

SEQ ID NO: 1984020 - RNA, 19 nt, Homo sapiens
  misc_RNA (1)...(19): siRNA sense strand
ccagugcuccugauuacuu

SEQ ID NO: 1984021 - RNA, 19 nt, Homo sapiens
  misc_RNA (1)...(19): siRNA sense strand
cagcaucaggcaaaggaua

SEQ ID NO: 1984022 - RNA, 19 nt, Homo sapiens
  misc_RNA (1)...(19): siRNA sense strand
cauuuacgcugcaguggau

SEQ ID NO: 1984023 - RNA, 19 nt, Homo sapiens
  misc_RNA (1)...(19): siRNA sense strand
ucaggaguauauaucaugu

SEQ ID NO: 1984024 - RNA, 19 nt, Homo sapiens
  misc_RNA (1)...(19): siRNA sense strand
uugccaggcucuaugauug

SEQ ID NO: 1984025 - RNA, 19 nt, Homo sapiens
  misc_RNA (1)...(19): siRNA sense strand
gcucugucuucuauuaauc

SEQ ID NO: 1984026 - RNA, 19 nt, Homo sapiens
  misc_RNA (1)...(19): siRNA sense strand
agaccagagugaauauaau

SEQ ID NO: 1984027 - RNA, 19 nt, Homo sapiens
  misc_RNA (1)...(19): siRNA sense strand
agacacaaaugcagcugau

SEQ ID NO: 1984028 - RNA, 19 nt, Homo sapiens
  misc_RNA (1)...(19): siRNA sense strand
cuucagauauuagagauag

SEQ ID NO: 1984029 - RNA, 19 nt, Homo sapiens
  misc_RNA (1)...(19): siRNA sense strand
agccagagcaaccaaauuu

SEQ ID NO: 1984030 - RNA, 19 nt, Homo sapiens
  misc_RNA (1)...(19): siRNA sense strand
gaaguccagcugccucaga

SEQ ID NO: 1984031 - RNA, 19 nt, Homo sapiens
  misc_RNA (1)...(19): siRNA sense strand
cugaagcagccuauagaua

SEQ ID NO: 1984032 - RNA, 19 nt, Homo sapiens
  misc_RNA (1)...(19): siRNA sense strand
ggaaucucugguaucuuua

SEQ ID NO: 1984033 - RNA, 19 nt, Homo sapiens
  misc_RNA (1)...(19): siRNA sense strand
uaaugacucuggagaagac

SEQ ID NO: 1984034 - RNA, 19 nt, Homo sapiens
  misc_RNA (1)...(19): siRNA sense strand
caacagaagaagguaugaa

SEQ ID NO: 1984035 - RNA, 19 nt, Homo sapiens
  misc_RNA (1)...(19): siRNA sense strand
ggccaagaaguauauauca

SEQ ID NO: 1984036 - RNA, 19 nt, Homo sapiens
  misc_RNA (1)...(19): siRNA sense strand
acacaaaugcagcugauuc

SEQ ID NO: 1984037 - RNA, 19 nt, Homo sapiens
  misc_RNA (1)...(19): siRNA sense strand
acaaaugcuuaccacauag

SEQ ID NO: 1984038 - RNA, 19 nt, Homo sapiens
  misc_RNA (1)...(19): siRNA sense strand
agcaacuucuuaagacuaa

SEQ ID NO: 1984039 - RNA, 19 nt, Homo sapiens
  misc_RNA (1)...(19): siRNA sense strand
gaagggcgcuacaaagaga

SEQ ID NO: 1984040 - RNA, 19 nt, Homo sapiens
  misc_RNA (1)...(19): siRNA sense strand
ggaauaaucugcccaucug

SEQ ID NO: 1984041 - RNA, 19 nt, Homo sapiens
  misc_RNA (1)...(19): siRNA sense strand
caauggagauggauuucua

SEQ ID NO: 1984042 - RNA, 19 nt, Homo sapiens
  misc_RNA (1)...(19): siRNA sense strand
ggaaugaacccgagcaaug

SEQ ID NO: 1984043 - RNA, 19 nt, Homo sapiens
  misc_RNA (1)...(19): siRNA sense strand
gauggaacguggaauaauc

SEQ ID NO: 1984044 - RNA, 19 nt, Homo sapiens
  misc_RNA (1)...(19): siRNA sense strand
ggagagaagcuaaucauca

SEQ ID NO: 1984045 - RNA, 19 nt, Homo sapiens
  misc_RNA (1)...(19): siRNA sense strand
gaugauggaacguggaaua

SEQ ID NO: 1984046 - RNA, 19 nt, Homo sapiens
  misc_RNA (1)...(19): siRNA sense strand
gaagaugcugagauucaua

SEQ ID NO: 1984047 - RNA, 19 nt, Homo sapiens
  misc_RNA (1)...(19): siRNA sense strand
gagcaauggagauggauuu

SEQ ID NO: 1984048 - RNA, 19 nt, Homo sapiens
  misc_RNA (1)...(19): siRNA sense strand
caagacauauagacaugga

SEQ ID NO: 1984049 - RNA, 19 nt, Homo sapiens
  misc_RNA (1)...(19): siRNA sense strand
cuacaaagagacuguguuu

SEQ ID NO: 1984050 - RNA, 19 nt, Homo sapiens
  misc_RNA (1)...(19): siRNA sense strand
gagagaagcuaaucaucac

SEQ ID NO: 1984051 - RNA, 19 nt, Homo sapiens
  misc_RNA (1)...(19): siRNA sense strand
gaaugaacccgagcaaugg

SEQ ID NO: 1984052 - RNA, 19 nt, Homo sapiens
  misc_RNA (1)...(19): siRNA sense strand
gacuguguuugaagcauuu

SEQ ID NO: 1984053 - RNA, 19 nt, Homo sapiens
  misc_RNA (1)...(19): siRNA sense strand
augcugagauucauaacaa

SEQ ID NO: 1984054 - RNA, 19 nt, Homo sapiens
  misc_RNA (1)...(19): siRNA sense strand
ggcuggaucccaagugaua

SEQ ID NO: 1984055 - RNA, 19 nt, Homo sapiens
  misc_RNA (1)...(19): siRNA sense strand
ccguaucccucaaaucgaa

SEQ ID NO: 1984056 - RNA, 19 nt, Homo sapiens
  misc_RNA (1)...(19): siRNA sense strand
gcuccaaagucuguauuca

SEQ ID NO: 1984057 - RNA, 19 nt, Homo sapiens
  misc_RNA (1)...(19): siRNA sense strand
gagaagcuaaucaucacuu

SEQ ID NO: 1984058 - RNA, 19 nt, Homo sapiens
  misc_RNA (1)...(19): siRNA sense strand
aacaagacauauagacaug

SEQ ID NO: 1984059 - RNA, 19 nt, Homo sapiens
  misc_RNA (1)...(19): siRNA sense strand
ucacuugucaugaaggauu

SEQ ID NO: 1984060 - RNA, 19 nt, Homo sapiens
  misc_RNA (1)...(19): siRNA sense strand
agacuguguuugaagcauu

SEQ ID NO: 1984061 - RNA, 19 nt, Homo sapiens
  misc_RNA (1)...(19): siRNA sense strand
gaccuacacaauaugguuu

SEQ ID NO: 1984062 - RNA, 19 nt, Homo sapiens
  misc_RNA (1)...(19): siRNA sense strand
gcggagggguuuucuuuga

SEQ ID NO: 1984063 - RNA, 19 nt, Homo sapiens
  misc_RNA (1)...(19): siRNA sense strand
caucacuugucaugaagga

SEQ ID NO: 1984064 - RNA, 19 nt, Homo sapiens
  misc_RNA (1)...(19): siRNA sense strand
caagaagauugccguaucc

SEQ ID NO: 1984065 - RNA, 19 nt, Homo sapiens
  misc_RNA (1)...(19): siRNA sense strand
uaggcuggaucccaaguga

SEQ ID NO: 1984066 - RNA, 19 nt, Homo sapiens
  misc_RNA (1)...(19): siRNA sense strand
cgaagaugcugagauucau

SEQ ID NO: 1984067 - RNA, 19 nt, Homo sapiens
  misc_RNA (1)...(19): siRNA sense strand
agacauggagagaagcuaa

SEQ ID NO: 1984068 - RNA, 19 nt, Homo sapiens
  misc_RNA (1)...(19): siRNA sense strand
cuaaucaucacuugucaug

SEQ ID NO: 1984069 - RNA, 19 nt, Homo sapiens
  misc_RNA (1)...(19): siRNA sense strand
agaagcuaaucaucacuug

SEQ ID NO: 1984070 - RNA, 19 nt, Homo sapiens
  misc_RNA (1)...(19): siRNA sense strand
cugaagggcgcuacaaaga

SEQ ID NO: 1984071 - RNA, 19 nt, Homo sapiens
  misc_RNA (1)...(19): siRNA sense strand
gcugagauucauaacaaga

SEQ ID NO: 1984072 - RNA, 19 nt, Homo sapiens
  misc_RNA (1)...(19): siRNA sense strand
ucgaagaugcugagauuca

SEQ ID NO: 1984073 - RNA, 19 nt, Homo sapiens
  misc_RNA (1)...(19): siRNA sense strand
caagugauaauuccaucug

SEQ ID NO: 1984074 - RNA, 19 nt, Homo sapiens
  misc_RNA (1)...(19): siRNA sense strand
cgaccuacacaauaugguu

SEQ ID NO: 1984075 - RNA, 19 nt, Homo sapiens
  misc_RNA (1)...(19): siRNA sense strand
ccaucugugugcaagaaga

SEQ ID NO: 1984076 - RNA, 19 nt, Homo sapiens
  misc_RNA (1)...(19): siRNA sense strand
ccucccaggugccaagaga

SEQ ID NO: 1984077 - RNA, 19 nt, Homo sapiens
  misc_RNA (1)...(19): siRNA sense strand
cggguucgaugaccuucaa

SEQ ID NO: 1984078 - RNA, 19 nt, Homo sapiens
  misc_RNA (1)...(19): siRNA sense strand
gaagcuaaucaucacuugu

SEQ ID NO: 1984079 - RNA, 19 nt, Homo sapiens
  misc_RNA (1)...(19): siRNA sense strand
gaucccaagugauaauucc

SEQ ID NO: 1984080 - RNA, 19 nt, Homo sapiens
  misc_RNA (1)...(19): siRNA sense strand
auauagacauggagagaag

SEQ ID NO: 1984081 - RNA, 19 nt, Homo sapiens
  misc_RNA (1)...(19): siRNA sense strand
ugagauucauaacaagaca

SEQ ID NO: 1984082 - RNA, 19 nt, Homo sapiens
  misc_RNA (1)...(19): siRNA sense strand
aagaugcugagauucauaa

SEQ ID NO: 1984083 - RNA, 19 nt, Homo sapiens
  misc_RNA (1)...(19): siRNA sense strand
gcugaagggcgcuacaaag

SEQ ID NO: 1984084 - RNA, 19 nt, Homo sapiens
  misc_RNA (1)...(19): siRNA sense strand
gugauaauuccaucugugu

SEQ ID NO: 1984085 - RNA, 19 nt, Homo sapiens
  misc_RNA (1)...(19): siRNA sense strand
cgaugaccuucaagugugu

SEQ ID NO: 1984086 - RNA, 19 nt, Homo sapiens
  misc_RNA (1)...(19): siRNA sense strand
gccgugauccugugguuuc

SEQ ID NO: 1984087 - RNA, 19 nt, Homo sapiens
  misc_RNA (1)...(19): siRNA sense strand
gcgaugauggaacguggaa

SEQ ID NO: 1984088 - RNA, 19 nt, Homo sapiens
  misc_RNA (1)...(19): siRNA sense strand
gagacuguguuugaagcau

SEQ ID NO: 1984089 - RNA, 19 nt, Homo sapiens
  misc_RNA (1)...(19): siRNA sense strand
ucggacaacccugacauaa

SEQ ID NO: 1984090 - RNA, 19 nt, Homo sapiens
  misc_RNA (1)...(19): siRNA sense strand
cauauagacauggagagaa

SEQ ID NO: 1984091 - RNA, 19 nt, Homo sapiens
  misc_RNA (1)...(19): siRNA sense strand
gcuacaaagagacuguguu

SEQ ID NO: 1984092 - RNA, 19 nt, Homo sapiens
  misc_RNA (1)...(19): siRNA sense strand
gaauaaucugcccaucugu

SEQ ID NO: 1984093 - RNA, 19 nt, Homo sapiens
  misc_RNA (1)...(19): siRNA sense strand
aaagagacuguguuugaag

SEQ ID NO: 1984094 - RNA, 19 nt, Homo sapiens
  misc_RNA (1)...(19): siRNA sense strand
guucgaugaccuucaagug

SEQ ID NO: 1984095 - RNA, 19 nt, Homo sapiens
  misc_RNA (1)...(19): siRNA sense strand
gggagucagaaaccuguga

SEQ ID NO: 1984096 - RNA, 19 nt, Homo sapiens
  misc_RNA (1)...(19): siRNA sense strand
gcaccuauaugcccucuuu

SEQ ID NO: 1984097 - RNA, 19 nt, Homo sapiens
  misc_RNA (1)...(19): siRNA sense strand
caaggaggcugcaugauga

SEQ ID NO: 1984098 - RNA, 19 nt, Homo sapiens
  misc_RNA (1)...(19): siRNA sense strand
gaaaucaugugcaaauugg

SEQ ID NO: 1984099 - RNA, 19 nt, Homo sapiens
  misc_RNA (1)...(19): siRNA sense strand
aaaggcaccugaaggaaua

SEQ ID NO: 1984100 - RNA, 19 nt, Homo sapiens
  misc_RNA (1)...(19): siRNA sense strand
gauccacgcugacaucaau

SEQ ID NO: 1984101 - RNA, 19 nt, Homo sapiens
  misc_RNA (1)...(19): siRNA sense strand
gagaagcuuuccuuggauu

SEQ ID NO: 1984102 - RNA, 19 nt, Homo sapiens
  misc_RNA (1)...(19): siRNA sense strand
gaacaagacccugcagaug

SEQ ID NO: 1984103 - RNA, 19 nt, Homo sapiens
  misc_RNA (1)...(19): siRNA sense strand
caagaaaucaugugcaaau

SEQ ID NO: 1984104 - RNA, 19 nt, Homo sapiens
  misc_RNA (1)...(19): siRNA sense strand
ggagauggaccuucugcua

SEQ ID NO: 1984105 - RNA, 19 nt, Homo sapiens
  misc_RNA (1)...(19): siRNA sense strand
gaaaggcaccugaaggaau

SEQ ID NO: 1984106 - RNA, 19 nt, Homo sapiens
  misc_RNA (1)...(19): siRNA sense strand
uuaaagagaucaggaacaa

SEQ ID NO: 1984107 - RNA, 19 nt, Homo sapiens
  misc_RNA (1)...(19): siRNA sense strand
ggaaagcauuaaagagauc

SEQ ID NO: 1984108 - RNA, 19 nt, Homo sapiens
  misc_RNA (1)...(19): siRNA sense strand
ggaaaacacuaucaaacaa

SEQ ID NO: 1984109 - RNA, 19 nt, Homo sapiens
  misc_RNA (1)...(19): siRNA sense strand
gcacuugagucagaggaaa

SEQ ID NO: 1984110 - RNA, 19 nt, Homo sapiens
  misc_RNA (1)...(19): siRNA sense strand
gaagaucaaggcucguuug

SEQ ID NO: 1984111 - RNA, 19 nt, Homo sapiens
  misc_RNA (1)...(19): siRNA sense strand
ggagaagcuuuccuuggau

SEQ ID NO: 1984112 - RNA, 19 nt, Homo sapiens
  misc_RNA (1)...(19): siRNA sense strand
gaagaagaggagaagcuuu

SEQ ID NO: 1984113 - RNA, 19 nt, Homo sapiens
  misc_RNA (1)...(19): siRNA sense strand
ucaaacaaucugagaauga

SEQ ID NO: 1984114 - RNA, 19 nt, Homo sapiens
  misc_RNA (1)...(19): siRNA sense strand
aaagagaucaggaacaaga

SEQ ID NO: 1984115 - RNA, 19 nt, Homo sapiens
  misc_RNA (1)...(19): siRNA sense strand
ucaccggaaugcaccuaua

SEQ ID NO: 1984116 - RNA, 19 nt, Homo sapiens
  misc_RNA (1)...(19): siRNA sense strand
ggaacaagacccugcagau

SEQ ID NO: 1984117 - RNA, 19 nt, Homo sapiens
  misc_RNA (1)...(19): siRNA sense strand
gcaaauuggaaagcauuaa

SEQ ID NO: 1984118 - RNA, 19 nt, Homo sapiens
  misc_RNA (1)...(19): siRNA sense strand
gaggcugcaugaugaguau

SEQ ID NO: 1984119 - RNA, 19 nt, Homo sapiens
  misc_RNA (1)...(19): siRNA sense strand
acaagacccugcagaugga

SEQ ID NO: 1984120 - RNA, 19 nt, Homo sapiens
  misc_RNA (1)...(19): siRNA sense strand
gaggcucccugacuugugu

SEQ ID NO: 1984121 - RNA, 19 nt, Homo sapiens
  misc_RNA (1)...(19): siRNA sense strand
ggaaaggcaccugaaggaa

SEQ ID NO: 1984122 - RNA, 19 nt, Homo sapiens
  misc_RNA (1)...(19): siRNA sense strand
caaacaaucugagaaugac

SEQ ID NO: 1984123 - RNA, 19 nt, Homo sapiens
  misc_RNA (1)...(19): siRNA sense strand
gcauuaaagagaucaggaa

SEQ ID NO: 1984124 - RNA, 19 nt, Homo sapiens
  misc_RNA (1)...(19): siRNA sense strand
ugacuugugugaagaagag

SEQ ID NO: 1984125 - RNA, 19 nt, Homo sapiens
  misc_RNA (1)...(19): siRNA sense strand
agaaugaccuaaacaagcu

SEQ ID NO: 1984126 - RNA, 19 nt, Homo sapiens
  misc_RNA (1)...(19): siRNA sense strand
gcagaggcucccugacuug

SEQ ID NO: 1984127 - RNA, 19 nt, Homo sapiens
  misc_RNA (1)...(19): siRNA sense strand
ggaggcugcaugaugagua

SEQ ID NO: 1984128 - RNA, 19 nt, Homo sapiens
  misc_RNA (1)...(19): siRNA sense strand
cuacaaggaggcugcauga

SEQ ID NO: 1984129 - RNA, 19 nt, Homo sapiens
  misc_RNA (1)...(19): siRNA sense strand
cgaaacggaagcaggauga

SEQ ID NO: 1984130 - RNA, 19 nt, Homo sapiens
  misc_RNA (1)...(19): siRNA sense strand
acaaggaggcugcaugaug

SEQ ID NO: 1984131 - RNA, 19 nt, Homo sapiens
  misc_RNA (1)...(19): siRNA sense strand
aguauaagccacugaaaga

SEQ ID NO: 1984132 - RNA, 19 nt, Homo sapiens
  misc_RNA (1)...(19): siRNA sense strand
uaugaaggccugcuuguca

SEQ ID NO: 1984133 - RNA, 19 nt, Homo sapiens
  misc_RNA (1)...(19): siRNA sense strand
gagaagaucaaggcucguu

SEQ ID NO: 1984134 - RNA, 19 nt, Homo sapiens
  misc_RNA (1)...(19): siRNA sense strand
uggaaagcauuaaagagau

SEQ ID NO: 1984135 - RNA, 19 nt, Homo sapiens
  misc_RNA (1)...(19): siRNA sense strand
gaaagcagaauggcagaca

SEQ ID NO: 1984136 - RNA, 19 nt, Homo sapiens
  misc_RNA (1)...(19): siRNA sense strand
agaaaucaugugcaaauug

SEQ ID NO: 1984137 - RNA, 19 nt, Homo sapiens
  misc_RNA (1)...(19): siRNA sense strand
aacggaagcaggaugaaua

SEQ ID NO: 1984138 - RNA, 19 nt, Homo sapiens
  misc_RNA (1)...(19): siRNA sense strand
gcaagaaaucaugugcaaa

SEQ ID NO: 1984139 - RNA, 19 nt, Homo sapiens
  misc_RNA (1)...(19): siRNA sense strand
gcagaugagcaagaaauca

SEQ ID NO: 1984140 - RNA, 19 nt, Homo sapiens
  misc_RNA (1)...(19): siRNA sense strand
gaguauaagccacugaaag

SEQ ID NO: 1984141 - RNA, 19 nt, Homo sapiens
  misc_RNA (1)...(19): siRNA sense strand
guuugaaggcugaguuuga

SEQ ID NO: 1984142 - RNA, 19 nt, Homo sapiens
  misc_RNA (1)...(19): siRNA sense strand
agcaagaaaucaugugcaa

SEQ ID NO: 1984143 - RNA, 19 nt, Homo sapiens
  misc_RNA (1)...(19): siRNA sense strand
aaucugagaaugaccuaaa

SEQ ID NO: 1984144 - RNA, 19 nt, Homo sapiens
  misc_RNA (1)...(19): siRNA sense strand
uugaggcacuugagucaga

SEQ ID NO: 1984145 - RNA, 19 nt, Homo sapiens
  misc_RNA (1)...(19): siRNA sense strand
uuggaaagcauuaaagaga

SEQ ID NO: 1984146 - RNA, 19 nt, Homo sapiens
  misc_RNA (1)...(19): siRNA sense strand
guauaagccacugaaagaa

SEQ ID NO: 1984147 - RNA, 19 nt, Homo sapiens
  misc_RNA (1)...(19): siRNA sense strand
agauggaccuucugcuaca

SEQ ID NO: 1984148 - RNA, 19 nt, Homo sapiens
  misc_RNA (1)...(19): siRNA sense strand
auaagccacugaaagaaca

SEQ ID NO: 1984149 - RNA, 19 nt, Homo sapiens
  misc_RNA (1)...(19): siRNA sense strand
ggaauacaagcaggagaug

SEQ ID NO: 1984150 - RNA, 19 nt, Homo sapiens
  misc_RNA (1)...(19): siRNA sense strand
gaagcagaaagcagaaugg

SEQ ID NO: 1984151 - RNA, 19 nt, Homo sapiens
  misc_RNA (1)...(19): siRNA sense strand
uggauuacuuugagaagca

SEQ ID NO: 1984152 - RNA, 19 nt, Homo sapiens
  misc_RNA (1)...(19): siRNA sense strand
gugcaaauuggaaagcauu

SEQ ID NO: 1984153 - RNA, 19 nt, Homo sapiens
  misc_RNA (1)...(19): siRNA sense strand
ugcagaggcucccugacuu

SEQ ID NO: 1984154 - RNA, 19 nt, Homo sapiens
  misc_RNA (1)...(19): siRNA sense strand
gaaacggaagcaggaugaa

SEQ ID NO: 1984155 - RNA, 19 nt, Homo sapiens
  misc_RNA (1)...(19): siRNA sense strand
aagaagaggagaagcuuuc

SEQ ID NO: 1984156 - RNA, 19 nt, Homo sapiens
  misc_RNA (1)...(19): siRNA sense strand
cuaaacaagcugcuagagu

SEQ ID NO: 1984157 - RNA, 19 nt, Homo sapiens
  misc_RNA (1)...(19): siRNA sense strand
gaaagcauuaaagagauca

SEQ ID NO: 1984158 - RNA, 19 nt, Homo sapiens
  misc_RNA (1)...(19): siRNA sense strand
gcaccugaaggaauacaag

SEQ ID NO: 1984159 - RNA, 19 nt, Homo sapiens
  misc_RNA (1)...(19): siRNA sense strand
cuauaugcccucuuugcaa

SEQ ID NO: 1984160 - RNA, 19 nt, Homo sapiens
  misc_RNA (1)...(19): siRNA sense strand
ugagaaugaccuaaacaag

SEQ ID NO: 1984161 - RNA, 19 nt, Homo sapiens
  misc_RNA (1)...(19): siRNA sense strand
aggaaaggcaccugaagga

SEQ ID NO: 1984162 - RNA, 19 nt, Homo sapiens
  misc_RNA (1)...(19): siRNA sense strand
agaagcuuuccuuggauua

SEQ ID NO: 1984163 - RNA, 19 nt, Homo sapiens
  misc_RNA (1)...(19): siRNA sense strand
ugaagaagaggagaagcuu

SEQ ID NO: 1984164 - RNA, 19 nt, Homo sapiens
  misc_RNA (1)...(19): siRNA sense strand
aauacaagcaggagaugga

SEQ ID NO: 1984165 - RNA, 19 nt, Homo sapiens
  misc_RNA (1)...(19): siRNA sense strand
caugucaccagcaaauuca

SEQ ID NO: 1984166 - RNA, 19 nt, Homo sapiens
  misc_RNA (1)...(19): siRNA sense strand
ucaugucaccagcaaauuc

SEQ ID NO: 1984167 - RNA, 19 nt, Homo sapiens
  misc_RNA (1)...(19): siRNA sense strand
gaaggccugcuugucaugu

SEQ ID NO: 1984168 - RNA, 19 nt, Homo sapiens
  misc_RNA (1)...(19): siRNA sense strand
aaucaugugcaaauuggaa

SEQ ID NO: 1984169 - RNA, 19 nt, Homo sapiens
  misc_RNA (1)...(19): siRNA sense strand
ugucaugucaccagcaaau

SEQ ID NO: 1984170 - RNA, 19 nt, Homo sapiens
  misc_RNA (1)...(19): siRNA sense strand
acggaagcaggaugaauaa

SEQ ID NO: 1984171 - RNA, 19 nt, Homo sapiens
  misc_RNA (1)...(19): siRNA sense strand
cgacugauccacgcugaca

SEQ ID NO: 1984172 - RNA, 19 nt, Homo sapiens
  misc_RNA (1)...(19): siRNA sense strand
ggcugcaugaugaguauaa

SEQ ID NO: 1984173 - RNA, 19 nt, Homo sapiens
  misc_RNA (1)...(19): siRNA sense strand
cagaggaaaggcaccugaa

SEQ ID NO: 1984174 - RNA, 19 nt, Homo sapiens
  misc_RNA (1)...(19): siRNA sense strand
gauggaaaacacuaucaaa

SEQ ID NO: 1984175 - RNA, 19 nt, Homo sapiens
  misc_RNA (1)...(19): siRNA sense strand
ggugguaucuugucuguuu

SEQ ID NO: 1984176 - RNA, 19 nt, Homo sapiens
  misc_RNA (1)...(19): siRNA sense strand
gauaucaguuccauguaua

SEQ ID NO: 1984177 - RNA, 19 nt, Homo sapiens
  misc_RNA (1)...(19): siRNA sense strand
ggauuuguuucguuuguua

SEQ ID NO: 1984178 - RNA, 19 nt, Homo sapiens
  misc_RNA (1)...(19): siRNA sense strand
gauaucaguugccuguaua

SEQ ID NO: 1984179 - RNA, 19 nt, Homo sapiens
  misc_RNA (1)...(19): siRNA sense strand
gauaucaguugccuguaua

SEQ ID NO: 1984180 - RNA, 19 nt, Homo sapiens
  misc_RNA (1)...(19): siRNA sense strand
gauaucaguugccuguaua

SEQ ID NO: 1984181 - RNA, 19 nt, Homo sapiens
  misc_RNA (1)...(19): siRNA sense strand
gauaucaguugccuguaua

SEQ ID NO: 1984182 - RNA, 19 nt, Homo sapiens
  misc_RNA (1)...(19): siRNA sense strand
gauaucaguugccuguaua

SEQ ID NO: 1984183 - RNA, 19 nt, Homo sapiens
  misc_RNA (1)...(19): siRNA sense strand
gauaucaguugccuguaua

SEQ ID NO: 1984184 - RNA, 19 nt, Homo sapiens
  misc_RNA (1)...(19): siRNA sense strand
gauaucaguugccuguaua

SEQ ID NO: 1984185 - RNA, 19 nt, Homo sapiens
  misc_RNA (1)...(19): siRNA sense strand
gauaucaguugccuguaua

SEQ ID NO: 1984186 - RNA, 19 nt, Homo sapiens
  misc_RNA (1)...(19): siRNA sense strand
gauaucaguucccuguaua

SEQ ID NO: 1984187 - RNA, 19 nt, Homo sapiens
  misc_RNA (1)...(19): siRNA sense strand
gauaucaguugccuguaua

SEQ ID NO: 1984188 - RNA, 19 nt, Homo sapiens
  misc_RNA (1)...(19): siRNA sense strand
gauaucaguucccuguaua

SEQ ID NO: 1984189 - RNA, 19 nt, Homo sapiens
  misc_RNA (1)...(19): siRNA sense strand
gauaucaguugccuguaua

SEQ ID NO: 1984190 - RNA, 19 nt, Homo sapiens
  misc_RNA (1)...(19): siRNA sense strand
gauaucaguugccuguaua

SEQ ID NO: 1984191 - RNA, 19 nt, Homo sapiens
  misc_RNA (1)...(19): siRNA sense strand
gauaguaggaucacagaua

SEQ ID NO: 1984192 - RNA, 19 nt, Homo sapiens
  misc_RNA (1)...(19): siRNA sense strand
ggauaucaguuccauguau

SEQ ID NO: 1984193 - RNA, 19 nt, Homo sapiens
  misc_RNA (1)...(19): siRNA sense strand
gaugucaguugcuuguaua

SEQ ID NO: 1984194 - RNA, 19 nt, Homo sapiens
  misc_RNA (1)...(19): siRNA sense strand
gucaguugcuuguauauaa

SEQ ID NO: 1984195 - RNA, 19 nt, Homo sapiens
  misc_RNA (1)...(19): siRNA sense strand
ggauaucaguugccuguau

SEQ ID NO: 1984196 - RNA, 19 nt, Homo sapiens
  misc_RNA (1)...(19): siRNA sense strand
ggauaucaguugccuguau

SEQ ID NO: 1984197 - RNA, 19 nt, Homo sapiens
  misc_RNA (1)...(19): siRNA sense strand
ggauaucaguugccuguau

SEQ ID NO: 1984198 - RNA, 19 nt, Homo sapiens
  misc_RNA (1)...(19): siRNA sense strand
ggauaucaguugccuguau

SEQ ID NO: 1984199 - RNA, 19 nt, Homo sapiens
  misc_RNA (1)...(19): siRNA sense strand
ggauaucaguugccuguau

SEQ ID NO: 1984200 - RNA, 19 nt, Homo sapiens
  misc_RNA (1)...(19): siRNA sense strand
ggauaucaguugccuguau

SEQ ID NO: 1984201 - RNA, 19 nt, Homo sapiens
  misc_RNA (1)...(19): siRNA sense strand
ggauaucaguugccuguau

SEQ ID NO: 1984202 - RNA, 19 nt, Homo sapiens
  misc_RNA (1)...(19): siRNA sense strand
ggauaucaguugccuguau

SEQ ID NO: 1984203 - RNA, 19 nt, Homo sapiens
  misc_RNA (1)...(19): siRNA sense strand
ggauaucaguugccuguau

SEQ ID NO: 1984204 - RNA, 19 nt, Homo sapiens
  misc_RNA (1)...(19): siRNA sense strand
ggauaucaguucccuguau

SEQ ID NO: 1984205 - RNA, 19 nt, Homo sapiens
  misc_RNA (1)...(19): siRNA sense strand
ggauaucaguugccuguau

SEQ ID NO: 1984206 - RNA, 19 nt, Homo sapiens
  misc_RNA (1)...(19): siRNA sense strand
ggauaucaguucccuguau

SEQ ID NO: 1984207 - RNA, 19 nt, Homo sapiens
  misc_RNA (1)...(19): siRNA sense strand
ggauaucaguugccuguau

SEQ ID NO: 1984208 - RNA, 19 nt, Homo sapiens
  misc_RNA (1)...(19): siRNA sense strand
gaacugguguguccaaagg

SEQ ID NO: 1984209 - RNA, 19 nt, Homo sapiens
  misc_RNA (1)...(19): siRNA sense strand
gagcaaaggagaaaucugu

SEQ ID NO: 1984210 - RNA, 19 nt, Homo sapiens
  misc_RNA (1)...(19): siRNA sense strand
ggaugucaguugcuuguau

SEQ ID NO: 1984211 - RNA, 19 nt, Homo sapiens
  misc_RNA (1)...(19): siRNA sense strand
gcagccacguccuuuggua

SEQ ID NO: 1984212 - RNA, 19 nt, Homo sapiens
  misc_RNA (1)...(19): siRNA sense strand
ggaugaaacugagauugga

SEQ ID NO: 1984213 - RNA, 19 nt, Homo sapiens
  misc_RNA (1)...(19): siRNA sense strand
ccacguccuuugguaguua

SEQ ID NO: 1984214 - RNA, 19 nt, Homo sapiens
  misc_RNA (1)...(19): siRNA sense strand
ucaguugccuguauauaau

SEQ ID NO: 1984215 - RNA, 19 nt, Homo sapiens
  misc_RNA (1)...(19): siRNA sense strand
ucaguugccuguauauaau

SEQ ID NO: 1984216 - RNA, 19 nt, Homo sapiens
  misc_RNA (1)...(19): siRNA sense strand
ucaguugccuguauauaau

SEQ ID NO: 1984217 - RNA, 19 nt, Homo sapiens
  misc_RNA (1)...(19): siRNA sense strand
ucaguugccuguauauaau

SEQ ID NO: 1984218 - RNA, 19 nt, Homo sapiens
  misc_RNA (1)...(19): siRNA sense strand
ucaguugccuguauauaau

SEQ ID NO: 1984219 - RNA, 19 nt, Homo sapiens
  misc_RNA (1)...(19): siRNA sense strand
ucaguugccuguauauaau

SEQ ID NO: 1984220 - RNA, 19 nt, Homo sapiens
  misc_RNA (1)...(19): siRNA sense strand
ucaguugccuguauauaau

SEQ ID NO: 1984221 - RNA, 19 nt, Homo sapiens
  misc_RNA (1)...(19): siRNA sense strand
ucaguugccuguauauaau

SEQ ID NO: 1984222 - RNA, 19 nt, Homo sapiens
  misc_RNA (1)...(19): siRNA sense strand
ucaguugccuguauauaau

SEQ ID NO: 1984223 - RNA, 19 nt, Homo sapiens
  misc_RNA (1)...(19): siRNA sense strand
ucaguugccuguauauaau

SEQ ID NO: 1984224 - RNA, 19 nt, Homo sapiens
  misc_RNA (1)...(19): siRNA sense strand
ucaggucacugcuggauau

SEQ ID NO: 1984225 - RNA, 19 nt, Homo sapiens
  misc_RNA (1)...(19): siRNA sense strand
ucaggucacugcuggauau

SEQ ID NO: 1984226 - RNA, 19 nt, Homo sapiens
  misc_RNA (1)...(19): siRNA sense strand
cagauacauuuccauggua

SEQ ID NO: 1984227 - RNA, 19 nt, Homo sapiens
  misc_RNA (1)...(19): siRNA sense strand
ucaguugccuguauacaau

SEQ ID NO: 1984228 - RNA, 19 nt, Homo sapiens
  misc_RNA (1)...(19): siRNA sense strand
ucaguucccuguauacaau

SEQ ID NO: 1984229 - RNA, 19 nt, Homo sapiens
  misc_RNA (1)...(19): siRNA sense strand
ucaguucccuguauacaau

SEQ ID NO: 1984230 - RNA, 19 nt, Homo sapiens
  misc_RNA (1)...(19): siRNA sense strand
uauccaagaucaccauuuc

SEQ ID NO: 1984231 - RNA, 19 nt, Homo sapiens
  misc_RNA (1)...(19): siRNA sense strand
gaucacagauacauuucca

SEQ ID NO: 1984232 - RNA, 19 nt, Homo sapiens
  misc_RNA (1)...(19): siRNA sense strand
gcuauggauuuguuucguu

SEQ ID NO: 1984233 - RNA, 19 nt, Homo sapiens
  misc_RNA (1)...(19): siRNA sense strand
gaccgaagcauacaaaugg

SEQ ID NO: 1984234 - RNA, 19 nt, Homo sapiens
  misc_RNA (1)...(19): siRNA sense strand
ggaccgaagcauacaaaug

SEQ ID NO: 1984235 - RNA, 19 nt, Homo sapiens
  misc_RNA (1)...(19): siRNA sense strand
uacaaauggugguaucuug

SEQ ID NO: 1984236 - RNA, 19 nt, Homo sapiens
  misc_RNA (1)...(19): siRNA sense strand
gaaagaagugaagauaauc

SEQ ID NO: 1984237 - RNA, 19 nt, Homo sapiens
  misc_RNA (1)...(19): siRNA sense strand
ucaguuccauguauacaau

SEQ ID NO: 1984238 - RNA, 19 nt, Homo sapiens
  misc_RNA (1)...(19): siRNA sense strand
gugaaagaagugaagauaa

SEQ ID NO: 1984239 - RNA, 19 nt, Homo sapiens
  misc_RNA (1)...(19): siRNA sense strand
cuauggauuuguuucguuu

SEQ ID NO: 1984240 - RNA, 19 nt, Homo sapiens
  misc_RNA (1)...(19): siRNA sense strand
uauccaaguucaccauuuc

SEQ ID NO: 1984241 - RNA, 19 nt, Homo sapiens
  misc_RNA (1)...(19): siRNA sense strand
uauccaaguucaccauuuc

SEQ ID NO: 1984242 - RNA, 19 nt, Homo sapiens
  misc_RNA (1)...(19): siRNA sense strand
uauccaaguucaccauuuc

SEQ ID NO: 1984243 - RNA, 19 nt, Homo sapiens
  misc_RNA (1)...(19): siRNA sense strand
uauccaaguucaccauuuc

SEQ ID NO: 1984244 - RNA, 19 nt, Homo sapiens
  misc_RNA (1)...(19): siRNA sense strand
uauccaaguucaccauuuc

SEQ ID NO: 1984245 - RNA, 19 nt, Homo sapiens
  misc_RNA (1)...(19): siRNA sense strand
uauccaaguucaccauuuc

SEQ ID NO: 1984246 - RNA, 19 nt, Homo sapiens
  misc_RNA (1)...(19): siRNA sense strand
uauccaaguucaccauuuc

SEQ ID NO: 1984247 - RNA, 19 nt, Homo sapiens
  misc_RNA (1)...(19): siRNA sense strand
uauccaaguucaccauuuc

SEQ ID NO: 1984248 - RNA, 19 nt, Homo sapiens
  misc_RNA (1)...(19): siRNA sense strand
uaggaucacagauacauuu

SEQ ID NO: 1984249 - RNA, 19 nt, Homo sapiens
  misc_RNA (1)...(19): siRNA sense strand
guuaugugcucgucaugug

SEQ ID NO: 1984250 - RNA, 19 nt, Homo sapiens
  misc_RNA (1)...(19): siRNA sense strand
ucaagucgccacuggauau

SEQ ID NO: 1984251 - RNA, 19 nt, Homo sapiens
  misc_RNA (1)...(19): siRNA sense strand
uaucagccauuuccugcuu

SEQ ID NO: 1984252 - RNA, 19 nt, Homo sapiens
  misc_RNA (1)...(19): siRNA sense strand
ucaagucgccacuggauau

SEQ ID NO: 1984253 - RNA, 19 nt, Homo sapiens
  misc_RNA (1)...(19): siRNA sense strand
uaucagccauuuccugcuu

SEQ ID NO: 1984254 - RNA, 19 nt, Homo sapiens
  misc_RNA (1)...(19): siRNA sense strand
acagauacauuuccauggu

SEQ ID NO: 1984255 - RNA, 19 nt, Homo sapiens
  misc_RNA (1)...(19): siRNA sense strand
agauacauuuccaugguaa

SEQ ID NO: 1984256 - RNA, 19 nt, Homo sapiens
  misc_RNA (1)...(19): siRNA sense strand
uguauacaauuaccagaug

SEQ ID NO: 1984257 - RNA, 19 nt, Homo sapiens
  misc_RNA (1)...(19): siRNA sense strand
uaucuugucuguuuaaucc

SEQ ID NO: 1984258 - RNA, 19 nt, Homo sapiens
  misc_RNA (1)...(19): siRNA sense strand
gguguuaccagaaggcaaa

SEQ ID NO: 1984259 - RNA, 19 nt, Homo sapiens
  misc_RNA (1)...(19): siRNA sense strand
uauccaaauucaccaguuc

SEQ ID NO: 1984260 - RNA, 19 nt, Homo sapiens
  misc_RNA (1)...(19): siRNA sense strand
gugguaucuugucuguuua

SEQ ID NO: 1984261 - RNA, 19 nt, Homo sapiens
  misc_RNA (1)...(19): siRNA sense strand
aagauaaucacgaaucgaa

SEQ ID NO: 1984262 - RNA, 19 nt, Homo sapiens
  misc_RNA (1)...(19): siRNA sense strand
gaagcugggcccugcaauc

SEQ ID NO: 1984263 - RNA, 19 nt, Homo sapiens
  misc_RNA (1)...(19): siRNA sense strand
ggucaccacuggauaucag

SEQ ID NO: 1984264 - RNA, 19 nt, Homo sapiens
  misc_RNA (1)...(19): siRNA sense strand
ggucaccacuggauaucag

SEQ ID NO: 1984265 - RNA, 19 nt, Homo sapiens
  misc_RNA (1)...(19): siRNA sense strand
ggucaccacuggauaucag

SEQ ID NO: 1984266 - RNA, 19 nt, Homo sapiens
  misc_RNA (1)...(19): siRNA sense strand
ggucaccacuggauaucag

SEQ ID NO: 1984267 - RNA, 19 nt, Homo sapiens
  misc_RNA (1)...(19): siRNA sense strand
ggucaccacuggauaucag

SEQ ID NO: 1984268 - RNA, 19 nt, Homo sapiens
  misc_RNA (1)...(19): siRNA sense strand
ggucaccacuggauaucag

SEQ ID NO: 1984269 - RNA, 19 nt, Homo sapiens
  misc_RNA (1)...(19): siRNA sense strand
ggucaccacuggauaucag

SEQ ID NO: 1984270 - RNA, 19 nt, Homo sapiens
  misc_RNA (1)...(19): siRNA sense strand
ggucaccacuggauaucag

SEQ ID NO: 1984271 - RNA, 19 nt, Homo sapiens
  misc_RNA (1)...(19): siRNA sense strand
ggucaccacuggauaucag

SEQ ID NO: 1984272 - RNA, 19 nt, Homo sapiens
  misc_RNA (1)...(19): siRNA sense strand
ggucaccacuggauaucag

SEQ ID NO: 1984273 - RNA, 19 nt, Homo sapiens
  misc_RNA (1)...(19): siRNA sense strand
gaauugaugcuaggaugga

SEQ ID NO: 1984274 - RNA, 19 nt, Homo sapiens
  misc_RNA (1)...(19): siRNA sense strand
aaaguuaugugcucgucau

SEQ ID NO: 1984275 - RNA, 19 nt, Homo sapiens
  misc_RNA (1)...(19): siRNA sense strand
agaagaagauggccaauuu

SEQ ID NO: 1984276 - RNA, 19 nt, Homo sapiens
  misc_RNA (1)...(19): siRNA sense strand
ucucaaagcucaucagaaa

SEQ ID NO: 1984277 - RNA, 19 nt, Homo sapiens
  misc_RNA (1)...(19): siRNA sense strand
cagaggagcuuauugagaa

SEQ ID NO: 1984278 - RNA, 19 nt, Homo sapiens
  misc_RNA (1)...(19): siRNA sense strand
gaaaguggccauaaugaga

SEQ ID NO: 1984279 - RNA, 19 nt, Homo sapiens
  misc_RNA (1)...(19): siRNA sense strand
gaaaugggaccuugaauac

SEQ ID NO: 1984280 - RNA, 19 nt, Homo sapiens
  misc_RNA (1)...(19): siRNA sense strand
ucacauagagucauuacua

SEQ ID NO: 1984281 - RNA, 19 nt, Homo sapiens
  misc_RNA (1)...(19): siRNA sense strand
ggaacuggauuaauaagca

SEQ ID NO: 1984282 - RNA, 19 nt, Homo sapiens
  misc_RNA (1)...(19): siRNA sense strand
caacagggaagaaaugaaa

SEQ ID NO: 1984283 - RNA, 19 nt, Homo sapiens
  misc_RNA (1)...(19): siRNA sense strand
ugagaaacauugagaagau

SEQ ID NO: 1984284 - RNA, 19 nt, Homo sapiens
  misc_RNA (1)...(19): siRNA sense strand
gaacuggauuaauaagcaa

SEQ ID NO: 1984285 - RNA, 19 nt, Homo sapiens
  misc_RNA (1)...(19): siRNA sense strand
uacgagagguucccuaauu

SEQ ID NO: 1984286 - RNA, 19 nt, Homo sapiens
  misc_RNA (1)...(19): siRNA sense strand
gaaauuucaugaguucguu

SEQ ID NO: 1984287 - RNA, 19 nt, Homo sapiens
  misc_RNA (1)...(19): siRNA sense strand
ugaaaugggaccuugaaua

SEQ ID NO: 1984288 - RNA, 19 nt, Homo sapiens
  misc_RNA (1)...(19): siRNA sense strand
uuacaaacgaugcaucuua

SEQ ID NO: 1984289 - RNA, 19 nt, Homo sapiens
  misc_RNA (1)...(19): siRNA sense strand
gauaaaagguuacaaacga

SEQ ID NO: 1984290 - RNA, 19 nt, Homo sapiens
  misc_RNA (1)...(19): siRNA sense strand
cacauagagucauuacuaa

SEQ ID NO: 1984291 - RNA, 19 nt, Homo sapiens
  misc_RNA (1)...(19): siRNA sense strand
aacuggaacuggauuaaua

SEQ ID NO: 1984292 - RNA, 19 nt, Homo sapiens
  misc_RNA (1)...(19): siRNA sense strand
gggcagaggagcuuauuga

SEQ ID NO: 1984293 - RNA, 19 nt, Homo sapiens
  misc_RNA (1)...(19): siRNA sense strand
uugaauaccugcaagagaa

SEQ ID NO: 1984294 - RNA, 19 nt, Homo sapiens
  misc_RNA (1)...(19): siRNA sense strand
gcgggaagauugucaugga

SEQ ID NO: 1984295 - RNA, 19 nt, Homo sapiens
  misc_RNA (1)...(19): siRNA sense strand
ggaagauugucauggacuu

SEQ ID NO: 1984296 - RNA, 19 nt, Homo sapiens
  misc_RNA (1)...(19): siRNA sense strand
acugugaacuucugguaua

SEQ ID NO: 1984297 - RNA, 19 nt, Homo sapiens
  misc_RNA (1)...(19): siRNA sense strand
gcagaggagcuuauugaga

SEQ ID NO: 1984298 - RNA, 19 nt, Homo sapiens
  misc_RNA (1)...(19): siRNA sense strand
aguuauagcuucccgacua

SEQ ID NO: 1984299 - RNA, 19 nt, Homo sapiens
  misc_RNA (1)...(19): siRNA sense strand
gagaaacauugagaagaug

SEQ ID NO: 1984300 - RNA, 19 nt, Homo sapiens
  misc_RNA (1)...(19): siRNA sense strand
uacaaacgaugcaucuuau

SEQ ID NO: 1984301 - RNA, 19 nt, Homo sapiens
  misc_RNA (1)...(19): siRNA sense strand
gagguucccuaauuuccaa

SEQ ID NO: 1984302 - RNA, 19 nt, Homo sapiens
  misc_RNA (1)...(19): siRNA sense strand
uugagaaacugcaggauau

SEQ ID NO: 1984303 - RNA, 19 nt, Homo sapiens
  misc_RNA (1)...(19): siRNA sense strand
guacugguggcaucacaua

SEQ ID NO: 1984304 - RNA, 19 nt, Homo sapiens
  misc_RNA (1)...(19): siRNA sense strand
ucgagugccucuacccaua

SEQ ID NO: 1984305 - RNA, 19 nt, Homo sapiens
  misc_RNA (1)...(19): siRNA sense strand
ccaauuuccagaacuuuaa

SEQ ID NO: 1984306 - RNA, 19 nt, Homo sapiens
  misc_RNA (1)...(19): siRNA sense strand
guugagaaacugcaggaua

SEQ ID NO: 1984307 - RNA, 19 nt, Homo sapiens
  misc_RNA (1)...(19): siRNA sense strand
acgagagguucccuaauuu

SEQ ID NO: 1984308 - RNA, 19 nt, Homo sapiens
  misc_RNA (1)...(19): siRNA sense strand
caaacgaugcaucuuauuc

SEQ ID NO: 1984309 - RNA, 19 nt, Homo sapiens
  misc_RNA (1)...(19): siRNA sense strand
gggaagagagguuguaucu

SEQ ID NO: 1984310 - RNA, 19 nt, Homo sapiens
  misc_RNA (1)...(19): siRNA sense strand
gagaagaagauggccaauu

SEQ ID NO: 1984311 - RNA, 19 nt, Homo sapiens
  misc_RNA (1)...(19): siRNA sense strand
gucauggacuucuuagguu

SEQ ID NO: 1984312 - RNA, 19 nt, Homo sapiens
  misc_RNA (1)...(19): siRNA sense strand
gaagaagauggccaauuuc

SEQ ID NO: 1984313 - RNA, 19 nt, Homo sapiens
  misc_RNA (1)...(19): siRNA sense strand
ucauggacuucuuagguuu

SEQ ID NO: 1984314 - RNA, 19 nt, Homo sapiens
  misc_RNA (1)...(19): siRNA sense strand
gccaauuuccagaacuuua

SEQ ID NO: 1984315 - RNA, 19 nt, Homo sapiens
  misc_RNA (1)...(19): siRNA sense strand
cagaaaguggccauaauga

SEQ ID NO: 1984316 - RNA, 19 nt, Homo sapiens
  misc_RNA (1)...(19): siRNA sense strand
ugacaccugcucacuauga

SEQ ID NO: 1984317 - RNA, 19 nt, Homo sapiens
  misc_RNA (1)...(19): siRNA sense strand
ucaaagcucaucagaaagu

SEQ ID NO: 1984318 - RNA, 19 nt, Homo sapiens
  misc_RNA (1)...(19): siRNA sense strand
ggcaucacauagagucauu

SEQ ID NO: 1984319 - RNA, 19 nt, Homo sapiens
  misc_RNA (1)...(19): siRNA sense strand
agaauugaauauccucuca

SEQ ID NO: 1984320 - RNA, 19 nt, Homo sapiens
  misc_RNA (1)...(19): siRNA sense strand
ucagaaaguggccauaaug

SEQ ID NO: 1984321 - RNA, 19 nt, Homo sapiens
  misc_RNA (1)...(19): siRNA sense strand
uuaauaagcaacagggaaa

SEQ ID NO: 1984322 - RNA, 19 nt, Homo sapiens
  misc_RNA (1)...(19): siRNA sense strand
caucagaaaguggccauaa

SEQ ID NO: 1984323 - RNA, 19 nt, Homo sapiens
  misc_RNA (1)...(19): siRNA sense strand
aaaugugguugguuacgaa

SEQ ID NO: 1984324 - RNA, 19 nt, Homo sapiens
  misc_RNA (1)...(19): siRNA sense strand
guacuaugaugagaagaag

SEQ ID NO: 1984325 - RNA, 19 nt, Homo sapiens
  misc_RNA (1)...(19): siRNA sense strand
gguuggcccuggugauguu

SEQ ID NO: 1984326 - RNA, 19 nt, Homo sapiens
  misc_RNA (1)...(19): siRNA sense strand
gaauaccugcaagagaaua

SEQ ID NO: 1984327 - RNA, 19 nt, Homo sapiens
  misc_RNA (1)...(19): siRNA sense strand
gguuguaucugcagcaaac

SEQ ID NO: 1984328 - RNA, 19 nt, Homo sapiens
  misc_RNA (1)...(19): siRNA sense strand
gaaucccaguugcgcaguu

SEQ ID NO: 1984329 - RNA, 19 nt, Homo sapiens
  misc_RNA (1)...(19): siRNA sense strand
agagccagguggacuuuga

SEQ ID NO: 1984330 - RNA, 19 nt, Homo sapiens
  misc_RNA (1)...(19): siRNA sense strand
cagcaaacgcucaaugaca

SEQ ID NO: 1984331 - RNA, 19 nt, Homo sapiens
  misc_RNA (1)...(19): siRNA sense strand
gauugucauggacuucuua

SEQ ID NO: 1984332 - RNA, 19 nt, Homo sapiens
  misc_RNA (1)...(19): siRNA sense strand
ucauuggcauggaaggaaa

SEQ ID NO: 1984333 - RNA, 19 nt, Homo sapiens
  misc_RNA (1)...(19): siRNA sense strand
ugaauauccucucaaagcu

SEQ ID NO: 1984334 - RNA, 19 nt, Homo sapiens
  misc_RNA (1)...(19): siRNA sense strand
cuaagagaauugaauaucc

SEQ ID NO: 1984335 - RNA, 19 nt, Homo sapiens
  misc_RNA (1)...(19): siRNA sense strand
ccagguggacuuugacaau

SEQ ID NO: 1984336 - RNA, 19 nt, Homo sapiens
  misc_RNA (1)...(19): siRNA sense strand
gagguuguaucugcagcaa

SEQ ID NO: 1984337 - RNA, 19 nt, Homo sapiens
  misc_RNA (1)...(19): siRNA sense strand
aaaguggccauaaugagaa

SEQ ID NO: 1984338 - RNA, 19 nt, Homo sapiens
  misc_RNA (1)...(19): siRNA sense strand
aaucccaguugcgcaguua

SEQ ID NO: 1984339 - RNA, 19 nt, Homo sapiens
  misc_RNA (1)...(19): siRNA sense strand
ccucuaaccugcugcucau

SEQ ID NO: 1984340 - RNA, 19 nt, Homo sapiens
  misc_RNA (1)...(19): siRNA sense strand
gugaacuucugguauaagg

SEQ ID NO: 1984341 - RNA, 19 nt, Homo sapiens
  misc_RNA (1)...(19): siRNA sense strand
gcccuggugauguucuuua

SEQ ID NO: 1984342 - RNA, 19 nt, Homo sapiens
  misc_RNA (1)...(19): siRNA sense strand
ugagaaacugcaggauaua

SEQ ID NO: 1984343 - RNA, 19 nt, Homo sapiens
  misc_RNA (1)...(19): siRNA sense strand
caaagcucaucagaaagug

SEQ ID NO: 1984344 - RNA, 19 nt, Homo sapiens
  misc_RNA (1)...(19): siRNA sense strand
guuauagcuucccgacuag

SEQ ID NO: 1984345 - RNA, 19 nt, Homo sapiens
  misc_RNA (1)...(19): siRNA sense strand
uguguauccugcccugaaa

SEQ ID NO: 1984346 - RNA, 19 nt, Homo sapiens
  misc_RNA (1)...(19): siRNA sense strand
acagggaagaaaugaaauu

SEQ ID NO: 1984347 - RNA, 19 nt, Homo sapiens
  misc_RNA (1)...(19): siRNA sense strand
cagguggacuuugacaauc

SEQ ID NO: 1984348 - RNA, 19 nt, Homo sapiens
  misc_RNA (1)...(19): siRNA sense strand
gacaccugcucacuaugau

SEQ ID NO: 1984349 - RNA, 19 nt, Homo sapiens
  misc_RNA (1)...(19): siRNA sense strand
uaacuggaacuggauuaau

SEQ ID NO: 1984350 - RNA, 19 nt, Homo sapiens
  misc_RNA (1)...(19): siRNA sense strand
gaaacugcaggauauacag

SEQ ID NO: 1984351 - RNA, 19 nt, Homo sapiens
  misc_RNA (1)...(19): siRNA sense strand
uucaugaguucguugagaa

SEQ ID NO: 1984352 - RNA, 19 nt, Homo sapiens
  misc_RNA (1)...(19): siRNA sense strand
cgagagguucccuaauuuc

SEQ ID NO: 1984353 - RNA, 19 nt, Homo sapiens
  misc_RNA (1)...(19): siRNA sense strand
caccugcucacuaugauga

SEQ ID NO: 1984354 - RNA, 19 nt, Homo sapiens
  misc_RNA (1)...(19): siRNA sense strand
gauggccaauuuccagaac

SEQ ID NO: 1984355 - RNA, 19 nt, Homo sapiens
  misc_RNA (1)...(19): siRNA sense strand
gagaaacugcaggauauac

SEQ ID NO: 1984356 - RNA, 19 nt, Homo sapiens
  misc_RNA (1)...(19): siRNA sense strand
uggccaauuuccagaacuu

SEQ ID NO: 1984357 - RNA, 19 nt, Homo sapiens
  misc_RNA (1)...(19): siRNA sense strand
ggaccuugaauaccugcaa

SEQ ID NO: 1984358 - RNA, 19 nt, Homo sapiens
  misc_RNA (1)...(19): siRNA sense strand
ccuaagagaauugaauauc

SEQ ID NO: 1984359 - RNA, 19 nt, Homo sapiens
  misc_RNA (1)...(19): siRNA sense strand
acccauacccuguucauca

SEQ ID NO: 1984360 - RNA, 19 nt, Homo sapiens
  misc_RNA (1)...(19): siRNA sense strand
ggcauggaaggaaauguga

SEQ ID NO: 1984361 - RNA, 19 nt, Homo sapiens
  misc_RNA (1)...(19): siRNA sense strand
gcugcucauuggcauggaa

SEQ ID NO: 1984362 - RNA, 19 nt, Homo sapiens
  misc_RNA (1)...(19): siRNA sense strand
aaugggaccuugaauaccu

SEQ ID NO: 1984363 - RNA, 19 nt, Homo sapiens
  misc_RNA (1)...(19): siRNA sense strand
aggagcuuauugagaauga

SEQ ID NO: 1984364 - RNA, 19 nt, Homo sapiens
  misc_RNA (1)...(19): siRNA sense strand
gugcugaccgacacaaauc

SEQ ID NO: 1984365 - RNA, 19 nt, Homo sapiens
  misc_RNA (1)...(19): siRNA sense strand
cugugaacuucugguauaa

SEQ ID NO: 1984366 - RNA, 19 nt, Homo sapiens
  misc_RNA (1)...(19): siRNA sense strand
gcaucacauagagucauua

SEQ ID NO: 1984367 - RNA, 19 nt, Homo sapiens
  misc_RNA (1)...(19): siRNA sense strand
gguccaacagggaagaaau

SEQ ID NO: 1984368 - RNA, 19 nt, Homo sapiens
  misc_RNA (1)...(19): siRNA sense strand
ugucauggacuucuuaggu

SEQ ID NO: 1984369 - RNA, 19 nt, Homo sapiens
  misc_RNA (1)...(19): siRNA sense strand
uuucaugaguucguugaga

SEQ ID NO: 1984370 - RNA, 19 nt, Homo sapiens
  misc_RNA (1)...(19): siRNA sense strand
ugugguugguuacgaaaca

SEQ ID NO: 1984371 - RNA, 19 nt, Homo sapiens
  misc_RNA (1)...(19): siRNA sense strand
gacagagccagguggacuu

SEQ ID NO: 1984372 - RNA, 19 nt, Homo sapiens
  misc_RNA (1)...(19): siRNA sense strand
ccugaaaugggaccuugaa

SEQ ID NO: 1984373 - RNA, 19 nt, Homo sapiens
  misc_RNA (1)...(19): siRNA sense strand
cuaaccugcugcucauugg

SEQ ID NO: 1984374 - RNA, 19 nt, Homo sapiens
  misc_RNA (1)...(19): siRNA sense strand
ggugcugaccgacacaaau

SEQ ID NO: 1984375 - RNA, 19 nt, Homo sapiens
  misc_RNA (1)...(19): siRNA sense strand
acaaauaacuggagucaaa

SEQ ID NO: 1984376 - RNA, 19 nt, Homo sapiens
  misc_RNA (1)...(19): siRNA sense strand
ggaaacagcugccaaaugc

SEQ ID NO: 1984377 - RNA, 19 nt, Homo sapiens
  misc_RNA (1)...(19): siRNA sense strand
gcacauuucuggacuacaa

SEQ ID NO: 1984378 - RNA, 19 nt, Homo sapiens
  misc_RNA (1)...(19): siRNA sense strand
caacaugucuguguccuaa

SEQ ID NO: 1984379 - RNA, 19 nt, Homo sapiens
  misc_RNA (1)...(19): siRNA sense strand
gaaauuggagauguuagua

SEQ ID NO: 1984380 - RNA, 19 nt, Homo sapiens
  misc_RNA (1)...(19): siRNA sense strand
gagacugacugccuaugaa

SEQ ID NO: 1984381 - RNA, 19 nt, Homo sapiens
  misc_RNA (1)...(19): siRNA sense strand
gcagaaauuggagauguua

SEQ ID NO: 1984382 - RNA, 19 nt, Homo sapiens
  misc_RNA (1)...(19): siRNA sense strand
gaaggugaaggcagaaauu

SEQ ID NO: 1984383 - RNA, 19 nt, Homo sapiens
  misc_RNA (1)...(19): siRNA sense strand
ugaacuggcugccuuacaa

SEQ ID NO: 1984384 - RNA, 19 nt, Homo sapiens
  misc_RNA (1)...(19): siRNA sense strand
caaguuugcugcuguugga

SEQ ID NO: 1984385 - RNA, 19 nt, Homo sapiens
  misc_RNA (1)...(19): siRNA sense strand
cacaagauccucagauuga

SEQ ID NO: 1984386 - RNA, 19 nt, Homo sapiens
  misc_RNA (1)...(19): siRNA sense strand
uaacaacauuggaaaggau

SEQ ID NO: 1984387 - RNA, 19 nt, Homo sapiens
  misc_RNA (1)...(19): siRNA sense strand
ggaggaaacagcugccaaa

SEQ ID NO: 1984388 - RNA, 19 nt, Homo sapiens
  misc_RNA (1)...(19): siRNA sense strand
ggagacugacugccuauga

SEQ ID NO: 1984389 - RNA, 19 nt, Homo sapiens
  misc_RNA (1)...(19): siRNA sense strand
cguaaacacuggcuucauc

SEQ ID NO: 1984390 - RNA, 19 nt, Homo sapiens
  misc_RNA (1)...(19): siRNA sense strand
gaacuggcugccuuacaaa

SEQ ID NO: 1984391 - RNA, 19 nt, Homo sapiens
  misc_RNA (1)...(19): siRNA sense strand
uacacaagauccucagauu

SEQ ID NO: 1984392 - RNA, 19 nt, Homo sapiens
  misc_RNA (1)...(19): siRNA sense strand
uuacagcucugcaaagaag

SEQ ID NO: 1984393 - RNA, 19 nt, Homo sapiens
  misc_RNA (1)...(19): siRNA sense strand
ggauauaaauaagcaugga

SEQ ID NO: 1984394 - RNA, 19 nt, Homo sapiens
  misc_RNA (1)...(19): siRNA sense strand
aaauaaugcugguguaguc

SEQ ID NO: 1984395 - RNA, 19 nt, Homo sapiens
  misc_RNA (1)...(19): siRNA sense strand
ggcagaaauuggagauguu

SEQ ID NO: 1984396 - RNA, 19 nt, Homo sapiens
  misc_RNA (1)...(19): siRNA sense strand
gcuguuggauuucauaaaa

SEQ ID NO: 1984397 - RNA, 19 nt, Homo sapiens
  misc_RNA (1)...(19): siRNA sense strand
gggacugggugccaagguu

SEQ ID NO: 1984398 - RNA, 19 nt, Homo sapiens
  misc_RNA (1)...(19): siRNA sense strand
ugacugagcagaagaugau

SEQ ID NO: 1984399 - RNA, 19 nt, Homo sapiens
  misc_RNA (1)...(19): siRNA sense strand
acaugucuguguccuaauu

SEQ ID NO: 1984400 - RNA, 19 nt, Homo sapiens
  misc_RNA (1)...(19): siRNA sense strand
gaaauuucuucuggacauc

SEQ ID NO: 1984401 - RNA, 19 nt, Homo sapiens
  misc_RNA (1)...(19): siRNA sense strand
cuggcugccuuacaaauaa

SEQ ID NO: 1984402 - RNA, 19 nt, Homo sapiens
  misc_RNA (1)...(19): siRNA sense strand
gcaaccgagaagauauuua

SEQ ID NO: 1984403 - RNA, 19 nt, Homo sapiens
  misc_RNA (1)...(19): siRNA sense strand
gcagcaaccgagaagauau

SEQ ID NO: 1984404 - RNA, 19 nt, Homo sapiens
  misc_RNA (1)...(19): siRNA sense strand
uugaugcaguuauuggaua

SEQ ID NO: 1984405 - RNA, 19 nt, Homo sapiens
  misc_RNA (1)...(19): siRNA sense strand
aaacacuggcuucaucaaa

SEQ ID NO: 1984406 - RNA, 19 nt, Homo sapiens
  misc_RNA (1)...(19): siRNA sense strand
caaccgagaagauauuuac

SEQ ID NO: 1984407 - RNA, 19 nt, Homo sapiens
  misc_RNA (1)...(19): siRNA sense strand
cugguucucugggauauaa

SEQ ID NO: 1984408 - RNA, 19 nt, Homo sapiens
  misc_RNA (1)...(19): siRNA sense strand
cugcaaugacgaagaauaa

SEQ ID NO: 1984409 - RNA, 19 nt, Homo sapiens
  misc_RNA (1)...(19): siRNA sense strand
caagauccucagauugaaa

SEQ ID NO: 1984410 - RNA, 19 nt, Homo sapiens
  misc_RNA (1)...(19): siRNA sense strand
ggugaaggcagaaauugga

SEQ ID NO: 1984411 - RNA, 19 nt, Homo sapiens
  misc_RNA (1)...(19): siRNA sense strand
guuugcugcuguuggauuu

SEQ ID NO: 1984412 - RNA, 19 nt, Homo sapiens
  misc_RNA (1)...(19): siRNA sense strand
ugcaugggauucugacuga

SEQ ID NO: 1984413 - RNA, 19 nt, Homo sapiens
  misc_RNA (1)...(19): siRNA sense strand
ggaacccgaggaaguggua

SEQ ID NO: 1984414 - RNA, 19 nt, Homo sapiens
  misc_RNA (1)...(19): siRNA sense strand
aaacagcugccaaaugcaa

SEQ ID NO: 1984415 - RNA, 19 nt, Homo sapiens
  misc_RNA (1)...(19): siRNA sense strand
gagcguuuccuggcaguuu

SEQ ID NO: 1984416 - RNA, 19 nt, Homo sapiens
  misc_RNA (1)...(19): siRNA sense strand
aagaauaaccauggccaua

SEQ ID NO: 1984417 - RNA, 19 nt, Homo sapiens
  misc_RNA (1)...(19): siRNA sense strand
ccuaugaauuugcuaaacu

SEQ ID NO: 1984418 - RNA, 19 nt, Homo sapiens
  misc_RNA (1)...(19): siRNA sense strand
uaaugcugguguagucuau

SEQ ID NO: 1984419 - RNA, 19 nt, Homo sapiens
  misc_RNA (1)...(19): siRNA sense strand
gaaggcagaaauuggagau

SEQ ID NO: 1984420 - RNA, 19 nt, Homo sapiens
  misc_RNA (1)...(19): siRNA sense strand
cagcaaccgagaagauauu

SEQ ID NO: 1984421 - RNA, 19 nt, Homo sapiens
  misc_RNA (1)...(19): siRNA sense strand
uuaacaacauuggaaagga

SEQ ID NO: 1984422 - RNA, 19 nt, Homo sapiens
  misc_RNA (1)...(19): siRNA sense strand
guaaacacuggcuucauca

SEQ ID NO: 1984423 - RNA, 19 nt, Homo sapiens
  misc_RNA (1)...(19): siRNA sense strand
cauaaaacuuugacagaug

SEQ ID NO: 1984424 - RNA, 19 nt, Homo sapiens
  misc_RNA (1)...(19): siRNA sense strand
acaagauccucagauugaa

SEQ ID NO: 1984425 - RNA, 19 nt, Homo sapiens
  misc_RNA (1)...(19): siRNA sense strand
aguaaauaaugcuggugua

SEQ ID NO: 1984426 - RNA, 19 nt, Homo sapiens
  misc_RNA (1)...(19): siRNA sense strand
acacaagauccucagauug

SEQ ID NO: 1984427 - RNA, 19 nt, Homo sapiens
  misc_RNA (1)...(19): siRNA sense strand
ugaugcaguuauuggauau

SEQ ID NO: 1984428 - RNA, 19 nt, Homo sapiens
  misc_RNA (1)...(19): siRNA sense strand
uacaggagcugggcaugga

SEQ ID NO: 1984429 - RNA, 19 nt, Homo sapiens
  misc_RNA (1)...(19): siRNA sense strand
ggacuacaaaggcauuucu

SEQ ID NO: 1984430 - RNA, 19 nt, Homo sapiens
  misc_RNA (1)...(19): siRNA sense strand
gauauuuacagcucugcaa

SEQ ID NO: 1984431 - RNA, 19 nt, Homo sapiens
  misc_RNA (1)...(19): siRNA sense strand
cuuacuggcuuacuguuca

SEQ ID NO: 1984432 - RNA, 19 nt, Homo sapiens
  misc_RNA (1)...(19): siRNA sense strand
cagauuuguuugcuacaca

SEQ ID NO: 1984433 - RNA, 19 nt, Homo sapiens
  misc_RNA (1)...(19): siRNA sense strand
ccuccugcuucucccguua

SEQ ID NO: 1984434 - RNA, 19 nt, Homo sapiens
  misc_RNA (1)...(19): siRNA sense strand
agaauaaccauggccauau

SEQ ID NO: 1984435 - RNA, 19 nt, Homo sapiens
  misc_RNA (1)...(19): siRNA sense strand
guaaauaaugcugguguag

SEQ ID NO: 1984436 - RNA, 19 nt, Homo sapiens
  misc_RNA (1)...(19): siRNA sense strand
acugacugccuaugaauuu

SEQ ID NO: 1984437 - RNA, 19 nt, Homo sapiens
  misc_RNA (1)...(19): siRNA sense strand
ucuguguccuaauuucgua

SEQ ID NO: 1984438 - RNA, 19 nt, Homo sapiens
  misc_RNA (1)...(19): siRNA sense strand
aggcagaaauuggagaugu

SEQ ID NO: 1984439 - RNA, 19 nt, Homo sapiens
  misc_RNA (1)...(19): siRNA sense strand
caaaacaacaugucugugu

SEQ ID NO: 1984440 - RNA, 19 nt, Homo sapiens
  misc_RNA (1)...(19): siRNA sense strand
ccgaggaagugguaaacag

SEQ ID NO: 1984441 - RNA, 19 nt, Homo sapiens
  misc_RNA (1)...(19): siRNA sense strand
ucucugggauauaaauaag

SEQ ID NO: 1984442 - RNA, 19 nt, Homo sapiens
  misc_RNA (1)...(19): siRNA sense strand
gaggaaacagcugccaaau

SEQ ID NO: 1984443 - RNA, 19 nt, Homo sapiens
  misc_RNA (1)...(19): siRNA sense strand
gauccuuccugagcguuuc

SEQ ID NO: 1984444 - RNA, 19 nt, Homo sapiens
  misc_RNA (1)...(19): siRNA sense strand
gaucgucugcucccuagag

SEQ ID NO: 1984445 - RNA, 19 nt, Homo sapiens
  misc_RNA (1)...(19): siRNA sense strand
ggagcugggcauggaauug

SEQ ID NO: 1984446 - RNA, 19 nt, Homo sapiens
  misc_RNA (1)...(19): siRNA sense strand
uaaauaaugcugguguagu

SEQ ID NO: 1984447 - RNA, 19 nt, Homo sapiens
  misc_RNA (1)...(19): siRNA sense strand
aggcauuucuuccugcaau

SEQ ID NO: 1984448 - RNA, 19 nt, Homo sapiens
  misc_RNA (1)...(19): siRNA sense strand
guucucugggauauaaaua

SEQ ID NO: 1984449 - RNA, 19 nt, Homo sapiens
  misc_RNA (1)...(19): siRNA sense strand
ucugggauauaaauaagca

SEQ ID NO: 1984450 - RNA, 19 nt, Homo sapiens
  misc_RNA (1)...(19): siRNA sense strand
cugcuucucccguuacuga

SEQ ID NO: 1984451 - RNA, 19 nt, Homo sapiens
  misc_RNA (1)...(19): siRNA sense strand
aaccauggccauauuguca

SEQ ID NO: 1984452 - RNA, 19 nt, Homo sapiens
  misc_RNA (1)...(19): siRNA sense strand
auuuacagcucugcaaaga

SEQ ID NO: 1984453 - RNA, 19 nt, Homo sapiens
  misc_RNA (1)...(19): siRNA sense strand
gagcugggcauggaauugg

SEQ ID NO: 1984454 - RNA, 19 nt, Homo sapiens
  misc_RNA (1)...(19): siRNA sense strand
gucuauacaucagauuugu

SEQ ID NO: 1984455 - RNA, 19 nt, Homo sapiens
  misc_RNA (1)...(19): siRNA sense strand
gacugacugccuaugaauu

SEQ ID NO: 1984456 - RNA, 19 nt, Homo sapiens
  misc_RNA (1)...(19): siRNA sense strand
ccugcaaugacgaagaaua

SEQ ID NO: 1984457 - RNA, 19 nt, Homo sapiens
  misc_RNA (1)...(19): siRNA sense strand
gcugaugcaugggauucug

SEQ ID NO: 1984458 - RNA, 19 nt, Homo sapiens
  misc_RNA (1)...(19): siRNA sense strand
aaauccaaguacaaguuug

SEQ ID NO: 1984459 - RNA, 19 nt, Homo sapiens
  misc_RNA (1)...(19): siRNA sense strand
uuacaaauaacuggaguca

SEQ ID NO: 1984460 - RNA, 19 nt, Homo sapiens
  misc_RNA (1)...(19): siRNA sense strand
acuggcugccuuacaaaua

SEQ ID NO: 1984461 - RNA, 19 nt, Homo sapiens
  misc_RNA (1)...(19): siRNA sense strand
uuacuguucaagcaaguuu

SEQ ID NO: 1984462 - RNA, 19 nt, Homo sapiens
  misc_RNA (1)...(19): siRNA sense strand
uguuaaguuugaugcaguu

SEQ ID NO: 1984463 - RNA, 19 nt, Homo sapiens
  misc_RNA (1)...(19): siRNA sense strand
aggaaacagcugccaaaug

SEQ ID NO: 1984464 - RNA, 19 nt, Homo sapiens
  misc_RNA (1)...(19): siRNA sense strand
gcaaugacgaagaauaacc

SEQ ID NO: 1984465 - RNA, 19 nt, Homo sapiens
  misc_RNA (1)...(19): siRNA sense strand
uuccugcaaugacgaagaa

SEQ ID NO: 1984466 - RNA, 19 nt, Homo sapiens
  misc_RNA (1)...(19): siRNA sense strand
cauggaauugggagacuga

SEQ ID NO: 1984467 - RNA, 19 nt, Homo sapiens
  misc_RNA (1)...(19): siRNA sense strand
gaacacagaagcuuaaaga

SEQ ID NO: 1984468 - RNA, 19 nt, Homo sapiens
  misc_RNA (1)...(19): siRNA sense strand
agaagaaacugaacagaaa

SEQ ID NO: 1984469 - RNA, 19 nt, Homo sapiens
  misc_RNA (1)...(19): siRNA sense strand
gaauguguguuucugcaua

SEQ ID NO: 1984470 - RNA, 19 nt, Homo sapiens
  misc_RNA (1)...(19): siRNA sense strand
gcaagaacacagaagcuua

SEQ ID NO: 1984471 - RNA, 19 nt, Homo sapiens
  misc_RNA (1)...(19): siRNA sense strand
cacagaagcuuaaagaaga

SEQ ID NO: 1984472 - RNA, 19 nt, Homo sapiens
  misc_RNA (1)...(19): siRNA sense strand
gggaugaguuggccuacua

SEQ ID NO: 1984473 - RNA, 19 nt, Homo sapiens
  misc_RNA (1)...(19): siRNA sense strand
guagggaggugcucaugaa

SEQ ID NO: 1984474 - RNA, 19 nt, Homo sapiens
  misc_RNA (1)...(19): siRNA sense strand
caucagagaauguguguuu

SEQ ID NO: 1984475 - RNA, 19 nt, Homo sapiens
  misc_RNA (1)...(19): siRNA sense strand
ggacagccaucagagaaug

SEQ ID NO: 1984476 - RNA, 19 nt, Homo sapiens
  misc_RNA (1)...(19): siRNA sense strand
caagaacacagaagcuuaa

SEQ ID NO: 1984477 - RNA, 19 nt, Homo sapiens
  misc_RNA (1)...(19): siRNA sense strand
ggaaaugugggaugaguug

SEQ ID NO: 1984478 - RNA, 19 nt, Homo sapiens
  misc_RNA (1)...(19): siRNA sense strand
caggagagcaugagauuug

SEQ ID NO: 1984479 - RNA, 19 nt, Homo sapiens
  misc_RNA (1)...(19): siRNA sense strand
gaagaaaacacacgagauu

SEQ ID NO: 1984480 - RNA, 19 nt, Homo sapiens
  misc_RNA (1)...(19): siRNA sense strand
gaaaagguauuugaaagug

SEQ ID NO: 1984481 - RNA, 19 nt, Homo sapiens
  misc_RNA (1)...(19): siRNA sense strand
ggaaacaaagggaagaugu

SEQ ID NO: 1984482 - RNA, 19 nt, Homo sapiens
  misc_RNA (1)...(19): siRNA sense strand
gggucuaccucaugaauca

SEQ ID NO: 1984483 - RNA, 19 nt, Homo sapiens
  misc_RNA (1)...(19): siRNA sense strand
ggaugcuucuucaggaauu

SEQ ID NO: 1984484 - RNA, 19 nt, Homo sapiens
  misc_RNA (1)...(19): siRNA sense strand
gauguugguucagcaagaa

SEQ ID NO: 1984485 - RNA, 19 nt, Homo sapiens
  misc_RNA (1)...(19): siRNA sense strand
gaagacggcucuggguuuu

SEQ ID NO: 1984486 - RNA, 19 nt, Homo sapiens
  misc_RNA (1)...(19): siRNA sense strand
gaagaaacugaacagaaau

SEQ ID NO: 1984487 - RNA, 19 nt, Homo sapiens
  misc_RNA (1)...(19): siRNA sense strand
gagagcaugagauuugaaa

SEQ ID NO: 1984488 - RNA, 19 nt, Homo sapiens
  misc_RNA (1)...(19): siRNA sense strand
ggaauucgaaggaagaaag

SEQ ID NO: 1984489 - RNA, 19 nt, Homo sapiens
  misc_RNA (1)...(19): siRNA sense strand
ugaguuggccuacuacgaa

SEQ ID NO: 1984490 - RNA, 19 nt, Homo sapiens
  misc_RNA (1)...(19): siRNA sense strand
ugaagacggcucuggguuu

SEQ ID NO: 1984491 - RNA, 19 nt, Homo sapiens
  misc_RNA (1)...(19): siRNA sense strand
aagaagaaacugaacagaa

SEQ ID NO: 1984492 - RNA, 19 nt, Homo sapiens
  misc_RNA (1)...(19): siRNA sense strand
gaagauguugguucagcaa

SEQ ID NO: 1984493 - RNA, 19 nt, Homo sapiens
  misc_RNA (1)...(19): siRNA sense strand
acagaagcuuaaagaagaa

SEQ ID NO: 1984494 - RNA, 19 nt, Homo sapiens
  misc_RNA (1)...(19): siRNA sense strand
aagggaagauguugguuca

SEQ ID NO: 1984495 - RNA, 19 nt, Homo sapiens
  misc_RNA (1)...(19): siRNA sense strand
gggaggugcucaugaagac

SEQ ID NO: 1984496 - RNA, 19 nt, Homo sapiens
  misc_RNA (1)...(19): siRNA sense strand
acacagaagcuuaaagaag

SEQ ID NO: 1984497 - RNA, 19 nt, Homo sapiens
  misc_RNA (1)...(19): siRNA sense strand
caugagauuugaaaaggua

SEQ ID NO: 1984498 - RNA, 19 nt, Homo sapiens
  misc_RNA (1)...(19): siRNA sense strand
gaauucgaaggaagaaaga

SEQ ID NO: 1984499 - RNA, 19 nt, Homo sapiens
  misc_RNA (1)...(19): siRNA sense strand
gcuuaaagaagaaacugaa

SEQ ID NO: 1984500 - RNA, 19 nt, Homo sapiens
  misc_RNA (1)...(19): siRNA sense strand
aggcauugcucccaaaaua

SEQ ID NO: 1984501 - RNA, 19 nt, Homo sapiens
  misc_RNA (1)...(19): siRNA sense strand
caaggacagccaucagaga

SEQ ID NO: 1984502 - RNA, 19 nt, Homo sapiens
  misc_RNA (1)...(19): siRNA sense strand
uaaagaagaaacugaacag

SEQ ID NO: 1984503 - RNA, 19 nt, Homo sapiens
  misc_RNA (1)...(19): siRNA sense strand
gguauuugaaagugcagua

SEQ ID NO: 1984504 - RNA, 19 nt, Homo sapiens
  misc_RNA (1)...(19): siRNA sense strand
ggagagcaugagauuugaa

SEQ ID NO: 1984505 - RNA, 19 nt, Homo sapiens
  misc_RNA (1)...(19): siRNA sense strand
gcaaacaagauguguaccu

SEQ ID NO: 1984506 - RNA, 19 nt, Homo sapiens
  misc_RNA (1)...(19): siRNA sense strand
aguagauccuggagcugua

SEQ ID NO: 1984507 - RNA, 19 nt, Homo sapiens
  misc_RNA (1)...(19): siRNA sense strand
ucaggaauucgaaggaaga

SEQ ID NO: 1984508 - RNA, 19 nt, Homo sapiens
  misc_RNA (1)...(19): siRNA sense strand
agauguugguucagcaaga

SEQ ID NO: 1984509 - RNA, 19 nt, Homo sapiens
  misc_RNA (1)...(19): siRNA sense strand
uaguagaccuuuuggaaau

SEQ ID NO: 1984510 - RNA, 19 nt, Homo sapiens
  misc_RNA (1)...(19): siRNA sense strand
cgaaggaagaaagacauga

SEQ ID NO: 1984511 - RNA, 19 nt, Homo sapiens
  misc_RNA (1)...(19): siRNA sense strand
aaggacagccaucagagaa

SEQ ID NO: 1984512 - RNA, 19 nt, Homo sapiens
  misc_RNA (1)...(19): siRNA sense strand
ggagaagggcugcuuuccu

SEQ ID NO: 1984513 - RNA, 19 nt, Homo sapiens
  misc_RNA (1)...(19): siRNA sense strand
aggagagcaugagauuuga

SEQ ID NO: 1984514 - RNA, 19 nt, Homo sapiens
  misc_RNA (1)...(19): siRNA sense strand
uacaaggacagccaucaga

SEQ ID NO: 1984515 - RNA, 19 nt, Homo sapiens
  misc_RNA (1)...(19): siRNA sense strand
guaguagaccuuuuggaaa

SEQ ID NO: 1984516 - RNA, 19 nt, Homo sapiens
  misc_RNA (1)...(19): siRNA sense strand
cacacgagauuuucuuuuc

SEQ ID NO: 1984517 - RNA, 19 nt, Homo sapiens
  misc_RNA (1)...(19): siRNA sense strand
ugaagacccugguuucuga

SEQ ID NO: 1984518 - RNA, 19 nt, Homo sapiens
  misc_RNA (1)...(19): siRNA sense strand
ucaggaagaugaugugaag

SEQ ID NO: 1984519 - RNA, 19 nt, Homo sapiens
  misc_RNA (1)...(19): siRNA sense strand
ggacguacaccuugaccaa

SEQ ID NO: 1984520 - RNA, 19 nt, Homo sapiens
  misc_RNA (1)...(19): siRNA sense strand
ggaugaaaguccauauggu

SEQ ID NO: 1984521 - RNA, 19 nt, Homo sapiens
  misc_RNA (1)...(19): siRNA sense strand
uaacagccaugaccaaagc

SEQ ID NO: 1984522 - RNA, 19 nt, Homo sapiens
  misc_RNA (1)...(19): siRNA sense strand
gagaccauccgccgauuug

SEQ ID NO: 1984523 - RNA, 19 nt, Homo sapiens
  misc_RNA (1)...(19): siRNA sense strand
gaugugaagacccugguuu

SEQ ID NO: 1984524 - RNA, 19 nt, Homo sapiens
  misc_RNA (1)...(19): siRNA sense strand
gcggaagagucaagggaau

SEQ ID NO: 1984525 - RNA, 19 nt, Homo sapiens
  misc_RNA (1)...(19): siRNA sense strand
ucaagggaaugucaucaac

SEQ ID NO: 1984526 - RNA, 19 nt, Homo sapiens
  misc_RNA (1)...(19): siRNA sense strand
ccaggcaguucccuaugug

SEQ ID NO: 1984527 - RNA, 19 nt, Homo sapiens
  misc_RNA (1)...(19): siRNA sense strand
ggaagagucaagggaaugu

SEQ ID NO: 1984528 - RNA, 19 nt, Homo sapiens
  misc_RNA (1)...(19): siRNA sense strand
cccuggagcugucuuuauc

SEQ ID NO: 1984529 - RNA, 19 nt, Homo sapiens
  misc_RNA (1)...(19): siRNA sense strand
ugaugugacucaggaagau

SEQ ID NO: 1984530 - RNA, 19 nt, Homo sapiens
  misc_RNA (1)...(19): siRNA sense strand
caagggaaugucaucaaca

SEQ ID NO: 1984531 - RNA, 19 nt, Homo sapiens
  misc_RNA (1)...(19): siRNA sense strand
cccaggcaguucccuaugu

SEQ ID NO: 1984532 - RNA, 19 nt, Homo sapiens
  misc_RNA (1)...(19): siRNA sense strand
guaacagccaugaccaaag

SEQ ID NO: 1984533 - RNA, 19 nt, Homo sapiens
  misc_RNA (1)...(19): siRNA sense strand
uuuauccucugugauguga

SEQ ID NO: 1984534 - RNA, 19 nt, Homo sapiens
  misc_RNA (1)...(19): siRNA sense strand
cagccaugaccaaagcuuu

SEQ ID NO: 1984535 - RNA, 19 nt, Homo sapiens
  misc_RNA (1)...(19): siRNA sense strand
ugagaccauccgccgauuu

SEQ ID NO: 1984536 - RNA, 19 nt, Homo sapiens
  misc_RNA (1)...(19): siRNA sense strand
gugaagacccugguuucug

SEQ ID NO: 1984537 - RNA, 19 nt, Homo sapiens
  misc_RNA (1)...(19): siRNA sense strand
gugaugugacucaggaaga

SEQ ID NO: 1984538 - RNA, 19 nt, Homo sapiens
  misc_RNA (1)...(19): siRNA sense strand
ugacucaggaagaugaugu

SEQ ID NO: 1984539 - RNA, 19 nt, Homo sapiens
  misc_RNA (1)...(19): siRNA sense strand
gagcagaggaggaagagaa

SEQ ID NO: 1984540 - RNA, 19 nt, Homo sapiens
  misc_RNA (1)...(19): siRNA sense strand
agaagaggcuuugccauug

SEQ ID NO: 1984541 - RNA, 19 nt, Homo sapiens
  misc_RNA (1)...(19): siRNA sense strand
gcaauggccuguuguaccu

SEQ ID NO: 1984542 - RNA, 19 nt, Homo sapiens
  misc_RNA (1)...(19): siRNA sense strand
ggagcugccugugguggua

SEQ ID NO: 1984543 - RNA, 19 nt, Homo sapiens
  misc_RNA (1)...(19): siRNA sense strand
ccugccaccuccuuucuua

SEQ ID NO: 1984544 - RNA, 19 nt, Homo sapiens
  misc_RNA (1)...(19): siRNA sense strand
gaagaggcuuugccauugc

SEQ ID NO: 1984545 - RNA, 19 nt, Homo sapiens
  misc_RNA (1)...(19): siRNA sense strand
cagcaucuaccacguguuu

SEQ ID NO: 1984546 - RNA, 19 nt, Homo sapiens
  misc_RNA (1)...(19): siRNA sense strand
cagggcagcuccacucugu

SEQ ID NO: 1984547 - RNA, 19 nt, Homo sapiens
  misc_RNA (1)...(19): siRNA sense strand
aagaagaggcuuugccauu

SEQ ID NO: 1984548 - RNA, 19 nt, Homo sapiens
  misc_RNA (1)...(19): siRNA sense strand
gugcagagcuuuuccuguu

SEQ ID NO: 1984549 - RNA, 19 nt, Homo sapiens
  misc_RNA (1)...(19): siRNA sense strand
gcagaaaggacuguguaga

SEQ ID NO: 1984550 - RNA, 19 nt, Homo sapiens
  misc_RNA (1)...(19): siRNA sense strand
guaccucuaaugucacuuu

SEQ ID NO: 1984551 - RNA, 19 nt, Homo sapiens
  misc_RNA (1)...(19): siRNA sense strand
uguuguaccucuaauguca

SEQ ID NO: 1984552 - RNA, 19 nt, Homo sapiens
  misc_RNA (1)...(19): siRNA sense strand
ggaagagaaggaggaagaa

SEQ ID NO: 1984553 - RNA, 19 nt, Homo sapiens
  misc_RNA (1)...(19): siRNA sense strand
ggaggaagaagaggcuuug

SEQ ID NO: 1984554 - RNA, 19 nt, Homo sapiens
  misc_RNA (1)...(19): siRNA sense strand
ccagugccgugaccaaugg

SEQ ID NO: 1984555 - RNA, 19 nt, Homo sapiens
  misc_RNA (1)...(19): siRNA sense strand
uguguguucucauauguga

SEQ ID NO: 1984556 - RNA, 19 nt, Homo sapiens
  misc_RNA (1)...(19): siRNA sense strand
gucuguguguguucucaua

SEQ ID NO: 1984557 - RNA, 19 nt, Homo sapiens
  misc_RNA (1)...(19): siRNA sense strand
gcaucuaccacguguuuca

SEQ ID NO: 1984558 - RNA, 19 nt, Homo sapiens
  misc_RNA (1)...(19): siRNA sense strand
gcagagcuuuuccuguuug

SEQ ID NO: 1984559 - RNA, 19 nt, Homo sapiens
  misc_RNA (1)...(19): siRNA sense strand
ucacuacccucuguaacca

SEQ ID NO: 1984560 - RNA, 19 nt, Homo sapiens
  misc_RNA (1)...(19): siRNA sense strand
aagcagaaaggacugugua

SEQ ID NO: 1984561 - RNA, 19 nt, Homo sapiens
  misc_RNA (1)...(19): siRNA sense strand
ccaagugggcucccugcuu

SEQ ID NO: 1984562 - RNA, 19 nt, Homo sapiens
  misc_RNA (1)...(19): siRNA sense strand
ggaggaagagaaggaggaa

SEQ ID NO: 1984563 - RNA, 19 nt, Homo sapiens
  misc_RNA (1)...(19): siRNA sense strand
gcagggcugguuggucuuu

SEQ ID NO: 1984564 - RNA, 19 nt, Homo sapiens
  misc_RNA (1)...(19): siRNA sense strand
gaagagaaggaggaagaag

SEQ ID NO: 1984565 - RNA, 19 nt, Homo sapiens
  misc_RNA (1)...(19): siRNA sense strand
aagagaaggaggaagaaga

SEQ ID NO: 1984566 - RNA, 19 nt, Homo sapiens
  misc_RNA (1)...(19): siRNA sense strand
cagaaaggacuguguagac

SEQ ID NO: 1984567 - RNA, 19 nt, Homo sapiens
  misc_RNA (1)...(19): siRNA sense strand
cgacuucccugagcguuuu

SEQ ID NO: 1984568 - RNA, 19 nt, Homo sapiens
  misc_RNA (1)...(19): siRNA sense strand
cagaggaggaagagaagga

SEQ ID NO: 1984569 - RNA, 19 nt, Homo sapiens
  misc_RNA (1)...(19): siRNA sense strand
aggaagagaaggaggaaga

SEQ ID NO: 1984570 - RNA, 19 nt, Homo sapiens
  misc_RNA (1)...(19): siRNA sense strand
ugccaucacuacccucugu

SEQ ID NO: 1984571 - RNA, 19 nt, Homo sapiens
  misc_RNA (1)...(19): siRNA sense strand
ugguacaggugcugagugu

SEQ ID NO: 1984572 - RNA, 19 nt, Homo sapiens
  misc_RNA (1)...(19): siRNA sense strand
ugagguccaucagcuguuc

SEQ ID NO: 1984573 - RNA, 19 nt, Homo sapiens
  misc_RNA (1)...(19): siRNA sense strand
ccaucacuacccucuguaa

SEQ ID NO: 1984574 - RNA, 19 nt, Homo sapiens
  misc_RNA (1)...(19): siRNA sense strand
ugucgugggugcugugucu

SEQ ID NO: 1984575 - RNA, 19 nt, Homo sapiens
  misc_RNA (1)...(19): siRNA sense strand
uaccacguguuucaaagca

SEQ ID NO: 1984576 - RNA, 19 nt, Homo sapiens
  misc_RNA (1)...(19): siRNA sense strand
uguguguguucucauaugu

SEQ ID NO: 1984577 - RNA, 19 nt, Homo sapiens
  misc_RNA (1)...(19): siRNA sense strand
caacugcagugaagagugu

SEQ ID NO: 1984578 - RNA, 19 nt, Homo sapiens
  misc_RNA (1)...(19): siRNA sense strand
gcaaauuugugaaugugau

SEQ ID NO: 1984579 - RNA, 19 nt, Homo sapiens
  misc_RNA (1)...(19): siRNA sense strand
ggagacagguuccuuuagc

SEQ ID NO: 1984580 - RNA, 19 nt, Homo sapiens
  misc_RNA (1)...(19): siRNA sense strand
ccagaggcguuguaagugu

SEQ ID NO: 1984581 - RNA, 19 nt, Homo sapiens
  misc_RNA (1)...(19): siRNA sense strand
gcaucaaccugugggaaau

SEQ ID NO: 1984582 - RNA, 19 nt, Homo sapiens
  misc_RNA (1)...(19): siRNA sense strand
ccaguuacccgucagauca

SEQ ID NO: 1984583 - RNA, 19 nt, Homo sapiens
  misc_RNA (1)...(19): siRNA sense strand
gagccaagccacagagugu

SEQ ID NO: 1984584 - RNA, 19 nt, Homo sapiens
  misc_RNA (1)...(19): siRNA sense strand
gagacagguuccuuuagca

SEQ ID NO: 1984585 - RNA, 19 nt, Homo sapiens
  misc_RNA (1)...(19): siRNA sense strand
ggacacugagaacccauuu

SEQ ID NO: 1984586 - RNA, 19 nt, Homo sapiens
  misc_RNA (1)...(19): siRNA sense strand
ucguguggcugauucguaa

SEQ ID NO: 1984587 - RNA, 19 nt, Homo sapiens
  misc_RNA (1)...(19): siRNA sense strand
guaagugugagcaccauug

SEQ ID NO: 1984588 - RNA, 19 nt, Homo sapiens
  misc_RNA (1)...(19): siRNA sense strand
gcaccuucgugucgcacuu

SEQ ID NO: 1984589 - RNA, 19 nt, Homo sapiens
  misc_RNA (1)...(19): siRNA sense strand
uagcaaauuugugaaugug

SEQ ID NO: 1984590 - RNA, 19 nt, Homo sapiens
  misc_RNA (1)...(19): siRNA sense strand
acagguuccuuuagcaaau

SEQ ID NO: 1984591 - RNA, 19 nt, Homo sapiens
  misc_RNA (1)...(19): siRNA sense strand
aggaggugcuggacacuga

SEQ ID NO: 1984592 - RNA, 19 nt, Homo sapiens
  misc_RNA (1)...(19): siRNA sense strand
gacagguuccuuuagcaaa

SEQ ID NO: 1984593 - RNA, 19 nt, Homo sapiens
  misc_RNA (1)...(19): siRNA sense strand
acacugagaacccauuugu

SEQ ID NO: 1984594 - RNA, 19 nt, Homo sapiens
  misc_RNA (1)...(19): siRNA sense strand
ugcagcgucuccagaguaa

SEQ ID NO: 1984595 - RNA, 19 nt, Homo sapiens
  misc_RNA (1)...(19): siRNA sense strand
ggcaucaaccugugggaaa

SEQ ID NO: 1984596 - RNA, 19 nt, Homo sapiens
  misc_RNA (1)...(19): siRNA sense strand
cagguuccuuuagcaaauu

SEQ ID NO: 1984597 - RNA, 19 nt, Homo sapiens
  misc_RNA (1)...(19): siRNA sense strand
aauggaagcaucuacauca

SEQ ID NO: 1984598 - RNA, 19 nt, Homo sapiens
  misc_RNA (1)...(19): siRNA sense strand
cggaguuccugcugaaaca

SEQ ID NO: 1984599 - RNA, 19 nt, Homo sapiens
  misc_RNA (1)...(19): siRNA sense strand
ugugggaaauggcggaguu

SEQ ID NO: 1984600 - RNA, 19 nt, Homo sapiens
  misc_RNA (1)...(19): siRNA sense strand
uggcggaguuccugcugaa

SEQ ID NO: 1984601 - RNA, 19 nt, Homo sapiens
  misc_RNA (1)...(19): siRNA sense strand
guaauggaagcaucuacau

SEQ ID NO: 1984602 - RNA, 19 nt, Homo sapiens
  misc_RNA (1)...(19): siRNA sense strand
ggagcagcguggcaucaac

SEQ ID NO: 1984603 - RNA, 19 nt, Homo sapiens
  misc_RNA (1)...(19): siRNA sense strand
acgggaccuuggccaguua

SEQ ID NO: 1984604 - RNA, 19 nt, Homo sapiens
  misc_RNA (1)...(19): siRNA sense strand
aagggcagcuggugcucuu

SEQ ID NO: 1984605 - RNA, 19 nt, Homo sapiens
  misc_RNA (1)...(19): siRNA sense strand
ccaaugcaccgggcacuuc

SEQ ID NO: 1984606 - RNA, 19 nt, Homo sapiens
  misc_RNA (1)...(19): siRNA sense strand
gaaacaggacguggucaac

SEQ ID NO: 1984607 - RNA, 19 nt, Homo sapiens
  misc_RNA (1)...(19): siRNA sense strand
ugaaacaggacguggucaa

SEQ ID NO: 1984608 - RNA, 19 nt, Homo sapiens
  misc_RNA (1)...(19): siRNA sense strand
cagcuggugcucuuucaug

SEQ ID NO: 1984609 - RNA, 19 nt, Homo sapiens
  misc_RNA (1)...(19): siRNA sense strand
ccgcgacgacgacuugcua

SEQ ID NO: 1984610 - RNA, 19 nt, Homo sapiens
  misc_RNA (1)...(19): siRNA sense strand
ggcagcuggugcucuuuca

SEQ ID NO: 1984611 - RNA, 19 nt, Homo sapiens
  misc_RNA (1)...(19): siRNA sense strand
ugccagaggcguuguaagu

SEQ ID NO: 1984612 - RNA, 19 nt, Homo sapiens
  misc_RNA (1)...(19): siRNA sense strand
cugcagcgucuccagagua

SEQ ID NO: 1984613 - RNA, 19 nt, Homo sapiens
  misc_RNA (1)...(19): siRNA sense strand
cagcgucuccagaguaaag

SEQ ID NO: 1984614 - RNA, 19 nt, Homo sapiens
  misc_RNA (1)...(19): siRNA sense strand
agacagguuccuuuagcaa

SEQ ID NO: 1984615 - RNA, 19 nt, Homo sapiens
  misc_RNA (1)...(19): siRNA sense strand
ggguccaacugcagugaag

SEQ ID NO: 1984616 - RNA, 19 nt, Homo sapiens
  misc_RNA (1)...(19): siRNA sense strand
gaaagaagcucugcuaaua

SEQ ID NO: 1984617 - RNA, 19 nt, Homo sapiens
  misc_RNA (1)...(19): siRNA sense strand
caagauaucugcaaaugaa

SEQ ID NO: 1984618 - RNA, 19 nt, Homo sapiens
  misc_RNA (1)...(19): siRNA sense strand
gaacagugcggugauauua

SEQ ID NO: 1984619 - RNA, 19 nt, Homo sapiens
  misc_RNA (1)...(19): siRNA sense strand
gcuaauagguaucauauca

SEQ ID NO: 1984620 - RNA, 19 nt, Homo sapiens
  misc_RNA (1)...(19): siRNA sense strand
ccauuuaccuuucugguua

SEQ ID NO: 1984621 - RNA, 19 nt, Homo sapiens
  misc_RNA (1)...(19): siRNA sense strand
gcaagaacauagacauuug

SEQ ID NO: 1984622 - RNA, 19 nt, Homo sapiens
  misc_RNA (1)...(19): siRNA sense strand
ggaaaugucugaugaugag

SEQ ID NO: 1984623 - RNA, 19 nt, Homo sapiens
  misc_RNA (1)...(19): siRNA sense strand
gaaguugugugccuuugaa

SEQ ID NO: 1984624 - RNA, 19 nt, Homo sapiens
  misc_RNA (1)...(19): siRNA sense strand
agaaguggcuguugucaaa

SEQ ID NO: 1984625 - RNA, 19 nt, Homo sapiens
  misc_RNA (1)...(19): siRNA sense strand
gauccaagccucaacauga

SEQ ID NO: 1984626 - RNA, 19 nt, Homo sapiens
  misc_RNA (1)...(19): siRNA sense strand
uaacugggauucucacuca

SEQ ID NO: 1984627 - RNA, 19 nt, Homo sapiens
  misc_RNA (1)...(19): siRNA sense strand
ugacagcccuacaaagaaa

SEQ ID NO: 1984628 - RNA, 19 nt, Homo sapiens
  misc_RNA (1)...(19): siRNA sense strand
caacauagaauaucuuugg

SEQ ID NO: 1984629 - RNA, 19 nt, Homo sapiens
  misc_RNA (1)...(19): siRNA sense strand
ggaaauuauucaagaaguc

SEQ ID NO: 1984630 - RNA, 19 nt, Homo sapiens
  misc_RNA (1)...(19): siRNA sense strand
gaauaucuuuggucauaca

SEQ ID NO: 1984631 - RNA, 19 nt, Homo sapiens
  misc_RNA (1)...(19): siRNA sense strand
aaauggaaaugucugauga

SEQ ID NO: 1984632 - RNA, 19 nt, Homo sapiens
  misc_RNA (1)...(19): siRNA sense strand
gaaagaugauagcaagucu

SEQ ID NO: 1984633 - RNA, 19 nt, Homo sapiens
  misc_RNA (1)...(19): siRNA sense strand
ggccagggaugacuucuau

SEQ ID NO: 1984634 - RNA, 19 nt, Homo sapiens
  misc_RNA (1)...(19): siRNA sense strand
gaaauaauccacugcaaaa

SEQ ID NO: 1984635 - RNA, 19 nt, Homo sapiens
  misc_RNA (1)...(19): siRNA sense strand
gaaauggaaaugucugaug

SEQ ID NO: 1984636 - RNA, 19 nt, Homo sapiens
  misc_RNA (1)...(19): siRNA sense strand
gaagcucugcuaauaggua

SEQ ID NO: 1984637 - RNA, 19 nt, Homo sapiens
  misc_RNA (1)...(19): siRNA sense strand
gcucgugucugacucaauc

SEQ ID NO: 1984638 - RNA, 19 nt, Homo sapiens
  misc_RNA (1)...(19): siRNA sense strand
gagagaacaauauugagaa

SEQ ID NO: 1984639 - RNA, 19 nt, Homo sapiens
  misc_RNA (1)...(19): siRNA sense strand
gagaaagaagcucugcuaa

SEQ ID NO: 1984640 - RNA, 19 nt, Homo sapiens
  misc_RNA (1)...(19): siRNA sense strand
gaagagcagucccauacac

SEQ ID NO: 1984641 - RNA, 19 nt, Homo sapiens
  misc_RNA (1)...(19): siRNA sense strand
gguaucauaucaacguuuc

SEQ ID NO: 1984642 - RNA, 19 nt, Homo sapiens
  misc_RNA (1)...(19): siRNA sense strand
cagaggaauucaugguuga

SEQ ID NO: 1984643 - RNA, 19 nt, Homo sapiens
  misc_RNA (1)...(19): siRNA sense strand
gagccaacauagaauaucu

SEQ ID NO: 1984644 - RNA, 19 nt, Homo sapiens
  misc_RNA (1)...(19): siRNA sense strand
gccaugaggauucaaauga

SEQ ID NO: 1984645 - RNA, 19 nt, Homo sapiens
  misc_RNA (1)...(19): siRNA sense strand
ggaauucaugguugauaaa

SEQ ID NO: 1984646 - RNA, 19 nt, Homo sapiens
  misc_RNA (1)...(19): siRNA sense strand
gcaaaccaguucuauucca

SEQ ID NO: 1984647 - RNA, 19 nt, Homo sapiens
  misc_RNA (1)...(19): siRNA sense strand
ggaaaagcaagaagaauuu

SEQ ID NO: 1984648 - RNA, 19 nt, Homo sapiens
  misc_RNA (1)...(19): siRNA sense strand
gaagaagaaauggaaaugu

SEQ ID NO: 1984649 - RNA, 19 nt, Homo sapiens
  misc_RNA (1)...(19): siRNA sense strand
cugaaaagcugaaagauga

SEQ ID NO: 1984650 - RNA, 19 nt, Homo sapiens
  misc_RNA (1)...(19): siRNA sense strand
gcggugauauuacagcaau

SEQ ID NO: 1984651 - RNA, 19 nt, Homo sapiens
  misc_RNA (1)...(19): siRNA sense strand
cugaggaaauuauucaaga

SEQ ID NO: 1984652 - RNA, 19 nt, Homo sapiens
  misc_RNA (1)...(19): siRNA sense strand
cgacccagcucaacauguc

SEQ ID NO: 1984653 - RNA, 19 nt, Homo sapiens
  misc_RNA (1)...(19): siRNA sense strand
cgagagaacaauauugaga

SEQ ID NO: 1984654 - RNA, 19 nt, Homo sapiens
  misc_RNA (1)...(19): siRNA sense strand
caagaccgagagaacaaua

SEQ ID NO: 1984655 - RNA, 19 nt, Homo sapiens
  misc_RNA (1)...(19): siRNA sense strand
aagaagaaauggaaauguc

SEQ ID NO: 1984656 - RNA, 19 nt, Homo sapiens
  misc_RNA (1)...(19): siRNA sense strand
gggauucucacucaauuug

SEQ ID NO: 1984657 - RNA, 19 nt, Homo sapiens
  misc_RNA (1)...(19): siRNA sense strand
ccacagccaugaggauuca

SEQ ID NO: 1984658 - RNA, 19 nt, Homo sapiens
  misc_RNA (1)...(19): siRNA sense strand
aggaauucaugguugauaa

SEQ ID NO: 1984659 - RNA, 19 nt, Homo sapiens
  misc_RNA (1)...(19): siRNA sense strand
gaaagaggagaaugacagu

SEQ ID NO: 1984660 - RNA, 19 nt, Homo sapiens
  misc_RNA (1)...(19): siRNA sense strand
ccagggaugacuucuauga

SEQ ID NO: 1984661 - RNA, 19 nt, Homo sapiens
  misc_RNA (1)...(19): siRNA sense strand
agaaauaauccacugcaaa

SEQ ID NO: 1984662 - RNA, 19 nt, Homo sapiens
  misc_RNA (1)...(19): siRNA sense strand
ggaggaagccaaggagaau

SEQ ID NO: 1984663 - RNA, 19 nt, Homo sapiens
  misc_RNA (1)...(19): siRNA sense strand
caaaccaguucuauuccau

SEQ ID NO: 1984664 - RNA, 19 nt, Homo sapiens
  misc_RNA (1)...(19): siRNA sense strand
gguguaagaccguguuugu

SEQ ID NO: 1984665 - RNA, 19 nt, Homo sapiens
  misc_RNA (1)...(19): siRNA sense strand
caggaggaguuaaacaaca

SEQ ID NO: 1984666 - RNA, 19 nt, Homo sapiens
  misc_RNA (1)...(19): siRNA sense strand
gcgcaagaacauagacauu

SEQ ID NO: 1984667 - RNA, 19 nt, Homo sapiens
  misc_RNA (1)...(19): siRNA sense strand
gaggaauucaugguugaua

SEQ ID NO: 1984668 - RNA, 19 nt, Homo sapiens
  misc_RNA (1)...(19): siRNA sense strand
gucggaggauuaccagaaa

SEQ ID NO: 1984669 - RNA, 19 nt, Homo sapiens
  misc_RNA (1)...(19): siRNA sense strand
ugaauaaccugggcauggu

SEQ ID NO: 1984670 - RNA, 19 nt, Homo sapiens
  misc_RNA (1)...(19): siRNA sense strand
ggaaguugugugccuuuga

SEQ ID NO: 1984671 - RNA, 19 nt, Homo sapiens
  misc_RNA (1)...(19): siRNA sense strand
ugugacagcccuacaaaga

SEQ ID NO: 1984672 - RNA, 19 nt, Homo sapiens
  misc_RNA (1)...(19): siRNA sense strand
acagugcggugauauuaca

SEQ ID NO: 1984673 - RNA, 19 nt, Homo sapiens
  misc_RNA (1)...(19): siRNA sense strand
aagaagcucugcuaauagg

SEQ ID NO: 1984674 - RNA, 19 nt, Homo sapiens
  misc_RNA (1)...(19): siRNA sense strand
guugacaguugcauuaguc

SEQ ID NO: 1984675 - RNA, 19 nt, Homo sapiens
  misc_RNA (1)...(19): siRNA sense strand
gugcugcuuuccuggauug

SEQ ID NO: 1984676 - RNA, 19 nt, Homo sapiens
  misc_RNA (1)...(19): siRNA sense strand
uccaagauaucugcaaaug

SEQ ID NO: 1984677 - RNA, 19 nt, Homo sapiens
  misc_RNA (1)...(19): siRNA sense strand
agaaagaagcucugcuaau

SEQ ID NO: 1984678 - RNA, 19 nt, Homo sapiens
  misc_RNA (1)...(19): siRNA sense strand
caacgcuucuaccagacaa

SEQ ID NO: 1984679 - RNA, 19 nt, Homo sapiens
  misc_RNA (1)...(19): siRNA sense strand
cugcaaaccaguucuauuc

SEQ ID NO: 1984680 - RNA, 19 nt, Homo sapiens
  misc_RNA (1)...(19): siRNA sense strand
gcacuacucggagcacgaa

SEQ ID NO: 1984681 - RNA, 19 nt, Homo sapiens
  misc_RNA (1)...(19): siRNA sense strand
gcaaaugaaauagaaaugc

SEQ ID NO: 1984682 - RNA, 19 nt, Homo sapiens
  misc_RNA (1)...(19): siRNA sense strand
ccaagauaucugcaaauga

SEQ ID NO: 1984683 - RNA, 19 nt, Homo sapiens
  misc_RNA (1)...(19): siRNA sense strand
gccaacauagaauaucuuu

SEQ ID NO: 1984684 - RNA, 19 nt, Homo sapiens
  misc_RNA (1)...(19): siRNA sense strand
uguguugacaguugcauua

SEQ ID NO: 1984685 - RNA, 19 nt, Homo sapiens
  misc_RNA (1)...(19): siRNA sense strand
caggaacaauuaaaaggua

SEQ ID NO: 1984686 - RNA, 19 nt, Homo sapiens
  misc_RNA (1)...(19): siRNA sense strand
aagaaaaccucaccaagga

SEQ ID NO: 1984687 - RNA, 19 nt, Homo sapiens
  misc_RNA (1)...(19): siRNA sense strand
gcuccggaaugcucaaagu

SEQ ID NO: 1984688 - RNA, 19 nt, Homo sapiens
  misc_RNA (1)...(19): siRNA sense strand
acauagacauuuggcgaaa

SEQ ID NO: 1984689 - RNA, 19 nt, Homo sapiens
  misc_RNA (1)...(19): siRNA sense strand
gaacgaccuccugggugua

SEQ ID NO: 1984690 - RNA, 19 nt, Homo sapiens
  misc_RNA (1)...(19): siRNA sense strand
ggagcuuccucagaugaug

SEQ ID NO: 1984691 - RNA, 19 nt, Homo sapiens
  misc_RNA (1)...(19): siRNA sense strand
aaugagagucgaugaauca

SEQ ID NO: 1984692 - RNA, 19 nt, Homo sapiens
  misc_RNA (1)...(19): siRNA sense strand
gaaaaugagagucgaugaa

SEQ ID NO: 1984693 - RNA, 19 nt, Homo sapiens
  misc_RNA (1)...(19): siRNA sense strand
cgaagaagaaauggaaaug

SEQ ID NO: 1984694 - RNA, 19 nt, Homo sapiens
  misc_RNA (1)...(19): siRNA sense strand
gcgaagaagaaauggaaau

SEQ ID NO: 1984695 - RNA, 19 nt, Homo sapiens
  misc_RNA (1)...(19): siRNA sense strand
cgaaagcccagcgcaagaa

SEQ ID NO: 1984696 - RNA, 19 nt, Homo sapiens
  misc_RNA (1)...(19): siRNA sense strand
caaccaagaccgagagaac

SEQ ID NO: 1984697 - RNA, 19 nt, Homo sapiens
  misc_RNA (1)...(19): siRNA sense strand
cgcaagaacauagacauuu

SEQ ID NO: 1984698 - RNA, 19 nt, Homo sapiens
  misc_RNA (1)...(19): siRNA sense strand
cuacugaggaaauuauuca

SEQ ID NO: 1984699 - RNA, 19 nt, Homo sapiens
  misc_RNA (1)...(19): siRNA sense strand
gagcugcugaaacaagaaa

SEQ ID NO: 1984700 - RNA, 19 nt, Homo sapiens
  misc_RNA (1)...(19): siRNA sense strand
gcuguugucaaagaaauaa

SEQ ID NO: 1984701 - RNA, 19 nt, Homo sapiens
  misc_RNA (1)...(19): siRNA sense strand
gagcagauuguggccguuu

SEQ ID NO: 1984702 - RNA, 19 nt, Homo sapiens
  misc_RNA (1)...(19): siRNA sense strand
gcuaucacagugcugcuuu

SEQ ID NO: 1984703 - RNA, 19 nt, Homo sapiens
  misc_RNA (1)...(19): siRNA sense strand
gguuauaggaugcgauuag

SEQ ID NO: 1984704 - RNA, 19 nt, Homo sapiens
  misc_RNA (1)...(19): siRNA sense strand
gaggaaauuauucaagaag

SEQ ID NO: 1984705 - RNA, 19 nt, Homo sapiens
  misc_RNA (1)...(19): siRNA sense strand
gaugauagcaagucuucag

SEQ ID NO: 1984706 - RNA, 19 nt, Homo sapiens
  misc_RNA (1)...(19): siRNA sense strand
aaagaagcucugcuaauag

SEQ ID NO: 1984707 - RNA, 19 nt, Homo sapiens
  misc_RNA (1)...(19): siRNA sense strand
ucaacaugaugacuggaau

SEQ ID NO: 1984708 - RNA, 19 nt, Homo sapiens
  misc_RNA (1)...(19): siRNA sense strand
ggaagagcagucccauaca

SEQ ID NO: 1984709 - RNA, 19 nt, Homo sapiens
  misc_RNA (1)...(19): siRNA sense strand
agguggagcugcugaaaca

SEQ ID NO: 1984710 - RNA, 19 nt, Homo sapiens
  misc_RNA (1)...(19): siRNA sense strand
aaaugagagucgaugaauc

SEQ ID NO: 1984711 - RNA, 19 nt, Homo sapiens
  misc_RNA (1)...(19): siRNA sense strand
aagaaauaauccacugcaa

SEQ ID NO: 1984712 - RNA, 19 nt, Homo sapiens
  misc_RNA (1)...(19): siRNA sense strand
gacauuuggcgaaagcauu

SEQ ID NO: 1984713 - RNA, 19 nt, Homo sapiens
  misc_RNA (1)...(19): siRNA sense strand
aggaggaguuaaacaacaa

SEQ ID NO: 1984714 - RNA, 19 nt, Homo sapiens
  misc_RNA (1)...(19): siRNA sense strand
acuccaagauaucugcaaa

SEQ ID NO: 1984715 - RNA, 19 nt, Homo sapiens
  misc_RNA (1)...(19): siRNA sense strand
uaaaagguaccaaggaauu

SEQ ID NO: 1984716 - RNA, 19 nt, Homo sapiens
  misc_RNA (1)...(19): siRNA sense strand
ugagagaccugcugucaua

SEQ ID NO: 1984717 - RNA, 19 nt, Homo sapiens
  misc_RNA (1)...(19): siRNA sense strand
gagagaagccguucaaaug

SEQ ID NO: 1984718 - RNA, 19 nt, Homo sapiens
  misc_RNA (1)...(19): siRNA sense strand
gaacuuaacauaugagaag

SEQ ID NO: 1984719 - RNA, 19 nt, Homo sapiens
  misc_RNA (1)...(19): siRNA sense strand
gaaggaggcugagcugaug

SEQ ID NO: 1984720 - RNA, 19 nt, Homo sapiens
  misc_RNA (1)...(19): siRNA sense strand
ggagaaggagaacagauua

SEQ ID NO: 1984721 - RNA, 19 nt, Homo sapiens
  misc_RNA (1)...(19): siRNA sense strand
gaacaagagccuauuaugg

SEQ ID NO: 1984722 - RNA, 19 nt, Homo sapiens
  misc_RNA (1)...(19): siRNA sense strand
gcagagugaugaagagugu

SEQ ID NO: 1984723 - RNA, 19 nt, Homo sapiens
  misc_RNA (1)...(19): siRNA sense strand
cgauucagcuacccagaua

SEQ ID NO: 1984724 - RNA, 19 nt, Homo sapiens
  misc_RNA (1)...(19): siRNA sense strand
guucaaauguccuuucugu

SEQ ID NO: 1984725 - RNA, 19 nt, Homo sapiens
  misc_RNA (1)...(19): siRNA sense strand
acaacuaucuccagaaugu

SEQ ID NO: 1984726 - RNA, 19 nt, Homo sapiens
  misc_RNA (1)...(19): siRNA sense strand
ccacaacuaucuccagaau

SEQ ID NO: 1984727 - RNA, 19 nt, Homo sapiens
  misc_RNA (1)...(19): siRNA sense strand
ggaaacagacgcuauugau

SEQ ID NO: 1984728 - RNA, 19 nt, Homo sapiens
  misc_RNA (1)...(19): siRNA sense strand
ccaggaccguuaugaguuu

SEQ ID NO: 1984729 - RNA, 19 nt, Homo sapiens
  misc_RNA (1)...(19): siRNA sense strand
gaaggaggaugucaaagcu

SEQ ID NO: 1984730 - RNA, 19 nt, Homo sapiens
  misc_RNA (1)...(19): siRNA sense strand
gggaaaagcucaugcgauu

SEQ ID NO: 1984731 - RNA, 19 nt, Homo sapiens
  misc_RNA (1)...(19): siRNA sense strand
uauggaagauuguaaggaa

SEQ ID NO: 1984732 - RNA, 19 nt, Homo sapiens
  misc_RNA (1)...(19): siRNA sense strand
gagcugaugcagucucaua

SEQ ID NO: 1984733 - RNA, 19 nt, Homo sapiens
  misc_RNA (1)...(19): siRNA sense strand
ggagagaagccguucaaau

SEQ ID NO: 1984734 - RNA, 19 nt, Homo sapiens
  misc_RNA (1)...(19): siRNA sense strand
ggaccaagccaucaacaau

SEQ ID NO: 1984735 - RNA, 19 nt, Homo sapiens
  misc_RNA (1)...(19): siRNA sense strand
caaauucaguaaagcuaga

SEQ ID NO: 1984736 - RNA, 19 nt, Homo sapiens
  misc_RNA (1)...(19): siRNA sense strand
gaugcagucucauaugaug

SEQ ID NO: 1984737 - RNA, 19 nt, Homo sapiens
  misc_RNA (1)...(19): siRNA sense strand
gaaacagacgcuauugaug

SEQ ID NO: 1984738 - RNA, 19 nt, Homo sapiens
  misc_RNA (1)...(19): siRNA sense strand
ggaaacugcugauagucau

SEQ ID NO: 1984739 - RNA, 19 nt, Homo sapiens
  misc_RNA (1)...(19): siRNA sense strand
gagaagccguucaaauguc

SEQ ID NO: 1984740 - RNA, 19 nt, Homo sapiens
  misc_RNA (1)...(19): siRNA sense strand
ggaacaagagccuauuaug

SEQ ID NO: 1984741 - RNA, 19 nt, Homo sapiens
  misc_RNA (1)...(19): siRNA sense strand
ccagauauucacuuugaua

SEQ ID NO: 1984742 - RNA, 19 nt, Homo sapiens
  misc_RNA (1)...(19): siRNA sense strand
ugaagagugugacaggaaa

SEQ ID NO: 1984743 - RNA, 19 nt, Homo sapiens
  misc_RNA (1)...(19): siRNA sense strand
agcaauagcugccuggauu

SEQ ID NO: 1984744 - RNA, 19 nt, Homo sapiens
  misc_RNA (1)...(19): siRNA sense strand
cuacccagauauucacuuu

SEQ ID NO: 1984745 - RNA, 19 nt, Homo sapiens
  misc_RNA (1)...(19): siRNA sense strand
gaauccggcuuccgaaugg

SEQ ID NO: 1984746 - RNA, 19 nt, Homo sapiens
  misc_RNA (1)...(19): siRNA sense strand
ugaaggacaucuacaaggu

SEQ ID NO: 1984747 - RNA, 19 nt, Homo sapiens
  misc_RNA (1)...(19): siRNA sense strand
gaccugcugucauagagaa

SEQ ID NO: 1984748 - RNA, 19 nt, Homo sapiens
  misc_RNA (1)...(19): siRNA sense strand
cagcaugccucaccaaguc

SEQ ID NO: 1984749 - RNA, 19 nt, Homo sapiens
  misc_RNA (1)...(19): siRNA sense strand
ucaaauguccuuucuguag

SEQ ID NO: 1984750 - RNA, 19 nt, Homo sapiens
  misc_RNA (1)...(19): siRNA sense strand
ccaaugugcuuaugguaca

SEQ ID NO: 1984751 - RNA, 19 nt, Homo sapiens
  misc_RNA (1)...(19): siRNA sense strand
ucagaaagcagccaugaug

SEQ ID NO: 1984752 - RNA, 19 nt, Homo sapiens
  misc_RNA (1)...(19): siRNA sense strand
gacaagcacaaauucagua

SEQ ID NO: 1984753 - RNA, 19 nt, Homo sapiens
  misc_RNA (1)...(19): siRNA sense strand
gauuagggccuucaagugu

SEQ ID NO: 1984754 - RNA, 19 nt, Homo sapiens
  misc_RNA (1)...(19): siRNA sense strand
gaacgccccuuccacugua

SEQ ID NO: 1984755 - RNA, 19 nt, Homo sapiens
  misc_RNA (1)...(19): siRNA sense strand
cagggaaacugcugauagu

SEQ ID NO: 1984756 - RNA, 19 nt, Homo sapiens
  misc_RNA (1)...(19): siRNA sense strand
caguaaagcuagaaaugca

SEQ ID NO: 1984757 - RNA, 19 nt, Homo sapiens
  misc_RNA (1)...(19): siRNA sense strand
aagcacaaauucaguaaag

SEQ ID NO: 1984758 - RNA, 19 nt, Homo sapiens
  misc_RNA (1)...(19): siRNA sense strand
acccagauauucacuuuga

SEQ ID NO: 1984759 - RNA, 19 nt, Homo sapiens
  misc_RNA (1)...(19): siRNA sense strand
gcuauugauggcuauauaa

SEQ ID NO: 1984760 - RNA, 19 nt, Homo sapiens
  misc_RNA (1)...(19): siRNA sense strand
ggacaccucaggacccauu

SEQ ID NO: 1984761 - RNA, 19 nt, Homo sapiens
  misc_RNA (1)...(19): siRNA sense strand
gcacuccaauauggcaauu

SEQ ID NO: 1984762 - RNA, 19 nt, Homo sapiens
  misc_RNA (1)...(19): siRNA sense strand
ugacgucuguggcaugguu

SEQ ID NO: 1984763 - RNA, 19 nt, Homo sapiens
  misc_RNA (1)...(19): siRNA sense strand
gaagaaccccuaauugaga

SEQ ID NO: 1984764 - RNA, 19 nt, Homo sapiens
  misc_RNA (1)...(19): siRNA sense strand
aggaggaugucaaagcuuu

SEQ ID NO: 1984765 - RNA, 19 nt, Homo sapiens
  misc_RNA (1)...(19): siRNA sense strand
ucugagacacauaaaguua

SEQ ID NO: 1984766 - RNA, 19 nt, Homo sapiens
  misc_RNA (1)...(19): siRNA sense strand
augguaaacugaaauguga

SEQ ID NO: 1984767 - RNA, 19 nt, Homo sapiens
  misc_RNA (1)...(19): siRNA sense strand
ccacuggaaugcaacaucu

SEQ ID NO: 1984768 - RNA, 19 nt, Homo sapiens
  misc_RNA (1)...(19): siRNA sense strand
cugaugcagucucauauga

SEQ ID NO: 1984769 - RNA, 19 nt, Homo sapiens
  misc_RNA (1)...(19): siRNA sense strand
uauauaacgugugacaaug

SEQ ID NO: 1984770 - RNA, 19 nt, Homo sapiens
  misc_RNA (1)...(19): siRNA sense strand
guaaggaacaagagccuau

SEQ ID NO: 1984771 - RNA, 19 nt, Homo sapiens
  misc_RNA (1)...(19): siRNA sense strand
ucaggucuaucauccaaau

SEQ ID NO: 1984772 - RNA, 19 nt, Homo sapiens
  misc_RNA (1)...(19): siRNA sense strand
ggaacgcugccacaacuau

SEQ ID NO: 1984773 - RNA, 19 nt, Homo sapiens
  misc_RNA (1)...(19): siRNA sense strand
gaccaagccaucaacaaug

SEQ ID NO: 1984774 - RNA, 19 nt, Homo sapiens
  misc_RNA (1)...(19): siRNA sense strand
aacaagagccuauuaugga

SEQ ID NO: 1984775 - RNA, 19 nt, Homo sapiens
  misc_RNA (1)...(19): siRNA sense strand
gaaaagcucaugcgauuca

SEQ ID NO: 1984776 - RNA, 19 nt, Homo sapiens
  misc_RNA (1)...(19): siRNA sense strand
acagaagccaggaccguua

SEQ ID NO: 1984777 - RNA, 19 nt, Homo sapiens
  misc_RNA (1)...(19): siRNA sense strand
gggaaacugcugauaguca

SEQ ID NO: 1984778 - RNA, 19 nt, Homo sapiens
  misc_RNA (1)...(19): siRNA sense strand
ucuacaaggucuucaaugg

SEQ ID NO: 1984779 - RNA, 19 nt, Homo sapiens
  misc_RNA (1)...(19): siRNA sense strand
gaggguagcagccuagaag

SEQ ID NO: 1984780 - RNA, 19 nt, Homo sapiens
  misc_RNA (1)...(19): siRNA sense strand
gaagccaggaccguuauga

SEQ ID NO: 1984781 - RNA, 19 nt, Homo sapiens
  misc_RNA (1)...(19): siRNA sense strand
gaaguggccccaguuauaa

SEQ ID NO: 1984782 - RNA, 19 nt, Homo sapiens
  misc_RNA (1)...(19): siRNA sense strand
ugagacacauaaaguuaca

SEQ ID NO: 1984783 - RNA, 19 nt, Homo sapiens
  misc_RNA (1)...(19): siRNA sense strand
ggaaaguccaggagcuuca

SEQ ID NO: 1984784 - RNA, 19 nt, Homo sapiens
  misc_RNA (1)...(19): siRNA sense strand
guaaaccucacaagugcaa

SEQ ID NO: 1984785 - RNA, 19 nt, Homo sapiens
  misc_RNA (1)...(19): siRNA sense strand
gaacagauuagggccuuca

SEQ ID NO: 1984786 - RNA, 19 nt, Homo sapiens
  misc_RNA (1)...(19): siRNA sense strand
gcacaaauucaguaaagcu

SEQ ID NO: 1984787 - RNA, 19 nt, Homo sapiens
  misc_RNA (1)...(19): siRNA sense strand
caugaaggaggaugucaaa

SEQ ID NO: 1984788 - RNA, 19 nt, Homo sapiens
  misc_RNA (1)...(19): siRNA sense strand
auauuucucuggugccuuu

SEQ ID NO: 1984789 - RNA, 19 nt, Homo sapiens
  misc_RNA (1)...(19): siRNA sense strand
cgcuauugauggcuauaua

SEQ ID NO: 1984790 - RNA, 19 nt, Homo sapiens
  misc_RNA (1)...(19): siRNA sense strand
ucucaggucuaucauccaa

SEQ ID NO: 1984791 - RNA, 19 nt, Homo sapiens
  misc_RNA (1)...(19): siRNA sense strand
gagaccugcugucauagag

SEQ ID NO: 1984792 - RNA, 19 nt, Homo sapiens
  misc_RNA (1)...(19): siRNA sense strand
ggacaucuacaaggucuuc

SEQ ID NO: 1984793 - RNA, 19 nt, Homo sapiens
  misc_RNA (1)...(19): siRNA sense strand
ugaaguggccccaguuaua

SEQ ID NO: 1984794 - RNA, 19 nt, Homo sapiens
  misc_RNA (1)...(19): siRNA sense strand
caagcacaaucgcugaagu

SEQ ID NO: 1984795 - RNA, 19 nt, Homo sapiens
  misc_RNA (1)...(19): siRNA sense strand
cacaugacaagcacaaauu

SEQ ID NO: 1984796 - RNA, 19 nt, Homo sapiens
  misc_RNA (1)...(19): siRNA sense strand
acugaaaugugacgucugu

SEQ ID NO: 1984797 - RNA, 19 nt, Homo sapiens
  misc_RNA (1)...(19): siRNA sense strand
gagcacugccgaguccuuu

SEQ ID NO: 1984798 - RNA, 19 nt, Homo sapiens
  misc_RNA (1)...(19): siRNA sense strand
cagaaagcagccaugauga

SEQ ID NO: 1984799 - RNA, 19 nt, Homo sapiens
  misc_RNA (1)...(19): siRNA sense strand
cuauauaacgugugacaau

SEQ ID NO: 1984800 - RNA, 19 nt, Homo sapiens
  misc_RNA (1)...(19): siRNA sense strand
gccaggaccguuaugaguu

SEQ ID NO: 1984801 - RNA, 19 nt, Homo sapiens
  misc_RNA (1)...(19): siRNA sense strand
ccuuaaaucccaagaggaa

SEQ ID NO: 1984802 - RNA, 19 nt, Homo sapiens
  misc_RNA (1)...(19): siRNA sense strand
agagaagccguucaaaugu

SEQ ID NO: 1984803 - RNA, 19 nt, Homo sapiens
  misc_RNA (1)...(19): siRNA sense strand
ggauagaaagacccauuag

SEQ ID NO: 1984804 - RNA, 19 nt, Homo sapiens
  misc_RNA (1)...(19): siRNA sense strand
uagaagaaccccuaauuga

SEQ ID NO: 1984805 - RNA, 19 nt, Homo sapiens
  misc_RNA (1)...(19): siRNA sense strand
gggacccacuggaaugcaa

SEQ ID NO: 1984806 - RNA, 19 nt, Homo sapiens
  misc_RNA (1)...(19): siRNA sense strand
ucacaugacaagcacaaau

SEQ ID NO: 1984807 - RNA, 19 nt, Homo sapiens
  misc_RNA (1)...(19): siRNA sense strand
gcaauagcugccuggauuc

SEQ ID NO: 1984808 - RNA, 19 nt, Homo sapiens
  misc_RNA (1)...(19): siRNA sense strand
aaggaacaagagccuauua

SEQ ID NO: 1984809 - RNA, 19 nt, Homo sapiens
  misc_RNA (1)...(19): siRNA sense strand
gaaaguccaggagcuucaa

SEQ ID NO: 1984810 - RNA, 19 nt, Homo sapiens
  misc_RNA (1)...(19): siRNA sense strand
uggagaaggagaacagauu

SEQ ID NO: 1984811 - RNA, 19 nt, Homo sapiens
  misc_RNA (1)...(19): siRNA sense strand
cuacaaggucuucaaugga

SEQ ID NO: 1984812 - RNA, 19 nt, Homo sapiens
  misc_RNA (1)...(19): siRNA sense strand
ggacagcaugccucaccaa

SEQ ID NO: 1984813 - RNA, 19 nt, Homo sapiens
  misc_RNA (1)...(19): siRNA sense strand
gaacgcugccacaacuauc

SEQ ID NO: 1984814 - RNA, 19 nt, Homo sapiens
  misc_RNA (1)...(19): siRNA sense strand
aaggaacgcugccacaacu

SEQ ID NO: 1984815 - RNA, 19 nt, Homo sapiens
  misc_RNA (1)...(19): siRNA sense strand
acacauaaaguuacacucu

SEQ ID NO: 1984816 - RNA, 19 nt, Homo sapiens
  misc_RNA (1)...(19): siRNA sense strand
uggcagacauugaagauuu

SEQ ID NO: 1984817 - RNA, 19 nt, Homo sapiens
  misc_RNA (1)...(19): siRNA sense strand
ccagcacaaugaagaauuu

SEQ ID NO: 1984818 - RNA, 19 nt, Homo sapiens
  misc_RNA (1)...(19): siRNA sense strand
ggcagacauugaagauuua

SEQ ID NO: 1984819 - RNA, 19 nt, Homo sapiens
  misc_RNA (1)...(19): siRNA sense strand
gggcugagguugacaugga

SEQ ID NO: 1984820 - RNA, 19 nt, Homo sapiens
  misc_RNA (1)...(19): siRNA sense strand
gaagacacccugacagaag

SEQ ID NO: 1984821 - RNA, 19 nt, Homo sapiens
  misc_RNA (1)...(19): siRNA sense strand
ggaauccuuugccuccuau

SEQ ID NO: 1984822 - RNA, 19 nt, Homo sapiens
  misc_RNA (1)...(19): siRNA sense strand
gaagaauuuuggcaguaua

SEQ ID NO: 1984823 - RNA, 19 nt, Homo sapiens
  misc_RNA (1)...(19): siRNA sense strand
gugaagacacccugacaga

SEQ ID NO: 1984824 - RNA, 19 nt, Homo sapiens
  misc_RNA (1)...(19): siRNA sense strand
gcagacauugaagauuuaa

SEQ ID NO: 1984825 - RNA, 19 nt, Homo sapiens
  misc_RNA (1)...(19): siRNA sense strand
gcuccugcuuugcgacuuc

SEQ ID NO: 1984826 - RNA, 19 nt, Homo sapiens
  misc_RNA (1)...(19): siRNA sense strand
ugaagacacccugacagaa

SEQ ID NO: 1984827 - RNA, 19 nt, Homo sapiens
  misc_RNA (1)...(19): siRNA sense strand
ucccagagcagcaccgaaa

SEQ ID NO: 1984828 - RNA, 19 nt, Homo sapiens
  misc_RNA (1)...(19): siRNA sense strand
gaagauuuaagugaagaca

SEQ ID NO: 1984829 - RNA, 19 nt, Homo sapiens
  misc_RNA (1)...(19): siRNA sense strand
auaauaccuuccaauacug

SEQ ID NO: 1984830 - RNA, 19 nt, Homo sapiens
  misc_RNA (1)...(19): siRNA sense strand
gccagcacaaugaagaauu

SEQ ID NO: 1984831 - RNA, 19 nt, Homo sapiens
  misc_RNA (1)...(19): siRNA sense strand
gacauugaagauuuaagug

SEQ ID NO: 1984832 - RNA, 19 nt, Homo sapiens
  misc_RNA (1)...(19): siRNA sense strand
gaaugaaggggcugagguu

SEQ ID NO: 1984833 - RNA, 19 nt, Homo sapiens
  misc_RNA (1)...(19): siRNA sense strand
gcaagaagguggcaaggua

SEQ ID NO: 1984834 - RNA, 19 nt, Homo sapiens
  misc_RNA (1)...(19): siRNA sense strand
ggacauugcugacaagguu

SEQ ID NO: 1984835 - RNA, 19 nt, Homo sapiens
  misc_RNA (1)...(19): siRNA sense strand
gcaugggccugcaggagua

SEQ ID NO: 1984836 - RNA, 19 nt, Homo sapiens
  misc_RNA (1)...(19): siRNA sense strand
caaagcggcucuccagcaa

SEQ ID NO: 1984837 - RNA, 19 nt, Homo sapiens
  misc_RNA (1)...(19): siRNA sense strand
gggcagagcaggugaagga

SEQ ID NO: 1984838 - RNA, 19 nt, Homo sapiens
  misc_RNA (1)...(19): siRNA sense strand
gcugagagccugcgagaug

SEQ ID NO: 1984839 - RNA, 19 nt, Homo sapiens
  misc_RNA (1)...(19): siRNA sense strand
agcagaagcuguuggauga

SEQ ID NO: 1984840 - RNA, 19 nt, Homo sapiens
  misc_RNA (1)...(19): siRNA sense strand
gugaagagcaggagaacaa

SEQ ID NO: 1984841 - RNA, 19 nt, Homo sapiens
  misc_RNA (1)...(19): siRNA sense strand
gagagcaccuacagugagu

SEQ ID NO: 1984842 - RNA, 19 nt, Homo sapiens
  misc_RNA (1)...(19): siRNA sense strand
gcaccuacagugaguguga

SEQ ID NO: 1984843 - RNA, 19 nt, Homo sapiens
  misc_RNA (1)...(19): siRNA sense strand
gagcugaacgggcagauca

SEQ ID NO: 1984844 - RNA, 19 nt, Homo sapiens
  misc_RNA (1)...(19): siRNA sense strand
gcauugagaucgagaaccu

SEQ ID NO: 1984845 - RNA, 19 nt, Homo sapiens
  misc_RNA (1)...(19): siRNA sense strand
cagagcaggugaaggacuu

SEQ ID NO: 1984846 - RNA, 19 nt, Homo sapiens
  misc_RNA (1)...(19): siRNA sense strand
gaagcuguuggaugagaua

SEQ ID NO: 1984847 - RNA, 19 nt, Homo sapiens
  misc_RNA (1)...(19): siRNA sense strand
gcgagaugguccuggaaga

SEQ ID NO: 1984848 - RNA, 19 nt, Homo sapiens
  misc_RNA (1)...(19): siRNA sense strand
gaucacagccaucagaaac

SEQ ID NO: 1984849 - RNA, 19 nt, Homo sapiens
  misc_RNA (1)...(19): siRNA sense strand
gaagagcaggagaacaaga

SEQ ID NO: 1984850 - RNA, 19 nt, Homo sapiens
  misc_RNA (1)...(19): siRNA sense strand
ggaggacauugcugacaag

SEQ ID NO: 1984851 - RNA, 19 nt, Homo sapiens
  misc_RNA (1)...(19): siRNA sense strand
cagaagcuguuggaugaga

SEQ ID NO: 1984852 - RNA, 19 nt, Homo sapiens
  misc_RNA (1)...(19): siRNA sense strand
ggacgaguucgaugacuuc

SEQ ID NO: 1984853 - RNA, 19 nt, Homo sapiens
  misc_RNA (1)...(19): siRNA sense strand
aagcggcucuccagcaaga

SEQ ID NO: 1984854 - RNA, 19 nt, Homo sapiens
  misc_RNA (1)...(19): siRNA sense strand
gaucaucguggccaucaug

SEQ ID NO: 1984855 - RNA, 19 nt, Homo sapiens
  misc_RNA (1)...(19): siRNA sense strand
gagaacaagaggagaaugg

SEQ ID NO: 1984856 - RNA, 19 nt, Homo sapiens
  misc_RNA (1)...(19): siRNA sense strand
gagaugguccuggaagaga

SEQ ID NO: 1984857 - RNA, 19 nt, Homo sapiens
  misc_RNA (1)...(19): siRNA sense strand
gggagaagagcauugagau

SEQ ID NO: 1984858 - RNA, 19 nt, Homo sapiens
  misc_RNA (1)...(19): siRNA sense strand
ggagaagagcauugagauc

SEQ ID NO: 1984859 - RNA, 19 nt, Homo sapiens
  misc_RNA (1)...(19): siRNA sense strand
ggacgaggagaacagugaa

SEQ ID NO: 1984860 - RNA, 19 nt, Homo sapiens
  misc_RNA (1)...(19): siRNA sense strand
ggacaaccgcaaccugaag

SEQ ID NO: 1984861 - RNA, 19 nt, Homo sapiens
  misc_RNA (1)...(19): siRNA sense strand
agaagagcauugagaucga

SEQ ID NO: 1984862 - RNA, 19 nt, Homo sapiens
  misc_RNA (1)...(19): siRNA sense strand
gugaucagcuuugaagacu

SEQ ID NO: 1984863 - RNA, 19 nt, Homo sapiens
  misc_RNA (1)...(19): siRNA sense strand
gcaggaggagaucaacuuc

SEQ ID NO: 1984864 - RNA, 19 nt, Homo sapiens
  misc_RNA (1)...(19): siRNA sense strand
ucauggaggcgauucagaa

SEQ ID NO: 1984865 - RNA, 19 nt, Homo sapiens
  misc_RNA (1)...(19): siRNA sense strand
ucgaggacuucauccaguu

SEQ ID NO: 1984866 - RNA, 19 nt, Homo sapiens
  misc_RNA (1)...(19): siRNA sense strand
caagggaucacagccauca

SEQ ID NO: 1984867 - RNA, 19 nt, Homo sapiens
  misc_RNA (1)...(19): siRNA sense strand
ggaucacagccaucagaaa

SEQ ID NO: 1984868 - RNA, 19 nt, Homo sapiens
  misc_RNA (1)...(19): siRNA sense strand
gcuguuggaugagauagag

SEQ ID NO: 1984869 - RNA, 19 nt, Homo sapiens
  misc_RNA (1)...(19): siRNA sense strand
caggagaacaagaggagaa

SEQ ID NO: 1984870 - RNA, 19 nt, Homo sapiens
  misc_RNA (1)...(19): siRNA sense strand
aggaggacauugcugacaa

SEQ ID NO: 1984871 - RNA, 19 nt, Homo sapiens
  misc_RNA (1)...(19): siRNA sense strand
uggaggcgauucagaagca

SEQ ID NO: 1984872 - RNA, 19 nt, Homo sapiens
  misc_RNA (1)...(19): siRNA sense strand
cugaacgggcagaucauua

SEQ ID NO: 1984873 - RNA, 19 nt, Homo sapiens
  misc_RNA (1)...(19): siRNA sense strand
cggacgaguucgaugacuu

SEQ ID NO: 1984874 - RNA, 19 nt, Homo sapiens
  misc_RNA (1)...(19): siRNA sense strand
uggaggagcagcugaagga

SEQ ID NO: 1984875 - RNA, 19 nt, Homo sapiens
  misc_RNA (1)...(19): siRNA sense strand
gagagggagaagagcauug

SEQ ID NO: 1984876 - RNA, 19 nt, Homo sapiens
  misc_RNA (1)...(19): siRNA sense strand
ggagagggagaagagcauu

SEQ ID NO: 1984877 - RNA, 19 nt, Homo sapiens
  misc_RNA (1)...(19): siRNA sense strand
gucccuggcugcagagauc

SEQ ID NO: 1984878 - RNA, 19 nt, Homo sapiens
  misc_RNA (1)...(19): siRNA sense strand
gaaggagcaggagcugaga

SEQ ID NO: 1984879 - RNA, 19 nt, Homo sapiens
  misc_RNA (1)...(19): siRNA sense strand
gcccggacgaguucgauga

SEQ ID NO: 1984880 - RNA, 19 nt, Homo sapiens
  misc_RNA (1)...(19): siRNA sense strand
caggugaaggacuuaacua

SEQ ID NO: 1984881 - RNA, 19 nt, Homo sapiens
  misc_RNA (1)...(19): siRNA sense strand
gcugaacgggcagaucauu

SEQ ID NO: 1984882 - RNA, 19 nt, Homo sapiens
  misc_RNA (1)...(19): siRNA sense strand
ucagugaagagcaggagaa

SEQ ID NO: 1984883 - RNA, 19 nt, Homo sapiens
  misc_RNA (1)...(19): siRNA sense strand
ggagaagcagaagcuguug

SEQ ID NO: 1984884 - RNA, 19 nt, Homo sapiens
  misc_RNA (1)...(19): siRNA sense strand
gggaucacagccaucagaa

SEQ ID NO: 1984885 - RNA, 19 nt, Homo sapiens
  misc_RNA (1)...(19): siRNA sense strand
gagcaggugaaggacuuaa

SEQ ID NO: 1984886 - RNA, 19 nt, Homo sapiens
  misc_RNA (1)...(19): siRNA sense strand
gcaagauggagagggagaa

SEQ ID NO: 1984887 - RNA, 19 nt, Homo sapiens
  misc_RNA (1)...(19): siRNA sense strand
gagcaccuacagugagugu

SEQ ID NO: 1984888 - RNA, 19 nt, Homo sapiens
  misc_RNA (1)...(19): siRNA sense strand
cgaggacuucauccaguuu

SEQ ID NO: 1984889 - RNA, 19 nt, Homo sapiens
  misc_RNA (1)...(19): siRNA sense strand
gcaggugaaggacuuaacu

SEQ ID NO: 1984890 - RNA, 19 nt, Homo sapiens
  misc_RNA (1)...(19): siRNA sense strand
gcagaccaggcuacagcaa

SEQ ID NO: 1984891 - RNA, 19 nt, Homo sapiens
  misc_RNA (1)...(19): siRNA sense strand
gacuucauccaguuugcua

SEQ ID NO: 1984892 - RNA, 19 nt, Homo sapiens
  misc_RNA (1)...(19): siRNA sense strand
gaggacuucauccaguuug

SEQ ID NO: 1984893 - RNA, 19 nt, Homo sapiens
  misc_RNA (1)...(19): siRNA sense strand
ccgagagcaccuacaguga

SEQ ID NO: 1984894 - RNA, 19 nt, Homo sapiens
  misc_RNA (1)...(19): siRNA sense strand
gucugaaggccaacauuga

SEQ ID NO: 1984895 - RNA, 19 nt, Homo sapiens
  misc_RNA (1)...(19): siRNA sense strand
ugucugaaggccaacauug

SEQ ID NO: 1984896 - RNA, 19 nt, Homo sapiens
  misc_RNA (1)...(19): siRNA sense strand
agaccaggcuacagcaacu

SEQ ID NO: 1984897 - RNA, 19 nt, Homo sapiens
  misc_RNA (1)...(19): siRNA sense strand
aggagcacuuugaggacua

SEQ ID NO: 1984898 - RNA, 19 nt, Homo sapiens
  misc_RNA (1)...(19): siRNA sense strand
ugaacgggcagaucauuac

SEQ ID NO: 1984899 - RNA, 19 nt, Homo sapiens
  misc_RNA (1)...(19): siRNA sense strand
ggagaacaagaggagaaug

SEQ ID NO: 1984900 - RNA, 19 nt, Homo sapiens
  misc_RNA (1)...(19): siRNA sense strand
cgaggucgacgucuucucu

SEQ ID NO: 1984901 - RNA, 19 nt, Homo sapiens
  misc_RNA (1)...(19): siRNA sense strand
aggagaagcagaagcuguu

SEQ ID NO: 1984902 - RNA, 19 nt, Homo sapiens
  misc_RNA (1)...(19): siRNA sense strand
uggaggaggagaagcagaa

SEQ ID NO: 1984903 - RNA, 19 nt, Homo sapiens
  misc_RNA (1)...(19): siRNA sense strand
gguguugucuggucaguaa

SEQ ID NO: 1984904 - RNA, 19 nt, Homo sapiens
  misc_RNA (1)...(19): siRNA sense strand
caacuguguucuaaagauu

SEQ ID NO: 1984905 - RNA, 19 nt, Homo sapiens
  misc_RNA (1)...(19): siRNA sense strand
cagcucagaucaugucaaa

SEQ ID NO: 1984906 - RNA, 19 nt, Homo sapiens
  misc_RNA (1)...(19): siRNA sense strand
ggccagaguggaagaauua

SEQ ID NO: 1984907 - RNA, 19 nt, Homo sapiens
  misc_RNA (1)...(19): siRNA sense strand
gcaacuguguucuaaagau

SEQ ID NO: 1984908 - RNA, 19 nt, Homo sapiens
  misc_RNA (1)...(19): siRNA sense strand
caaauuugaugacacuuuc

SEQ ID NO: 1984909 - RNA, 19 nt, Homo sapiens
  misc_RNA (1)...(19): siRNA sense strand
cagaauugaugcagaguga

SEQ ID NO: 1984910 - RNA, 19 nt, Homo sapiens
  misc_RNA (1)...(19): siRNA sense strand
gaacuacuaggacgaagaa

SEQ ID NO: 1984911 - RNA, 19 nt, Homo sapiens
  misc_RNA (1)...(19): siRNA sense strand
ggacgaagaauauuguuuc

SEQ ID NO: 1984912 - RNA, 19 nt, Homo sapiens
  misc_RNA (1)...(19): siRNA sense strand
ccacucagcucagaucaug

SEQ ID NO: 1984913 - RNA, 19 nt, Homo sapiens
  misc_RNA (1)...(19): siRNA sense strand
gcagagugaccuacauaaa

SEQ ID NO: 1984914 - RNA, 19 nt, Homo sapiens
  misc_RNA (1)...(19): siRNA sense strand
gcaggauguuggucuuuga

SEQ ID NO: 1984915 - RNA, 19 nt, Homo sapiens
  misc_RNA (1)...(19): siRNA sense strand
ggcaacaacagccauauuu

SEQ ID NO: 1984916 - RNA, 19 nt, Homo sapiens
  misc_RNA (1)...(19): siRNA sense strand
gaaagagaguagcgcucaa

SEQ ID NO: 1984917 - RNA, 19 nt, Homo sapiens
  misc_RNA (1)...(19): siRNA sense strand
caucagcacucgcaucauc

SEQ ID NO: 1984918 - RNA, 19 nt, Homo sapiens
  misc_RNA (1)...(19): siRNA sense strand
ccauucagcuggcauuuua

SEQ ID NO: 1984919 - RNA, 19 nt, Homo sapiens
  misc_RNA (1)...(19): siRNA sense strand
ucaccaaucccaaauuuga

SEQ ID NO: 1984920 - RNA, 19 nt, Homo sapiens
  misc_RNA (1)...(19): siRNA sense strand
ugucaccaaucccaaauuu

SEQ ID NO: 1984921 - RNA, 19 nt, Homo sapiens
  misc_RNA (1)...(19): siRNA sense strand
gcucagaucaugucaaagu

SEQ ID NO: 1984922 - RNA, 19 nt, Homo sapiens
  misc_RNA (1)...(19): siRNA sense strand
cagcaacuguguucuaaag

SEQ ID NO: 1984923 - RNA, 19 nt, Homo sapiens
  misc_RNA (1)...(19): siRNA sense strand
cagggaaucuccuugugaa

SEQ ID NO: 1984924 - RNA, 19 nt, Homo sapiens
  misc_RNA (1)...(19): siRNA sense strand
cuccacacauugacuauuu

SEQ ID NO: 1984925 - RNA, 19 nt, Homo sapiens
  misc_RNA (1)...(19): siRNA sense strand
gaagggcgacuacgauauc

SEQ ID NO: 1984926 - RNA, 19 nt, Homo sapiens
  misc_RNA (1)...(19): siRNA sense strand
cuacuaggacgaagaauau

SEQ ID NO: 1984927 - RNA, 19 nt, Homo sapiens
  misc_RNA (1)...(19): siRNA sense strand
ucauaugacucaggaaguu

SEQ ID NO: 1984928 - RNA, 19 nt, Homo sapiens
  misc_RNA (1)...(19): siRNA sense strand
gacgaagaauauuguuuca

SEQ ID NO: 1984929 - RNA, 19 nt, Homo sapiens
  misc_RNA (1)...(19): siRNA sense strand
guuaaacccugggcaacaa

SEQ ID NO: 1984930 - RNA, 19 nt, Homo sapiens
  misc_RNA (1)...(19): siRNA sense strand
gcaacaacagccauauuuc

SEQ ID NO: 1984931 - RNA, 19 nt, Homo sapiens
  misc_RNA (1)...(19): siRNA sense strand
uuuauuaguuccacuguug

SEQ ID NO: 1984932 - RNA, 19 nt, Homo sapiens
  misc_RNA (1)...(19): siRNA sense strand
ccaaauuugaugacacuuu

SEQ ID NO: 1984933 - RNA, 19 nt, Homo sapiens
  misc_RNA (1)...(19): siRNA sense strand
ccauucagcaguuggauuu

SEQ ID NO: 1984934 - RNA, 19 nt, Homo sapiens
  misc_RNA (1)...(19): siRNA sense strand
ggauguaucuuugcagaac

SEQ ID NO: 1984935 - RNA, 19 nt, Homo sapiens
  misc_RNA (1)...(19): siRNA sense strand
gaauugaagauguuguguu

SEQ ID NO: 1984936 - RNA, 19 nt, Homo sapiens
  misc_RNA (1)...(19): siRNA sense strand
caccaucacuggaagcaau

SEQ ID NO: 1984937 - RNA, 19 nt, Homo sapiens
  misc_RNA (1)...(19): siRNA sense strand
uauuggauauggagccuuu

SEQ ID NO: 1984938 - RNA, 19 nt, Homo sapiens
  misc_RNA (1)...(19): siRNA sense strand
gaagaguuuauaccaguga

SEQ ID NO: 1984939 - RNA, 19 nt, Homo sapiens
  misc_RNA (1)...(19): siRNA sense strand
gguuugaaauaucuccauu

SEQ ID NO: 1984940 - RNA, 19 nt, Homo sapiens
  misc_RNA (1)...(19): siRNA sense strand
ggaaucuccuugugaacag

SEQ ID NO: 1984941 - RNA, 19 nt, Homo sapiens
  misc_RNA (1)...(19): siRNA sense strand
gaugacacuuucgagaaga

SEQ ID NO: 1984942 - RNA, 19 nt, Homo sapiens
  misc_RNA (1)...(19): siRNA sense strand
cgacagguuaaagaaauua

SEQ ID NO: 1984943 - RNA, 19 nt, Homo sapiens
  misc_RNA (1)...(19): siRNA sense strand
cgacuacgauaucacacau

SEQ ID NO: 1984944 - RNA, 19 nt, Homo sapiens
  misc_RNA (1)...(19): siRNA sense strand
gcagaacuacuaggacgaa

SEQ ID NO: 1984945 - RNA, 19 nt, Homo sapiens
  misc_RNA (1)...(19): siRNA sense strand
gggcacaccaucacuggaa

SEQ ID NO: 1984946 - RNA, 19 nt, Homo sapiens
  misc_RNA (1)...(19): siRNA sense strand
aguaacagauccaagagau

SEQ ID NO: 1984947 - RNA, 19 nt, Homo sapiens
  misc_RNA (1)...(19): siRNA sense strand
gaugaagggcgacuacgau

SEQ ID NO: 1984948 - RNA, 19 nt, Homo sapiens
  misc_RNA (1)...(19): siRNA sense strand
ccaaaagaauauccgcuaa

SEQ ID NO: 1984949 - RNA, 19 nt, Homo sapiens
  misc_RNA (1)...(19): siRNA sense strand
cauaaacagccaucucuuc

SEQ ID NO: 1984950 - RNA, 19 nt, Homo sapiens
  misc_RNA (1)...(19): siRNA sense strand
gcaaugaggacagcuugug

SEQ ID NO: 1984951 - RNA, 19 nt, Homo sapiens
  misc_RNA (1)...(19): siRNA sense strand
uaucuuugcagaacuacua

SEQ ID NO: 1984952 - RNA, 19 nt, Homo sapiens
  misc_RNA (1)...(19): siRNA sense strand
gggcaacaacagccauauu

SEQ ID NO: 1984953 - RNA, 19 nt, Homo sapiens
  misc_RNA (1)...(19): siRNA sense strand
gaaucuggucucuugcaaa

SEQ ID NO: 1984954 - RNA, 19 nt, Homo sapiens
  misc_RNA (1)...(19): siRNA sense strand
gaacagcagaaaggaaaca

SEQ ID NO: 1984955 - RNA, 19 nt, Homo sapiens
  misc_RNA (1)...(19): siRNA sense strand
ccgacagguuaaagaaauu

SEQ ID NO: 1984956 - RNA, 19 nt, Homo sapiens
  misc_RNA (1)...(19): siRNA sense strand
uauggagccuuugguguug

SEQ ID NO: 1984957 - RNA, 19 nt, Homo sapiens
  misc_RNA (1)...(19): siRNA sense strand
uggaacagcagaaaggaaa

SEQ ID NO: 1984958 - RNA, 19 nt, Homo sapiens
  misc_RNA (1)...(19): siRNA sense strand
ugaugacacuuucgagaag

SEQ ID NO: 1984959 - RNA, 19 nt, Homo sapiens
  misc_RNA (1)...(19): siRNA sense strand
ugccgcagcugcuacaguu

SEQ ID NO: 1984960 - RNA, 19 nt, Homo sapiens
  misc_RNA (1)...(19): siRNA sense strand
ucugugggauguaucuuug

SEQ ID NO: 1984961 - RNA, 19 nt, Homo sapiens
  misc_RNA (1)...(19): siRNA sense strand
ccagggaaucuccuuguga

SEQ ID NO: 1984962 - RNA, 19 nt, Homo sapiens
  misc_RNA (1)...(19): siRNA sense strand
ucagaucaugucaaaguuu

SEQ ID NO: 1984963 - RNA, 19 nt, Homo sapiens
  misc_RNA (1)...(19): siRNA sense strand
uaucgucucuccucaacca

SEQ ID NO: 1984964 - RNA, 19 nt, Homo sapiens
  misc_RNA (1)...(19): siRNA sense strand
gcaugauaauguacucucu

SEQ ID NO: 1984965 - RNA, 19 nt, Homo sapiens
  misc_RNA (1)...(19): siRNA sense strand
ccaccacccucaacaccau

SEQ ID NO: 1984966 - RNA, 19 nt, Homo sapiens
  misc_RNA (1)...(19): siRNA sense strand
uacgauaucacacauguau

SEQ ID NO: 1984967 - RNA, 19 nt, Homo sapiens
  misc_RNA (1)...(19): siRNA sense strand
gcuaaggcacauauacuca

SEQ ID NO: 1984968 - RNA, 19 nt, Homo sapiens
  misc_RNA (1)...(19): siRNA sense strand
caaugaggacagcuuguga

SEQ ID NO: 1984969 - RNA, 19 nt, Homo sapiens
  misc_RNA (1)...(19): siRNA sense strand
guggaagaauuagaugaau

SEQ ID NO: 1984970 - RNA, 19 nt, Homo sapiens
  misc_RNA (1)...(19): siRNA sense strand
gaagcuguucaucuccuuu

SEQ ID NO: 1984971 - RNA, 19 nt, Homo sapiens
  misc_RNA (1)...(19): siRNA sense strand
cagcugcagccauguuaaa

SEQ ID NO: 1984972 - RNA, 19 nt, Homo sapiens
  misc_RNA (1)...(19): siRNA sense strand
gaugcagagugaccuacau

SEQ ID NO: 1984973 - RNA, 19 nt, Homo sapiens
  misc_RNA (1)...(19): siRNA sense strand
uccgacagguuaaagaaau

SEQ ID NO: 1984974 - RNA, 19 nt, Homo sapiens
  misc_RNA (1)...(19): siRNA sense strand
uggaagaauuagaugaauc

SEQ ID NO: 1984975 - RNA, 19 nt, Homo sapiens
  misc_RNA (1)...(19): siRNA sense strand
cagaucaugucaaaguuuu

SEQ ID NO: 1984976 - RNA, 19 nt, Homo sapiens
  misc_RNA (1)...(19): siRNA sense strand
ccgcagcugcuacaguuaa

SEQ ID NO: 1984977 - RNA, 19 nt, Homo sapiens
  misc_RNA (1)...(19): siRNA sense strand
ggaagaauuagaugaaucc

SEQ ID NO: 1984978 - RNA, 19 nt, Homo sapiens
  misc_RNA (1)...(19): siRNA sense strand
gggaaucuccuugugaaca

SEQ ID NO: 1984979 - RNA, 19 nt, Homo sapiens
  misc_RNA (1)...(19): siRNA sense strand
caagagauggaaagagagu

SEQ ID NO: 1984980 - RNA, 19 nt, Homo sapiens
  misc_RNA (1)...(19): siRNA sense strand
caacaacagccauauuucc

SEQ ID NO: 1984981 - RNA, 19 nt, Homo sapiens
  misc_RNA (1)...(19): siRNA sense strand
gccagggaaucuccuugug

SEQ ID NO: 1984982 - RNA, 19 nt, Homo sapiens
  misc_RNA (1)...(19): siRNA sense strand
gcagcugcagccauguuaa

SEQ ID NO: 1984983 - RNA, 19 nt, Homo sapiens
  misc_RNA (1)...(19): siRNA sense strand
aaagagaguagcgcucaaa

SEQ ID NO: 1984984 - RNA, 19 nt, Homo sapiens
  misc_RNA (1)...(19): siRNA sense strand
uuaaggcgcaccaucauca

SEQ ID NO: 1984985 - RNA, 19 nt, Homo sapiens
  misc_RNA (1)...(19): siRNA sense strand
acuacuaggacgaagaaua

SEQ ID NO: 1984986 - RNA, 19 nt, Homo sapiens
  misc_RNA (1)...(19): siRNA sense strand
uuaucgggcuccagaaauc

SEQ ID NO: 1984987 - RNA, 19 nt, Homo sapiens
  misc_RNA (1)...(19): siRNA sense strand
cucaggaaguuguuacuca

SEQ ID NO: 1984988 - RNA, 19 nt, Homo sapiens
  misc_RNA (1)...(19): siRNA sense strand
gaguggaagaauuagauga

SEQ ID NO: 1984989 - RNA, 19 nt, Homo sapiens
  misc_RNA (1)...(19): siRNA sense strand
gucaguaacagauccaaga

SEQ ID NO: 1984990 - RNA, 19 nt, Homo sapiens
  misc_RNA (1)...(19): siRNA sense strand
cagaguggaagaauuagau

SEQ ID NO: 1984991 - RNA, 19 nt, Homo sapiens
  misc_RNA (1)...(19): siRNA sense strand
acuacgauaucacacaugu

SEQ ID NO: 1984992 - RNA, 19 nt, Homo sapiens
  misc_RNA (1)...(19): siRNA sense strand
agaaucuggucucuugcaa

SEQ ID NO: 1984993 - RNA, 19 nt, Homo sapiens
  misc_RNA (1)...(19): siRNA sense strand
uggccagaguggaagaauu

SEQ ID NO: 1984994 - RNA, 19 nt, Homo sapiens
  misc_RNA (1)...(19): siRNA sense strand
acagccauauuucccauca

SEQ ID NO: 1984995 - RNA, 19 nt, Homo sapiens
  misc_RNA (1)...(19): siRNA sense strand
caaccacucagcucagauc

SEQ ID NO: 1984996 - RNA, 19 nt, Homo sapiens
  misc_RNA (1)...(19): siRNA sense strand
agagugaccuacauaaaau

SEQ ID NO: 1984997 - RNA, 19 nt, Homo sapiens
  misc_RNA (1)...(19): siRNA sense strand
cagagugaccuacauaaaa

SEQ ID NO: 1984998 - RNA, 19 nt, Homo sapiens
  misc_RNA (1)...(19): siRNA sense strand
cccaacgucuuccagaauc

SEQ ID NO: 1984999 - RNA, 19 nt, Homo sapiens
  misc_RNA (1)...(19): siRNA sense strand
aaucuggucucuugcaaaa

SEQ ID NO: 1985000 - RNA, 19 nt, Homo sapiens
  misc_RNA (1)...(19): siRNA sense strand
gggaauugaagauguugug

SEQ ID NO: 1985001 - RNA, 19 nt, Homo sapiens
  misc_RNA (1)...(19): siRNA sense strand
ggcuacacaugaagcuguu

SEQ ID NO: 1985002 - RNA, 19 nt, Homo sapiens
  misc_RNA (1)...(19): siRNA sense strand
gauuugugauuuuggauug

SEQ ID NO: 1985003 - RNA, 19 nt, Homo sapiens
  misc_RNA (1)...(19): siRNA sense strand
gaaacucugugaaggcaua

SEQ ID NO: 1985004 - RNA, 19 nt, Homo sapiens
  misc_RNA (1)...(19): siRNA sense strand
gcauagggcuacuuucaaa

SEQ ID NO: 1985005 - RNA, 19 nt, Homo sapiens
  misc_RNA (1)...(19): siRNA sense strand
ucaaagcucucuucaaugu

SEQ ID NO: 1985006 - RNA, 19 nt, Homo sapiens
  misc_RNA (1)...(19): siRNA sense strand
ccucaaagcucucuucaau

SEQ ID NO: 1985007 - RNA, 19 nt, Homo sapiens
  misc_RNA (1)...(19): siRNA sense strand
uggauagucugcugaaaua

SEQ ID NO: 1985008 - RNA, 19 nt, Homo sapiens
  misc_RNA (1)...(19): siRNA sense strand
caacaugcuugauaaacuu

SEQ ID NO: 1985009 - RNA, 19 nt, Homo sapiens
  misc_RNA (1)...(19): siRNA sense strand
gcaaggaccggaaauuuau

SEQ ID NO: 1985010 - RNA, 19 nt, Homo sapiens
  misc_RNA (1)...(19): siRNA sense strand
ugaguuagaugauucuuug

SEQ ID NO: 1985011 - RNA, 19 nt, Homo sapiens
  misc_RNA (1)...(19): siRNA sense strand
cagaagagcuacacagcaa

SEQ ID NO: 1985012 - RNA, 19 nt, Homo sapiens
  misc_RNA (1)...(19): siRNA sense strand
gaagaggagauaauuggua

SEQ ID NO: 1985013 - RNA, 19 nt, Homo sapiens
  misc_RNA (1)...(19): siRNA sense strand
gaccggaaauuuaucaaug

SEQ ID NO: 1985014 - RNA, 19 nt, Homo sapiens
  misc_RNA (1)...(19): siRNA sense strand
ggacacagacacugaagaa

SEQ ID NO: 1985015 - RNA, 19 nt, Homo sapiens
  misc_RNA (1)...(19): siRNA sense strand
acacagacacugaagaaua

SEQ ID NO: 1985016 - RNA, 19 nt, Homo sapiens
  misc_RNA (1)...(19): siRNA sense strand
ucuuaucacuggucauuua

SEQ ID NO: 1985017 - RNA, 19 nt, Homo sapiens
  misc_RNA (1)...(19): siRNA sense strand
guuggaaggugcauaaaga

SEQ ID NO: 1985018 - RNA, 19 nt, Homo sapiens
  misc_RNA (1)...(19): siRNA sense strand
guaucagaguucccaguua

SEQ ID NO: 1985019 - RNA, 19 nt, Homo sapiens
  misc_RNA (1)...(19): siRNA sense strand
uagaugaaaugacagaaga

SEQ ID NO: 1985020 - RNA, 19 nt, Homo sapiens
  misc_RNA (1)...(19): siRNA sense strand
uaauggaccuccucucuca

SEQ ID NO: 1985021 - RNA, 19 nt, Homo sapiens
  misc_RNA (1)...(19): siRNA sense strand
uaacgcagaucuuggaaag

SEQ ID NO: 1985022 - RNA, 19 nt, Homo sapiens
  misc_RNA (1)...(19): siRNA sense strand
uaucagaguucccaguuau

SEQ ID NO: 1985023 - RNA, 19 nt, Homo sapiens
  misc_RNA (1)...(19): siRNA sense strand
aaagcucucuucaauguga

SEQ ID NO: 1985024 - RNA, 19 nt, Homo sapiens
  misc_RNA (1)...(19): siRNA sense strand
gcaaagagagaguggauag

SEQ ID NO: 1985025 - RNA, 19 nt, Homo sapiens
  misc_RNA (1)...(19): siRNA sense strand
uaaaacagcugagaaagaa

SEQ ID NO: 1985026 - RNA, 19 nt, Homo sapiens
  misc_RNA (1)...(19): siRNA sense strand
ccaacaacaugucaagugu

SEQ ID NO: 1985027 - RNA, 19 nt, Homo sapiens
  misc_RNA (1)...(19): siRNA sense strand
ggaggaagaggagauaauu

SEQ ID NO: 1985028 - RNA, 19 nt, Homo sapiens
  misc_RNA (1)...(19): siRNA sense strand
ucucaucaguuccguguaa

SEQ ID NO: 1985029 - RNA, 19 nt, Homo sapiens
  misc_RNA (1)...(19): siRNA sense strand
ggagaaaguaucagaguuc

SEQ ID NO: 1985030 - RNA, 19 nt, Homo sapiens
  misc_RNA (1)...(19): siRNA sense strand
cagcucagccuggaacuua

SEQ ID NO: 1985031 - RNA, 19 nt, Homo sapiens
  misc_RNA (1)...(19): siRNA sense strand
ccaugaaacuugucaacau

SEQ ID NO: 1985032 - RNA, 19 nt, Homo sapiens
  misc_RNA (1)...(19): siRNA sense strand
gaaaugacagaagaacaaa

SEQ ID NO: 1985033 - RNA, 19 nt, Homo sapiens
  misc_RNA (1)...(19): siRNA sense strand
gaaggugcauaaagagagu

SEQ ID NO: 1985034 - RNA, 19 nt, Homo sapiens
  misc_RNA (1)...(19): siRNA sense strand
ucuguaaccuccugagaaa

SEQ ID NO: 1985035 - RNA, 19 nt, Homo sapiens
  misc_RNA (1)...(19): siRNA sense strand
uaaaggacaucccaacaac

SEQ ID NO: 1985036 - RNA, 19 nt, Homo sapiens
  misc_RNA (1)...(19): siRNA sense strand
ggucacaauugcgcuauga

SEQ ID NO: 1985037 - RNA, 19 nt, Homo sapiens
  misc_RNA (1)...(19): siRNA sense strand
ggcaacgacucuagaugaa

SEQ ID NO: 1985038 - RNA, 19 nt, Homo sapiens
  misc_RNA (1)...(19): siRNA sense strand
gaaguacuccgcauucucu

SEQ ID NO: 1985039 - RNA, 19 nt, Homo sapiens
  misc_RNA (1)...(19): siRNA sense strand
caaguggaccgaugaguau

SEQ ID NO: 1985040 - RNA, 19 nt, Homo sapiens
  misc_RNA (1)...(19): siRNA sense strand
cgacaucaggucacaauug

SEQ ID NO: 1985041 - RNA, 19 nt, Homo sapiens
  misc_RNA (1)...(19): siRNA sense strand
ccaguucucagcuuauuaa

SEQ ID NO: 1985042 - RNA, 19 nt, Homo sapiens
  misc_RNA (1)...(19): siRNA sense strand
gacaagggaagcagcuaua

SEQ ID NO: 1985043 - RNA, 19 nt, Homo sapiens
  misc_RNA (1)...(19): siRNA sense strand
gcaaugcagucaaccuuuu

SEQ ID NO: 1985044 - RNA, 19 nt, Homo sapiens
  misc_RNA (1)...(19): siRNA sense strand
gaagagcuacacagcaaug

SEQ ID NO: 1985045 - RNA, 19 nt, Homo sapiens
  misc_RNA (1)...(19): siRNA sense strand
ucaaguggaccgaugagua

SEQ ID NO: 1985046 - RNA, 19 nt, Homo sapiens
  misc_RNA (1)...(19): siRNA sense strand
aaucguagguccaacugaa

SEQ ID NO: 1985047 - RNA, 19 nt, Homo sapiens
  misc_RNA (1)...(19): siRNA sense strand
aaagaaagaaacucuguga

SEQ ID NO: 1985048 - RNA, 19 nt, Homo sapiens
  misc_RNA (1)...(19): siRNA sense strand
ugaaaugacagaagaacaa

SEQ ID NO: 1985049 - RNA, 19 nt, Homo sapiens
  misc_RNA (1)...(19): siRNA sense strand
caacgacucuagaugaacu

SEQ ID NO: 1985050 - RNA, 19 nt, Homo sapiens
  misc_RNA (1)...(19): siRNA sense strand
gauuacagcgacaagcaua

SEQ ID NO: 1985051 - RNA, 19 nt, Homo sapiens
  misc_RNA (1)...(19): siRNA sense strand
uagggcuacuuucaaauuu

SEQ ID NO: 1985052 - RNA, 19 nt, Homo sapiens
  misc_RNA (1)...(19): siRNA sense strand
gcaauguuccagucucuug

SEQ ID NO: 1985053 - RNA, 19 nt, Homo sapiens
  misc_RNA (1)...(19): siRNA sense strand
gcagcuguccuucgucauu

SEQ ID NO: 1985054 - RNA, 19 nt, Homo sapiens
  misc_RNA (1)...(19): siRNA sense strand
gacauuaagugcuuugacu

SEQ ID NO: 1985055 - RNA, 19 nt, Homo sapiens
  misc_RNA (1)...(19): siRNA sense strand
ugcaaggaccggaaauuua

SEQ ID NO: 1985056 - RNA, 19 nt, Homo sapiens
  misc_RNA (1)...(19): siRNA sense strand
guuuggauguucucauuug

SEQ ID NO: 1985057 - RNA, 19 nt, Homo sapiens
  misc_RNA (1)...(19): siRNA sense strand
cacagacacugaagaauac

SEQ ID NO: 1985058 - RNA, 19 nt, Homo sapiens
  misc_RNA (1)...(19): siRNA sense strand
ucucaaagaucagguuuua

SEQ ID NO: 1985059 - RNA, 19 nt, Homo sapiens
  misc_RNA (1)...(19): siRNA sense strand
acaaugguaugaauaugga

SEQ ID NO: 1985060 - RNA, 19 nt, Homo sapiens
  misc_RNA (1)...(19): siRNA sense strand
guucucauuuguccguuaa

SEQ ID NO: 1985061 - RNA, 19 nt, Homo sapiens
  misc_RNA (1)...(19): siRNA sense strand
gugcaaggaccggaaauuu

SEQ ID NO: 1985062 - RNA, 19 nt, Homo sapiens
  misc_RNA (1)...(19): siRNA sense strand
gugaaggcauauuuaaagu

SEQ ID NO: 1985063 - RNA, 19 nt, Homo sapiens
  misc_RNA (1)...(19): siRNA sense strand
gagcggguccugagggauu

SEQ ID NO: 1985064 - RNA, 19 nt, Homo sapiens
  misc_RNA (1)...(19): siRNA sense strand
guuaacccaugaagaaaca

SEQ ID NO: 1985065 - RNA, 19 nt, Homo sapiens
  misc_RNA (1)...(19): siRNA sense strand
gacaucaggucacaauugc

SEQ ID NO: 1985066 - RNA, 19 nt, Homo sapiens
  misc_RNA (1)...(19): siRNA sense strand
gagauaauugguacucaga

SEQ ID NO: 1985067 - RNA, 19 nt, Homo sapiens
  misc_RNA (1)...(19): siRNA sense strand
cuucgucauuguuuacuaa

SEQ ID NO: 1985068 - RNA, 19 nt, Homo sapiens
  misc_RNA (1)...(19): siRNA sense strand
ggagagcagaugugaagga

SEQ ID NO: 1985069 - RNA, 19 nt, Homo sapiens
  misc_RNA (1)...(19): siRNA sense strand
acgcagaucuuggaaagug

SEQ ID NO: 1985070 - RNA, 19 nt, Homo sapiens
  misc_RNA (1)...(19): siRNA sense strand
gaggaagaggagauaauug

SEQ ID NO: 1985071 - RNA, 19 nt, Homo sapiens
  misc_RNA (1)...(19): siRNA sense strand
ggaggccauucauguuuua

SEQ ID NO: 1985072 - RNA, 19 nt, Homo sapiens
  misc_RNA (1)...(19): siRNA sense strand
aaucggccauagaccauaa

SEQ ID NO: 1985073 - RNA, 19 nt, Homo sapiens
  misc_RNA (1)...(19): siRNA sense strand
ugagggaugugacaaaucg

SEQ ID NO: 1985074 - RNA, 19 nt, Homo sapiens
  misc_RNA (1)...(19): siRNA sense strand
ucaaguguccugccuggaa

SEQ ID NO: 1985075 - RNA, 19 nt, Homo sapiens
  misc_RNA (1)...(19): siRNA sense strand
gauagucugcugaaauaca

SEQ ID NO: 1985076 - RNA, 19 nt, Homo sapiens
  misc_RNA (1)...(19): siRNA sense strand
agaaagaaacucugugaag

SEQ ID NO: 1985077 - RNA, 19 nt, Homo sapiens
  misc_RNA (1)...(19): siRNA sense strand
uggagaaaguaucagaguu

SEQ ID NO: 1985078 - RNA, 19 nt, Homo sapiens
  misc_RNA (1)...(19): siRNA sense strand
acaaaucgaccugaaguug

SEQ ID NO: 1985079 - RNA, 19 nt, Homo sapiens
  misc_RNA (1)...(19): siRNA sense strand
caagggaagcagcuauaga

SEQ ID NO: 1985080 - RNA, 19 nt, Homo sapiens
  misc_RNA (1)...(19): siRNA sense strand
ugaaucaacagaugaagau

SEQ ID NO: 1985081 - RNA, 19 nt, Homo sapiens
  misc_RNA (1)...(19): siRNA sense strand
gaaucaacagaugaagaua

SEQ ID NO: 1985082 - RNA, 19 nt, Homo sapiens
  misc_RNA (1)...(19): siRNA sense strand
guugagggaugugacaaau

SEQ ID NO: 1985083 - RNA, 19 nt, Homo sapiens
  misc_RNA (1)...(19): siRNA sense strand
gcauaaagagagugauucu

SEQ ID NO: 1985084 - RNA, 19 nt, Homo sapiens
  misc_RNA (1)...(19): siRNA sense strand
ggaccgaugaguaugaauc

SEQ ID NO: 1985085 - RNA, 19 nt, Homo sapiens
  misc_RNA (1)...(19): siRNA sense strand
ggaccggaaauuuaucaau

SEQ ID NO: 1985086 - RNA, 19 nt, Homo sapiens
  misc_RNA (1)...(19): siRNA sense strand
caggagagcagaugugaag

SEQ ID NO: 1985087 - RNA, 19 nt, Homo sapiens
  misc_RNA (1)...(19): siRNA sense strand
uaugaagccaugaaacuug

SEQ ID NO: 1985088 - RNA, 19 nt, Homo sapiens
  misc_RNA (1)...(19): siRNA sense strand
uagaggaaccaaugccaaa

SEQ ID NO: 1985089 - RNA, 19 nt, Homo sapiens
  misc_RNA (1)...(19): siRNA sense strand
gaaugcugcaggacuguug

SEQ ID NO: 1985090 - RNA, 19 nt, Homo sapiens
  misc_RNA (1)...(19): siRNA sense strand
cagcuguccuucgucauug

SEQ ID NO: 1985091 - RNA, 19 nt, Homo sapiens
  misc_RNA (1)...(19): siRNA sense strand
gugcauaaagagagugauu

SEQ ID NO: 1985092 - RNA, 19 nt, Homo sapiens
  misc_RNA (1)...(19): siRNA sense strand
aagcauagggcuacuuuca

SEQ ID NO: 1985093 - RNA, 19 nt, Homo sapiens
  misc_RNA (1)...(19): siRNA sense strand
ugaaauacacuggcuaugg

SEQ ID NO: 1985094 - RNA, 19 nt, Homo sapiens
  misc_RNA (1)...(19): siRNA sense strand
gcugaaauacacuggcuau

SEQ ID NO: 1985095 - RNA, 19 nt, Homo sapiens
  misc_RNA (1)...(19): siRNA sense strand
ugacaaaucgaccugaagu

SEQ ID NO: 1985096 - RNA, 19 nt, Homo sapiens
  misc_RNA (1)...(19): siRNA sense strand
acacagcaaugcagucaac

SEQ ID NO: 1985097 - RNA, 19 nt, Homo sapiens
  misc_RNA (1)...(19): siRNA sense strand
acaguuggaaggugcauaa

SEQ ID NO: 1985098 - RNA, 19 nt, Homo sapiens
  misc_RNA (1)...(19): siRNA sense strand
guuccagucucuuguuugg

SEQ ID NO: 1985099 - RNA, 19 nt, Homo sapiens
  misc_RNA (1)...(19): siRNA sense strand
uguccuucgucauuguuua

SEQ ID NO: 1985100 - RNA, 19 nt, Homo sapiens
  misc_RNA (1)...(19): siRNA sense strand
acaagcauagggcuacuuu

SEQ ID NO: 1985101 - RNA, 19 nt, Homo sapiens
  misc_RNA (1)...(19): siRNA sense strand
guggauagucugcugaaau

SEQ ID NO: 1985102 - RNA, 19 nt, Homo sapiens
  misc_RNA (1)...(19): siRNA sense strand
ugaagaaacagcccaagag

SEQ ID NO: 1985103 - RNA, 19 nt, Homo sapiens
  misc_RNA (1)...(19): siRNA sense strand
ucaaggaacugcuggauua

SEQ ID NO: 1985104 - RNA, 19 nt, Homo sapiens
  misc_RNA (1)...(19): siRNA sense strand
gcgggugccugucauuaag

SEQ ID NO: 1985105 - RNA, 19 nt, Homo sapiens
  misc_RNA (1)...(19): siRNA sense strand
caaggaacugcuggauuaa

SEQ ID NO: 1985106 - RNA, 19 nt, Homo sapiens
  misc_RNA (1)...(19): siRNA sense strand
gcccaaacccuacccuucu

SEQ ID NO: 1985107 - RNA, 19 nt, Homo sapiens
  misc_RNA (1)...(19): siRNA sense strand
cccaaacccuacccuucuu

SEQ ID NO: 1985108 - RNA, 19 nt, Homo sapiens
  misc_RNA (1)...(19): siRNA sense strand
gcugguguaucaaggaacu

SEQ ID NO: 1985109 - RNA, 19 nt, Homo sapiens
  misc_RNA (1)...(19): siRNA sense strand
gggugccugucauuaagau

SEQ ID NO: 1985110 - RNA, 19 nt, Homo sapiens
  misc_RNA (1)...(19): siRNA sense strand
ggaaggaaguggagaaaug

SEQ ID NO: 1985111 - RNA, 19 nt, Homo sapiens
  misc_RNA (1)...(19): siRNA sense strand
gacagaugcucauuucuaa

SEQ ID NO: 1985112 - RNA, 19 nt, Homo sapiens
  misc_RNA (1)...(19): siRNA sense strand
ggaaacaacugggcauaug

SEQ ID NO: 1985113 - RNA, 19 nt, Homo sapiens
  misc_RNA (1)...(19): siRNA sense strand
gaaauauggucaacaugca

SEQ ID NO: 1985114 - RNA, 19 nt, Homo sapiens
  misc_RNA (1)...(19): siRNA sense strand
ugagaagucugcaguguug

SEQ ID NO: 1985115 - RNA, 19 nt, Homo sapiens
  misc_RNA (1)...(19): siRNA sense strand
ggaagaagguauugauagg

SEQ ID NO: 1985116 - RNA, 19 nt, Homo sapiens
  misc_RNA (1)...(19): siRNA sense strand
aagcagaucuccuuuagug

SEQ ID NO: 1985117 - RNA, 19 nt, Homo sapiens
  misc_RNA (1)...(19): siRNA sense strand
caacagccaguucuuagua

SEQ ID NO: 1985118 - RNA, 19 nt, Homo sapiens
  misc_RNA (1)...(19): siRNA sense strand
gggaaggcauggaauaugu

SEQ ID NO: 1985119 - RNA, 19 nt, Homo sapiens
  misc_RNA (1)...(19): siRNA sense strand
gggcacaggaucaggauua

SEQ ID NO: 1985120 - RNA, 19 nt, Homo sapiens
  misc_RNA (1)...(19): siRNA sense strand
gaagaucaguacucaaacu

SEQ ID NO: 1985121 - RNA, 19 nt, Homo sapiens
  misc_RNA (1)...(19): siRNA sense strand
cagggacucugcucuauga

SEQ ID NO: 1985122 - RNA, 19 nt, Homo sapiens
  misc_RNA (1)...(19): siRNA sense strand
ggacuuccuccucuuagua

SEQ ID NO: 1985123 - RNA, 19 nt, Homo sapiens
  misc_RNA (1)...(19): siRNA sense strand
gacauggaacccaaaguua

SEQ ID NO: 1985124 - RNA, 19 nt, Homo sapiens
  misc_RNA (1)...(19): siRNA sense strand
gugcaaaacugaugaauau

SEQ ID NO: 1985125 - RNA, 19 nt, Homo sapiens
  misc_RNA (1)...(19): siRNA sense strand
gaacauaauccggaaggaa

SEQ ID NO: 1985126 - RNA, 19 nt, Homo sapiens
  misc_RNA (1)...(19): siRNA sense strand
gcaugaagaaucuauaaug

SEQ ID NO: 1985127 - RNA, 19 nt, Homo sapiens
  misc_RNA (1)...(19): siRNA sense strand
cagaucuccuuuagugaua

SEQ ID NO: 1985128 - RNA, 19 nt, Homo sapiens
  misc_RNA (1)...(19): siRNA sense strand
ucacaugucugagaauuca

SEQ ID NO: 1985129 - RNA, 19 nt, Homo sapiens
  misc_RNA (1)...(19): siRNA sense strand
ucaagcagaucuccuuuag

SEQ ID NO: 1985130 - RNA, 19 nt, Homo sapiens
  misc_RNA (1)...(19): siRNA sense strand
gugcagauguggagggauu

SEQ ID NO: 1985131 - RNA, 19 nt, Homo sapiens
  misc_RNA (1)...(19): siRNA sense strand
ggauuaggagcuuucguua

SEQ ID NO: 1985132 - RNA, 19 nt, Homo sapiens
  misc_RNA (1)...(19): siRNA sense strand
uagaagaucaguacucaaa

SEQ ID NO: 1985133 - RNA, 19 nt, Homo sapiens
  misc_RNA (1)...(19): siRNA sense strand
ugagagagaaugaggcaua

SEQ ID NO: 1985134 - RNA, 19 nt, Homo sapiens
  misc_RNA (1)...(19): siRNA sense strand
gcauaugguuacucuguuc

SEQ ID NO: 1985135 - RNA, 19 nt, Homo sapiens
  misc_RNA (1)...(19): siRNA sense strand
gagcuuucguuacacagaa

SEQ ID NO: 1985136 - RNA, 19 nt, Homo sapiens
  misc_RNA (1)...(19): siRNA sense strand
gaaggcauggaauauguuu

SEQ ID NO: 1985137 - RNA, 19 nt, Homo sapiens
  misc_RNA (1)...(19): siRNA sense strand
acaaggaccugcauuuuaa

SEQ ID NO: 1985138 - RNA, 19 nt, Homo sapiens
  misc_RNA (1)...(19): siRNA sense strand
gcauguauggccuccuuua

SEQ ID NO: 1985139 - RNA, 19 nt, Homo sapiens
  misc_RNA (1)...(19): siRNA sense strand
gagagagaaugaggcauau

SEQ ID NO: 1985140 - RNA, 19 nt, Homo sapiens
  misc_RNA (1)...(19): siRNA sense strand
cagauuauuuggccuuaug

SEQ ID NO: 1985141 - RNA, 19 nt, Homo sapiens
  misc_RNA (1)...(19): siRNA sense strand
gcaaagauggaagaaggua

SEQ ID NO: 1985142 - RNA, 19 nt, Homo sapiens
  misc_RNA (1)...(19): siRNA sense strand
gaaauccacuaggagacuu

SEQ ID NO: 1985143 - RNA, 19 nt, Homo sapiens
  misc_RNA (1)...(19): siRNA sense strand
gagagaaugaggcauauca

SEQ ID NO: 1985144 - RNA, 19 nt, Homo sapiens
  misc_RNA (1)...(19): siRNA sense strand
aaaugucucucaacaagga

SEQ ID NO: 1985145 - RNA, 19 nt, Homo sapiens
  misc_RNA (1)...(19): siRNA sense strand
agacagaugcucauuucua

SEQ ID NO: 1985146 - RNA, 19 nt, Homo sapiens
  misc_RNA (1)...(19): siRNA sense strand
gaauuuagaagaucaguac

SEQ ID NO: 1985147 - RNA, 19 nt, Homo sapiens
  misc_RNA (1)...(19): siRNA sense strand
gaucaguacucaaacucau

SEQ ID NO: 1985148 - RNA, 19 nt, Homo sapiens
  misc_RNA (1)...(19): siRNA sense strand
aagccuacauucaucagua

SEQ ID NO: 1985149 - RNA, 19 nt, Homo sapiens
  misc_RNA (1)...(19): siRNA sense strand
uguauggccuccuuuauca

SEQ ID NO: 1985150 - RNA, 19 nt, Homo sapiens
  misc_RNA (1)...(19): siRNA sense strand
gaacuggugagguuauugu

SEQ ID NO: 1985151 - RNA, 19 nt, Homo sapiens
  misc_RNA (1)...(19): siRNA sense strand
aaacaagguucuggaaaca

SEQ ID NO: 1985152 - RNA, 19 nt, Homo sapiens
  misc_RNA (1)...(19): siRNA sense strand
gcauacaccacauuuacuu

SEQ ID NO: 1985153 - RNA, 19 nt, Homo sapiens
  misc_RNA (1)...(19): siRNA sense strand
gcagaucuccuuuagugau

SEQ ID NO: 1985154 - RNA, 19 nt, Homo sapiens
  misc_RNA (1)...(19): siRNA sense strand
gaaugaggcauaucaagca

SEQ ID NO: 1985155 - RNA, 19 nt, Homo sapiens
  misc_RNA (1)...(19): siRNA sense strand
uuaaagauccagcucugua

SEQ ID NO: 1985156 - RNA, 19 nt, Homo sapiens
  misc_RNA (1)...(19): siRNA sense strand
acacuuccauugcuaacuu

SEQ ID NO: 1985157 - RNA, 19 nt, Homo sapiens
  misc_RNA (1)...(19): siRNA sense strand
ugacauggaacccaaaguu

SEQ ID NO: 1985158 - RNA, 19 nt, Homo sapiens
  misc_RNA (1)...(19): siRNA sense strand
guggagggauuuaaagauc

SEQ ID NO: 1985159 - RNA, 19 nt, Homo sapiens
  misc_RNA (1)...(19): siRNA sense strand
cagacgaaauccacuagga

SEQ ID NO: 1985160 - RNA, 19 nt, Homo sapiens
  misc_RNA (1)...(19): siRNA sense strand
caugcaugcuucugucaaa

SEQ ID NO: 1985161 - RNA, 19 nt, Homo sapiens
  misc_RNA (1)...(19): siRNA sense strand
ucaacaaggaccugcauuu

SEQ ID NO: 1985162 - RNA, 19 nt, Homo sapiens
  misc_RNA (1)...(19): siRNA sense strand
gaucaggauuaggagcuuu

SEQ ID NO: 1985163 - RNA, 19 nt, Homo sapiens
  misc_RNA (1)...(19): siRNA sense strand
gaaggaaguggagaaaugu

SEQ ID NO: 1985164 - RNA, 19 nt, Homo sapiens
  misc_RNA (1)...(19): siRNA sense strand
uaaaaugucucucaacaag

SEQ ID NO: 1985165 - RNA, 19 nt, Homo sapiens
  misc_RNA (1)...(19): siRNA sense strand
cagcaacagccaguucuua

SEQ ID NO: 1985166 - RNA, 19 nt, Homo sapiens
  misc_RNA (1)...(19): siRNA sense strand
uuauggaacuggugagguu

SEQ ID NO: 1985167 - RNA, 19 nt, Homo sapiens
  misc_RNA (1)...(19): siRNA sense strand
gcagauguggagggauuua

SEQ ID NO: 1985168 - RNA, 19 nt, Homo sapiens
  misc_RNA (1)...(19): siRNA sense strand
gucaaaggcugcccagucu

SEQ ID NO: 1985169 - RNA, 19 nt, Homo sapiens
  misc_RNA (1)...(19): siRNA sense strand
gggcauaugguuacucugu

SEQ ID NO: 1985170 - RNA, 19 nt, Homo sapiens
  misc_RNA (1)...(19): siRNA sense strand
ggucauucuucgugggaaa

SEQ ID NO: 1985171 - RNA, 19 nt, Homo sapiens
  misc_RNA (1)...(19): siRNA sense strand
auuaggagcuuucguuaca

SEQ ID NO: 1985172 - RNA, 19 nt, Homo sapiens
  misc_RNA (1)...(19): siRNA sense strand
gaaacaacugggcauaugg

SEQ ID NO: 1985173 - RNA, 19 nt, Homo sapiens
  misc_RNA (1)...(19): siRNA sense strand
uagcaaauaugagaagucu

SEQ ID NO: 1985174 - RNA, 19 nt, Homo sapiens
  misc_RNA (1)...(19): siRNA sense strand
aaagauccagcucuguaua

SEQ ID NO: 1985175 - RNA, 19 nt, Homo sapiens
  misc_RNA (1)...(19): siRNA sense strand
aaagauggaagaagguauu

SEQ ID NO: 1985176 - RNA, 19 nt, Homo sapiens
  misc_RNA (1)...(19): siRNA sense strand
gagaauucauuggcauaca

SEQ ID NO: 1985177 - RNA, 19 nt, Homo sapiens
  misc_RNA (1)...(19): siRNA sense strand
gcacaucagcugggaagug

SEQ ID NO: 1985178 - RNA, 19 nt, Homo sapiens
  misc_RNA (1)...(19): siRNA sense strand
acacagaauuuagaagauc

SEQ ID NO: 1985179 - RNA, 19 nt, Homo sapiens
  misc_RNA (1)...(19): siRNA sense strand
caacugggcauaugguuac

SEQ ID NO: 1985180 - RNA, 19 nt, Homo sapiens
  misc_RNA (1)...(19): siRNA sense strand
gauggaagaagguauugau

SEQ ID NO: 1985181 - RNA, 19 nt, Homo sapiens
  misc_RNA (1)...(19): siRNA sense strand
ucauuucacuacagacgaa

SEQ ID NO: 1985182 - RNA, 19 nt, Homo sapiens
  misc_RNA (1)...(19): siRNA sense strand
uaaagauccagcucuguau

SEQ ID NO: 1985183 - RNA, 19 nt, Homo sapiens
  misc_RNA (1)...(19): siRNA sense strand
uggaauauguuugcuucaa

SEQ ID NO: 1985184 - RNA, 19 nt, Homo sapiens
  misc_RNA (1)...(19): siRNA sense strand
ggaaggcauggaauauguu

SEQ ID NO: 1985185 - RNA, 19 nt, Homo sapiens
  misc_RNA (1)...(19): siRNA sense strand
ggcauaugguuacucuguu

SEQ ID NO: 1985186 - RNA, 19 nt, Homo sapiens
  misc_RNA (1)...(19): siRNA sense strand
gguugaagccuguuaaugc

SEQ ID NO: 1985187 - RNA, 19 nt, Homo sapiens
  misc_RNA (1)...(19): siRNA sense strand
cacaucagcugggaagugu

SEQ ID NO: 1985188 - RNA, 19 nt, Homo sapiens
  misc_RNA (1)...(19): siRNA sense strand
cacagaauuuagaagauca

SEQ ID NO: 1985189 - RNA, 19 nt, Homo sapiens
  misc_RNA (1)...(19): siRNA sense strand
uaugagaagucugcagugu

SEQ ID NO: 1985190 - RNA, 19 nt, Homo sapiens
  misc_RNA (1)...(19): siRNA sense strand
ugggaaagaugugcaaagu

SEQ ID NO: 1985191 - RNA, 19 nt, Homo sapiens
  misc_RNA (1)...(19): siRNA sense strand
gggcuguucuuguugacau

SEQ ID NO: 1985192 - RNA, 19 nt, Homo sapiens
  misc_RNA (1)...(19): siRNA sense strand
gagaaugaggcauaucaag

SEQ ID NO: 1985193 - RNA, 19 nt, Homo sapiens
  misc_RNA (1)...(19): siRNA sense strand
acaacugggcauaugguua

SEQ ID NO: 1985194 - RNA, 19 nt, Homo sapiens
  misc_RNA (1)...(19): siRNA sense strand
guugggaaggcauggaaua

SEQ ID NO: 1985195 - RNA, 19 nt, Homo sapiens
  misc_RNA (1)...(19): siRNA sense strand
uuuagaagaucaguacuca

SEQ ID NO: 1985196 - RNA, 19 nt, Homo sapiens
  misc_RNA (1)...(19): siRNA sense strand
aacagccaguucuuaguaa

SEQ ID NO: 1985197 - RNA, 19 nt, Homo sapiens
  misc_RNA (1)...(19): siRNA sense strand
gcaacagccaguucuuagu

SEQ ID NO: 1985198 - RNA, 19 nt, Homo sapiens
  misc_RNA (1)...(19): siRNA sense strand
caacaaggaccugcauuuu

SEQ ID NO: 1985199 - RNA, 19 nt, Homo sapiens
  misc_RNA (1)...(19): siRNA sense strand
uccauaagaucugugcaaa

SEQ ID NO: 1985200 - RNA, 19 nt, Homo sapiens
  misc_RNA (1)...(19): siRNA sense strand
cagacgcccuccuucuuca

SEQ ID NO: 1985201 - RNA, 19 nt, Homo sapiens
  misc_RNA (1)...(19): siRNA sense strand
gacacuuucucacuuguac

SEQ ID NO: 1985202 - RNA, 19 nt, Homo sapiens
  misc_RNA (1)...(19): siRNA sense strand
cuggugagguuauuguuca

SEQ ID NO: 1985203 - RNA, 19 nt, Homo sapiens
  misc_RNA (1)...(19): siRNA sense strand
cuacagacgaaauccacua

SEQ ID NO: 1985204 - RNA, 19 nt, Homo sapiens
  misc_RNA (1)...(19): siRNA sense strand
uagacaguuucacgucauu

SEQ ID NO: 1985205 - RNA, 19 nt, Homo sapiens
  misc_RNA (1)...(19): siRNA sense strand
ccacuugauaugauuguug

SEQ ID NO: 1985206 - RNA, 19 nt, Homo sapiens
  misc_RNA (1)...(19): siRNA sense strand
uuuaacacuuccauugcua

SEQ ID NO: 1985207 - RNA, 19 nt, Homo sapiens
  misc_RNA (1)...(19): siRNA sense strand
gacuuccuccucuuaguaa

SEQ ID NO: 1985208 - RNA, 19 nt, Homo sapiens
  misc_RNA (1)...(19): siRNA sense strand
ugaggcauaucaagcaucu

SEQ ID NO: 1985209 - RNA, 19 nt, Homo sapiens
  misc_RNA (1)...(19): siRNA sense strand
gcagguuguugccaguuac

SEQ ID NO: 1985210 - RNA, 19 nt, Homo sapiens
  misc_RNA (1)...(19): siRNA sense strand
ggacucaggcggaucuuga

SEQ ID NO: 1985211 - RNA, 19 nt, Homo sapiens
  misc_RNA (1)...(19): siRNA sense strand
ggugaacgccauccucuuu

SEQ ID NO: 1985212 - RNA, 19 nt, Homo sapiens
  misc_RNA (1)...(19): siRNA sense strand
gaccacggguuccacuuug

SEQ ID NO: 1985213 - RNA, 19 nt, Homo sapiens
  misc_RNA (1)...(19): siRNA sense strand
ccaaggugauggcccuaga

SEQ ID NO: 1985214 - RNA, 19 nt, Homo sapiens
  misc_RNA (1)...(19): siRNA sense strand
caaguuugcugagguagag

SEQ ID NO: 1985215 - RNA, 19 nt, Homo sapiens
  misc_RNA (1)...(19): siRNA sense strand
gaaccugcgugcggucauc

SEQ ID NO: 1985216 - RNA, 19 nt, Homo sapiens
  misc_RNA (1)...(19): siRNA sense strand
uaacuaaccauagcgucua

SEQ ID NO: 1985217 - RNA, 19 nt, Homo sapiens
  misc_RNA (1)...(19): siRNA sense strand
gauccgagugaaugcagua

SEQ ID NO: 1985218 - RNA, 19 nt, Homo sapiens
  misc_RNA (1)...(19): siRNA sense strand
ccacaagauccgagugaau

SEQ ID NO: 1985219 - RNA, 19 nt, Homo sapiens
  misc_RNA (1)...(19): siRNA sense strand
cacaagauccgagugaaug

SEQ ID NO: 1985220 - RNA, 19 nt, Homo sapiens
  misc_RNA (1)...(19): siRNA sense strand
acagauccuuugaggugaa

SEQ ID NO: 1985221 - RNA, 19 nt, Homo sapiens
  misc_RNA (1)...(19): siRNA sense strand
ugaccacggguuccacuuu

SEQ ID NO: 1985222 - RNA, 19 nt, Homo sapiens
  misc_RNA (1)...(19): siRNA sense strand
ccacaaggccaagacuaug

SEQ ID NO: 1985223 - RNA, 19 nt, Homo sapiens
  misc_RNA (1)...(19): siRNA sense strand
ggcaguaacuaaccauagc

SEQ ID NO: 1985224 - RNA, 19 nt, Homo sapiens
  misc_RNA (1)...(19): siRNA sense strand
gggcaguaacuaaccauag

SEQ ID NO: 1985225 - RNA, 19 nt, Homo sapiens
  misc_RNA (1)...(19): siRNA sense strand
ccgagugaaugcaguaaac

SEQ ID NO: 1985226 - RNA, 19 nt, Homo sapiens
  misc_RNA (1)...(19): siRNA sense strand
ccguggaccugcuggugaa

SEQ ID NO: 1985227 - RNA, 19 nt, Homo sapiens
  misc_RNA (1)...(19): siRNA sense strand
gcgaagagccucauaaauu

SEQ ID NO: 1985228 - RNA, 19 nt, Homo sapiens
  misc_RNA (1)...(19): siRNA sense strand
cgaagagccucauaaauuc

SEQ ID NO: 1985229 - RNA, 19 nt, Homo sapiens
  misc_RNA (1)...(19): siRNA sense strand
agacacaacugcaagaaau

SEQ ID NO: 1985230 - RNA, 19 nt, Homo sapiens
  misc_RNA (1)...(19): siRNA sense strand
gaagucaccaucucugaaa

SEQ ID NO: 1985231 - RNA, 19 nt, Homo sapiens
  misc_RNA (1)...(19): siRNA sense strand
agaaaugccuuggaagaaa

SEQ ID NO: 1985232 - RNA, 19 nt, Homo sapiens
  misc_RNA (1)...(19): siRNA sense strand
gaaaugccuuggaagaaaa

SEQ ID NO: 1985233 - RNA, 19 nt, Homo sapiens
  misc_RNA (1)...(19): siRNA sense strand
guccaaaguucagaaagaa

SEQ ID NO: 1985234 - RNA, 19 nt, Homo sapiens
  misc_RNA (1)...(19): siRNA sense strand
caacuuagggccaacuguu

SEQ ID NO: 1985235 - RNA, 19 nt, Homo sapiens
  misc_RNA (1)...(19): siRNA sense strand
guagacugaugcucgcaaa

SEQ ID NO: 1985236 - RNA, 19 nt, Homo sapiens
  misc_RNA (1)...(19): siRNA sense strand
gcagcgaagagccucauaa

SEQ ID NO: 1985237 - RNA, 19 nt, Homo sapiens
  misc_RNA (1)...(19): siRNA sense strand
acacuaacaugccagaagu

SEQ ID NO: 1985238 - RNA, 19 nt, Homo sapiens
  misc_RNA (1)...(19): siRNA sense strand
ggacugcauucaacuuagg

SEQ ID NO: 1985239 - RNA, 19 nt, Homo sapiens
  misc_RNA (1)...(19): siRNA sense strand
gcaaacaggccuccguucu

SEQ ID NO: 1985240 - RNA, 19 nt, Homo sapiens
  misc_RNA (1)...(19): siRNA sense strand
cagcgaagagccucauaaa

SEQ ID NO: 1985241 - RNA, 19 nt, Homo sapiens
  misc_RNA (1)...(19): siRNA sense strand
aaacaggccuccguucucu

SEQ ID NO: 1985242 - RNA, 19 nt, Homo sapiens
  misc_RNA (1)...(19): siRNA sense strand
aaaguuaucugaguagacu

SEQ ID NO: 1985243 - RNA, 19 nt, Homo sapiens
  misc_RNA (1)...(19): siRNA sense strand
aguccaaaguucagaaaga

SEQ ID NO: 1985244 - RNA, 19 nt, Homo sapiens
  misc_RNA (1)...(19): siRNA sense strand
gaaaaguuaucugaguaga

SEQ ID NO: 1985245 - RNA, 19 nt, Homo sapiens
  misc_RNA (1)...(19): siRNA sense strand
acaacaacgugggcacuga

SEQ ID NO: 1985246 - RNA, 19 nt, Homo sapiens
  misc_RNA (1)...(19): siRNA sense strand
gggacugcauucaacuuag

SEQ ID NO: 1985247 - RNA, 19 nt, Homo sapiens
  misc_RNA (1)...(19): siRNA sense strand
aagaaaugccuuggaagaa

SEQ ID NO: 1985248 - RNA, 19 nt, Homo sapiens
  misc_RNA (1)...(19): siRNA sense strand
cagaacacccaaggucaaa

SEQ ID NO: 1985249 - RNA, 19 nt, Homo sapiens
  misc_RNA (1)...(19): siRNA sense strand
caaacaggccuccguucuc

SEQ ID NO: 1985250 - RNA, 19 nt, Homo sapiens
  misc_RNA (1)...(19): siRNA sense strand
ugggacugcauucaacuua

SEQ ID NO: 1985251 - RNA, 19 nt, Homo sapiens
  misc_RNA (1)...(19): siRNA sense strand
aacacaaacuacaaucauc

SEQ ID NO: 1985252 - RNA, 19 nt, Homo sapiens
  misc_RNA (1)...(19): siRNA sense strand
gacacaacugcaagaaaug

SEQ ID NO: 1985253 - RNA, 19 nt, Homo sapiens
  misc_RNA (1)...(19): siRNA sense strand
ccauugcucaguuugaaau

SEQ ID NO: 1985254 - RNA, 19 nt, Homo sapiens
  misc_RNA (1)...(19): siRNA sense strand
acagaacacccaaggucaa

SEQ ID NO: 1985255 - RNA, 19 nt, Homo sapiens
  misc_RNA (1)...(19): siRNA sense strand
caaaaugggaauacaacaa

SEQ ID NO: 1985256 - RNA, 19 nt, Homo sapiens
  misc_RNA (1)...(19): siRNA sense strand
aacuuagggccaacuguua

SEQ ID NO: 1985257 - RNA, 19 nt, Homo sapiens
  misc_RNA (1)...(19): siRNA sense strand
agaagucaccaucucugaa

SEQ ID NO: 1985258 - RNA, 19 nt, Homo sapiens
  misc_RNA (1)...(19): siRNA sense strand
aaagacacaacugcaagaa

SEQ ID NO: 1985259 - RNA, 19 nt, Homo sapiens
  misc_RNA (1)...(19): siRNA sense strand
ccucauaaauuccccuuca

SEQ ID NO: 1985260 - RNA, 19 nt, Homo sapiens
  misc_RNA (1)...(19): siRNA sense strand
gaaaacacaaacuacaauc

SEQ ID NO: 1985261 - RNA, 19 nt, Homo sapiens
  misc_RNA (1)...(19): siRNA sense strand
gacugaugcucgcaaacag

SEQ ID NO: 1985262 - RNA, 19 nt, Homo sapiens
  misc_RNA (1)...(19): siRNA sense strand
ccaaaguucagaaagaaaa

SEQ ID NO: 1985263 - RNA, 19 nt, Homo sapiens
  misc_RNA (1)...(19): siRNA sense strand
caccaucucugaaaacaca

SEQ ID NO: 1985264 - RNA, 19 nt, Homo sapiens
  misc_RNA (1)...(19): siRNA sense strand
acccauugcucaguuugaa

SEQ ID NO: 1985265 - RNA, 19 nt, Homo sapiens
  misc_RNA (1)...(19): siRNA sense strand
gaaaauggauuacgugaua

SEQ ID NO: 1985266 - RNA, 19 nt, Homo sapiens
  misc_RNA (1)...(19): siRNA sense strand
caacaaacacugaugauaa

SEQ ID NO: 1985267 - RNA, 19 nt, Homo sapiens
  misc_RNA (1)...(19): siRNA sense strand
ugaaauagauacuggagaa

SEQ ID NO: 1985268 - RNA, 19 nt, Homo sapiens
  misc_RNA (1)...(19): siRNA sense strand
ggauggaucuuuacaugug

SEQ ID NO: 1985269 - RNA, 19 nt, Homo sapiens
  misc_RNA (1)...(19): siRNA sense strand
caaagauccuucaaacaug

SEQ ID NO: 1985270 - RNA, 19 nt, Homo sapiens
  misc_RNA (1)...(19): siRNA sense strand
gaaguuaacaguggaauau

SEQ ID NO: 1985271 - RNA, 19 nt, Homo sapiens
  misc_RNA (1)...(19): siRNA sense strand
guaucuagcuucugaguuc

SEQ ID NO: 1985272 - RNA, 19 nt, Homo sapiens
  misc_RNA (1)...(19): siRNA sense strand
cugcagcucuucuugcuua

SEQ ID NO: 1985273 - RNA, 19 nt, Homo sapiens
  misc_RNA (1)...(19): siRNA sense strand
gcugcuggauuuaauguuu

SEQ ID NO: 1985274 - RNA, 19 nt, Homo sapiens
  misc_RNA (1)...(19): siRNA sense strand
ggaacauccuuaucucuca

SEQ ID NO: 1985275 - RNA, 19 nt, Homo sapiens
  misc_RNA (1)...(19): siRNA sense strand
gaauauaucggguucuuuc

SEQ ID NO: 1985276 - RNA, 19 nt, Homo sapiens
  misc_RNA (1)...(19): siRNA sense strand
ccaaagauccuucaaacau

SEQ ID NO: 1985277 - RNA, 19 nt, Homo sapiens
  misc_RNA (1)...(19): siRNA sense strand
gaagcaggaauucuuauug

SEQ ID NO: 1985278 - RNA, 19 nt, Homo sapiens
  misc_RNA (1)...(19): siRNA sense strand
ggcagaagcuccagugauc

SEQ ID NO: 1985279 - RNA, 19 nt, Homo sapiens
  misc_RNA (1)...(19): siRNA sense strand
ggaagaacucugccaaaga

SEQ ID NO: 1985280 - RNA, 19 nt, Homo sapiens
  misc_RNA (1)...(19): siRNA sense strand
aaagauccuucaaacauga

SEQ ID NO: 1985281 - RNA, 19 nt, Homo sapiens
  misc_RNA (1)...(19): siRNA sense strand
cacaguaucuagcuucuga

SEQ ID NO: 1985282 - RNA, 19 nt, Homo sapiens
  misc_RNA (1)...(19): siRNA sense strand
uaacaucgguggugcacau

SEQ ID NO: 1985283 - RNA, 19 nt, Homo sapiens
  misc_RNA (1)...(19): siRNA sense strand
ccagacugauauuuaguaa

SEQ ID NO: 1985284 - RNA, 19 nt, Homo sapiens
  misc_RNA (1)...(19): siRNA sense strand
uacagcaacugauuaaaga

SEQ ID NO: 1985285 - RNA, 19 nt, Homo sapiens
  misc_RNA (1)...(19): siRNA sense strand
gggaagaacucugccaaag

SEQ ID NO: 1985286 - RNA, 19 nt, Homo sapiens
  misc_RNA (1)...(19): siRNA sense strand
agaaauacaucgcggaaag

SEQ ID NO: 1985287 - RNA, 19 nt, Homo sapiens
  misc_RNA (1)...(19): siRNA sense strand
ccaaagaggaaaccaaguu

SEQ ID NO: 1985288 - RNA, 19 nt, Homo sapiens
  misc_RNA (1)...(19): siRNA sense strand
ugaagagauuguuggauug

SEQ ID NO: 1985289 - RNA, 19 nt, Homo sapiens
  misc_RNA (1)...(19): siRNA sense strand
ggaaguuaacaguggaaua

SEQ ID NO: 1985290 - RNA, 19 nt, Homo sapiens
  misc_RNA (1)...(19): siRNA sense strand
cagaugauaucaacaaggu

SEQ ID NO: 1985291 - RNA, 19 nt, Homo sapiens
  misc_RNA (1)...(19): siRNA sense strand
ucaagaaacuggaaaaugu

SEQ ID NO: 1985292 - RNA, 19 nt, Homo sapiens
  misc_RNA (1)...(19): siRNA sense strand
gaagauguugccagacuga

SEQ ID NO: 1985293 - RNA, 19 nt, Homo sapiens
  misc_RNA (1)...(19): siRNA sense strand
gggcucagaugcaaaugau

SEQ ID NO: 1985294 - RNA, 19 nt, Homo sapiens
  misc_RNA (1)...(19): siRNA sense strand
ugaaagaaacggcacauuc

SEQ ID NO: 1985295 - RNA, 19 nt, Homo sapiens
  misc_RNA (1)...(19): siRNA sense strand
augaagagauuguuggauu

SEQ ID NO: 1985296 - RNA, 19 nt, Homo sapiens
  misc_RNA (1)...(19): siRNA sense strand
gaagacaacacacauugca

SEQ ID NO: 1985297 - RNA, 19 nt, Homo sapiens
  misc_RNA (1)...(19): siRNA sense strand
cagaaaccuuagcacagua

SEQ ID NO: 1985298 - RNA, 19 nt, Homo sapiens
  misc_RNA (1)...(19): siRNA sense strand
gaugaagugaucccuauug

SEQ ID NO: 1985299 - RNA, 19 nt, Homo sapiens
  misc_RNA (1)...(19): siRNA sense strand
aauagauacuggagaagaa

SEQ ID NO: 1985300 - RNA, 19 nt, Homo sapiens
  misc_RNA (1)...(19): siRNA sense strand
gaaaugcgcgagccaugau

SEQ ID NO: 1985301 - RNA, 19 nt, Homo sapiens
  misc_RNA (1)...(19): siRNA sense strand
ggaaaugcgcgagccauga

SEQ ID NO: 1985302 - RNA, 19 nt, Homo sapiens
  misc_RNA (1)...(19): siRNA sense strand
gggcuggugugguugcaaa

SEQ ID NO: 1985303 - RNA, 19 nt, Homo sapiens
  misc_RNA (1)...(19): siRNA sense strand
ggacaagacuccccuacug

SEQ ID NO: 1985304 - RNA, 19 nt, Homo sapiens
  misc_RNA (1)...(19): siRNA sense strand
uagcuguucuuacuaugaa

SEQ ID NO: 1985305 - RNA, 19 nt, Homo sapiens
  misc_RNA (1)...(19): siRNA sense strand
gcaagccccuggaagcaua

SEQ ID NO: 1985306 - RNA, 19 nt, Homo sapiens
  misc_RNA (1)...(19): siRNA sense strand
gagcaagauuugaacuucu

SEQ ID NO: 1985307 - RNA, 19 nt, Homo sapiens
  misc_RNA (1)...(19): siRNA sense strand
gggaaauuacgauaugaaa

SEQ ID NO: 1985308 - RNA, 19 nt, Homo sapiens
  misc_RNA (1)...(19): siRNA sense strand
gauggaucuuuacauguga

SEQ ID NO: 1985309 - RNA, 19 nt, Homo sapiens
  misc_RNA (1)...(19): siRNA sense strand
gaaacggcacauucuguau

SEQ ID NO: 1985310 - RNA, 19 nt, Homo sapiens
  misc_RNA (1)...(19): siRNA sense strand
cagaagauguugccagacu

SEQ ID NO: 1985311 - RNA, 19 nt, Homo sapiens
  misc_RNA (1)...(19): siRNA sense strand
ggauuuacagcagaugaua

SEQ ID NO: 1985312 - RNA, 19 nt, Homo sapiens
  misc_RNA (1)...(19): siRNA sense strand
gcgaaacauucuuugucaa

SEQ ID NO: 1985313 - RNA, 19 nt, Homo sapiens
  misc_RNA (1)...(19): siRNA sense strand
ucaacaaacacugaugaua

SEQ ID NO: 1985314 - RNA, 19 nt, Homo sapiens
  misc_RNA (1)...(19): siRNA sense strand
gacaugcacagaucaagaa

SEQ ID NO: 1985315 - RNA, 19 nt, Homo sapiens
  misc_RNA (1)...(19): siRNA sense strand
uauaugaagggcaagauuu

SEQ ID NO: 1985316 - RNA, 19 nt, Homo sapiens
  misc_RNA (1)...(19): siRNA sense strand
aaugggaaauuacgauaug

SEQ ID NO: 1985317 - RNA, 19 nt, Homo sapiens
  misc_RNA (1)...(19): siRNA sense strand
gcaacugauuaaagaucuu

SEQ ID NO: 1985318 - RNA, 19 nt, Homo sapiens
  misc_RNA (1)...(19): siRNA sense strand
ccaaagcuacagcaacuga

SEQ ID NO: 1985319 - RNA, 19 nt, Homo sapiens
  misc_RNA (1)...(19): siRNA sense strand
aacgaacagugcugaagua

SEQ ID NO: 1985320 - RNA, 19 nt, Homo sapiens
  misc_RNA (1)...(19): siRNA sense strand
acagaaaccuuagcacagu

SEQ ID NO: 1985321 - RNA, 19 nt, Homo sapiens
  misc_RNA (1)...(19): siRNA sense strand
cuccagcuguuguugcuua

SEQ ID NO: 1985322 - RNA, 19 nt, Homo sapiens
  misc_RNA (1)...(19): siRNA sense strand
guugccagacugauauuua

SEQ ID NO: 1985323 - RNA, 19 nt, Homo sapiens
  misc_RNA (1)...(19): siRNA sense strand
gauguugccagacugauau

SEQ ID NO: 1985324 - RNA, 19 nt, Homo sapiens
  misc_RNA (1)...(19): siRNA sense strand
cagcagaugauaucaacaa

SEQ ID NO: 1985325 - RNA, 19 nt, Homo sapiens
  misc_RNA (1)...(19): siRNA sense strand
gcucagaugcaaaugaugu

SEQ ID NO: 1985326 - RNA, 19 nt, Homo sapiens
  misc_RNA (1)...(19): siRNA sense strand
guauugggcucagaugcaa

SEQ ID NO: 1985327 - RNA, 19 nt, Homo sapiens
  misc_RNA (1)...(19): siRNA sense strand
agaugcaaaugauguaguu

SEQ ID NO: 1985328 - RNA, 19 nt, Homo sapiens
  misc_RNA (1)...(19): siRNA sense strand
cgugauauauuagcuguuc

SEQ ID NO: 1985329 - RNA, 19 nt, Homo sapiens
  misc_RNA (1)...(19): siRNA sense strand
gugcugaaguagcgaaaca

SEQ ID NO: 1985330 - RNA, 19 nt, Homo sapiens
  misc_RNA (1)...(19): siRNA sense strand
cgcgagccaugaugaaauu

SEQ ID NO: 1985331 - RNA, 19 nt, Homo sapiens
  misc_RNA (1)...(19): siRNA sense strand
auacaucgcggaaaguaaa

SEQ ID NO: 1985332 - RNA, 19 nt, Homo sapiens
  misc_RNA (1)...(19): siRNA sense strand
caucgguggugcacauuuc

SEQ ID NO: 1985333 - RNA, 19 nt, Homo sapiens
  misc_RNA (1)...(19): siRNA sense strand
aaacggcacauucuguauu

SEQ ID NO: 1985334 - RNA, 19 nt, Homo sapiens
  misc_RNA (1)...(19): siRNA sense strand
gccagacugauauuuagua

SEQ ID NO: 1985335 - RNA, 19 nt, Homo sapiens
  misc_RNA (1)...(19): siRNA sense strand
uagagcugcuggauuuaau

SEQ ID NO: 1985336 - RNA, 19 nt, Homo sapiens
  misc_RNA (1)...(19): siRNA sense strand
uuacugucccguuugauuu

SEQ ID NO: 1985337 - RNA, 19 nt, Homo sapiens
  misc_RNA (1)...(19): siRNA sense strand
agggauggaucuuuacaug

SEQ ID NO: 1985338 - RNA, 19 nt, Homo sapiens
  misc_RNA (1)...(19): siRNA sense strand
aagcaggaauucuuauugg

SEQ ID NO: 1985339 - RNA, 19 nt, Homo sapiens
  misc_RNA (1)...(19): siRNA sense strand
cugaugaagugaucccuau

SEQ ID NO: 1985340 - RNA, 19 nt, Homo sapiens
  misc_RNA (1)...(19): siRNA sense strand
gaaauacaucgcggaaagu

SEQ ID NO: 1985341 - RNA, 19 nt, Homo sapiens
  misc_RNA (1)...(19): siRNA sense strand
guacuccaggauuuagaua

SEQ ID NO: 1985342 - RNA, 19 nt, Homo sapiens
  misc_RNA (1)...(19): siRNA sense strand
cagugugccuugaacucua

SEQ ID NO: 1985343 - RNA, 19 nt, Homo sapiens
  misc_RNA (1)...(19): siRNA sense strand
cuacagcaacugauuaaag

SEQ ID NO: 1985344 - RNA, 19 nt, Homo sapiens
  misc_RNA (1)...(19): siRNA sense strand
gaaaaugaagagauuguug

SEQ ID NO: 1985345 - RNA, 19 nt, Homo sapiens
  misc_RNA (1)...(19): siRNA sense strand
agagcaagauuugaacuuc

SEQ ID NO: 1985346 - RNA, 19 nt, Homo sapiens
  misc_RNA (1)...(19): siRNA sense strand
gagccaugaugaaauuaac

SEQ ID NO: 1985347 - RNA, 19 nt, Homo sapiens
  misc_RNA (1)...(19): siRNA sense strand
ggaauauaucggguucuuu

SEQ ID NO: 1985348 - RNA, 19 nt, Homo sapiens
  misc_RNA (1)...(19): siRNA sense strand
gcugaaguagcgaaacauu

SEQ ID NO: 1985349 - RNA, 19 nt, Homo sapiens
  misc_RNA (1)...(19): siRNA sense strand
caaguuugcacagguugua

SEQ ID NO: 1985350 - RNA, 19 nt, Homo sapiens
  misc_RNA (1)...(19): siRNA sense strand
guccagagcaagauuugaa

SEQ ID NO: 1985351 - RNA, 19 nt, Homo sapiens
  misc_RNA (1)...(19): siRNA sense strand
ugaaguagcgaaacauucu

SEQ ID NO: 1985352 - RNA, 19 nt, Homo sapiens
  misc_RNA (1)...(19): siRNA sense strand
aaauacaucgcggaaagua

SEQ ID NO: 1985353 - RNA, 19 nt, Homo sapiens
  misc_RNA (1)...(19): siRNA sense strand
aagcuacagcaacugauua

SEQ ID NO: 1985354 - RNA, 19 nt, Homo sapiens
  misc_RNA (1)...(19): siRNA sense strand
cuucuuuguucuccacuuu

SEQ ID NO: 1985355 - RNA, 19 nt, Homo sapiens
  misc_RNA (1)...(19): siRNA sense strand
uuauuacugucccguuuga

SEQ ID NO: 1985356 - RNA, 19 nt, Homo sapiens
  misc_RNA (1)...(19): siRNA sense strand
uaacgaacagugcugaagu

SEQ ID NO: 1985357 - RNA, 19 nt, Homo sapiens
  misc_RNA (1)...(19): siRNA sense strand
cuucugaguuccaaagauc

SEQ ID NO: 1985358 - RNA, 19 nt, Homo sapiens
  misc_RNA (1)...(19): siRNA sense strand
aacaaacacugaugauaac

SEQ ID NO: 1985359 - RNA, 19 nt, Homo sapiens
  misc_RNA (1)...(19): siRNA sense strand
uggaauauaucggguucuu

SEQ ID NO: 1985360 - RNA, 19 nt, Homo sapiens
  misc_RNA (1)...(19): siRNA sense strand
ucgcggaaaguaaauguuu

SEQ ID NO: 1985361 - RNA, 19 nt, Homo sapiens
  misc_RNA (1)...(19): siRNA sense strand
cagcucuucuugcuuaugg

SEQ ID NO: 1985362 - RNA, 19 nt, Homo sapiens
  misc_RNA (1)...(19): siRNA sense strand
ugacaugcacagaucaaga

SEQ ID NO: 1985363 - RNA, 19 nt, Homo sapiens
  misc_RNA (1)...(19): siRNA sense strand
uggagggucuucucgaauc

SEQ ID NO: 1985364 - RNA, 19 nt, Homo sapiens
  misc_RNA (1)...(19): siRNA sense strand
gaagagauuguuggauugg

SEQ ID NO: 1985365 - RNA, 19 nt, Homo sapiens
  misc_RNA (1)...(19): siRNA sense strand
gcagauaucuuauguuuca

SEQ ID NO: 1985366 - RNA, 19 nt, Homo sapiens
  misc_RNA (1)...(19): siRNA sense strand
caaagaguauucugaagua

SEQ ID NO: 1985367 - RNA, 19 nt, Homo sapiens
  misc_RNA (1)...(19): siRNA sense strand
uggcagauaucuuauguuu

SEQ ID NO: 1985368 - RNA, 19 nt, Homo sapiens
  misc_RNA (1)...(19): siRNA sense strand
gaacaagaaucagaagaag

SEQ ID NO: 1985369 - RNA, 19 nt, Homo sapiens
  misc_RNA (1)...(19): siRNA sense strand
ggagggaauuacaauaguu

SEQ ID NO: 1985370 - RNA, 19 nt, Homo sapiens
  misc_RNA (1)...(19): siRNA sense strand
caccauguauuucuucuuu

SEQ ID NO: 1985371 - RNA, 19 nt, Homo sapiens
  misc_RNA (1)...(19): siRNA sense strand
guacaaagaguauucugaa

SEQ ID NO: 1985372 - RNA, 19 nt, Homo sapiens
  misc_RNA (1)...(19): siRNA sense strand
uaaacaaggucacuggaau

SEQ ID NO: 1985373 - RNA, 19 nt, Homo sapiens
  misc_RNA (1)...(19): siRNA sense strand
aagcgaaccugcuaucuug

SEQ ID NO: 1985374 - RNA, 19 nt, Homo sapiens
  misc_RNA (1)...(19): siRNA sense strand
gggaaaugcuggacaucuu

SEQ ID NO: 1985375 - RNA, 19 nt, Homo sapiens
  misc_RNA (1)...(19): siRNA sense strand
ccaaguuaauguugucaaa

SEQ ID NO: 1985376 - RNA, 19 nt, Homo sapiens
  misc_RNA (1)...(19): siRNA sense strand
ggaaaugcuggacaucuuu

SEQ ID NO: 1985377 - RNA, 19 nt, Homo sapiens
  misc_RNA (1)...(19): siRNA sense strand
uucauuaccugguugguua

SEQ ID NO: 1985378 - RNA, 19 nt, Homo sapiens
  misc_RNA (1)...(19): siRNA sense strand
gauuggauuuguccuguau

SEQ ID NO: 1985379 - RNA, 19 nt, Homo sapiens
  misc_RNA (1)...(19): siRNA sense strand
acaagaaucagaagaagaa

SEQ ID NO: 1985380 - RNA, 19 nt, Homo sapiens
  misc_RNA (1)...(19): siRNA sense strand
ggguguggcagauaucuua

SEQ ID NO: 1985381 - RNA, 19 nt, Homo sapiens
  misc_RNA (1)...(19): siRNA sense strand
caaggucacuggaaucaac

SEQ ID NO: 1985382 - RNA, 19 nt, Homo sapiens
  misc_RNA (1)...(19): siRNA sense strand
ggucuuuggugguguacaa

SEQ ID NO: 1985383 - RNA, 19 nt, Homo sapiens
  misc_RNA (1)...(19): siRNA sense strand
ggcaucauuucaccaugua

SEQ ID NO: 1985384 - RNA, 19 nt, Homo sapiens
  misc_RNA (1)...(19): siRNA sense strand
ggucaugcccucccuggaa

SEQ ID NO: 1985385 - RNA, 19 nt, Homo sapiens
  misc_RNA (1)...(19): siRNA sense strand
gaauuaugcuuucauuacc

SEQ ID NO: 1985386 - RNA, 19 nt, Homo sapiens
  misc_RNA (1)...(19): siRNA sense strand
gaaaugcuggacaucuuug

SEQ ID NO: 1985387 - RNA, 19 nt, Homo sapiens
  misc_RNA (1)...(19): siRNA sense strand
ggagcugguucuuucagau

SEQ ID NO: 1985388 - RNA, 19 nt, Homo sapiens
  misc_RNA (1)...(19): siRNA sense strand
gagcugguucuuucagauu

SEQ ID NO: 1985389 - RNA, 19 nt, Homo sapiens
  misc_RNA (1)...(19): siRNA sense strand
uggaaugaauuaugcuuuc

SEQ ID NO: 1985390 - RNA, 19 nt, Homo sapiens
  misc_RNA (1)...(19): siRNA sense strand
ugaacgagaacaagaauca

SEQ ID NO: 1985391 - RNA, 19 nt, Homo sapiens
  misc_RNA (1)...(19): siRNA sense strand
caauguacuucuggagcua

SEQ ID NO: 1985392 - RNA, 19 nt, Homo sapiens
  misc_RNA (1)...(19): siRNA sense strand
agaacaagaaucagaagaa

SEQ ID NO: 1985393 - RNA, 19 nt, Homo sapiens
  misc_RNA (1)...(19): siRNA sense strand
gagggaauuacaauaguug

SEQ ID NO: 1985394 - RNA, 19 nt, Homo sapiens
  misc_RNA (1)...(19): siRNA sense strand
agaaucagaagaagaaaug

SEQ ID NO: 1985395 - RNA, 19 nt, Homo sapiens
  misc_RNA (1)...(19): siRNA sense strand
gggagcugguucuuucaga

SEQ ID NO: 1985396 - RNA, 19 nt, Homo sapiens
  misc_RNA (1)...(19): siRNA sense strand
gagaacaagaaucagaaga

SEQ ID NO: 1985397 - RNA, 19 nt, Homo sapiens
  misc_RNA (1)...(19): siRNA sense strand
cuccugggcuggcaucauu

SEQ ID NO: 1985398 - RNA, 19 nt, Homo sapiens
  misc_RNA (1)...(19): siRNA sense strand
ccauguauuucuucuuugg

SEQ ID NO: 1985399 - RNA, 19 nt, Homo sapiens
  misc_RNA (1)...(19): siRNA sense strand
cuauugcggucaagucuca

SEQ ID NO: 1985400 - RNA, 19 nt, Homo sapiens
  misc_RNA (1)...(19): siRNA sense strand
guggaggccuuuaucuucu

SEQ ID NO: 1985401 - RNA, 19 nt, Homo sapiens
  misc_RNA (1)...(19): siRNA sense strand
caucauuucaccauguauu

SEQ ID NO: 1985402 - RNA, 19 nt, Homo sapiens
  misc_RNA (1)...(19): siRNA sense strand
uuaccugguugguuaaauc

SEQ ID NO: 1985403 - RNA, 19 nt, Homo sapiens
  misc_RNA (1)...(19): siRNA sense strand
acaaagaguauucugaagu

SEQ ID NO: 1985404 - RNA, 19 nt, Homo sapiens
  misc_RNA (1)...(19): siRNA sense strand
uguggcagauaucuuaugu

SEQ ID NO: 1985405 - RNA, 19 nt, Homo sapiens
  misc_RNA (1)...(19): siRNA sense strand
ucugaaguauaucugcaaa

SEQ ID NO: 1985406 - RNA, 19 nt, Homo sapiens
  misc_RNA (1)...(19): siRNA sense strand
gguccugcaugggaucuga

SEQ ID NO: 1985407 - RNA, 19 nt, Homo sapiens
  misc_RNA (1)...(19): siRNA sense strand
uggcaucauuucaccaugu

SEQ ID NO: 1985408 - RNA, 19 nt, Homo sapiens
  misc_RNA (1)...(19): siRNA sense strand
aaagcgaaccugcuaucuu

SEQ ID NO: 1985409 - RNA, 19 nt, Homo sapiens
  misc_RNA (1)...(19): siRNA sense strand
caagucucauucugcuuca

SEQ ID NO: 1985410 - RNA, 19 nt, Homo sapiens
  misc_RNA (1)...(19): siRNA sense strand
uggaggccuuuaucuucua

SEQ ID NO: 1985411 - RNA, 19 nt, Homo sapiens
  misc_RNA (1)...(19): siRNA sense strand
gcggucaagucucauucug

SEQ ID NO: 1985412 - RNA, 19 nt, Homo sapiens
  misc_RNA (1)...(19): siRNA sense strand
ccugguugguuaaaucuag

SEQ ID NO: 1985413 - RNA, 19 nt, Homo sapiens
  misc_RNA (1)...(19): siRNA sense strand
uggagggaauuacaauagu

SEQ ID NO: 1985414 - RNA, 19 nt, Homo sapiens
  misc_RNA (1)...(19): siRNA sense strand
agauuggauuuguccugua

SEQ ID NO: 1985415 - RNA, 19 nt, Homo sapiens
  misc_RNA (1)...(19): siRNA sense strand
uacaaagaguauucugaag

SEQ ID NO: 1985416 - RNA, 19 nt, Homo sapiens
  misc_RNA (1)...(19): siRNA sense strand
aaacaaggucacuggaauc

SEQ ID NO: 1985417 - RNA, 19 nt, Homo sapiens
  misc_RNA (1)...(19): siRNA sense strand
caauaguuggcauggcuuu

SEQ ID NO: 1985418 - RNA, 19 nt, Homo sapiens
  misc_RNA (1)...(19): siRNA sense strand
caggggagcugguucuuuc

SEQ ID NO: 1985419 - RNA, 19 nt, Homo sapiens
  misc_RNA (1)...(19): siRNA sense strand
aauguugucaaaugccuua

SEQ ID NO: 1985420 - RNA, 19 nt, Homo sapiens
  misc_RNA (1)...(19): siRNA sense strand
gcuguuggguguggcagau

SEQ ID NO: 1985421 - RNA, 19 nt, Homo sapiens
  misc_RNA (1)...(19): siRNA sense strand
gcugaacgagaacaagaau

SEQ ID NO: 1985422 - RNA, 19 nt, Homo sapiens
  misc_RNA (1)...(19): siRNA sense strand
ggaggccuuuaucuucuac

SEQ ID NO: 1985423 - RNA, 19 nt, Homo sapiens
  misc_RNA (1)...(19): siRNA sense strand
uguggaggccuuuaucuuc

SEQ ID NO: 1985424 - RNA, 19 nt, Homo sapiens
  misc_RNA (1)...(19): siRNA sense strand
ucacuuccuguguccuuaa

SEQ ID NO: 1985425 - RNA, 19 nt, Homo sapiens
  misc_RNA (1)...(19): siRNA sense strand
ggugguguacaaagaguau

SEQ ID NO: 1985426 - RNA, 19 nt, Homo sapiens
  misc_RNA (1)...(19): siRNA sense strand
cauuaugcaguaaccauug

SEQ ID NO: 1985427 - RNA, 19 nt, Homo sapiens
  misc_RNA (1)...(19): siRNA sense strand
gccgggaaaugcuggacau

SEQ ID NO: 1985428 - RNA, 19 nt, Homo sapiens
  misc_RNA (1)...(19): siRNA sense strand
auaguuggcauggcuuuaa

SEQ ID NO: 1985429 - RNA, 19 nt, Homo sapiens
  misc_RNA (1)...(19): siRNA sense strand
auaaacaaggucacuggaa

SEQ ID NO: 1985430 - RNA, 19 nt, Homo sapiens
  misc_RNA (1)...(19): siRNA sense strand
aguaaccauugucaucguu

SEQ ID NO: 1985431 - RNA, 19 nt, Homo sapiens
  misc_RNA (1)...(19): siRNA sense strand
gagcuauugcggucaaguc

SEQ ID NO: 1985432 - RNA, 19 nt, Homo sapiens
  misc_RNA (1)...(19): siRNA sense strand
ucggaacaauguacuucug

SEQ ID NO: 1985433 - RNA, 19 nt, Homo sapiens
  misc_RNA (1)...(19): siRNA sense strand
uguacaaagaguauucuga

SEQ ID NO: 1985434 - RNA, 19 nt, Homo sapiens
  misc_RNA (1)...(19): siRNA sense strand
ggaagaagaugaaauggaa

SEQ ID NO: 1985435 - RNA, 19 nt, Homo sapiens
  misc_RNA (1)...(19): siRNA sense strand
gaagaccaauguucauaua

SEQ ID NO: 1985436 - RNA, 19 nt, Homo sapiens
  misc_RNA (1)...(19): siRNA sense strand
ggacagacauuaccucuuc

SEQ ID NO: 1985437 - RNA, 19 nt, Homo sapiens
  misc_RNA (1)...(19): siRNA sense strand
ugaaauaaguccagacaaa

SEQ ID NO: 1985438 - RNA, 19 nt, Homo sapiens
  misc_RNA (1)...(19): siRNA sense strand
cauauuggauggaaguuua

SEQ ID NO: 1985439 - RNA, 19 nt, Homo sapiens
  misc_RNA (1)...(19): siRNA sense strand
gaacaacagcagagauaua

SEQ ID NO: 1985440 - RNA, 19 nt, Homo sapiens
  misc_RNA (1)...(19): siRNA sense strand
guauaaggcuugcaacuug

SEQ ID NO: 1985441 - RNA, 19 nt, Homo sapiens
  misc_RNA (1)...(19): siRNA sense strand
gaugauguauugagaauuc

SEQ ID NO: 1985442 - RNA, 19 nt, Homo sapiens
  misc_RNA (1)...(19): siRNA sense strand
gaauugagauagugaaagu

SEQ ID NO: 1985443 - RNA, 19 nt, Homo sapiens
  misc_RNA (1)...(19): siRNA sense strand
guacuucccuuugcuguaa

SEQ ID NO: 1985444 - RNA, 19 nt, Homo sapiens
  misc_RNA (1)...(19): siRNA sense strand
ggaaagggaagcacaguuu

SEQ ID NO: 1985445 - RNA, 19 nt, Homo sapiens
  misc_RNA (1)...(19): siRNA sense strand
caauuagaaucccucaaua

SEQ ID NO: 1985446 - RNA, 19 nt, Homo sapiens
  misc_RNA (1)...(19): siRNA sense strand
gauggcagcuuaugugaau

SEQ ID NO: 1985447 - RNA, 19 nt, Homo sapiens
  misc_RNA (1)...(19): siRNA sense strand
gaaagcaauuggaagacaa

SEQ ID NO: 1985448 - RNA, 19 nt, Homo sapiens
  misc_RNA (1)...(19): siRNA sense strand
gacauuaccucuucagcuu

SEQ ID NO: 1985449 - RNA, 19 nt, Homo sapiens
  misc_RNA (1)...(19): siRNA sense strand
gugcaaaucuaacuucaug

SEQ ID NO: 1985450 - RNA, 19 nt, Homo sapiens
  misc_RNA (1)...(19): siRNA sense strand
gugcugauauggaagaauu

SEQ ID NO: 1985451 - RNA, 19 nt, Homo sapiens
  misc_RNA (1)...(19): siRNA sense strand
aaagacaugucaccucaaa

SEQ ID NO: 1985452 - RNA, 19 nt, Homo sapiens
  misc_RNA (1)...(19): siRNA sense strand
uagaaucccucaauaagug

SEQ ID NO: 1985453 - RNA, 19 nt, Homo sapiens
  misc_RNA (1)...(19): siRNA sense strand
cagaguagcugcuugucuu

SEQ ID NO: 1985454 - RNA, 19 nt, Homo sapiens
  misc_RNA (1)...(19): siRNA sense strand
gaauucagcuccuuaaaau

SEQ ID NO: 1985455 - RNA, 19 nt, Homo sapiens
  misc_RNA (1)...(19): siRNA sense strand
gagaagaccaauguucaua

SEQ ID NO: 1985456 - RNA, 19 nt, Homo sapiens
  misc_RNA (1)...(19): siRNA sense strand
agaaauaccagaagagaaa

SEQ ID NO: 1985457 - RNA, 19 nt, Homo sapiens
  misc_RNA (1)...(19): siRNA sense strand
gcaggacuuugcacgauga

SEQ ID NO: 1985458 - RNA, 19 nt, Homo sapiens
  misc_RNA (1)...(19): siRNA sense strand
cgacuucgcugugaauuag

SEQ ID NO: 1985459 - RNA, 19 nt, Homo sapiens
  misc_RNA (1)...(19): siRNA sense strand
gaauguguguugccuucaa

SEQ ID NO: 1985460 - RNA, 19 nt, Homo sapiens
  misc_RNA (1)...(19): siRNA sense strand
gcuugcaacuugaaucuga

SEQ ID NO: 1985461 - RNA, 19 nt, Homo sapiens
  misc_RNA (1)...(19): siRNA sense strand
ggguaugccuggacuguug

SEQ ID NO: 1985462 - RNA, 19 nt, Homo sapiens
  misc_RNA (1)...(19): siRNA sense strand
gaagacaaagguucaaagu

SEQ ID NO: 1985463 - RNA, 19 nt, Homo sapiens
  misc_RNA (1)...(19): siRNA sense strand
gaacaggauuuuggaauug

SEQ ID NO: 1985464 - RNA, 19 nt, Homo sapiens
  misc_RNA (1)...(19): siRNA sense strand
aagaugaaauggaaguuga

SEQ ID NO: 1985465 - RNA, 19 nt, Homo sapiens
  misc_RNA (1)...(19): siRNA sense strand
gaaagggaagcacaguuug

SEQ ID NO: 1985466 - RNA, 19 nt, Homo sapiens
  misc_RNA (1)...(19): siRNA sense strand
gaaauaaguccagacaaag

SEQ ID NO: 1985467 - RNA, 19 nt, Homo sapiens
  misc_RNA (1)...(19): siRNA sense strand
gcagaaauaccagaagaga

SEQ ID NO: 1985468 - RNA, 19 nt, Homo sapiens
  misc_RNA (1)...(19): siRNA sense strand
ccagcaagcuaaagugcaa

SEQ ID NO: 1985469 - RNA, 19 nt, Homo sapiens
  misc_RNA (1)...(19): siRNA sense strand
gacaucacauacauaccua

SEQ ID NO: 1985470 - RNA, 19 nt, Homo sapiens
  misc_RNA (1)...(19): siRNA sense strand
gaacacagucagauggaau

SEQ ID NO: 1985471 - RNA, 19 nt, Homo sapiens
  misc_RNA (1)...(19): siRNA sense strand
caaaguccuugagcuaaga

SEQ ID NO: 1985472 - RNA, 19 nt, Homo sapiens
  misc_RNA (1)...(19): siRNA sense strand
gaaagugaaagcaauugga

SEQ ID NO: 1985473 - RNA, 19 nt, Homo sapiens
  misc_RNA (1)...(19): siRNA sense strand
gaagcacaguuuggaacaa

SEQ ID NO: 1985474 - RNA, 19 nt, Homo sapiens
  misc_RNA (1)...(19): siRNA sense strand
agaaacagcuacgugaaug

SEQ ID NO: 1985475 - RNA, 19 nt, Homo sapiens
  misc_RNA (1)...(19): siRNA sense strand
gaagaugaaauggaaguug

SEQ ID NO: 1985476 - RNA, 19 nt, Homo sapiens
  misc_RNA (1)...(19): siRNA sense strand
caagagaagaccaauguuc

SEQ ID NO: 1985477 - RNA, 19 nt, Homo sapiens
  misc_RNA (1)...(19): siRNA sense strand
uauaaaugguggcagaaau

SEQ ID NO: 1985478 - RNA, 19 nt, Homo sapiens
  misc_RNA (1)...(19): siRNA sense strand
gaaguugaagaccaggaua

SEQ ID NO: 1985479 - RNA, 19 nt, Homo sapiens
  misc_RNA (1)...(19): siRNA sense strand
cugcuugucuuccuauuga

SEQ ID NO: 1985480 - RNA, 19 nt, Homo sapiens
  misc_RNA (1)...(19): siRNA sense strand
ccuaggugcugauauggaa

SEQ ID NO: 1985481 - RNA, 19 nt, Homo sapiens
  misc_RNA (1)...(19): siRNA sense strand
gcugugaauuagacauuau

SEQ ID NO: 1985482 - RNA, 19 nt, Homo sapiens
  misc_RNA (1)...(19): siRNA sense strand
ucaguauggugcggaauuu

SEQ ID NO: 1985483 - RNA, 19 nt, Homo sapiens
  misc_RNA (1)...(19): siRNA sense strand
gcaauuggaagacaaaggu

SEQ ID NO: 1985484 - RNA, 19 nt, Homo sapiens
  misc_RNA (1)...(19): siRNA sense strand
uauaaggcuugcaacuuga

SEQ ID NO: 1985485 - RNA, 19 nt, Homo sapiens
  misc_RNA (1)...(19): siRNA sense strand
uaaauguacuucccuuugc

SEQ ID NO: 1985486 - RNA, 19 nt, Homo sapiens
  misc_RNA (1)...(19): siRNA sense strand
auaaaugguggcagaaaua

SEQ ID NO: 1985487 - RNA, 19 nt, Homo sapiens
  misc_RNA (1)...(19): siRNA sense strand
ucaauuagaaucccucaau

SEQ ID NO: 1985488 - RNA, 19 nt, Homo sapiens
  misc_RNA (1)...(19): siRNA sense strand
agaccaggauaguaaagaa

SEQ ID NO: 1985489 - RNA, 19 nt, Homo sapiens
  misc_RNA (1)...(19): siRNA sense strand
caugucugcaguucaauua

SEQ ID NO: 1985490 - RNA, 19 nt, Homo sapiens
  misc_RNA (1)...(19): siRNA sense strand
gaaguuuacggccaccaaa

SEQ ID NO: 1985491 - RNA, 19 nt, Homo sapiens
  misc_RNA (1)...(19): siRNA sense strand
caagaaacagcuacgugaa

SEQ ID NO: 1985492 - RNA, 19 nt, Homo sapiens
  misc_RNA (1)...(19): siRNA sense strand
ugaggaagaagaugaaaug

SEQ ID NO: 1985493 - RNA, 19 nt, Homo sapiens
  misc_RNA (1)...(19): siRNA sense strand
cucaauaagugccagauau

SEQ ID NO: 1985494 - RNA, 19 nt, Homo sapiens
  misc_RNA (1)...(19): siRNA sense strand
ccagauauuuccuucaaaa

SEQ ID NO: 1985495 - RNA, 19 nt, Homo sapiens
  misc_RNA (1)...(19): siRNA sense strand
uggcagaaauaccagaaga

SEQ ID NO: 1985496 - RNA, 19 nt, Homo sapiens
  misc_RNA (1)...(19): siRNA sense strand
auaccuaggugcugauaug

SEQ ID NO: 1985497 - RNA, 19 nt, Homo sapiens
  misc_RNA (1)...(19): siRNA sense strand
uggaacaacagcagagaua

SEQ ID NO: 1985498 - RNA, 19 nt, Homo sapiens
  misc_RNA (1)...(19): siRNA sense strand
cacugaagaugaaauaagu

SEQ ID NO: 1985499 - RNA, 19 nt, Homo sapiens
  misc_RNA (1)...(19): siRNA sense strand
agacacugaagaugaaaua

SEQ ID NO: 1985500 - RNA, 19 nt, Homo sapiens
  misc_RNA (1)...(19): siRNA sense strand
gugggccgauggcagcuua

SEQ ID NO: 1985501 - RNA, 19 nt, Homo sapiens
  misc_RNA (1)...(19): siRNA sense strand
gagaauucagcuccuuaaa

SEQ ID NO: 1985502 - RNA, 19 nt, Homo sapiens
  misc_RNA (1)...(19): siRNA sense strand
ugaaagcaauuggaagaca

SEQ ID NO: 1985503 - RNA, 19 nt, Homo sapiens
  misc_RNA (1)...(19): siRNA sense strand
gaugaaauaaguccagaca

SEQ ID NO: 1985504 - RNA, 19 nt, Homo sapiens
  misc_RNA (1)...(19): siRNA sense strand
augauucucuuccuucaaa

SEQ ID NO: 1985505 - RNA, 19 nt, Homo sapiens
  misc_RNA (1)...(19): siRNA sense strand
cuacgugaaugggaugaaa

SEQ ID NO: 1985506 - RNA, 19 nt, Homo sapiens
  misc_RNA (1)...(19): siRNA sense strand
uugaagaccaggauaguaa

SEQ ID NO: 1985507 - RNA, 19 nt, Homo sapiens
  misc_RNA (1)...(19): siRNA sense strand
caagcuaaagugcaaauuc

SEQ ID NO: 1985508 - RNA, 19 nt, Homo sapiens
  misc_RNA (1)...(19): siRNA sense strand
ugaaugggaugaaaaucua

SEQ ID NO: 1985509 - RNA, 19 nt, Homo sapiens
  misc_RNA (1)...(19): siRNA sense strand
aagcuaaagugcaaauucu

SEQ ID NO: 1985510 - RNA, 19 nt, Homo sapiens
  misc_RNA (1)...(19): siRNA sense strand
cccagacacugaagaugaa

SEQ ID NO: 1985511 - RNA, 19 nt, Homo sapiens
  misc_RNA (1)...(19): siRNA sense strand
gaucugugcaagccauauu

SEQ ID NO: 1985512 - RNA, 19 nt, Homo sapiens
  misc_RNA (1)...(19): siRNA sense strand
ugagauagugaaagugaaa

SEQ ID NO: 1985513 - RNA, 19 nt, Homo sapiens
  misc_RNA (1)...(19): siRNA sense strand
aauaaguccagacaaagua

SEQ ID NO: 1985514 - RNA, 19 nt, Homo sapiens
  misc_RNA (1)...(19): siRNA sense strand
ugccagauauuuccuucaa

SEQ ID NO: 1985515 - RNA, 19 nt, Homo sapiens
  misc_RNA (1)...(19): siRNA sense strand
aaccaugucugcaguucaa

SEQ ID NO: 1985516 - RNA, 19 nt, Homo sapiens
  misc_RNA (1)...(19): siRNA sense strand
gcuaaagugcaaauucuuc

SEQ ID NO: 1985517 - RNA, 19 nt, Homo sapiens
  misc_RNA (1)...(19): siRNA sense strand
caacagcagagauauaugc

SEQ ID NO: 1985518 - RNA, 19 nt, Homo sapiens
  misc_RNA (1)...(19): siRNA sense strand
guagcugcuugucuuccua

SEQ ID NO: 1985519 - RNA, 19 nt, Homo sapiens
  misc_RNA (1)...(19): siRNA sense strand
ugucugcaguucaauuaga

SEQ ID NO: 1985520 - RNA, 19 nt, Homo sapiens
  misc_RNA (1)...(19): siRNA sense strand
ggaagcacaguuuggaaca

SEQ ID NO: 1985521 - RNA, 19 nt, Homo sapiens
  misc_RNA (1)...(19): siRNA sense strand
ggaagacaaagguucaaag

SEQ ID NO: 1985522 - RNA, 19 nt, Homo sapiens
  misc_RNA (1)...(19): siRNA sense strand
aaagugaaagcaauuggaa

SEQ ID NO: 1985523 - RNA, 19 nt, Homo sapiens
  misc_RNA (1)...(19): siRNA sense strand
ggaacaacagcagagauau

SEQ ID NO: 1985524 - RNA, 19 nt, Homo sapiens
  misc_RNA (1)...(19): siRNA sense strand
gccagauauuuccuucaaa

SEQ ID NO: 1985525 - RNA, 19 nt, Homo sapiens
  misc_RNA (1)...(19): siRNA sense strand
gaaacagaaauaacaacca

SEQ ID NO: 1985526 - RNA, 19 nt, Homo sapiens
  misc_RNA (1)...(19): siRNA sense strand
agauagaaccuuugcuguu

SEQ ID NO: 1985527 - RNA, 19 nt, Homo sapiens
  misc_RNA (1)...(19): siRNA sense strand
uggccucgcuggcuguauu

SEQ ID NO: 1985528 - RNA, 19 nt, Homo sapiens
  misc_RNA (1)...(19): siRNA sense strand
ccuuugcuguucuugcaua

SEQ ID NO: 1985529 - RNA, 19 nt, Homo sapiens
  misc_RNA (1)...(19): siRNA sense strand
ggacgcugcgcacaacaug

SEQ ID NO: 1985530 - RNA, 19 nt, Homo sapiens
  misc_RNA (1)...(19): siRNA sense strand
ugagaauucagcuccuuaa

SEQ ID NO: 1985531 - RNA, 19 nt, Homo sapiens
  misc_RNA (1)...(19): siRNA sense strand
gauauggaagaauuucaug

SEQ ID NO: 1985532 - RNA, 19 nt, Homo sapiens
  misc_RNA (1)...(19): siRNA sense strand
ccaauguucauauaaaugg

SEQ ID NO: 1985533 - RNA, 19 nt, Homo sapiens
  misc_RNA (1)...(19): siRNA sense strand
gcuaagaacacagucagau

SEQ ID NO: 1985534 - RNA, 19 nt, Homo sapiens
  misc_RNA (1)...(19): siRNA sense strand
gaaagaagcuuaugaagug

SEQ ID NO: 1985535 - RNA, 19 nt, Homo sapiens
  misc_RNA (1)...(19): siRNA sense strand
ggagaaagaugaugacuuc

SEQ ID NO: 1985536 - RNA, 19 nt, Homo sapiens
  misc_RNA (1)...(19): siRNA sense strand
caacaugaauggcuacuuu

SEQ ID NO: 1985537 - RNA, 19 nt, Homo sapiens
  misc_RNA (1)...(19): siRNA sense strand
gaagacagaugugccauug

SEQ ID NO: 1985538 - RNA, 19 nt, Homo sapiens
  misc_RNA (1)...(19): siRNA sense strand
gaagaaagaagcuuaugaa

SEQ ID NO: 1985539 - RNA, 19 nt, Homo sapiens
  misc_RNA (1)...(19): siRNA sense strand
aagcggagcugguaccuua

SEQ ID NO: 1985540 - RNA, 19 nt, Homo sapiens
  misc_RNA (1)...(19): siRNA sense strand
uaccuuaccuggaaguaua

SEQ ID NO: 1985541 - RNA, 19 nt, Homo sapiens
  misc_RNA (1)...(19): siRNA sense strand
ggaagaagcggagcuggua

SEQ ID NO: 1985542 - RNA, 19 nt, Homo sapiens
  misc_RNA (1)...(19): siRNA sense strand
gcagggaaccgacccaauu

SEQ ID NO: 1985543 - RNA, 19 nt, Homo sapiens
  misc_RNA (1)...(19): siRNA sense strand
ccacggugcuggaggauga

SEQ ID NO: 1985544 - RNA, 19 nt, Homo sapiens
  misc_RNA (1)...(19): siRNA sense strand
gaagaggaccuggacauug

SEQ ID NO: 1985545 - RNA, 19 nt, Homo sapiens
  misc_RNA (1)...(19): siRNA sense strand
ggaaguauaaacugacaaa

SEQ ID NO: 1985546 - RNA, 19 nt, Homo sapiens
  misc_RNA (1)...(19): siRNA sense strand
ugaagaagcuacccucagu

SEQ ID NO: 1985547 - RNA, 19 nt, Homo sapiens
  misc_RNA (1)...(19): siRNA sense strand
acaacaagguccucaaugu

SEQ ID NO: 1985548 - RNA, 19 nt, Homo sapiens
  misc_RNA (1)...(19): siRNA sense strand
ggacauugcuguggauuuu

SEQ ID NO: 1985549 - RNA, 19 nt, Homo sapiens
  misc_RNA (1)...(19): siRNA sense strand
uaaaucaccugcccucucu

SEQ ID NO: 1985550 - RNA, 19 nt, Homo sapiens
  misc_RNA (1)...(19): siRNA sense strand
gaauggagaaagaugauga

SEQ ID NO: 1985551 - RNA, 19 nt, Homo sapiens
  misc_RNA (1)...(19): siRNA sense strand
ggagauuguuucggaagaa

SEQ ID NO: 1985552 - RNA, 19 nt, Homo sapiens
  misc_RNA (1)...(19): siRNA sense strand
ggaagaggaccuggacauu

SEQ ID NO: 1985553 - RNA, 19 nt, Homo sapiens
  misc_RNA (1)...(19): siRNA sense strand
ccaagugccuccauaucug

SEQ ID NO: 1985554 - RNA, 19 nt, Homo sapiens
  misc_RNA (1)...(19): siRNA sense strand
ucaagaagcacaaguucaa

SEQ ID NO: 1985555 - RNA, 19 nt, Homo sapiens
  misc_RNA (1)...(19): siRNA sense strand
cagggaaccgacccaauua

SEQ ID NO: 1985556 - RNA, 19 nt, Homo sapiens
  misc_RNA (1)...(19): siRNA sense strand
ggacguagagguguauuca

SEQ ID NO: 1985557 - RNA, 19 nt, Homo sapiens
  misc_RNA (1)...(19): siRNA sense strand
ccucagaugauaacaguuu

SEQ ID NO: 1985558 - RNA, 19 nt, Homo sapiens
  misc_RNA (1)...(19): siRNA sense strand
cagcaaaguugagggcuau

SEQ ID NO: 1985559 - RNA, 19 nt, Homo sapiens
  misc_RNA (1)...(19): siRNA sense strand
caucugcacugucaaggau

SEQ ID NO: 1985560 - RNA, 19 nt, Homo sapiens
  misc_RNA (1)...(19): siRNA sense strand
ucaagucgcagcaaaguau

SEQ ID NO: 1985561 - RNA, 19 nt, Homo sapiens
  misc_RNA (1)...(19): siRNA sense strand
guagagguguauucaaguc

SEQ ID NO: 1985562 - RNA, 19 nt, Homo sapiens
  misc_RNA (1)...(19): siRNA sense strand
caacaagguccucaaugug

SEQ ID NO: 1985563 - RNA, 19 nt, Homo sapiens
  misc_RNA (1)...(19): siRNA sense strand
guauucaagucgcagcaaa

SEQ ID NO: 1985564 - RNA, 19 nt, Homo sapiens
  misc_RNA (1)...(19): siRNA sense strand
ugagggcuauggaagugua

SEQ ID NO: 1985565 - RNA, 19 nt, Homo sapiens
  misc_RNA (1)...(19): siRNA sense strand
acaccuacguggccuuuau

SEQ ID NO: 1985566 - RNA, 19 nt, Homo sapiens
  misc_RNA (1)...(19): siRNA sense strand
gggcauccaugucauuguc

SEQ ID NO: 1985567 - RNA, 19 nt, Homo sapiens
  misc_RNA (1)...(19): siRNA sense strand
ugaagaaagaagcuuauga

SEQ ID NO: 1985568 - RNA, 19 nt, Homo sapiens
  misc_RNA (1)...(19): siRNA sense strand
gagccaauccauccaccua

SEQ ID NO: 1985569 - RNA, 19 nt, Homo sapiens
  misc_RNA (1)...(19): siRNA sense strand
agacagaugugccauugag

SEQ ID NO: 1985570 - RNA, 19 nt, Homo sapiens
  misc_RNA (1)...(19): siRNA sense strand
gcucugggauugggacaug

SEQ ID NO: 1985571 - RNA, 19 nt, Homo sapiens
  misc_RNA (1)...(19): siRNA sense strand
uggacagucugaagaaaga

SEQ ID NO: 1985572 - RNA, 19 nt, Homo sapiens
  misc_RNA (1)...(19): siRNA sense strand
ccauugagcucagcagaag

SEQ ID NO: 1985573 - RNA, 19 nt, Homo sapiens
  misc_RNA (1)...(19): siRNA sense strand
acacagagggccacaccua

SEQ ID NO: 1985574 - RNA, 19 nt, Homo sapiens
  misc_RNA (1)...(19): siRNA sense strand
agaaagaagcuuaugaagu

SEQ ID NO: 1985575 - RNA, 19 nt, Homo sapiens
  misc_RNA (1)...(19): siRNA sense strand
aguauaaacugacaaacca

SEQ ID NO: 1985576 - RNA, 19 nt, Homo sapiens
  misc_RNA (1)...(19): siRNA sense strand
ggccaaguuugcugugguu

SEQ ID NO: 1985577 - RNA, 19 nt, Homo sapiens
  misc_RNA (1)...(19): siRNA sense strand
ucaggaauguggacagucu

SEQ ID NO: 1985578 - RNA, 19 nt, Homo sapiens
  misc_RNA (1)...(19): siRNA sense strand
augcugcgcucucugcuuu

SEQ ID NO: 1985579 - RNA, 19 nt, Homo sapiens
  misc_RNA (1)...(19): siRNA sense strand
ggaugcggaugccugaaca

SEQ ID NO: 1985580 - RNA, 19 nt, Homo sapiens
  misc_RNA (1)...(19): siRNA sense strand
gacacguacucaccucaug

SEQ ID NO: 1985581 - RNA, 19 nt, Homo sapiens
  misc_RNA (1)...(19): siRNA sense strand
ucacgaggccuacuucaag

SEQ ID NO: 1985582 - RNA, 19 nt, Homo sapiens
  misc_RNA (1)...(19): siRNA sense strand
ggacccagcacuacuguac

SEQ ID NO: 1985583 - RNA, 19 nt, Homo sapiens
  misc_RNA (1)...(19): siRNA sense strand
ggugucuccucagaugaua

SEQ ID NO: 1985584 - RNA, 19 nt, Homo sapiens
  misc_RNA (1)...(19): siRNA sense strand
ggaugugguggcacuguuu

SEQ ID NO: 1985585 - RNA, 19 nt, Homo sapiens
  misc_RNA (1)...(19): siRNA sense strand
uacguggccuuuauucgaa

SEQ ID NO: 1985586 - RNA, 19 nt, Homo sapiens
  misc_RNA (1)...(19): siRNA sense strand
ucagugaagccaaugaaga

SEQ ID NO: 1985587 - RNA, 19 nt, Homo sapiens
  misc_RNA (1)...(19): siRNA sense strand
caucaucccugacguuucc

SEQ ID NO: 1985588 - RNA, 19 nt, Homo sapiens
  misc_RNA (1)...(19): siRNA sense strand
cggaaaagcucugggauug

SEQ ID NO: 1985589 - RNA, 19 nt, Homo sapiens
  misc_RNA (1)...(19): siRNA sense strand
caaguuugcugugguucug

SEQ ID NO: 1985590 - RNA, 19 nt, Homo sapiens
  misc_RNA (1)...(19): siRNA sense strand
guugagggcuauggaagug

SEQ ID NO: 1985591 - RNA, 19 nt, Homo sapiens
  misc_RNA (1)...(19): siRNA sense strand
gaacccuugugaagacucu

SEQ ID NO: 1985592 - RNA, 19 nt, Homo sapiens
  misc_RNA (1)...(19): siRNA sense strand
cacgaggccuacuucaaga

SEQ ID NO: 1985593 - RNA, 19 nt, Homo sapiens
  misc_RNA (1)...(19): siRNA sense strand
cagccucacugccacuuuc

SEQ ID NO: 1985594 - RNA, 19 nt, Homo sapiens
  misc_RNA (1)...(19): siRNA sense strand
gcucaggaauguggacagu

SEQ ID NO: 1985595 - RNA, 19 nt, Homo sapiens
  misc_RNA (1)...(19): siRNA sense strand
aagaggaccuggacauugc

SEQ ID NO: 1985596 - RNA, 19 nt, Homo sapiens
  misc_RNA (1)...(19): siRNA sense strand
cugcaucucugccuggaau

SEQ ID NO: 1985597 - RNA, 19 nt, Homo sapiens
  misc_RNA (1)...(19): siRNA sense strand
cuacguggccuuuauucga

SEQ ID NO: 1985598 - RNA, 19 nt, Homo sapiens
  misc_RNA (1)...(19): siRNA sense strand
caagucgcagcaaaguaua

SEQ ID NO: 1985599 - RNA, 19 nt, Homo sapiens
  misc_RNA (1)...(19): siRNA sense strand
gacaacaagguccucaaug

SEQ ID NO: 1985600 - RNA, 19 nt, Homo sapiens
  misc_RNA (1)...(19): siRNA sense strand
ugacggcuacuaugaggaa

SEQ ID NO: 1985601 - RNA, 19 nt, Homo sapiens
  misc_RNA (1)...(19): siRNA sense strand
gagauuguuucggaagaag

SEQ ID NO: 1985602 - RNA, 19 nt, Homo sapiens
  misc_RNA (1)...(19): siRNA sense strand
gccaagugccuccauaucu

SEQ ID NO: 1985603 - RNA, 19 nt, Homo sapiens
  misc_RNA (1)...(19): siRNA sense strand
gaauguggacagucugaag

SEQ ID NO: 1985604 - RNA, 19 nt, Homo sapiens
  misc_RNA (1)...(19): siRNA sense strand
ggaaugaccagggguauga

SEQ ID NO: 1985605 - RNA, 19 nt, Homo sapiens
  misc_RNA (1)...(19): siRNA sense strand
gggcagacacagagcugaa

SEQ ID NO: 1985606 - RNA, 19 nt, Homo sapiens
  misc_RNA (1)...(19): siRNA sense strand
ggaugugcguggcaaccau

SEQ ID NO: 1985607 - RNA, 19 nt, Homo sapiens
  misc_RNA (1)...(19): siRNA sense strand
caucgucggccucaacaug

SEQ ID NO: 1985608 - RNA, 19 nt, Homo sapiens
  misc_RNA (1)...(19): siRNA sense strand
gcuauuccucaacauggua

SEQ ID NO: 1985609 - RNA, 19 nt, Homo sapiens
  misc_RNA (1)...(19): siRNA sense strand
cagagcaagacuaugauga

SEQ ID NO: 1985610 - RNA, 19 nt, Homo sapiens
  misc_RNA (1)...(19): siRNA sense strand
agccagagcaagacuauga

SEQ ID NO: 1985611 - RNA, 19 nt, Homo sapiens
  misc_RNA (1)...(19): siRNA sense strand
ggaugaggccauggugcua

SEQ ID NO: 1985612 - RNA, 19 nt, Homo sapiens
  misc_RNA (1)...(19): siRNA sense strand
gauuguuucggaagaagaa

SEQ ID NO: 1985613 - RNA, 19 nt, Homo sapiens
  misc_RNA (1)...(19): siRNA sense strand
agaagcuuaugaaguggaa

SEQ ID NO: 1985614 - RNA, 19 nt, Homo sapiens
  misc_RNA (1)...(19): siRNA sense strand
caaaguugagggcuaugga

SEQ ID NO: 1985615 - RNA, 19 nt, Homo sapiens
  misc_RNA (1)...(19): siRNA sense strand
gacccaguccugcugaaga

SEQ ID NO: 1985616 - RNA, 19 nt, Homo sapiens
  misc_RNA (1)...(19): siRNA sense strand
gcgcuucugcagcaaaguu

SEQ ID NO: 1985617 - RNA, 19 nt, Homo sapiens
  misc_RNA (1)...(19): siRNA sense strand
acguagagguguauucaag

SEQ ID NO: 1985618 - RNA, 19 nt, Homo sapiens
  misc_RNA (1)...(19): siRNA sense strand
caucagugaagccaaugaa

SEQ ID NO: 1985619 - RNA, 19 nt, Homo sapiens
  misc_RNA (1)...(19): siRNA sense strand
uuauucgaauggagaaaga

SEQ ID NO: 1985620 - RNA, 19 nt, Homo sapiens
  misc_RNA (1)...(19): siRNA sense strand
ugaagacagaugugccauu

SEQ ID NO: 1985621 - RNA, 19 nt, Homo sapiens
  misc_RNA (1)...(19): siRNA sense strand
gauaacaguuuucauugac

SEQ ID NO: 1985622 - RNA, 19 nt, Homo sapiens
  misc_RNA (1)...(19): siRNA sense strand
gaugaggccauggugcuau

SEQ ID NO: 1985623 - RNA, 19 nt, Homo sapiens
  misc_RNA (1)...(19): siRNA sense strand
gcugcgcucucugcuuuca

SEQ ID NO: 1985624 - RNA, 19 nt, Homo sapiens
  misc_RNA (1)...(19): siRNA sense strand
gccuguggcugucauugca

SEQ ID NO: 1985625 - RNA, 19 nt, Homo sapiens
  misc_RNA (1)...(19): siRNA sense strand
ccacacccaucgaguucag

SEQ ID NO: 1985626 - RNA, 19 nt, Homo sapiens
  misc_RNA (1)...(19): siRNA sense strand
ccauggugcuauuccucaa

SEQ ID NO: 1985627 - RNA, 19 nt, Homo sapiens
  misc_RNA (1)...(19): siRNA sense strand
uggagauuguuucggaaga

SEQ ID NO: 1985628 - RNA, 19 nt, Homo sapiens
  misc_RNA (1)...(19): siRNA sense strand
gaugugguggcacuguuug

SEQ ID NO: 1985629 - RNA, 19 nt, Homo sapiens
  misc_RNA (1)...(19): siRNA sense strand
agacaacaagguccucaau

SEQ ID NO: 1985630 - RNA, 19 nt, Homo sapiens
  misc_RNA (1)...(19): siRNA sense strand
acacguacucaccucauga

SEQ ID NO: 1985631 - RNA, 19 nt, Homo sapiens
  misc_RNA (1)...(19): siRNA sense strand
guaccuuaccuggaaguau

SEQ ID NO: 1985632 - RNA, 19 nt, Homo sapiens
  misc_RNA (1)...(19): siRNA sense strand
guucuggaccacagcaaga

SEQ ID NO: 1985633 - RNA, 19 nt, Homo sapiens
  misc_RNA (1)...(19): siRNA sense strand
gccaauccauccaccuacu

SEQ ID NO: 1985634 - RNA, 19 nt, Homo sapiens
  misc_RNA (1)...(19): siRNA sense strand
gaaggugagugaagaauua

SEQ ID NO: 1985635 - RNA, 19 nt, Homo sapiens
  misc_RNA (1)...(19): siRNA sense strand
gaacaacaguuucagcaaa

SEQ ID NO: 1985636 - RNA, 19 nt, Homo sapiens
  misc_RNA (1)...(19): siRNA sense strand
cgaaagcggucuaaccaua

SEQ ID NO: 1985637 - RNA, 19 nt, Homo sapiens
  misc_RNA (1)...(19): siRNA sense strand
gaacaagccuaugaaagau

SEQ ID NO: 1985638 - RNA, 19 nt, Homo sapiens
  misc_RNA (1)...(19): siRNA sense strand
gguagcauaucacaaagua

SEQ ID NO: 1985639 - RNA, 19 nt, Homo sapiens
  misc_RNA (1)...(19): siRNA sense strand
caagagaugucuauguugu

SEQ ID NO: 1985640 - RNA, 19 nt, Homo sapiens
  misc_RNA (1)...(19): siRNA sense strand
agaagcaccucucgaaauu

SEQ ID NO: 1985641 - RNA, 19 nt, Homo sapiens
  misc_RNA (1)...(19): siRNA sense strand
ggaagaaucugagcuguac

SEQ ID NO: 1985642 - RNA, 19 nt, Homo sapiens
  misc_RNA (1)...(19): siRNA sense strand
gaacagauagaaauuguca

SEQ ID NO: 1985643 - RNA, 19 nt, Homo sapiens
  misc_RNA (1)...(19): siRNA sense strand
uaugaaagauggaaggaaa

SEQ ID NO: 1985644 - RNA, 19 nt, Homo sapiens
  misc_RNA (1)...(19): siRNA sense strand
gaagaauuaugcagcuuuc

SEQ ID NO: 1985645 - RNA, 19 nt, Homo sapiens
  misc_RNA (1)...(19): siRNA sense strand
cagcaaagacugaugaauu

SEQ ID NO: 1985646 - RNA, 19 nt, Homo sapiens
  misc_RNA (1)...(19): siRNA sense strand
aaucugagcuguaccaaug

SEQ ID NO: 1985647 - RNA, 19 nt, Homo sapiens
  misc_RNA (1)...(19): siRNA sense strand
caacaggccuaguaagaca

SEQ ID NO: 1985648 - RNA, 19 nt, Homo sapiens
  misc_RNA (1)...(19): siRNA sense strand
ucacacagguagcauauca

SEQ ID NO: 1985649 - RNA, 19 nt, Homo sapiens
  misc_RNA (1)...(19): siRNA sense strand
ggaagugaagcaaggaaua

SEQ ID NO: 1985650 - RNA, 19 nt, Homo sapiens
  misc_RNA (1)...(19): siRNA sense strand
ccaaauggaacaacaguuu

SEQ ID NO: 1985651 - RNA, 19 nt, Homo sapiens
  misc_RNA (1)...(19): siRNA sense strand
cacauuaagucagcauuua

SEQ ID NO: 1985652 - RNA, 19 nt, Homo sapiens
  misc_RNA (1)...(19): siRNA sense strand
ugaacaagccuaugaaaga

SEQ ID NO: 1985653 - RNA, 19 nt, Homo sapiens
  misc_RNA (1)...(19): siRNA sense strand
agcaaagacugaugaauuu

SEQ ID NO: 1985654 - RNA, 19 nt, Homo sapiens
  misc_RNA (1)...(19): siRNA sense strand
ggagaacuacccacaacua

SEQ ID NO: 1985655 - RNA, 19 nt, Homo sapiens
  misc_RNA (1)...(19): siRNA sense strand
gaucccaggucaaauuaug

SEQ ID NO: 1985656 - RNA, 19 nt, Homo sapiens
  misc_RNA (1)...(19): siRNA sense strand
gcaaagacugaugaauuua

SEQ ID NO: 1985657 - RNA, 19 nt, Homo sapiens
  misc_RNA (1)...(19): siRNA sense strand
gaacuacccacaacuauac

SEQ ID NO: 1985658 - RNA, 19 nt, Homo sapiens
  misc_RNA (1)...(19): siRNA sense strand
ucuaagugcuuccaggaua

SEQ ID NO: 1985659 - RNA, 19 nt, Homo sapiens
  misc_RNA (1)...(19): siRNA sense strand
ccagagcaauucuacgaaa

SEQ ID NO: 1985660 - RNA, 19 nt, Homo sapiens
  misc_RNA (1)...(19): siRNA sense strand
uaaugaagauguuggacuu

SEQ ID NO: 1985661 - RNA, 19 nt, Homo sapiens
  misc_RNA (1)...(19): siRNA sense strand
gauagcaagccuccaagua

SEQ ID NO: 1985662 - RNA, 19 nt, Homo sapiens
  misc_RNA (1)...(19): siRNA sense strand
gaucucaagcccugugaua

SEQ ID NO: 1985663 - RNA, 19 nt, Homo sapiens
  misc_RNA (1)...(19): siRNA sense strand
caggaaaugccaaauguaa

SEQ ID NO: 1985664 - RNA, 19 nt, Homo sapiens
  misc_RNA (1)...(19): siRNA sense strand
ccgaagcauugaugguuua

SEQ ID NO: 1985665 - RNA, 19 nt, Homo sapiens
  misc_RNA (1)...(19): siRNA sense strand
guaacgauguguccgguau

SEQ ID NO: 1985666 - RNA, 19 nt, Homo sapiens
  misc_RNA (1)...(19): siRNA sense strand
ccaagaagcaccucucgaa

SEQ ID NO: 1985667 - RNA, 19 nt, Homo sapiens
  misc_RNA (1)...(19): siRNA sense strand
gaaaggacuacaaggaaug

SEQ ID NO: 1985668 - RNA, 19 nt, Homo sapiens
  misc_RNA (1)...(19): siRNA sense strand
gagagcaguagcccacuua

SEQ ID NO: 1985669 - RNA, 19 nt, Homo sapiens
  misc_RNA (1)...(19): siRNA sense strand
ccucgcaguuaucgaaaua

SEQ ID NO: 1985670 - RNA, 19 nt, Homo sapiens
  misc_RNA (1)...(19): siRNA sense strand
gauaaucccaccaagaaau

SEQ ID NO: 1985671 - RNA, 19 nt, Homo sapiens
  misc_RNA (1)...(19): siRNA sense strand
ugaaaggacuacaaggaau

SEQ ID NO: 1985672 - RNA, 19 nt, Homo sapiens
  misc_RNA (1)...(19): siRNA sense strand
guagcccacuuagaaauuu

SEQ ID NO: 1985673 - RNA, 19 nt, Homo sapiens
  misc_RNA (1)...(19): siRNA sense strand
ggaugaagucagauucuuu

SEQ ID NO: 1985674 - RNA, 19 nt, Homo sapiens
  misc_RNA (1)...(19): siRNA sense strand
cuaagugcuuccaggauaa

SEQ ID NO: 1985675 - RNA, 19 nt, Homo sapiens
  misc_RNA (1)...(19): siRNA sense strand
caacaagagaugucuaugu

SEQ ID NO: 1985676 - RNA, 19 nt, Homo sapiens
  misc_RNA (1)...(19): siRNA sense strand
gcaguagcccacuuagaaa

SEQ ID NO: 1985677 - RNA, 19 nt, Homo sapiens
  misc_RNA (1)...(19): siRNA sense strand
gaccaaauguaauucugau

SEQ ID NO: 1985678 - RNA, 19 nt, Homo sapiens
  misc_RNA (1)...(19): siRNA sense strand
gaaauucgaaagcggucua

SEQ ID NO: 1985679 - RNA, 19 nt, Homo sapiens
  misc_RNA (1)...(19): siRNA sense strand
acagguagcauaucacaaa

SEQ ID NO: 1985680 - RNA, 19 nt, Homo sapiens
  misc_RNA (1)...(19): siRNA sense strand
uagcaagccuccaaguaau

SEQ ID NO: 1985681 - RNA, 19 nt, Homo sapiens
  misc_RNA (1)...(19): siRNA sense strand
ggaauuacaacccucacuu

SEQ ID NO: 1985682 - RNA, 19 nt, Homo sapiens
  misc_RNA (1)...(19): siRNA sense strand
ggaccaaauguaauucuga

SEQ ID NO: 1985683 - RNA, 19 nt, Homo sapiens
  misc_RNA (1)...(19): siRNA sense strand
aaauuucaguuguggcuuu

SEQ ID NO: 1985684 - RNA, 19 nt, Homo sapiens
  misc_RNA (1)...(19): siRNA sense strand
ggacuuagcauguggucau

SEQ ID NO: 1985685 - RNA, 19 nt, Homo sapiens
  misc_RNA (1)...(19): siRNA sense strand
auagaaggaugaagucaga

SEQ ID NO: 1985686 - RNA, 19 nt, Homo sapiens
  misc_RNA (1)...(19): siRNA sense strand
gcaaggaauagauccgaaa

SEQ ID NO: 1985687 - RNA, 19 nt, Homo sapiens
  misc_RNA (1)...(19): siRNA sense strand
gcugaucccaggucaaauu

SEQ ID NO: 1985688 - RNA, 19 nt, Homo sapiens
  misc_RNA (1)...(19): siRNA sense strand
ggacuacaaggaaugagaa

SEQ ID NO: 1985689 - RNA, 19 nt, Homo sapiens
  misc_RNA (1)...(19): siRNA sense strand
gaaagcggucuaaccauag

SEQ ID NO: 1985690 - RNA, 19 nt, Homo sapiens
  misc_RNA (1)...(19): siRNA sense strand
ccacaacuauaccauuucu

SEQ ID NO: 1985691 - RNA, 19 nt, Homo sapiens
  misc_RNA (1)...(19): siRNA sense strand
ccugaggacuucugaggaa

SEQ ID NO: 1985692 - RNA, 19 nt, Homo sapiens
  misc_RNA (1)...(19): siRNA sense strand
caaauguaauucugauguc

SEQ ID NO: 1985693 - RNA, 19 nt, Homo sapiens
  misc_RNA (1)...(19): siRNA sense strand
gaaaaccaaugcccacaug

SEQ ID NO: 1985694 - RNA, 19 nt, Homo sapiens
  misc_RNA (1)...(19): siRNA sense strand
ccaugagggucgaaguaaa

SEQ ID NO: 1985695 - RNA, 19 nt, Homo sapiens
  misc_RNA (1)...(19): siRNA sense strand
gaaaugccaaauguaacua

SEQ ID NO: 1985696 - RNA, 19 nt, Homo sapiens
  misc_RNA (1)...(19): siRNA sense strand
ccacuuagaaauuucaguu

SEQ ID NO: 1985697 - RNA, 19 nt, Homo sapiens
  misc_RNA (1)...(19): siRNA sense strand
caagaagcaccucucgaaa

SEQ ID NO: 1985698 - RNA, 19 nt, Homo sapiens
  misc_RNA (1)...(19): siRNA sense strand
ggaaaugccaaauguaacu

SEQ ID NO: 1985699 - RNA, 19 nt, Homo sapiens
  misc_RNA (1)...(19): siRNA sense strand
gagaacuacccacaacuau

SEQ ID NO: 1985700 - RNA, 19 nt, Homo sapiens
  misc_RNA (1)...(19): siRNA sense strand
gacuggagaccgaguaauu

SEQ ID NO: 1985701 - RNA, 19 nt, Homo sapiens
  misc_RNA (1)...(19): siRNA sense strand
caaaugcagggacaccuaa

SEQ ID NO: 1985702 - RNA, 19 nt, Homo sapiens
  misc_RNA (1)...(19): siRNA sense strand
gaauuacaacccucacuuc

SEQ ID NO: 1985703 - RNA, 19 nt, Homo sapiens
  misc_RNA (1)...(19): siRNA sense strand
cagcucggauucugaacaa

SEQ ID NO: 1985704 - RNA, 19 nt, Homo sapiens
  misc_RNA (1)...(19): siRNA sense strand
ccacauuaagucagcauuu

SEQ ID NO: 1985705 - RNA, 19 nt, Homo sapiens
  misc_RNA (1)...(19): siRNA sense strand
gaagugaagcaaggaauag

SEQ ID NO: 1985706 - RNA, 19 nt, Homo sapiens
  misc_RNA (1)...(19): siRNA sense strand
ucacuucccuuugagacaa

SEQ ID NO: 1985707 - RNA, 19 nt, Homo sapiens
  misc_RNA (1)...(19): siRNA sense strand
acccacaacuauaccauuu

SEQ ID NO: 1985708 - RNA, 19 nt, Homo sapiens
  misc_RNA (1)...(19): siRNA sense strand
gaaggaugaagucagauuc

SEQ ID NO: 1985709 - RNA, 19 nt, Homo sapiens
  misc_RNA (1)...(19): siRNA sense strand
gauguuggacuuagcaugu

SEQ ID NO: 1985710 - RNA, 19 nt, Homo sapiens
  misc_RNA (1)...(19): siRNA sense strand
gcaagccuccaaguaauga

SEQ ID NO: 1985711 - RNA, 19 nt, Homo sapiens
  misc_RNA (1)...(19): siRNA sense strand
agagaugucuauguuguau

SEQ ID NO: 1985712 - RNA, 19 nt, Homo sapiens
  misc_RNA (1)...(19): siRNA sense strand
ccaaauguaauucugaugu

SEQ ID NO: 1985713 - RNA, 19 nt, Homo sapiens
  misc_RNA (1)...(19): siRNA sense strand
uugaagaacuugcgaaggu

SEQ ID NO: 1985714 - RNA, 19 nt, Homo sapiens
  misc_RNA (1)...(19): siRNA sense strand
auagcaagccuccaaguaa

SEQ ID NO: 1985715 - RNA, 19 nt, Homo sapiens
  misc_RNA (1)...(19): siRNA sense strand
gaagcaccucucgaaauuu

SEQ ID NO: 1985716 - RNA, 19 nt, Homo sapiens
  misc_RNA (1)...(19): siRNA sense strand
agaacuacccacaacuaua

SEQ ID NO: 1985717 - RNA, 19 nt, Homo sapiens
  misc_RNA (1)...(19): siRNA sense strand
gcggagaacuacccacaac

SEQ ID NO: 1985718 - RNA, 19 nt, Homo sapiens
  misc_RNA (1)...(19): siRNA sense strand
ggaacaacaguuucagcaa

SEQ ID NO: 1985719 - RNA, 19 nt, Homo sapiens
  misc_RNA (1)...(19): siRNA sense strand
ccuaaguccucgcaguuau

SEQ ID NO: 1985720 - RNA, 19 nt, Homo sapiens
  misc_RNA (1)...(19): siRNA sense strand
cacaacaggccuaguaaga

SEQ ID NO: 1985721 - RNA, 19 nt, Homo sapiens
  misc_RNA (1)...(19): siRNA sense strand
ugugauaccucaucuacuc

SEQ ID NO: 1985722 - RNA, 19 nt, Homo sapiens
  misc_RNA (1)...(19): siRNA sense strand
ggccugaccugaggacuuc

SEQ ID NO: 1985723 - RNA, 19 nt, Homo sapiens
  misc_RNA (1)...(19): siRNA sense strand
gaucuucauguaaguaaug

SEQ ID NO: 1985724 - RNA, 19 nt, Homo sapiens
  misc_RNA (1)...(19): siRNA sense strand
gaggaauccaugucaguga

SEQ ID NO: 1985725 - RNA, 19 nt, Homo sapiens
  misc_RNA (1)...(19): siRNA sense strand
aaauuaugguguuguggaa

SEQ ID NO: 1985726 - RNA, 19 nt, Homo sapiens
  misc_RNA (1)...(19): siRNA sense strand
guauccaaaugaagggaaa

SEQ ID NO: 1985727 - RNA, 19 nt, Homo sapiens
  misc_RNA (1)...(19): siRNA sense strand
cugauaaucccaccaagaa

SEQ ID NO: 1985728 - RNA, 19 nt, Homo sapiens
  misc_RNA (1)...(19): siRNA sense strand
uggaaaaugugccugauaa

SEQ ID NO: 1985729 - RNA, 19 nt, Homo sapiens
  misc_RNA (1)...(19): siRNA sense strand
aaucacagcugcucaaaau

SEQ ID NO: 1985730 - RNA, 19 nt, Homo sapiens
  misc_RNA (1)...(19): siRNA sense strand
aaagauggaaggaaagguu

SEQ ID NO: 1985731 - RNA, 19 nt, Homo sapiens
  misc_RNA (1)...(19): siRNA sense strand
cagcugaucccaggucaaa

SEQ ID NO: 1985732 - RNA, 19 nt, Homo sapiens
  misc_RNA (1)...(19): siRNA sense strand
gaagauguuggacuuagca

SEQ ID NO: 1985733 - RNA, 19 nt, Homo sapiens
  misc_RNA (1)...(19): siRNA sense strand
ugaagaauuaugcagcuuu

SEQ ID NO: 1985734 - RNA, 19 nt, Homo sapiens
  misc_RNA (1)...(19): siRNA sense strand
gaaaagagcuugaagaaau

SEQ ID NO: 1985735 - RNA, 19 nt, Homo sapiens
  misc_RNA (1)...(19): siRNA sense strand
gaagaugacucaguauuug

SEQ ID NO: 1985736 - RNA, 19 nt, Homo sapiens
  misc_RNA (1)...(19): siRNA sense strand
ggaagaugacucaguauuu

SEQ ID NO: 1985737 - RNA, 19 nt, Homo sapiens
  misc_RNA (1)...(19): siRNA sense strand
gaggauaucuuggucagaa

SEQ ID NO: 1985738 - RNA, 19 nt, Homo sapiens
  misc_RNA (1)...(19): siRNA sense strand
gugggaagaugacucagua

SEQ ID NO: 1985739 - RNA, 19 nt, Homo sapiens
  misc_RNA (1)...(19): siRNA sense strand
ggagagagccaaucaccuu

SEQ ID NO: 1985740 - RNA, 19 nt, Homo sapiens
  misc_RNA (1)...(19): siRNA sense strand
ggaccuaauuauaaagauc

SEQ ID NO: 1985741 - RNA, 19 nt, Homo sapiens
  misc_RNA (1)...(19): siRNA sense strand
gaccagaccagacgaguga

SEQ ID NO: 1985742 - RNA, 19 nt, Homo sapiens
  misc_RNA (1)...(19): siRNA sense strand
ccaaguacccgcugccauu

SEQ ID NO: 1985743 - RNA, 19 nt, Homo sapiens
  misc_RNA (1)...(19): siRNA sense strand
gagagagccaaucaccuua

SEQ ID NO: 1985744 - RNA, 19 nt, Homo sapiens
  misc_RNA (1)...(19): siRNA sense strand
guaacuauguccagcucuu

SEQ ID NO: 1985745 - RNA, 19 nt, Homo sapiens
  misc_RNA (1)...(19): siRNA sense strand
guacagcucaggcuucguu

SEQ ID NO: 1985746 - RNA, 19 nt, Homo sapiens
  misc_RNA (1)...(19): siRNA sense strand
ggacucacccagaccaguu

SEQ ID NO: 1985747 - RNA, 19 nt, Homo sapiens
  misc_RNA (1)...(19): siRNA sense strand
gggaagaugacucaguauu

SEQ ID NO: 1985748 - RNA, 19 nt, Homo sapiens
  misc_RNA (1)...(19): siRNA sense strand
uggagaagcuggguuauac

SEQ ID NO: 1985749 - RNA, 19 nt, Homo sapiens
  misc_RNA (1)...(19): siRNA sense strand
gagagccaaucaccuuaca

SEQ ID NO: 1985750 - RNA, 19 nt, Homo sapiens
  misc_RNA (1)...(19): siRNA sense strand
gacagaggaggauaucuug

SEQ ID NO: 1985751 - RNA, 19 nt, Homo sapiens
  misc_RNA (1)...(19): siRNA sense strand
ugccauugauugagaaaga

SEQ ID NO: 1985752 - RNA, 19 nt, Homo sapiens
  misc_RNA (1)...(19): siRNA sense strand
agacagaggaggauaucuu

SEQ ID NO: 1985753 - RNA, 19 nt, Homo sapiens
  misc_RNA (1)...(19): siRNA sense strand
ccgcugccauugauugaga

SEQ ID NO: 1985754 - RNA, 19 nt, Homo sapiens
  misc_RNA (1)...(19): siRNA sense strand
gcagcucauucgccacauc

SEQ ID NO: 1985755 - RNA, 19 nt, Homo sapiens
  misc_RNA (1)...(19): siRNA sense strand
gaugaugacagaggcuuug

SEQ ID NO: 1985756 - RNA, 19 nt, Homo sapiens
  misc_RNA (1)...(19): siRNA sense strand
cccauuggcuggaaguaca

SEQ ID NO: 1985757 - RNA, 19 nt, Homo sapiens
  misc_RNA (1)...(19): siRNA sense strand
guauuuggagaacaugaaa

SEQ ID NO: 1985758 - RNA, 19 nt, Homo sapiens
  misc_RNA (1)...(19): siRNA sense strand
ccacggaaucuuggaauca

SEQ ID NO: 1985759 - RNA, 19 nt, Homo sapiens
  misc_RNA (1)...(19): siRNA sense strand
gguuauacccaggacauga

SEQ ID NO: 1985760 - RNA, 19 nt, Homo sapiens
  misc_RNA (1)...(19): siRNA sense strand
cagaaaagagcuugaagaa

SEQ ID NO: 1985761 - RNA, 19 nt, Homo sapiens
  misc_RNA (1)...(19): siRNA sense strand
gccgaucaccugggaauga

SEQ ID NO: 1985762 - RNA, 19 nt, Homo sapiens
  misc_RNA (1)...(19): siRNA sense strand
ccagacgagugagccuaaa

SEQ ID NO: 1985763 - RNA, 19 nt, Homo sapiens
  misc_RNA (1)...(19): siRNA sense strand
ugacucaguauuuggagaa

SEQ ID NO: 1985764 - RNA, 19 nt, Homo sapiens
  misc_RNA (1)...(19): siRNA sense strand
ugucuuagggcuuccugua

SEQ ID NO: 1985765 - RNA, 19 nt, Homo sapiens
  misc_RNA (1)...(19): siRNA sense strand
caaguacccgcugccauug

SEQ ID NO: 1985766 - RNA, 19 nt, Homo sapiens
  misc_RNA (1)...(19): siRNA sense strand
gagaaaaucagccacaaca

SEQ ID NO: 1985767 - RNA, 19 nt, Homo sapiens
  misc_RNA (1)...(19): siRNA sense strand
cugccgacaugaucaagga

SEQ ID NO: 1985768 - RNA, 19 nt, Homo sapiens
  misc_RNA (1)...(19): siRNA sense strand
cagaggcuuuguggaccua

SEQ ID NO: 1985769 - RNA, 19 nt, Homo sapiens
  misc_RNA (1)...(19): siRNA sense strand
cuuuguggaccuaauuaua

SEQ ID NO: 1985770 - RNA, 19 nt, Homo sapiens
  misc_RNA (1)...(19): siRNA sense strand
cuccagugaugaugacaga

SEQ ID NO: 1985771 - RNA, 19 nt, Homo sapiens
  misc_RNA (1)...(19): siRNA sense strand
cuucguuacugccgacaug

SEQ ID NO: 1985772 - RNA, 19 nt, Homo sapiens
  misc_RNA (1)...(19): siRNA sense strand
gccacggaaucuuggaauc

SEQ ID NO: 1985773 - RNA, 19 nt, Homo sapiens
  misc_RNA (1)...(19): siRNA sense strand
uaacuauguccagcucuug

SEQ ID NO: 1985774 - RNA, 19 nt, Homo sapiens
  misc_RNA (1)...(19): siRNA sense strand
ggcuuuguggaccuaauua

SEQ ID NO: 1985775 - RNA, 19 nt, Homo sapiens
  misc_RNA (1)...(19): siRNA sense strand
gaggcuuuguggaccuaau

SEQ ID NO: 1985776 - RNA, 19 nt, Homo sapiens
  misc_RNA (1)...(19): siRNA sense strand
cuggagaagcuggguuaua

SEQ ID NO: 1985777 - RNA, 19 nt, Homo sapiens
  misc_RNA (1)...(19): siRNA sense strand
cagaggaggauaucuuggu

SEQ ID NO: 1985778 - RNA, 19 nt, Homo sapiens
  misc_RNA (1)...(19): siRNA sense strand
aggcaucacacccauguug

SEQ ID NO: 1985779 - RNA, 19 nt, Homo sapiens
  misc_RNA (1)...(19): siRNA sense strand
caugggccacggaaucuug

SEQ ID NO: 1985780 - RNA, 19 nt, Homo sapiens
  misc_RNA (1)...(19): siRNA sense strand
guggaccuaauuauaaaga

SEQ ID NO: 1985781 - RNA, 19 nt, Homo sapiens
  misc_RNA (1)...(19): siRNA sense strand
gaagaaggcuggcaagauu

SEQ ID NO: 1985782 - RNA, 19 nt, Homo sapiens
  misc_RNA (1)...(19): siRNA sense strand
ccacagaucucacacauuu

SEQ ID NO: 1985783 - RNA, 19 nt, Homo sapiens
  misc_RNA (1)...(19): siRNA sense strand
gaaaugaaaucaggcagua

SEQ ID NO: 1985784 - RNA, 19 nt, Homo sapiens
  misc_RNA (1)...(19): siRNA sense strand
gaaaacaugucucaacuua

SEQ ID NO: 1985785 - RNA, 19 nt, Homo sapiens
  misc_RNA (1)...(19): siRNA sense strand
gaaaucaggcaguacauua

SEQ ID NO: 1985786 - RNA, 19 nt, Homo sapiens
  misc_RNA (1)...(19): siRNA sense strand
gaugacacauuucuugaua

SEQ ID NO: 1985787 - RNA, 19 nt, Homo sapiens
  misc_RNA (1)...(19): siRNA sense strand
uaacacaguugaaggaauu

SEQ ID NO: 1985788 - RNA, 19 nt, Homo sapiens
  misc_RNA (1)...(19): siRNA sense strand
gaacccaucuuaaugacaa

SEQ ID NO: 1985789 - RNA, 19 nt, Homo sapiens
  misc_RNA (1)...(19): siRNA sense strand
ccaaauauccugaagauga

SEQ ID NO: 1985790 - RNA, 19 nt, Homo sapiens
  misc_RNA (1)...(19): siRNA sense strand
ggacuggccugauugagaa

SEQ ID NO: 1985791 - RNA, 19 nt, Homo sapiens
  misc_RNA (1)...(19): siRNA sense strand
ggaaauggauaccucugaa

SEQ ID NO: 1985792 - RNA, 19 nt, Homo sapiens
  misc_RNA (1)...(19): siRNA sense strand
agagaacccuauugucuua

SEQ ID NO: 1985793 - RNA, 19 nt, Homo sapiens
  misc_RNA (1)...(19): siRNA sense strand
gaagagaacccuauugucu

SEQ ID NO: 1985794 - RNA, 19 nt, Homo sapiens
  misc_RNA (1)...(19): siRNA sense strand
gcaagcagcagcaaauauu

SEQ ID NO: 1985795 - RNA, 19 nt, Homo sapiens
  misc_RNA (1)...(19): siRNA sense strand
gcagaacccaucuuaauga

SEQ ID NO: 1985796 - RNA, 19 nt, Homo sapiens
  misc_RNA (1)...(19): siRNA sense strand
ugacaaguauggcuauuga

SEQ ID NO: 1985797 - RNA, 19 nt, Homo sapiens
  misc_RNA (1)...(19): siRNA sense strand
agaagaagaugcuaagaga

SEQ ID NO: 1985798 - RNA, 19 nt, Homo sapiens
  misc_RNA (1)...(19): siRNA sense strand
gaaagaugagccugaagua

SEQ ID NO: 1985799 - RNA, 19 nt, Homo sapiens
  misc_RNA (1)...(19): siRNA sense strand
gaaaggaggaagcaaauuc

SEQ ID NO: 1985800 - RNA, 19 nt, Homo sapiens
  misc_RNA (1)...(19): siRNA sense strand
ggagaagaauuagaauaug

SEQ ID NO: 1985801 - RNA, 19 nt, Homo sapiens
  misc_RNA (1)...(19): siRNA sense strand
ccgagaaggagaagaauua

SEQ ID NO: 1985802 - RNA, 19 nt, Homo sapiens
  misc_RNA (1)...(19): siRNA sense strand
ggaagaggaagaagagaaa

SEQ ID NO: 1985803 - RNA, 19 nt, Homo sapiens
  misc_RNA (1)...(19): siRNA sense strand
gaauccgaguuaacaguaa

SEQ ID NO: 1985804 - RNA, 19 nt, Homo sapiens
  misc_RNA (1)...(19): siRNA sense strand
gaacaacagagacuuaaag

SEQ ID NO: 1985805 - RNA, 19 nt, Homo sapiens
  misc_RNA (1)...(19): siRNA sense strand
gaacagggacauagcacuu

SEQ ID NO: 1985806 - RNA, 19 nt, Homo sapiens
  misc_RNA (1)...(19): siRNA sense strand
gaagaagaggaaauggaua

SEQ ID NO: 1985807 - RNA, 19 nt, Homo sapiens
  misc_RNA (1)...(19): siRNA sense strand
gggagaagaugcaguagag

SEQ ID NO: 1985808 - RNA, 19 nt, Homo sapiens
  misc_RNA (1)...(19): siRNA sense strand
gagauuaccuguggacgau

SEQ ID NO: 1985809 - RNA, 19 nt, Homo sapiens
  misc_RNA (1)...(19): siRNA sense strand
acagagacuuaaaggguua

SEQ ID NO: 1985810 - RNA, 19 nt, Homo sapiens
  misc_RNA (1)...(19): siRNA sense strand
ugaaauuucugagagauug

SEQ ID NO: 1985811 - RNA, 19 nt, Homo sapiens
  misc_RNA (1)...(19): siRNA sense strand
gaugaugacacauuucuug

SEQ ID NO: 1985812 - RNA, 19 nt, Homo sapiens
  misc_RNA (1)...(19): siRNA sense strand
ggaggaagcaaauucaaau

SEQ ID NO: 1985813 - RNA, 19 nt, Homo sapiens
  misc_RNA (1)...(19): siRNA sense strand
gaggauggcugacauucuc

SEQ ID NO: 1985814 - RNA, 19 nt, Homo sapiens
  misc_RNA (1)...(19): siRNA sense strand
ugauaggacuggccugauu

SEQ ID NO: 1985815 - RNA, 19 nt, Homo sapiens
  misc_RNA (1)...(19): siRNA sense strand
gcagagauuccagaacuaa

SEQ ID NO: 1985816 - RNA, 19 nt, Homo sapiens
  misc_RNA (1)...(19): siRNA sense strand
gaggaaagaacaacagaga

SEQ ID NO: 1985817 - RNA, 19 nt, Homo sapiens
  misc_RNA (1)...(19): siRNA sense strand
gaaauggauaccucugaaa

SEQ ID NO: 1985818 - RNA, 19 nt, Homo sapiens
  misc_RNA (1)...(19): siRNA sense strand
gaacucccuccaacucuaa

SEQ ID NO: 1985819 - RNA, 19 nt, Homo sapiens
  misc_RNA (1)...(19): siRNA sense strand
aaagaacaacagagacuua

SEQ ID NO: 1985820 - RNA, 19 nt, Homo sapiens
  misc_RNA (1)...(19): siRNA sense strand
gccaagaacugggaagaug

SEQ ID NO: 1985821 - RNA, 19 nt, Homo sapiens
  misc_RNA (1)...(19): siRNA sense strand
cugggaagaugaagacuuu

SEQ ID NO: 1985822 - RNA, 19 nt, Homo sapiens
  misc_RNA (1)...(19): siRNA sense strand
caacacuuucuuccaaaua

SEQ ID NO: 1985823 - RNA, 19 nt, Homo sapiens
  misc_RNA (1)...(19): siRNA sense strand
cagcagagauuccagaacu

SEQ ID NO: 1985824 - RNA, 19 nt, Homo sapiens
  misc_RNA (1)...(19): siRNA sense strand
uaagagaagacucagauga

SEQ ID NO: 1985825 - RNA, 19 nt, Homo sapiens
  misc_RNA (1)...(19): siRNA sense strand
aagcagaggugaauugaag

SEQ ID NO: 1985826 - RNA, 19 nt, Homo sapiens
  misc_RNA (1)...(19): siRNA sense strand
ggaggaagaggaagaggaa

SEQ ID NO: 1985827 - RNA, 19 nt, Homo sapiens
  misc_RNA (1)...(19): siRNA sense strand
gagaagaagcgucugaaca

SEQ ID NO: 1985828 - RNA, 19 nt, Homo sapiens
  misc_RNA (1)...(19): siRNA sense strand
caccaacacuuucuuccaa

SEQ ID NO: 1985829 - RNA, 19 nt, Homo sapiens
  misc_RNA (1)...(19): siRNA sense strand
cagcaucaaagaaugaaua

SEQ ID NO: 1985830 - RNA, 19 nt, Homo sapiens
  misc_RNA (1)...(19): siRNA sense strand
aaacaugucucaacuuagc

SEQ ID NO: 1985831 - RNA, 19 nt, Homo sapiens
  misc_RNA (1)...(19): siRNA sense strand
aagcuuacauugccucuau

SEQ ID NO: 1985832 - RNA, 19 nt, Homo sapiens
  misc_RNA (1)...(19): siRNA sense strand
uagccaagaugaugagaug

SEQ ID NO: 1985833 - RNA, 19 nt, Homo sapiens
  misc_RNA (1)...(19): siRNA sense strand
aaacuuccaccaacacuuu

SEQ ID NO: 1985834 - RNA, 19 nt, Homo sapiens
  misc_RNA (1)...(19): siRNA sense strand
gaagaagaugcuaagagaa

SEQ ID NO: 1985835 - RNA, 19 nt, Homo sapiens
  misc_RNA (1)...(19): siRNA sense strand
caagccaaguucuaucaga

SEQ ID NO: 1985836 - RNA, 19 nt, Homo sapiens
  misc_RNA (1)...(19): siRNA sense strand
agaaggagaagaauuagaa

SEQ ID NO: 1985837 - RNA, 19 nt, Homo sapiens
  misc_RNA (1)...(19): siRNA sense strand
cagagaccuuugaaucauu

SEQ ID NO: 1985838 - RNA, 19 nt, Homo sapiens
  misc_RNA (1)...(19): siRNA sense strand
ggaagaacagaauaaagau

SEQ ID NO: 1985839 - RNA, 19 nt, Homo sapiens
  misc_RNA (1)...(19): siRNA sense strand
caaauauuguuggagaaga

SEQ ID NO: 1985840 - RNA, 19 nt, Homo sapiens
  misc_RNA (1)...(19): siRNA sense strand
gcgaggaagaacagaauaa

SEQ ID NO: 1985841 - RNA, 19 nt, Homo sapiens
  misc_RNA (1)...(19): siRNA sense strand
aaacuucaccugagaacuu

SEQ ID NO: 1985842 - RNA, 19 nt, Homo sapiens
  misc_RNA (1)...(19): siRNA sense strand
gauggugugucccggaaga

SEQ ID NO: 1985843 - RNA, 19 nt, Homo sapiens
  misc_RNA (1)...(19): siRNA sense strand
gaaagccucaagccaaguu

SEQ ID NO: 1985844 - RNA, 19 nt, Homo sapiens
  misc_RNA (1)...(19): siRNA sense strand
ccagagaccuuugaaucau

SEQ ID NO: 1985845 - RNA, 19 nt, Homo sapiens
  misc_RNA (1)...(19): siRNA sense strand
gggacgaguuacugccuuu

SEQ ID NO: 1985846 - RNA, 19 nt, Homo sapiens
  misc_RNA (1)...(19): siRNA sense strand
gcaggacccucagcaucaa

SEQ ID NO: 1985847 - RNA, 19 nt, Homo sapiens
  misc_RNA (1)...(19): siRNA sense strand
gccauucacucaggaaaga

SEQ ID NO: 1985848 - RNA, 19 nt, Homo sapiens
  misc_RNA (1)...(19): siRNA sense strand
guaacacaguugaaggaau

SEQ ID NO: 1985849 - RNA, 19 nt, Homo sapiens
  misc_RNA (1)...(19): siRNA sense strand
agaugagccugaaguagaa

SEQ ID NO: 1985850 - RNA, 19 nt, Homo sapiens
  misc_RNA (1)...(19): siRNA sense strand
gaaagaacaacagagacuu

SEQ ID NO: 1985851 - RNA, 19 nt, Homo sapiens
  misc_RNA (1)...(19): siRNA sense strand
ggaaagaacaacagagacu

SEQ ID NO: 1985852 - RNA, 19 nt, Homo sapiens
  misc_RNA (1)...(19): siRNA sense strand
gcuaagagaagacucagau

SEQ ID NO: 1985853 - RNA, 19 nt, Homo sapiens
  misc_RNA (1)...(19): siRNA sense strand
caaauauccugaagaugac

SEQ ID NO: 1985854 - RNA, 19 nt, Homo sapiens
  misc_RNA (1)...(19): siRNA sense strand
gaaaagcagaggugaauug

SEQ ID NO: 1985855 - RNA, 19 nt, Homo sapiens
  misc_RNA (1)...(19): siRNA sense strand
ggaagaggaagaggaagaa

SEQ ID NO: 1985856 - RNA, 19 nt, Homo sapiens
  misc_RNA (1)...(19): siRNA sense strand
cuaaugagaaugaaagaug

SEQ ID NO: 1985857 - RNA, 19 nt, Homo sapiens
  misc_RNA (1)...(19): siRNA sense strand
agacucagaugaagaagag

SEQ ID NO: 1985858 - RNA, 19 nt, Homo sapiens
  misc_RNA (1)...(19): siRNA sense strand
gagaagacucagaugaaga

SEQ ID NO: 1985859 - RNA, 19 nt, Homo sapiens
  misc_RNA (1)...(19): siRNA sense strand
gagaagaagaugcuaagag

SEQ ID NO: 1985860 - RNA, 19 nt, Homo sapiens
  misc_RNA (1)...(19): siRNA sense strand
uaucaagacuguagcaaaa

SEQ ID NO: 1985861 - RNA, 19 nt, Homo sapiens
  misc_RNA (1)...(19): siRNA sense strand
ggaagcaguaucucggaaa

SEQ ID NO: 1985862 - RNA, 19 nt, Homo sapiens
  misc_RNA (1)...(19): siRNA sense strand
ggaugaugcugaagagaac

SEQ ID NO: 1985863 - RNA, 19 nt, Homo sapiens
  misc_RNA (1)...(19): siRNA sense strand
ggcagcacccggcucuuua

SEQ ID NO: 1985864 - RNA, 19 nt, Homo sapiens
  misc_RNA (1)...(19): siRNA sense strand
gcagaggugaauugaagaa

SEQ ID NO: 1985865 - RNA, 19 nt, Homo sapiens
  misc_RNA (1)...(19): siRNA sense strand
ggaggagcaugaaaagaaa

SEQ ID NO: 1985866 - RNA, 19 nt, Homo sapiens
  misc_RNA (1)...(19): siRNA sense strand
uagaugcguucaugucaga

SEQ ID NO: 1985867 - RNA, 19 nt, Homo sapiens
  misc_RNA (1)...(19): siRNA sense strand
gaacugggaagaugaagac

SEQ ID NO: 1985868 - RNA, 19 nt, Homo sapiens
  misc_RNA (1)...(19): siRNA sense strand
gcuugaaagggacgaguua

SEQ ID NO: 1985869 - RNA, 19 nt, Homo sapiens
  misc_RNA (1)...(19): siRNA sense strand
aggaagaacagaauaaaga

SEQ ID NO: 1985870 - RNA, 19 nt, Homo sapiens
  misc_RNA (1)...(19): siRNA sense strand
gauuaccuguggacgauuc

SEQ ID NO: 1985871 - RNA, 19 nt, Homo sapiens
  misc_RNA (1)...(19): siRNA sense strand
ggcagaacccaucuuaaug

SEQ ID NO: 1985872 - RNA, 19 nt, Homo sapiens
  misc_RNA (1)...(19): siRNA sense strand
gaaacccaaacccaugaaa

SEQ ID NO: 1985873 - RNA, 19 nt, Homo sapiens
  misc_RNA (1)...(19): siRNA sense strand
aagaugagccugaaguaga

SEQ ID NO: 1985874 - RNA, 19 nt, Homo sapiens
  misc_RNA (1)...(19): siRNA sense strand
agaacucccuccaacucua

SEQ ID NO: 1985875 - RNA, 19 nt, Homo sapiens
  misc_RNA (1)...(19): siRNA sense strand
caugaaaggaggaagcaaa

SEQ ID NO: 1985876 - RNA, 19 nt, Homo sapiens
  misc_RNA (1)...(19): siRNA sense strand
ucuauuuggugccaugaaa

SEQ ID NO: 1985877 - RNA, 19 nt, Homo sapiens
  misc_RNA (1)...(19): siRNA sense strand
gaagcaguaucucggaaaa

SEQ ID NO: 1985878 - RNA, 19 nt, Homo sapiens
  misc_RNA (1)...(19): siRNA sense strand
gccagagaccuuugaauca

SEQ ID NO: 1985879 - RNA, 19 nt, Homo sapiens
  misc_RNA (1)...(19): siRNA sense strand
uggcugacauucucucuca

SEQ ID NO: 1985880 - RNA, 19 nt, Homo sapiens
  misc_RNA (1)...(19): siRNA sense strand
uaucagagucuccaucuca

SEQ ID NO: 1985881 - RNA, 19 nt, Homo sapiens
  misc_RNA (1)...(19): siRNA sense strand
caacaggcauuuaagcaau

SEQ ID NO: 1985882 - RNA, 19 nt, Homo sapiens
  misc_RNA (1)...(19): siRNA sense strand
ugaaauagaugagauaagg

SEQ ID NO: 1985883 - RNA, 19 nt, Homo sapiens
  misc_RNA (1)...(19): siRNA sense strand
gugaugcguuggaagguua

SEQ ID NO: 1985884 - RNA, 19 nt, Homo sapiens
  misc_RNA (1)...(19): siRNA sense strand
guuggaagguuaaucgaaa

SEQ ID NO: 1985885 - RNA, 19 nt, Homo sapiens
  misc_RNA (1)...(19): siRNA sense strand
gcaaugaagauauguuuag

SEQ ID NO: 1985886 - RNA, 19 nt, Homo sapiens
  misc_RNA (1)...(19): siRNA sense strand
ggaugaaauagaugagaua

SEQ ID NO: 1985887 - RNA, 19 nt, Homo sapiens
  misc_RNA (1)...(19): siRNA sense strand
agagaaaggcugauucaau

SEQ ID NO: 1985888 - RNA, 19 nt, Homo sapiens
  misc_RNA (1)...(19): siRNA sense strand
gaugagauaaggagaguca

SEQ ID NO: 1985889 - RNA, 19 nt, Homo sapiens
  misc_RNA (1)...(19): siRNA sense strand
auacacaacaggcauuuaa

SEQ ID NO: 1985890 - RNA, 19 nt, Homo sapiens
  misc_RNA (1)...(19): siRNA sense strand
gaaauagaugagauaagga

SEQ ID NO: 1985891 - RNA, 19 nt, Homo sapiens
  misc_RNA (1)...(19): siRNA sense strand
gagauaaggagagucagaa

SEQ ID NO: 1985892 - RNA, 19 nt, Homo sapiens
  misc_RNA (1)...(19): siRNA sense strand
uaaggagagucagaaacaa

SEQ ID NO: 1985893 - RNA, 19 nt, Homo sapiens
  misc_RNA (1)...(19): siRNA sense strand
gauauacacaacaggcauu

SEQ ID NO: 1985894 - RNA, 19 nt, Homo sapiens
  misc_RNA (1)...(19): siRNA sense strand
agagucagaaacaaacuua

SEQ ID NO: 1985895 - RNA, 19 nt, Homo sapiens
  misc_RNA (1)...(19): siRNA sense strand
agagugaaccaaagcauga

SEQ ID NO: 1985896 - RNA, 19 nt, Homo sapiens
  misc_RNA (1)...(19): siRNA sense strand
uccaggaguuuaaagaaga

SEQ ID NO: 1985897 - RNA, 19 nt, Homo sapiens
  misc_RNA (1)...(19): siRNA sense strand
aaccaaagcaugaggaaga

SEQ ID NO: 1985898 - RNA, 19 nt, Homo sapiens
  misc_RNA (1)...(19): siRNA sense strand
cagaaacaaacuuauagug

SEQ ID NO: 1985899 - RNA, 19 nt, Homo sapiens
  misc_RNA (1)...(19): siRNA sense strand
aagaagauauacacaacag

SEQ ID NO: 1985900 - RNA, 19 nt, Homo sapiens
  misc_RNA (1)...(19): siRNA sense strand
ccaggaguuuaaagaagau

SEQ ID NO: 1985901 - RNA, 19 nt, Homo sapiens
  misc_RNA (1)...(19): siRNA sense strand
ggaaggaaaaccagaaaau

SEQ ID NO: 1985902 - RNA, 19 nt, Homo sapiens
  misc_RNA (1)...(19): siRNA sense strand
gaaggaaaaccagaaaaug

SEQ ID NO: 1985903 - RNA, 19 nt, Homo sapiens
  misc_RNA (1)...(19): siRNA sense strand
uagaugagauaaggagagu

SEQ ID NO: 1985904 - RNA, 19 nt, Homo sapiens
  misc_RNA (1)...(19): siRNA sense strand
uggaugaaauagaugagau

SEQ ID NO: 1985905 - RNA, 19 nt, Homo sapiens
  misc_RNA (1)...(19): siRNA sense strand
aaaugagagugaaccaaag

SEQ ID NO: 1985906 - RNA, 19 nt, Homo sapiens
  misc_RNA (1)...(19): siRNA sense strand
ggaggaggccaaagcaaaa

SEQ ID NO: 1985907 - RNA, 19 nt, Homo sapiens
  misc_RNA (1)...(19): siRNA sense strand
gagagucagaaacaaacuu

SEQ ID NO: 1985908 - RNA, 19 nt, Homo sapiens
  misc_RNA (1)...(19): siRNA sense strand
auaaggagagucagaaaca

SEQ ID NO: 1985909 - RNA, 19 nt, Homo sapiens
  misc_RNA (1)...(19): siRNA sense strand
gauaaggagagucagaaac

SEQ ID NO: 1985910 - RNA, 19 nt, Homo sapiens
  misc_RNA (1)...(19): siRNA sense strand
uuaaucgaaaccauccuua

SEQ ID NO: 1985911 - RNA, 19 nt, Homo sapiens
  misc_RNA (1)...(19): siRNA sense strand
gucagaaacaaacuuauag

SEQ ID NO: 1985912 - RNA, 19 nt, Homo sapiens
  misc_RNA (1)...(19): siRNA sense strand
aaggagagucagaaacaaa

SEQ ID NO: 1985913 - RNA, 19 nt, Homo sapiens
  misc_RNA (1)...(19): siRNA sense strand
ugagauaaggagagucaga

SEQ ID NO: 1985914 - RNA, 19 nt, Homo sapiens
  misc_RNA (1)...(19): siRNA sense strand
gagccaaagccugaggaaa

SEQ ID NO: 1985915 - RNA, 19 nt, Homo sapiens
  misc_RNA (1)...(19): siRNA sense strand
uuagagaaaggcugauuca

SEQ ID NO: 1985916 - RNA, 19 nt, Homo sapiens
  misc_RNA (1)...(19): siRNA sense strand
acaacaggcauuuaagcaa

SEQ ID NO: 1985917 - RNA, 19 nt, Homo sapiens
  misc_RNA (1)...(19): siRNA sense strand
cagaagaggaggagaagcu

SEQ ID NO: 1985918 - RNA, 19 nt, Homo sapiens
  misc_RNA (1)...(19): siRNA sense strand
aaaaugagagugaaccaaa

SEQ ID NO: 1985919 - RNA, 19 nt, Homo sapiens
  misc_RNA (1)...(19): siRNA sense strand
aggaggaggccaaagcaaa

SEQ ID NO: 1985920 - RNA, 19 nt, Homo sapiens
  misc_RNA (1)...(19): siRNA sense strand
gaggaggaggccaaagcaa

SEQ ID NO: 1985921 - RNA, 19 nt, Homo sapiens
  misc_RNA (1)...(19): siRNA sense strand
guuaaucgaaaccauccuu

SEQ ID NO: 1985922 - RNA, 19 nt, Homo sapiens
  misc_RNA (1)...(19): siRNA sense strand
gaacaauuguguaggagaa

SEQ ID NO: 1985923 - RNA, 19 nt, Homo sapiens
  misc_RNA (1)...(19): siRNA sense strand
cccaagugcugcuguauua

SEQ ID NO: 1985924 - RNA, 19 nt, Homo sapiens
  misc_RNA (1)...(19): siRNA sense strand
gaaacgcuacgaaagaaua

SEQ ID NO: 1985925 - RNA, 19 nt, Homo sapiens
  misc_RNA (1)...(19): siRNA sense strand
gcucuucacuauguauaua

SEQ ID NO: 1985926 - RNA, 19 nt, Homo sapiens
  misc_RNA (1)...(19): siRNA sense strand
guauauagcucugucuuca

SEQ ID NO: 1985927 - RNA, 19 nt, Homo sapiens
  misc_RNA (1)...(19): siRNA sense strand
caaaggaaacgcuacgaaa

SEQ ID NO: 1985928 - RNA, 19 nt, Homo sapiens
  misc_RNA (1)...(19): siRNA sense strand
gcccgugggugaacaauug

SEQ ID NO: 1985929 - RNA, 19 nt, Homo sapiens
  misc_RNA (1)...(19): siRNA sense strand
uuugugggcuuccgauuua

SEQ ID NO: 1985930 - RNA, 19 nt, Homo sapiens
  misc_RNA (1)...(19): siRNA sense strand
ggugaacaauuguguagga

SEQ ID NO: 1985931 - RNA, 19 nt, Homo sapiens
  misc_RNA (1)...(19): siRNA sense strand
caaauccacuccauaugca

SEQ ID NO: 1985932 - RNA, 19 nt, Homo sapiens
  misc_RNA (1)...(19): siRNA sense strand
caaaagauguauucggaaa

SEQ ID NO: 1985933 - RNA, 19 nt, Homo sapiens
  misc_RNA (1)...(19): siRNA sense strand
aagaauacauggagagcuu

SEQ ID NO: 1985934 - RNA, 19 nt, Homo sapiens
  misc_RNA (1)...(19): siRNA sense strand
gggaagucaucuacaagug

SEQ ID NO: 1985935 - RNA, 19 nt, Homo sapiens
  misc_RNA (1)...(19): siRNA sense strand
caagugcugcuguauuaaa

SEQ ID NO: 1985936 - RNA, 19 nt, Homo sapiens
  misc_RNA (1)...(19): siRNA sense strand
ggcaugaucugugcuguca

SEQ ID NO: 1985937 - RNA, 19 nt, Homo sapiens
  misc_RNA (1)...(19): siRNA sense strand
gggaugaaguccgucuuug

SEQ ID NO: 1985938 - RNA, 19 nt, Homo sapiens
  misc_RNA (1)...(19): siRNA sense strand
ugacgacuaugacucuuca

SEQ ID NO: 1985939 - RNA, 19 nt, Homo sapiens
  misc_RNA (1)...(19): siRNA sense strand
uaacuguaauccuguugau

SEQ ID NO: 1985940 - RNA, 19 nt, Homo sapiens
  misc_RNA (1)...(19): siRNA sense strand
ucacuccucuggaugaauc

SEQ ID NO: 1985941 - RNA, 19 nt, Homo sapiens
  misc_RNA (1)...(19): siRNA sense strand
ccuugagggucuucuguuu

SEQ ID NO: 1985942 - RNA, 19 nt, Homo sapiens
  misc_RNA (1)...(19): siRNA sense strand
ucacugcaguuauguuugg

SEQ ID NO: 1985943 - RNA, 19 nt, Homo sapiens
  misc_RNA (1)...(19): siRNA sense strand
gcacccaaauccacuccau

SEQ ID NO: 1985944 - RNA, 19 nt, Homo sapiens
  misc_RNA (1)...(19): siRNA sense strand
gggcaguacccaaaggaaa

SEQ ID NO: 1985945 - RNA, 19 nt, Homo sapiens
  misc_RNA (1)...(19): siRNA sense strand
aggaaacgcuacgaaagaa

SEQ ID NO: 1985946 - RNA, 19 nt, Homo sapiens
  misc_RNA (1)...(19): siRNA sense strand
ggucgccuaugcagacuuc

SEQ ID NO: 1985947 - RNA, 19 nt, Homo sapiens
  misc_RNA (1)...(19): siRNA sense strand
ccaaaggaaacgcuacgaa

SEQ ID NO: 1985948 - RNA, 19 nt, Homo sapiens
  misc_RNA (1)...(19): siRNA sense strand
ccaaagacuucugguacuc

SEQ ID NO: 1985949 - RNA, 19 nt, Homo sapiens
  misc_RNA (1)...(19): siRNA sense strand
cagacuucguggugacuuu

SEQ ID NO: 1985950 - RNA, 19 nt, Homo sapiens
  misc_RNA (1)...(19): siRNA sense strand
cgauaacuguaauccuguu

SEQ ID NO: 1985951 - RNA, 19 nt, Homo sapiens
  misc_RNA (1)...(19): siRNA sense strand
ccaaauccacuccauaugc

SEQ ID NO: 1985952 - RNA, 19 nt, Homo sapiens
  misc_RNA (1)...(19): siRNA sense strand
ucaacggggucaucuuuaa

SEQ ID NO: 1985953 - RNA, 19 nt, Homo sapiens
  misc_RNA (1)...(19): siRNA sense strand
aaagugagaagcccacaug

SEQ ID NO: 1985954 - RNA, 19 nt, Homo sapiens
  misc_RNA (1)...(19): siRNA sense strand
aaggaaacgcuacgaaaga

SEQ ID NO: 1985955 - RNA, 19 nt, Homo sapiens
  misc_RNA (1)...(19): siRNA sense strand
uuugugcucuucacuaugu

SEQ ID NO: 1985956 - RNA, 19 nt, Homo sapiens
  misc_RNA (1)...(19): siRNA sense strand
uccaugcucugauccuuug

SEQ ID NO: 1985957 - RNA, 19 nt, Homo sapiens
  misc_RNA (1)...(19): siRNA sense strand
ggaaacgcuacgaaagaau

SEQ ID NO: 1985958 - RNA, 19 nt, Homo sapiens
  misc_RNA (1)...(19): siRNA sense strand
ggaugaaguccgucuuugg

SEQ ID NO: 1985959 - RNA, 19 nt, Homo sapiens
  misc_RNA (1)...(19): siRNA sense strand
cacuuucacugcaguuaug

SEQ ID NO: 1985960 - RNA, 19 nt, Homo sapiens
  misc_RNA (1)...(19): siRNA sense strand
aaaggaaacgcuacgaaag

SEQ ID NO: 1985961 - RNA, 19 nt, Homo sapiens
  misc_RNA (1)...(19): siRNA sense strand
auauagcucugucuucagu

SEQ ID NO: 1985962 - RNA, 19 nt, Homo sapiens
  misc_RNA (1)...(19): siRNA sense strand
ucaccuccgauaacuguaa

SEQ ID NO: 1985963 - RNA, 19 nt, Homo sapiens
  misc_RNA (1)...(19): siRNA sense strand
gcaacgacgagacggagau

SEQ ID NO: 1985964 - RNA, 19 nt, Homo sapiens
  misc_RNA (1)...(19): siRNA sense strand
gaugggaagggaugaaguc

SEQ ID NO: 1985965 - RNA, 19 nt, Homo sapiens
  misc_RNA (1)...(19): siRNA sense strand
gcugcugccuuccaaagac

SEQ ID NO: 1985966 - RNA, 19 nt, Homo sapiens
  misc_RNA (1)...(19): siRNA sense strand
ggucaacggggucaucuuu

SEQ ID NO: 1985967 - RNA, 19 nt, Homo sapiens
  misc_RNA (1)...(19): siRNA sense strand
ccaagugcugcuguauuaa

SEQ ID NO: 1985968 - RNA, 19 nt, Homo sapiens
  misc_RNA (1)...(19): siRNA sense strand
gauaacuguaauccuguug

SEQ ID NO: 1985969 - RNA, 19 nt, Homo sapiens
  misc_RNA (1)...(19): siRNA sense strand
acccaaauccacuccauau

SEQ ID NO: 1985970 - RNA, 19 nt, Homo sapiens
  misc_RNA (1)...(19): siRNA sense strand
ucaugcugcugccuuccaa

SEQ ID NO: 1985971 - RNA, 19 nt, Homo sapiens
  misc_RNA (1)...(19): siRNA sense strand
uuucacugcaguuauguuu

SEQ ID NO: 1985972 - RNA, 19 nt, Homo sapiens
  misc_RNA (1)...(19): siRNA sense strand
ucacuuucacugcaguuau

SEQ ID NO: 1985973 - RNA, 19 nt, Homo sapiens
  misc_RNA (1)...(19): siRNA sense strand
gcaguaccagcauguguua

SEQ ID NO: 1985974 - RNA, 19 nt, Homo sapiens
  misc_RNA (1)...(19): siRNA sense strand
ggaacgagugcgugcagua

SEQ ID NO: 1985975 - RNA, 19 nt, Homo sapiens
  misc_RNA (1)...(19): siRNA sense strand
gggcaaggcggaagucaau

SEQ ID NO: 1985976 - RNA, 19 nt, Homo sapiens
  misc_RNA (1)...(19): siRNA sense strand
gcaaggcggaagucaauca

SEQ ID NO: 1985977 - RNA, 19 nt, Homo sapiens
  misc_RNA (1)...(19): siRNA sense strand
gcuguauuguggaguauca

SEQ ID NO: 1985978 - RNA, 19 nt, Homo sapiens
  misc_RNA (1)...(19): siRNA sense strand
aggcggaagucaaucaaga

SEQ ID NO: 1985979 - RNA, 19 nt, Homo sapiens
  misc_RNA (1)...(19): siRNA sense strand
gcagaugccaguccaacca

SEQ ID NO: 1985980 - RNA, 19 nt, Homo sapiens
  misc_RNA (1)...(19): siRNA sense strand
gaacgagugcgugcaguac

SEQ ID NO: 1985981 - RNA, 19 nt, Homo sapiens
  misc_RNA (1)...(19): siRNA sense strand
gcggaagucaaucaagaga

SEQ ID NO: 1985982 - RNA, 19 nt, Homo sapiens
  misc_RNA (1)...(19): siRNA sense strand
ggagaaugaccagcugauc

SEQ ID NO: 1985983 - RNA, 19 nt, Homo sapiens
  misc_RNA (1)...(19): siRNA sense strand
gcugauccgcuguauugug

SEQ ID NO: 1985984 - RNA, 19 nt, Homo sapiens
  misc_RNA (1)...(19): siRNA sense strand
ucauuuauuuggcuaccau

SEQ ID NO: 1985985 - RNA, 19 nt, Homo sapiens
  misc_RNA (1)...(19): siRNA sense strand
uuauuuggcuaccauugca

SEQ ID NO: 1985986 - RNA, 19 nt, Homo sapiens
  misc_RNA (1)...(19): siRNA sense strand
caaggcggaagucaaucaa

SEQ ID NO: 1985987 - RNA, 19 nt, Homo sapiens
  misc_RNA (1)...(19): siRNA sense strand
guccaaccagcacuucaaa

SEQ ID NO: 1985988 - RNA, 19 nt, Homo sapiens
  misc_RNA (1)...(19): siRNA sense strand
gaagaacaguugagaauug

SEQ ID NO: 1985989 - RNA, 19 nt, Homo sapiens
  misc_RNA (1)...(19): siRNA sense strand
gaacaaagaaagauucaug

SEQ ID NO: 1985990 - RNA, 19 nt, Homo sapiens
  misc_RNA (1)...(19): siRNA sense strand
aaacuguccuucucauuaa

SEQ ID NO: 1985991 - RNA, 19 nt, Homo sapiens
  misc_RNA (1)...(19): siRNA sense strand
ggaugaaacuagaacaaga

SEQ ID NO: 1985992 - RNA, 19 nt, Homo sapiens
  misc_RNA (1)...(19): siRNA sense strand
ccaaaucucgggaaaguaa

SEQ ID NO: 1985993 - RNA, 19 nt, Homo sapiens
  misc_RNA (1)...(19): siRNA sense strand
ggaagaaacagcacgaaga

SEQ ID NO: 1985994 - RNA, 19 nt, Homo sapiens
  misc_RNA (1)...(19): siRNA sense strand
gcagcaagcacaacaagaa

SEQ ID NO: 1985995 - RNA, 19 nt, Homo sapiens
  misc_RNA (1)...(19): siRNA sense strand
ggaugaaauugaacgagaa

SEQ ID NO: 1985996 - RNA, 19 nt, Homo sapiens
  misc_RNA (1)...(19): siRNA sense strand
gaacgacaacgucaacaga

SEQ ID NO: 1985997 - RNA, 19 nt, Homo sapiens
  misc_RNA (1)...(19): siRNA sense strand
gaagaacaaagaaagauuc

SEQ ID NO: 1985998 - RNA, 19 nt, Homo sapiens
  misc_RNA (1)...(19): siRNA sense strand
gaaacuagaacaagaacga

SEQ ID NO: 1985999 - RNA, 19 nt, Homo sapiens
  misc_RNA (1)...(19): siRNA sense strand
guugagaauuguugaagaa

SEQ ID NO: 1986000 - RNA, 19 nt, Homo sapiens
  misc_RNA (1)...(19): siRNA sense strand
uagaagaauugguagcaaa

SEQ ID NO: 1986001 - RNA, 19 nt, Homo sapiens
  misc_RNA (1)...(19): siRNA sense strand
agaaacagcacgaagagua

SEQ ID NO: 1986002 - RNA, 19 nt, Homo sapiens
  misc_RNA (1)...(19): siRNA sense strand
gcagcagccuggacgagaa

SEQ ID NO: 1986003 - RNA, 19 nt, Homo sapiens
  misc_RNA (1)...(19): siRNA sense strand
gagaggaggaggagaagaa

SEQ ID NO: 1986004 - RNA, 19 nt, Homo sapiens
  misc_RNA (1)...(19): siRNA sense strand
gaagaaacagcacgaagag

SEQ ID NO: 1986005 - RNA, 19 nt, Homo sapiens
  misc_RNA (1)...(19): siRNA sense strand
gaggaaaggaugaaacuag

SEQ ID NO: 1986006 - RNA, 19 nt, Homo sapiens
  misc_RNA (1)...(19): siRNA sense strand
gaaaaggaaggaugaaauu

SEQ ID NO: 1986007 - RNA, 19 nt, Homo sapiens
  misc_RNA (1)...(19): siRNA sense strand
gaagaacucgagcgacaga

SEQ ID NO: 1986008 - RNA, 19 nt, Homo sapiens
  misc_RNA (1)...(19): siRNA sense strand
aaggaaggaugaaauugaa

SEQ ID NO: 1986009 - RNA, 19 nt, Homo sapiens
  misc_RNA (1)...(19): siRNA sense strand
aaaggaaggaugaaauuga

SEQ ID NO: 1986010 - RNA, 19 nt, Homo sapiens
  misc_RNA (1)...(19): siRNA sense strand
gaugaaacuagaacaagaa

SEQ ID NO: 1986011 - RNA, 19 nt, Homo sapiens
  misc_RNA (1)...(19): siRNA sense strand
gugaggagcuagagcgaau

SEQ ID NO: 1986012 - RNA, 19 nt, Homo sapiens
  misc_RNA (1)...(19): siRNA sense strand
gcacgaagaguagaagaau

SEQ ID NO: 1986013 - RNA, 19 nt, Homo sapiens
  misc_RNA (1)...(19): siRNA sense strand
gaaacagcacgaagaguag

SEQ ID NO: 1986014 - RNA, 19 nt, Homo sapiens
  misc_RNA (1)...(19): siRNA sense strand
caacagaaagaagaacaaa

SEQ ID NO: 1986015 - RNA, 19 nt, Homo sapiens
  misc_RNA (1)...(19): siRNA sense strand
gaauacuggaagagaauaa

SEQ ID NO: 1986016 - RNA, 19 nt, Homo sapiens
  misc_RNA (1)...(19): siRNA sense strand
ggaggaagaacuggagaaa

SEQ ID NO: 1986017 - RNA, 19 nt, Homo sapiens
  misc_RNA (1)...(19): siRNA sense strand
guagaagaauugguagcaa

SEQ ID NO: 1986018 - RNA, 19 nt, Homo sapiens
  misc_RNA (1)...(19): siRNA sense strand
ggaaaggaugaaacuagaa

SEQ ID NO: 1986019 - RNA, 19 nt, Homo sapiens
  misc_RNA (1)...(19): siRNA sense strand
gaaagauucaugaggaaag

SEQ ID NO: 1986020 - RNA, 19 nt, Homo sapiens
  misc_RNA (1)...(19): siRNA sense strand
aagaguagaagaauuggua

SEQ ID NO: 1986021 - RNA, 19 nt, Homo sapiens
  misc_RNA (1)...(19): siRNA sense strand
ggaagagaauaaccgaaaa

SEQ ID NO: 1986022 - RNA, 19 nt, Homo sapiens
  misc_RNA (1)...(19): siRNA sense strand
gccaaacgcaucauggaaa

SEQ ID NO: 1986023 - RNA, 19 nt, Homo sapiens
  misc_RNA (1)...(19): siRNA sense strand
aagaaagauucaugaggaa

SEQ ID NO: 1986024 - RNA, 19 nt, Homo sapiens
  misc_RNA (1)...(19): siRNA sense strand
aggaaaggaugaaacuaga

SEQ ID NO: 1986025 - RNA, 19 nt, Homo sapiens
  misc_RNA (1)...(19): siRNA sense strand
ugaaauugaacgagaaguu

SEQ ID NO: 1986026 - RNA, 19 nt, Homo sapiens
  misc_RNA (1)...(19): siRNA sense strand
gaaaggaugaaacuagaac

SEQ ID NO: 1986027 - RNA, 19 nt, Homo sapiens
  misc_RNA (1)...(19): siRNA sense strand
gagcgaauacuggaagaga

SEQ ID NO: 1986028 - RNA, 19 nt, Homo sapiens
  misc_RNA (1)...(19): siRNA sense strand
cacgaagaguagaagaauu

SEQ ID NO: 1986029 - RNA, 19 nt, Homo sapiens
  misc_RNA (1)...(19): siRNA sense strand
ccgaagaacaguugagaau

SEQ ID NO: 1986030 - RNA, 19 nt, Homo sapiens
  misc_RNA (1)...(19): siRNA sense strand
uggaagagaauaaccgaaa

SEQ ID NO: 1986031 - RNA, 19 nt, Homo sapiens
  misc_RNA (1)...(19): siRNA sense strand
cgaagaacaguugagaauu

SEQ ID NO: 1986032 - RNA, 19 nt, Homo sapiens
  misc_RNA (1)...(19): siRNA sense strand
aaaacuguccuucucauua

SEQ ID NO: 1986033 - RNA, 19 nt, Homo sapiens
  misc_RNA (1)...(19): siRNA sense strand
ggagcuagagcgaauacug

SEQ ID NO: 1986034 - RNA, 19 nt, Homo sapiens
  misc_RNA (1)...(19): siRNA sense strand
acgacaacgucaacagaaa

SEQ ID NO: 1986035 - RNA, 19 nt, Homo sapiens
  misc_RNA (1)...(19): siRNA sense strand
caaacuggccgaagaacag

SEQ ID NO: 1986036 - RNA, 19 nt, Homo sapiens
  misc_RNA (1)...(19): siRNA sense strand
acgaagaguagaagaauug

SEQ ID NO: 1986037 - RNA, 19 nt, Homo sapiens
  misc_RNA (1)...(19): siRNA sense strand
gcgaauacuggaagagaau

SEQ ID NO: 1986038 - RNA, 19 nt, Homo sapiens
  misc_RNA (1)...(19): siRNA sense strand
ccaaacgcaucauggaaaa

SEQ ID NO: 1986039 - RNA, 19 nt, Homo sapiens
  misc_RNA (1)...(19): siRNA sense strand
aagaacaguugagaauugu

SEQ ID NO: 1986040 - RNA, 19 nt, Homo sapiens
  misc_RNA (1)...(19): siRNA sense strand
gacaacgucaacagaaaga

SEQ ID NO: 1986041 - RNA, 19 nt, Homo sapiens
  misc_RNA (1)...(19): siRNA sense strand
ggaggaagaacgugcaaaa

SEQ ID NO: 1986042 - RNA, 19 nt, Homo sapiens
  misc_RNA (1)...(19): siRNA sense strand
gaaggaugaaauugaacga

SEQ ID NO: 1986043 - RNA, 19 nt, Homo sapiens
  misc_RNA (1)...(19): siRNA sense strand
ggaagccaaacgcaucaug

SEQ ID NO: 1986044 - RNA, 19 nt, Homo sapiens
  misc_RNA (1)...(19): siRNA sense strand
gaggaagccaaacgcauca

SEQ ID NO: 1986045 - RNA, 19 nt, Homo sapiens
  misc_RNA (1)...(19): siRNA sense strand
guugaagaacaaagaaaga

SEQ ID NO: 1986046 - RNA, 19 nt, Homo sapiens
  misc_RNA (1)...(19): siRNA sense strand
gcuccaagcacaccaagag

SEQ ID NO: 1986047 - RNA, 19 nt, Homo sapiens
  misc_RNA (1)...(19): siRNA sense strand
gagcagcaagcacaacaag

SEQ ID NO: 1986048 - RNA, 19 nt, Homo sapiens
  misc_RNA (1)...(19): siRNA sense strand
cagcaagaaauagaagaaa

SEQ ID NO: 1986049 - RNA, 19 nt, Homo sapiens
  misc_RNA (1)...(19): siRNA sense strand
caacgucaacagaaagaag

SEQ ID NO: 1986050 - RNA, 19 nt, Homo sapiens
  misc_RNA (1)...(19): siRNA sense strand
cgaauacuggaagagaaua

SEQ ID NO: 1986051 - RNA, 19 nt, Homo sapiens
  misc_RNA (1)...(19): siRNA sense strand
caagaacgacaacgucaac

SEQ ID NO: 1986052 - RNA, 19 nt, Homo sapiens
  misc_RNA (1)...(19): siRNA sense strand
ggagaagaaagcggaguuc

SEQ ID NO: 1986053 - RNA, 19 nt, Homo sapiens
  misc_RNA (1)...(19): siRNA sense strand
cgacaacgucaacagaaag

SEQ ID NO: 1986054 - RNA, 19 nt, Homo sapiens
  misc_RNA (1)...(19): siRNA sense strand
aaacucaucgaggaagaaa

SEQ ID NO: 1986055 - RNA, 19 nt, Homo sapiens
  misc_RNA (1)...(19): siRNA sense strand
ugcagaagcacaagccaaa

SEQ ID NO: 1986056 - RNA, 19 nt, Homo sapiens
  misc_RNA (1)...(19): siRNA sense strand
aggaagaacuggagaaaag

SEQ ID NO: 1986057 - RNA, 19 nt, Homo sapiens
  misc_RNA (1)...(19): siRNA sense strand
uagagcgaauacuggaaga

SEQ ID NO: 1986058 - RNA, 19 nt, Homo sapiens
  misc_RNA (1)...(19): siRNA sense strand
acagcaagaaauagaagaa

SEQ ID NO: 1986059 - RNA, 19 nt, Homo sapiens
  misc_RNA (1)...(19): siRNA sense strand
gaugaaauugaacgagaag

SEQ ID NO: 1986060 - RNA, 19 nt, Homo sapiens
  misc_RNA (1)...(19): siRNA sense strand
aaagauucaugaggaaagg

SEQ ID NO: 1986061 - RNA, 19 nt, Homo sapiens
  misc_RNA (1)...(19): siRNA sense strand
ccaaacuggccgaagaaca

SEQ ID NO: 1986062 - RNA, 19 nt, Homo sapiens
  misc_RNA (1)...(19): siRNA sense strand
caaaucucgggaaaguaaa

SEQ ID NO: 1986063 - RNA, 19 nt, Homo sapiens
  misc_RNA (1)...(19): siRNA sense strand
agaagaaagcggaguucga

SEQ ID NO: 1986064 - RNA, 19 nt, Homo sapiens
  misc_RNA (1)...(19): siRNA sense strand
gaggaagaaacagcacgaa

SEQ ID NO: 1986065 - RNA, 19 nt, Homo sapiens
  misc_RNA (1)...(19): siRNA sense strand
cgacagcaagaaauagaag

SEQ ID NO: 1986066 - RNA, 19 nt, Homo sapiens
  misc_RNA (1)...(19): siRNA sense strand
ucaacagaaagaagaacaa

SEQ ID NO: 1986067 - RNA, 19 nt, Homo sapiens
  misc_RNA (1)...(19): siRNA sense strand
gacagcaagaaauagaaga

SEQ ID NO: 1986068 - RNA, 19 nt, Homo sapiens
  misc_RNA (1)...(19): siRNA sense strand
ccaagagcagcaagcacaa

SEQ ID NO: 1986069 - RNA, 19 nt, Homo sapiens
  misc_RNA (1)...(19): siRNA sense strand
aauucgacagcaagaaaua

SEQ ID NO: 1986070 - RNA, 19 nt, Homo sapiens
  misc_RNA (1)...(19): siRNA sense strand
ccaagaagcuuuagaaauu

SEQ ID NO: 1986071 - RNA, 19 nt, Homo sapiens
  misc_RNA (1)...(19): siRNA sense strand
gagacuauguuucuaagua

SEQ ID NO: 1986072 - RNA, 19 nt, Homo sapiens
  misc_RNA (1)...(19): siRNA sense strand
uaagagcacugacauguuu

SEQ ID NO: 1986073 - RNA, 19 nt, Homo sapiens
  misc_RNA (1)...(19): siRNA sense strand
ggacuuaaauaaagcaaga

SEQ ID NO: 1986074 - RNA, 19 nt, Homo sapiens
  misc_RNA (1)...(19): siRNA sense strand
gcacagcucuggcucuuuc

SEQ ID NO: 1986075 - RNA, 19 nt, Homo sapiens
  misc_RNA (1)...(19): siRNA sense strand
gaaaguaucaucaagugaa

SEQ ID NO: 1986076 - RNA, 19 nt, Homo sapiens
  misc_RNA (1)...(19): siRNA sense strand
ggaaguagcauaacuguca

SEQ ID NO: 1986077 - RNA, 19 nt, Homo sapiens
  misc_RNA (1)...(19): siRNA sense strand
gacacaaacuuaauuccua

SEQ ID NO: 1986078 - RNA, 19 nt, Homo sapiens
  misc_RNA (1)...(19): siRNA sense strand
cagaaaugaugccuguuua

SEQ ID NO: 1986079 - RNA, 19 nt, Homo sapiens
  misc_RNA (1)...(19): siRNA sense strand
caaauugacucuggaagaa

SEQ ID NO: 1986080 - RNA, 19 nt, Homo sapiens
  misc_RNA (1)...(19): siRNA sense strand
gaaccaggauauaacaguu

SEQ ID NO: 1986081 - RNA, 19 nt, Homo sapiens
  misc_RNA (1)...(19): siRNA sense strand
ugaugaaggugauaacuuu

SEQ ID NO: 1986082 - RNA, 19 nt, Homo sapiens
  misc_RNA (1)...(19): siRNA sense strand
ccaccugccucaaagauaa

SEQ ID NO: 1986083 - RNA, 19 nt, Homo sapiens
  misc_RNA (1)...(19): siRNA sense strand
gaaaugaugccuguuuauu

SEQ ID NO: 1986084 - RNA, 19 nt, Homo sapiens
  misc_RNA (1)...(19): siRNA sense strand
ugaaagagacccuauaaga

SEQ ID NO: 1986085 - RNA, 19 nt, Homo sapiens
  misc_RNA (1)...(19): siRNA sense strand
gaaagaauuugcaaacacu

SEQ ID NO: 1986086 - RNA, 19 nt, Homo sapiens
  misc_RNA (1)...(19): siRNA sense strand
ggucauaauucaacacaga

SEQ ID NO: 1986087 - RNA, 19 nt, Homo sapiens
  misc_RNA (1)...(19): siRNA sense strand
caaaaggacuggauuacua

SEQ ID NO: 1986088 - RNA, 19 nt, Homo sapiens
  misc_RNA (1)...(19): siRNA sense strand
gcacacacuugccuauguu

SEQ ID NO: 1986089 - RNA, 19 nt, Homo sapiens
  misc_RNA (1)...(19): siRNA sense strand
ucaacuaccugaaaguauu

SEQ ID NO: 1986090 - RNA, 19 nt, Homo sapiens
  misc_RNA (1)...(19): siRNA sense strand
guacaaugcugcgucauau

SEQ ID NO: 1986091 - RNA, 19 nt, Homo sapiens
  misc_RNA (1)...(19): siRNA sense strand
aagaagaacuacagaaaug

SEQ ID NO: 1986092 - RNA, 19 nt, Homo sapiens
  misc_RNA (1)...(19): siRNA sense strand
ugaagggacuguaaagaga

SEQ ID NO: 1986093 - RNA, 19 nt, Homo sapiens
  misc_RNA (1)...(19): siRNA sense strand
gaaagagacccuauaagag

SEQ ID NO: 1986094 - RNA, 19 nt, Homo sapiens
  misc_RNA (1)...(19): siRNA sense strand
ccgaagaacugaaggaugu

SEQ ID NO: 1986095 - RNA, 19 nt, Homo sapiens
  misc_RNA (1)...(19): siRNA sense strand
cagaaacgacacaaacuua

SEQ ID NO: 1986096 - RNA, 19 nt, Homo sapiens
  misc_RNA (1)...(19): siRNA sense strand
ugacaacuauagcaugaaa

SEQ ID NO: 1986097 - RNA, 19 nt, Homo sapiens
  misc_RNA (1)...(19): siRNA sense strand
gccgaaaugcauuaaauua

SEQ ID NO: 1986098 - RNA, 19 nt, Homo sapiens
  misc_RNA (1)...(19): siRNA sense strand
gaagaaagagagucugaau

SEQ ID NO: 1986099 - RNA, 19 nt, Homo sapiens
  misc_RNA (1)...(19): siRNA sense strand
aaaugaauguggacaacua

SEQ ID NO: 1986100 - RNA, 19 nt, Homo sapiens
  misc_RNA (1)...(19): siRNA sense strand
caacaacaacagaggauuu

SEQ ID NO: 1986101 - RNA, 19 nt, Homo sapiens
  misc_RNA (1)...(19): siRNA sense strand
aaacacuucuggaugauga

SEQ ID NO: 1986102 - RNA, 19 nt, Homo sapiens
  misc_RNA (1)...(19): siRNA sense strand
ggaaagaauuugcaaacac

SEQ ID NO: 1986103 - RNA, 19 nt, Homo sapiens
  misc_RNA (1)...(19): siRNA sense strand
gggcaacucugcaagaauc

SEQ ID NO: 1986104 - RNA, 19 nt, Homo sapiens
  misc_RNA (1)...(19): siRNA sense strand
gcaacuuggucauaauuca

SEQ ID NO: 1986105 - RNA, 19 nt, Homo sapiens
  misc_RNA (1)...(19): siRNA sense strand
gaucacauguggagauuac

SEQ ID NO: 1986106 - RNA, 19 nt, Homo sapiens
  misc_RNA (1)...(19): siRNA sense strand
gaaaaccauuugaguauga

SEQ ID NO: 1986107 - RNA, 19 nt, Homo sapiens
  misc_RNA (1)...(19): siRNA sense strand
ccugaaaguuggaaugaaa

SEQ ID NO: 1986108 - RNA, 19 nt, Homo sapiens
  misc_RNA (1)...(19): siRNA sense strand
aauaugggauguucaugua

SEQ ID NO: 1986109 - RNA, 19 nt, Homo sapiens
  misc_RNA (1)...(19): siRNA sense strand
uaaaccaggugaaauguca

SEQ ID NO: 1986110 - RNA, 19 nt, Homo sapiens
  misc_RNA (1)...(19): siRNA sense strand
ugaaucagcuaagucaauu

SEQ ID NO: 1986111 - RNA, 19 nt, Homo sapiens
  misc_RNA (1)...(19): siRNA sense strand
gacuuucccuguucaauug

SEQ ID NO: 1986112 - RNA, 19 nt, Homo sapiens
  misc_RNA (1)...(19): siRNA sense strand
ggacuuucccuguucaauu

SEQ ID NO: 1986113 - RNA, 19 nt, Homo sapiens
  misc_RNA (1)...(19): siRNA sense strand
aaugaugccuguuuauuug

SEQ ID NO: 1986114 - RNA, 19 nt, Homo sapiens
  misc_RNA (1)...(19): siRNA sense strand
gaaugaaagagacccuaua

SEQ ID NO: 1986115 - RNA, 19 nt, Homo sapiens
  misc_RNA (1)...(19): siRNA sense strand
cgacgaagacauuaucaaa

SEQ ID NO: 1986116 - RNA, 19 nt, Homo sapiens
  misc_RNA (1)...(19): siRNA sense strand
caaccagacuaacaagaga

SEQ ID NO: 1986117 - RNA, 19 nt, Homo sapiens
  misc_RNA (1)...(19): siRNA sense strand
gauaaccaccugccucaaa

SEQ ID NO: 1986118 - RNA, 19 nt, Homo sapiens
  misc_RNA (1)...(19): siRNA sense strand
ggauaaagaaagagaauuc

SEQ ID NO: 1986119 - RNA, 19 nt, Homo sapiens
  misc_RNA (1)...(19): siRNA sense strand
uacaggaacugacagacua

SEQ ID NO: 1986120 - RNA, 19 nt, Homo sapiens
  misc_RNA (1)...(19): siRNA sense strand
caagagagacuauguuucu

SEQ ID NO: 1986121 - RNA, 19 nt, Homo sapiens
  misc_RNA (1)...(19): siRNA sense strand
uaugacaacuauagcauga

SEQ ID NO: 1986122 - RNA, 19 nt, Homo sapiens
  misc_RNA (1)...(19): siRNA sense strand
ggagaaugguaauguucaa

SEQ ID NO: 1986123 - RNA, 19 nt, Homo sapiens
  misc_RNA (1)...(19): siRNA sense strand
gugaaaguaucaucaagug

SEQ ID NO: 1986124 - RNA, 19 nt, Homo sapiens
  misc_RNA (1)...(19): siRNA sense strand
cgaaaugcauuaaauuagg

SEQ ID NO: 1986125 - RNA, 19 nt, Homo sapiens
  misc_RNA (1)...(19): siRNA sense strand
ggacaauuccuacucugaa

SEQ ID NO: 1986126 - RNA, 19 nt, Homo sapiens
  misc_RNA (1)...(19): siRNA sense strand
ggaguacccuuggcucaga

SEQ ID NO: 1986127 - RNA, 19 nt, Homo sapiens
  misc_RNA (1)...(19): siRNA sense strand
guggagaaauuggguauga

SEQ ID NO: 1986128 - RNA, 19 nt, Homo sapiens
  misc_RNA (1)...(19): siRNA sense strand
agaaagagagucugaauuc

SEQ ID NO: 1986129 - RNA, 19 nt, Homo sapiens
  misc_RNA (1)...(19): siRNA sense strand
ggacuggauuacuaacaug

SEQ ID NO: 1986130 - RNA, 19 nt, Homo sapiens
  misc_RNA (1)...(19): siRNA sense strand
ucagaaaguugaauuuguc

SEQ ID NO: 1986131 - RNA, 19 nt, Homo sapiens
  misc_RNA (1)...(19): siRNA sense strand
gaacugacagacuacaaau

SEQ ID NO: 1986132 - RNA, 19 nt, Homo sapiens
  misc_RNA (1)...(19): siRNA sense strand
ggaacugacagacuacaaa

SEQ ID NO: 1986133 - RNA, 19 nt, Homo sapiens
  misc_RNA (1)...(19): siRNA sense strand
gaaguagcauaacugucaa

SEQ ID NO: 1986134 - RNA, 19 nt, Homo sapiens
  misc_RNA (1)...(19): siRNA sense strand
gaaacgacacaaacuuaau

SEQ ID NO: 1986135 - RNA, 19 nt, Homo sapiens
  misc_RNA (1)...(19): siRNA sense strand
guagaaguaugcagaaggu

SEQ ID NO: 1986136 - RNA, 19 nt, Homo sapiens
  misc_RNA (1)...(19): siRNA sense strand
ggauauaacaguucacauc

SEQ ID NO: 1986137 - RNA, 19 nt, Homo sapiens
  misc_RNA (1)...(19): siRNA sense strand
ggacagaaacgacacaaac

SEQ ID NO: 1986138 - RNA, 19 nt, Homo sapiens
  misc_RNA (1)...(19): siRNA sense strand
gaauaugggauguucaugu

SEQ ID NO: 1986139 - RNA, 19 nt, Homo sapiens
  misc_RNA (1)...(19): siRNA sense strand
uucagucacuuuccauuua

SEQ ID NO: 1986140 - RNA, 19 nt, Homo sapiens
  misc_RNA (1)...(19): siRNA sense strand
agagauggauugcugaugu

SEQ ID NO: 1986141 - RNA, 19 nt, Homo sapiens
  misc_RNA (1)...(19): siRNA sense strand
gcaugaaacaucuaagguu

SEQ ID NO: 1986142 - RNA, 19 nt, Homo sapiens
  misc_RNA (1)...(19): siRNA sense strand
ucauaugccaguuggauua

SEQ ID NO: 1986143 - RNA, 19 nt, Homo sapiens
  misc_RNA (1)...(19): siRNA sense strand
ugaaagccauaccucagaa

SEQ ID NO: 1986144 - RNA, 19 nt, Homo sapiens
  misc_RNA (1)...(19): siRNA sense strand
ugcaaacacuucuggauga

SEQ ID NO: 1986145 - RNA, 19 nt, Homo sapiens
  misc_RNA (1)...(19): siRNA sense strand
gggaaagaauuugcaaaca

SEQ ID NO: 1986146 - RNA, 19 nt, Homo sapiens
  misc_RNA (1)...(19): siRNA sense strand
gaaugaagaccugaggaaa

SEQ ID NO: 1986147 - RNA, 19 nt, Homo sapiens
  misc_RNA (1)...(19): siRNA sense strand
agaauccacuuucagcaaa

SEQ ID NO: 1986148 - RNA, 19 nt, Homo sapiens
  misc_RNA (1)...(19): siRNA sense strand
ggagggaaucaaagcauuu

SEQ ID NO: 1986149 - RNA, 19 nt, Homo sapiens
  misc_RNA (1)...(19): siRNA sense strand
caggaugggcugcuguuua

SEQ ID NO: 1986150 - RNA, 19 nt, Homo sapiens
  misc_RNA (1)...(19): siRNA sense strand
gagagacuauguuucuaag

SEQ ID NO: 1986151 - RNA, 19 nt, Homo sapiens
  misc_RNA (1)...(19): siRNA sense strand
ugaaagugcugaggagaau

SEQ ID NO: 1986152 - RNA, 19 nt, Homo sapiens
  misc_RNA (1)...(19): siRNA sense strand
acacugagaguaaagauga

SEQ ID NO: 1986153 - RNA, 19 nt, Homo sapiens
  misc_RNA (1)...(19): siRNA sense strand
gaaugcacguuaugaacca

SEQ ID NO: 1986154 - RNA, 19 nt, Homo sapiens
  misc_RNA (1)...(19): siRNA sense strand
gaaagagagucugaauucg

SEQ ID NO: 1986155 - RNA, 19 nt, Homo sapiens
  misc_RNA (1)...(19): siRNA sense strand
aaagggaaauccaagagau

SEQ ID NO: 1986156 - RNA, 19 nt, Homo sapiens
  misc_RNA (1)...(19): siRNA sense strand
caucuaagguuugaaagca

SEQ ID NO: 1986157 - RNA, 19 nt, Homo sapiens
  misc_RNA (1)...(19): siRNA sense strand
gagcuaagacccuguuugg

SEQ ID NO: 1986158 - RNA, 19 nt, Homo sapiens
  misc_RNA (1)...(19): siRNA sense strand
gaacugaaggaugugauug

SEQ ID NO: 1986159 - RNA, 19 nt, Homo sapiens
  misc_RNA (1)...(19): siRNA sense strand
ggcgguuuaugaagaauuu

SEQ ID NO: 1986160 - RNA, 19 nt, Homo sapiens
  misc_RNA (1)...(19): siRNA sense strand
caaacuuaauuccuaaugg

SEQ ID NO: 1986161 - RNA, 19 nt, Homo sapiens
  misc_RNA (1)...(19): siRNA sense strand
gcaaacacuucuggaugau

SEQ ID NO: 1986162 - RNA, 19 nt, Homo sapiens
  misc_RNA (1)...(19): siRNA sense strand
gaucuaacagucagaagga

SEQ ID NO: 1986163 - RNA, 19 nt, Homo sapiens
  misc_RNA (1)...(19): siRNA sense strand
gaagaacuacagaaaugau

SEQ ID NO: 1986164 - RNA, 19 nt, Homo sapiens
  misc_RNA (1)...(19): siRNA sense strand
uugcugauguggagacuaa

SEQ ID NO: 1986165 - RNA, 19 nt, Homo sapiens
  misc_RNA (1)...(19): siRNA sense strand
aagaagccaucaacaacaa

SEQ ID NO: 1986166 - RNA, 19 nt, Homo sapiens
  misc_RNA (1)...(19): siRNA sense strand
ccuaauggaaguagcauaa

SEQ ID NO: 1986167 - RNA, 19 nt, Homo sapiens
  misc_RNA (1)...(19): siRNA sense strand
aaaggcgguuuaugaagaa

SEQ ID NO: 1986168 - RNA, 19 nt, Homo sapiens
  misc_RNA (1)...(19): siRNA sense strand
ugacagacuacaaaugaaa

SEQ ID NO: 1986169 - RNA, 19 nt, Homo sapiens
  misc_RNA (1)...(19): siRNA sense strand
ggaugugauuguuggaaau

SEQ ID NO: 1986170 - RNA, 19 nt, Homo sapiens
  misc_RNA (1)...(19): siRNA sense strand
gagaauaacugugcuucca

SEQ ID NO: 1986171 - RNA, 19 nt, Homo sapiens
  misc_RNA (1)...(19): siRNA sense strand
ggacgaggaccaugccuau

SEQ ID NO: 1986172 - RNA, 19 nt, Homo sapiens
  misc_RNA (1)...(19): siRNA sense strand
uagagucggucaaggagaa

SEQ ID NO: 1986173 - RNA, 19 nt, Homo sapiens
  misc_RNA (1)...(19): siRNA sense strand
agucagacccgaaccuuaa

SEQ ID NO: 1986174 - RNA, 19 nt, Homo sapiens
  misc_RNA (1)...(19): siRNA sense strand
ggucaaggagaauaacugu

SEQ ID NO: 1986175 - RNA, 19 nt, Homo sapiens
  misc_RNA (1)...(19): siRNA sense strand
cagacccgaaccuuaauaa

SEQ ID NO: 1986176 - RNA, 19 nt, Homo sapiens
  misc_RNA (1)...(19): siRNA sense strand
caagaccggcugcgugauc

SEQ ID NO: 1986177 - RNA, 19 nt, Homo sapiens
  misc_RNA (1)...(19): siRNA sense strand
ucagacccgaaccuuaaua

SEQ ID NO: 1986178 - RNA, 19 nt, Homo sapiens
  misc_RNA (1)...(19): siRNA sense strand
caagucagacccgaaccuu

SEQ ID NO: 1986179 - RNA, 19 nt, Homo sapiens
  misc_RNA (1)...(19): siRNA sense strand
gauccagccugugccaaaa

SEQ ID NO: 1986180 - RNA, 19 nt, Homo sapiens
  misc_RNA (1)...(19): siRNA sense strand
ugauccagccugugccaaa

SEQ ID NO: 1986181 - RNA, 19 nt, Homo sapiens
  misc_RNA (1)...(19): siRNA sense strand
gaagagacgcuuaacaaug

SEQ ID NO: 1986182 - RNA, 19 nt, Homo sapiens
  misc_RNA (1)...(19): siRNA sense strand
cagcauagcuauuccuguu

SEQ ID NO: 1986183 - RNA, 19 nt, Homo sapiens
  misc_RNA (1)...(19): siRNA sense strand
gaaugucuccucagcauaa

SEQ ID NO: 1986184 - RNA, 19 nt, Homo sapiens
  misc_RNA (1)...(19): siRNA sense strand
gcauagcuauuccuguuga

SEQ ID NO: 1986185 - RNA, 19 nt, Homo sapiens
  misc_RNA (1)...(19): siRNA sense strand
aagagacgcuuaacaaugu

SEQ ID NO: 1986186 - RNA, 19 nt, Homo sapiens
  misc_RNA (1)...(19): siRNA sense strand
gaccuaagccaguuucaaa

SEQ ID NO: 1986187 - RNA, 19 nt, Homo sapiens
  misc_RNA (1)...(19): siRNA sense strand
gagaagaaguggaaguuuu

SEQ ID NO: 1986188 - RNA, 19 nt, Homo sapiens
  misc_RNA (1)...(19): siRNA sense strand
gcaagucgacgauacuaga

SEQ ID NO: 1986189 - RNA, 19 nt, Homo sapiens
  misc_RNA (1)...(19): siRNA sense strand
gaaaagccauuugauguau

SEQ ID NO: 1986190 - RNA, 19 nt, Homo sapiens
  misc_RNA (1)...(19): siRNA sense strand
uaacaccuaugaacagucu

SEQ ID NO: 1986191 - RNA, 19 nt, Homo sapiens
  misc_RNA (1)...(19): siRNA sense strand
aaacucagacccagccuuu

SEQ ID NO: 1986192 - RNA, 19 nt, Homo sapiens
  misc_RNA (1)...(19): siRNA sense strand
aaauaagccuguugugaag

SEQ ID NO: 1986193 - RNA, 19 nt, Homo sapiens
  misc_RNA (1)...(19): siRNA sense strand
gaaaauaagccuguuguga

SEQ ID NO: 1986194 - RNA, 19 nt, Homo sapiens
  misc_RNA (1)...(19): siRNA sense strand
gagcggagagcccuauaga

SEQ ID NO: 1986195 - RNA, 19 nt, Homo sapiens
  misc_RNA (1)...(19): siRNA sense strand
uaccaagcguuccauuuga

SEQ ID NO: 1986196 - RNA, 19 nt, Homo sapiens
  misc_RNA (1)...(19): siRNA sense strand
ccgaagagacgcuuaacaa

SEQ ID NO: 1986197 - RNA, 19 nt, Homo sapiens
  misc_RNA (1)...(19): siRNA sense strand
gaagccgccuguugcagau

SEQ ID NO: 1986198 - RNA, 19 nt, Homo sapiens
  misc_RNA (1)...(19): siRNA sense strand
gauggacguguauggaaua

SEQ ID NO: 1986199 - RNA, 19 nt, Homo sapiens
  misc_RNA (1)...(19): siRNA sense strand
ccacauguaguucccguuu

SEQ ID NO: 1986200 - RNA, 19 nt, Homo sapiens
  misc_RNA (1)...(19): siRNA sense strand
cuaccaagcguuccauuug

SEQ ID NO: 1986201 - RNA, 19 nt, Homo sapiens
  misc_RNA (1)...(19): siRNA sense strand
ccaccacuuucucucauug

SEQ ID NO: 1986202 - RNA, 19 nt, Homo sapiens
  misc_RNA (1)...(19): siRNA sense strand
ccaaaccuccuccuagaug

SEQ ID NO: 1986203 - RNA, 19 nt, Homo sapiens
  misc_RNA (1)...(19): siRNA sense strand
gacagcagcguccugacua

SEQ ID NO: 1986204 - RNA, 19 nt, Homo sapiens
  misc_RNA (1)...(19): siRNA sense strand
caaaauagaacaagcaaug

SEQ ID NO: 1986205 - RNA, 19 nt, Homo sapiens
  misc_RNA (1)...(19): siRNA sense strand
ggaacugacagcuccuuga

SEQ ID NO: 1986206 - RNA, 19 nt, Homo sapiens
  misc_RNA (1)...(19): siRNA sense strand
acacacagcgcaccaacaa

SEQ ID NO: 1986207 - RNA, 19 nt, Homo sapiens
  misc_RNA (1)...(19): siRNA sense strand
gauguaugcaguaagagaa

SEQ ID NO: 1986208 - RNA, 19 nt, Homo sapiens
  misc_RNA (1)...(19): siRNA sense strand
gcagcguccugacuagauc

SEQ ID NO: 1986209 - RNA, 19 nt, Homo sapiens
  misc_RNA (1)...(19): siRNA sense strand
cgaagagacgcuuaacaau

SEQ ID NO: 1986210 - RNA, 19 nt, Homo sapiens
  misc_RNA (1)...(19): siRNA sense strand
cgauggacguguauggaau

SEQ ID NO: 1986211 - RNA, 19 nt, Homo sapiens
  misc_RNA (1)...(19): siRNA sense strand
gagguguuguagccauuga

SEQ ID NO: 1986212 - RNA, 19 nt, Homo sapiens
  misc_RNA (1)...(19): siRNA sense strand
gggagguguuguagccauu

SEQ ID NO: 1986213 - RNA, 19 nt, Homo sapiens
  misc_RNA (1)...(19): siRNA sense strand
gcagcauaauccagcaugu

SEQ ID NO: 1986214 - RNA, 19 nt, Homo sapiens
  misc_RNA (1)...(19): siRNA sense strand
gcuccaagcgugccuagug

SEQ ID NO: 1986215 - RNA, 19 nt, Homo sapiens
  misc_RNA (1)...(19): siRNA sense strand
ccgaaugucuccucagcau

SEQ ID NO: 1986216 - RNA, 19 nt, Homo sapiens
  misc_RNA (1)...(19): siRNA sense strand
cauuugauguaugcaguaa

SEQ ID NO: 1986217 - RNA, 19 nt, Homo sapiens
  misc_RNA (1)...(19): siRNA sense strand
gagggucgguggugguagu

SEQ ID NO: 1986218 - RNA, 19 nt, Homo sapiens
  misc_RNA (1)...(19): siRNA sense strand
uuugauguaugcaguaaga

SEQ ID NO: 1986219 - RNA, 19 nt, Homo sapiens
  misc_RNA (1)...(19): siRNA sense strand
caauggaucuggugaaaag

SEQ ID NO: 1986220 - RNA, 19 nt, Homo sapiens
  misc_RNA (1)...(19): siRNA sense strand
gaacugacagcuccuugac

SEQ ID NO: 1986221 - RNA, 19 nt, Homo sapiens
  misc_RNA (1)...(19): siRNA sense strand
gagaaaaugcacuguuaaa

SEQ ID NO: 1986222 - RNA, 19 nt, Homo sapiens
  misc_RNA (1)...(19): siRNA sense strand
acgagaaaaugcacuguua

SEQ ID NO: 1986223 - RNA, 19 nt, Homo sapiens
  misc_RNA (1)...(19): siRNA sense strand
aaaauaagccuguugugaa

SEQ ID NO: 1986224 - RNA, 19 nt, Homo sapiens
  misc_RNA (1)...(19): siRNA sense strand
gugucuaccacuucuguua

SEQ ID NO: 1986225 - RNA, 19 nt, Homo sapiens
  misc_RNA (1)...(19): siRNA sense strand
caaccaccacuuucucuca

SEQ ID NO: 1986226 - RNA, 19 nt, Homo sapiens
  misc_RNA (1)...(19): siRNA sense strand
guuaacaccuaugaacagu

SEQ ID NO: 1986227 - RNA, 19 nt, Homo sapiens
  misc_RNA (1)...(19): siRNA sense strand
uagcacuucucaacagcaa

SEQ ID NO: 1986228 - RNA, 19 nt, Homo sapiens
  misc_RNA (1)...(19): siRNA sense strand
ggaauccuucaacugcuuu

SEQ ID NO: 1986229 - RNA, 19 nt, Homo sapiens
  misc_RNA (1)...(19): siRNA sense strand
guauucagcauagcuauuc

SEQ ID NO: 1986230 - RNA, 19 nt, Homo sapiens
  misc_RNA (1)...(19): siRNA sense strand
aguaagagaagaaguggaa

SEQ ID NO: 1986231 - RNA, 19 nt, Homo sapiens
  misc_RNA (1)...(19): siRNA sense strand
ucaacagcaagcagugaua

SEQ ID NO: 1986232 - RNA, 19 nt, Homo sapiens
  misc_RNA (1)...(19): siRNA sense strand
cagcaggagcagcagcaua

SEQ ID NO: 1986233 - RNA, 19 nt, Homo sapiens
  misc_RNA (1)...(19): siRNA sense strand
aagagcugcuuccagauca

SEQ ID NO: 1986234 - RNA, 19 nt, Homo sapiens
  misc_RNA (1)...(19): siRNA sense strand
caagucgacgauacuagaa

SEQ ID NO: 1986235 - RNA, 19 nt, Homo sapiens
  misc_RNA (1)...(19): siRNA sense strand
acacagcgcaccaacaagu

SEQ ID NO: 1986236 - RNA, 19 nt, Homo sapiens
  misc_RNA (1)...(19): siRNA sense strand
cuaccacagucugaccuaa

SEQ ID NO: 1986237 - RNA, 19 nt, Homo sapiens
  misc_RNA (1)...(19): siRNA sense strand
caagcaaugaucaauuauc

SEQ ID NO: 1986238 - RNA, 19 nt, Homo sapiens
  misc_RNA (1)...(19): siRNA sense strand
ugaaaagccauuugaugua

SEQ ID NO: 1986239 - RNA, 19 nt, Homo sapiens
  misc_RNA (1)...(19): siRNA sense strand
cuaccucaaccaccacuuu

SEQ ID NO: 1986240 - RNA, 19 nt, Homo sapiens
  misc_RNA (1)...(19): siRNA sense strand
ucucucgggccacggauua

SEQ ID NO: 1986241 - RNA, 19 nt, Homo sapiens
  misc_RNA (1)...(19): siRNA sense strand
agcaggagcagcagcauaa

SEQ ID NO: 1986242 - RNA, 19 nt, Homo sapiens
  misc_RNA (1)...(19): siRNA sense strand
caacagcaagcagugauag

SEQ ID NO: 1986243 - RNA, 19 nt, Homo sapiens
  misc_RNA (1)...(19): siRNA sense strand
aagcaaugaucaauuaucc

SEQ ID NO: 1986244 - RNA, 19 nt, Homo sapiens
  misc_RNA (1)...(19): siRNA sense strand
agaagaaguggaaguuuua

SEQ ID NO: 1986245 - RNA, 19 nt, Homo sapiens
  misc_RNA (1)...(19): siRNA sense strand
agcaauggaucuggugaaa

SEQ ID NO: 1986246 - RNA, 19 nt, Homo sapiens
  misc_RNA (1)...(19): siRNA sense strand
ugaacacguuaaaggaauc

SEQ ID NO: 1986247 - RNA, 19 nt, Homo sapiens
  misc_RNA (1)...(19): siRNA sense strand
gcuuccagaucaccagugu

SEQ ID NO: 1986248 - RNA, 19 nt, Homo sapiens
  misc_RNA (1)...(19): siRNA sense strand
cgacgauacuagaagaaaa

SEQ ID NO: 1986249 - RNA, 19 nt, Homo sapiens
  misc_RNA (1)...(19): siRNA sense strand
agucgacgauacuagaaga

SEQ ID NO: 1986250 - RNA, 19 nt, Homo sapiens
  misc_RNA (1)...(19): siRNA sense strand
gggcaagucgacgauacua

SEQ ID NO: 1986251 - RNA, 19 nt, Homo sapiens
  misc_RNA (1)...(19): siRNA sense strand
ggucgguggugguaguagu

SEQ ID NO: 1986252 - RNA, 19 nt, Homo sapiens
  misc_RNA (1)...(19): siRNA sense strand
cgaaugucuccucagcaua

SEQ ID NO: 1986253 - RNA, 19 nt, Homo sapiens
  misc_RNA (1)...(19): siRNA sense strand
ccacagcagccgaaugucu

SEQ ID NO: 1986254 - RNA, 19 nt, Homo sapiens
  misc_RNA (1)...(19): siRNA sense strand
aaauagaacaagcaaugga

SEQ ID NO: 1986255 - RNA, 19 nt, Homo sapiens
  misc_RNA (1)...(19): siRNA sense strand
gaacacguuaaaggaauca

SEQ ID NO: 1986256 - RNA, 19 nt, Homo sapiens
  misc_RNA (1)...(19): siRNA sense strand
uugaacacguuaaaggaau

SEQ ID NO: 1986257 - RNA, 19 nt, Homo sapiens
  misc_RNA (1)...(19): siRNA sense strand
ccaacaagucuaccacagu

SEQ ID NO: 1986258 - RNA, 19 nt, Homo sapiens
  misc_RNA (1)...(19): siRNA sense strand
ccaagaagaagagcugcuu

SEQ ID NO: 1986259 - RNA, 19 nt, Homo sapiens
  misc_RNA (1)...(19): siRNA sense strand
accaagcguuccauuugaa

SEQ ID NO: 1986260 - RNA, 19 nt, Homo sapiens
  misc_RNA (1)...(19): siRNA sense strand
guugugaagccgccuguug

SEQ ID NO: 1986261 - RNA, 19 nt, Homo sapiens
  misc_RNA (1)...(19): siRNA sense strand
ugcauuagacacagcagua

SEQ ID NO: 1986262 - RNA, 19 nt, Homo sapiens
  misc_RNA (1)...(19): siRNA sense strand
uaagagaagaaguggaagu

SEQ ID NO: 1986263 - RNA, 19 nt, Homo sapiens
  misc_RNA (1)...(19): siRNA sense strand
uguagccauugacaacaaa

SEQ ID NO: 1986264 - RNA, 19 nt, Homo sapiens
  misc_RNA (1)...(19): siRNA sense strand
uaccacuucuguuacuaug

SEQ ID NO: 1986265 - RNA, 19 nt, Homo sapiens
  misc_RNA (1)...(19): siRNA sense strand
cagcauaauccagcauguu

SEQ ID NO: 1986266 - RNA, 19 nt, Homo sapiens
  misc_RNA (1)...(19): siRNA sense strand
gugaaaagccauuugaugu

SEQ ID NO: 1986267 - RNA, 19 nt, Homo sapiens
  misc_RNA (1)...(19): siRNA sense strand
caagucuaccacagucuga

SEQ ID NO: 1986268 - RNA, 19 nt, Homo sapiens
  misc_RNA (1)...(19): siRNA sense strand
ucaguuaacaccuaugaac

SEQ ID NO: 1986269 - RNA, 19 nt, Homo sapiens
  misc_RNA (1)...(19): siRNA sense strand
aaaucucuuucaagcaaug

SEQ ID NO: 1986270 - RNA, 19 nt, Homo sapiens
  misc_RNA (1)...(19): siRNA sense strand
cagccucccaccacaugua

SEQ ID NO: 1986271 - RNA, 19 nt, Homo sapiens
  misc_RNA (1)...(19): siRNA sense strand
agacacagcaguacuuuug

SEQ ID NO: 1986272 - RNA, 19 nt, Homo sapiens
  misc_RNA (1)...(19): siRNA sense strand
aagagaagaaguggaaguu

SEQ ID NO: 1986273 - RNA, 19 nt, Homo sapiens
  misc_RNA (1)...(19): siRNA sense strand
ccucugggauagugcaucu

SEQ ID NO: 1986274 - RNA, 19 nt, Homo sapiens
  misc_RNA (1)...(19): siRNA sense strand
agucugaccuaagccaguu

SEQ ID NO: 1986275 - RNA, 19 nt, Homo sapiens
  misc_RNA (1)...(19): siRNA sense strand
acuaugagagggauucaga

SEQ ID NO: 1986276 - RNA, 19 nt, Homo sapiens
  misc_RNA (1)...(19): siRNA sense strand
agagaagaaguggaaguuu

SEQ ID NO: 1986277 - RNA, 19 nt, Homo sapiens
  misc_RNA (1)...(19): siRNA sense strand
ccgauggacguguauggaa

SEQ ID NO: 1986278 - RNA, 19 nt, Homo sapiens
  misc_RNA (1)...(19): siRNA sense strand
gaagaaguggaaguuuuaa

SEQ ID NO: 1986279 - RNA, 19 nt, Homo sapiens
  misc_RNA (1)...(19): siRNA sense strand
aaagccauuugauguaugc

SEQ ID NO: 1986280 - RNA, 19 nt, Homo sapiens
  misc_RNA (1)...(19): siRNA sense strand
ggaaagagcucucauggaa

SEQ ID NO: 1986281 - RNA, 19 nt, Homo sapiens
  misc_RNA (1)...(19): siRNA sense strand
guacaaagaugucaaggau

SEQ ID NO: 1986282 - RNA, 19 nt, Homo sapiens
  misc_RNA (1)...(19): siRNA sense strand
gaaacacgaugaagcaguu

SEQ ID NO: 1986283 - RNA, 19 nt, Homo sapiens
  misc_RNA (1)...(19): siRNA sense strand
gauccagaguguuguauuu

SEQ ID NO: 1986284 - RNA, 19 nt, Homo sapiens
  misc_RNA (1)...(19): siRNA sense strand
ggagggaccuguucgaugu

SEQ ID NO: 1986285 - RNA, 19 nt, Homo sapiens
  misc_RNA (1)...(19): siRNA sense strand
ucacagagaugcugaguca

SEQ ID NO: 1986286 - RNA, 19 nt, Homo sapiens
  misc_RNA (1)...(19): siRNA sense strand
gaccuugacuggcuuauug

SEQ ID NO: 1986287 - RNA, 19 nt, Homo sapiens
  misc_RNA (1)...(19): siRNA sense strand
uaaugaagaucgaugcuuu

SEQ ID NO: 1986288 - RNA, 19 nt, Homo sapiens
  misc_RNA (1)...(19): siRNA sense strand
ggaaggagaugcgagaaau

SEQ ID NO: 1986289 - RNA, 19 nt, Homo sapiens
  misc_RNA (1)...(19): siRNA sense strand
ggaauaauguacagagcaa

SEQ ID NO: 1986290 - RNA, 19 nt, Homo sapiens
  misc_RNA (1)...(19): siRNA sense strand
cagcagaaaucaggaagua

SEQ ID NO: 1986291 - RNA, 19 nt, Homo sapiens
  misc_RNA (1)...(19): siRNA sense strand
gaacacggagcaauacauu

SEQ ID NO: 1986292 - RNA, 19 nt, Homo sapiens
  misc_RNA (1)...(19): siRNA sense strand
acaaagaugucaaggauuc

SEQ ID NO: 1986293 - RNA, 19 nt, Homo sapiens
  misc_RNA (1)...(19): siRNA sense strand
acagugaccuggcggauuu

SEQ ID NO: 1986294 - RNA, 19 nt, Homo sapiens
  misc_RNA (1)...(19): siRNA sense strand
gagaaaugaccaagaguuu

SEQ ID NO: 1986295 - RNA, 19 nt, Homo sapiens
  misc_RNA (1)...(19): siRNA sense strand
gaacccaaccuacuuccua

SEQ ID NO: 1986296 - RNA, 19 nt, Homo sapiens
  misc_RNA (1)...(19): siRNA sense strand
acaaagggaugaguuauau

SEQ ID NO: 1986297 - RNA, 19 nt, Homo sapiens
  misc_RNA (1)...(19): siRNA sense strand
agaacaacaucgacuauga

SEQ ID NO: 1986298 - RNA, 19 nt, Homo sapiens
  misc_RNA (1)...(19): siRNA sense strand
caagcaggguaauuuauau

SEQ ID NO: 1986299 - RNA, 19 nt, Homo sapiens
  misc_RNA (1)...(19): siRNA sense strand
gaaugagaaaggugucuua

SEQ ID NO: 1986300 - RNA, 19 nt, Homo sapiens
  misc_RNA (1)...(19): siRNA sense strand
gacaaagggaugaguuaua

SEQ ID NO: 1986301 - RNA, 19 nt, Homo sapiens
  misc_RNA (1)...(19): siRNA sense strand
gcagaaaucaggaaguaug

SEQ ID NO: 1986302 - RNA, 19 nt, Homo sapiens
  misc_RNA (1)...(19): siRNA sense strand
gcaggguaauuuauaugaa

SEQ ID NO: 1986303 - RNA, 19 nt, Homo sapiens
  misc_RNA (1)...(19): siRNA sense strand
aagccaaacuucuuuaaug

SEQ ID NO: 1986304 - RNA, 19 nt, Homo sapiens
  misc_RNA (1)...(19): siRNA sense strand
ugagaaaggugucuuacuc

SEQ ID NO: 1986305 - RNA, 19 nt, Homo sapiens
  misc_RNA (1)...(19): siRNA sense strand
gcgcuucgcugacaucuac

SEQ ID NO: 1986306 - RNA, 19 nt, Homo sapiens
  misc_RNA (1)...(19): siRNA sense strand
gagaggauccagaguguug

SEQ ID NO: 1986307 - RNA, 19 nt, Homo sapiens
  misc_RNA (1)...(19): siRNA sense strand
gcacgggaccuucucauca

SEQ ID NO: 1986308 - RNA, 19 nt, Homo sapiens
  misc_RNA (1)...(19): siRNA sense strand
gaaagagcucucauggaaa

SEQ ID NO: 1986309 - RNA, 19 nt, Homo sapiens
  misc_RNA (1)...(19): siRNA sense strand
guacagagcaauugaagca

SEQ ID NO: 1986310 - RNA, 19 nt, Homo sapiens
  misc_RNA (1)...(19): siRNA sense strand
gcaauucguggacuucauu

SEQ ID NO: 1986311 - RNA, 19 nt, Homo sapiens
  misc_RNA (1)...(19): siRNA sense strand
gcagaaaggccagauauac

SEQ ID NO: 1986312 - RNA, 19 nt, Homo sapiens
  misc_RNA (1)...(19): siRNA sense strand
ugaaaucuauggcuucgau

SEQ ID NO: 1986313 - RNA, 19 nt, Homo sapiens
  misc_RNA (1)...(19): siRNA sense strand
gaucauggcaagaagaugu

SEQ ID NO: 1986314 - RNA, 19 nt, Homo sapiens
  misc_RNA (1)...(19): siRNA sense strand
uccacacgcugauauuuaa

SEQ ID NO: 1986315 - RNA, 19 nt, Homo sapiens
  misc_RNA (1)...(19): siRNA sense strand
gcaaucaucccagaguuga

SEQ ID NO: 1986316 - RNA, 19 nt, Homo sapiens
  misc_RNA (1)...(19): siRNA sense strand
acaagcaggguaauuuaua

SEQ ID NO: 1986317 - RNA, 19 nt, Homo sapiens
  misc_RNA (1)...(19): siRNA sense strand
gaucgaugcuuuucauuau

SEQ ID NO: 1986318 - RNA, 19 nt, Homo sapiens
  misc_RNA (1)...(19): siRNA sense strand
guacagcgggcaguauuaa

SEQ ID NO: 1986319 - RNA, 19 nt, Homo sapiens
  misc_RNA (1)...(19): siRNA sense strand
ugagcugccuccugaacua

SEQ ID NO: 1986320 - RNA, 19 nt, Homo sapiens
  misc_RNA (1)...(19): siRNA sense strand
gaucugagcucaaaaucau

SEQ ID NO: 1986321 - RNA, 19 nt, Homo sapiens
  misc_RNA (1)...(19): siRNA sense strand
aaagagcucucauggaaac

SEQ ID NO: 1986322 - RNA, 19 nt, Homo sapiens
  misc_RNA (1)...(19): siRNA sense strand
ccacaucaaaggaauaaug

SEQ ID NO: 1986323 - RNA, 19 nt, Homo sapiens
  misc_RNA (1)...(19): siRNA sense strand
gaaugaauacuuccucaag

SEQ ID NO: 1986324 - RNA, 19 nt, Homo sapiens
  misc_RNA (1)...(19): siRNA sense strand
aagcagacauugaaaagua

SEQ ID NO: 1986325 - RNA, 19 nt, Homo sapiens
  misc_RNA (1)...(19): siRNA sense strand
uccgaaagaugaaugagaa

SEQ ID NO: 1986326 - RNA, 19 nt, Homo sapiens
  misc_RNA (1)...(19): siRNA sense strand
agccaaacuucuuuaauga

SEQ ID NO: 1986327 - RNA, 19 nt, Homo sapiens
  misc_RNA (1)...(19): siRNA sense strand
gaaaucaggaaguaugagu

SEQ ID NO: 1986328 - RNA, 19 nt, Homo sapiens
  misc_RNA (1)...(19): siRNA sense strand
ugaccuggcugcagaccuu

SEQ ID NO: 1986329 - RNA, 19 nt, Homo sapiens
  misc_RNA (1)...(19): siRNA sense strand
ggacaaagggaugaguuau

SEQ ID NO: 1986330 - RNA, 19 nt, Homo sapiens
  misc_RNA (1)...(19): siRNA sense strand
gaagaucgaugcuuuucau

SEQ ID NO: 1986331 - RNA, 19 nt, Homo sapiens
  misc_RNA (1)...(19): siRNA sense strand
gaacaacaucgacuaugag

SEQ ID NO: 1986332 - RNA, 19 nt, Homo sapiens
  misc_RNA (1)...(19): siRNA sense strand
auacaagcaggguaauuua

SEQ ID NO: 1986333 - RNA, 19 nt, Homo sapiens
  misc_RNA (1)...(19): siRNA sense strand
uauacaagcaggguaauuu

SEQ ID NO: 1986334 - RNA, 19 nt, Homo sapiens
  misc_RNA (1)...(19): siRNA sense strand
guaugaguaugacccaaau

SEQ ID NO: 1986335 - RNA, 19 nt, Homo sapiens
  misc_RNA (1)...(19): siRNA sense strand
gaaagaugaaugagaaagg

SEQ ID NO: 1986336 - RNA, 19 nt, Homo sapiens
  misc_RNA (1)...(19): siRNA sense strand
caagaacaacaucgacuau

SEQ ID NO: 1986337 - RNA, 19 nt, Homo sapiens
  misc_RNA (1)...(19): siRNA sense strand
ucaggaaguaugaguauga

SEQ ID NO: 1986338 - RNA, 19 nt, Homo sapiens
  misc_RNA (1)...(19): siRNA sense strand
cuacagaggccucaguguu

SEQ ID NO: 1986339 - RNA, 19 nt, Homo sapiens
  misc_RNA (1)...(19): siRNA sense strand
ucuauggcuucgauuauga

SEQ ID NO: 1986340 - RNA, 19 nt, Homo sapiens
  misc_RNA (1)...(19): siRNA sense strand
ucaugaacacggagcaaua

SEQ ID NO: 1986341 - RNA, 19 nt, Homo sapiens
  misc_RNA (1)...(19): siRNA sense strand
aaugaauacuuccucaaga

SEQ ID NO: 1986342 - RNA, 19 nt, Homo sapiens
  misc_RNA (1)...(19): siRNA sense strand
uguccugcgugaaugaaua

SEQ ID NO: 1986343 - RNA, 19 nt, Homo sapiens
  misc_RNA (1)...(19): siRNA sense strand
cgagaaaugaccaagaguu

SEQ ID NO: 1986344 - RNA, 19 nt, Homo sapiens
  misc_RNA (1)...(19): siRNA sense strand
gaaggagaugcgagaaaug

SEQ ID NO: 1986345 - RNA, 19 nt, Homo sapiens
  misc_RNA (1)...(19): siRNA sense strand
ugucaaggauucaauucga

SEQ ID NO: 1986346 - RNA, 19 nt, Homo sapiens
  misc_RNA (1)...(19): siRNA sense strand
ucaagaacaacaucgacua

SEQ ID NO: 1986347 - RNA, 19 nt, Homo sapiens
  misc_RNA (1)...(19): siRNA sense strand
agaaaggccagauauacaa

SEQ ID NO: 1986348 - RNA, 19 nt, Homo sapiens
  misc_RNA (1)...(19): siRNA sense strand
augaauacuuccucaagaa

SEQ ID NO: 1986349 - RNA, 19 nt, Homo sapiens
  misc_RNA (1)...(19): siRNA sense strand
uuucuucaaugcccaguuu

SEQ ID NO: 1986350 - RNA, 19 nt, Homo sapiens
  misc_RNA (1)...(19): siRNA sense strand
cagaaaggccagauauaca

SEQ ID NO: 1986351 - RNA, 19 nt, Homo sapiens
  misc_RNA (1)...(19): siRNA sense strand
cacgggaccuucucaucaa

SEQ ID NO: 1986352 - RNA, 19 nt, Homo sapiens
  misc_RNA (1)...(19): siRNA sense strand
ucaaaggaauaauguacag

SEQ ID NO: 1986353 - RNA, 19 nt, Homo sapiens
  misc_RNA (1)...(19): siRNA sense strand
gaggacuggugcaaucauc

SEQ ID NO: 1986354 - RNA, 19 nt, Homo sapiens
  misc_RNA (1)...(19): siRNA sense strand
gugcaaucaucccagaguu

SEQ ID NO: 1986355 - RNA, 19 nt, Homo sapiens
  misc_RNA (1)...(19): siRNA sense strand
gaauacuuccucaagaaca

SEQ ID NO: 1986356 - RNA, 19 nt, Homo sapiens
  misc_RNA (1)...(19): siRNA sense strand
aaagaugaaugagaaaggu

SEQ ID NO: 1986357 - RNA, 19 nt, Homo sapiens
  misc_RNA (1)...(19): siRNA sense strand
acacggagcaauacauuca

SEQ ID NO: 1986358 - RNA, 19 nt, Homo sapiens
  misc_RNA (1)...(19): siRNA sense strand
gugaccauauauacaguga

SEQ ID NO: 1986359 - RNA, 19 nt, Homo sapiens
  misc_RNA (1)...(19): siRNA sense strand
cagaaaucaggaaguauga

SEQ ID NO: 1986360 - RNA, 19 nt, Homo sapiens
  misc_RNA (1)...(19): siRNA sense strand
gcugccuccugaacuauga

SEQ ID NO: 1986361 - RNA, 19 nt, Homo sapiens
  misc_RNA (1)...(19): siRNA sense strand
aacccaaccuacuuccuaa

SEQ ID NO: 1986362 - RNA, 19 nt, Homo sapiens
  misc_RNA (1)...(19): siRNA sense strand
agaugcagguucacagaga

SEQ ID NO: 1986363 - RNA, 19 nt, Homo sapiens
  misc_RNA (1)...(19): siRNA sense strand
gaaaggccagauauacaag

SEQ ID NO: 1986364 - RNA, 19 nt, Homo sapiens
  misc_RNA (1)...(19): siRNA sense strand
uggcuucgauuaugauuac

SEQ ID NO: 1986365 - RNA, 19 nt, Homo sapiens
  misc_RNA (1)...(19): siRNA sense strand
gucagacauugaaaucuau

SEQ ID NO: 1986366 - RNA, 19 nt, Homo sapiens
  misc_RNA (1)...(19): siRNA sense strand
uacagaggccucaguguug

SEQ ID NO: 1986367 - RNA, 19 nt, Homo sapiens
  misc_RNA (1)...(19): siRNA sense strand
gaggauccagaguguugua

SEQ ID NO: 1986368 - RNA, 19 nt, Homo sapiens
  misc_RNA (1)...(19): siRNA sense strand
caucaaaggaauaauguac

SEQ ID NO: 1986369 - RNA, 19 nt, Homo sapiens
  misc_RNA (1)...(19): siRNA sense strand
uguugucccugaugaagaa

SEQ ID NO: 1986370 - RNA, 19 nt, Homo sapiens
  misc_RNA (1)...(19): siRNA sense strand
cagcgggcaguauuaauga

SEQ ID NO: 1986371 - RNA, 19 nt, Homo sapiens
  misc_RNA (1)...(19): siRNA sense strand
gaugcagguucacagagau

SEQ ID NO: 1986372 - RNA, 19 nt, Homo sapiens
  misc_RNA (1)...(19): siRNA sense strand
caauacauucaaaccauga

SEQ ID NO: 1986373 - RNA, 19 nt, Homo sapiens
  misc_RNA (1)...(19): siRNA sense strand
gagaaaggugucuuacucu

SEQ ID NO: 1986374 - RNA, 19 nt, Homo sapiens
  misc_RNA (1)...(19): siRNA sense strand
gcagaugagugacuuuuac

SEQ ID NO: 1986375 - RNA, 19 nt, Homo sapiens
  misc_RNA (1)...(19): siRNA sense strand
gggcaguauuaaugaagau

SEQ ID NO: 1986376 - RNA, 19 nt, Homo sapiens
  misc_RNA (1)...(19): siRNA sense strand
gaccagaacccaaccuacu

SEQ ID NO: 1986377 - RNA, 19 nt, Homo sapiens
  misc_RNA (1)...(19): siRNA sense strand
gaauccagaugccauuuuc

SEQ ID NO: 1986378 - RNA, 19 nt, Homo sapiens
  misc_RNA (1)...(19): siRNA sense strand
uggcggauuugacccuaaa

SEQ ID NO: 1986379 - RNA, 19 nt, Homo sapiens
  misc_RNA (1)...(19): siRNA sense strand
cuccacacgcugauauuua

SEQ ID NO: 1986380 - RNA, 19 nt, Homo sapiens
  misc_RNA (1)...(19): siRNA sense strand
gagacaagcuguuauguug

SEQ ID NO: 1986381 - RNA, 19 nt, Homo sapiens
  misc_RNA (1)...(19): siRNA sense strand
gaagcaagcuguccaguca

SEQ ID NO: 1986382 - RNA, 19 nt, Homo sapiens
  misc_RNA (1)...(19): siRNA sense strand
gcagaugguacuaauauua

SEQ ID NO: 1986383 - RNA, 19 nt, Homo sapiens
  misc_RNA (1)...(19): siRNA sense strand
ugaaggaucucaucaguau

SEQ ID NO: 1986384 - RNA, 19 nt, Homo sapiens
  misc_RNA (1)...(19): siRNA sense strand
uaagauuggugucccauuu

SEQ ID NO: 1986385 - RNA, 19 nt, Homo sapiens
  misc_RNA (1)...(19): siRNA sense strand
gcacuuugauucugugaug

SEQ ID NO: 1986386 - RNA, 19 nt, Homo sapiens
  misc_RNA (1)...(19): siRNA sense strand
gaauaucacugggcagaug

SEQ ID NO: 1986387 - RNA, 19 nt, Homo sapiens
  misc_RNA (1)...(19): siRNA sense strand
uagagaaacuuggaucaaa

SEQ ID NO: 1986388 - RNA, 19 nt, Homo sapiens
  misc_RNA (1)...(19): siRNA sense strand
gaacacuguggauuucuuu

SEQ ID NO: 1986389 - RNA, 19 nt, Homo sapiens
  misc_RNA (1)...(19): siRNA sense strand
gggcagaugguacuaauau

SEQ ID NO: 1986390 - RNA, 19 nt, Homo sapiens
  misc_RNA (1)...(19): siRNA sense strand
ggcaaagacuauucuaaag

SEQ ID NO: 1986391 - RNA, 19 nt, Homo sapiens
  misc_RNA (1)...(19): siRNA sense strand
ggauugcugugaacacugu

SEQ ID NO: 1986392 - RNA, 19 nt, Homo sapiens
  misc_RNA (1)...(19): siRNA sense strand
ggaucucaaugaauggauu

SEQ ID NO: 1986393 - RNA, 19 nt, Homo sapiens
  misc_RNA (1)...(19): siRNA sense strand
uggcaaagacuauucuaaa

SEQ ID NO: 1986394 - RNA, 19 nt, Homo sapiens
  misc_RNA (1)...(19): siRNA sense strand
agaagcaacucuaggaagu

SEQ ID NO: 1986395 - RNA, 19 nt, Homo sapiens
  misc_RNA (1)...(19): siRNA sense strand
caaauguucugcaccaaaa

SEQ ID NO: 1986396 - RNA, 19 nt, Homo sapiens
  misc_RNA (1)...(19): siRNA sense strand
uuaaccagaucaacauguu

SEQ ID NO: 1986397 - RNA, 19 nt, Homo sapiens
  misc_RNA (1)...(19): siRNA sense strand
aaagaagaauaucccugaa

SEQ ID NO: 1986398 - RNA, 19 nt, Homo sapiens
  misc_RNA (1)...(19): siRNA sense strand
gaagugggaaucugagaca

SEQ ID NO: 1986399 - RNA, 19 nt, Homo sapiens
  misc_RNA (1)...(19): siRNA sense strand
gcagaagcaacucuaggaa

SEQ ID NO: 1986400 - RNA, 19 nt, Homo sapiens
  misc_RNA (1)...(19): siRNA sense strand
gaagaauaucccugaagga

SEQ ID NO: 1986401 - RNA, 19 nt, Homo sapiens
  misc_RNA (1)...(19): siRNA sense strand
ggcagaugguacuaauauu

SEQ ID NO: 1986402 - RNA, 19 nt, Homo sapiens
  misc_RNA (1)...(19): siRNA sense strand
gcaaagacuauucuaaagc

SEQ ID NO: 1986403 - RNA, 19 nt, Homo sapiens
  misc_RNA (1)...(19): siRNA sense strand
aagcgucuguucaggguuu

SEQ ID NO: 1986404 - RNA, 19 nt, Homo sapiens
  misc_RNA (1)...(19): siRNA sense strand
aaucugagacaagcuguua

SEQ ID NO: 1986405 - RNA, 19 nt, Homo sapiens
  misc_RNA (1)...(19): siRNA sense strand
ugaacacuguggauuucuu

SEQ ID NO: 1986406 - RNA, 19 nt, Homo sapiens
  misc_RNA (1)...(19): siRNA sense strand
cagaucaacauguuauaug

SEQ ID NO: 1986407 - RNA, 19 nt, Homo sapiens
  misc_RNA (1)...(19): siRNA sense strand
gaucaacauguuauaugga

SEQ ID NO: 1986408 - RNA, 19 nt, Homo sapiens
  misc_RNA (1)...(19): siRNA sense strand
caccucaacaccuccuuua

SEQ ID NO: 1986409 - RNA, 19 nt, Homo sapiens
  misc_RNA (1)...(19): siRNA sense strand
ucaaauguucugcaccaaa

SEQ ID NO: 1986410 - RNA, 19 nt, Homo sapiens
  misc_RNA (1)...(19): siRNA sense strand
ugagacaagcuguuauguu

SEQ ID NO: 1986411 - RNA, 19 nt, Homo sapiens
  misc_RNA (1)...(19): siRNA sense strand
acacuguggauuucuuuaa

SEQ ID NO: 1986412 - RNA, 19 nt, Homo sapiens
  misc_RNA (1)...(19): siRNA sense strand
ggauuucuuuaaccagauc

SEQ ID NO: 1986413 - RNA, 19 nt, Homo sapiens
  misc_RNA (1)...(19): siRNA sense strand
cagcagccgcucuucuaaa

SEQ ID NO: 1986414 - RNA, 19 nt, Homo sapiens
  misc_RNA (1)...(19): siRNA sense strand
augaauggauugcugugaa

SEQ ID NO: 1986415 - RNA, 19 nt, Homo sapiens
  misc_RNA (1)...(19): siRNA sense strand
aaacuuggaucaaaagaca

SEQ ID NO: 1986416 - RNA, 19 nt, Homo sapiens
  misc_RNA (1)...(19): siRNA sense strand
gcagguccgagauaugaau

SEQ ID NO: 1986417 - RNA, 19 nt, Homo sapiens
  misc_RNA (1)...(19): siRNA sense strand
agaucaacauguuauaugg

SEQ ID NO: 1986418 - RNA, 19 nt, Homo sapiens
  misc_RNA (1)...(19): siRNA sense strand
ccagaucaacauguuauau

SEQ ID NO: 1986419 - RNA, 19 nt, Homo sapiens
  misc_RNA (1)...(19): siRNA sense strand
ugugaacacuguggauuuc

SEQ ID NO: 1986420 - RNA, 19 nt, Homo sapiens
  misc_RNA (1)...(19): siRNA sense strand
agagaaacuuggaucaaaa

SEQ ID NO: 1986421 - RNA, 19 nt, Homo sapiens
  misc_RNA (1)...(19): siRNA sense strand
gaagcaacucuaggaagug

SEQ ID NO: 1986422 - RNA, 19 nt, Homo sapiens
  misc_RNA (1)...(19): siRNA sense strand
cuaggaagugggaaucuga

SEQ ID NO: 1986423 - RNA, 19 nt, Homo sapiens
  misc_RNA (1)...(19): siRNA sense strand
uugacuauuugaugacuug

SEQ ID NO: 1986424 - RNA, 19 nt, Homo sapiens
  misc_RNA (1)...(19): siRNA sense strand
ccucaacaccuccuuuaag

SEQ ID NO: 1986425 - RNA, 19 nt, Homo sapiens
  misc_RNA (1)...(19): siRNA sense strand
caccagcacuuugauucug

SEQ ID NO: 1986426 - RNA, 19 nt, Homo sapiens
  misc_RNA (1)...(19): siRNA sense strand
ugaauggauugcugugaac

SEQ ID NO: 1986427 - RNA, 19 nt, Homo sapiens
  misc_RNA (1)...(19): siRNA sense strand
gagcuggcaccucuucaag

SEQ ID NO: 1986428 - RNA, 19 nt, Homo sapiens
  misc_RNA (1)...(19): siRNA sense strand
guggcaaagacuauucuaa

SEQ ID NO: 1986429 - RNA, 19 nt, Homo sapiens
  misc_RNA (1)...(19): siRNA sense strand
ucagcagccgcucuucuaa

SEQ ID NO: 1986430 - RNA, 19 nt, Homo sapiens
  misc_RNA (1)...(19): siRNA sense strand
cauucaaaccaaagaagaa

SEQ ID NO: 1986431 - RNA, 19 nt, Homo sapiens
  misc_RNA (1)...(19): siRNA sense strand
caacauguuauauggaacu

SEQ ID NO: 1986432 - RNA, 19 nt, Homo sapiens
  misc_RNA (1)...(19): siRNA sense strand
gcugugaacacuguggauu

SEQ ID NO: 1986433 - RNA, 19 nt, Homo sapiens
  misc_RNA (1)...(19): siRNA sense strand
gcuugaugaugaaacucuu

SEQ ID NO: 1986434 - RNA, 19 nt, Homo sapiens
  misc_RNA (1)...(19): siRNA sense strand
cugcagguccgagauauga

SEQ ID NO: 1986435 - RNA, 19 nt, Homo sapiens
  misc_RNA (1)...(19): siRNA sense strand
ucagcuugaugaugaaacu

SEQ ID NO: 1986436 - RNA, 19 nt, Homo sapiens
  misc_RNA (1)...(19): siRNA sense strand
ccaccucaacaccuccuuu

SEQ ID NO: 1986437 - RNA, 19 nt, Homo sapiens
  misc_RNA (1)...(19): siRNA sense strand
agcaagcuguccagucaug

SEQ ID NO: 1986438 - RNA, 19 nt, Homo sapiens
  misc_RNA (1)...(19): siRNA sense strand
acaccuccuuuaagcacuu

SEQ ID NO: 1986439 - RNA, 19 nt, Homo sapiens
  misc_RNA (1)...(19): siRNA sense strand
aaaagccaaucaaauguuc

SEQ ID NO: 1986440 - RNA, 19 nt, Homo sapiens
  misc_RNA (1)...(19): siRNA sense strand
cagguccgagauaugaaua

SEQ ID NO: 1986441 - RNA, 19 nt, Homo sapiens
  misc_RNA (1)...(19): siRNA sense strand
gaacuagaucuguugcuua

SEQ ID NO: 1986442 - RNA, 19 nt, Homo sapiens
  misc_RNA (1)...(19): siRNA sense strand
gaacagggaaauuauucua

SEQ ID NO: 1986443 - RNA, 19 nt, Homo sapiens
  misc_RNA (1)...(19): siRNA sense strand
gaaagauugucucuaacug

SEQ ID NO: 1986444 - RNA, 19 nt, Homo sapiens
  misc_RNA (1)...(19): siRNA sense strand
cuagaucuguugcuuaauu

SEQ ID NO: 1986445 - RNA, 19 nt, Homo sapiens
  misc_RNA (1)...(19): siRNA sense strand
uaacugggaucgauaucaa

SEQ ID NO: 1986446 - RNA, 19 nt, Homo sapiens
  misc_RNA (1)...(19): siRNA sense strand
gaaagaaugggauagugaa

SEQ ID NO: 1986447 - RNA, 19 nt, Homo sapiens
  misc_RNA (1)...(19): siRNA sense strand
caacguugcugccgaacug

SEQ ID NO: 1986448 - RNA, 19 nt, Homo sapiens
  misc_RNA (1)...(19): siRNA sense strand
gagaagagaaugaugaaca

SEQ ID NO: 1986449 - RNA, 19 nt, Homo sapiens
  misc_RNA (1)...(19): siRNA sense strand
gagaaagaaugggauagug

SEQ ID NO: 1986450 - RNA, 19 nt, Homo sapiens
  misc_RNA (1)...(19): siRNA sense strand
gaaccugagcaaccaagua

SEQ ID NO: 1986451 - RNA, 19 nt, Homo sapiens
  misc_RNA (1)...(19): siRNA sense strand
gcagagaccuauggagaag

SEQ ID NO: 1986452 - RNA, 19 nt, Homo sapiens
  misc_RNA (1)...(19): siRNA sense strand
uaaugaaaguggagaguca

SEQ ID NO: 1986453 - RNA, 19 nt, Homo sapiens
  misc_RNA (1)...(19): siRNA sense strand
aagaagaacuagaucuguu

SEQ ID NO: 1986454 - RNA, 19 nt, Homo sapiens
  misc_RNA (1)...(19): siRNA sense strand
gaaaguggagagucacaga

SEQ ID NO: 1986455 - RNA, 19 nt, Homo sapiens
  misc_RNA (1)...(19): siRNA sense strand
gcaaccaaguaccuccaaa

SEQ ID NO: 1986456 - RNA, 19 nt, Homo sapiens
  misc_RNA (1)...(19): siRNA sense strand
uuauguggauagugaguua

SEQ ID NO: 1986457 - RNA, 19 nt, Homo sapiens
  misc_RNA (1)...(19): siRNA sense strand
ggaagaagaacuagaucug

SEQ ID NO: 1986458 - RNA, 19 nt, Homo sapiens
  misc_RNA (1)...(19): siRNA sense strand
aacuagaucuguugcuuaa

SEQ ID NO: 1986459 - RNA, 19 nt, Homo sapiens
  misc_RNA (1)...(19): siRNA sense strand
gaagaagaacuagaucugu

SEQ ID NO: 1986460 - RNA, 19 nt, Homo sapiens
  misc_RNA (1)...(19): siRNA sense strand
gaugaacagggaaauuauu

SEQ ID NO: 1986461 - RNA, 19 nt, Homo sapiens
  misc_RNA (1)...(19): siRNA sense strand
gaggagaaagaaugggaua

SEQ ID NO: 1986462 - RNA, 19 nt, Homo sapiens
  misc_RNA (1)...(19): siRNA sense strand
ucuuugagcugaaaucugu

SEQ ID NO: 1986463 - RNA, 19 nt, Homo sapiens
  misc_RNA (1)...(19): siRNA sense strand
gagaccauuuggaagaaga

SEQ ID NO: 1986464 - RNA, 19 nt, Homo sapiens
  misc_RNA (1)...(19): siRNA sense strand
ccaaagagaacugaugaug

SEQ ID NO: 1986465 - RNA, 19 nt, Homo sapiens
  misc_RNA (1)...(19): siRNA sense strand
ggacagcaugauuuccuaa

SEQ ID NO: 1986466 - RNA, 19 nt, Homo sapiens
  misc_RNA (1)...(19): siRNA sense strand
ggacucauucucacaguuc

SEQ ID NO: 1986467 - RNA, 19 nt, Homo sapiens
  misc_RNA (1)...(19): siRNA sense strand
gguccaagaggaagaaguu

SEQ ID NO: 1986468 - RNA, 19 nt, Homo sapiens
  misc_RNA (1)...(19): siRNA sense strand
ggagaaagaaugggauagu

SEQ ID NO: 1986469 - RNA, 19 nt, Homo sapiens
  misc_RNA (1)...(19): siRNA sense strand
caggagaccauuuggaaga

SEQ ID NO: 1986470 - RNA, 19 nt, Homo sapiens
  misc_RNA (1)...(19): siRNA sense strand
agaaagaaugggauaguga

SEQ ID NO: 1986471 - RNA, 19 nt, Homo sapiens
  misc_RNA (1)...(19): siRNA sense strand
ggaggugguccaagaggaa

SEQ ID NO: 1986472 - RNA, 19 nt, Homo sapiens
  misc_RNA (1)...(19): siRNA sense strand
gauuucaguguccuccuua

SEQ ID NO: 1986473 - RNA, 19 nt, Homo sapiens
  misc_RNA (1)...(19): siRNA sense strand
aaacauggaaccugagcaa

SEQ ID NO: 1986474 - RNA, 19 nt, Homo sapiens
  misc_RNA (1)...(19): siRNA sense strand
agaacuagaucuguugcuu

SEQ ID NO: 1986475 - RNA, 19 nt, Homo sapiens
  misc_RNA (1)...(19): siRNA sense strand
ggauagugaguuauugguu

SEQ ID NO: 1986476 - RNA, 19 nt, Homo sapiens
  misc_RNA (1)...(19): siRNA sense strand
ccaggguacaguuccuuua

SEQ ID NO: 1986477 - RNA, 19 nt, Homo sapiens
  misc_RNA (1)...(19): siRNA sense strand
ccaagaggaagaaguuugu

SEQ ID NO: 1986478 - RNA, 19 nt, Homo sapiens
  misc_RNA (1)...(19): siRNA sense strand
gcccaucuuugagcugaaa

SEQ ID NO: 1986479 - RNA, 19 nt, Homo sapiens
  misc_RNA (1)...(19): siRNA sense strand
aaccaucugugacugaaga

SEQ ID NO: 1986480 - RNA, 19 nt, Homo sapiens
  misc_RNA (1)...(19): siRNA sense strand
gaucuguugcuuaauuuag

SEQ ID NO: 1986481 - RNA, 19 nt, Homo sapiens
  misc_RNA (1)...(19): siRNA sense strand
ccauuuggaagaagaacua

SEQ ID NO: 1986482 - RNA, 19 nt, Homo sapiens
  misc_RNA (1)...(19): siRNA sense strand
gggacucauucucacaguu

SEQ ID NO: 1986483 - RNA, 19 nt, Homo sapiens
  misc_RNA (1)...(19): siRNA sense strand
ggaccugaaauccaaggaa

SEQ ID NO: 1986484 - RNA, 19 nt, Homo sapiens
  misc_RNA (1)...(19): siRNA sense strand
uacaguuccuuuagagguu

SEQ ID NO: 1986485 - RNA, 19 nt, Homo sapiens
  misc_RNA (1)...(19): siRNA sense strand
ggguacaguuccuuuagag

SEQ ID NO: 1986486 - RNA, 19 nt, Homo sapiens
  misc_RNA (1)...(19): siRNA sense strand
caggugaaaccaaagagaa

SEQ ID NO: 1986487 - RNA, 19 nt, Homo sapiens
  misc_RNA (1)...(19): siRNA sense strand
caaaacagaauucagcauu

SEQ ID NO: 1986488 - RNA, 19 nt, Homo sapiens
  misc_RNA (1)...(19): siRNA sense strand
augaugaacagggaaauua

SEQ ID NO: 1986489 - RNA, 19 nt, Homo sapiens
  misc_RNA (1)...(19): siRNA sense strand
gcagucagcaggagaccau

SEQ ID NO: 1986490 - RNA, 19 nt, Homo sapiens
  misc_RNA (1)...(19): siRNA sense strand
agaagagaaugaugaacag

SEQ ID NO: 1986491 - RNA, 19 nt, Homo sapiens
  misc_RNA (1)...(19): siRNA sense strand
gaggaagaaguuugugcaa

SEQ ID NO: 1986492 - RNA, 19 nt, Homo sapiens
  misc_RNA (1)...(19): siRNA sense strand
agaggucaauaaugaaagu

SEQ ID NO: 1986493 - RNA, 19 nt, Homo sapiens
  misc_RNA (1)...(19): siRNA sense strand
aaaccaaagagaacugaug

SEQ ID NO: 1986494 - RNA, 19 nt, Homo sapiens
  misc_RNA (1)...(19): siRNA sense strand
uaccagaucagacgucuca

SEQ ID NO: 1986495 - RNA, 19 nt, Homo sapiens
  misc_RNA (1)...(19): siRNA sense strand
agaagaacuagaucuguug

SEQ ID NO: 1986496 - RNA, 19 nt, Homo sapiens
  misc_RNA (1)...(19): siRNA sense strand
ccgguuugcugaggagaaa

SEQ ID NO: 1986497 - RNA, 19 nt, Homo sapiens
  misc_RNA (1)...(19): siRNA sense strand
uggacagcaugauuuccua

SEQ ID NO: 1986498 - RNA, 19 nt, Homo sapiens
  misc_RNA (1)...(19): siRNA sense strand
gaugacagcgaugcagaga

SEQ ID NO: 1986499 - RNA, 19 nt, Homo sapiens
  misc_RNA (1)...(19): siRNA sense strand
ggagaccauuuggaagaag

SEQ ID NO: 1986500 - RNA, 19 nt, Homo sapiens
  misc_RNA (1)...(19): siRNA sense strand
aaccaaagagaacugauga

SEQ ID NO: 1986501 - RNA, 19 nt, Homo sapiens
  misc_RNA (1)...(19): siRNA sense strand
cauggaaccugagcaacca

SEQ ID NO: 1986502 - RNA, 19 nt, Homo sapiens
  misc_RNA (1)...(19): siRNA sense strand
agaaugggauagugaagcu

SEQ ID NO: 1986503 - RNA, 19 nt, Homo sapiens
  misc_RNA (1)...(19): siRNA sense strand
gaauucagcauuuuaugug

SEQ ID NO: 1986504 - RNA, 19 nt, Homo sapiens
  misc_RNA (1)...(19): siRNA sense strand
ucacagaggggaacagauu

SEQ ID NO: 1986505 - RNA, 19 nt, Homo sapiens
  misc_RNA (1)...(19): siRNA sense strand
ugaugaacagggaaauuau

SEQ ID NO: 1986506 - RNA, 19 nt, Homo sapiens
  misc_RNA (1)...(19): siRNA sense strand
gaugauggcaagggauuag

SEQ ID NO: 1986507 - RNA, 19 nt, Homo sapiens
  misc_RNA (1)...(19): siRNA sense strand
cauuuuauguggauaguga

SEQ ID NO: 1986508 - RNA, 19 nt, Homo sapiens
  misc_RNA (1)...(19): siRNA sense strand
ggauagugaagcuucuugu

SEQ ID NO: 1986509 - RNA, 19 nt, Homo sapiens
  misc_RNA (1)...(19): siRNA sense strand
agagaccuauggagaagag

SEQ ID NO: 1986510 - RNA, 19 nt, Homo sapiens
  misc_RNA (1)...(19): siRNA sense strand
uuccucaggugaaaccaaa

SEQ ID NO: 1986511 - RNA, 19 nt, Homo sapiens
  misc_RNA (1)...(19): siRNA sense strand
gauagugaagcuucuuguc

SEQ ID NO: 1986512 - RNA, 19 nt, Homo sapiens
  misc_RNA (1)...(19): siRNA sense strand
gggauagugaagcuucuug

SEQ ID NO: 1986513 - RNA, 19 nt, Homo sapiens
  misc_RNA (1)...(19): siRNA sense strand
agaaugaugaacagggaaa

SEQ ID NO: 1986514 - RNA, 19 nt, Homo sapiens
  misc_RNA (1)...(19): siRNA sense strand
ugaagcuucuuguccaaaa

SEQ ID NO: 1986515 - RNA, 19 nt, Homo sapiens
  misc_RNA (1)...(19): siRNA sense strand
aggagaccauuuggaagaa

SEQ ID NO: 1986516 - RNA, 19 nt, Homo sapiens
  misc_RNA (1)...(19): siRNA sense strand
agauuucaguguccuccuu

SEQ ID NO: 1986517 - RNA, 19 nt, Homo sapiens
  misc_RNA (1)...(19): siRNA sense strand
gaaaccaaagagaacugau

SEQ ID NO: 1986518 - RNA, 19 nt, Homo sapiens
  misc_RNA (1)...(19): siRNA sense strand
agaaagauugucucuaacu

SEQ ID NO: 1986519 - RNA, 19 nt, Homo sapiens
  misc_RNA (1)...(19): siRNA sense strand
gguucgagcccuucaagag

SEQ ID NO: 1986520 - RNA, 19 nt, Homo sapiens
  misc_RNA (1)...(19): siRNA sense strand
aggguacaguuccuuuaga

SEQ ID NO: 1986521 - RNA, 19 nt, Homo sapiens
  misc_RNA (1)...(19): siRNA sense strand
gaaauggccuuuacugaga

SEQ ID NO: 1986522 - RNA, 19 nt, Homo sapiens
  misc_RNA (1)...(19): siRNA sense strand
gagcaugcauguaaauuaa

SEQ ID NO: 1986523 - RNA, 19 nt, Homo sapiens
  misc_RNA (1)...(19): siRNA sense strand
caacaaagaugaugauucu

SEQ ID NO: 1986524 - RNA, 19 nt, Homo sapiens
  misc_RNA (1)...(19): siRNA sense strand
gcagauggauucaauggaa

SEQ ID NO: 1986525 - RNA, 19 nt, Homo sapiens
  misc_RNA (1)...(19): siRNA sense strand
ggaguagacuucacacaaa

SEQ ID NO: 1986526 - RNA, 19 nt, Homo sapiens
  misc_RNA (1)...(19): siRNA sense strand
uaaaugagcaugcauguaa

SEQ ID NO: 1986527 - RNA, 19 nt, Homo sapiens
  misc_RNA (1)...(19): siRNA sense strand
gaaagggaauuaauaaguc

SEQ ID NO: 1986528 - RNA, 19 nt, Homo sapiens
  misc_RNA (1)...(19): siRNA sense strand
gcaguggccucuauaaaug

SEQ ID NO: 1986529 - RNA, 19 nt, Homo sapiens
  misc_RNA (1)...(19): siRNA sense strand
gaacaguacuugugucagu

SEQ ID NO: 1986530 - RNA, 19 nt, Homo sapiens
  misc_RNA (1)...(19): siRNA sense strand
caaguaugcuagaauauug

SEQ ID NO: 1986531 - RNA, 19 nt, Homo sapiens
  misc_RNA (1)...(19): siRNA sense strand
ccaauaugcuucugauaga

SEQ ID NO: 1986532 - RNA, 19 nt, Homo sapiens
  misc_RNA (1)...(19): siRNA sense strand
ggagaguccuauagaaguu

SEQ ID NO: 1986533 - RNA, 19 nt, Homo sapiens
  misc_RNA (1)...(19): siRNA sense strand
ugacuugccucauaaaugu

SEQ ID NO: 1986534 - RNA, 19 nt, Homo sapiens
  misc_RNA (1)...(19): siRNA sense strand
gcagugaacucuaccuaca

SEQ ID NO: 1986535 - RNA, 19 nt, Homo sapiens
  misc_RNA (1)...(19): siRNA sense strand
agaccaaacugaugaagaa

SEQ ID NO: 1986536 - RNA, 19 nt, Homo sapiens
  misc_RNA (1)...(19): siRNA sense strand
gauagaacaugccaaacug

SEQ ID NO: 1986537 - RNA, 19 nt, Homo sapiens
  misc_RNA (1)...(19): siRNA sense strand
ucaaaugugugucgaguau

SEQ ID NO: 1986538 - RNA, 19 nt, Homo sapiens
  misc_RNA (1)...(19): siRNA sense strand
gcauaaacguacugauuca

SEQ ID NO: 1986539 - RNA, 19 nt, Homo sapiens
  misc_RNA (1)...(19): siRNA sense strand
caauauagccucuuaagca

SEQ ID NO: 1986540 - RNA, 19 nt, Homo sapiens
  misc_RNA (1)...(19): siRNA sense strand
uaacaauggugaacaugga

SEQ ID NO: 1986541 - RNA, 19 nt, Homo sapiens
  misc_RNA (1)...(19): siRNA sense strand
ggacaaauugaagaucuua

SEQ ID NO: 1986542 - RNA, 19 nt, Homo sapiens
  misc_RNA (1)...(19): siRNA sense strand
gaacaugaaacuaaugauc

SEQ ID NO: 1986543 - RNA, 19 nt, Homo sapiens
  misc_RNA (1)...(19): siRNA sense strand
cagcugacuugccucauaa

SEQ ID NO: 1986544 - RNA, 19 nt, Homo sapiens
  misc_RNA (1)...(19): siRNA sense strand
gaaacagaaaucagaacua

SEQ ID NO: 1986545 - RNA, 19 nt, Homo sapiens
  misc_RNA (1)...(19): siRNA sense strand
gagccaagcuuugaaugug

SEQ ID NO: 1986546 - RNA, 19 nt, Homo sapiens
  misc_RNA (1)...(19): siRNA sense strand
guacaguucuccucaagca

SEQ ID NO: 1986547 - RNA, 19 nt, Homo sapiens
  misc_RNA (1)...(19): siRNA sense strand
ggaaaugaaagggaauuaa

SEQ ID NO: 1986548 - RNA, 19 nt, Homo sapiens
  misc_RNA (1)...(19): siRNA sense strand
ucagcugacuugccucaua

SEQ ID NO: 1986549 - RNA, 19 nt, Homo sapiens
  misc_RNA (1)...(19): siRNA sense strand
agacuucacacaaauguua

SEQ ID NO: 1986550 - RNA, 19 nt, Homo sapiens
  misc_RNA (1)...(19): siRNA sense strand
gaugagguuuggaaaugaa

SEQ ID NO: 1986551 - RNA, 19 nt, Homo sapiens
  misc_RNA (1)...(19): siRNA sense strand
ucacacugcugaagauguu

SEQ ID NO: 1986552 - RNA, 19 nt, Homo sapiens
  misc_RNA (1)...(19): siRNA sense strand
gaagggauuuauuuauguc

SEQ ID NO: 1986553 - RNA, 19 nt, Homo sapiens
  misc_RNA (1)...(19): siRNA sense strand
caaaugacuugccaaaauu

SEQ ID NO: 1986554 - RNA, 19 nt, Homo sapiens
  misc_RNA (1)...(19): siRNA sense strand
gaaaacaauuccucugaga

SEQ ID NO: 1986555 - RNA, 19 nt, Homo sapiens
  misc_RNA (1)...(19): siRNA sense strand
acauuuaucugaagggauu

SEQ ID NO: 1986556 - RNA, 19 nt, Homo sapiens
  misc_RNA (1)...(19): siRNA sense strand
gaaccgccagcuaaacuuu

SEQ ID NO: 1986557 - RNA, 19 nt, Homo sapiens
  misc_RNA (1)...(19): siRNA sense strand
aaacagaaaucagaacuac

SEQ ID NO: 1986558 - RNA, 19 nt, Homo sapiens
  misc_RNA (1)...(19): siRNA sense strand
gaguagacuucacacaaau

SEQ ID NO: 1986559 - RNA, 19 nt, Homo sapiens
  misc_RNA (1)...(19): siRNA sense strand
caaagaugaugauucugau

SEQ ID NO: 1986560 - RNA, 19 nt, Homo sapiens
  misc_RNA (1)...(19): siRNA sense strand
uguagugacugcuugauga

SEQ ID NO: 1986561 - RNA, 19 nt, Homo sapiens
  misc_RNA (1)...(19): siRNA sense strand
gcaagcauuuaaauucaca

SEQ ID NO: 1986562 - RNA, 19 nt, Homo sapiens
  misc_RNA (1)...(19): siRNA sense strand
cagcagaaauggccuuuac

SEQ ID NO: 1986563 - RNA, 19 nt, Homo sapiens
  misc_RNA (1)...(19): siRNA sense strand
gacaagagccaagcuuuga

SEQ ID NO: 1986564 - RNA, 19 nt, Homo sapiens
  misc_RNA (1)...(19): siRNA sense strand
cugcugauauuguaauuug

SEQ ID NO: 1986565 - RNA, 19 nt, Homo sapiens
  misc_RNA (1)...(19): siRNA sense strand
caacaggacaaauugaaga

SEQ ID NO: 1986566 - RNA, 19 nt, Homo sapiens
  misc_RNA (1)...(19): siRNA sense strand
ugagacagccagauuuaaa

SEQ ID NO: 1986567 - RNA, 19 nt, Homo sapiens
  misc_RNA (1)...(19): siRNA sense strand
cugaagggauuuauuuaug

SEQ ID NO: 1986568 - RNA, 19 nt, Homo sapiens
  misc_RNA (1)...(19): siRNA sense strand
gcuagaauauugcaagcau

SEQ ID NO: 1986569 - RNA, 19 nt, Homo sapiens
  misc_RNA (1)...(19): siRNA sense strand
gcauagccaugugguaaau

SEQ ID NO: 1986570 - RNA, 19 nt, Homo sapiens
  misc_RNA (1)...(19): siRNA sense strand
uaugagacagccagauuua

SEQ ID NO: 1986571 - RNA, 19 nt, Homo sapiens
  misc_RNA (1)...(19): siRNA sense strand
uggacaauauagccucuua

SEQ ID NO: 1986572 - RNA, 19 nt, Homo sapiens
  misc_RNA (1)...(19): siRNA sense strand
acaaagaugaugauucuga

SEQ ID NO: 1986573 - RNA, 19 nt, Homo sapiens
  misc_RNA (1)...(19): siRNA sense strand
ugagcaugcauguaaauua

SEQ ID NO: 1986574 - RNA, 19 nt, Homo sapiens
  misc_RNA (1)...(19): siRNA sense strand
ucaaaugacuugccaaaau

SEQ ID NO: 1986575 - RNA, 19 nt, Homo sapiens
  misc_RNA (1)...(19): siRNA sense strand
guauaacaauggugaacau

SEQ ID NO: 1986576 - RNA, 19 nt, Homo sapiens
  misc_RNA (1)...(19): siRNA sense strand
gcagaaauggccuuuacug

SEQ ID NO: 1986577 - RNA, 19 nt, Homo sapiens
  misc_RNA (1)...(19): siRNA sense strand
aauauagccucuuaagcaa

SEQ ID NO: 1986578 - RNA, 19 nt, Homo sapiens
  misc_RNA (1)...(19): siRNA sense strand
aagcauaaacguacugauu

SEQ ID NO: 1986579 - RNA, 19 nt, Homo sapiens
  misc_RNA (1)...(19): siRNA sense strand
guacuugugucaguucugu

SEQ ID NO: 1986580 - RNA, 19 nt, Homo sapiens
  misc_RNA (1)...(19): siRNA sense strand
caucuagauuucaagcauu

SEQ ID NO: 1986581 - RNA, 19 nt, Homo sapiens
  misc_RNA (1)...(19): siRNA sense strand
ugaaacuaaugauccagaa

SEQ ID NO: 1986582 - RNA, 19 nt, Homo sapiens
  misc_RNA (1)...(19): siRNA sense strand
acaggcauguugcuauuga

SEQ ID NO: 1986583 - RNA, 19 nt, Homo sapiens
  misc_RNA (1)...(19): siRNA sense strand
gaugaagaaccgccagcua

SEQ ID NO: 1986584 - RNA, 19 nt, Homo sapiens
  misc_RNA (1)...(19): siRNA sense strand
ccucauaaauguagugacu

SEQ ID NO: 1986585 - RNA, 19 nt, Homo sapiens
  misc_RNA (1)...(19): siRNA sense strand
ggacaauauagccucuuaa

SEQ ID NO: 1986586 - RNA, 19 nt, Homo sapiens
  misc_RNA (1)...(19): siRNA sense strand
aaacuaaugauccagaaga

SEQ ID NO: 1986587 - RNA, 19 nt, Homo sapiens
  misc_RNA (1)...(19): siRNA sense strand
gauguacaguucuccucaa

SEQ ID NO: 1986588 - RNA, 19 nt, Homo sapiens
  misc_RNA (1)...(19): siRNA sense strand
cagaaauggccuuuacuga

SEQ ID NO: 1986589 - RNA, 19 nt, Homo sapiens
  misc_RNA (1)...(19): siRNA sense strand
ugaagaaccgccagcuaaa

SEQ ID NO: 1986590 - RNA, 19 nt, Homo sapiens
  misc_RNA (1)...(19): siRNA sense strand
cuacacccuucucguuauu

SEQ ID NO: 1986591 - RNA, 19 nt, Homo sapiens
  misc_RNA (1)...(19): siRNA sense strand
aaaugagcaugcauguaaa

SEQ ID NO: 1986592 - RNA, 19 nt, Homo sapiens
  misc_RNA (1)...(19): siRNA sense strand
ggaaucaaggccagaaaca

SEQ ID NO: 1986593 - RNA, 19 nt, Homo sapiens
  misc_RNA (1)...(19): siRNA sense strand
uuagugaucaccucuauug

SEQ ID NO: 1986594 - RNA, 19 nt, Homo sapiens
  misc_RNA (1)...(19): siRNA sense strand
gaguaugcaaggaaaguuu

SEQ ID NO: 1986595 - RNA, 19 nt, Homo sapiens
  misc_RNA (1)...(19): siRNA sense strand
ggauuaugauauagagaca

SEQ ID NO: 1986596 - RNA, 19 nt, Homo sapiens
  misc_RNA (1)...(19): siRNA sense strand
ggaauuuucucugaucauu

SEQ ID NO: 1986597 - RNA, 19 nt, Homo sapiens
  misc_RNA (1)...(19): siRNA sense strand
gaucauuguuacagugucu

SEQ ID NO: 1986598 - RNA, 19 nt, Homo sapiens
  misc_RNA (1)...(19): siRNA sense strand
guaaaugagcaugcaugua

SEQ ID NO: 1986599 - RNA, 19 nt, Homo sapiens
  misc_RNA (1)...(19): siRNA sense strand
uccaauugcuguagaagug

SEQ ID NO: 1986600 - RNA, 19 nt, Homo sapiens
  misc_RNA (1)...(19): siRNA sense strand
caggacaaauugaagaucu

SEQ ID NO: 1986601 - RNA, 19 nt, Homo sapiens
  misc_RNA (1)...(19): siRNA sense strand
gccagaaacagaaaucaga

SEQ ID NO: 1986602 - RNA, 19 nt, Homo sapiens
  misc_RNA (1)...(19): siRNA sense strand
gaaccucagccagcacauu

SEQ ID NO: 1986603 - RNA, 19 nt, Homo sapiens
  misc_RNA (1)...(19): siRNA sense strand
aagcagaauugcagaugga

SEQ ID NO: 1986604 - RNA, 19 nt, Homo sapiens
  misc_RNA (1)...(19): siRNA sense strand
ggugaacauggacaauaua

SEQ ID NO: 1986605 - RNA, 19 nt, Homo sapiens
  misc_RNA (1)...(19): siRNA sense strand
ucugugaacaugaaacuaa

SEQ ID NO: 1986606 - RNA, 19 nt, Homo sapiens
  misc_RNA (1)...(19): siRNA sense strand
auaccgagacgucaaauga

SEQ ID NO: 1986607 - RNA, 19 nt, Homo sapiens
  misc_RNA (1)...(19): siRNA sense strand
ugacaagagccaagcuuug

SEQ ID NO: 1986608 - RNA, 19 nt, Homo sapiens
  misc_RNA (1)...(19): siRNA sense strand
uggugaacauggacaauau

SEQ ID NO: 1986609 - RNA, 19 nt, Homo sapiens
  misc_RNA (1)...(19): siRNA sense strand
agugaacucuaccuacauu

SEQ ID NO: 1986610 - RNA, 19 nt, Homo sapiens
  misc_RNA (1)...(19): siRNA sense strand
gacaauauagccucuuaag

SEQ ID NO: 1986611 - RNA, 19 nt, Homo sapiens
  misc_RNA (1)...(19): siRNA sense strand
ugaugagguuuggaaauga

SEQ ID NO: 1986612 - RNA, 19 nt, Homo sapiens
  misc_RNA (1)...(19): siRNA sense strand
uugaugagguuuggaaaug

SEQ ID NO: 1986613 - RNA, 19 nt, Homo sapiens
  misc_RNA (1)...(19): siRNA sense strand
ggccuuuacugagagcuaa

SEQ ID NO: 1986614 - RNA, 19 nt, Homo sapiens
  misc_RNA (1)...(19): siRNA sense strand
ggaauuaauaagucaccuu

SEQ ID NO: 1986615 - RNA, 19 nt, Homo sapiens
  misc_RNA (1)...(19): siRNA sense strand
ccagaaacagaaaucagaa

SEQ ID NO: 1986616 - RNA, 19 nt, Homo sapiens
  misc_RNA (1)...(19): siRNA sense strand
ucaauggaauuuucucuga

SEQ ID NO: 1986617 - RNA, 19 nt, Homo sapiens
  misc_RNA (1)...(19): siRNA sense strand
cuaaugauccagaagacuu

SEQ ID NO: 1986618 - RNA, 19 nt, Homo sapiens
  misc_RNA (1)...(19): siRNA sense strand
aaucaaggccagaaacaga

SEQ ID NO: 1986619 - RNA, 19 nt, Homo sapiens
  misc_RNA (1)...(19): siRNA sense strand
acagugugauguacaguuc

SEQ ID NO: 1986620 - RNA, 19 nt, Homo sapiens
  misc_RNA (1)...(19): siRNA sense strand
gugaacaugaaacuaauga

SEQ ID NO: 1986621 - RNA, 19 nt, Homo sapiens
  misc_RNA (1)...(19): siRNA sense strand
gaacuuguuucgcaaauuu

SEQ ID NO: 1986622 - RNA, 19 nt, Homo sapiens
  misc_RNA (1)...(19): siRNA sense strand
gaagugaucuccaaaauga

SEQ ID NO: 1986623 - RNA, 19 nt, Homo sapiens
  misc_RNA (1)...(19): siRNA sense strand
gaucuauaccugcuaauua

SEQ ID NO: 1986624 - RNA, 19 nt, Homo sapiens
  misc_RNA (1)...(19): siRNA sense strand
ggagaaacuucaauauuca

SEQ ID NO: 1986625 - RNA, 19 nt, Homo sapiens
  misc_RNA (1)...(19): siRNA sense strand
cggagaaacuucaauauuc

SEQ ID NO: 1986626 - RNA, 19 nt, Homo sapiens
  misc_RNA (1)...(19): siRNA sense strand
gcgcgcagcugcucaagaa

SEQ ID NO: 1986627 - RNA, 19 nt, Homo sapiens
  misc_RNA (1)...(19): siRNA sense strand
ucaagaaguucaucaagau

SEQ ID NO: 1986628 - RNA, 19 nt, Homo sapiens
  misc_RNA (1)...(19): siRNA sense strand
ccaaucaccugcagaccaa

SEQ ID NO: 1986629 - RNA, 19 nt, Homo sapiens
  misc_RNA (1)...(19): siRNA sense strand
ggaguaagacccuuguaga

SEQ ID NO: 1986630 - RNA, 19 nt, Homo sapiens
  misc_RNA (1)...(19): siRNA sense strand
ccuacaagcuggaggcaaa

SEQ ID NO: 1986631 - RNA, 19 nt, Homo sapiens
  misc_RNA (1)...(19): siRNA sense strand
gagaucuucugccguguau

SEQ ID NO: 1986632 - RNA, 19 nt, Homo sapiens
  misc_RNA (1)...(19): siRNA sense strand
uagccaugcuucuccauuu

SEQ ID NO: 1986633 - RNA, 19 nt, Homo sapiens
  misc_RNA (1)...(19): siRNA sense strand
ugaggacaauccgcaaaua

SEQ ID NO: 1986634 - RNA, 19 nt, Homo sapiens
  misc_RNA (1)...(19): siRNA sense strand
ugacggagaaacuucaaua

SEQ ID NO: 1986635 - RNA, 19 nt, Homo sapiens
  misc_RNA (1)...(19): siRNA sense strand
ucgagaagcugcauucagu

SEQ ID NO: 1986636 - RNA, 19 nt, Homo sapiens
  misc_RNA (1)...(19): siRNA sense strand
ccugaccacucuuauguga

SEQ ID NO: 1986637 - RNA, 19 nt, Homo sapiens
  misc_RNA (1)...(19): siRNA sense strand
cagggaaauucaagaacuu

SEQ ID NO: 1986638 - RNA, 19 nt, Homo sapiens
  misc_RNA (1)...(19): siRNA sense strand
cucaagaaguucaucaaga

SEQ ID NO: 1986639 - RNA, 19 nt, Homo sapiens
  misc_RNA (1)...(19): siRNA sense strand
gaguaagacccuuguagau

SEQ ID NO: 1986640 - RNA, 19 nt, Homo sapiens
  misc_RNA (1)...(19): siRNA sense strand
ccagggaaauucaagaacu

SEQ ID NO: 1986641 - RNA, 19 nt, Homo sapiens
  misc_RNA (1)...(19): siRNA sense strand
guagaugguuuggugaaca

SEQ ID NO: 1986642 - RNA, 19 nt, Homo sapiens
  misc_RNA (1)...(19): siRNA sense strand
uggagacgguggaacuaaa

SEQ ID NO: 1986643 - RNA, 19 nt, Homo sapiens
  misc_RNA (1)...(19): siRNA sense strand
auacaugccugaccacucu

SEQ ID NO: 1986644 - RNA, 19 nt, Homo sapiens
  misc_RNA (1)...(19): siRNA sense strand
ggaggcaaacagucaguga

SEQ ID NO: 1986645 - RNA, 19 nt, Homo sapiens
  misc_RNA (1)...(19): siRNA sense strand
ggaucuauaccugcuaauu

SEQ ID NO: 1986646 - RNA, 19 nt, Homo sapiens
  misc_RNA (1)...(19): siRNA sense strand
gaucuucugccguguauac

SEQ ID NO: 1986647 - RNA, 19 nt, Homo sapiens
  misc_RNA (1)...(19): siRNA sense strand
aaggaucuauaccugcuaa

SEQ ID NO: 1986648 - RNA, 19 nt, Homo sapiens
  misc_RNA (1)...(19): siRNA sense strand
uaaagauuccagaggagaa

SEQ ID NO: 1986649 - RNA, 19 nt, Homo sapiens
  misc_RNA (1)...(19): siRNA sense strand
cagcaucugugcaggacau

SEQ ID NO: 1986650 - RNA, 19 nt, Homo sapiens
  misc_RNA (1)...(19): siRNA sense strand
gacgguggaacuaaagauu

SEQ ID NO: 1986651 - RNA, 19 nt, Homo sapiens
  misc_RNA (1)...(19): siRNA sense strand
ucuucgagcucuccuacaa

SEQ ID NO: 1986652 - RNA, 19 nt, Homo sapiens
  misc_RNA (1)...(19): siRNA sense strand
gaagcugccagggaaauuc

SEQ ID NO: 1986653 - RNA, 19 nt, Homo sapiens
  misc_RNA (1)...(19): siRNA sense strand
caaccagaaccuccucuuc

SEQ ID NO: 1986654 - RNA, 19 nt, Homo sapiens
  misc_RNA (1)...(19): siRNA sense strand
gacggagaaacuucaauau

SEQ ID NO: 1986655 - RNA, 19 nt, Homo sapiens
  misc_RNA (1)...(19): siRNA sense strand
gcaggaaccacaaaagcua

SEQ ID NO: 1986656 - RNA, 19 nt, Homo sapiens
  misc_RNA (1)...(19): siRNA sense strand
ggagaagcugccagggaaa

SEQ ID NO: 1986657 - RNA, 19 nt, Homo sapiens
  misc_RNA (1)...(19): siRNA sense strand
acggagaaacuucaauauu

SEQ ID NO: 1986658 - RNA, 19 nt, Homo sapiens
  misc_RNA (1)...(19): siRNA sense strand
caucaucaaggaucuauac

SEQ ID NO: 1986659 - RNA, 19 nt, Homo sapiens
  misc_RNA (1)...(19): siRNA sense strand
gaggacaauccgcaaauac

SEQ ID NO: 1986660 - RNA, 19 nt, Homo sapiens
  misc_RNA (1)...(19): siRNA sense strand
cuauaccugcuaauuauga

SEQ ID NO: 1986661 - RNA, 19 nt, Homo sapiens
  misc_RNA (1)...(19): siRNA sense strand
gggaguaagacccuuguag

SEQ ID NO: 1986662 - RNA, 19 nt, Homo sapiens
  misc_RNA (1)...(19): siRNA sense strand
gagaagcugccagggaaau

SEQ ID NO: 1986663 - RNA, 19 nt, Homo sapiens
  misc_RNA (1)...(19): siRNA sense strand
cgcagcugcucaagaaguu

SEQ ID NO: 1986664 - RNA, 19 nt, Homo sapiens
  misc_RNA (1)...(19): siRNA sense strand
guucguggacuacguguuc

SEQ ID NO: 1986665 - RNA, 19 nt, Homo sapiens
  misc_RNA (1)...(19): siRNA sense strand
gacauucugggcucuguga

SEQ ID NO: 1986666 - RNA, 19 nt, Homo sapiens
  misc_RNA (1)...(19): siRNA sense strand
guacucgggacagcuauga

SEQ ID NO: 1986667 - RNA, 19 nt, Homo sapiens
  misc_RNA (1)...(19): siRNA sense strand
gaacaucgagaagcugcau

SEQ ID NO: 1986668 - RNA, 19 nt, Homo sapiens
  misc_RNA (1)...(19): siRNA sense strand
agaacuuguuucgcaaauu

SEQ ID NO: 1986669 - RNA, 19 nt, Homo sapiens
  misc_RNA (1)...(19): siRNA sense strand
cuucugccguguauacaug

SEQ ID NO: 1986670 - RNA, 19 nt, Homo sapiens
  misc_RNA (1)...(19): siRNA sense strand
ggagacgguggaacuaaag

SEQ ID NO: 1986671 - RNA, 19 nt, Homo sapiens
  misc_RNA (1)...(19): siRNA sense strand
gcucaagaaguucaucaag

SEQ ID NO: 1986672 - RNA, 19 nt, Homo sapiens
  misc_RNA (1)...(19): siRNA sense strand
gcgcagcugcucaagaagu

SEQ ID NO: 1986673 - RNA, 19 nt, Homo sapiens
  misc_RNA (1)...(19): siRNA sense strand
ccacaaaagcuaccgagaa

SEQ ID NO: 1986674 - RNA, 19 nt, Homo sapiens
  misc_RNA (1)...(19): siRNA sense strand
ugagaucuucugccgugua

SEQ ID NO: 1986675 - RNA, 19 nt, Homo sapiens
  misc_RNA (1)...(19): siRNA sense strand
uagaugguuuggugaacau

SEQ ID NO: 1986676 - RNA, 19 nt, Homo sapiens
  misc_RNA (1)...(19): siRNA sense strand
caagaaguucaucaagauc

SEQ ID NO: 1986677 - RNA, 19 nt, Homo sapiens
  misc_RNA (1)...(19): siRNA sense strand
ugcaugagcuggaguucgu

SEQ ID NO: 1986678 - RNA, 19 nt, Homo sapiens
  misc_RNA (1)...(19): siRNA sense strand
uaagacccuuguagauggu

SEQ ID NO: 1986679 - RNA, 19 nt, Homo sapiens
  misc_RNA (1)...(19): siRNA sense strand
aguaagacccuuguagaug

SEQ ID NO: 1986680 - RNA, 19 nt, Homo sapiens
  misc_RNA (1)...(19): siRNA sense strand
cacaaaagcuaccgagaag

SEQ ID NO: 1986681 - RNA, 19 nt, Homo sapiens
  misc_RNA (1)...(19): siRNA sense strand
aagaacuuguuucgcaaau

SEQ ID NO: 1986682 - RNA, 19 nt, Homo sapiens
  misc_RNA (1)...(19): siRNA sense strand
gggcucugaugagaucuuc

SEQ ID NO: 1986683 - RNA, 19 nt, Homo sapiens
  misc_RNA (1)...(19): siRNA sense strand
caaaagcuaccgagaagug

SEQ ID NO: 1986684 - RNA, 19 nt, Homo sapiens
  misc_RNA (1)...(19): siRNA sense strand
ucaccgcacugggcaucaa

SEQ ID NO: 1986685 - RNA, 19 nt, Homo sapiens
  misc_RNA (1)...(19): siRNA sense strand
guggagacgguggaacuaa

SEQ ID NO: 1986686 - RNA, 19 nt, Homo sapiens
  misc_RNA (1)...(19): siRNA sense strand
ccaugcuucuccauuucuu

SEQ ID NO: 1986687 - RNA, 19 nt, Homo sapiens
  misc_RNA (1)...(19): siRNA sense strand
gcucugaugagaucuucug

SEQ ID NO: 1986688 - RNA, 19 nt, Homo sapiens
  misc_RNA (1)...(19): siRNA sense strand
ggucaucgacaaccagaac

SEQ ID NO: 1986689 - RNA, 19 nt, Homo sapiens
  misc_RNA (1)...(19): siRNA sense strand
gcagaccaaggccuaugug

SEQ ID NO: 1986690 - RNA, 19 nt, Homo sapiens
  misc_RNA (1)...(19): siRNA sense strand
gagacgguggaacuaaaga

SEQ ID NO: 1986691 - RNA, 19 nt, Homo sapiens
  misc_RNA (1)...(19): siRNA sense strand
gugaggacaauccgcaaau

SEQ ID NO: 1986692 - RNA, 19 nt, Homo sapiens
  misc_RNA (1)...(19): siRNA sense strand
accagaaccuccucuucga

SEQ ID NO: 1986693 - RNA, 19 nt, Homo sapiens
  misc_RNA (1)...(19): siRNA sense strand
cgacacaucucucaucaga

SEQ ID NO: 1986694 - RNA, 19 nt, Homo sapiens
  misc_RNA (1)...(19): siRNA sense strand
ugaauccguucgaguauua

SEQ ID NO: 1986695 - RNA, 19 nt, Homo sapiens
  misc_RNA (1)...(19): siRNA sense strand
caaccuggcugagaugauu

SEQ ID NO: 1986696 - RNA, 19 nt, Homo sapiens
  misc_RNA (1)...(19): siRNA sense strand
aaauguggcuucaucacua

SEQ ID NO: 1986697 - RNA, 19 nt, Homo sapiens
  misc_RNA (1)...(19): siRNA sense strand
gcuaugagaucgccagcuu

SEQ ID NO: 1986698 - RNA, 19 nt, Homo sapiens
  misc_RNA (1)...(19): siRNA sense strand
gaaacucuaccucuucuug

SEQ ID NO: 1986699 - RNA, 19 nt, Homo sapiens
  misc_RNA (1)...(19): siRNA sense strand
ggagaaaugggcacccuuu

SEQ ID NO: 1986700 - RNA, 19 nt, Homo sapiens
  misc_RNA (1)...(19): siRNA sense strand
ucagaaaggugagcagcua

SEQ ID NO: 1986701 - RNA, 19 nt, Homo sapiens
  misc_RNA (1)...(19): siRNA sense strand
guucgaguauuacauauuc

SEQ ID NO: 1986702 - RNA, 19 nt, Homo sapiens
  misc_RNA (1)...(19): siRNA sense strand
aggagaaccugcugaugua

SEQ ID NO: 1986703 - RNA, 19 nt, Homo sapiens
  misc_RNA (1)...(19): siRNA sense strand
gaaaugggcacccuuuguc

SEQ ID NO: 1986704 - RNA, 19 nt, Homo sapiens
  misc_RNA (1)...(19): siRNA sense strand
gcagaaacucuaccucuuc

SEQ ID NO: 1986705 - RNA, 19 nt, Homo sapiens
  misc_RNA (1)...(19): siRNA sense strand
ucaaugggcugcgaagguu

SEQ ID NO: 1986706 - RNA, 19 nt, Homo sapiens
  misc_RNA (1)...(19): siRNA sense strand
ccaacgaccuggacgagau

SEQ ID NO: 1986707 - RNA, 19 nt, Homo sapiens
  misc_RNA (1)...(19): siRNA sense strand
gguaccagaucaucaaugg

SEQ ID NO: 1986708 - RNA, 19 nt, Homo sapiens
  misc_RNA (1)...(19): siRNA sense strand
cugcgaagguuugaaauug

SEQ ID NO: 1986709 - RNA, 19 nt, Homo sapiens
  misc_RNA (1)...(19): siRNA sense strand
gagcuguccuggagaugug

SEQ ID NO: 1986710 - RNA, 19 nt, Homo sapiens
  misc_RNA (1)...(19): siRNA sense strand
ccaccacacuagccuccua

SEQ ID NO: 1986711 - RNA, 19 nt, Homo sapiens
  misc_RNA (1)...(19): siRNA sense strand
caaguuguuugugggcuuu

SEQ ID NO: 1986712 - RNA, 19 nt, Homo sapiens
  misc_RNA (1)...(19): siRNA sense strand
gaaauguggcuucaucacu

SEQ ID NO: 1986713 - RNA, 19 nt, Homo sapiens
  misc_RNA (1)...(19): siRNA sense strand
gaagguuugaaauugagua

SEQ ID NO: 1986714 - RNA, 19 nt, Homo sapiens
  misc_RNA (1)...(19): siRNA sense strand
ggccaggacugcaaguaca

SEQ ID NO: 1986715 - RNA, 19 nt, Homo sapiens
  misc_RNA (1)...(19): siRNA sense strand
gaaaggugagcagcuauuc

SEQ ID NO: 1986716 - RNA, 19 nt, Homo sapiens
  misc_RNA (1)...(19): siRNA sense strand
gauguacaccaaguuguuu

SEQ ID NO: 1986717 - RNA, 19 nt, Homo sapiens
  misc_RNA (1)...(19): siRNA sense strand
ucgcucagcucaucacaca

SEQ ID NO: 1986718 - RNA, 19 nt, Homo sapiens
  misc_RNA (1)...(19): siRNA sense strand
ggagaaggcccuggaguac

SEQ ID NO: 1986719 - RNA, 19 nt, Homo sapiens
  misc_RNA (1)...(19): siRNA sense strand
gcaccacccaggaugagaa

SEQ ID NO: 1986720 - RNA, 19 nt, Homo sapiens
  misc_RNA (1)...(19): siRNA sense strand
ucucauggcugggcuuuag

SEQ ID NO: 1986721 - RNA, 19 nt, Homo sapiens
  misc_RNA (1)...(19): siRNA sense strand
gcgaagguuugaaauugag

SEQ ID NO: 1986722 - RNA, 19 nt, Homo sapiens
  misc_RNA (1)...(19): siRNA sense strand
gggcugcgaagguuugaaa

SEQ ID NO: 1986723 - RNA, 19 nt, Homo sapiens
  misc_RNA (1)...(19): siRNA sense strand
ggaguaccugcgccagaua

SEQ ID NO: 1986724 - RNA, 19 nt, Homo sapiens
  misc_RNA (1)...(19): siRNA sense strand
gacaccagccauacccuuu

SEQ ID NO: 1986725 - RNA, 19 nt, Homo sapiens
  misc_RNA (1)...(19): siRNA sense strand
gguuugaaauugaguacca

SEQ ID NO: 1986726 - RNA, 19 nt, Homo sapiens
  misc_RNA (1)...(19): siRNA sense strand
uggagaaggcccuggagua

SEQ ID NO: 1986727 - RNA, 19 nt, Homo sapiens
  misc_RNA (1)...(19): siRNA sense strand
gagaaaugggcacccuuug

SEQ ID NO: 1986728 - RNA, 19 nt, Homo sapiens
  misc_RNA (1)...(19): siRNA sense strand
ucagagcuguccuggagau

SEQ ID NO: 1986729 - RNA, 19 nt, Homo sapiens
  misc_RNA (1)...(19): siRNA sense strand
ccacaacaagguccaguuc

SEQ ID NO: 1986730 - RNA, 19 nt, Homo sapiens
  misc_RNA (1)...(19): siRNA sense strand
ugcgaagguuugaaauuga

SEQ ID NO: 1986731 - RNA, 19 nt, Homo sapiens
  misc_RNA (1)...(19): siRNA sense strand
ucacugaugccuccuucaa

SEQ ID NO: 1986732 - RNA, 19 nt, Homo sapiens
  misc_RNA (1)...(19): siRNA sense strand
gcugcgaagguuugaaauu

SEQ ID NO: 1986733 - RNA, 19 nt, Homo sapiens
  misc_RNA (1)...(19): siRNA sense strand
aagcgcagcucaggcaguu

SEQ ID NO: 1986734 - RNA, 19 nt, Homo sapiens
  misc_RNA (1)...(19): siRNA sense strand
uaaagcgacacaucucuca

SEQ ID NO: 1986735 - RNA, 19 nt, Homo sapiens
  misc_RNA (1)...(19): siRNA sense strand
acuauuccuuggagaugua

SEQ ID NO: 1986736 - RNA, 19 nt, Homo sapiens
  misc_RNA (1)...(19): siRNA sense strand
ccauacccuuugcuuccua

SEQ ID NO: 1986737 - RNA, 19 nt, Homo sapiens
  misc_RNA (1)...(19): siRNA sense strand
gccaucaaccacagauuug

SEQ ID NO: 1986738 - RNA, 19 nt, Homo sapiens
  misc_RNA (1)...(19): siRNA sense strand
cuucagacugugccuauuu

SEQ ID NO: 1986739 - RNA, 19 nt, Homo sapiens
  misc_RNA (1)...(19): siRNA sense strand
gcugauguacaccaaguug

SEQ ID NO: 1986740 - RNA, 19 nt, Homo sapiens
  misc_RNA (1)...(19): siRNA sense strand
cgagguucguccagcagaa

SEQ ID NO: 1986741 - RNA, 19 nt, Homo sapiens
  misc_RNA (1)...(19): siRNA sense strand
cuacugaggagcauguguu

SEQ ID NO: 1986742 - RNA, 19 nt, Homo sapiens
  misc_RNA (1)...(19): siRNA sense strand
agacugugccuauuucauc

SEQ ID NO: 1986743 - RNA, 19 nt, Homo sapiens
  misc_RNA (1)...(19): siRNA sense strand
gcucaucacacaggccaaa

SEQ ID NO: 1986744 - RNA, 19 nt, Homo sapiens
  misc_RNA (1)...(19): siRNA sense strand
gcaaguacaccccgauguu

SEQ ID NO: 1986745 - RNA, 19 nt, Homo sapiens
  misc_RNA (1)...(19): siRNA sense strand
gguacgcgccugacaagca

SEQ ID NO: 1986746 - RNA, 19 nt, Homo sapiens
  misc_RNA (1)...(19): siRNA sense strand
gcgcagcucaggcaguuca

SEQ ID NO: 1986747 - RNA, 19 nt, Homo sapiens
  misc_RNA (1)...(19): siRNA sense strand
gggccuuggucugaacuug

SEQ ID NO: 1986748 - RNA, 19 nt, Homo sapiens
  misc_RNA (1)...(19): siRNA sense strand
ugauguacaccaaguuguu

SEQ ID NO: 1986749 - RNA, 19 nt, Homo sapiens
  misc_RNA (1)...(19): siRNA sense strand
agaaaugggcacccuuugu

SEQ ID NO: 1986750 - RNA, 19 nt, Homo sapiens
  misc_RNA (1)...(19): siRNA sense strand
gaagcaccugcacgccuuu

SEQ ID NO: 1986751 - RNA, 19 nt, Homo sapiens
  misc_RNA (1)...(19): siRNA sense strand
cagauuugcaggacagaug

SEQ ID NO: 1986752 - RNA, 19 nt, Homo sapiens
  misc_RNA (1)...(19): siRNA sense strand
ugccaucaaccacagauuu

SEQ ID NO: 1986753 - RNA, 19 nt, Homo sapiens
  misc_RNA (1)...(19): siRNA sense strand
aauguggcuucaucacuau

SEQ ID NO: 1986754 - RNA, 19 nt, Homo sapiens
  misc_RNA (1)...(19): siRNA sense strand
ccaaacacacagccaaguc

SEQ ID NO: 1986755 - RNA, 19 nt, Homo sapiens
  misc_RNA (1)...(19): siRNA sense strand
agaaaggugagcagcuauu

SEQ ID NO: 1986756 - RNA, 19 nt, Homo sapiens
  misc_RNA (1)...(19): siRNA sense strand
gagaaccugcugauguaca

SEQ ID NO: 1986757 - RNA, 19 nt, Homo sapiens
  misc_RNA (1)...(19): siRNA sense strand
agcagaaacucuaccucuu

SEQ ID NO: 1986758 - RNA, 19 nt, Homo sapiens
  misc_RNA (1)...(19): siRNA sense strand
gagguucguccagcagaaa

SEQ ID NO: 1986759 - RNA, 19 nt, Homo sapiens
  misc_RNA (1)...(19): siRNA sense strand
guccaucuccgaccagugu

SEQ ID NO: 1986760 - RNA, 19 nt, Homo sapiens
  misc_RNA (1)...(19): siRNA sense strand
gcugucgucugccaucaac

SEQ ID NO: 1986761 - RNA, 19 nt, Homo sapiens
  misc_RNA (1)...(19): siRNA sense strand
cugaauccguucgaguauu

SEQ ID NO: 1986762 - RNA, 19 nt, Homo sapiens
  misc_RNA (1)...(19): siRNA sense strand
cagaugaauaccuggagaa

SEQ ID NO: 1986763 - RNA, 19 nt, Homo sapiens
  misc_RNA (1)...(19): siRNA sense strand
uccggaagacagaugaaua

SEQ ID NO: 1986764 - RNA, 19 nt, Homo sapiens
  misc_RNA (1)...(19): siRNA sense strand
ccuuggagauguaucaaaa

SEQ ID NO: 1986765 - RNA, 19 nt, Homo sapiens
  misc_RNA (1)...(19): siRNA sense strand
cuucguggccucucuguuc

SEQ ID NO: 1986766 - RNA, 19 nt, Homo sapiens
  misc_RNA (1)...(19): siRNA sense strand
gaguaccugcgccagauau

SEQ ID NO: 1986767 - RNA, 19 nt, Homo sapiens
  misc_RNA (1)...(19): siRNA sense strand
uggaguaccugcgccagau

SEQ ID NO: 1986768 - RNA, 19 nt, Homo sapiens
  misc_RNA (1)...(19): siRNA sense strand
agaaggcccuggaguaccu

SEQ ID NO: 1986769 - RNA, 19 nt, Homo sapiens
  misc_RNA (1)...(19): siRNA sense strand
caacgaccuggacgagaug

SEQ ID NO: 1986770 - RNA, 19 nt, Homo sapiens
  misc_RNA (1)...(19): siRNA sense strand
ugagaugauucagaaaggu

SEQ ID NO: 1986771 - RNA, 19 nt, Homo sapiens
  misc_RNA (1)...(19): siRNA sense strand
acaacaagguccaguucac

SEQ ID NO: 1986772 - RNA, 19 nt, Homo sapiens
  misc_RNA (1)...(19): siRNA sense strand
uaccucuucuugcagcauu

SEQ ID NO: 1986773 - RNA, 19 nt, Homo sapiens
  misc_RNA (1)...(19): siRNA sense strand
cguccguacuucagacugu

SEQ ID NO: 1986774 - RNA, 19 nt, Homo sapiens
  misc_RNA (1)...(19): siRNA sense strand
aaaaugcaguccccucaug

SEQ ID NO: 1986775 - RNA, 19 nt, Homo sapiens
  misc_RNA (1)...(19): siRNA sense strand
ggaagacagaugaauaccu

SEQ ID NO: 1986776 - RNA, 19 nt, Homo sapiens
  misc_RNA (1)...(19): siRNA sense strand
cccugaauccguucgagua

SEQ ID NO: 1986777 - RNA, 19 nt, Homo sapiens
  misc_RNA (1)...(19): siRNA sense strand
guaccugcgccagauauuc

SEQ ID NO: 1986778 - RNA, 19 nt, Homo sapiens
  misc_RNA (1)...(19): siRNA sense strand
caaccuggcugagaugauu

SEQ ID NO: 1986779 - RNA, 19 nt, Homo sapiens
  misc_RNA (1)...(19): siRNA sense strand
gcuaugagaucgccagcuu

SEQ ID NO: 1986780 - RNA, 19 nt, Homo sapiens
  misc_RNA (1)...(19): siRNA sense strand
gaaacucuaccucuucuug

SEQ ID NO: 1986781 - RNA, 19 nt, Homo sapiens
  misc_RNA (1)...(19): siRNA sense strand
ggagaaaugggcacccuuu

SEQ ID NO: 1986782 - RNA, 19 nt, Homo sapiens
  misc_RNA (1)...(19): siRNA sense strand
ucagaaaggugagcagcua

SEQ ID NO: 1986783 - RNA, 19 nt, Homo sapiens
  misc_RNA (1)...(19): siRNA sense strand
aggagaaccugcugaugua

SEQ ID NO: 1986784 - RNA, 19 nt, Homo sapiens
  misc_RNA (1)...(19): siRNA sense strand
gaaaugggcacccuuuguc

SEQ ID NO: 1986785 - RNA, 19 nt, Homo sapiens
  misc_RNA (1)...(19): siRNA sense strand
gcagaaacucuaccucuuc

SEQ ID NO: 1986786 - RNA, 19 nt, Homo sapiens
  misc_RNA (1)...(19): siRNA sense strand
ucaaugggcugcgaagguu

SEQ ID NO: 1986787 - RNA, 19 nt, Homo sapiens
  misc_RNA (1)...(19): siRNA sense strand
ccaacgaccuggacgagau

SEQ ID NO: 1986788 - RNA, 19 nt, Homo sapiens
  misc_RNA (1)...(19): siRNA sense strand
gguaccagaucaucaaugg

SEQ ID NO: 1986789 - RNA, 19 nt, Homo sapiens
  misc_RNA (1)...(19): siRNA sense strand
cugcgaagguuugaaauug

SEQ ID NO: 1986790 - RNA, 19 nt, Homo sapiens
  misc_RNA (1)...(19): siRNA sense strand
gagcuguccuggagaugug

SEQ ID NO: 1986791 - RNA, 19 nt, Homo sapiens
  misc_RNA (1)...(19): siRNA sense strand
caaguuguuugugggcuuu

SEQ ID NO: 1986792 - RNA, 19 nt, Homo sapiens
  misc_RNA (1)...(19): siRNA sense strand
gaaaggugagcagcuauuc

SEQ ID NO: 1986793 - RNA, 19 nt, Homo sapiens
  misc_RNA (1)...(19): siRNA sense strand
gaagguuugaaauugagua

SEQ ID NO: 1986794 - RNA, 19 nt, Homo sapiens
  misc_RNA (1)...(19): siRNA sense strand
ggccaggacugcaaguaca

SEQ ID NO: 1986795 - RNA, 19 nt, Homo sapiens
  misc_RNA (1)...(19): siRNA sense strand
gauguacaccaaguuguuu

SEQ ID NO: 1986796 - RNA, 19 nt, Homo sapiens
  misc_RNA (1)...(19): siRNA sense strand
ucgcucagcucaucacaca

SEQ ID NO: 1986797 - RNA, 19 nt, Homo sapiens
  misc_RNA (1)...(19): siRNA sense strand
ggagaaggcccuggaguac

SEQ ID NO: 1986798 - RNA, 19 nt, Homo sapiens
  misc_RNA (1)...(19): siRNA sense strand
gcaccacccaggaugagaa

SEQ ID NO: 1986799 - RNA, 19 nt, Homo sapiens
  misc_RNA (1)...(19): siRNA sense strand
ucucauggcugggcuuuag

SEQ ID NO: 1986800 - RNA, 19 nt, Homo sapiens
  misc_RNA (1)...(19): siRNA sense strand
gcgaagguuugaaauugag

SEQ ID NO: 1986801 - RNA, 19 nt, Homo sapiens
  misc_RNA (1)...(19): siRNA sense strand
gggcugcgaagguuugaaa

SEQ ID NO: 1986802 - RNA, 19 nt, Homo sapiens
  misc_RNA (1)...(19): siRNA sense strand
ggaguaccugcgccagaua

SEQ ID NO: 1986803 - RNA, 19 nt, Homo sapiens
  misc_RNA (1)...(19): siRNA sense strand
ucagagcuguccuggagau

SEQ ID NO: 1986804 - RNA, 19 nt, Homo sapiens
  misc_RNA (1)...(19): siRNA sense strand
gguuugaaauugaguacca

SEQ ID NO: 1986805 - RNA, 19 nt, Homo sapiens
  misc_RNA (1)...(19): siRNA sense strand
uggagaaggcccuggagua

SEQ ID NO: 1986806 - RNA, 19 nt, Homo sapiens
  misc_RNA (1)...(19): siRNA sense strand
gagaaaugggcacccuuug

SEQ ID NO: 1986807 - RNA, 19 nt, Homo sapiens
  misc_RNA (1)...(19): siRNA sense strand
ugcgaagguuugaaauuga

SEQ ID NO: 1986808 - RNA, 19 nt, Homo sapiens
  misc_RNA (1)...(19): siRNA sense strand
ucacugaugccuccuucaa

SEQ ID NO: 1986809 - RNA, 19 nt, Homo sapiens
  misc_RNA (1)...(19): siRNA sense strand
gcugcgaagguuugaaauu

SEQ ID NO: 1986810 - RNA, 19 nt, Homo sapiens
  misc_RNA (1)...(19): siRNA sense strand
aagcgcagcucaggcaguu

SEQ ID NO: 1986811 - RNA, 19 nt, Homo sapiens
  misc_RNA (1)...(19): siRNA sense strand
acuauuccuuggagaugua

SEQ ID NO: 1986812 - RNA, 19 nt, Homo sapiens
  misc_RNA (1)...(19): siRNA sense strand
cgagguucguccagcagaa

SEQ ID NO: 1986813 - RNA, 19 nt, Homo sapiens
  misc_RNA (1)...(19): siRNA sense strand
gccaucaaccacagauuug

SEQ ID NO: 1986814 - RNA, 19 nt, Homo sapiens
  misc_RNA (1)...(19): siRNA sense strand
gcugauguacaccaaguug

SEQ ID NO: 1986815 - RNA, 19 nt, Homo sapiens
  misc_RNA (1)...(19): siRNA sense strand
cuacugaggagcauguguu

SEQ ID NO: 1986816 - RNA, 19 nt, Homo sapiens
  misc_RNA (1)...(19): siRNA sense strand
gcaaguacaccccgauguu

SEQ ID NO: 1986817 - RNA, 19 nt, Homo sapiens
  misc_RNA (1)...(19): siRNA sense strand
gcucaucacacaggccaaa

SEQ ID NO: 1986818 - RNA, 19 nt, Homo sapiens
  misc_RNA (1)...(19): siRNA sense strand
gguacgcgccugacaagca

SEQ ID NO: 1986819 - RNA, 19 nt, Homo sapiens
  misc_RNA (1)...(19): siRNA sense strand
gcgcagcucaggcaguuca

SEQ ID NO: 1986820 - RNA, 19 nt, Homo sapiens
  misc_RNA (1)...(19): siRNA sense strand
ugauguacaccaaguuguu

SEQ ID NO: 1986821 - RNA, 19 nt, Homo sapiens
  misc_RNA (1)...(19): siRNA sense strand
agaaaugggcacccuuugu

SEQ ID NO: 1986822 - RNA, 19 nt, Homo sapiens
  misc_RNA (1)...(19): siRNA sense strand
gaagcaccugcacgccuuu

SEQ ID NO: 1986823 - RNA, 19 nt, Homo sapiens
  misc_RNA (1)...(19): siRNA sense strand
cagauuugcaggacagaug

SEQ ID NO: 1986824 - RNA, 19 nt, Homo sapiens
  misc_RNA (1)...(19): siRNA sense strand
ugccaucaaccacagauuu

SEQ ID NO: 1986825 - RNA, 19 nt, Homo sapiens
  misc_RNA (1)...(19): siRNA sense strand
gagaaccugcugauguaca

SEQ ID NO: 1986826 - RNA, 19 nt, Homo sapiens
  misc_RNA (1)...(19): siRNA sense strand
agcagaaacucuaccucuu

SEQ ID NO: 1986827 - RNA, 19 nt, Homo sapiens
  misc_RNA (1)...(19): siRNA sense strand
ccaaacacacagccaaguc

SEQ ID NO: 1986828 - RNA, 19 nt, Homo sapiens
  misc_RNA (1)...(19): siRNA sense strand
agaaaggugagcagcuauu

SEQ ID NO: 1986829 - RNA, 19 nt, Homo sapiens
  misc_RNA (1)...(19): siRNA sense strand
gagguucguccagcagaaa

SEQ ID NO: 1986830 - RNA, 19 nt, Homo sapiens
  misc_RNA (1)...(19): siRNA sense strand
guccaucuccgaccagugu

SEQ ID NO: 1986831 - RNA, 19 nt, Homo sapiens
  misc_RNA (1)...(19): siRNA sense strand
gcugucgucugccaucaac

SEQ ID NO: 1986832 - RNA, 19 nt, Homo sapiens
  misc_RNA (1)...(19): siRNA sense strand
cagaugaauaccuggagaa

SEQ ID NO: 1986833 - RNA, 19 nt, Homo sapiens
  misc_RNA (1)...(19): siRNA sense strand
uccggaagacagaugaaua

SEQ ID NO: 1986834 - RNA, 19 nt, Homo sapiens
  misc_RNA (1)...(19): siRNA sense strand
ccuuggagauguaucaaaa

SEQ ID NO: 1986835 - RNA, 19 nt, Homo sapiens
  misc_RNA (1)...(19): siRNA sense strand
cuucguggccucucuguuc

SEQ ID NO: 1986836 - RNA, 19 nt, Homo sapiens
  misc_RNA (1)...(19): siRNA sense strand
gaguaccugcgccagauau

SEQ ID NO: 1986837 - RNA, 19 nt, Homo sapiens
  misc_RNA (1)...(19): siRNA sense strand
uggaguaccugcgccagau

SEQ ID NO: 1986838 - RNA, 19 nt, Homo sapiens
  misc_RNA (1)...(19): siRNA sense strand
agaaggcccuggaguaccu

SEQ ID NO: 1986839 - RNA, 19 nt, Homo sapiens
  misc_RNA (1)...(19): siRNA sense strand
caacgaccuggacgagaug

SEQ ID NO: 1986840 - RNA, 19 nt, Homo sapiens
  misc_RNA (1)...(19): siRNA sense strand
ugagaugauucagaaaggu

SEQ ID NO: 1986841 - RNA, 19 nt, Homo sapiens
  misc_RNA (1)...(19): siRNA sense strand
uaccucuucuugcagcauu

SEQ ID NO: 1986842 - RNA, 19 nt, Homo sapiens
  misc_RNA (1)...(19): siRNA sense strand
aaaaugcaguccccucaug

SEQ ID NO: 1986843 - RNA, 19 nt, Homo sapiens
  misc_RNA (1)...(19): siRNA sense strand
ggaagacagaugaauaccu

SEQ ID NO: 1986844 - RNA, 19 nt, Homo sapiens
  misc_RNA (1)...(19): siRNA sense strand
guaccugcgccagauauuc

SEQ ID NO: 1986845 - RNA, 19 nt, Homo sapiens
  misc_RNA (1)...(19): siRNA sense strand
ggaugaggcuuucuucaaa

SEQ ID NO: 1986846 - RNA, 19 nt, Homo sapiens
  misc_RNA (1)...(19): siRNA sense strand
caaagaggauggagugaga

SEQ ID NO: 1986847 - RNA, 19 nt, Homo sapiens
  misc_RNA (1)...(19): siRNA sense strand
agacacggcuuccugauug

SEQ ID NO: 1986848 - RNA, 19 nt, Homo sapiens
  misc_RNA (1)...(19): siRNA sense strand
ggacugacaccauguucaa

SEQ ID NO: 1986849 - RNA, 19 nt, Homo sapiens
  misc_RNA (1)...(19): siRNA sense strand
gaccaaggccuacgagaga

SEQ ID NO: 1986850 - RNA, 19 nt, Homo sapiens
  misc_RNA (1)...(19): siRNA sense strand
ggagugagagacagccuaa

SEQ ID NO: 1986851 - RNA, 19 nt, Homo sapiens
  misc_RNA (1)...(19): siRNA sense strand
gcagugccguccucucucu

SEQ ID NO: 1986852 - RNA, 19 nt, Homo sapiens
  misc_RNA (1)...(19): siRNA sense strand
gaugaggcuuucuucaaac

SEQ ID NO: 1986853 - RNA, 19 nt, Homo sapiens
  misc_RNA (1)...(19): siRNA sense strand
gcacggaagccuccagcau

SEQ ID NO: 1986854 - RNA, 19 nt, Homo sapiens
  misc_RNA (1)...(19): siRNA sense strand
gggccaaggaugaggcuuu

SEQ ID NO: 1986855 - RNA, 19 nt, Homo sapiens
  misc_RNA (1)...(19): siRNA sense strand
gaggcuuucuucaaacuac

SEQ ID NO: 1986856 - RNA, 19 nt, Homo sapiens
  misc_RNA (1)...(19): siRNA sense strand
ccuaacaauuugccuccuu

SEQ ID NO: 1986857 - RNA, 19 nt, Homo sapiens
  misc_RNA (1)...(19): siRNA sense strand
ggccaaggaugaggcuuuc

SEQ ID NO: 1986858 - RNA, 19 nt, Homo sapiens
  misc_RNA (1)...(19): siRNA sense strand
gaggauggagugagagaca

SEQ ID NO: 1986859 - RNA, 19 nt, Homo sapiens
  misc_RNA (1)...(19): siRNA sense strand
aaacuacugcccuugaugu

SEQ ID NO: 1986860 - RNA, 19 nt, Homo sapiens
  misc_RNA (1)...(19): siRNA sense strand
ccaaggaugaggcuuucuu

SEQ ID NO: 1986861 - RNA, 19 nt, Homo sapiens
  misc_RNA (1)...(19): siRNA sense strand
ugagagacagccuaagugu

SEQ ID NO: 1986862 - RNA, 19 nt, Homo sapiens
  misc_RNA (1)...(19): siRNA sense strand
cagacacggcuuccugauu

SEQ ID NO: 1986863 - RNA, 19 nt, Homo sapiens
  misc_RNA (1)...(19): siRNA sense strand
gccacacgcccuaaugaug

SEQ ID NO: 1986864 - RNA, 19 nt, Homo sapiens
  misc_RNA (1)...(19): siRNA sense strand
caaacuacugcccuugaug

SEQ ID NO: 1986865 - RNA, 19 nt, Homo sapiens
  misc_RNA (1)...(19): siRNA sense strand
aaagcagggccaaggauga

SEQ ID NO: 1986866 - RNA, 19 nt, Homo sapiens
  misc_RNA (1)...(19): siRNA sense strand
gccguccucucucuucuag

SEQ ID NO: 1986867 - RNA, 19 nt, Homo sapiens
  misc_RNA (1)...(19): siRNA sense strand
caaggaugaggcuuucuuc

SEQ ID NO: 1986868 - RNA, 19 nt, Homo sapiens
  misc_RNA (1)...(19): siRNA sense strand
cguccucucucuucuaggu

SEQ ID NO: 1986869 - RNA, 19 nt, Homo sapiens
  misc_RNA (1)...(19): siRNA sense strand
gugagagacagccuaagug

SEQ ID NO: 1986870 - RNA, 19 nt, Homo sapiens
  misc_RNA (1)...(19): siRNA sense strand
gcagacacggcuuccugau

SEQ ID NO: 1986871 - RNA, 19 nt, Homo sapiens
  misc_RNA (1)...(19): siRNA sense strand
aggaugaggcuuucuucaa

SEQ ID NO: 1986872 - RNA, 19 nt, Homo sapiens
  misc_RNA (1)...(19): siRNA sense strand
gcuuccugauugcaccuaa

SEQ ID NO: 1986873 - RNA, 19 nt, Homo sapiens
  misc_RNA (1)...(19): siRNA sense strand
gaacacaaacuacucagaa

SEQ ID NO: 1986874 - RNA, 19 nt, Homo sapiens
  misc_RNA (1)...(19): siRNA sense strand
gcugaaaguucgaaggauu

SEQ ID NO: 1986875 - RNA, 19 nt, Homo sapiens
  misc_RNA (1)...(19): siRNA sense strand
gguacuauguucccagcua

SEQ ID NO: 1986876 - RNA, 19 nt, Homo sapiens
  misc_RNA (1)...(19): siRNA sense strand
ggaucaaccucccagacaa

SEQ ID NO: 1986877 - RNA, 19 nt, Homo sapiens
  misc_RNA (1)...(19): siRNA sense strand
gcaucucucucccguccua

SEQ ID NO: 1986878 - RNA, 19 nt, Homo sapiens
  misc_RNA (1)...(19): siRNA sense strand
gcucagggcagcaacaaga

SEQ ID NO: 1986879 - RNA, 19 nt, Homo sapiens
  misc_RNA (1)...(19): siRNA sense strand
gaucaaccucccagacaaa

SEQ ID NO: 1986880 - RNA, 19 nt, Homo sapiens
  misc_RNA (1)...(19): siRNA sense strand
aggaagugaugaacacaaa

SEQ ID NO: 1986881 - RNA, 19 nt, Homo sapiens
  misc_RNA (1)...(19): siRNA sense strand
gaugaacacaaacuacuca

SEQ ID NO: 1986882 - RNA, 19 nt, Homo sapiens
  misc_RNA (1)...(19): siRNA sense strand
cugaaaguucgaaggauua

SEQ ID NO: 1986883 - RNA, 19 nt, Homo sapiens
  misc_RNA (1)...(19): siRNA sense strand
gaagugaugaacacaaacu

SEQ ID NO: 1986884 - RNA, 19 nt, Homo sapiens
  misc_RNA (1)...(19): siRNA sense strand
cuuucuaucugccugagua

SEQ ID NO: 1986885 - RNA, 19 nt, Homo sapiens
  misc_RNA (1)...(19): siRNA sense strand
cgacugaaaccgcugaaag

SEQ ID NO: 1986886 - RNA, 19 nt, Homo sapiens
  misc_RNA (1)...(19): siRNA sense strand
ggaagacagccaggaggaa

SEQ ID NO: 1986887 - RNA, 19 nt, Homo sapiens
  misc_RNA (1)...(19): siRNA sense strand
gacugaaaccgcugaaagu

SEQ ID NO: 1986888 - RNA, 19 nt, Homo sapiens
  misc_RNA (1)...(19): siRNA sense strand
gaggaagugaugaacacaa

SEQ ID NO: 1986889 - RNA, 19 nt, Homo sapiens
  misc_RNA (1)...(19): siRNA sense strand
gaaaguucgaaggauuaaa

SEQ ID NO: 1986890 - RNA, 19 nt, Homo sapiens
  misc_RNA (1)...(19): siRNA sense strand
caacagcucagggcagcaa

SEQ ID NO: 1986891 - RNA, 19 nt, Homo sapiens
  misc_RNA (1)...(19): siRNA sense strand
ggaagaagaggaggaugag

SEQ ID NO: 1986892 - RNA, 19 nt, Homo sapiens
  misc_RNA (1)...(19): siRNA sense strand
augaugaaguccaggagaa

SEQ ID NO: 1986893 - RNA, 19 nt, Homo sapiens
  misc_RNA (1)...(19): siRNA sense strand
gugaugcugcugcugcuuu

SEQ ID NO: 1986894 - RNA, 19 nt, Homo sapiens
  misc_RNA (1)...(19): siRNA sense strand
ugaaaguucgaaggauuaa

SEQ ID NO: 1986895 - RNA, 19 nt, Homo sapiens
  misc_RNA (1)...(19): siRNA sense strand
ggaggaagaagaggaggau

SEQ ID NO: 1986896 - RNA, 19 nt, Homo sapiens
  misc_RNA (1)...(19): siRNA sense strand
acaaacuacucagaagcaa

SEQ ID NO: 1986897 - RNA, 19 nt, Homo sapiens
  misc_RNA (1)...(19): siRNA sense strand
ugacuccuccaccgcagua

SEQ ID NO: 1986898 - RNA, 19 nt, Homo sapiens
  misc_RNA (1)...(19): siRNA sense strand
cagcuacgaggaagugaug

SEQ ID NO: 1986899 - RNA, 19 nt, Homo sapiens
  misc_RNA (1)...(19): siRNA sense strand
gccucaagguacuauguuc

SEQ ID NO: 1986900 - RNA, 19 nt, Homo sapiens
  misc_RNA (1)...(19): siRNA sense strand
gcuacgaggaagugaugaa

SEQ ID NO: 1986901 - RNA, 19 nt, Homo sapiens
  misc_RNA (1)...(19): siRNA sense strand
aggaagaagaggaggauga

SEQ ID NO: 1986902 - RNA, 19 nt, Homo sapiens
  misc_RNA (1)...(19): siRNA sense strand
cugacaggcagaacucuaa

SEQ ID NO: 1986903 - RNA, 19 nt, Homo sapiens
  misc_RNA (1)...(19): siRNA sense strand
gcggcauccucaagagcaa

SEQ ID NO: 1986904 - RNA, 19 nt, Homo sapiens
  misc_RNA (1)...(19): siRNA sense strand
aacacaaacuacucagaag

SEQ ID NO: 1986905 - RNA, 19 nt, Homo sapiens
  misc_RNA (1)...(19): siRNA sense strand
cacaaacuacucagaagca

SEQ ID NO: 1986906 - RNA, 19 nt, Homo sapiens
  misc_RNA (1)...(19): siRNA sense strand
gcagaguuccuuccgguuu

SEQ ID NO: 1986907 - RNA, 19 nt, Homo sapiens
  misc_RNA (1)...(19): siRNA sense strand
cagaguuccuuccgguuug

SEQ ID NO: 1986908 - RNA, 19 nt, Homo sapiens
  misc_RNA (1)...(19): siRNA sense strand
ccgcgugccugcaacaauc

SEQ ID NO: 1986909 - RNA, 19 nt, Homo sapiens
  misc_RNA (1)...(19): siRNA sense strand
aggguuggcuggauucagu

SEQ ID NO: 1986910 - RNA, 19 nt, Homo sapiens
  misc_RNA (1)...(19): siRNA sense strand
gguuggcuggauucaguua

SEQ ID NO: 1986911 - RNA, 19 nt, Homo sapiens
  misc_RNA (1)...(19): siRNA sense strand
caccaaagaugaugaauua

SEQ ID NO: 1986912 - RNA, 19 nt, Homo sapiens
  misc_RNA (1)...(19): siRNA sense strand
gaagagggcuugauagcaa

SEQ ID NO: 1986913 - RNA, 19 nt, Homo sapiens
  misc_RNA (1)...(19): siRNA sense strand
gagaugaugucacuuacua

SEQ ID NO: 1986914 - RNA, 19 nt, Homo sapiens
  misc_RNA (1)...(19): siRNA sense strand
gcacagagcccuuugauuc

SEQ ID NO: 1986915 - RNA, 19 nt, Homo sapiens
  misc_RNA (1)...(19): siRNA sense strand
guacaguucuggucgauuu

SEQ ID NO: 1986916 - RNA, 19 nt, Homo sapiens
  misc_RNA (1)...(19): siRNA sense strand
gaaauuuacaugccacuua

SEQ ID NO: 1986917 - RNA, 19 nt, Homo sapiens
  misc_RNA (1)...(19): siRNA sense strand
gcacuuaaauacucaucua

SEQ ID NO: 1986918 - RNA, 19 nt, Homo sapiens
  misc_RNA (1)...(19): siRNA sense strand
ggaaacgucugcaaguauu

SEQ ID NO: 1986919 - RNA, 19 nt, Homo sapiens
  misc_RNA (1)...(19): siRNA sense strand
gcaaaguguguaaguauua

SEQ ID NO: 1986920 - RNA, 19 nt, Homo sapiens
  misc_RNA (1)...(19): siRNA sense strand
gaauaaguauguaguggaa

SEQ ID NO: 1986921 - RNA, 19 nt, Homo sapiens
  misc_RNA (1)...(19): siRNA sense strand
gauagaaguuucacagaga

SEQ ID NO: 1986922 - RNA, 19 nt, Homo sapiens
  misc_RNA (1)...(19): siRNA sense strand
aaacuugacuguucacauu

SEQ ID NO: 1986923 - RNA, 19 nt, Homo sapiens
  misc_RNA (1)...(19): siRNA sense strand
gaaaagccguuuaaaugua

SEQ ID NO: 1986924 - RNA, 19 nt, Homo sapiens
  misc_RNA (1)...(19): siRNA sense strand
gaaaugagcaggccagugu

SEQ ID NO: 1986925 - RNA, 19 nt, Homo sapiens
  misc_RNA (1)...(19): siRNA sense strand
gcaacgggagugagaauua

SEQ ID NO: 1986926 - RNA, 19 nt, Homo sapiens
  misc_RNA (1)...(19): siRNA sense strand
gcaaacacauucugcauac

SEQ ID NO: 1986927 - RNA, 19 nt, Homo sapiens
  misc_RNA (1)...(19): siRNA sense strand
gcagauugcucuauuuuaa

SEQ ID NO: 1986928 - RNA, 19 nt, Homo sapiens
  misc_RNA (1)...(19): siRNA sense strand
gaggagaugaugucacuua

SEQ ID NO: 1986929 - RNA, 19 nt, Homo sapiens
  misc_RNA (1)...(19): siRNA sense strand
uaaaggacggguagaaaua

SEQ ID NO: 1986930 - RNA, 19 nt, Homo sapiens
  misc_RNA (1)...(19): siRNA sense strand
gaaagacugugcucaaggu

SEQ ID NO: 1986931 - RNA, 19 nt, Homo sapiens
  misc_RNA (1)...(19): siRNA sense strand
gaauaaagaacccugaaga

SEQ ID NO: 1986932 - RNA, 19 nt, Homo sapiens
  misc_RNA (1)...(19): siRNA sense strand
ggaagacacugagcaaauc

SEQ ID NO: 1986933 - RNA, 19 nt, Homo sapiens
  misc_RNA (1)...(19): siRNA sense strand
ucucaacucugcuaaugua

SEQ ID NO: 1986934 - RNA, 19 nt, Homo sapiens
  misc_RNA (1)...(19): siRNA sense strand
cgauuugacuccuccauaa

SEQ ID NO: 1986935 - RNA, 19 nt, Homo sapiens
  misc_RNA (1)...(19): siRNA sense strand
caacucugcuaauguagaa

SEQ ID NO: 1986936 - RNA, 19 nt, Homo sapiens
  misc_RNA (1)...(19): siRNA sense strand
guacaacugucccaagugu

SEQ ID NO: 1986937 - RNA, 19 nt, Homo sapiens
  misc_RNA (1)...(19): siRNA sense strand
ucaggaagcucugccuuaa

SEQ ID NO: 1986938 - RNA, 19 nt, Homo sapiens
  misc_RNA (1)...(19): siRNA sense strand
gaagaagagcaucaacaaa

SEQ ID NO: 1986939 - RNA, 19 nt, Homo sapiens
  misc_RNA (1)...(19): siRNA sense strand
gaauacaagugucaugucu

SEQ ID NO: 1986940 - RNA, 19 nt, Homo sapiens
  misc_RNA (1)...(19): siRNA sense strand
caugagauaucgaaugaug

SEQ ID NO: 1986941 - RNA, 19 nt, Homo sapiens
  misc_RNA (1)...(19): siRNA sense strand
gagaaaagccguuuaaaug

SEQ ID NO: 1986942 - RNA, 19 nt, Homo sapiens
  misc_RNA (1)...(19): siRNA sense strand
cgaauuugcugugaugauu

SEQ ID NO: 1986943 - RNA, 19 nt, Homo sapiens
  misc_RNA (1)...(19): siRNA sense strand
gaauuagcuucaaccacua

SEQ ID NO: 1986944 - RNA, 19 nt, Homo sapiens
  misc_RNA (1)...(19): siRNA sense strand
uaacaaaccagcugaguca

SEQ ID NO: 1986945 - RNA, 19 nt, Homo sapiens
  misc_RNA (1)...(19): siRNA sense strand
ccacaacucagucccauuu

SEQ ID NO: 1986946 - RNA, 19 nt, Homo sapiens
  misc_RNA (1)...(19): siRNA sense strand
gggaagaugugucgaagca

SEQ ID NO: 1986947 - RNA, 19 nt, Homo sapiens
  misc_RNA (1)...(19): siRNA sense strand
gcacuuccauuguuuacuc

SEQ ID NO: 1986948 - RNA, 19 nt, Homo sapiens
  misc_RNA (1)...(19): siRNA sense strand
uuagugagcugcccuugaa

SEQ ID NO: 1986949 - RNA, 19 nt, Homo sapiens
  misc_RNA (1)...(19): siRNA sense strand
uaacagccaucuucuugau

SEQ ID NO: 1986950 - RNA, 19 nt, Homo sapiens
  misc_RNA (1)...(19): siRNA sense strand
gaaauagaagcaaguggaa

SEQ ID NO: 1986951 - RNA, 19 nt, Homo sapiens
  misc_RNA (1)...(19): siRNA sense strand
aaacacaguucagauauca

SEQ ID NO: 1986952 - RNA, 19 nt, Homo sapiens
  misc_RNA (1)...(19): siRNA sense strand
gaagcucugccuuaaauug

SEQ ID NO: 1986953 - RNA, 19 nt, Homo sapiens
  misc_RNA (1)...(19): siRNA sense strand
ggaccucgcuuaccugcau

SEQ ID NO: 1986954 - RNA, 19 nt, Homo sapiens
  misc_RNA (1)...(19): siRNA sense strand
ugaaaguagugaugucuau

SEQ ID NO: 1986955 - RNA, 19 nt, Homo sapiens
  misc_RNA (1)...(19): siRNA sense strand
ccaaagagagggagaccua

SEQ ID NO: 1986956 - RNA, 19 nt, Homo sapiens
  misc_RNA (1)...(19): siRNA sense strand
gaaaauauccgcaaacaca

SEQ ID NO: 1986957 - RNA, 19 nt, Homo sapiens
  misc_RNA (1)...(19): siRNA sense strand
gaaaggugaccaagaagau

SEQ ID NO: 1986958 - RNA, 19 nt, Homo sapiens
  misc_RNA (1)...(19): siRNA sense strand
ugaagaagcacuuaaauac

SEQ ID NO: 1986959 - RNA, 19 nt, Homo sapiens
  misc_RNA (1)...(19): siRNA sense strand
gcaccaaagaugaugaauu

SEQ ID NO: 1986960 - RNA, 19 nt, Homo sapiens
  misc_RNA (1)...(19): siRNA sense strand
ggaggugaauaaguaugua

SEQ ID NO: 1986961 - RNA, 19 nt, Homo sapiens
  misc_RNA (1)...(19): siRNA sense strand
ugaagauggugaguugaua

SEQ ID NO: 1986962 - RNA, 19 nt, Homo sapiens
  misc_RNA (1)...(19): siRNA sense strand
ggaaaacacaguucagaua

SEQ ID NO: 1986963 - RNA, 19 nt, Homo sapiens
  misc_RNA (1)...(19): siRNA sense strand
aauugaagcugaaguugaa

SEQ ID NO: 1986964 - RNA, 19 nt, Homo sapiens
  misc_RNA (1)...(19): siRNA sense strand
ugacaagaauaaccagaga

SEQ ID NO: 1986965 - RNA, 19 nt, Homo sapiens
  misc_RNA (1)...(19): siRNA sense strand
ggagauauggaacgucauu

SEQ ID NO: 1986966 - RNA, 19 nt, Homo sapiens
  misc_RNA (1)...(19): siRNA sense strand
gcucugcgcugcugacucu

SEQ ID NO: 1986967 - RNA, 19 nt, Homo sapiens
  misc_RNA (1)...(19): siRNA sense strand
agaugaacaugcuaacaaa

SEQ ID NO: 1986968 - RNA, 19 nt, Homo sapiens
  misc_RNA (1)...(19): siRNA sense strand
ggaacagcauccugacauc

SEQ ID NO: 1986969 - RNA, 19 nt, Homo sapiens
  misc_RNA (1)...(19): siRNA sense strand
caaagaugaugaauuagcu

SEQ ID NO: 1986970 - RNA, 19 nt, Homo sapiens
  misc_RNA (1)...(19): siRNA sense strand
ggacugaguggacugaaug

SEQ ID NO: 1986971 - RNA, 19 nt, Homo sapiens
  misc_RNA (1)...(19): siRNA sense strand
guagugaugucuaugaaac

SEQ ID NO: 1986972 - RNA, 19 nt, Homo sapiens
  misc_RNA (1)...(19): siRNA sense strand
ugaaagcccugugcucguu

SEQ ID NO: 1986973 - RNA, 19 nt, Homo sapiens
  misc_RNA (1)...(19): siRNA sense strand
gcacaggugagaauaagug

SEQ ID NO: 1986974 - RNA, 19 nt, Homo sapiens
  misc_RNA (1)...(19): siRNA sense strand
guuaacagccaucuucuug

SEQ ID NO: 1986975 - RNA, 19 nt, Homo sapiens
  misc_RNA (1)...(19): siRNA sense strand
gaagccagaucguggaaac

SEQ ID NO: 1986976 - RNA, 19 nt, Homo sapiens
  misc_RNA (1)...(19): siRNA sense strand
gagaaaagcccuacagaug

SEQ ID NO: 1986977 - RNA, 19 nt, Homo sapiens
  misc_RNA (1)...(19): siRNA sense strand
ccaugaagcauccuacaaa

SEQ ID NO: 1986978 - RNA, 19 nt, Homo sapiens
  misc_RNA (1)...(19): siRNA sense strand
gagcugcccuugaaagacu

SEQ ID NO: 1986979 - RNA, 19 nt, Homo sapiens
  misc_RNA (1)...(19): siRNA sense strand
aggaagcucugccuuaaau

SEQ ID NO: 1986980 - RNA, 19 nt, Homo sapiens
  misc_RNA (1)...(19): siRNA sense strand
gaagaagcacuuaaauacu

SEQ ID NO: 1986981 - RNA, 19 nt, Homo sapiens
  misc_RNA (1)...(19): siRNA sense strand
ugcgggaggugaauaagua

SEQ ID NO: 1986982 - RNA, 19 nt, Homo sapiens
  misc_RNA (1)...(19): siRNA sense strand
uguggaaagucguucuaua

SEQ ID NO: 1986983 - RNA, 19 nt, Homo sapiens
  misc_RNA (1)...(19): siRNA sense strand
ugaugauuguggcuucuua

SEQ ID NO: 1986984 - RNA, 19 nt, Homo sapiens
  misc_RNA (1)...(19): siRNA sense strand
acagucaccaguauaguua

SEQ ID NO: 1986985 - RNA, 19 nt, Homo sapiens
  misc_RNA (1)...(19): siRNA sense strand
uuacaaacuugacuguuca

SEQ ID NO: 1986986 - RNA, 19 nt, Homo sapiens
  misc_RNA (1)...(19): siRNA sense strand
gagucaagauguacaacug

SEQ ID NO: 1986987 - RNA, 19 nt, Homo sapiens
  misc_RNA (1)...(19): siRNA sense strand
guaaugaagaagcacuuaa

SEQ ID NO: 1986988 - RNA, 19 nt, Homo sapiens
  misc_RNA (1)...(19): siRNA sense strand
aaagaacccugaagauggu

SEQ ID NO: 1986989 - RNA, 19 nt, Homo sapiens
  misc_RNA (1)...(19): siRNA sense strand
gcugcagauugcucuauuu

SEQ ID NO: 1986990 - RNA, 19 nt, Homo sapiens
  misc_RNA (1)...(19): siRNA sense strand
uaucucaacucugcuaaug

SEQ ID NO: 1986991 - RNA, 19 nt, Homo sapiens
  misc_RNA (1)...(19): siRNA sense strand
caggugagaauaaguguuu

SEQ ID NO: 1986992 - RNA, 19 nt, Homo sapiens
  misc_RNA (1)...(19): siRNA sense strand
gaucguggaaacucaauug

SEQ ID NO: 1986993 - RNA, 19 nt, Homo sapiens
  misc_RNA (1)...(19): siRNA sense strand
ucacuccucugcuucucua

SEQ ID NO: 1986994 - RNA, 19 nt, Homo sapiens
  misc_RNA (1)...(19): siRNA sense strand
ggaaccauuugaaggaaca

SEQ ID NO: 1986995 - RNA, 19 nt, Homo sapiens
  misc_RNA (1)...(19): siRNA sense strand
aagaagcacuuaaauacuc

SEQ ID NO: 1986996 - RNA, 19 nt, Homo sapiens
  misc_RNA (1)...(19): siRNA sense strand
ccauucaagugcaagauau

SEQ ID NO: 1986997 - RNA, 19 nt, Homo sapiens
  misc_RNA (1)...(19): siRNA sense strand
acacgaauuugcugugaug

SEQ ID NO: 1986998 - RNA, 19 nt, Homo sapiens
  misc_RNA (1)...(19): siRNA sense strand
ugaagaagagcaucaacaa

SEQ ID NO: 1986999 - RNA, 19 nt, Homo sapiens
  misc_RNA (1)...(19): siRNA sense strand
aaacacagucaccaguaua

SEQ ID NO: 1987000 - RNA, 19 nt, Homo sapiens
  misc_RNA (1)...(19): siRNA sense strand
caacgggagugagaauuag

SEQ ID NO: 1987001 - RNA, 19 nt, Homo sapiens
  misc_RNA (1)...(19): siRNA sense strand
uaggaaaccugaggagaug

SEQ ID NO: 1987002 - RNA, 19 nt, Homo sapiens
  misc_RNA (1)...(19): siRNA sense strand
cuagaaaugcugcagauug

SEQ ID NO: 1987003 - RNA, 19 nt, Homo sapiens
  misc_RNA (1)...(19): siRNA sense strand
ccucuaguauuacaaacuu

SEQ ID NO: 1987004 - RNA, 19 nt, Homo sapiens
  misc_RNA (1)...(19): siRNA sense strand
cagaugaacaugcuaacaa

SEQ ID NO: 1987005 - RNA, 19 nt, Homo sapiens
  misc_RNA (1)...(19): siRNA sense strand
ccacgugccauuacucauu

SEQ ID NO: 1987006 - RNA, 19 nt, Homo sapiens
  misc_RNA (1)...(19): siRNA sense strand
gggaaacgucugcaaguau

SEQ ID NO: 1987007 - RNA, 19 nt, Homo sapiens
  misc_RNA (1)...(19): siRNA sense strand
gcucugccuuaaauuguga

SEQ ID NO: 1987008 - RNA, 19 nt, Homo sapiens
  misc_RNA (1)...(19): siRNA sense strand
caucugauacucuuaaauc

SEQ ID NO: 1987009 - RNA, 19 nt, Homo sapiens
  misc_RNA (1)...(19): siRNA sense strand
gaccaggcaugcagcaaca

SEQ ID NO: 1987010 - RNA, 19 nt, Homo sapiens
  misc_RNA (1)...(19): siRNA sense strand
aaacucaauugaagcugaa

SEQ ID NO: 1987011 - RNA, 19 nt, Homo sapiens
  misc_RNA (1)...(19): siRNA sense strand
caaugaagaugaugaaaug

SEQ ID NO: 1987012 - RNA, 19 nt, Homo sapiens
  misc_RNA (1)...(19): siRNA sense strand
caacauugccgcagacuuu

SEQ ID NO: 1987013 - RNA, 19 nt, Homo sapiens
  misc_RNA (1)...(19): siRNA sense strand
gagacgagaucagcaaauu

SEQ ID NO: 1987014 - RNA, 19 nt, Homo sapiens
  misc_RNA (1)...(19): siRNA sense strand
gaacggagcaguaauaacu

SEQ ID NO: 1987015 - RNA, 19 nt, Homo sapiens
  misc_RNA (1)...(19): siRNA sense strand
caagaacggagcaguaaua

SEQ ID NO: 1987016 - RNA, 19 nt, Homo sapiens
  misc_RNA (1)...(19): siRNA sense strand
ggauauguguauacucaaa

SEQ ID NO: 1987017 - RNA, 19 nt, Homo sapiens
  misc_RNA (1)...(19): siRNA sense strand
gcaguaauaacuucaacua

SEQ ID NO: 1987018 - RNA, 19 nt, Homo sapiens
  misc_RNA (1)...(19): siRNA sense strand
ugacaacggcaucaaauuu

SEQ ID NO: 1987019 - RNA, 19 nt, Homo sapiens
  misc_RNA (1)...(19): siRNA sense strand
ggaaaucucccuccuccuu

SEQ ID NO: 1987020 - RNA, 19 nt, Homo sapiens
  misc_RNA (1)...(19): siRNA sense strand
ccuggaagcuccugcauug

SEQ ID NO: 1987021 - RNA, 19 nt, Homo sapiens
  misc_RNA (1)...(19): siRNA sense strand
gaagauuggacauucguuu

SEQ ID NO: 1987022 - RNA, 19 nt, Homo sapiens
  misc_RNA (1)...(19): siRNA sense strand
ggaagacgcggucccgaaa

SEQ ID NO: 1987023 - RNA, 19 nt, Homo sapiens
  misc_RNA (1)...(19): siRNA sense strand
caucaaauuugcauucaca

SEQ ID NO: 1987024 - RNA, 19 nt, Homo sapiens
  misc_RNA (1)...(19): siRNA sense strand
gaggauuaaugucagaaau

SEQ ID NO: 1987025 - RNA, 19 nt, Homo sapiens
  misc_RNA (1)...(19): siRNA sense strand
ugagucaacuagugaauuc

SEQ ID NO: 1987026 - RNA, 19 nt, Homo sapiens
  misc_RNA (1)...(19): siRNA sense strand
gacgagaucagcaaauuga

SEQ ID NO: 1987027 - RNA, 19 nt, Homo sapiens
  misc_RNA (1)...(19): siRNA sense strand
ggauuaaugucagaaaugg

SEQ ID NO: 1987028 - RNA, 19 nt, Homo sapiens
  misc_RNA (1)...(19): siRNA sense strand
acauuugaguugagagaua

SEQ ID NO: 1987029 - RNA, 19 nt, Homo sapiens
  misc_RNA (1)...(19): siRNA sense strand
cgauguauguacugaaguu

SEQ ID NO: 1987030 - RNA, 19 nt, Homo sapiens
  misc_RNA (1)...(19): siRNA sense strand
gacaacggcaucaaauuug

SEQ ID NO: 1987031 - RNA, 19 nt, Homo sapiens
  misc_RNA (1)...(19): siRNA sense strand
gaccaaguuuugaggauua

SEQ ID NO: 1987032 - RNA, 19 nt, Homo sapiens
  misc_RNA (1)...(19): siRNA sense strand
ugaagaugaugaaaugcaa

SEQ ID NO: 1987033 - RNA, 19 nt, Homo sapiens
  misc_RNA (1)...(19): siRNA sense strand
cagcaucuguggccgagaa

SEQ ID NO: 1987034 - RNA, 19 nt, Homo sapiens
  misc_RNA (1)...(19): siRNA sense strand
gaugaaaugcaacacaaug

SEQ ID NO: 1987035 - RNA, 19 nt, Homo sapiens
  misc_RNA (1)...(19): siRNA sense strand
gggcaagaacggagcagua

SEQ ID NO: 1987036 - RNA, 19 nt, Homo sapiens
  misc_RNA (1)...(19): siRNA sense strand
gaaaugcaacacaaugaag

SEQ ID NO: 1987037 - RNA, 19 nt, Homo sapiens
  misc_RNA (1)...(19): siRNA sense strand
gcauucacauuugaguuga

SEQ ID NO: 1987038 - RNA, 19 nt, Homo sapiens
  misc_RNA (1)...(19): siRNA sense strand
ggaggugaaaucaguggua

SEQ ID NO: 1987039 - RNA, 19 nt, Homo sapiens
  misc_RNA (1)...(19): siRNA sense strand
gcgaggagggugaagauug

SEQ ID NO: 1987040 - RNA, 19 nt, Homo sapiens
  misc_RNA (1)...(19): siRNA sense strand
gauuggacauucguuugaa

SEQ ID NO: 1987041 - RNA, 19 nt, Homo sapiens
  misc_RNA (1)...(19): siRNA sense strand
ccagagggauccagcuauc

SEQ ID NO: 1987042 - RNA, 19 nt, Homo sapiens
  misc_RNA (1)...(19): siRNA sense strand
gugcugacccaaauagaaa

SEQ ID NO: 1987043 - RNA, 19 nt, Homo sapiens
  misc_RNA (1)...(19): siRNA sense strand
ccauauggguacucaguca

SEQ ID NO: 1987044 - RNA, 19 nt, Homo sapiens
  misc_RNA (1)...(19): siRNA sense strand
ggaaguggaggugaaauca

SEQ ID NO: 1987045 - RNA, 19 nt, Homo sapiens
  misc_RNA (1)...(19): siRNA sense strand
gaaguucagcacugggaaa

SEQ ID NO: 1987046 - RNA, 19 nt, Homo sapiens
  misc_RNA (1)...(19): siRNA sense strand
ucaucgaccugcacagcua

SEQ ID NO: 1987047 - RNA, 19 nt, Homo sapiens
  misc_RNA (1)...(19): siRNA sense strand
ggcaagaacggagcaguaa

SEQ ID NO: 1987048 - RNA, 19 nt, Homo sapiens
  misc_RNA (1)...(19): siRNA sense strand
gaucccagggcuuagagua

SEQ ID NO: 1987049 - RNA, 19 nt, Homo sapiens
  misc_RNA (1)...(19): siRNA sense strand
cgaggagggugaagauugg

SEQ ID NO: 1987050 - RNA, 19 nt, Homo sapiens
  misc_RNA (1)...(19): siRNA sense strand
gggugaagauuggacauuc

SEQ ID NO: 1987051 - RNA, 19 nt, Homo sapiens
  misc_RNA (1)...(19): siRNA sense strand
ccugauggauauguguaua

SEQ ID NO: 1987052 - RNA, 19 nt, Homo sapiens
  misc_RNA (1)...(19): siRNA sense strand
ugaaaugcaacacaaugaa

SEQ ID NO: 1987053 - RNA, 19 nt, Homo sapiens
  misc_RNA (1)...(19): siRNA sense strand
ggacggcaaggaagauugu

SEQ ID NO: 1987054 - RNA, 19 nt, Homo sapiens
  misc_RNA (1)...(19): siRNA sense strand
uuaaauccuuccugagauc

SEQ ID NO: 1987055 - RNA, 19 nt, Homo sapiens
  misc_RNA (1)...(19): siRNA sense strand
agugguagauuucauccaa

SEQ ID NO: 1987056 - RNA, 19 nt, Homo sapiens
  misc_RNA (1)...(19): siRNA sense strand
gagcaguaauaacuucaac

SEQ ID NO: 1987057 - RNA, 19 nt, Homo sapiens
  misc_RNA (1)...(19): siRNA sense strand
ucaaucggccuguggaugu

SEQ ID NO: 1987058 - RNA, 19 nt, Homo sapiens
  misc_RNA (1)...(19): siRNA sense strand
gaaagggagccagcgacaa

SEQ ID NO: 1987059 - RNA, 19 nt, Homo sapiens
  misc_RNA (1)...(19): siRNA sense strand
ggugcugacccaaauagaa

SEQ ID NO: 1987060 - RNA, 19 nt, Homo sapiens
  misc_RNA (1)...(19): siRNA sense strand
gguggauacuguucauugg

SEQ ID NO: 1987061 - RNA, 19 nt, Homo sapiens
  misc_RNA (1)...(19): siRNA sense strand
gucaacuagugaauucaaa

SEQ ID NO: 1987062 - RNA, 19 nt, Homo sapiens
  misc_RNA (1)...(19): siRNA sense strand
gcaagaacggagcaguaau

SEQ ID NO: 1987063 - RNA, 19 nt, Homo sapiens
  misc_RNA (1)...(19): siRNA sense strand
ggcaucaaauuugcauuca

SEQ ID NO: 1987064 - RNA, 19 nt, Homo sapiens
  misc_RNA (1)...(19): siRNA sense strand
guaugacaacggcaucaaa

SEQ ID NO: 1987065 - RNA, 19 nt, Homo sapiens
  misc_RNA (1)...(19): siRNA sense strand
caacuagugaauucaaaca

SEQ ID NO: 1987066 - RNA, 19 nt, Homo sapiens
  misc_RNA (1)...(19): siRNA sense strand
gccgauguauguacugaag

SEQ ID NO: 1987067 - RNA, 19 nt, Homo sapiens
  misc_RNA (1)...(19): siRNA sense strand
auggauauguguauacuca

SEQ ID NO: 1987068 - RNA, 19 nt, Homo sapiens
  misc_RNA (1)...(19): siRNA sense strand
gugguagauuucauccaaa

SEQ ID NO: 1987069 - RNA, 19 nt, Homo sapiens
  misc_RNA (1)...(19): siRNA sense strand
gaagacgcggucccgaaau

SEQ ID NO: 1987070 - RNA, 19 nt, Homo sapiens
  misc_RNA (1)...(19): siRNA sense strand
gaugaugaaaugcaacaca

SEQ ID NO: 1987071 - RNA, 19 nt, Homo sapiens
  misc_RNA (1)...(19): siRNA sense strand
ggugaaaucagugguagau

SEQ ID NO: 1987072 - RNA, 19 nt, Homo sapiens
  misc_RNA (1)...(19): siRNA sense strand
gaauuucaagggcuucauc

SEQ ID NO: 1987073 - RNA, 19 nt, Homo sapiens
  misc_RNA (1)...(19): siRNA sense strand
ggaccaaguuuugaggauu

SEQ ID NO: 1987074 - RNA, 19 nt, Homo sapiens
  misc_RNA (1)...(19): siRNA sense strand
agacaaugaagaugaugaa

SEQ ID NO: 1987075 - RNA, 19 nt, Homo sapiens
  misc_RNA (1)...(19): siRNA sense strand
ggagacgagaucagcaaau

SEQ ID NO: 1987076 - RNA, 19 nt, Homo sapiens
  misc_RNA (1)...(19): siRNA sense strand
cugcugauguauccauaug

SEQ ID NO: 1987077 - RNA, 19 nt, Homo sapiens
  misc_RNA (1)...(19): siRNA sense strand
cuagugaauucaaacaacu

SEQ ID NO: 1987078 - RNA, 19 nt, Homo sapiens
  misc_RNA (1)...(19): siRNA sense strand
gaguacgcagugacaauug

SEQ ID NO: 1987079 - RNA, 19 nt, Homo sapiens
  misc_RNA (1)...(19): siRNA sense strand
ucagucugcaggcauuuaa

SEQ ID NO: 1987080 - RNA, 19 nt, Homo sapiens
  misc_RNA (1)...(19): siRNA sense strand
aaguggaggugaaaucagu

SEQ ID NO: 1987081 - RNA, 19 nt, Homo sapiens
  misc_RNA (1)...(19): siRNA sense strand
gaaauggagacgagaucag

SEQ ID NO: 1987082 - RNA, 19 nt, Homo sapiens
  misc_RNA (1)...(19): siRNA sense strand
augaugaaaugcaacacaa

SEQ ID NO: 1987083 - RNA, 19 nt, Homo sapiens
  misc_RNA (1)...(19): siRNA sense strand
aaaucucccuccuccuuca

SEQ ID NO: 1987084 - RNA, 19 nt, Homo sapiens
  misc_RNA (1)...(19): siRNA sense strand
cgacugggcguaugacaac

SEQ ID NO: 1987085 - RNA, 19 nt, Homo sapiens
  misc_RNA (1)...(19): siRNA sense strand
ccacgccaauucggaagug

SEQ ID NO: 1987086 - RNA, 19 nt, Homo sapiens
  misc_RNA (1)...(19): siRNA sense strand
uuuaaauccuuccugagau

SEQ ID NO: 1987087 - RNA, 19 nt, Homo sapiens
  misc_RNA (1)...(19): siRNA sense strand
ccacgagauggacaacauu

SEQ ID NO: 1987088 - RNA, 19 nt, Homo sapiens
  misc_RNA (1)...(19): siRNA sense strand
aguacgcagugacaauuga

SEQ ID NO: 1987089 - RNA, 19 nt, Homo sapiens
  misc_RNA (1)...(19): siRNA sense strand
uaugacaacggcaucaaau

SEQ ID NO: 1987090 - RNA, 19 nt, Homo sapiens
  misc_RNA (1)...(19): siRNA sense strand
gcaucgacugggcguauga

SEQ ID NO: 1987091 - RNA, 19 nt, Homo sapiens
  misc_RNA (1)...(19): siRNA sense strand
aagacgcggucccgaaauc

SEQ ID NO: 1987092 - RNA, 19 nt, Homo sapiens
  misc_RNA (1)...(19): siRNA sense strand
ggugaagauuggacauucg

SEQ ID NO: 1987093 - RNA, 19 nt, Homo sapiens
  misc_RNA (1)...(19): siRNA sense strand
aagaacggagcaguaauaa

SEQ ID NO: 1987094 - RNA, 19 nt, Homo sapiens
  misc_RNA (1)...(19): siRNA sense strand
gacaaugaagaugaugaaa

SEQ ID NO: 1987095 - RNA, 19 nt, Homo sapiens
  misc_RNA (1)...(19): siRNA sense strand
ucacauuugaguugagaga

SEQ ID NO: 1987096 - RNA, 19 nt, Homo sapiens
  misc_RNA (1)...(19): siRNA sense strand
cuuauuggguccagcaucu

SEQ ID NO: 1987097 - RNA, 19 nt, Homo sapiens
  misc_RNA (1)...(19): siRNA sense strand
caaucuggacggcaaggaa

SEQ ID NO: 1987098 - RNA, 19 nt, Homo sapiens
  misc_RNA (1)...(19): siRNA sense strand
ggagcaguaauaacuucaa

SEQ ID NO: 1987099 - RNA, 19 nt, Homo sapiens
  misc_RNA (1)...(19): siRNA sense strand
agaguacgcagugacaauu

SEQ ID NO: 1987100 - RNA, 19 nt, Homo sapiens
  misc_RNA (1)...(19): siRNA sense strand
agauuggacauucguuuga

SEQ ID NO: 1987101 - RNA, 19 nt, Homo sapiens
  misc_RNA (1)...(19): siRNA sense strand
cggcaucaaauuugcauuc

SEQ ID NO: 1987102 - RNA, 19 nt, Homo sapiens
  misc_RNA (1)...(19): siRNA sense strand
cagcaucgacugggcguau

SEQ ID NO: 1987103 - RNA, 19 nt, Homo sapiens
  misc_RNA (1)...(19): siRNA sense strand
aaagggagccagcgacaac

SEQ ID NO: 1987104 - RNA, 19 nt, Homo sapiens
  misc_RNA (1)...(19): siRNA sense strand
ggaccugcaggcccuuuua

SEQ ID NO: 1987105 - RNA, 19 nt, Homo sapiens
  misc_RNA (1)...(19): siRNA sense strand
agacgagaucagcaaauug

SEQ ID NO: 1987106 - RNA, 19 nt, Homo sapiens
  misc_RNA (1)...(19): siRNA sense strand
uaccagagggauccagcua

SEQ ID NO: 1987107 - RNA, 19 nt, Homo sapiens
  misc_RNA (1)...(19): siRNA sense strand
cauuugaguugagagauac

SEQ ID NO: 1987108 - RNA, 19 nt, Homo sapiens
  misc_RNA (1)...(19): siRNA sense strand
guauccauauggguacuca

SEQ ID NO: 1987109 - RNA, 19 nt, Homo sapiens
  misc_RNA (1)...(19): siRNA sense strand
gaaguggaggugaaaucag

SEQ ID NO: 1987110 - RNA, 19 nt, Homo sapiens
  misc_RNA (1)...(19): siRNA sense strand
guguauacucaaacucaaa

SEQ ID NO: 1987111 - RNA, 19 nt, Homo sapiens
  misc_RNA (1)...(19): siRNA sense strand
ggacagaacuucauuuaug

SEQ ID NO: 1987112 - RNA, 19 nt, Homo sapiens
  misc_RNA (1)...(19): siRNA sense strand
gaucugggauuaccauguu

SEQ ID NO: 1987113 - RNA, 19 nt, Homo sapiens
  misc_RNA (1)...(19): siRNA sense strand
gaggacagaacuucauuua

SEQ ID NO: 1987114 - RNA, 19 nt, Homo sapiens
  misc_RNA (1)...(19): siRNA sense strand
ugaccgaucucacaugaaa

SEQ ID NO: 1987115 - RNA, 19 nt, Homo sapiens
  misc_RNA (1)...(19): siRNA sense strand
gauacugucuugccauuuc

SEQ ID NO: 1987116 - RNA, 19 nt, Homo sapiens
  misc_RNA (1)...(19): siRNA sense strand
gacauucacccacaguuua

SEQ ID NO: 1987117 - RNA, 19 nt, Homo sapiens
  misc_RNA (1)...(19): siRNA sense strand
ccaguauccuuuagaagaa

SEQ ID NO: 1987118 - RNA, 19 nt, Homo sapiens
  misc_RNA (1)...(19): siRNA sense strand
gaccugugaucugggauua

SEQ ID NO: 1987119 - RNA, 19 nt, Homo sapiens
  misc_RNA (1)...(19): siRNA sense strand
ccauaucccugcauugaga

SEQ ID NO: 1987120 - RNA, 19 nt, Homo sapiens
  misc_RNA (1)...(19): siRNA sense strand
gaagcucugugaauacauc

SEQ ID NO: 1987121 - RNA, 19 nt, Homo sapiens
  misc_RNA (1)...(19): siRNA sense strand
acacaucgguuuggcagua

SEQ ID NO: 1987122 - RNA, 19 nt, Homo sapiens
  misc_RNA (1)...(19): siRNA sense strand
agaggaagaugauaccuau

SEQ ID NO: 1987123 - RNA, 19 nt, Homo sapiens
  misc_RNA (1)...(19): siRNA sense strand
caguauggaucccaaggua

SEQ ID NO: 1987124 - RNA, 19 nt, Homo sapiens
  misc_RNA (1)...(19): siRNA sense strand
ugaccaguauccuuuagaa

SEQ ID NO: 1987125 - RNA, 19 nt, Homo sapiens
  misc_RNA (1)...(19): siRNA sense strand
uuuggaagcucugugaaua

SEQ ID NO: 1987126 - RNA, 19 nt, Homo sapiens
  misc_RNA (1)...(19): siRNA sense strand
gaaagacuccagugggaau

SEQ ID NO: 1987127 - RNA, 19 nt, Homo sapiens
  misc_RNA (1)...(19): siRNA sense strand
gaggaaauuuagagugauc

SEQ ID NO: 1987128 - RNA, 19 nt, Homo sapiens
  misc_RNA (1)...(19): siRNA sense strand
caguuuaggaggaaauuua

SEQ ID NO: 1987129 - RNA, 19 nt, Homo sapiens
  misc_RNA (1)...(19): siRNA sense strand
uaagucugaugaugacauu

SEQ ID NO: 1987130 - RNA, 19 nt, Homo sapiens
  misc_RNA (1)...(19): siRNA sense strand
gagaggaagaugauaccua

SEQ ID NO: 1987131 - RNA, 19 nt, Homo sapiens
  misc_RNA (1)...(19): siRNA sense strand
ggcgagaccuggagaugga

SEQ ID NO: 1987132 - RNA, 19 nt, Homo sapiens
  misc_RNA (1)...(19): siRNA sense strand
aggaggaaauuuagaguga

SEQ ID NO: 1987133 - RNA, 19 nt, Homo sapiens
  misc_RNA (1)...(19): siRNA sense strand
gaauuuacacaucgguuug

SEQ ID NO: 1987134 - RNA, 19 nt, Homo sapiens
  misc_RNA (1)...(19): siRNA sense strand
uuuaugaucucgauacugu

SEQ ID NO: 1987135 - RNA, 19 nt, Homo sapiens
  misc_RNA (1)...(19): siRNA sense strand
ccauuucccugccucuuug

SEQ ID NO: 1987136 - RNA, 19 nt, Homo sapiens
  misc_RNA (1)...(19): siRNA sense strand
uguagaagaugccuuuaag

SEQ ID NO: 1987137 - RNA, 19 nt, Homo sapiens
  misc_RNA (1)...(19): siRNA sense strand
ugacauucacccacaguuu

SEQ ID NO: 1987138 - RNA, 19 nt, Homo sapiens
  misc_RNA (1)...(19): siRNA sense strand
ggaggacagaacuucauuu

SEQ ID NO: 1987139 - RNA, 19 nt, Homo sapiens
  misc_RNA (1)...(19): siRNA sense strand
cuacacacuauccgaauuu

SEQ ID NO: 1987140 - RNA, 19 nt, Homo sapiens
  misc_RNA (1)...(19): siRNA sense strand
ugacacuuauguagaagau

SEQ ID NO: 1987141 - RNA, 19 nt, Homo sapiens
  misc_RNA (1)...(19): siRNA sense strand
cgaauuuacacaucgguuu

SEQ ID NO: 1987142 - RNA, 19 nt, Homo sapiens
  misc_RNA (1)...(19): siRNA sense strand
ggaggaaauuuagagugau

SEQ ID NO: 1987143 - RNA, 19 nt, Homo sapiens
  misc_RNA (1)...(19): siRNA sense strand
gcauugagacuggagauuc

SEQ ID NO: 1987144 - RNA, 19 nt, Homo sapiens
  misc_RNA (1)...(19): siRNA sense strand
aagaugccuuuaagucuga

SEQ ID NO: 1987145 - RNA, 19 nt, Homo sapiens
  misc_RNA (1)...(19): siRNA sense strand
ucugaccgaucucacauga

SEQ ID NO: 1987146 - RNA, 19 nt, Homo sapiens
  misc_RNA (1)...(19): siRNA sense strand
ccgugcagauucauauuug

SEQ ID NO: 1987147 - RNA, 19 nt, Homo sapiens
  misc_RNA (1)...(19): siRNA sense strand
agaauguuaugcugucuuc

SEQ ID NO: 1987148 - RNA, 19 nt, Homo sapiens
  misc_RNA (1)...(19): siRNA sense strand
uacacacuauccgaauuua

SEQ ID NO: 1987149 - RNA, 19 nt, Homo sapiens
  misc_RNA (1)...(19): siRNA sense strand
gauccgugcagauucauau

SEQ ID NO: 1987150 - RNA, 19 nt, Homo sapiens
  misc_RNA (1)...(19): siRNA sense strand
uagaagaugccuuuaaguc

SEQ ID NO: 1987151 - RNA, 19 nt, Homo sapiens
  misc_RNA (1)...(19): siRNA sense strand
gaagaauguuaugcugucu

SEQ ID NO: 1987152 - RNA, 19 nt, Homo sapiens
  misc_RNA (1)...(19): siRNA sense strand
cuuugacacuuauguagaa

SEQ ID NO: 1987153 - RNA, 19 nt, Homo sapiens
  misc_RNA (1)...(19): siRNA sense strand
ggauuaccauguuguuuug

SEQ ID NO: 1987154 - RNA, 19 nt, Homo sapiens
  misc_RNA (1)...(19): siRNA sense strand
gcucugugaauacaucaaa

SEQ ID NO: 1987155 - RNA, 19 nt, Homo sapiens
  misc_RNA (1)...(19): siRNA sense strand
cagcugcuacugugaagaa

SEQ ID NO: 1987156 - RNA, 19 nt, Homo sapiens
  misc_RNA (1)...(19): siRNA sense strand
ucuacacacuauccgaauu

SEQ ID NO: 1987157 - RNA, 19 nt, Homo sapiens
  misc_RNA (1)...(19): siRNA sense strand
ucgauacugucuugccauu

SEQ ID NO: 1987158 - RNA, 19 nt, Homo sapiens
  misc_RNA (1)...(19): siRNA sense strand
gccauuucccugccucuuu

SEQ ID NO: 1987159 - RNA, 19 nt, Homo sapiens
  misc_RNA (1)...(19): siRNA sense strand
auaccuaucuggaaacaac

SEQ ID NO: 1987160 - RNA, 19 nt, Homo sapiens
  misc_RNA (1)...(19): siRNA sense strand
aaaaugaaccugaacgauu

SEQ ID NO: 1987161 - RNA, 19 nt, Homo sapiens
  misc_RNA (1)...(19): siRNA sense strand
cuaaugagaggaagaugau

SEQ ID NO: 1987162 - RNA, 19 nt, Homo sapiens
  misc_RNA (1)...(19): siRNA sense strand
ccaugaccaguauccuuua

SEQ ID NO: 1987163 - RNA, 19 nt, Homo sapiens
  misc_RNA (1)...(19): siRNA sense strand
ggaccugugaucugggauu

SEQ ID NO: 1987164 - RNA, 19 nt, Homo sapiens
  misc_RNA (1)...(19): siRNA sense strand
uggaagcucugugaauaca

SEQ ID NO: 1987165 - RNA, 19 nt, Homo sapiens
  misc_RNA (1)...(19): siRNA sense strand
ugaucucgauacugucuug

SEQ ID NO: 1987166 - RNA, 19 nt, Homo sapiens
  misc_RNA (1)...(19): siRNA sense strand
agagugauccgugcagauu

SEQ ID NO: 1987167 - RNA, 19 nt, Homo sapiens
  misc_RNA (1)...(19): siRNA sense strand
gggauuaccauguuguuuu

SEQ ID NO: 1987168 - RNA, 19 nt, Homo sapiens
  misc_RNA (1)...(19): siRNA sense strand
gaacgauuucaucaguaug

SEQ ID NO: 1987169 - RNA, 19 nt, Homo sapiens
  misc_RNA (1)...(19): siRNA sense strand
cgccauaucccugcauuga

SEQ ID NO: 1987170 - RNA, 19 nt, Homo sapiens
  misc_RNA (1)...(19): siRNA sense strand
uuauguagaagaugccuuu

SEQ ID NO: 1987171 - RNA, 19 nt, Homo sapiens
  misc_RNA (1)...(19): siRNA sense strand
guagaagaugccuuuaagu

SEQ ID NO: 1987172 - RNA, 19 nt, Homo sapiens
  misc_RNA (1)...(19): siRNA sense strand
cacaucgguuuggcaguaa

SEQ ID NO: 1987173 - RNA, 19 nt, Homo sapiens
  misc_RNA (1)...(19): siRNA sense strand
agaagaugccuuuaagucu

SEQ ID NO: 1987174 - RNA, 19 nt, Homo sapiens
  misc_RNA (1)...(19): siRNA sense strand
ucuaaugagaggaagauga

SEQ ID NO: 1987175 - RNA, 19 nt, Homo sapiens
  misc_RNA (1)...(19): siRNA sense strand
cacacuauccgaauuuaca

SEQ ID NO: 1987176 - RNA, 19 nt, Homo sapiens
  misc_RNA (1)...(19): siRNA sense strand
caugaccaguauccuuuag

SEQ ID NO: 1987177 - RNA, 19 nt, Homo sapiens
  misc_RNA (1)...(19): siRNA sense strand
ccuuuaagucugaugauga

SEQ ID NO: 1987178 - RNA, 19 nt, Homo sapiens
  misc_RNA (1)...(19): siRNA sense strand
gccuuuaagucugaugaug

SEQ ID NO: 1987179 - RNA, 19 nt, Homo sapiens
  misc_RNA (1)...(19): siRNA sense strand
accaguauccuuuagaaga

SEQ ID NO: 1987180 - RNA, 19 nt, Homo sapiens
  misc_RNA (1)...(19): siRNA sense strand
cgugcagauucauauuuga

SEQ ID NO: 1987181 - RNA, 19 nt, Homo sapiens
  misc_RNA (1)...(19): siRNA sense strand
agugauccgugcagauuca

SEQ ID NO: 1987182 - RNA, 19 nt, Homo sapiens
  misc_RNA (1)...(19): siRNA sense strand
ccucuuugacacuuaugua

SEQ ID NO: 1987183 - RNA, 19 nt, Homo sapiens
  misc_RNA (1)...(19): siRNA sense strand
caacaugucaacagaauua

SEQ ID NO: 1987184 - RNA, 19 nt, Homo sapiens
  misc_RNA (1)...(19): siRNA sense strand
gaaaggagaagaaagcaaa

SEQ ID NO: 1987185 - RNA, 19 nt, Homo sapiens
  misc_RNA (1)...(19): siRNA sense strand
gaauucugcugcuguuauu

SEQ ID NO: 1987186 - RNA, 19 nt, Homo sapiens
  misc_RNA (1)...(19): siRNA sense strand
gagcauaagcguucacuga

SEQ ID NO: 1987187 - RNA, 19 nt, Homo sapiens
  misc_RNA (1)...(19): siRNA sense strand
gagaagaaagcaaagguuu

SEQ ID NO: 1987188 - RNA, 19 nt, Homo sapiens
  misc_RNA (1)...(19): siRNA sense strand
ggaagaaacgcgagcaaga

SEQ ID NO: 1987189 - RNA, 19 nt, Homo sapiens
  misc_RNA (1)...(19): siRNA sense strand
gaagaaacgcgagcaagaa

SEQ ID NO: 1987190 - RNA, 19 nt, Homo sapiens
  misc_RNA (1)...(19): siRNA sense strand
gcuugggacacacaaauua

SEQ ID NO: 1987191 - RNA, 19 nt, Homo sapiens
  misc_RNA (1)...(19): siRNA sense strand
ggaauucugcugcuguuau

SEQ ID NO: 1987192 - RNA, 19 nt, Homo sapiens
  misc_RNA (1)...(19): siRNA sense strand
gaucuuaaagcaaguuugu

SEQ ID NO: 1987193 - RNA, 19 nt, Homo sapiens
  misc_RNA (1)...(19): siRNA sense strand
ccacacaaaggaaagcuaa

SEQ ID NO: 1987194 - RNA, 19 nt, Homo sapiens
  misc_RNA (1)...(19): siRNA sense strand
cagcugcuacuaaagauaa

SEQ ID NO: 1987195 - RNA, 19 nt, Homo sapiens
  misc_RNA (1)...(19): siRNA sense strand
caacuaugaaccacacaaa

SEQ ID NO: 1987196 - RNA, 19 nt, Homo sapiens
  misc_RNA (1)...(19): siRNA sense strand
ggagaagaaagcaaagguu

SEQ ID NO: 1987197 - RNA, 19 nt, Homo sapiens
  misc_RNA (1)...(19): siRNA sense strand
gaacgaaaggagaagaaag

SEQ ID NO: 1987198 - RNA, 19 nt, Homo sapiens
  misc_RNA (1)...(19): siRNA sense strand
aaaucaacaugucaacaga

SEQ ID NO: 1987199 - RNA, 19 nt, Homo sapiens
  misc_RNA (1)...(19): siRNA sense strand
gaagagcaacggaagaaac

SEQ ID NO: 1987200 - RNA, 19 nt, Homo sapiens
  misc_RNA (1)...(19): siRNA sense strand
caagcgcucugcuaucucu

SEQ ID NO: 1987201 - RNA, 19 nt, Homo sapiens
  misc_RNA (1)...(19): siRNA sense strand
gaaacgcgagcaagaacga

SEQ ID NO: 1987202 - RNA, 19 nt, Homo sapiens
  misc_RNA (1)...(19): siRNA sense strand
ccaagacuccagccagaaa

SEQ ID NO: 1987203 - RNA, 19 nt, Homo sapiens
  misc_RNA (1)...(19): siRNA sense strand
ggucaggacuccaguaccu

SEQ ID NO: 1987204 - RNA, 19 nt, Homo sapiens
  misc_RNA (1)...(19): siRNA sense strand
cauuuuggcugaagauuaa

SEQ ID NO: 1987205 - RNA, 19 nt, Homo sapiens
  misc_RNA (1)...(19): siRNA sense strand
acuccagucuccaauaaga

SEQ ID NO: 1987206 - RNA, 19 nt, Homo sapiens
  misc_RNA (1)...(19): siRNA sense strand
ggaagagcaacggaagaaa

SEQ ID NO: 1987207 - RNA, 19 nt, Homo sapiens
  misc_RNA (1)...(19): siRNA sense strand
ccaauaagaaaccaguguu

SEQ ID NO: 1987208 - RNA, 19 nt, Homo sapiens
  misc_RNA (1)...(19): siRNA sense strand
aaccaguguuugaucuuaa

SEQ ID NO: 1987209 - RNA, 19 nt, Homo sapiens
  misc_RNA (1)...(19): siRNA sense strand
uaaaucaacaugucaacag

SEQ ID NO: 1987210 - RNA, 19 nt, Homo sapiens
  misc_RNA (1)...(19): siRNA sense strand
ucacucaagcgcucugcua

SEQ ID NO: 1987211 - RNA, 19 nt, Homo sapiens
  misc_RNA (1)...(19): siRNA sense strand
ggacacacaaauuaaagac

SEQ ID NO: 1987212 - RNA, 19 nt, Homo sapiens
  misc_RNA (1)...(19): siRNA sense strand
gggacacacaaauuaaaga

SEQ ID NO: 1987213 - RNA, 19 nt, Homo sapiens
  misc_RNA (1)...(19): siRNA sense strand
ugcuaucucugcagcuaaa

SEQ ID NO: 1987214 - RNA, 19 nt, Homo sapiens
  misc_RNA (1)...(19): siRNA sense strand
caagaacgaaaggagaaga

SEQ ID NO: 1987215 - RNA, 19 nt, Homo sapiens
  misc_RNA (1)...(19): siRNA sense strand
cuaugaaccacacaaagga

SEQ ID NO: 1987216 - RNA, 19 nt, Homo sapiens
  misc_RNA (1)...(19): siRNA sense strand
ggggcaaucuaaagaaaau

SEQ ID NO: 1987217 - RNA, 19 nt, Homo sapiens
  misc_RNA (1)...(19): siRNA sense strand
gggaauucugcugcuguua

SEQ ID NO: 1987218 - RNA, 19 nt, Homo sapiens
  misc_RNA (1)...(19): siRNA sense strand
cgaaaggagaagaaagcaa

SEQ ID NO: 1987219 - RNA, 19 nt, Homo sapiens
  misc_RNA (1)...(19): siRNA sense strand
ccagacaaaggaagagcaa

SEQ ID NO: 1987220 - RNA, 19 nt, Homo sapiens
  misc_RNA (1)...(19): siRNA sense strand
uuucagcugcuacuaaaga

SEQ ID NO: 1987221 - RNA, 19 nt, Homo sapiens
  misc_RNA (1)...(19): siRNA sense strand
cucaagcgcucugcuaucu

SEQ ID NO: 1987222 - RNA, 19 nt, Homo sapiens
  misc_RNA (1)...(19): siRNA sense strand
accaguguuugaucuuaaa

SEQ ID NO: 1987223 - RNA, 19 nt, Homo sapiens
  misc_RNA (1)...(19): siRNA sense strand
gcgaaggggccucauuuug

SEQ ID NO: 1987224 - RNA, 19 nt, Homo sapiens
  misc_RNA (1)...(19): siRNA sense strand
guuuucagcugcuacuaaa

SEQ ID NO: 1987225 - RNA, 19 nt, Homo sapiens
  misc_RNA (1)...(19): siRNA sense strand
uaacagagauucaaaggua

SEQ ID NO: 1987226 - RNA, 19 nt, Homo sapiens
  misc_RNA (1)...(19): siRNA sense strand
gaaaugagaaucaggauga

SEQ ID NO: 1987227 - RNA, 19 nt, Homo sapiens
  misc_RNA (1)...(19): siRNA sense strand
caacaugucaacagaauua

SEQ ID NO: 1987228 - RNA, 19 nt, Homo sapiens
  misc_RNA (1)...(19): siRNA sense strand
ggaaagaaaucucucuaca

SEQ ID NO: 1987229 - RNA, 19 nt, Homo sapiens
  misc_RNA (1)...(19): siRNA sense strand
gaaaggagaagaaagcaaa

SEQ ID NO: 1987230 - RNA, 19 nt, Homo sapiens
  misc_RNA (1)...(19): siRNA sense strand
aaagaaaucucucuacaca

SEQ ID NO: 1987231 - RNA, 19 nt, Homo sapiens
  misc_RNA (1)...(19): siRNA sense strand
gaauucugcugcuguuauu

SEQ ID NO: 1987232 - RNA, 19 nt, Homo sapiens
  misc_RNA (1)...(19): siRNA sense strand
agaaaucucucuacacaga

SEQ ID NO: 1987233 - RNA, 19 nt, Homo sapiens
  misc_RNA (1)...(19): siRNA sense strand
gagcauaagcguucacuga

SEQ ID NO: 1987234 - RNA, 19 nt, Homo sapiens
  misc_RNA (1)...(19): siRNA sense strand
uaaguaaucccacugaauu

SEQ ID NO: 1987235 - RNA, 19 nt, Homo sapiens
  misc_RNA (1)...(19): siRNA sense strand
gaagaacacaauuccauga

SEQ ID NO: 1987236 - RNA, 19 nt, Homo sapiens
  misc_RNA (1)...(19): siRNA sense strand
gagaagaaagcaaagguuu

SEQ ID NO: 1987237 - RNA, 19 nt, Homo sapiens
  misc_RNA (1)...(19): siRNA sense strand
ggaagaaacgcgagcaaga

SEQ ID NO: 1987238 - RNA, 19 nt, Homo sapiens
  misc_RNA (1)...(19): siRNA sense strand
gaagaaacgcgagcaagaa

SEQ ID NO: 1987239 - RNA, 19 nt, Homo sapiens
  misc_RNA (1)...(19): siRNA sense strand
gagcuggacucccucaagu

SEQ ID NO: 1987240 - RNA, 19 nt, Homo sapiens
  misc_RNA (1)...(19): siRNA sense strand
acagugaccugcagaacuu

SEQ ID NO: 1987241 - RNA, 19 nt, Homo sapiens
  misc_RNA (1)...(19): siRNA sense strand
gaaucaggaugaaagucaa

SEQ ID NO: 1987242 - RNA, 19 nt, Homo sapiens
  misc_RNA (1)...(19): siRNA sense strand
ucacuacuccaaacuuuaa

SEQ ID NO: 1987243 - RNA, 19 nt, Homo sapiens
  misc_RNA (1)...(19): siRNA sense strand
aaucacuacuccaaacuuu

SEQ ID NO: 1987244 - RNA, 19 nt, Homo sapiens
  misc_RNA (1)...(19): siRNA sense strand
gcuugggacacacaaauua

SEQ ID NO: 1987245 - RNA, 19 nt, Homo sapiens
  misc_RNA (1)...(19): siRNA sense strand
ggaauucugcugcuguuau

SEQ ID NO: 1987246 - RNA, 19 nt, Homo sapiens
  misc_RNA (1)...(19): siRNA sense strand
ggaaagccaggaucucaga

SEQ ID NO: 1987247 - RNA, 19 nt, Homo sapiens
  misc_RNA (1)...(19): siRNA sense strand
gaucuuaaagcaaguuugu

SEQ ID NO: 1987248 - RNA, 19 nt, Homo sapiens
  misc_RNA (1)...(19): siRNA sense strand
gaaaggcuacauuaaacau

SEQ ID NO: 1987249 - RNA, 19 nt, Homo sapiens
  misc_RNA (1)...(19): siRNA sense strand
ccacacaaaggaaagcuaa

SEQ ID NO: 1987250 - RNA, 19 nt, Homo sapiens
  misc_RNA (1)...(19): siRNA sense strand
gcaccaagaagcugagaau

SEQ ID NO: 1987251 - RNA, 19 nt, Homo sapiens
  misc_RNA (1)...(19): siRNA sense strand
cagcugcuacuaaagauaa

SEQ ID NO: 1987252 - RNA, 19 nt, Homo sapiens
  misc_RNA (1)...(19): siRNA sense strand
ccaagaagcugagaaugcu

SEQ ID NO: 1987253 - RNA, 19 nt, Homo sapiens
  misc_RNA (1)...(19): siRNA sense strand
ggagaagaaagcaaagguu

SEQ ID NO: 1987254 - RNA, 19 nt, Homo sapiens
  misc_RNA (1)...(19): siRNA sense strand
caacuaugaaccacacaaa

SEQ ID NO: 1987255 - RNA, 19 nt, Homo sapiens
  misc_RNA (1)...(19): siRNA sense strand
uaaaagaacugcaaucacu

SEQ ID NO: 1987256 - RNA, 19 nt, Homo sapiens
  misc_RNA (1)...(19): siRNA sense strand
gaacgaaaggagaagaaag

SEQ ID NO: 1987257 - RNA, 19 nt, Homo sapiens
  misc_RNA (1)...(19): siRNA sense strand
gaaaaggaaaugagaauca

SEQ ID NO: 1987258 - RNA, 19 nt, Homo sapiens
  misc_RNA (1)...(19): siRNA sense strand
gaagagcaacggaagaaac

SEQ ID NO: 1987259 - RNA, 19 nt, Homo sapiens
  misc_RNA (1)...(19): siRNA sense strand
aaaucaacaugucaacaga

SEQ ID NO: 1987260 - RNA, 19 nt, Homo sapiens
  misc_RNA (1)...(19): siRNA sense strand
gaaagaaaucucucuacac

SEQ ID NO: 1987261 - RNA, 19 nt, Homo sapiens
  misc_RNA (1)...(19): siRNA sense strand
cugcagaacuuagccaaga

SEQ ID NO: 1987262 - RNA, 19 nt, Homo sapiens
  misc_RNA (1)...(19): siRNA sense strand
gaucagcaaccaggaagaa

SEQ ID NO: 1987263 - RNA, 19 nt, Homo sapiens
  misc_RNA (1)...(19): siRNA sense strand
caagcgcucugcuaucucu

SEQ ID NO: 1987264 - RNA, 19 nt, Homo sapiens
  misc_RNA (1)...(19): siRNA sense strand
aaggcuacauuaaacauga

SEQ ID NO: 1987265 - RNA, 19 nt, Homo sapiens
  misc_RNA (1)...(19): siRNA sense strand
gaaacgcgagcaagaacga

SEQ ID NO: 1987266 - RNA, 19 nt, Homo sapiens
  misc_RNA (1)...(19): siRNA sense strand
ccaagacuccagccagaaa

SEQ ID NO: 1987267 - RNA, 19 nt, Homo sapiens
  misc_RNA (1)...(19): siRNA sense strand
cuugaaaggcuacauuaaa

SEQ ID NO: 1987268 - RNA, 19 nt, Homo sapiens
  misc_RNA (1)...(19): siRNA sense strand
ggucaggacuccaguaccu

SEQ ID NO: 1987269 - RNA, 19 nt, Homo sapiens
  misc_RNA (1)...(19): siRNA sense strand
cauuuuggcugaagauuaa

SEQ ID NO: 1987270 - RNA, 19 nt, Homo sapiens
  misc_RNA (1)...(19): siRNA sense strand
ucucagagcuacugcaaaa

SEQ ID NO: 1987271 - RNA, 19 nt, Homo sapiens
  misc_RNA (1)...(19): siRNA sense strand
cauuaaacaugaggcaaga

SEQ ID NO: 1987272 - RNA, 19 nt, Homo sapiens
  misc_RNA (1)...(19): siRNA sense strand
ggagaaggugcaagacugu

SEQ ID NO: 1987273 - RNA, 19 nt, Homo sapiens
  misc_RNA (1)...(19): siRNA sense strand
ccaggaagaagcugagaga

SEQ ID NO: 1987274 - RNA, 19 nt, Homo sapiens
  misc_RNA (1)...(19): siRNA sense strand
gaaggaaagaaaucucucu

SEQ ID NO: 1987275 - RNA, 19 nt, Homo sapiens
  misc_RNA (1)...(19): siRNA sense strand
gaucucagagcuacugcaa

SEQ ID NO: 1987276 - RNA, 19 nt, Homo sapiens
  misc_RNA (1)...(19): siRNA sense strand
gugaugagacugagauaca

SEQ ID NO: 1987277 - RNA, 19 nt, Homo sapiens
  misc_RNA (1)...(19): siRNA sense strand
uugaaaggcuacauuaaac

SEQ ID NO: 1987278 - RNA, 19 nt, Homo sapiens
  misc_RNA (1)...(19): siRNA sense strand
ggaagagcaacggaagaaa

SEQ ID NO: 1987279 - RNA, 19 nt, Homo sapiens
  misc_RNA (1)...(19): siRNA sense strand
ccaauaagaaaccaguguu

SEQ ID NO: 1987280 - RNA, 19 nt, Homo sapiens
  misc_RNA (1)...(19): siRNA sense strand
acuccagucuccaauaaga

SEQ ID NO: 1987281 - RNA, 19 nt, Homo sapiens
  misc_RNA (1)...(19): siRNA sense strand
acaaggagaaggugcaaga

SEQ ID NO: 1987282 - RNA, 19 nt, Homo sapiens
  misc_RNA (1)...(19): siRNA sense strand
aaccaguguuugaucuuaa

SEQ ID NO: 1987283 - RNA, 19 nt, Homo sapiens
  misc_RNA (1)...(19): siRNA sense strand
uuaaacaugaggcaagaaa

SEQ ID NO: 1987284 - RNA, 19 nt, Homo sapiens
  misc_RNA (1)...(19): siRNA sense strand
aaacuucugcauccucuug

SEQ ID NO: 1987285 - RNA, 19 nt, Homo sapiens
  misc_RNA (1)...(19): siRNA sense strand
uaaaucaacaugucaacag

SEQ ID NO: 1987286 - RNA, 19 nt, Homo sapiens
  misc_RNA (1)...(19): siRNA sense strand
gaagcucauuuuaaggaaa

SEQ ID NO: 1987287 - RNA, 19 nt, Homo sapiens
  misc_RNA (1)...(19): siRNA sense strand
aauaaguaaucccacugaa

SEQ ID NO: 1987288 - RNA, 19 nt, Homo sapiens
  misc_RNA (1)...(19): siRNA sense strand
gcaagaaaaggaaaugaga

SEQ ID NO: 1987289 - RNA, 19 nt, Homo sapiens
  misc_RNA (1)...(19): siRNA sense strand
ucacucaagcgcucugcua

SEQ ID NO: 1987290 - RNA, 19 nt, Homo sapiens
  misc_RNA (1)...(19): siRNA sense strand
aaauaaguaaucccacuga

SEQ ID NO: 1987291 - RNA, 19 nt, Homo sapiens
  misc_RNA (1)...(19): siRNA sense strand
ggacacacaaauuaaagac

SEQ ID NO: 1987292 - RNA, 19 nt, Homo sapiens
  misc_RNA (1)...(19): siRNA sense strand
gaugagacugagauacaga

SEQ ID NO: 1987293 - RNA, 19 nt, Homo sapiens
  misc_RNA (1)...(19): siRNA sense strand
gggacacacaaauuaaaga

SEQ ID NO: 1987294 - RNA, 19 nt, Homo sapiens
  misc_RNA (1)...(19): siRNA sense strand
agaaucaggaugaaaguca

SEQ ID NO: 1987295 - RNA, 19 nt, Homo sapiens
  misc_RNA (1)...(19): siRNA sense strand
caggaaagccaggaucuca

SEQ ID NO: 1987296 - RNA, 19 nt, Homo sapiens
  misc_RNA (1)...(19): siRNA sense strand
aaaugagaaucaggaugaa

SEQ ID NO: 1987297 - RNA, 19 nt, Homo sapiens
  misc_RNA (1)...(19): siRNA sense strand
ugaaaggcuacauuaaaca

SEQ ID NO: 1987298 - RNA, 19 nt, Homo sapiens
  misc_RNA (1)...(19): siRNA sense strand
gguaacagagauucaaagg

SEQ ID NO: 1987299 - RNA, 19 nt, Homo sapiens
  misc_RNA (1)...(19): siRNA sense strand
gagacugagauacagauca

SEQ ID NO: 1987300 - RNA, 19 nt, Homo sapiens
  misc_RNA (1)...(19): siRNA sense strand
caagaacgaaaggagaaga

SEQ ID NO: 1987301 - RNA, 19 nt, Homo sapiens
  misc_RNA (1)...(19): siRNA sense strand
ugcuaucucugcagcuaaa

SEQ ID NO: 1987302 - RNA, 19 nt, Homo sapiens
  misc_RNA (1)...(19): siRNA sense strand
gaagcugagaaugcuguuu

SEQ ID NO: 1987303 - RNA, 19 nt, Homo sapiens
  misc_RNA (1)...(19): siRNA sense strand
cagguaacagagauucaaa

SEQ ID NO: 1987304 - RNA, 19 nt, Homo sapiens
  misc_RNA (1)...(19): siRNA sense strand
ggggcaaucuaaagaaaau

SEQ ID NO: 1987305 - RNA, 19 nt, Homo sapiens
  misc_RNA (1)...(19): siRNA sense strand
cuaugaaccacacaaagga

SEQ ID NO: 1987306 - RNA, 19 nt, Homo sapiens
  misc_RNA (1)...(19): siRNA sense strand
gcagaacuuagccaagagu

SEQ ID NO: 1987307 - RNA, 19 nt, Homo sapiens
  misc_RNA (1)...(19): siRNA sense strand
gcaaucacuacuccaaacu

SEQ ID NO: 1987308 - RNA, 19 nt, Homo sapiens
  misc_RNA (1)...(19): siRNA sense strand
cuacuccaaacuuuaagaa

SEQ ID NO: 1987309 - RNA, 19 nt, Homo sapiens
  misc_RNA (1)...(19): siRNA sense strand
cgaaaggagaagaaagcaa

SEQ ID NO: 1987310 - RNA, 19 nt, Homo sapiens
  misc_RNA (1)...(19): siRNA sense strand
ccagacaaaggaagagcaa

SEQ ID NO: 1987311 - RNA, 19 nt, Homo sapiens
  misc_RNA (1)...(19): siRNA sense strand
gggaauucugcugcuguua

SEQ ID NO: 1987312 - RNA, 19 nt, Homo sapiens
  misc_RNA (1)...(19): siRNA sense strand
caaucacuacuccaaacuu

SEQ ID NO: 1987313 - RNA, 19 nt, Homo sapiens
  misc_RNA (1)...(19): siRNA sense strand
uuucagcugcuacuaaaga

SEQ ID NO: 1987314 - RNA, 19 nt, Homo sapiens
  misc_RNA (1)...(19): siRNA sense strand
cucaagcgcucugcuaucu

SEQ ID NO: 1987315 - RNA, 19 nt, Homo sapiens
  misc_RNA (1)...(19): siRNA sense strand
aagaacacaauuccaugaa

SEQ ID NO: 1987316 - RNA, 19 nt, Homo sapiens
  misc_RNA (1)...(19): siRNA sense strand
caccagacgagcaccaaga

SEQ ID NO: 1987317 - RNA, 19 nt, Homo sapiens
  misc_RNA (1)...(19): siRNA sense strand
gcgaaggggccucauuuug

SEQ ID NO: 1987318 - RNA, 19 nt, Homo sapiens
  misc_RNA (1)...(19): siRNA sense strand
gcuggacucccucaaguac

SEQ ID NO: 1987319 - RNA, 19 nt, Homo sapiens
  misc_RNA (1)...(19): siRNA sense strand
accaguguuugaucuuaaa

SEQ ID NO: 1987320 - RNA, 19 nt, Homo sapiens
  misc_RNA (1)...(19): siRNA sense strand
aagcugagaaugcuguuuc

SEQ ID NO: 1987321 - RNA, 19 nt, Homo sapiens
  misc_RNA (1)...(19): siRNA sense strand
guuuucagcugcuacuaaa

SEQ ID NO: 1987322 - RNA, 19 nt, Homo sapiens
  misc_RNA (1)...(19): siRNA sense strand
aaggaaagaaaucucucua

SEQ ID NO: 1987323 - RNA, 19 nt, Homo sapiens
  misc_RNA (1)...(19): siRNA sense strand
cagaaggaaagaaaucucu

SEQ ID NO: 1987324 - RNA, 19 nt, Homo sapiens
  misc_RNA (1)...(19): siRNA sense strand
aaugcuguuuccucaggua

SEQ ID NO: 1987325 - RNA, 19 nt, Homo sapiens
  misc_RNA (1)...(19): siRNA sense strand
gaagaucagucucaagguu

SEQ ID NO: 1987326 - RNA, 19 nt, Homo sapiens
  misc_RNA (1)...(19): siRNA sense strand
gcagcaggauucagaccua

SEQ ID NO: 1987327 - RNA, 19 nt, Homo sapiens
  misc_RNA (1)...(19): siRNA sense strand
ccagguggcugcucugagu

SEQ ID NO: 1987328 - RNA, 19 nt, Homo sapiens
  misc_RNA (1)...(19): siRNA sense strand
ggguuucccuugaagauca

SEQ ID NO: 1987329 - RNA, 19 nt, Homo sapiens
  misc_RNA (1)...(19): siRNA sense strand
ucugagugcuccaguguug

SEQ ID NO: 1987330 - RNA, 19 nt, Homo sapiens
  misc_RNA (1)...(19): siRNA sense strand
caccuaacccugacgcuuu

SEQ ID NO: 1987331 - RNA, 19 nt, Homo sapiens
  misc_RNA (1)...(19): siRNA sense strand
ggauucagaccuagaugug

SEQ ID NO: 1987332 - RNA, 19 nt, Homo sapiens
  misc_RNA (1)...(19): siRNA sense strand
gugagcagcaggauucaga

SEQ ID NO: 1987333 - RNA, 19 nt, Homo sapiens
  misc_RNA (1)...(19): siRNA sense strand
uggcuuggcuuccagaaac

SEQ ID NO: 1987334 - RNA, 19 nt, Homo sapiens
  misc_RNA (1)...(19): siRNA sense strand
gcaggauucagaccuagau

SEQ ID NO: 1987335 - RNA, 19 nt, Homo sapiens
  misc_RNA (1)...(19): siRNA sense strand
ucugggauccuuucaccua

SEQ ID NO: 1987336 - RNA, 19 nt, Homo sapiens
  misc_RNA (1)...(19): siRNA sense strand
gcucugagugcuccagugu

SEQ ID NO: 1987337 - RNA, 19 nt, Homo sapiens
  misc_RNA (1)...(19): siRNA sense strand
cugggauccuuucaccuaa

SEQ ID NO: 1987338 - RNA, 19 nt, Homo sapiens
  misc_RNA (1)...(19): siRNA sense strand
ccaggccacugcuaauagg

SEQ ID NO: 1987339 - RNA, 19 nt, Homo sapiens
  misc_RNA (1)...(19): siRNA sense strand
cagaguggcuuggcuucca

SEQ ID NO: 1987340 - RNA, 19 nt, Homo sapiens
  misc_RNA (1)...(19): siRNA sense strand
ccggugagcagcaggauuc

SEQ ID NO: 1987341 - RNA, 19 nt, Homo sapiens
  misc_RNA (1)...(19): siRNA sense strand
ggagguccuggccaugcua

SEQ ID NO: 1987342 - RNA, 19 nt, Homo sapiens
  misc_RNA (1)...(19): siRNA sense strand
caucuuggaguuucugaag

SEQ ID NO: 1987343 - RNA, 19 nt, Homo sapiens
  misc_RNA (1)...(19): siRNA sense strand
uucuuugggucacuuauga

SEQ ID NO: 1987344 - RNA, 19 nt, Homo sapiens
  misc_RNA (1)...(19): siRNA sense strand
ccaacaugcuggugacuaa

SEQ ID NO: 1987345 - RNA, 19 nt, Homo sapiens
  misc_RNA (1)...(19): siRNA sense strand
cuacaaagccguuucuuau

SEQ ID NO: 1987346 - RNA, 19 nt, Homo sapiens
  misc_RNA (1)...(19): siRNA sense strand
acaaagccguuucuuauca

SEQ ID NO: 1987347 - RNA, 19 nt, Homo sapiens
  misc_RNA (1)...(19): siRNA sense strand
gaagaaaccaacuacaaag

SEQ ID NO: 1987348 - RNA, 19 nt, Homo sapiens
  misc_RNA (1)...(19): siRNA sense strand
gcuggaggccucacacuaa

SEQ ID NO: 1987349 - RNA, 19 nt, Homo sapiens
  misc_RNA (1)...(19): siRNA sense strand
gugacuaacuucuggaugu

SEQ ID NO: 1987350 - RNA, 19 nt, Homo sapiens
  misc_RNA (1)...(19): siRNA sense strand
caagcacgacuauguguaa

SEQ ID NO: 1987351 - RNA, 19 nt, Homo sapiens
  misc_RNA (1)...(19): siRNA sense strand
gagguacaaucuuauccuu

SEQ ID NO: 1987352 - RNA, 19 nt, Homo sapiens
  misc_RNA (1)...(19): siRNA sense strand
cagaagaaaccaacuacaa

SEQ ID NO: 1987353 - RNA, 19 nt, Homo sapiens
  misc_RNA (1)...(19): siRNA sense strand
aggacgagguacaaucuua

SEQ ID NO: 1987354 - RNA, 19 nt, Homo sapiens
  misc_RNA (1)...(19): siRNA sense strand
agaagaaaccaacuacaaa

SEQ ID NO: 1987355 - RNA, 19 nt, Homo sapiens
  misc_RNA (1)...(19): siRNA sense strand
gaaugcaggcccuauuuca

SEQ ID NO: 1987356 - RNA, 19 nt, Homo sapiens
  misc_RNA (1)...(19): siRNA sense strand
gcacagaggacgagguaca

SEQ ID NO: 1987357 - RNA, 19 nt, Homo sapiens
  misc_RNA (1)...(19): siRNA sense strand
ucaccuccguguuccagua

SEQ ID NO: 1987358 - RNA, 19 nt, Homo sapiens
  misc_RNA (1)...(19): siRNA sense strand
ggaggccucacacuaauug

SEQ ID NO: 1987359 - RNA, 19 nt, Homo sapiens
  misc_RNA (1)...(19): siRNA sense strand
gcagugcgagcccugauga

SEQ ID NO: 1987360 - RNA, 19 nt, Homo sapiens
  misc_RNA (1)...(19): siRNA sense strand
gggaucauguucauugucu

SEQ ID NO: 1987361 - RNA, 19 nt, Homo sapiens
  misc_RNA (1)...(19): siRNA sense strand
acacugaccuccgggauca

SEQ ID NO: 1987362 - RNA, 19 nt, Homo sapiens
  misc_RNA (1)...(19): siRNA sense strand
caaagccguuucuuaucau

SEQ ID NO: 1987363 - RNA, 19 nt, Homo sapiens
  misc_RNA (1)...(19): siRNA sense strand
ggacgagguacaaucuuau

SEQ ID NO: 1987364 - RNA, 19 nt, Homo sapiens
  misc_RNA (1)...(19): siRNA sense strand
cagaccagguacacauuug

SEQ ID NO: 1987365 - RNA, 19 nt, Homo sapiens
  misc_RNA (1)...(19): siRNA sense strand
guccacagcuaacauguac

SEQ ID NO: 1987366 - RNA, 19 nt, Homo sapiens
  misc_RNA (1)...(19): siRNA sense strand
ccacaguguugccuacaag

SEQ ID NO: 1987367 - RNA, 19 nt, Homo sapiens
  misc_RNA (1)...(19): siRNA sense strand
ccaccgggauggacaugug

SEQ ID NO: 1987368 - RNA, 19 nt, Homo sapiens
  misc_RNA (1)...(19): siRNA sense strand
guucaggcuucaccgaaug

SEQ ID NO: 1987369 - RNA, 19 nt, Homo sapiens
  misc_RNA (1)...(19): siRNA sense strand
gaucauguucauugucuca

SEQ ID NO: 1987370 - RNA, 19 nt, Homo sapiens
  misc_RNA (1)...(19): siRNA sense strand
acuacaaagccguuucuua

SEQ ID NO: 1987371 - RNA, 19 nt, Homo sapiens
  misc_RNA (1)...(19): siRNA sense strand
ccgaaugcaggcccuauuu

SEQ ID NO: 1987372 - RNA, 19 nt, Homo sapiens
  misc_RNA (1)...(19): siRNA sense strand
ucaggucuuugugcaauug

SEQ ID NO: 1987373 - RNA, 19 nt, Homo sapiens
  misc_RNA (1)...(19): siRNA sense strand
aaucuuauccuuccaagca

SEQ ID NO: 1987374 - RNA, 19 nt, Homo sapiens
  misc_RNA (1)...(19): siRNA sense strand
ccaagcacgacuaugugua

SEQ ID NO: 1987375 - RNA, 19 nt, Homo sapiens
  misc_RNA (1)...(19): siRNA sense strand
gccacaguguugccuacaa

SEQ ID NO: 1987376 - RNA, 19 nt, Homo sapiens
  misc_RNA (1)...(19): siRNA sense strand
ccgcacagaggacgaggua

SEQ ID NO: 1987377 - RNA, 19 nt, Homo sapiens
  misc_RNA (1)...(19): siRNA sense strand
ccauuggccuccugguauc

SEQ ID NO: 1987378 - RNA, 19 nt, Homo sapiens
  misc_RNA (1)...(19): siRNA sense strand
caccagaagaaaccaacua

SEQ ID NO: 1987379 - RNA, 19 nt, Homo sapiens
  misc_RNA (1)...(19): siRNA sense strand
ucucaggucuuugugcaau

SEQ ID NO: 1987380 - RNA, 19 nt, Homo sapiens
  misc_RNA (1)...(19): siRNA sense strand
gcuggagugucuguguuug

SEQ ID NO: 1987381 - RNA, 19 nt, Homo sapiens
  misc_RNA (1)...(19): siRNA sense strand
ucagaccagguacacauuu

SEQ ID NO: 1987382 - RNA, 19 nt, Homo sapiens
  misc_RNA (1)...(19): siRNA sense strand
aaagccaacaugacacuga

SEQ ID NO: 1987383 - RNA, 19 nt, Homo sapiens
  misc_RNA (1)...(19): siRNA sense strand
caagaagauauacgaugga

SEQ ID NO: 1987384 - RNA, 19 nt, Homo sapiens
  misc_RNA (1)...(19): siRNA sense strand
cauggaggacucugccaaa

SEQ ID NO: 1987385 - RNA, 19 nt, Homo sapiens
  misc_RNA (1)...(19): siRNA sense strand
caacuacaaagccguuucu

SEQ ID NO: 1987386 - RNA, 19 nt, Homo sapiens
  misc_RNA (1)...(19): siRNA sense strand
guucagaccagguacacau

SEQ ID NO: 1987387 - RNA, 19 nt, Homo sapiens
  misc_RNA (1)...(19): siRNA sense strand
uucauugucucaggucuuu

SEQ ID NO: 1987388 - RNA, 19 nt, Homo sapiens
  misc_RNA (1)...(19): siRNA sense strand
ugcaauugcuggagugucu

SEQ ID NO: 1987389 - RNA, 19 nt, Homo sapiens
  misc_RNA (1)...(19): siRNA sense strand
cgaaugcaggcccuauuuc

SEQ ID NO: 1987390 - RNA, 19 nt, Homo sapiens
  misc_RNA (1)...(19): siRNA sense strand
agacuguucagaccaggua

SEQ ID NO: 1987391 - RNA, 19 nt, Homo sapiens
  misc_RNA (1)...(19): siRNA sense strand
ugacuaacuucuggauguc

SEQ ID NO: 1987392 - RNA, 19 nt, Homo sapiens
  misc_RNA (1)...(19): siRNA sense strand
cuggaggccucacacuaau

SEQ ID NO: 1987393 - RNA, 19 nt, Homo sapiens
  misc_RNA (1)...(19): siRNA sense strand
ugccaaagccaacaugaca

SEQ ID NO: 1987394 - RNA, 19 nt, Homo sapiens
  misc_RNA (1)...(19): siRNA sense strand
cuuccaagcacgacuaugu

SEQ ID NO: 1987395 - RNA, 19 nt, Homo sapiens
  misc_RNA (1)...(19): siRNA sense strand
ggauggugcagacuguuca

SEQ ID NO: 1987396 - RNA, 19 nt, Homo sapiens
  misc_RNA (1)...(19): siRNA sense strand
gugggauggugcagacugu

SEQ ID NO: 1987397 - RNA, 19 nt, Homo sapiens
  misc_RNA (1)...(19): siRNA sense strand
guacaaucuuauccuucca

SEQ ID NO: 1987398 - RNA, 19 nt, Homo sapiens
  misc_RNA (1)...(19): siRNA sense strand
aaagccguuucuuaucaug

SEQ ID NO: 1987399 - RNA, 19 nt, Homo sapiens
  misc_RNA (1)...(19): siRNA sense strand
gaucaggccagauaaguau

SEQ ID NO: 1987400 - RNA, 19 nt, Homo sapiens
  misc_RNA (1)...(19): siRNA sense strand
gaccaacuauuucuacgau

SEQ ID NO: 1987401 - RNA, 19 nt, Homo sapiens
  misc_RNA (1)...(19): siRNA sense strand
gaggagaugcugcccaauu

SEQ ID NO: 1987402 - RNA, 19 nt, Homo sapiens
  misc_RNA (1)...(19): siRNA sense strand
gcagucaaguuucgagaca

SEQ ID NO: 1987403 - RNA, 19 nt, Homo sapiens
  misc_RNA (1)...(19): siRNA sense strand
aaagggagauguacaaggu

SEQ ID NO: 1987404 - RNA, 19 nt, Homo sapiens
  misc_RNA (1)...(19): siRNA sense strand
gggaggcgcagucaaguuu

SEQ ID NO: 1987405 - RNA, 19 nt, Homo sapiens
  misc_RNA (1)...(19): siRNA sense strand
guacaaggugcaugagaaa

SEQ ID NO: 1987406 - RNA, 19 nt, Homo sapiens
  misc_RNA (1)...(19): siRNA sense strand
ggaucaggccagauaagua

SEQ ID NO: 1987407 - RNA, 19 nt, Homo sapiens
  misc_RNA (1)...(19): siRNA sense strand
ccaacuauuucuacgaugu

SEQ ID NO: 1987408 - RNA, 19 nt, Homo sapiens
  misc_RNA (1)...(19): siRNA sense strand
gaguggaucaggccagaua

SEQ ID NO: 1987409 - RNA, 19 nt, Homo sapiens
  misc_RNA (1)...(19): siRNA sense strand
uggaggcucugagggauua

SEQ ID NO: 1987410 - RNA, 19 nt, Homo sapiens
  misc_RNA (1)...(19): siRNA sense strand
ucucaggaguucuggaauu

SEQ ID NO: 1987411 - RNA, 19 nt, Homo sapiens
  misc_RNA (1)...(19): siRNA sense strand
ccagauaaguauggccauu

SEQ ID NO: 1987412 - RNA, 19 nt, Homo sapiens
  misc_RNA (1)...(19): siRNA sense strand
ggacaauacuccaguuccu

SEQ ID NO: 1987413 - RNA, 19 nt, Homo sapiens
  misc_RNA (1)...(19): siRNA sense strand
gggauuacuugcuccaaag

SEQ ID NO: 1987414 - RNA, 19 nt, Homo sapiens
  misc_RNA (1)...(19): siRNA sense strand
uguacaaggugcaugagaa

SEQ ID NO: 1987415 - RNA, 19 nt, Homo sapiens
  misc_RNA (1)...(19): siRNA sense strand
aggagaugcugcccaauug

SEQ ID NO: 1987416 - RNA, 19 nt, Homo sapiens
  misc_RNA (1)...(19): siRNA sense strand
guucuggaauuucugugaa

SEQ ID NO: 1987417 - RNA, 19 nt, Homo sapiens
  misc_RNA (1)...(19): siRNA sense strand
aaaggacaauacuccaguu

SEQ ID NO: 1987418 - RNA, 19 nt, Homo sapiens
  misc_RNA (1)...(19): siRNA sense strand
acaccuggcuggagaagca

SEQ ID NO: 1987419 - RNA, 19 nt, Homo sapiens
  misc_RNA (1)...(19): siRNA sense strand
agauaaguauggccauuuc

SEQ ID NO: 1987420 - RNA, 19 nt, Homo sapiens
  misc_RNA (1)...(19): siRNA sense strand
ugaagugccugucgaagcu

SEQ ID NO: 1987421 - RNA, 19 nt, Homo sapiens
  misc_RNA (1)...(19): siRNA sense strand
guggacgacuggugucuca

SEQ ID NO: 1987422 - RNA, 19 nt, Homo sapiens
  misc_RNA (1)...(19): siRNA sense strand
ccauuucucucaggaguuc

SEQ ID NO: 1987423 - RNA, 19 nt, Homo sapiens
  misc_RNA (1)...(19): siRNA sense strand
caggaguucuggaauuucu

SEQ ID NO: 1987424 - RNA, 19 nt, Homo sapiens
  misc_RNA (1)...(19): siRNA sense strand
cucaggaguucuggaauuu

SEQ ID NO: 1987425 - RNA, 19 nt, Homo sapiens
  misc_RNA (1)...(19): siRNA sense strand
cagauaaguauggccauuu

SEQ ID NO: 1987426 - RNA, 19 nt, Homo sapiens
  misc_RNA (1)...(19): siRNA sense strand
uggccucacucagauauug

SEQ ID NO: 1987427 - RNA, 19 nt, Homo sapiens
  misc_RNA (1)...(19): siRNA sense strand
caacuacgagggccuggau

SEQ ID NO: 1987428 - RNA, 19 nt, Homo sapiens
  misc_RNA (1)...(19): siRNA sense strand
agggauuacuugcuccaaa

SEQ ID NO: 1987429 - RNA, 19 nt, Homo sapiens
  misc_RNA (1)...(19): siRNA sense strand
ggaguucuggaauuucugu

SEQ ID NO: 1987430 - RNA, 19 nt, Homo sapiens
  misc_RNA (1)...(19): siRNA sense strand
auacggcgcaggugccuuu

SEQ ID NO: 1987431 - RNA, 19 nt, Homo sapiens
  misc_RNA (1)...(19): siRNA sense strand
gccggugacugugacauca

SEQ ID NO: 1987432 - RNA, 19 nt, Homo sapiens
  misc_RNA (1)...(19): siRNA sense strand
acugugacaucaacuacga

SEQ ID NO: 1987433 - RNA, 19 nt, Homo sapiens
  misc_RNA (1)...(19): siRNA sense strand
gaagaagaaaaggacaaua

SEQ ID NO: 1987434 - RNA, 19 nt, Homo sapiens
  misc_RNA (1)...(19): siRNA sense strand
agauauugguggaggagau

SEQ ID NO: 1987435 - RNA, 19 nt, Homo sapiens
  misc_RNA (1)...(19): siRNA sense strand
guccaacccuggccucacu

SEQ ID NO: 1987436 - RNA, 19 nt, Homo sapiens
  misc_RNA (1)...(19): siRNA sense strand
caacuauuucuacgaugug

SEQ ID NO: 1987437 - RNA, 19 nt, Homo sapiens
  misc_RNA (1)...(19): siRNA sense strand
uaaguauggccauuucucu

SEQ ID NO: 1987438 - RNA, 19 nt, Homo sapiens
  misc_RNA (1)...(19): siRNA sense strand
gauauugguggaggagaug

SEQ ID NO: 1987439 - RNA, 19 nt, Homo sapiens
  misc_RNA (1)...(19): siRNA sense strand
ggaaaucccugcucuuaaa

SEQ ID NO: 1987440 - RNA, 19 nt, Homo sapiens
  misc_RNA (1)...(19): siRNA sense strand
ggagguagauggacgcuuu

SEQ ID NO: 1987441 - RNA, 19 nt, Homo sapiens
  misc_RNA (1)...(19): siRNA sense strand
ggauuacccuuauuuagaa

SEQ ID NO: 1987442 - RNA, 19 nt, Homo sapiens
  misc_RNA (1)...(19): siRNA sense strand
guaacaagguagacaaaga

SEQ ID NO: 1987443 - RNA, 19 nt, Homo sapiens
  misc_RNA (1)...(19): siRNA sense strand
guagauggacgcuuuguaa

SEQ ID NO: 1987444 - RNA, 19 nt, Homo sapiens
  misc_RNA (1)...(19): siRNA sense strand
ugaaggacccugagcauuu

SEQ ID NO: 1987445 - RNA, 19 nt, Homo sapiens
  misc_RNA (1)...(19): siRNA sense strand
gaaggacccugagcauuuc

SEQ ID NO: 1987446 - RNA, 19 nt, Homo sapiens
  misc_RNA (1)...(19): siRNA sense strand
gaacguuucaagagccuua

SEQ ID NO: 1987447 - RNA, 19 nt, Homo sapiens
  misc_RNA (1)...(19): siRNA sense strand
gggauuacccuuauuuaga

SEQ ID NO: 1987448 - RNA, 19 nt, Homo sapiens
  misc_RNA (1)...(19): siRNA sense strand
gacaguggccuuugaagaa

SEQ ID NO: 1987449 - RNA, 19 nt, Homo sapiens
  misc_RNA (1)...(19): siRNA sense strand
gggaaaaguucgcuuauga

SEQ ID NO: 1987450 - RNA, 19 nt, Homo sapiens
  misc_RNA (1)...(19): siRNA sense strand
ccaaagaugauacuaaugu

SEQ ID NO: 1987451 - RNA, 19 nt, Homo sapiens
  misc_RNA (1)...(19): siRNA sense strand
aggaacagcuggagcauug

SEQ ID NO: 1987452 - RNA, 19 nt, Homo sapiens
  misc_RNA (1)...(19): siRNA sense strand
gaaacuagugccaaagaug

SEQ ID NO: 1987453 - RNA, 19 nt, Homo sapiens
  misc_RNA (1)...(19): siRNA sense strand
guaacuggcagaaagaauu

SEQ ID NO: 1987454 - RNA, 19 nt, Homo sapiens
  misc_RNA (1)...(19): siRNA sense strand
gaacaguggcuccaaagca

SEQ ID NO: 1987455 - RNA, 19 nt, Homo sapiens
  misc_RNA (1)...(19): siRNA sense strand
caaagaugauacuaaugug

SEQ ID NO: 1987456 - RNA, 19 nt, Homo sapiens
  misc_RNA (1)...(19): siRNA sense strand
ggugcuggcuguagaggaa

SEQ ID NO: 1987457 - RNA, 19 nt, Homo sapiens
  misc_RNA (1)...(19): siRNA sense strand
cggcagagcuucgagaauc

SEQ ID NO: 1987458 - RNA, 19 nt, Homo sapiens
  misc_RNA (1)...(19): siRNA sense strand
gcuggagcauugcauguug

SEQ ID NO: 1987459 - RNA, 19 nt, Homo sapiens
  misc_RNA (1)...(19): siRNA sense strand
caaagaggauaggcaagug

SEQ ID NO: 1987460 - RNA, 19 nt, Homo sapiens
  misc_RNA (1)...(19): siRNA sense strand
uaacuggcagaaagaauuu

SEQ ID NO: 1987461 - RNA, 19 nt, Homo sapiens
  misc_RNA (1)...(19): siRNA sense strand
cauguugggucacaccauu

SEQ ID NO: 1987462 - RNA, 19 nt, Homo sapiens
  misc_RNA (1)...(19): siRNA sense strand
aaacuagugccaaagauga

SEQ ID NO: 1987463 - RNA, 19 nt, Homo sapiens
  misc_RNA (1)...(19): siRNA sense strand
ugccaaagaugauacuaau

SEQ ID NO: 1987464 - RNA, 19 nt, Homo sapiens
  misc_RNA (1)...(19): siRNA sense strand
ggguagaguucuuaaaucg

SEQ ID NO: 1987465 - RNA, 19 nt, Homo sapiens
  misc_RNA (1)...(19): siRNA sense strand
guucuuaaaucgagaucug

SEQ ID NO: 1987466 - RNA, 19 nt, Homo sapiens
  misc_RNA (1)...(19): siRNA sense strand
cuuaugaaccguuacguaa

SEQ ID NO: 1987467 - RNA, 19 nt, Homo sapiens
  misc_RNA (1)...(19): siRNA sense strand
aaaucgagaucuggaggua

SEQ ID NO: 1987468 - RNA, 19 nt, Homo sapiens
  misc_RNA (1)...(19): siRNA sense strand
gaggauaggcaagugacua

SEQ ID NO: 1987469 - RNA, 19 nt, Homo sapiens
  misc_RNA (1)...(19): siRNA sense strand
uuuagaaacuagugccaaa

SEQ ID NO: 1987470 - RNA, 19 nt, Homo sapiens
  misc_RNA (1)...(19): siRNA sense strand
gggcaggaacguuucaaga

SEQ ID NO: 1987471 - RNA, 19 nt, Homo sapiens
  misc_RNA (1)...(19): siRNA sense strand
caagguagacaaagaggau

SEQ ID NO: 1987472 - RNA, 19 nt, Homo sapiens
  misc_RNA (1)...(19): siRNA sense strand
gaauggggauuacccuuau

SEQ ID NO: 1987473 - RNA, 19 nt, Homo sapiens
  misc_RNA (1)...(19): siRNA sense strand
gcuuaugaaccguuacgua

SEQ ID NO: 1987474 - RNA, 19 nt, Homo sapiens
  misc_RNA (1)...(19): siRNA sense strand
ugacaguggccuuugaaga

SEQ ID NO: 1987475 - RNA, 19 nt, Homo sapiens
  misc_RNA (1)...(19): siRNA sense strand
ggcaggugcuggcuguaga

SEQ ID NO: 1987476 - RNA, 19 nt, Homo sapiens
  misc_RNA (1)...(19): siRNA sense strand
auaggcaagugacuacuga

SEQ ID NO: 1987477 - RNA, 19 nt, Homo sapiens
  misc_RNA (1)...(19): siRNA sense strand
ucuuaaaggucauucucuu

SEQ ID NO: 1987478 - RNA, 19 nt, Homo sapiens
  misc_RNA (1)...(19): siRNA sense strand
ucgagaaucuugguaacug

SEQ ID NO: 1987479 - RNA, 19 nt, Homo sapiens
  misc_RNA (1)...(19): siRNA sense strand
gugccaaagaugauacuaa

SEQ ID NO: 1987480 - RNA, 19 nt, Homo sapiens
  misc_RNA (1)...(19): siRNA sense strand
uaacaagguagacaaagag

SEQ ID NO: 1987481 - RNA, 19 nt, Homo sapiens
  misc_RNA (1)...(19): siRNA sense strand
uagaaacuagugccaaaga

SEQ ID NO: 1987482 - RNA, 19 nt, Homo sapiens
  misc_RNA (1)...(19): siRNA sense strand
gaaaucccugcucuuaaag

SEQ ID NO: 1987483 - RNA, 19 nt, Homo sapiens
  misc_RNA (1)...(19): siRNA sense strand
gaacagcuggagcauugca

SEQ ID NO: 1987484 - RNA, 19 nt, Homo sapiens
  misc_RNA (1)...(19): siRNA sense strand
gguagauggacgcuuugua

SEQ ID NO: 1987485 - RNA, 19 nt, Homo sapiens
  misc_RNA (1)...(19): siRNA sense strand
agaaacuagugccaaagau

SEQ ID NO: 1987486 - RNA, 19 nt, Homo sapiens
  misc_RNA (1)...(19): siRNA sense strand
cuugguaacuggcagaaag

SEQ ID NO: 1987487 - RNA, 19 nt, Homo sapiens
  misc_RNA (1)...(19): siRNA sense strand
gucauucucuugggugaug

SEQ ID NO: 1987488 - RNA, 19 nt, Homo sapiens
  misc_RNA (1)...(19): siRNA sense strand
gcagggucuucgugcuguu

SEQ ID NO: 1987489 - RNA, 19 nt, Homo sapiens
  misc_RNA (1)...(19): siRNA sense strand
cuugaacaguggcuccaaa

SEQ ID NO: 1987490 - RNA, 19 nt, Homo sapiens
  misc_RNA (1)...(19): siRNA sense strand
gcuucgagaaucuugguaa

SEQ ID NO: 1987491 - RNA, 19 nt, Homo sapiens
  misc_RNA (1)...(19): siRNA sense strand
ggaaaaguucgcuuaugaa

SEQ ID NO: 1987492 - RNA, 19 nt, Homo sapiens
  misc_RNA (1)...(19): siRNA sense strand
gauaggcaagugacuacug

SEQ ID NO: 1987493 - RNA, 19 nt, Homo sapiens
  misc_RNA (1)...(19): siRNA sense strand
ggguaacaagguagacaaa

SEQ ID NO: 1987494 - RNA, 19 nt, Homo sapiens
  misc_RNA (1)...(19): siRNA sense strand
ggcagagcuucgagaaucu

SEQ ID NO: 1987495 - RNA, 19 nt, Homo sapiens
  misc_RNA (1)...(19): siRNA sense strand
gaggaacagcuggagcauu

SEQ ID NO: 1987496 - RNA, 19 nt, Homo sapiens
  misc_RNA (1)...(19): siRNA sense strand
aaagaggauaggcaaguga

SEQ ID NO: 1987497 - RNA, 19 nt, Homo sapiens
  misc_RNA (1)...(19): siRNA sense strand
gugaaggacccugagcauu

SEQ ID NO: 1987498 - RNA, 19 nt, Homo sapiens
  misc_RNA (1)...(19): siRNA sense strand
ggcaggaacguuucaagag

SEQ ID NO: 1987499 - RNA, 19 nt, Homo sapiens
  misc_RNA (1)...(19): siRNA sense strand
ucacaccauugacuugaac

SEQ ID NO: 1987500 - RNA, 19 nt, Homo sapiens
  misc_RNA (1)...(19): siRNA sense strand
gcauggagaauggggauua

SEQ ID NO: 1987501 - RNA, 19 nt, Homo sapiens
  misc_RNA (1)...(19): siRNA sense strand
gcauuuccccuuuguaguu

SEQ ID NO: 1987502 - RNA, 19 nt, Homo sapiens
  misc_RNA (1)...(19): siRNA sense strand
acaguggccuuugaagaag

SEQ ID NO: 1987503 - RNA, 19 nt, Homo sapiens
  misc_RNA (1)...(19): siRNA sense strand
gcagagcuucgagaaucuu

SEQ ID NO: 1987504 - RNA, 19 nt, Homo sapiens
  misc_RNA (1)...(19): siRNA sense strand
ccuggugcauggagaaugg

SEQ ID NO: 1987505 - RNA, 19 nt, Homo sapiens
  misc_RNA (1)...(19): siRNA sense strand
acaaagaggauaggcaagu

SEQ ID NO: 1987506 - RNA, 19 nt, Homo sapiens
  misc_RNA (1)...(19): siRNA sense strand
cagaugagcuuucaaguug

SEQ ID NO: 1987507 - RNA, 19 nt, Homo sapiens
  misc_RNA (1)...(19): siRNA sense strand
gcaguugccuucacaagaa

SEQ ID NO: 1987508 - RNA, 19 nt, Homo sapiens
  misc_RNA (1)...(19): siRNA sense strand
uagcagcucugaauccuua

SEQ ID NO: 1987509 - RNA, 19 nt, Homo sapiens
  misc_RNA (1)...(19): siRNA sense strand
gacaaaggcucugaauuga

SEQ ID NO: 1987510 - RNA, 19 nt, Homo sapiens
  misc_RNA (1)...(19): siRNA sense strand
ugacaaaggcucugaauug

SEQ ID NO: 1987511 - RNA, 19 nt, Homo sapiens
  misc_RNA (1)...(19): siRNA sense strand
caaaggcucugaauugaag

SEQ ID NO: 1987512 - RNA, 19 nt, Homo sapiens
  misc_RNA (1)...(19): siRNA sense strand
ggaagacgauaauuacaag

SEQ ID NO: 1987513 - RNA, 19 nt, Homo sapiens
  misc_RNA (1)...(19): siRNA sense strand
gcaagcagugucaauauug

SEQ ID NO: 1987514 - RNA, 19 nt, Homo sapiens
  misc_RNA (1)...(19): siRNA sense strand
gaauaugcgggucagauaa

SEQ ID NO: 1987515 - RNA, 19 nt, Homo sapiens
  misc_RNA (1)...(19): siRNA sense strand
ucucaacucuguucaguau

SEQ ID NO: 1987516 - RNA, 19 nt, Homo sapiens
  misc_RNA (1)...(19): siRNA sense strand
ggcaagcagugucaauauu

SEQ ID NO: 1987517 - RNA, 19 nt, Homo sapiens
  misc_RNA (1)...(19): siRNA sense strand
gaauaaccuucaugcacuu

SEQ ID NO: 1987518 - RNA, 19 nt, Homo sapiens
  misc_RNA (1)...(19): siRNA sense strand
caccuugcauucccuauuu

SEQ ID NO: 1987519 - RNA, 19 nt, Homo sapiens
  misc_RNA (1)...(19): siRNA sense strand
gguauucgauguucuuaag

SEQ ID NO: 1987520 - RNA, 19 nt, Homo sapiens
  misc_RNA (1)...(19): siRNA sense strand
ucaacucuguucaguauau

SEQ ID NO: 1987521 - RNA, 19 nt, Homo sapiens
  misc_RNA (1)...(19): siRNA sense strand
gaaacuguaugagcugaau

SEQ ID NO: 1987522 - RNA, 19 nt, Homo sapiens
  misc_RNA (1)...(19): siRNA sense strand
caacucuguucaguauaua

SEQ ID NO: 1987523 - RNA, 19 nt, Homo sapiens
  misc_RNA (1)...(19): siRNA sense strand
gaagauaacuacaaaagac

SEQ ID NO: 1987524 - RNA, 19 nt, Homo sapiens
  misc_RNA (1)...(19): siRNA sense strand
acagcagucuugugaauau

SEQ ID NO: 1987525 - RNA, 19 nt, Homo sapiens
  misc_RNA (1)...(19): siRNA sense strand
gaugagcuuucaaguugug

SEQ ID NO: 1987526 - RNA, 19 nt, Homo sapiens
  misc_RNA (1)...(19): siRNA sense strand
uuacagcagucuugugaau

SEQ ID NO: 1987527 - RNA, 19 nt, Homo sapiens
  misc_RNA (1)...(19): siRNA sense strand
gcucugaauccuuaaguga

SEQ ID NO: 1987528 - RNA, 19 nt, Homo sapiens
  misc_RNA (1)...(19): siRNA sense strand
ccagaugagcuuucaaguu

SEQ ID NO: 1987529 - RNA, 19 nt, Homo sapiens
  misc_RNA (1)...(19): siRNA sense strand
ggucagauaacauuaaugg

SEQ ID NO: 1987530 - RNA, 19 nt, Homo sapiens
  misc_RNA (1)...(19): siRNA sense strand
guuccaguauuuaaagcua

SEQ ID NO: 1987531 - RNA, 19 nt, Homo sapiens
  misc_RNA (1)...(19): siRNA sense strand
auacaucgauucagcauac

SEQ ID NO: 1987532 - RNA, 19 nt, Homo sapiens
  misc_RNA (1)...(19): siRNA sense strand
aagcuuugaugcuguggua

SEQ ID NO: 1987533 - RNA, 19 nt, Homo sapiens
  misc_RNA (1)...(19): siRNA sense strand
cucagagacuauauaagua

SEQ ID NO: 1987534 - RNA, 19 nt, Homo sapiens
  misc_RNA (1)...(19): siRNA sense strand
agacucagagacuauauaa

SEQ ID NO: 1987535 - RNA, 19 nt, Homo sapiens
  misc_RNA (1)...(19): siRNA sense strand
aaacaugggcguuauuaag

SEQ ID NO: 1987536 - RNA, 19 nt, Homo sapiens
  misc_RNA (1)...(19): siRNA sense strand
ucuucaugcucaaacauua

SEQ ID NO: 1987537 - RNA, 19 nt, Homo sapiens
  misc_RNA (1)...(19): siRNA sense strand
agaauaugcgggucagaua

SEQ ID NO: 1987538 - RNA, 19 nt, Homo sapiens
  misc_RNA (1)...(19): siRNA sense strand
gguuacaccagaagaauau

SEQ ID NO: 1987539 - RNA, 19 nt, Homo sapiens
  misc_RNA (1)...(19): siRNA sense strand
gaguaaagaagauaacuac

SEQ ID NO: 1987540 - RNA, 19 nt, Homo sapiens
  misc_RNA (1)...(19): siRNA sense strand
uguaugagcugaauaaccu

SEQ ID NO: 1987541 - RNA, 19 nt, Homo sapiens
  misc_RNA (1)...(19): siRNA sense strand
aaauauaguucugcaccaa

SEQ ID NO: 1987542 - RNA, 19 nt, Homo sapiens
  misc_RNA (1)...(19): siRNA sense strand
aaagaugacaccuugcauu

SEQ ID NO: 1987543 - RNA, 19 nt, Homo sapiens
  misc_RNA (1)...(19): siRNA sense strand
uaaccuucaugcacuuaug

SEQ ID NO: 1987544 - RNA, 19 nt, Homo sapiens
  misc_RNA (1)...(19): siRNA sense strand
ggauguuccaguauuuaaa

SEQ ID NO: 1987545 - RNA, 19 nt, Homo sapiens
  misc_RNA (1)...(19): siRNA sense strand
gagacuauauaaguagcuu

SEQ ID NO: 1987546 - RNA, 19 nt, Homo sapiens
  misc_RNA (1)...(19): siRNA sense strand
acucagagacuauauaagu

SEQ ID NO: 1987547 - RNA, 19 nt, Homo sapiens
  misc_RNA (1)...(19): siRNA sense strand
aaacugcuaagaaacugua

SEQ ID NO: 1987548 - RNA, 19 nt, Homo sapiens
  misc_RNA (1)...(19): siRNA sense strand
gcagucuugugaauaugau

SEQ ID NO: 1987549 - RNA, 19 nt, Homo sapiens
  misc_RNA (1)...(19): siRNA sense strand
cccaucaacuggcagcauu

SEQ ID NO: 1987550 - RNA, 19 nt, Homo sapiens
  misc_RNA (1)...(19): siRNA sense strand
ucaaccagaugagcuuuca

SEQ ID NO: 1987551 - RNA, 19 nt, Homo sapiens
  misc_RNA (1)...(19): siRNA sense strand
guuuugagccacuauauua

SEQ ID NO: 1987552 - RNA, 19 nt, Homo sapiens
  misc_RNA (1)...(19): siRNA sense strand
uaagguuacaccagaagaa

SEQ ID NO: 1987553 - RNA, 19 nt, Homo sapiens
  misc_RNA (1)...(19): siRNA sense strand
caggcaagcagugucaaua

SEQ ID NO: 1987554 - RNA, 19 nt, Homo sapiens
  misc_RNA (1)...(19): siRNA sense strand
uaaaacaugggcguuauua

SEQ ID NO: 1987555 - RNA, 19 nt, Homo sapiens
  misc_RNA (1)...(19): siRNA sense strand
caaaugcaguugccuucac

SEQ ID NO: 1987556 - RNA, 19 nt, Homo sapiens
  misc_RNA (1)...(19): siRNA sense strand
ucaaguuguggauggaaua

SEQ ID NO: 1987557 - RNA, 19 nt, Homo sapiens
  misc_RNA (1)...(19): siRNA sense strand
gcgggucagauaacauuaa

SEQ ID NO: 1987558 - RNA, 19 nt, Homo sapiens
  misc_RNA (1)...(19): siRNA sense strand
uaucucaacucuguucagu

SEQ ID NO: 1987559 - RNA, 19 nt, Homo sapiens
  misc_RNA (1)...(19): siRNA sense strand
caagcagugucaauauugc

SEQ ID NO: 1987560 - RNA, 19 nt, Homo sapiens
  misc_RNA (1)...(19): siRNA sense strand
gcugugguauucgauguuc

SEQ ID NO: 1987561 - RNA, 19 nt, Homo sapiens
  misc_RNA (1)...(19): siRNA sense strand
caacuggcagcauucuaga

SEQ ID NO: 1987562 - RNA, 19 nt, Homo sapiens
  misc_RNA (1)...(19): siRNA sense strand
gaaaagacaaaacuaccuu

SEQ ID NO: 1987563 - RNA, 19 nt, Homo sapiens
  misc_RNA (1)...(19): siRNA sense strand
caaguuguggauggaauaa

SEQ ID NO: 1987564 - RNA, 19 nt, Homo sapiens
  misc_RNA (1)...(19): siRNA sense strand
gauguuccaguauuuaaag

SEQ ID NO: 1987565 - RNA, 19 nt, Homo sapiens
  misc_RNA (1)...(19): siRNA sense strand
cgggucagauaacauuaau

SEQ ID NO: 1987566 - RNA, 19 nt, Homo sapiens
  misc_RNA (1)...(19): siRNA sense strand
uggaagacgauaauuacaa

SEQ ID NO: 1987567 - RNA, 19 nt, Homo sapiens
  misc_RNA (1)...(19): siRNA sense strand
gaaaaugagcaaagaucaa

SEQ ID NO: 1987568 - RNA, 19 nt, Homo sapiens
  misc_RNA (1)...(19): siRNA sense strand
acaaaggcucugaauugaa

SEQ ID NO: 1987569 - RNA, 19 nt, Homo sapiens
  misc_RNA (1)...(19): siRNA sense strand
cgauucagcauacccauca

SEQ ID NO: 1987570 - RNA, 19 nt, Homo sapiens
  misc_RNA (1)...(19): siRNA sense strand
aaaugcaguugccuucaca

SEQ ID NO: 1987571 - RNA, 19 nt, Homo sapiens
  misc_RNA (1)...(19): siRNA sense strand
gcuuugaugcugugguauu

SEQ ID NO: 1987572 - RNA, 19 nt, Homo sapiens
  misc_RNA (1)...(19): siRNA sense strand
ucaacuggcagcauucuag

SEQ ID NO: 1987573 - RNA, 19 nt, Homo sapiens
  misc_RNA (1)...(19): siRNA sense strand
ucagagacuauauaaguag

SEQ ID NO: 1987574 - RNA, 19 nt, Homo sapiens
  misc_RNA (1)...(19): siRNA sense strand
ucugaauccuuaagugaca

SEQ ID NO: 1987575 - RNA, 19 nt, Homo sapiens
  misc_RNA (1)...(19): siRNA sense strand
acaaaagacucagagacua

SEQ ID NO: 1987576 - RNA, 19 nt, Homo sapiens
  misc_RNA (1)...(19): siRNA sense strand
cugcuaagaaacuguauga

SEQ ID NO: 1987577 - RNA, 19 nt, Homo sapiens
  misc_RNA (1)...(19): siRNA sense strand
gcaggcaagcagugucaau

SEQ ID NO: 1987578 - RNA, 19 nt, Homo sapiens
  misc_RNA (1)...(19): siRNA sense strand
aagaugacaccuugcauuc

SEQ ID NO: 1987579 - RNA, 19 nt, Homo sapiens
  misc_RNA (1)...(19): siRNA sense strand
auauaguucugcaccaaau

SEQ ID NO: 1987580 - RNA, 19 nt, Homo sapiens
  misc_RNA (1)...(19): siRNA sense strand
gcucugaauugaagaaaag

SEQ ID NO: 1987581 - RNA, 19 nt, Homo sapiens
  misc_RNA (1)...(19): siRNA sense strand
uaaagcuauucaaccagau

SEQ ID NO: 1987582 - RNA, 19 nt, Homo sapiens
  misc_RNA (1)...(19): siRNA sense strand
aaaaguagcagcucugaau

SEQ ID NO: 1987583 - RNA, 19 nt, Homo sapiens
  misc_RNA (1)...(19): siRNA sense strand
cuacagagugccccaauuu

SEQ ID NO: 1987584 - RNA, 19 nt, Homo sapiens
  misc_RNA (1)...(19): siRNA sense strand
gauucuucaugcucaaaca

SEQ ID NO: 1987585 - RNA, 19 nt, Homo sapiens
  misc_RNA (1)...(19): siRNA sense strand
gugacaaaggcucugaauu

SEQ ID NO: 1987586 - RNA, 19 nt, Homo sapiens
  misc_RNA (1)...(19): siRNA sense strand
gggcaggcaagcaguguca

SEQ ID NO: 1987587 - RNA, 19 nt, Homo sapiens
  misc_RNA (1)...(19): siRNA sense strand
uuguggaagacgauaauua

SEQ ID NO: 1987588 - RNA, 19 nt, Homo sapiens
  misc_RNA (1)...(19): siRNA sense strand
aaauaucucaacucuguuc

SEQ ID NO: 1987589 - RNA, 19 nt, Homo sapiens
  misc_RNA (1)...(19): siRNA sense strand
caaaagacucagagacuau

SEQ ID NO: 1987590 - RNA, 19 nt, Homo sapiens
  misc_RNA (1)...(19): siRNA sense strand
guuguuagagagauucuuc

SEQ ID NO: 1987591 - RNA, 19 nt, Homo sapiens
  misc_RNA (1)...(19): siRNA sense strand
gagauucuucaugcucaaa

SEQ ID NO: 1987592 - RNA, 19 nt, Homo sapiens
  misc_RNA (1)...(19): siRNA sense strand
acaugggcguuauuaaguc

SEQ ID NO: 1987593 - RNA, 19 nt, Homo sapiens
  misc_RNA (1)...(19): siRNA sense strand
cagcagucuugugaauaug

SEQ ID NO: 1987594 - RNA, 19 nt, Homo sapiens
  misc_RNA (1)...(19): siRNA sense strand
gaagaaaagcuuugaugcu

SEQ ID NO: 1987595 - RNA, 19 nt, Homo sapiens
  misc_RNA (1)...(19): siRNA sense strand
uauucgauguucuuaaggu

SEQ ID NO: 1987596 - RNA, 19 nt, Homo sapiens
  misc_RNA (1)...(19): siRNA sense strand
aagacucagagacuauaua

SEQ ID NO: 1987597 - RNA, 19 nt, Homo sapiens
  misc_RNA (1)...(19): siRNA sense strand
guuagagagauucuucaug

SEQ ID NO: 1987598 - RNA, 19 nt, Homo sapiens
  misc_RNA (1)...(19): siRNA sense strand
cagaugagcuuucaaguug

SEQ ID NO: 1987599 - RNA, 19 nt, Homo sapiens
  misc_RNA (1)...(19): siRNA sense strand
gcaguugccuucacaagaa

SEQ ID NO: 1987600 - RNA, 19 nt, Homo sapiens
  misc_RNA (1)...(19): siRNA sense strand
uagcagcucugaauccuua

SEQ ID NO: 1987601 - RNA, 19 nt, Homo sapiens
  misc_RNA (1)...(19): siRNA sense strand
gacaaaggcucugaauuga

SEQ ID NO: 1987602 - RNA, 19 nt, Homo sapiens
  misc_RNA (1)...(19): siRNA sense strand
ugacaaaggcucugaauug

SEQ ID NO: 1987603 - RNA, 19 nt, Homo sapiens
  misc_RNA (1)...(19): siRNA sense strand
caaaggcucugaauugaag

SEQ ID NO: 1987604 - RNA, 19 nt, Homo sapiens
  misc_RNA (1)...(19): siRNA sense strand
ggaagacgauaauuacaag

SEQ ID NO: 1987605 - RNA, 19 nt, Homo sapiens
  misc_RNA (1)...(19): siRNA sense strand
gcaagcagugucaauauug

SEQ ID NO: 1987606 - RNA, 19 nt, Homo sapiens
  misc_RNA (1)...(19): siRNA sense strand
gaauaugcgggucagauaa

SEQ ID NO: 1987607 - RNA, 19 nt, Homo sapiens
  misc_RNA (1)...(19): siRNA sense strand
ucucaacucuguucaguau

SEQ ID NO: 1987608 - RNA, 19 nt, Homo sapiens
  misc_RNA (1)...(19): siRNA sense strand
ggcaagcagugucaauauu

SEQ ID NO: 1987609 - RNA, 19 nt, Homo sapiens
  misc_RNA (1)...(19): siRNA sense strand
gaauaaccuucaugcacuu

SEQ ID NO: 1987610 - RNA, 19 nt, Homo sapiens
  misc_RNA (1)...(19): siRNA sense strand
caccuugcauucccuauuu

SEQ ID NO: 1987611 - RNA, 19 nt, Homo sapiens
  misc_RNA (1)...(19): siRNA sense strand
gguauucgauguucuuaag

SEQ ID NO: 1987612 - RNA, 19 nt, Homo sapiens
  misc_RNA (1)...(19): siRNA sense strand
ucaacucuguucaguauau

SEQ ID NO: 1987613 - RNA, 19 nt, Homo sapiens
  misc_RNA (1)...(19): siRNA sense strand
gaaacuguaugagcugaau

SEQ ID NO: 1987614 - RNA, 19 nt, Homo sapiens
  misc_RNA (1)...(19): siRNA sense strand
caacucuguucaguauaua

SEQ ID NO: 1987615 - RNA, 19 nt, Homo sapiens
  misc_RNA (1)...(19): siRNA sense strand
gaagauaacuacaaaagac

SEQ ID NO: 1987616 - RNA, 19 nt, Homo sapiens
  misc_RNA (1)...(19): siRNA sense strand
acagcagucuugugaauau

SEQ ID NO: 1987617 - RNA, 19 nt, Homo sapiens
  misc_RNA (1)...(19): siRNA sense strand
gaugagcuuucaaguugug

SEQ ID NO: 1987618 - RNA, 19 nt, Homo sapiens
  misc_RNA (1)...(19): siRNA sense strand
uuacagcagucuugugaau

SEQ ID NO: 1987619 - RNA, 19 nt, Homo sapiens
  misc_RNA (1)...(19): siRNA sense strand
gcucugaauccuuaaguga

SEQ ID NO: 1987620 - RNA, 19 nt, Homo sapiens
  misc_RNA (1)...(19): siRNA sense strand
ccagaugagcuuucaaguu

SEQ ID NO: 1987621 - RNA, 19 nt, Homo sapiens
  misc_RNA (1)...(19): siRNA sense strand
ggucagauaacauuaaugg

SEQ ID NO: 1987622 - RNA, 19 nt, Homo sapiens
  misc_RNA (1)...(19): siRNA sense strand
guuccaguauuuaaagcua

SEQ ID NO: 1987623 - RNA, 19 nt, Homo sapiens
  misc_RNA (1)...(19): siRNA sense strand
auacaucgauucagcauac

SEQ ID NO: 1987624 - RNA, 19 nt, Homo sapiens
  misc_RNA (1)...(19): siRNA sense strand
aagcuuugaugcuguggua

SEQ ID NO: 1987625 - RNA, 19 nt, Homo sapiens
  misc_RNA (1)...(19): siRNA sense strand
cucagagacuauauaagua

SEQ ID NO: 1987626 - RNA, 19 nt, Homo sapiens
  misc_RNA (1)...(19): siRNA sense strand
agacucagagacuauauaa

SEQ ID NO: 1987627 - RNA, 19 nt, Homo sapiens
  misc_RNA (1)...(19): siRNA sense strand
aaacaugggcguuauuaag

SEQ ID NO: 1987628 - RNA, 19 nt, Homo sapiens
  misc_RNA (1)...(19): siRNA sense strand
ucuucaugcucaaacauua

SEQ ID NO: 1987629 - RNA, 19 nt, Homo sapiens
  misc_RNA (1)...(19): siRNA sense strand
agaauaugcgggucagaua

SEQ ID NO: 1987630 - RNA, 19 nt, Homo sapiens
  misc_RNA (1)...(19): siRNA sense strand
gguuacaccagaagaauau

SEQ ID NO: 1987631 - RNA, 19 nt, Homo sapiens
  misc_RNA (1)...(19): siRNA sense strand
gaguaaagaagauaacuac

SEQ ID NO: 1987632 - RNA, 19 nt, Homo sapiens
  misc_RNA (1)...(19): siRNA sense strand
uguaugagcugaauaaccu

SEQ ID NO: 1987633 - RNA, 19 nt, Homo sapiens
  misc_RNA (1)...(19): siRNA sense strand
aaauauaguucugcaccaa

SEQ ID NO: 1987634 - RNA, 19 nt, Homo sapiens
  misc_RNA (1)...(19): siRNA sense strand
aaagaugacaccuugcauu

SEQ ID NO: 1987635 - RNA, 19 nt, Homo sapiens
  misc_RNA (1)...(19): siRNA sense strand
uaaccuucaugcacuuaug

SEQ ID NO: 1987636 - RNA, 19 nt, Homo sapiens
  misc_RNA (1)...(19): siRNA sense strand
ggauguuccaguauuuaaa

SEQ ID NO: 1987637 - RNA, 19 nt, Homo sapiens
  misc_RNA (1)...(19): siRNA sense strand
gagacuauauaaguagcuu

SEQ ID NO: 1987638 - RNA, 19 nt, Homo sapiens
  misc_RNA (1)...(19): siRNA sense strand
acucagagacuauauaagu

SEQ ID NO: 1987639 - RNA, 19 nt, Homo sapiens
  misc_RNA (1)...(19): siRNA sense strand
aaacugcuaagaaacugua

SEQ ID NO: 1987640 - RNA, 19 nt, Homo sapiens
  misc_RNA (1)...(19): siRNA sense strand
gcagucuugugaauaugau

SEQ ID NO: 1987641 - RNA, 19 nt, Homo sapiens
  misc_RNA (1)...(19): siRNA sense strand
cccaucaacuggcagcauu

SEQ ID NO: 1987642 - RNA, 19 nt, Homo sapiens
  misc_RNA (1)...(19): siRNA sense strand
ucaaccagaugagcuuuca

SEQ ID NO: 1987643 - RNA, 19 nt, Homo sapiens
  misc_RNA (1)...(19): siRNA sense strand
guuuugagccacuauauua

SEQ ID NO: 1987644 - RNA, 19 nt, Homo sapiens
  misc_RNA (1)...(19): siRNA sense strand
uaagguuacaccagaagaa

SEQ ID NO: 1987645 - RNA, 19 nt, Homo sapiens
  misc_RNA (1)...(19): siRNA sense strand
caggcaagcagugucaaua

SEQ ID NO: 1987646 - RNA, 19 nt, Homo sapiens
  misc_RNA (1)...(19): siRNA sense strand
uaaaacaugggcguuauua

SEQ ID NO: 1987647 - RNA, 19 nt, Homo sapiens
  misc_RNA (1)...(19): siRNA sense strand
caaaugcaguugccuucac

SEQ ID NO: 1987648 - RNA, 19 nt, Homo sapiens
  misc_RNA (1)...(19): siRNA sense strand
ucaaguuguggauggaaua

SEQ ID NO: 1987649 - RNA, 19 nt, Homo sapiens
  misc_RNA (1)...(19): siRNA sense strand
gcgggucagauaacauuaa

SEQ ID NO: 1987650 - RNA, 19 nt, Homo sapiens
  misc_RNA (1)...(19): siRNA sense strand
uaucucaacucuguucagu

SEQ ID NO: 1987651 - RNA, 19 nt, Homo sapiens
  misc_RNA (1)...(19): siRNA sense strand
caagcagugucaauauugc

SEQ ID NO: 1987652 - RNA, 19 nt, Homo sapiens
  misc_RNA (1)...(19): siRNA sense strand
gcugugguauucgauguuc

SEQ ID NO: 1987653 - RNA, 19 nt, Homo sapiens
  misc_RNA (1)...(19): siRNA sense strand
caacuggcagcauucuaga

SEQ ID NO: 1987654 - RNA, 19 nt, Homo sapiens
  misc_RNA (1)...(19): siRNA sense strand
gaaaagacaaaacuaccuu

SEQ ID NO: 1987655 - RNA, 19 nt, Homo sapiens
  misc_RNA (1)...(19): siRNA sense strand
caaguuguggauggaauaa

SEQ ID NO: 1987656 - RNA, 19 nt, Homo sapiens
  misc_RNA (1)...(19): siRNA sense strand
gauguuccaguauuuaaag

SEQ ID NO: 1987657 - RNA, 19 nt, Homo sapiens
  misc_RNA (1)...(19): siRNA sense strand
cgggucagauaacauuaau

SEQ ID NO: 1987658 - RNA, 19 nt, Homo sapiens
  misc_RNA (1)...(19): siRNA sense strand
uggaagacgauaauuacaa

SEQ ID NO: 1987659 - RNA, 19 nt, Homo sapiens
  misc_RNA (1)...(19): siRNA sense strand
gaaaaugagcaaagaucaa

SEQ ID NO: 1987660 - RNA, 19 nt, Homo sapiens
  misc_RNA (1)...(19): siRNA sense strand
acaaaggcucugaauugaa

SEQ ID NO: 1987661 - RNA, 19 nt, Homo sapiens
  misc_RNA (1)...(19): siRNA sense strand
cgauucagcauacccauca

SEQ ID NO: 1987662 - RNA, 19 nt, Homo sapiens
  misc_RNA (1)...(19): siRNA sense strand
aaaugcaguugccuucaca

SEQ ID NO: 1987663 - RNA, 19 nt, Homo sapiens
  misc_RNA (1)...(19): siRNA sense strand
gcuuugaugcugugguauu

SEQ ID NO: 1987664 - RNA, 19 nt, Homo sapiens
  misc_RNA (1)...(19): siRNA sense strand
ucaacuggcagcauucuag

SEQ ID NO: 1987665 - RNA, 19 nt, Homo sapiens
  misc_RNA (1)...(19): siRNA sense strand
ucagagacuauauaaguag

SEQ ID NO: 1987666 - RNA, 19 nt, Homo sapiens
  misc_RNA (1)...(19): siRNA sense strand
ucugaauccuuaagugaca

SEQ ID NO: 1987667 - RNA, 19 nt, Homo sapiens
  misc_RNA (1)...(19): siRNA sense strand
acaaaagacucagagacua

SEQ ID NO: 1987668 - RNA, 19 nt, Homo sapiens
  misc_RNA (1)...(19): siRNA sense strand
cugcuaagaaacuguauga

SEQ ID NO: 1987669 - RNA, 19 nt, Homo sapiens
  misc_RNA (1)...(19): siRNA sense strand
gcaggcaagcagugucaau

SEQ ID NO: 1987670 - RNA, 19 nt, Homo sapiens
  misc_RNA (1)...(19): siRNA sense strand
aagaugacaccuugcauuc

SEQ ID NO: 1987671 - RNA, 19 nt, Homo sapiens
  misc_RNA (1)...(19): siRNA sense strand
auauaguucugcaccaaau

SEQ ID NO: 1987672 - RNA, 19 nt, Homo sapiens
  misc_RNA (1)...(19): siRNA sense strand
gcucugaauugaagaaaag

SEQ ID NO: 1987673 - RNA, 19 nt, Homo sapiens
  misc_RNA (1)...(19): siRNA sense strand
uaaagcuauucaaccagau

SEQ ID NO: 1987674 - RNA, 19 nt, Homo sapiens
  misc_RNA (1)...(19): siRNA sense strand
aaaaguagcagcucugaau

SEQ ID NO: 1987675 - RNA, 19 nt, Homo sapiens
  misc_RNA (1)...(19): siRNA sense strand
cuacagagugccccaauuu

SEQ ID NO: 1987676 - RNA, 19 nt, Homo sapiens
  misc_RNA (1)...(19): siRNA sense strand
gauucuucaugcucaaaca

SEQ ID NO: 1987677 - RNA, 19 nt, Homo sapiens
  misc_RNA (1)...(19): siRNA sense strand
gugacaaaggcucugaauu

SEQ ID NO: 1987678 - RNA, 19 nt, Homo sapiens
  misc_RNA (1)...(19): siRNA sense strand
gggcaggcaagcaguguca

SEQ ID NO: 1987679 - RNA, 19 nt, Homo sapiens
  misc_RNA (1)...(19): siRNA sense strand
uuguggaagacgauaauua

SEQ ID NO: 1987680 - RNA, 19 nt, Homo sapiens
  misc_RNA (1)...(19): siRNA sense strand
aaauaucucaacucuguuc

SEQ ID NO: 1987681 - RNA, 19 nt, Homo sapiens
  misc_RNA (1)...(19): siRNA sense strand
caaaagacucagagacuau

SEQ ID NO: 1987682 - RNA, 19 nt, Homo sapiens
  misc_RNA (1)...(19): siRNA sense strand
guuguuagagagauucuuc

SEQ ID NO: 1987683 - RNA, 19 nt, Homo sapiens
  misc_RNA (1)...(19): siRNA sense strand
gagauucuucaugcucaaa

SEQ ID NO: 1987684 - RNA, 19 nt, Homo sapiens
  misc_RNA (1)...(19): siRNA sense strand
acaugggcguuauuaaguc

SEQ ID NO: 1987685 - RNA, 19 nt, Homo sapiens
  misc_RNA (1)...(19): siRNA sense strand
cagcagucuugugaauaug

SEQ ID NO: 1987686 - RNA, 19 nt, Homo sapiens
  misc_RNA (1)...(19): siRNA sense strand
gaagaaaagcuuugaugcu

SEQ ID NO: 1987687 - RNA, 19 nt, Homo sapiens
  misc_RNA (1)...(19): siRNA sense strand
uauucgauguucuuaaggu

SEQ ID NO: 1987688 - RNA, 19 nt, Homo sapiens
  misc_RNA (1)...(19): siRNA sense strand
aagacucagagacuauaua

SEQ ID NO: 1987689 - RNA, 19 nt, Homo sapiens
  misc_RNA (1)...(19): siRNA sense strand
guuagagagauucuucaug

SEQ ID NO: 1987690 - RNA, 19 nt, Homo sapiens
  misc_RNA (1)...(19): siRNA sense strand
gagaguaaguccagcauca

SEQ ID NO: 1987691 - RNA, 19 nt, Homo sapiens
  misc_RNA (1)...(19): siRNA sense strand
gcugaggacuuuaauaucu

SEQ ID NO: 1987692 - RNA, 19 nt, Homo sapiens
  misc_RNA (1)...(19): siRNA sense strand
ggagccagauguacaccua

SEQ ID NO: 1987693 - RNA, 19 nt, Homo sapiens
  misc_RNA (1)...(19): siRNA sense strand
ggagugugcugcugugcuu

SEQ ID NO: 1987694 - RNA, 19 nt, Homo sapiens
  misc_RNA (1)...(19): siRNA sense strand
ggagaucacccgcuucuuc

SEQ ID NO: 1987695 - RNA, 19 nt, Homo sapiens
  misc_RNA (1)...(19): siRNA sense strand
ggaggagcuucuacgugua

SEQ ID NO: 1987696 - RNA, 19 nt, Homo sapiens
  misc_RNA (1)...(19): siRNA sense strand
ccacaaccuuccuguacuu

SEQ ID NO: 1987697 - RNA, 19 nt, Homo sapiens
  misc_RNA (1)...(19): siRNA sense strand
cagcugaggacuuuaauau

SEQ ID NO: 1987698 - RNA, 19 nt, Homo sapiens
  misc_RNA (1)...(19): siRNA sense strand
ggucagcuccugcuucuuc

SEQ ID NO: 1987699 - RNA, 19 nt, Homo sapiens
  misc_RNA (1)...(19): siRNA sense strand
ccaaugugcucuuccucau

SEQ ID NO: 1987700 - RNA, 19 nt, Homo sapiens
  misc_RNA (1)...(19): siRNA sense strand
gacagaggagccagaugua

SEQ ID NO: 1987701 - RNA, 19 nt, Homo sapiens
  misc_RNA (1)...(19): siRNA sense strand
cugaggacuuuaauaucua

SEQ ID NO: 1987702 - RNA, 19 nt, Homo sapiens
  misc_RNA (1)...(19): siRNA sense strand
gagauccuguacccugaug

SEQ ID NO: 1987703 - RNA, 19 nt, Homo sapiens
  misc_RNA (1)...(19): siRNA sense strand
gaggagcuucuacguguau

SEQ ID NO: 1987704 - RNA, 19 nt, Homo sapiens
  misc_RNA (1)...(19): siRNA sense strand
agacagaggagccagaugu

SEQ ID NO: 1987705 - RNA, 19 nt, Homo sapiens
  misc_RNA (1)...(19): siRNA sense strand
gauccucuucuccuacaaa

SEQ ID NO: 1987706 - RNA, 19 nt, Homo sapiens
  misc_RNA (1)...(19): siRNA sense strand
gggcucugcuguguagaug

SEQ ID NO: 1987707 - RNA, 19 nt, Homo sapiens
  misc_RNA (1)...(19): siRNA sense strand
caaccuuccuguacuucag

SEQ ID NO: 1987708 - RNA, 19 nt, Homo sapiens
  misc_RNA (1)...(19): siRNA sense strand
gcuggaaggccaucaaugc

SEQ ID NO: 1987709 - RNA, 19 nt, Homo sapiens
  misc_RNA (1)...(19): siRNA sense strand
cagaggagccagauguaca

SEQ ID NO: 1987710 - RNA, 19 nt, Homo sapiens
  misc_RNA (1)...(19): siRNA sense strand
aaugugcucuuccucaucu

SEQ ID NO: 1987711 - RNA, 19 nt, Homo sapiens
  misc_RNA (1)...(19): siRNA sense strand
cucgaacgcugcaacuguu

SEQ ID NO: 1987712 - RNA, 19 nt, Homo sapiens
  misc_RNA (1)...(19): siRNA sense strand
gccacaaccuuccuguacu

SEQ ID NO: 1987713 - RNA, 19 nt, Homo sapiens
  misc_RNA (1)...(19): siRNA sense strand
ccaucgagcugagugugau

SEQ ID NO: 1987714 - RNA, 19 nt, Homo sapiens
  misc_RNA (1)...(19): siRNA sense strand
aaacaucagugugccucau

SEQ ID NO: 1987715 - RNA, 19 nt, Homo sapiens
  misc_RNA (1)...(19): siRNA sense strand
guggucauccuucccaaga

SEQ ID NO: 1987716 - RNA, 19 nt, Homo sapiens
  misc_RNA (1)...(19): siRNA sense strand
gaguaaguccagcaucaag

SEQ ID NO: 1987717 - RNA, 19 nt, Homo sapiens
  misc_RNA (1)...(19): siRNA sense strand
ucagcugaggacuuuaaua

SEQ ID NO: 1987718 - RNA, 19 nt, Homo sapiens
  misc_RNA (1)...(19): siRNA sense strand
gaggggcucugcuguguag

SEQ ID NO: 1987719 - RNA, 19 nt, Homo sapiens
  misc_RNA (1)...(19): siRNA sense strand
uggccuaccuggaugacau

SEQ ID NO: 1987720 - RNA, 19 nt, Homo sapiens
  misc_RNA (1)...(19): siRNA sense strand
gcugcucuacgaagacauu

SEQ ID NO: 1987721 - RNA, 19 nt, Homo sapiens
  misc_RNA (1)...(19): siRNA sense strand
gcugccugcugcugcucua

SEQ ID NO: 1987722 - RNA, 19 nt, Homo sapiens
  misc_RNA (1)...(19): siRNA sense strand
ccucgaacgcugcaacugu

SEQ ID NO: 1987723 - RNA, 19 nt, Homo sapiens
  misc_RNA (1)...(19): siRNA sense strand
ccucuucuccuacaaaugc

SEQ ID NO: 1987724 - RNA, 19 nt, Homo sapiens
  misc_RNA (1)...(19): siRNA sense strand
cuucuucgcuccgcucauc

SEQ ID NO: 1987725 - RNA, 19 nt, Homo sapiens
  misc_RNA (1)...(19): siRNA sense strand
gugguaaacuugagauugu

SEQ ID NO: 1987726 - RNA, 19 nt, Homo sapiens
  misc_RNA (1)...(19): siRNA sense strand
gcauguuggugguaaacuu

SEQ ID NO: 1987727 - RNA, 19 nt, Homo sapiens
  misc_RNA (1)...(19): siRNA sense strand
cacaagcucccaagaguuu

SEQ ID NO: 1987728 - RNA, 19 nt, Homo sapiens
  misc_RNA (1)...(19): siRNA sense strand
gggcucauuuccugaacaa

SEQ ID NO: 1987729 - RNA, 19 nt, Homo sapiens
  misc_RNA (1)...(19): siRNA sense strand
uacacaagcucccaagagu

SEQ ID NO: 1987730 - RNA, 19 nt, Homo sapiens
  misc_RNA (1)...(19): siRNA sense strand
guuaaaauccucuggaaaa

SEQ ID NO: 1987731 - RNA, 19 nt, Homo sapiens
  misc_RNA (1)...(19): siRNA sense strand
ggcuguggauccaguuuga

SEQ ID NO: 1987732 - RNA, 19 nt, Homo sapiens
  misc_RNA (1)...(19): siRNA sense strand
guacacaagcucccaagag

SEQ ID NO: 1987733 - RNA, 19 nt, Homo sapiens
  misc_RNA (1)...(19): siRNA sense strand
aaaacuggaugcuguuaaa

SEQ ID NO: 1987734 - RNA, 19 nt, Homo sapiens
  misc_RNA (1)...(19): siRNA sense strand
cuccgugacuucccuugua

SEQ ID NO: 1987735 - RNA, 19 nt, Homo sapiens
  misc_RNA (1)...(19): siRNA sense strand
gucauggacauuugaauau

SEQ ID NO: 1987736 - RNA, 19 nt, Homo sapiens
  misc_RNA (1)...(19): siRNA sense strand
ggugguaaacuugagauug

SEQ ID NO: 1987737 - RNA, 19 nt, Homo sapiens
  misc_RNA (1)...(19): siRNA sense strand
ucacuuuagcgggcaguua

SEQ ID NO: 1987738 - RNA, 19 nt, Homo sapiens
  misc_RNA (1)...(19): siRNA sense strand
cacuuuagcgggcaguuaa

SEQ ID NO: 1987739 - RNA, 19 nt, Homo sapiens
  misc_RNA (1)...(19): siRNA sense strand
ugguaaacuugagauugua

SEQ ID NO: 1987740 - RNA, 19 nt, Homo sapiens
  misc_RNA (1)...(19): siRNA sense strand
caaaauggagagagagaaa

SEQ ID NO: 1987741 - RNA, 19 nt, Homo sapiens
  misc_RNA (1)...(19): siRNA sense strand
gguaaacuugagauuguau

SEQ ID NO: 1987742 - RNA, 19 nt, Homo sapiens
  misc_RNA (1)...(19): siRNA sense strand
ugaacaaaauggagagaga

SEQ ID NO: 1987743 - RNA, 19 nt, Homo sapiens
  misc_RNA (1)...(19): siRNA sense strand
gcucauuuccugaacaaaa

SEQ ID NO: 1987744 - RNA, 19 nt, Homo sapiens
  misc_RNA (1)...(19): siRNA sense strand
caaauuuagaggacguuuc

SEQ ID NO: 1987745 - RNA, 19 nt, Homo sapiens
  misc_RNA (1)...(19): siRNA sense strand
acacaagcucccaagaguu

SEQ ID NO: 1987746 - RNA, 19 nt, Homo sapiens
  misc_RNA (1)...(19): siRNA sense strand
uuucaaaaccuucguauug

SEQ ID NO: 1987747 - RNA, 19 nt, Homo sapiens
  misc_RNA (1)...(19): siRNA sense strand
uccaugccauugugcaguu

SEQ ID NO: 1987748 - RNA, 19 nt, Homo sapiens
  misc_RNA (1)...(19): siRNA sense strand
aaauuuagaggacguuucu

SEQ ID NO: 1987749 - RNA, 19 nt, Homo sapiens
  misc_RNA (1)...(19): siRNA sense strand
cauguuggugguaaacuug

SEQ ID NO: 1987750 - RNA, 19 nt, Homo sapiens
  misc_RNA (1)...(19): siRNA sense strand
gaaguaagcagccuccuaa

SEQ ID NO: 1987751 - RNA, 19 nt, Homo sapiens
  misc_RNA (1)...(19): siRNA sense strand
aaagaggaauggagaauga

SEQ ID NO: 1987752 - RNA, 19 nt, Homo sapiens
  misc_RNA (1)...(19): siRNA sense strand
gaaugaaauuaccugcuaa

SEQ ID NO: 1987753 - RNA, 19 nt, Homo sapiens
  misc_RNA (1)...(19): siRNA sense strand
guaagcagccuccuaagaa

SEQ ID NO: 1987754 - RNA, 19 nt, Homo sapiens
  misc_RNA (1)...(19): siRNA sense strand
agaaugaaauuaccugcua

SEQ ID NO: 1987755 - RNA, 19 nt, Homo sapiens
  misc_RNA (1)...(19): siRNA sense strand
gggagcagauauucuagaa

SEQ ID NO: 1987756 - RNA, 19 nt, Homo sapiens
  misc_RNA (1)...(19): siRNA sense strand
uaagcagccuccuaagaaa

SEQ ID NO: 1987757 - RNA, 19 nt, Homo sapiens
  misc_RNA (1)...(19): siRNA sense strand
gaaagacuaugcauaugcu

SEQ ID NO: 1987758 - RNA, 19 nt, Homo sapiens
  misc_RNA (1)...(19): siRNA sense strand
gaaugaggauccuucucuu

SEQ ID NO: 1987759 - RNA, 19 nt, Homo sapiens
  misc_RNA (1)...(19): siRNA sense strand
ggaauggagaaugaaauua

SEQ ID NO: 1987760 - RNA, 19 nt, Homo sapiens
  misc_RNA (1)...(19): siRNA sense strand
ugagaccacuagguauuua

SEQ ID NO: 1987761 - RNA, 19 nt, Homo sapiens
  misc_RNA (1)...(19): siRNA sense strand
ucuaucagcuuucagucua

SEQ ID NO: 1987762 - RNA, 19 nt, Homo sapiens
  misc_RNA (1)...(19): siRNA sense strand
ugaaggagaaagacuguaa

SEQ ID NO: 1987763 - RNA, 19 nt, Homo sapiens
  misc_RNA (1)...(19): siRNA sense strand
gaauggagaaugaaauuac

SEQ ID NO: 1987764 - RNA, 19 nt, Homo sapiens
  misc_RNA (1)...(19): siRNA sense strand
gaaagacuguaagccaagu

SEQ ID NO: 1987765 - RNA, 19 nt, Homo sapiens
  misc_RNA (1)...(19): siRNA sense strand
ggugagaccacuagguauu

SEQ ID NO: 1987766 - RNA, 19 nt, Homo sapiens
  misc_RNA (1)...(19): siRNA sense strand
acacaaagaauguucacuu

SEQ ID NO: 1987767 - RNA, 19 nt, Homo sapiens
  misc_RNA (1)...(19): siRNA sense strand
uaucagcucuuauucucau

SEQ ID NO: 1987768 - RNA, 19 nt, Homo sapiens
  misc_RNA (1)...(19): siRNA sense strand
aggcugcccuuuacacaaa

SEQ ID NO: 1987769 - RNA, 19 nt, Homo sapiens
  misc_RNA (1)...(19): siRNA sense strand
guucugauuugcaaacauc

SEQ ID NO: 1987770 - RNA, 19 nt, Homo sapiens
  misc_RNA (1)...(19): siRNA sense strand
cacuagguauuuacaagaa

SEQ ID NO: 1987771 - RNA, 19 nt, Homo sapiens
  misc_RNA (1)...(19): siRNA sense strand
gacacuauuuggucaucaa

SEQ ID NO: 1987772 - RNA, 19 nt, Homo sapiens
  misc_RNA (1)...(19): siRNA sense strand
gcuagacggacacuauuug

SEQ ID NO: 1987773 - RNA, 19 nt, Homo sapiens
  misc_RNA (1)...(19): siRNA sense strand
cuugaaagacuaugcauau

SEQ ID NO: 1987774 - RNA, 19 nt, Homo sapiens
  misc_RNA (1)...(19): siRNA sense strand
gaaagcggaauguuuugua

SEQ ID NO: 1987775 - RNA, 19 nt, Homo sapiens
  misc_RNA (1)...(19): siRNA sense strand
ggacacuauuuggucauca

SEQ ID NO: 1987776 - RNA, 19 nt, Homo sapiens
  misc_RNA (1)...(19): siRNA sense strand
uaagccaagugucaaaguc

SEQ ID NO: 1987777 - RNA, 19 nt, Homo sapiens
  misc_RNA (1)...(19): siRNA sense strand
ccacuagguauuuacaaga

SEQ ID NO: 1987778 - RNA, 19 nt, Homo sapiens
  misc_RNA (1)...(19): siRNA sense strand
ucagaaagcggaauguuuu

SEQ ID NO: 1987779 - RNA, 19 nt, Homo sapiens
  misc_RNA (1)...(19): siRNA sense strand
uaucagcuuucagucuaaa

SEQ ID NO: 1987780 - RNA, 19 nt, Homo sapiens
  misc_RNA (1)...(19): siRNA sense strand
gaggaauggagaaugaaau

SEQ ID NO: 1987781 - RNA, 19 nt, Homo sapiens
  misc_RNA (1)...(19): siRNA sense strand
uaaauuacaacucgauugc

SEQ ID NO: 1987782 - RNA, 19 nt, Homo sapiens
  misc_RNA (1)...(19): siRNA sense strand
gugagaccacuagguauuu

SEQ ID NO: 1987783 - RNA, 19 nt, Homo sapiens
  misc_RNA (1)...(19): siRNA sense strand
uaaagaggaauggagaaug

SEQ ID NO: 1987784 - RNA, 19 nt, Homo sapiens
  misc_RNA (1)...(19): siRNA sense strand
gaaggagaaagacuguaag

SEQ ID NO: 1987785 - RNA, 19 nt, Homo sapiens
  misc_RNA (1)...(19): siRNA sense strand
cuagguauuuacaagaaca

SEQ ID NO: 1987786 - RNA, 19 nt, Homo sapiens
  misc_RNA (1)...(19): siRNA sense strand
cuaucagcuuucagucuaa

SEQ ID NO: 1987787 - RNA, 19 nt, Homo sapiens
  misc_RNA (1)...(19): siRNA sense strand
uugcaaacaucuggugaga

SEQ ID NO: 1987788 - RNA, 19 nt, Homo sapiens
  misc_RNA (1)...(19): siRNA sense strand
agaaguaagcagccuccua

SEQ ID NO: 1987789 - RNA, 19 nt, Homo sapiens
  misc_RNA (1)...(19): siRNA sense strand
aggaauggagaaugaaauu

SEQ ID NO: 1987790 - RNA, 19 nt, Homo sapiens
  misc_RNA (1)...(19): siRNA sense strand
ugaaagacuaugcauaugc

SEQ ID NO: 1987791 - RNA, 19 nt, Homo sapiens
  misc_RNA (1)...(19): siRNA sense strand
uucagaauaucacugucua

SEQ ID NO: 1987792 - RNA, 19 nt, Homo sapiens
  misc_RNA (1)...(19): siRNA sense strand
gaugagggcaggaauucag

SEQ ID NO: 1987793 - RNA, 19 nt, Homo sapiens
  misc_RNA (1)...(19): siRNA sense strand
ggcuagacggacacuauuu

SEQ ID NO: 1987794 - RNA, 19 nt, Homo sapiens
  misc_RNA (1)...(19): siRNA sense strand
guacaggggagcagauauu

SEQ ID NO: 1987795 - RNA, 19 nt, Homo sapiens
  misc_RNA (1)...(19): siRNA sense strand
guggcuagacggacacuau

SEQ ID NO: 1987796 - RNA, 19 nt, Homo sapiens
  misc_RNA (1)...(19): siRNA sense strand
aaugaggauccuucucuuu

SEQ ID NO: 1987797 - RNA, 19 nt, Homo sapiens
  misc_RNA (1)...(19): siRNA sense strand
cucagaaagcggaauguuu

SEQ ID NO: 1987798 - RNA, 19 nt, Homo sapiens
  misc_RNA (1)...(19): siRNA sense strand
gacuguaagccaaguguca

SEQ ID NO: 1987799 - RNA, 19 nt, Homo sapiens
  misc_RNA (1)...(19): siRNA sense strand
uugaaagacuaugcauaug

SEQ ID NO: 1987800 - RNA, 19 nt, Homo sapiens
  misc_RNA (1)...(19): siRNA sense strand
guauuuacaagaacagagu

SEQ ID NO: 1987801 - RNA, 19 nt, Homo sapiens
  misc_RNA (1)...(19): siRNA sense strand
cuaaagaggaauggagaau

SEQ ID NO: 1987802 - RNA, 19 nt, Homo sapiens
  misc_RNA (1)...(19): siRNA sense strand
ggugaaggagaaagacugu

SEQ ID NO: 1987803 - RNA, 19 nt, Homo sapiens
  misc_RNA (1)...(19): siRNA sense strand
guaagccaagugucaaagu

SEQ ID NO: 1987804 - RNA, 19 nt, Homo sapiens
  misc_RNA (1)...(19): siRNA sense strand
caggaugagggcaggaauu

SEQ ID NO: 1987805 - RNA, 19 nt, Homo sapiens
  misc_RNA (1)...(19): siRNA sense strand
aguaagcagccuccuaaga

SEQ ID NO: 1987806 - RNA, 19 nt, Homo sapiens
  misc_RNA (1)...(19): siRNA sense strand
agaggaauggagaaugaaa

SEQ ID NO: 1987807 - RNA, 19 nt, Homo sapiens
  misc_RNA (1)...(19): siRNA sense strand
guucacauuuucauccaaa

SEQ ID NO: 1987808 - RNA, 19 nt, Homo sapiens
  misc_RNA (1)...(19): siRNA sense strand
cugacaggcugcccuuuac

SEQ ID NO: 1987809 - RNA, 19 nt, Homo sapiens
  misc_RNA (1)...(19): siRNA sense strand
cgugauggcugcauaugga

SEQ ID NO: 1987810 - RNA, 19 nt, Homo sapiens
  misc_RNA (1)...(19): siRNA sense strand
cauauggacugucggaaca

SEQ ID NO: 1987811 - RNA, 19 nt, Homo sapiens
  misc_RNA (1)...(19): siRNA sense strand
cuacugcccuauaugauca

SEQ ID NO: 1987812 - RNA, 19 nt, Homo sapiens
  misc_RNA (1)...(19): siRNA sense strand
caagacggccugcguagau

SEQ ID NO: 1987813 - RNA, 19 nt, Homo sapiens
  misc_RNA (1)...(19): siRNA sense strand
gggacgugauggcugcaua

SEQ ID NO: 1987814 - RNA, 19 nt, Homo sapiens
  misc_RNA (1)...(19): siRNA sense strand
gcagcgaggucccuaugac

SEQ ID NO: 1987815 - RNA, 19 nt, Homo sapiens
  misc_RNA (1)...(19): siRNA sense strand
ugaggcuacugcccuauau

SEQ ID NO: 1987816 - RNA, 19 nt, Homo sapiens
  misc_RNA (1)...(19): siRNA sense strand
agacugagcccagaguuga

SEQ ID NO: 1987817 - RNA, 19 nt, Homo sapiens
  misc_RNA (1)...(19): siRNA sense strand
agcaacagcuccagugugu

SEQ ID NO: 1987818 - RNA, 19 nt, Homo sapiens
  misc_RNA (1)...(19): siRNA sense strand
ggacgugauggcugcauau

SEQ ID NO: 1987819 - RNA, 19 nt, Homo sapiens
  misc_RNA (1)...(19): siRNA sense strand
aagacggccugcguagaua

SEQ ID NO: 1987820 - RNA, 19 nt, Homo sapiens
  misc_RNA (1)...(19): siRNA sense strand
gagacugagcccagaguug

SEQ ID NO: 1987821 - RNA, 19 nt, Homo sapiens
  misc_RNA (1)...(19): siRNA sense strand
gcgacgccgugcacaacuu

SEQ ID NO: 1987822 - RNA, 19 nt, Homo sapiens
  misc_RNA (1)...(19): siRNA sense strand
cagcucagccagucagaga

SEQ ID NO: 1987823 - RNA, 19 nt, Homo sapiens
  misc_RNA (1)...(19): siRNA sense strand
gccgagcccucaguacuuc

SEQ ID NO: 1987824 - RNA, 19 nt, Homo sapiens
  misc_RNA (1)...(19): siRNA sense strand
gcuacugcccuauaugauc

SEQ ID NO: 1987825 - RNA, 19 nt, Homo sapiens
  misc_RNA (1)...(19): siRNA sense strand
gacgcuguccugcaucuga

SEQ ID NO: 1987826 - RNA, 19 nt, Homo sapiens
  misc_RNA (1)...(19): siRNA sense strand
guacuucguggacuuugug

SEQ ID NO: 1987827 - RNA, 19 nt, Homo sapiens
  misc_RNA (1)...(19): siRNA sense strand
cucaucagcuccagcaaca

SEQ ID NO: 1987828 - RNA, 19 nt, Homo sapiens
  misc_RNA (1)...(19): siRNA sense strand
ggacacgguaugccugagu

SEQ ID NO: 1987829 - RNA, 19 nt, Homo sapiens
  misc_RNA (1)...(19): siRNA sense strand
ggagacugagcccagaguu

SEQ ID NO: 1987830 - RNA, 19 nt, Homo sapiens
  misc_RNA (1)...(19): siRNA sense strand
cagcagcgaggucccuaug

SEQ ID NO: 1987831 - RNA, 19 nt, Homo sapiens
  misc_RNA (1)...(19): siRNA sense strand
aggcuacugcccuauauga

SEQ ID NO: 1987832 - RNA, 19 nt, Homo sapiens
  misc_RNA (1)...(19): siRNA sense strand
cuacgccuucuuccuguuu

SEQ ID NO: 1987833 - RNA, 19 nt, Homo sapiens
  misc_RNA (1)...(19): siRNA sense strand
cgugauggcugcauaugga

SEQ ID NO: 1987834 - RNA, 19 nt, Homo sapiens
  misc_RNA (1)...(19): siRNA sense strand
cauauggacugucggaaca

SEQ ID NO: 1987835 - RNA, 19 nt, Homo sapiens
  misc_RNA (1)...(19): siRNA sense strand
cuacugcccuauaugauca

SEQ ID NO: 1987836 - RNA, 19 nt, Homo sapiens
  misc_RNA (1)...(19): siRNA sense strand
caagacggccugcguagau

SEQ ID NO: 1987837 - RNA, 19 nt, Homo sapiens
  misc_RNA (1)...(19): siRNA sense strand
gggacgugauggcugcaua

SEQ ID NO: 1987838 - RNA, 19 nt, Homo sapiens
  misc_RNA (1)...(19): siRNA sense strand
gcagcgaggucccuaugac

SEQ ID NO: 1987839 - RNA, 19 nt, Homo sapiens
  misc_RNA (1)...(19): siRNA sense strand
ugaggcuacugcccuauau

SEQ ID NO: 1987840 - RNA, 19 nt, Homo sapiens
  misc_RNA (1)...(19): siRNA sense strand
agacugagcccagaguuga

SEQ ID NO: 1987841 - RNA, 19 nt, Homo sapiens
  misc_RNA (1)...(19): siRNA sense strand
agcaacagcuccagugugu

SEQ ID NO: 1987842 - RNA, 19 nt, Homo sapiens
  misc_RNA (1)...(19): siRNA sense strand
ggacgugauggcugcauau

SEQ ID NO: 1987843 - RNA, 19 nt, Homo sapiens
  misc_RNA (1)...(19): siRNA sense strand
aagacggccugcguagaua

SEQ ID NO: 1987844 - RNA, 19 nt, Homo sapiens
  misc_RNA (1)...(19): siRNA sense strand
gagacugagcccagaguug

SEQ ID NO: 1987845 - RNA, 19 nt, Homo sapiens
  misc_RNA (1)...(19): siRNA sense strand
gcgacgccgugcacaacuu

SEQ ID NO: 1987846 - RNA, 19 nt, Homo sapiens
  misc_RNA (1)...(19): siRNA sense strand
cagcucagccagucagaga

SEQ ID NO: 1987847 - RNA, 19 nt, Homo sapiens
  misc_RNA (1)...(19): siRNA sense strand
gccgagcccucaguacuuc

SEQ ID NO: 1987848 - RNA, 19 nt, Homo sapiens
  misc_RNA (1)...(19): siRNA sense strand
gcuacugcccuauaugauc

SEQ ID NO: 1987849 - RNA, 19 nt, Homo sapiens
  misc_RNA (1)...(19): siRNA sense strand
gacgcuguccugcaucuga

SEQ ID NO: 1987850 - RNA, 19 nt, Homo sapiens
  misc_RNA (1)...(19): siRNA sense strand
guacuucguggacuuugug

SEQ ID NO: 1987851 - RNA, 19 nt, Homo sapiens
  misc_RNA (1)...(19): siRNA sense strand
cucaucagcuccagcaaca

SEQ ID NO: 1987852 - RNA, 19 nt, Homo sapiens
  misc_RNA (1)...(19): siRNA sense strand
ggacacgguaugccugagu

SEQ ID NO: 1987853 - RNA, 19 nt, Homo sapiens
  misc_RNA (1)...(19): siRNA sense strand
ggagacugagcccagaguu

SEQ ID NO: 1987854 - RNA, 19 nt, Homo sapiens
  misc_RNA (1)...(19): siRNA sense strand
cagcagcgaggucccuaug

SEQ ID NO: 1987855 - RNA, 19 nt, Homo sapiens
  misc_RNA (1)...(19): siRNA sense strand
aggcuacugcccuauauga

SEQ ID NO: 1987856 - RNA, 19 nt, Homo sapiens
  misc_RNA (1)...(19): siRNA sense strand
cuacgccuucuuccuguuu

SEQ ID NO: 1987857 - RNA, 19 nt, Homo sapiens
  misc_RNA (1)...(19): siRNA sense strand
ggaaggaaaucaugauaaa

SEQ ID NO: 1987858 - RNA, 19 nt, Homo sapiens
  misc_RNA (1)...(19): siRNA sense strand
gacaaaugcugaagaagaa

SEQ ID NO: 1987859 - RNA, 19 nt, Homo sapiens
  misc_RNA (1)...(19): siRNA sense strand
ggacaacacccuuuaaaug

SEQ ID NO: 1987860 - RNA, 19 nt, Homo sapiens
  misc_RNA (1)...(19): siRNA sense strand
gaagugcagugacaauuau

SEQ ID NO: 1987861 - RNA, 19 nt, Homo sapiens
  misc_RNA (1)...(19): siRNA sense strand
ggacaaaugcugaagaaga

SEQ ID NO: 1987862 - RNA, 19 nt, Homo sapiens
  misc_RNA (1)...(19): siRNA sense strand
gaaccagcaucaaucagaa

SEQ ID NO: 1987863 - RNA, 19 nt, Homo sapiens
  misc_RNA (1)...(19): siRNA sense strand
aagguuaacuuccuagaua

SEQ ID NO: 1987864 - RNA, 19 nt, Homo sapiens
  misc_RNA (1)...(19): siRNA sense strand
cagaaagacaucagagaua

SEQ ID NO: 1987865 - RNA, 19 nt, Homo sapiens
  misc_RNA (1)...(19): siRNA sense strand
cagagauacucaacaggua

SEQ ID NO: 1987866 - RNA, 19 nt, Homo sapiens
  misc_RNA (1)...(19): siRNA sense strand
ggacaaaucagaagaaucc

SEQ ID NO: 1987867 - RNA, 19 nt, Homo sapiens
  misc_RNA (1)...(19): siRNA sense strand
aaagacagaaccauaguaa

SEQ ID NO: 1987868 - RNA, 19 nt, Homo sapiens
  misc_RNA (1)...(19): siRNA sense strand
gaggaaggaaaucaugaua

SEQ ID NO: 1987869 - RNA, 19 nt, Homo sapiens
  misc_RNA (1)...(19): siRNA sense strand
ggaaccagcaucaaucaga

SEQ ID NO: 1987870 - RNA, 19 nt, Homo sapiens
  misc_RNA (1)...(19): siRNA sense strand
gaaauccggacaaaucaga

SEQ ID NO: 1987871 - RNA, 19 nt, Homo sapiens
  misc_RNA (1)...(19): siRNA sense strand
agaagugcagugacaauua

SEQ ID NO: 1987872 - RNA, 19 nt, Homo sapiens
  misc_RNA (1)...(19): siRNA sense strand
gacaacacccuuuaaaugg

SEQ ID NO: 1987873 - RNA, 19 nt, Homo sapiens
  misc_RNA (1)...(19): siRNA sense strand
ucucauagccacucagaaa

SEQ ID NO: 1987874 - RNA, 19 nt, Homo sapiens
  misc_RNA (1)...(19): siRNA sense strand
agaaggaaauccggacaaa

SEQ ID NO: 1987875 - RNA, 19 nt, Homo sapiens
  misc_RNA (1)...(19): siRNA sense strand
caucagagauacucaacag

SEQ ID NO: 1987876 - RNA, 19 nt, Homo sapiens
  misc_RNA (1)...(19): siRNA sense strand
gaaaccacuuagagagauc

SEQ ID NO: 1987877 - RNA, 19 nt, Homo sapiens
  misc_RNA (1)...(19): siRNA sense strand
caggagaagugcagugaca

SEQ ID NO: 1987878 - RNA, 19 nt, Homo sapiens
  misc_RNA (1)...(19): siRNA sense strand
uaauugagcaggagaagug

SEQ ID NO: 1987879 - RNA, 19 nt, Homo sapiens
  misc_RNA (1)...(19): siRNA sense strand
gagaucucauggccaauca

SEQ ID NO: 1987880 - RNA, 19 nt, Homo sapiens
  misc_RNA (1)...(19): siRNA sense strand
gaucucauggucacucaaa

SEQ ID NO: 1987881 - RNA, 19 nt, Homo sapiens
  misc_RNA (1)...(19): siRNA sense strand
cgaaaccacuuagagagau

SEQ ID NO: 1987882 - RNA, 19 nt, Homo sapiens
  misc_RNA (1)...(19): siRNA sense strand
cagcaucaaucagaaggaa

SEQ ID NO: 1987883 - RNA, 19 nt, Homo sapiens
  misc_RNA (1)...(19): siRNA sense strand
gagaagugcagugacaauu

SEQ ID NO: 1987884 - RNA, 19 nt, Homo sapiens
  misc_RNA (1)...(19): siRNA sense strand
agaaagacaucagagauac

SEQ ID NO: 1987885 - RNA, 19 nt, Homo sapiens
  misc_RNA (1)...(19): siRNA sense strand
cauggucacucaaagagau

SEQ ID NO: 1987886 - RNA, 19 nt, Homo sapiens
  misc_RNA (1)...(19): siRNA sense strand
cggagaggcuacucaagau

SEQ ID NO: 1987887 - RNA, 19 nt, Homo sapiens
  misc_RNA (1)...(19): siRNA sense strand
gagaucucguggccacuga

SEQ ID NO: 1987888 - RNA, 19 nt, Homo sapiens
  misc_RNA (1)...(19): siRNA sense strand
ucucauggccaaucagaaa

SEQ ID NO: 1987889 - RNA, 19 nt, Homo sapiens
  misc_RNA (1)...(19): siRNA sense strand
gagauacucaacagguaaa

SEQ ID NO: 1987890 - RNA, 19 nt, Homo sapiens
  misc_RNA (1)...(19): siRNA sense strand
aagcaacucugaggaagga

SEQ ID NO: 1987891 - RNA, 19 nt, Homo sapiens
  misc_RNA (1)...(19): siRNA sense strand
ggagaagugcagugacaau

SEQ ID NO: 1987892 - RNA, 19 nt, Homo sapiens
  misc_RNA (1)...(19): siRNA sense strand
gaucucauagucacucaga

SEQ ID NO: 1987893 - RNA, 19 nt, Homo sapiens
  misc_RNA (1)...(19): siRNA sense strand
gagaucuuguggacacuca

SEQ ID NO: 1987894 - RNA, 19 nt, Homo sapiens
  misc_RNA (1)...(19): siRNA sense strand
gagaucucauggucacuca

SEQ ID NO: 1987895 - RNA, 19 nt, Homo sapiens
  misc_RNA (1)...(19): siRNA sense strand
gagaucucauggucacuca

SEQ ID NO: 1987896 - RNA, 19 nt, Homo sapiens
  misc_RNA (1)...(19): siRNA sense strand
gaaggaaauccggacaaau

SEQ ID NO: 1987897 - RNA, 19 nt, Homo sapiens
  misc_RNA (1)...(19): siRNA sense strand
gcaucaaucagaaggaaau

SEQ ID NO: 1987898 - RNA, 19 nt, Homo sapiens
  misc_RNA (1)...(19): siRNA sense strand
gaagaaucaaggccaguca

SEQ ID NO: 1987899 - RNA, 19 nt, Homo sapiens
  misc_RNA (1)...(19): siRNA sense strand
aaggaaauccggacaaauc

SEQ ID NO: 1987900 - RNA, 19 nt, Homo sapiens
  misc_RNA (1)...(19): siRNA sense strand
gaucucauggccaauacaa

SEQ ID NO: 1987901 - RNA, 19 nt, Homo sapiens
  misc_RNA (1)...(19): siRNA sense strand
cauagucacucagagagau

SEQ ID NO: 1987902 - RNA, 19 nt, Homo sapiens
  misc_RNA (1)...(19): siRNA sense strand
agggacaaaugcugaagaa

SEQ ID NO: 1987903 - RNA, 19 nt, Homo sapiens
  misc_RNA (1)...(19): siRNA sense strand
ucagaaagacaucagagau

SEQ ID NO: 1987904 - RNA, 19 nt, Homo sapiens
  misc_RNA (1)...(19): siRNA sense strand
gaucucauggccaaucaga

SEQ ID NO: 1987905 - RNA, 19 nt, Homo sapiens
  misc_RNA (1)...(19): siRNA sense strand
agacagaaccauaguaaaa

SEQ ID NO: 1987906 - RNA, 19 nt, Homo sapiens
  misc_RNA (1)...(19): siRNA sense strand
gaucucauagccacucaga

SEQ ID NO: 1987907 - RNA, 19 nt, Homo sapiens
  misc_RNA (1)...(19): siRNA sense strand
gaucucauagccacucaga

SEQ ID NO: 1987908 - RNA, 19 nt, Homo sapiens
  misc_RNA (1)...(19): siRNA sense strand
gaucucauagccacucaga

SEQ ID NO: 1987909 - RNA, 19 nt, Homo sapiens
  misc_RNA (1)...(19): siRNA sense strand
gaucucauagccacucaga

SEQ ID NO: 1987910 - RNA, 19 nt, Homo sapiens
  misc_RNA (1)...(19): siRNA sense strand
gaucucauggucacucaga

SEQ ID NO: 1987911 - RNA, 19 nt, Homo sapiens
  misc_RNA (1)...(19): siRNA sense strand
gagaucucauggccacuca

SEQ ID NO: 1987912 - RNA, 19 nt, Homo sapiens
  misc_RNA (1)...(19): siRNA sense strand
gagaucucauggccaauac

SEQ ID NO: 1987913 - RNA, 19 nt, Homo sapiens
  misc_RNA (1)...(19): siRNA sense strand
gcaacucugaggaaggaaa

SEQ ID NO: 1987914 - RNA, 19 nt, Homo sapiens
  misc_RNA (1)...(19): siRNA sense strand
ucucauggccaauacaaga

SEQ ID NO: 1987915 - RNA, 19 nt, Homo sapiens
  misc_RNA (1)...(19): siRNA sense strand
ucucuagacgacauuauaa

SEQ ID NO: 1987916 - RNA, 19 nt, Homo sapiens
  misc_RNA (1)...(19): siRNA sense strand
agagaucucauggccaaua

SEQ ID NO: 1987917 - RNA, 19 nt, Homo sapiens
  misc_RNA (1)...(19): siRNA sense strand
cauagccacucagaaagau

SEQ ID NO: 1987918 - RNA, 19 nt, Homo sapiens
  misc_RNA (1)...(19): siRNA sense strand
gaucucauggccacucaga

SEQ ID NO: 1987919 - RNA, 19 nt, Homo sapiens
  misc_RNA (1)...(19): siRNA sense strand
caauacaagagaucucaug

SEQ ID NO: 1987920 - RNA, 19 nt, Homo sapiens
  misc_RNA (1)...(19): siRNA sense strand
ggagaggcuacucaagaug

SEQ ID NO: 1987921 - RNA, 19 nt, Homo sapiens
  misc_RNA (1)...(19): siRNA sense strand
gagaucucauagucacuca

SEQ ID NO: 1987922 - RNA, 19 nt, Homo sapiens
  misc_RNA (1)...(19): siRNA sense strand
cuucaagacagcaaucaaa

SEQ ID NO: 1987923 - RNA, 19 nt, Homo sapiens
  misc_RNA (1)...(19): siRNA sense strand
ucauagccacucagaaaga

SEQ ID NO: 1987924 - RNA, 19 nt, Homo sapiens
  misc_RNA (1)...(19): siRNA sense strand
ggagaucucauggccaauc

SEQ ID NO: 1987925 - RNA, 19 nt, Homo sapiens
  misc_RNA (1)...(19): siRNA sense strand
ucggagaggcuacucaaga

SEQ ID NO: 1987926 - RNA, 19 nt, Homo sapiens
  misc_RNA (1)...(19): siRNA sense strand
agagauacucaacagguaa

SEQ ID NO: 1987927 - RNA, 19 nt, Homo sapiens
  misc_RNA (1)...(19): siRNA sense strand
aggaaggaaaucaugauaa

SEQ ID NO: 1987928 - RNA, 19 nt, Homo sapiens
  misc_RNA (1)...(19): siRNA sense strand
gagaucucauagccacuca

SEQ ID NO: 1987929 - RNA, 19 nt, Homo sapiens
  misc_RNA (1)...(19): siRNA sense strand
gagaucucauagccacuca

SEQ ID NO: 1987930 - RNA, 19 nt, Homo sapiens
  misc_RNA (1)...(19): siRNA sense strand
ccgaaaccacuuagagaga

SEQ ID NO: 1987931 - RNA, 19 nt, Homo sapiens
  misc_RNA (1)...(19): siRNA sense strand
gaaagacaucagagauacu

SEQ ID NO: 1987932 - RNA, 19 nt, Homo sapiens
  misc_RNA (1)...(19): siRNA sense strand
gcgaucccgaaaccacuua

SEQ ID NO: 1987933 - RNA, 19 nt, Homo sapiens
  misc_RNA (1)...(19): siRNA sense strand
aggaaucgccuucaagaca

SEQ ID NO: 1987934 - RNA, 19 nt, Homo sapiens
  misc_RNA (1)...(19): siRNA sense strand
gaguuagaagggacaaaug

SEQ ID NO: 1987935 - RNA, 19 nt, Homo sapiens
  misc_RNA (1)...(19): siRNA sense strand
agagaucucauaaaucagu

SEQ ID NO: 1987936 - RNA, 19 nt, Homo sapiens
  misc_RNA (1)...(19): siRNA sense strand
gaucuuguggacacucaga

SEQ ID NO: 1987937 - RNA, 19 nt, Homo sapiens
  misc_RNA (1)...(19): siRNA sense strand
cauggucacucagagagau

SEQ ID NO: 1987938 - RNA, 19 nt, Homo sapiens
  misc_RNA (1)...(19): siRNA sense strand
cauggucacucagagagau

SEQ ID NO: 1987939 - RNA, 19 nt, Homo sapiens
  misc_RNA (1)...(19): siRNA sense strand
aaaugggcagccuuuaauu

SEQ ID NO: 1987940 - RNA, 19 nt, Homo sapiens
  misc_RNA (1)...(19): siRNA sense strand
ccggacaaaucagaagaau

SEQ ID NO: 1987941 - RNA, 19 nt, Homo sapiens
  misc_RNA (1)...(19): siRNA sense strand
cauagccacucagagagau

SEQ ID NO: 1987942 - RNA, 19 nt, Homo sapiens
  misc_RNA (1)...(19): siRNA sense strand
caacucugaggaaggaaau

SEQ ID NO: 1987943 - RNA, 19 nt, Homo sapiens
  misc_RNA (1)...(19): siRNA sense strand
cauagccacucagagagau

SEQ ID NO: 1987944 - RNA, 19 nt, Homo sapiens
  misc_RNA (1)...(19): siRNA sense strand
cauagccacucagagagau

SEQ ID NO: 1987945 - RNA, 19 nt, Homo sapiens
  misc_RNA (1)...(19): siRNA sense strand
ggauucaagucuggacaac

SEQ ID NO: 1987946 - RNA, 19 nt, Homo sapiens
  misc_RNA (1)...(19): siRNA sense strand
auaaaucagucagggagau

SEQ ID NO: 1987947 - RNA, 19 nt, Homo sapiens
  misc_RNA (1)...(19): siRNA sense strand
caucggagaggcuacucaa

SEQ ID NO: 1987948 - RNA, 19 nt, Homo sapiens
  misc_RNA (1)...(19): siRNA sense strand
aaugggcagccuuuaauug

SEQ ID NO: 1987949 - RNA, 19 nt, Homo sapiens
  misc_RNA (1)...(19): siRNA sense strand
gagacaucauccccaauau

SEQ ID NO: 1987950 - RNA, 19 nt, Homo sapiens
  misc_RNA (1)...(19): siRNA sense strand
ucauagccacucagagaga

SEQ ID NO: 1987951 - RNA, 19 nt, Homo sapiens
  misc_RNA (1)...(19): siRNA sense strand
ucauagccacucagagaga

SEQ ID NO: 1987952 - RNA, 19 nt, Homo sapiens
  misc_RNA (1)...(19): siRNA sense strand
cuagacgacauuauaaucu

SEQ ID NO: 1987953 - RNA, 19 nt, Homo sapiens
  misc_RNA (1)...(19): siRNA sense strand
ucauagccacucagagaga

SEQ ID NO: 1987954 - RNA, 19 nt, Homo sapiens
  misc_RNA (1)...(19): siRNA sense strand
gccaauacaagagaucuca

SEQ ID NO: 1987955 - RNA, 19 nt, Homo sapiens
  misc_RNA (1)...(19): siRNA sense strand
agguuaacuuccuagauau

SEQ ID NO: 1987956 - RNA, 19 nt, Homo sapiens
  misc_RNA (1)...(19): siRNA sense strand
gguuaacuuccuagauaug

SEQ ID NO: 1987957 - RNA, 19 nt, Homo sapiens
  misc_RNA (1)...(19): siRNA sense strand
ccagaacacugacuuagau

SEQ ID NO: 1987958 - RNA, 19 nt, Homo sapiens
  misc_RNA (1)...(19): siRNA sense strand
gcagguacauaaucacuuc

SEQ ID NO: 1987959 - RNA, 19 nt, Homo sapiens
  misc_RNA (1)...(19): siRNA sense strand
uccagaaacucuagugaua

SEQ ID NO: 1987960 - RNA, 19 nt, Homo sapiens
  misc_RNA (1)...(19): siRNA sense strand
acagacagauucacauuga

SEQ ID NO: 1987961 - RNA, 19 nt, Homo sapiens
  misc_RNA (1)...(19): siRNA sense strand
ggacgucccugccaacuac

SEQ ID NO: 1987962 - RNA, 19 nt, Homo sapiens
  misc_RNA (1)...(19): siRNA sense strand
caacacaguuccucugaag

SEQ ID NO: 1987963 - RNA, 19 nt, Homo sapiens
  misc_RNA (1)...(19): siRNA sense strand
ggagguacgagguagaaua

SEQ ID NO: 1987964 - RNA, 19 nt, Homo sapiens
  misc_RNA (1)...(19): siRNA sense strand
gaacacugacuuagaugaa

SEQ ID NO: 1987965 - RNA, 19 nt, Homo sapiens
  misc_RNA (1)...(19): siRNA sense strand
ggaagcgggaggaauauuu

SEQ ID NO: 1987966 - RNA, 19 nt, Homo sapiens
  misc_RNA (1)...(19): siRNA sense strand
caggauaacuacaccuuug

SEQ ID NO: 1987967 - RNA, 19 nt, Homo sapiens
  misc_RNA (1)...(19): siRNA sense strand
gaaggguucucccacuuuc

SEQ ID NO: 1987968 - RNA, 19 nt, Homo sapiens
  misc_RNA (1)...(19): siRNA sense strand
gaaccuaccuacaauacac

SEQ ID NO: 1987969 - RNA, 19 nt, Homo sapiens
  misc_RNA (1)...(19): siRNA sense strand
caggauaccuacagacaga

SEQ ID NO: 1987970 - RNA, 19 nt, Homo sapiens
  misc_RNA (1)...(19): siRNA sense strand
cuacagaaccuaccuacaa

SEQ ID NO: 1987971 - RNA, 19 nt, Homo sapiens
  misc_RNA (1)...(19): siRNA sense strand
ggaacccacuccacaaaca

SEQ ID NO: 1987972 - RNA, 19 nt, Homo sapiens
  misc_RNA (1)...(19): siRNA sense strand
gcaagcugcuggauggaau

SEQ ID NO: 1987973 - RNA, 19 nt, Homo sapiens
  misc_RNA (1)...(19): siRNA sense strand
caguuccucugaagaauaa

SEQ ID NO: 1987974 - RNA, 19 nt, Homo sapiens
  misc_RNA (1)...(19): siRNA sense strand
ccuggucacuccauucuuu

SEQ ID NO: 1987975 - RNA, 19 nt, Homo sapiens
  misc_RNA (1)...(19): siRNA sense strand
uagaauaccugcaguuugc

SEQ ID NO: 1987976 - RNA, 19 nt, Homo sapiens
  misc_RNA (1)...(19): siRNA sense strand
uccaaacucugaacucaaa

SEQ ID NO: 1987977 - RNA, 19 nt, Homo sapiens
  misc_RNA (1)...(19): siRNA sense strand
guacaggagaucuuugaaa

SEQ ID NO: 1987978 - RNA, 19 nt, Homo sapiens
  misc_RNA (1)...(19): siRNA sense strand
gcacagcauccuccucuug

SEQ ID NO: 1987979 - RNA, 19 nt, Homo sapiens
  misc_RNA (1)...(19): siRNA sense strand
cagaaacucuagugauaca

SEQ ID NO: 1987980 - RNA, 19 nt, Homo sapiens
  misc_RNA (1)...(19): siRNA sense strand
gcauucagccuguauaugg

SEQ ID NO: 1987981 - RNA, 19 nt, Homo sapiens
  misc_RNA (1)...(19): siRNA sense strand
uagaugaacugaggaagug

SEQ ID NO: 1987982 - RNA, 19 nt, Homo sapiens
  misc_RNA (1)...(19): siRNA sense strand
uaacuacaccuuugcacaa

SEQ ID NO: 1987983 - RNA, 19 nt, Homo sapiens
  misc_RNA (1)...(19): siRNA sense strand
auaagaaggccuccaguuu

SEQ ID NO: 1987984 - RNA, 19 nt, Homo sapiens
  misc_RNA (1)...(19): siRNA sense strand
gagaaaacccgccuagaaa

SEQ ID NO: 1987985 - RNA, 19 nt, Homo sapiens
  misc_RNA (1)...(19): siRNA sense strand
gaggaacccacuccacaaa

SEQ ID NO: 1987986 - RNA, 19 nt, Homo sapiens
  misc_RNA (1)...(19): siRNA sense strand
gaaacucuagugauacaug

SEQ ID NO: 1987987 - RNA, 19 nt, Homo sapiens
  misc_RNA (1)...(19): siRNA sense strand
ggagaaaacccgccuagaa

SEQ ID NO: 1987988 - RNA, 19 nt, Homo sapiens
  misc_RNA (1)...(19): siRNA sense strand
ccagaacggucccagucaa

SEQ ID NO: 1987989 - RNA, 19 nt, Homo sapiens
  misc_RNA (1)...(19): siRNA sense strand
gaucuuggaugaggaggau

SEQ ID NO: 1987990 - RNA, 19 nt, Homo sapiens
  misc_RNA (1)...(19): siRNA sense strand
ggaagaggauguggagaac

SEQ ID NO: 1987991 - RNA, 19 nt, Homo sapiens
  misc_RNA (1)...(19): siRNA sense strand
gaucaaaagucaacacagu

SEQ ID NO: 1987992 - RNA, 19 nt, Homo sapiens
  misc_RNA (1)...(19): siRNA sense strand
gagcuugucagccggauug

SEQ ID NO: 1987993 - RNA, 19 nt, Homo sapiens
  misc_RNA (1)...(19): siRNA sense strand
aagaggauguggagaacuu

SEQ ID NO: 1987994 - RNA, 19 nt, Homo sapiens
  misc_RNA (1)...(19): siRNA sense strand
cgaggaacaucaccaggau

SEQ ID NO: 1987995 - RNA, 19 nt, Homo sapiens
  misc_RNA (1)...(19): siRNA sense strand
guagaauaccugcaguuug

SEQ ID NO: 1987996 - RNA, 19 nt, Homo sapiens
  misc_RNA (1)...(19): siRNA sense strand
gagcauucagccuguauau

SEQ ID NO: 1987997 - RNA, 19 nt, Homo sapiens
  misc_RNA (1)...(19): siRNA sense strand
cauacagacucaaguacau

SEQ ID NO: 1987998 - RNA, 19 nt, Homo sapiens
  misc_RNA (1)...(19): siRNA sense strand
uacagaaccuaccuacaau

SEQ ID NO: 1987999 - RNA, 19 nt, Homo sapiens
  misc_RNA (1)...(19): siRNA sense strand
uugaugagcagguacauaa

SEQ ID NO: 1988000 - RNA, 19 nt, Homo sapiens
  misc_RNA (1)...(19): siRNA sense strand
gaaggugaaggcacuggaa

SEQ ID NO: 1988001 - RNA, 19 nt, Homo sapiens
  misc_RNA (1)...(19): siRNA sense strand
gcacggaauaccagugaug

SEQ ID NO: 1988002 - RNA, 19 nt, Homo sapiens
  misc_RNA (1)...(19): siRNA sense strand
aaccaggaauccagaagaa

SEQ ID NO: 1988003 - RNA, 19 nt, Homo sapiens
  misc_RNA (1)...(19): siRNA sense strand
acacaguuccucugaagaa

SEQ ID NO: 1988004 - RNA, 19 nt, Homo sapiens
  misc_RNA (1)...(19): siRNA sense strand
ggguauguccagggaauua

SEQ ID NO: 1988005 - RNA, 19 nt, Homo sapiens
  misc_RNA (1)...(19): siRNA sense strand
gaacugaggaaguguagcu

SEQ ID NO: 1988006 - RNA, 19 nt, Homo sapiens
  misc_RNA (1)...(19): siRNA sense strand
ccaacuacaaggucauaaa

SEQ ID NO: 1988007 - RNA, 19 nt, Homo sapiens
  misc_RNA (1)...(19): siRNA sense strand
gaugaacugaggaagugua

SEQ ID NO: 1988008 - RNA, 19 nt, Homo sapiens
  misc_RNA (1)...(19): siRNA sense strand
caacuacaaggucauaaag

SEQ ID NO: 1988009 - RNA, 19 nt, Homo sapiens
  misc_RNA (1)...(19): siRNA sense strand
agacucaaguacauguuug

SEQ ID NO: 1988010 - RNA, 19 nt, Homo sapiens
  misc_RNA (1)...(19): siRNA sense strand
gcauacagacucaaguaca

SEQ ID NO: 1988011 - RNA, 19 nt, Homo sapiens
  misc_RNA (1)...(19): siRNA sense strand
ucaccaggauaccuacaga

SEQ ID NO: 1988012 - RNA, 19 nt, Homo sapiens
  misc_RNA (1)...(19): siRNA sense strand
cauuggcgaugaugaggaa

SEQ ID NO: 1988013 - RNA, 19 nt, Homo sapiens
  misc_RNA (1)...(19): siRNA sense strand
cuacagacagauucacauu

SEQ ID NO: 1988014 - RNA, 19 nt, Homo sapiens
  misc_RNA (1)...(19): siRNA sense strand
aaagaacgaucaaaaguca

SEQ ID NO: 1988015 - RNA, 19 nt, Homo sapiens
  misc_RNA (1)...(19): siRNA sense strand
ggacauuggcgaugaugag

SEQ ID NO: 1988016 - RNA, 19 nt, Homo sapiens
  misc_RNA (1)...(19): siRNA sense strand
uaagaaggccuccaguuuu

SEQ ID NO: 1988017 - RNA, 19 nt, Homo sapiens
  misc_RNA (1)...(19): siRNA sense strand
gaacggucccagucaacga

SEQ ID NO: 1988018 - RNA, 19 nt, Homo sapiens
  misc_RNA (1)...(19): siRNA sense strand
cgggcuaucucccagcaaa

SEQ ID NO: 1988019 - RNA, 19 nt, Homo sapiens
  misc_RNA (1)...(19): siRNA sense strand
cgaagaaauugggcugcuu

SEQ ID NO: 1988020 - RNA, 19 nt, Homo sapiens
  misc_RNA (1)...(19): siRNA sense strand
gaugagcagguacauaauc

SEQ ID NO: 1988021 - RNA, 19 nt, Homo sapiens
  misc_RNA (1)...(19): siRNA sense strand
ucaacacaguuccucugaa

SEQ ID NO: 1988022 - RNA, 19 nt, Homo sapiens
  misc_RNA (1)...(19): siRNA sense strand
caaccaggaauccagaaga

SEQ ID NO: 1988023 - RNA, 19 nt, Homo sapiens
  misc_RNA (1)...(19): siRNA sense strand
ugaacaguauuaugacucu

SEQ ID NO: 1988024 - RNA, 19 nt, Homo sapiens
  misc_RNA (1)...(19): siRNA sense strand
ggaauauuuuggcuucauu

SEQ ID NO: 1988025 - RNA, 19 nt, Homo sapiens
  misc_RNA (1)...(19): siRNA sense strand
uggaugaacaaccugcuua

SEQ ID NO: 1988026 - RNA, 19 nt, Homo sapiens
  misc_RNA (1)...(19): siRNA sense strand
gccagaacacugacuuaga

SEQ ID NO: 1988027 - RNA, 19 nt, Homo sapiens
  misc_RNA (1)...(19): siRNA sense strand
gugcagccuucuugaucaa

SEQ ID NO: 1988028 - RNA, 19 nt, Homo sapiens
  misc_RNA (1)...(19): siRNA sense strand
ggaugaacaaccugcuuau

SEQ ID NO: 1988029 - RNA, 19 nt, Homo sapiens
  misc_RNA (1)...(19): siRNA sense strand
ggagcauucagccuguaua

SEQ ID NO: 1988030 - RNA, 19 nt, Homo sapiens
  misc_RNA (1)...(19): siRNA sense strand
gaggaacaucaccaggaua

SEQ ID NO: 1988031 - RNA, 19 nt, Homo sapiens
  misc_RNA (1)...(19): siRNA sense strand
acuacaaggucauaaaguc

SEQ ID NO: 1988032 - RNA, 19 nt, Homo sapiens
  misc_RNA (1)...(19): siRNA sense strand
gcccagcuguccagaaacu

SEQ ID NO: 1988033 - RNA, 19 nt, Homo sapiens
  misc_RNA (1)...(19): siRNA sense strand
cagccagaacacugacuua

SEQ ID NO: 1988034 - RNA, 19 nt, Homo sapiens
  misc_RNA (1)...(19): siRNA sense strand
gagguacgagguagaauac

SEQ ID NO: 1988035 - RNA, 19 nt, Homo sapiens
  misc_RNA (1)...(19): siRNA sense strand
uggaagaggauguggagaa

SEQ ID NO: 1988036 - RNA, 19 nt, Homo sapiens
  misc_RNA (1)...(19): siRNA sense strand
guggguauguccagggaau

SEQ ID NO: 1988037 - RNA, 19 nt, Homo sapiens
  misc_RNA (1)...(19): siRNA sense strand
ggauaccuacagacagauu

SEQ ID NO: 1988038 - RNA, 19 nt, Homo sapiens
  misc_RNA (1)...(19): siRNA sense strand
caaugacuguccgggagaa

SEQ ID NO: 1988039 - RNA, 19 nt, Homo sapiens
  misc_RNA (1)...(19): siRNA sense strand
gaugaacaaccugcuuaug

SEQ ID NO: 1988040 - RNA, 19 nt, Homo sapiens
  misc_RNA (1)...(19): siRNA sense strand
gcacuggaagagcuuguca

SEQ ID NO: 1988041 - RNA, 19 nt, Homo sapiens
  misc_RNA (1)...(19): siRNA sense strand
acaguuccucugaagaaua

SEQ ID NO: 1988042 - RNA, 19 nt, Homo sapiens
  misc_RNA (1)...(19): siRNA sense strand
gagaacagcaagcaguuuu

SEQ ID NO: 1988043 - RNA, 19 nt, Homo sapiens
  misc_RNA (1)...(19): siRNA sense strand
gaacaucaccaggauaccu

SEQ ID NO: 1988044 - RNA, 19 nt, Homo sapiens
  misc_RNA (1)...(19): siRNA sense strand
acagaaccuaccuacaaua

SEQ ID NO: 1988045 - RNA, 19 nt, Homo sapiens
  misc_RNA (1)...(19): siRNA sense strand
ccggauugaugagcaggua

SEQ ID NO: 1988046 - RNA, 19 nt, Homo sapiens
  misc_RNA (1)...(19): siRNA sense strand
gaauccagaagaaggugaa

SEQ ID NO: 1988047 - RNA, 19 nt, Homo sapiens
  misc_RNA (1)...(19): siRNA sense strand
augcccagcuguccagaaa

SEQ ID NO: 1988048 - RNA, 19 nt, Homo sapiens
  misc_RNA (1)...(19): siRNA sense strand
cagacucaaguacauguuu

SEQ ID NO: 1988049 - RNA, 19 nt, Homo sapiens
  misc_RNA (1)...(19): siRNA sense strand
ggaagaggagcgcuaagcu

SEQ ID NO: 1988050 - RNA, 19 nt, Homo sapiens
  misc_RNA (1)...(19): siRNA sense strand
cagugaugcuugggacauu

SEQ ID NO: 1988051 - RNA, 19 nt, Homo sapiens
  misc_RNA (1)...(19): siRNA sense strand
gaagcgggaggaauauuuu

SEQ ID NO: 1988052 - RNA, 19 nt, Homo sapiens
  misc_RNA (1)...(19): siRNA sense strand
ucauaaaguccagcaguga

SEQ ID NO: 1988053 - RNA, 19 nt, Homo sapiens
  misc_RNA (1)...(19): siRNA sense strand
aauaagaaggccuccaguu

SEQ ID NO: 1988054 - RNA, 19 nt, Homo sapiens
  misc_RNA (1)...(19): siRNA sense strand
ccaggauaacuacaccuuu

SEQ ID NO: 1988055 - RNA, 19 nt, Homo sapiens
  misc_RNA (1)...(19): siRNA sense strand
uauuaugacucucgaaacg

SEQ ID NO: 1988056 - RNA, 19 nt, Homo sapiens
  misc_RNA (1)...(19): siRNA sense strand
acacugagaggaggaaguu

SEQ ID NO: 1988057 - RNA, 19 nt, Homo sapiens
  misc_RNA (1)...(19): siRNA sense strand
ggacuaaggacccgaacug

SEQ ID NO: 1988058 - RNA, 19 nt, Homo sapiens
  misc_RNA (1)...(19): siRNA sense strand
ccagaucccagcuguguga

SEQ ID NO: 1988059 - RNA, 19 nt, Homo sapiens
  misc_RNA (1)...(19): siRNA sense strand
cuaaggacccgaacugcaa

SEQ ID NO: 1988060 - RNA, 19 nt, Homo sapiens
  misc_RNA (1)...(19): siRNA sense strand
ggaccaagcccagcauuuu

SEQ ID NO: 1988061 - RNA, 19 nt, Homo sapiens
  misc_RNA (1)...(19): siRNA sense strand
gguggacgcugcugaagcu

SEQ ID NO: 1988062 - RNA, 19 nt, Homo sapiens
  misc_RNA (1)...(19): siRNA sense strand
gaccaagcccagcauuuua

SEQ ID NO: 1988063 - RNA, 19 nt, Homo sapiens
  misc_RNA (1)...(19): siRNA sense strand
gggaccaagcccagcauuu

SEQ ID NO: 1988064 - RNA, 19 nt, Homo sapiens
  misc_RNA (1)...(19): siRNA sense strand
ggccugggaaguaggacua

SEQ ID NO: 1988065 - RNA, 19 nt, Homo sapiens
  misc_RNA (1)...(19): siRNA sense strand
cagacgaggcgcugaccuu

SEQ ID NO: 1988066 - RNA, 19 nt, Homo sapiens
  misc_RNA (1)...(19): siRNA sense strand
gaaaguaucuuaacugguu

SEQ ID NO: 1988067 - RNA, 19 nt, Homo sapiens
  misc_RNA (1)...(19): siRNA sense strand
gaaacgaaccagaccaaua

SEQ ID NO: 1988068 - RNA, 19 nt, Homo sapiens
  misc_RNA (1)...(19): siRNA sense strand
aaacggaggucguauaaug

SEQ ID NO: 1988069 - RNA, 19 nt, Homo sapiens
  misc_RNA (1)...(19): siRNA sense strand
gggaacagcuggcauuuca

SEQ ID NO: 1988070 - RNA, 19 nt, Homo sapiens
  misc_RNA (1)...(19): siRNA sense strand
ggaaucagguggagcaugu

SEQ ID NO: 1988071 - RNA, 19 nt, Homo sapiens
  misc_RNA (1)...(19): siRNA sense strand
ggagacuggucacugcuua

SEQ ID NO: 1988072 - RNA, 19 nt, Homo sapiens
  misc_RNA (1)...(19): siRNA sense strand
aaacgaaccagaccaauaa

SEQ ID NO: 1988073 - RNA, 19 nt, Homo sapiens
  misc_RNA (1)...(19): siRNA sense strand
ggacuuggauuuccucuac

SEQ ID NO: 1988074 - RNA, 19 nt, Homo sapiens
  misc_RNA (1)...(19): siRNA sense strand
uggaggagcugguucauga

SEQ ID NO: 1988075 - RNA, 19 nt, Homo sapiens
  misc_RNA (1)...(19): siRNA sense strand
ccaaagggauuaggacuug

SEQ ID NO: 1988076 - RNA, 19 nt, Homo sapiens
  misc_RNA (1)...(19): siRNA sense strand
gcaaacaagcaugcauuua

SEQ ID NO: 1988077 - RNA, 19 nt, Homo sapiens
  misc_RNA (1)...(19): siRNA sense strand
ggaagauccuacugagcua

SEQ ID NO: 1988078 - RNA, 19 nt, Homo sapiens
  misc_RNA (1)...(19): siRNA sense strand
cuaccaguaucaagaauuu

SEQ ID NO: 1988079 - RNA, 19 nt, Homo sapiens
  misc_RNA (1)...(19): siRNA sense strand
gaaaccgaaugcuucagaa

SEQ ID NO: 1988080 - RNA, 19 nt, Homo sapiens
  misc_RNA (1)...(19): siRNA sense strand
gaagacaaggugaugauga

SEQ ID NO: 1988081 - RNA, 19 nt, Homo sapiens
  misc_RNA (1)...(19): siRNA sense strand
ugaaagaggacacaagaaa

SEQ ID NO: 1988082 - RNA, 19 nt, Homo sapiens
  misc_RNA (1)...(19): siRNA sense strand
gaaccaagcaaggacuaua

SEQ ID NO: 1988083 - RNA, 19 nt, Homo sapiens
  misc_RNA (1)...(19): siRNA sense strand
gggauuaggacuuggauuu

SEQ ID NO: 1988084 - RNA, 19 nt, Homo sapiens
  misc_RNA (1)...(19): siRNA sense strand
ggacauggacagugauaga

SEQ ID NO: 1988085 - RNA, 19 nt, Homo sapiens
  misc_RNA (1)...(19): siRNA sense strand
aauccaagaugaaggagua

SEQ ID NO: 1988086 - RNA, 19 nt, Homo sapiens
  misc_RNA (1)...(19): siRNA sense strand
caaacaagcaugcauuuag

SEQ ID NO: 1988087 - RNA, 19 nt, Homo sapiens
  misc_RNA (1)...(19): siRNA sense strand
ggagauaucaaacggagaa

SEQ ID NO: 1988088 - RNA, 19 nt, Homo sapiens
  misc_RNA (1)...(19): siRNA sense strand
ggacaauguugggaauaga

SEQ ID NO: 1988089 - RNA, 19 nt, Homo sapiens
  misc_RNA (1)...(19): siRNA sense strand
ugauagagccuaccaguau

SEQ ID NO: 1988090 - RNA, 19 nt, Homo sapiens
  misc_RNA (1)...(19): siRNA sense strand
gaccaaauguuaguagcaa

SEQ ID NO: 1988091 - RNA, 19 nt, Homo sapiens
  misc_RNA (1)...(19): siRNA sense strand
gauaucaaacggagaagaa

SEQ ID NO: 1988092 - RNA, 19 nt, Homo sapiens
  misc_RNA (1)...(19): siRNA sense strand
cagaagagguuuccaagcu

SEQ ID NO: 1988093 - RNA, 19 nt, Homo sapiens
  misc_RNA (1)...(19): siRNA sense strand
gaaaacggaggucguauaa

SEQ ID NO: 1988094 - RNA, 19 nt, Homo sapiens
  misc_RNA (1)...(19): siRNA sense strand
ggaaaccgaaugcuucaga

SEQ ID NO: 1988095 - RNA, 19 nt, Homo sapiens
  misc_RNA (1)...(19): siRNA sense strand
gcagaggccaaagggauua

SEQ ID NO: 1988096 - RNA, 19 nt, Homo sapiens
  misc_RNA (1)...(19): siRNA sense strand
cgagguggauuugcugaaa

SEQ ID NO: 1988097 - RNA, 19 nt, Homo sapiens
  misc_RNA (1)...(19): siRNA sense strand
agaagagguuuccaagcua

SEQ ID NO: 1988098 - RNA, 19 nt, Homo sapiens
  misc_RNA (1)...(19): siRNA sense strand
gaacagcuggcauuucagu

SEQ ID NO: 1988099 - RNA, 19 nt, Homo sapiens
  misc_RNA (1)...(19): siRNA sense strand
cacaggacaucucuaacaa

SEQ ID NO: 1988100 - RNA, 19 nt, Homo sapiens
  misc_RNA (1)...(19): siRNA sense strand
uaccagauccugucuuuga

SEQ ID NO: 1988101 - RNA, 19 nt, Homo sapiens
  misc_RNA (1)...(19): siRNA sense strand
agaccauucucgaaguaua

SEQ ID NO: 1988102 - RNA, 19 nt, Homo sapiens
  misc_RNA (1)...(19): siRNA sense strand
aaacaagcaugcauuuagg

SEQ ID NO: 1988103 - RNA, 19 nt, Homo sapiens
  misc_RNA (1)...(19): siRNA sense strand
gacuccaacuucaauggua

SEQ ID NO: 1988104 - RNA, 19 nt, Homo sapiens
  misc_RNA (1)...(19): siRNA sense strand
aagacaaggugaugaugaa

SEQ ID NO: 1988105 - RNA, 19 nt, Homo sapiens
  misc_RNA (1)...(19): siRNA sense strand
caaggacuauagagagaau

SEQ ID NO: 1988106 - RNA, 19 nt, Homo sapiens
  misc_RNA (1)...(19): siRNA sense strand
guagagaucaggacaugga

SEQ ID NO: 1988107 - RNA, 19 nt, Homo sapiens
  misc_RNA (1)...(19): siRNA sense strand
gcacugaugcuggauuguu

SEQ ID NO: 1988108 - RNA, 19 nt, Homo sapiens
  misc_RNA (1)...(19): siRNA sense strand
gcucaugagugaaagugau

SEQ ID NO: 1988109 - RNA, 19 nt, Homo sapiens
  misc_RNA (1)...(19): siRNA sense strand
ugaaggcucugauucuagu

SEQ ID NO: 1988110 - RNA, 19 nt, Homo sapiens
  misc_RNA (1)...(19): siRNA sense strand
gcugaaagaggacacaaga

SEQ ID NO: 1988111 - RNA, 19 nt, Homo sapiens
  misc_RNA (1)...(19): siRNA sense strand
gagagauaaucgagcugaa

SEQ ID NO: 1988112 - RNA, 19 nt, Homo sapiens
  misc_RNA (1)...(19): siRNA sense strand
uguaccagauccugucuuu

SEQ ID NO: 1988113 - RNA, 19 nt, Homo sapiens
  misc_RNA (1)...(19): siRNA sense strand
ugacucugaugaccaaaug

SEQ ID NO: 1988114 - RNA, 19 nt, Homo sapiens
  misc_RNA (1)...(19): siRNA sense strand
gagccuaccaguaucaaga

SEQ ID NO: 1988115 - RNA, 19 nt, Homo sapiens
  misc_RNA (1)...(19): siRNA sense strand
ccacaggacaucucuaaca

SEQ ID NO: 1988116 - RNA, 19 nt, Homo sapiens
  misc_RNA (1)...(19): siRNA sense strand
uaauaauguucgagggaaa

SEQ ID NO: 1988117 - RNA, 19 nt, Homo sapiens
  misc_RNA (1)...(19): siRNA sense strand
caggacaucucuaacaaac

SEQ ID NO: 1988118 - RNA, 19 nt, Homo sapiens
  misc_RNA (1)...(19): siRNA sense strand
gaauuuaccaagaacaaag

SEQ ID NO: 1988119 - RNA, 19 nt, Homo sapiens
  misc_RNA (1)...(19): siRNA sense strand
ggagcugguucaugaccuu

SEQ ID NO: 1988120 - RNA, 19 nt, Homo sapiens
  misc_RNA (1)...(19): siRNA sense strand
caagaugaaggaguaguuu

SEQ ID NO: 1988121 - RNA, 19 nt, Homo sapiens
  misc_RNA (1)...(19): siRNA sense strand
gaaagaggacacaagaaaa

SEQ ID NO: 1988122 - RNA, 19 nt, Homo sapiens
  misc_RNA (1)...(19): siRNA sense strand
cacugaugcuggauuguuu

SEQ ID NO: 1988123 - RNA, 19 nt, Homo sapiens
  misc_RNA (1)...(19): siRNA sense strand
caagcaaggacuauagaga

SEQ ID NO: 1988124 - RNA, 19 nt, Homo sapiens
  misc_RNA (1)...(19): siRNA sense strand
ucuaacaaacggacaauga

SEQ ID NO: 1988125 - RNA, 19 nt, Homo sapiens
  misc_RNA (1)...(19): siRNA sense strand
cagcuggcauuucaguaga

SEQ ID NO: 1988126 - RNA, 19 nt, Homo sapiens
  misc_RNA (1)...(19): siRNA sense strand
ggcaaacaagcaugcauuu

SEQ ID NO: 1988127 - RNA, 19 nt, Homo sapiens
  misc_RNA (1)...(19): siRNA sense strand
guugugcccuggugggaaa

SEQ ID NO: 1988128 - RNA, 19 nt, Homo sapiens
  misc_RNA (1)...(19): siRNA sense strand
gaaacgccaggcaaggaaa

SEQ ID NO: 1988129 - RNA, 19 nt, Homo sapiens
  misc_RNA (1)...(19): siRNA sense strand
gaugcuggauuguuuacca

SEQ ID NO: 1988130 - RNA, 19 nt, Homo sapiens
  misc_RNA (1)...(19): siRNA sense strand
aaagaccucuauggcauga

SEQ ID NO: 1988131 - RNA, 19 nt, Homo sapiens
  misc_RNA (1)...(19): siRNA sense strand
gaaaauaaucagacaagga

SEQ ID NO: 1988132 - RNA, 19 nt, Homo sapiens
  misc_RNA (1)...(19): siRNA sense strand
gcaaagcgcaggccgucau

SEQ ID NO: 1988133 - RNA, 19 nt, Homo sapiens
  misc_RNA (1)...(19): siRNA sense strand
accgaaugcuucagaauau

SEQ ID NO: 1988134 - RNA, 19 nt, Homo sapiens
  misc_RNA (1)...(19): siRNA sense strand
gagauaaucgagcugaaag

SEQ ID NO: 1988135 - RNA, 19 nt, Homo sapiens
  misc_RNA (1)...(19): siRNA sense strand
ggucguauaaugugcauca

SEQ ID NO: 1988136 - RNA, 19 nt, Homo sapiens
  misc_RNA (1)...(19): siRNA sense strand
aaccgaaugcuucagaaua

SEQ ID NO: 1988137 - RNA, 19 nt, Homo sapiens
  misc_RNA (1)...(19): siRNA sense strand
cgaaccagaccaauaagga

SEQ ID NO: 1988138 - RNA, 19 nt, Homo sapiens
  misc_RNA (1)...(19): siRNA sense strand
agugaaggcucugauucua

SEQ ID NO: 1988139 - RNA, 19 nt, Homo sapiens
  misc_RNA (1)...(19): siRNA sense strand
gacaauguugggaauagaa

SEQ ID NO: 1988140 - RNA, 19 nt, Homo sapiens
  misc_RNA (1)...(19): siRNA sense strand
uaagugaaggcucugauuc

SEQ ID NO: 1988141 - RNA, 19 nt, Homo sapiens
  misc_RNA (1)...(19): siRNA sense strand
gggcuaggacagagcauga

SEQ ID NO: 1988142 - RNA, 19 nt, Homo sapiens
  misc_RNA (1)...(19): siRNA sense strand
aauggaaugugaagagcaa

SEQ ID NO: 1988143 - RNA, 19 nt, Homo sapiens
  misc_RNA (1)...(19): siRNA sense strand
gcaggaggagaaagguaaa

SEQ ID NO: 1988144 - RNA, 19 nt, Homo sapiens
  misc_RNA (1)...(19): siRNA sense strand
gaccuugucucagcauugg

SEQ ID NO: 1988145 - RNA, 19 nt, Homo sapiens
  misc_RNA (1)...(19): siRNA sense strand
aggcucugauucuaguuua

SEQ ID NO: 1988146 - RNA, 19 nt, Homo sapiens
  misc_RNA (1)...(19): siRNA sense strand
gcaaggacuauagagagaa

SEQ ID NO: 1988147 - RNA, 19 nt, Homo sapiens
  misc_RNA (1)...(19): siRNA sense strand
ccaagaugaaggaguaguu

SEQ ID NO: 1988148 - RNA, 19 nt, Homo sapiens
  misc_RNA (1)...(19): siRNA sense strand
gugauagagccuaccagua

SEQ ID NO: 1988149 - RNA, 19 nt, Homo sapiens
  misc_RNA (1)...(19): siRNA sense strand
gaccauucucgaaguauau

SEQ ID NO: 1988150 - RNA, 19 nt, Homo sapiens
  misc_RNA (1)...(19): siRNA sense strand
cagugacucugaugaccaa

SEQ ID NO: 1988151 - RNA, 19 nt, Homo sapiens
  misc_RNA (1)...(19): siRNA sense strand
gguggagcaugugguauca

SEQ ID NO: 1988152 - RNA, 19 nt, Homo sapiens
  misc_RNA (1)...(19): siRNA sense strand
ucaagaauuuaccaagaac

SEQ ID NO: 1988153 - RNA, 19 nt, Homo sapiens
  misc_RNA (1)...(19): siRNA sense strand
gaccuacuacugcaggauu

SEQ ID NO: 1988154 - RNA, 19 nt, Homo sapiens
  misc_RNA (1)...(19): siRNA sense strand
ucagucgccuucauggaau

SEQ ID NO: 1988155 - RNA, 19 nt, Homo sapiens
  misc_RNA (1)...(19): siRNA sense strand
gggaagacaaggugaugau

SEQ ID NO: 1988156 - RNA, 19 nt, Homo sapiens
  misc_RNA (1)...(19): siRNA sense strand
ccagaccaauaaggacaaa

SEQ ID NO: 1988157 - RNA, 19 nt, Homo sapiens
  misc_RNA (1)...(19): siRNA sense strand
gcaagcucgagguggauuu

SEQ ID NO: 1988158 - RNA, 19 nt, Homo sapiens
  misc_RNA (1)...(19): siRNA sense strand
ggauuaggacuuggauuuc

SEQ ID NO: 1988159 - RNA, 19 nt, Homo sapiens
  misc_RNA (1)...(19): siRNA sense strand
gacagagcaugaccagcau

SEQ ID NO: 1988160 - RNA, 19 nt, Homo sapiens
  misc_RNA (1)...(19): siRNA sense strand
gagggacuccaacuucaau

SEQ ID NO: 1988161 - RNA, 19 nt, Homo sapiens
  misc_RNA (1)...(19): siRNA sense strand
ucagguggagcauguggua

SEQ ID NO: 1988162 - RNA, 19 nt, Homo sapiens
  misc_RNA (1)...(19): siRNA sense strand
ggaagacaaggugaugaug

SEQ ID NO: 1988163 - RNA, 19 nt, Homo sapiens
  misc_RNA (1)...(19): siRNA sense strand
gauaaucgagcugaaagag

SEQ ID NO: 1988164 - RNA, 19 nt, Homo sapiens
  misc_RNA (1)...(19): siRNA sense strand
guaacaagagaaugguuca

SEQ ID NO: 1988165 - RNA, 19 nt, Homo sapiens
  misc_RNA (1)...(19): siRNA sense strand
ccagauccugucuuugaaa

SEQ ID NO: 1988166 - RNA, 19 nt, Homo sapiens
  misc_RNA (1)...(19): siRNA sense strand
ccgagaggcacucagcuua

SEQ ID NO: 1988167 - RNA, 19 nt, Homo sapiens
  misc_RNA (1)...(19): siRNA sense strand
cagcuuagccagguggaaa

SEQ ID NO: 1988168 - RNA, 19 nt, Homo sapiens
  misc_RNA (1)...(19): siRNA sense strand
gagaggcacucagcuuagc

SEQ ID NO: 1988169 - RNA, 19 nt, Homo sapiens
  misc_RNA (1)...(19): siRNA sense strand
gcgcgucaucgacuacauu

SEQ ID NO: 1988170 - RNA, 19 nt, Homo sapiens
  misc_RNA (1)...(19): siRNA sense strand
cugaggagccgcugagcuu

SEQ ID NO: 1988171 - RNA, 19 nt, Homo sapiens
  misc_RNA (1)...(19): siRNA sense strand
cgagaggcacucagcuuag

SEQ ID NO: 1988172 - RNA, 19 nt, Homo sapiens
  misc_RNA (1)...(19): siRNA sense strand
uacagcgcgucaucgacua

SEQ ID NO: 1988173 - RNA, 19 nt, Homo sapiens
  misc_RNA (1)...(19): siRNA sense strand
agaaaagccuuacccauuu

SEQ ID NO: 1988174 - RNA, 19 nt, Homo sapiens
  misc_RNA (1)...(19): siRNA sense strand
agaccaagacuccaaguga

SEQ ID NO: 1988175 - RNA, 19 nt, Homo sapiens
  misc_RNA (1)...(19): siRNA sense strand
gagacucacugccagaaaa

SEQ ID NO: 1988176 - RNA, 19 nt, Homo sapiens
  misc_RNA (1)...(19): siRNA sense strand
gggagccguucaugucaga

SEQ ID NO: 1988177 - RNA, 19 nt, Homo sapiens
  misc_RNA (1)...(19): siRNA sense strand
cagaaaagccuuacccauu

SEQ ID NO: 1988178 - RNA, 19 nt, Homo sapiens
  misc_RNA (1)...(19): siRNA sense strand
gcagagagggagccguuca

SEQ ID NO: 1988179 - RNA, 19 nt, Homo sapiens
  misc_RNA (1)...(19): siRNA sense strand
gagagggagccguucaugu

SEQ ID NO: 1988180 - RNA, 19 nt, Homo sapiens
  misc_RNA (1)...(19): siRNA sense strand
agaaagaccaagacuccaa

SEQ ID NO: 1988181 - RNA, 19 nt, Homo sapiens
  misc_RNA (1)...(19): siRNA sense strand
gagggagccguucauguca

SEQ ID NO: 1988182 - RNA, 19 nt, Homo sapiens
  misc_RNA (1)...(19): siRNA sense strand
caacugcuugcacugauca

SEQ ID NO: 1988183 - RNA, 19 nt, Homo sapiens
  misc_RNA (1)...(19): siRNA sense strand
agagggagccguucauguc

SEQ ID NO: 1988184 - RNA, 19 nt, Homo sapiens
  misc_RNA (1)...(19): siRNA sense strand
cugcuugcacugaucauuu

SEQ ID NO: 1988185 - RNA, 19 nt, Homo sapiens
  misc_RNA (1)...(19): siRNA sense strand
gagccguucaugucagaga

SEQ ID NO: 1988186 - RNA, 19 nt, Homo sapiens
  misc_RNA (1)...(19): siRNA sense strand
ggcaaagacucccuaaaua

SEQ ID NO: 1988187 - RNA, 19 nt, Homo sapiens
  misc_RNA (1)...(19): siRNA sense strand
gcagauagaucacuacaag

SEQ ID NO: 1988188 - RNA, 19 nt, Homo sapiens
  misc_RNA (1)...(19): siRNA sense strand
gcaaagacucccuaaauau

SEQ ID NO: 1988189 - RNA, 19 nt, Homo sapiens
  misc_RNA (1)...(19): siRNA sense strand
gcaaguugaugagcagaua

SEQ ID NO: 1988190 - RNA, 19 nt, Homo sapiens
  misc_RNA (1)...(19): siRNA sense strand
caaagacucccuaaauauu

SEQ ID NO: 1988191 - RNA, 19 nt, Homo sapiens
  misc_RNA (1)...(19): siRNA sense strand
gaugaaagcggucaagaau

SEQ ID NO: 1988192 - RNA, 19 nt, Homo sapiens
  misc_RNA (1)...(19): siRNA sense strand
gaagcuauguaagaaagaa

SEQ ID NO: 1988193 - RNA, 19 nt, Homo sapiens
  misc_RNA (1)...(19): siRNA sense strand
caaggaaagccaagacaaa

SEQ ID NO: 1988194 - RNA, 19 nt, Homo sapiens
  misc_RNA (1)...(19): siRNA sense strand
cuacagggaugucaugcuu

SEQ ID NO: 1988195 - RNA, 19 nt, Homo sapiens
  misc_RNA (1)...(19): siRNA sense strand
gaaaaggcauucaaaacau

SEQ ID NO: 1988196 - RNA, 19 nt, Homo sapiens
  misc_RNA (1)...(19): siRNA sense strand
aggaaacacugaaggauga

SEQ ID NO: 1988197 - RNA, 19 nt, Homo sapiens
  misc_RNA (1)...(19): siRNA sense strand
ggaaagccaagacaaacuu

SEQ ID NO: 1988198 - RNA, 19 nt, Homo sapiens
  misc_RNA (1)...(19): siRNA sense strand
ggucaagaauccagaacau

SEQ ID NO: 1988199 - RNA, 19 nt, Homo sapiens
  misc_RNA (1)...(19): siRNA sense strand
gcaaggaaacacugaagga

SEQ ID NO: 1988200 - RNA, 19 nt, Homo sapiens
  misc_RNA (1)...(19): siRNA sense strand
uuggcaagcugcauucaua

SEQ ID NO: 1988201 - RNA, 19 nt, Homo sapiens
  misc_RNA (1)...(19): siRNA sense strand
guacggaccugugcagaag

SEQ ID NO: 1988202 - RNA, 19 nt, Homo sapiens
  misc_RNA (1)...(19): siRNA sense strand
caagaauccagaacaugua

SEQ ID NO: 1988203 - RNA, 19 nt, Homo sapiens
  misc_RNA (1)...(19): siRNA sense strand
ggaugaaagcggucaagaa

SEQ ID NO: 1988204 - RNA, 19 nt, Homo sapiens
  misc_RNA (1)...(19): siRNA sense strand
ugaaagcggucaagaaucc

SEQ ID NO: 1988205 - RNA, 19 nt, Homo sapiens
  misc_RNA (1)...(19): siRNA sense strand
acagggaugucaugcuuga

SEQ ID NO: 1988206 - RNA, 19 nt, Homo sapiens
  misc_RNA (1)...(19): siRNA sense strand
ggacguguuuguggacuuc

SEQ ID NO: 1988207 - RNA, 19 nt, Homo sapiens
  misc_RNA (1)...(19): siRNA sense strand
ggaaaaggcauucaaaaca

SEQ ID NO: 1988208 - RNA, 19 nt, Homo sapiens
  misc_RNA (1)...(19): siRNA sense strand
gaauccagaacauguagaa

SEQ ID NO: 1988209 - RNA, 19 nt, Homo sapiens
  misc_RNA (1)...(19): siRNA sense strand
ucaagaauccagaacaugu

SEQ ID NO: 1988210 - RNA, 19 nt, Homo sapiens
  misc_RNA (1)...(19): siRNA sense strand
auagaucacuacaaggaaa

SEQ ID NO: 1988211 - RNA, 19 nt, Homo sapiens
  misc_RNA (1)...(19): siRNA sense strand
gggaugucaugcuugagaa

SEQ ID NO: 1988212 - RNA, 19 nt, Homo sapiens
  misc_RNA (1)...(19): siRNA sense strand
aggcaaagacucccuaaau

SEQ ID NO: 1988213 - RNA, 19 nt, Homo sapiens
  misc_RNA (1)...(19): siRNA sense strand
gauagaucacuacaaggaa

SEQ ID NO: 1988214 - RNA, 19 nt, Homo sapiens
  misc_RNA (1)...(19): siRNA sense strand
gaaagccaagacaaacuuc

SEQ ID NO: 1988215 - RNA, 19 nt, Homo sapiens
  misc_RNA (1)...(19): siRNA sense strand
agauagaucacuacaagga

SEQ ID NO: 1988216 - RNA, 19 nt, Homo sapiens
  misc_RNA (1)...(19): siRNA sense strand
gguacggaccugugcagaa

SEQ ID NO: 1988217 - RNA, 19 nt, Homo sapiens
  misc_RNA (1)...(19): siRNA sense strand
gaaacacugaaggaugaaa

SEQ ID NO: 1988218 - RNA, 19 nt, Homo sapiens
  misc_RNA (1)...(19): siRNA sense strand
gcauucauaggcaaggaaa

SEQ ID NO: 1988219 - RNA, 19 nt, Homo sapiens
  misc_RNA (1)...(19): siRNA sense strand
gagcagauagaucacuaca

SEQ ID NO: 1988220 - RNA, 19 nt, Homo sapiens
  misc_RNA (1)...(19): siRNA sense strand
caggaaucauugaccuuca

SEQ ID NO: 1988221 - RNA, 19 nt, Homo sapiens
  misc_RNA (1)...(19): siRNA sense strand
caaggaaacacugaaggau

SEQ ID NO: 1988222 - RNA, 19 nt, Homo sapiens
  misc_RNA (1)...(19): siRNA sense strand
ggccaugucccaggaauca

SEQ ID NO: 1988223 - RNA, 19 nt, Homo sapiens
  misc_RNA (1)...(19): siRNA sense strand
ccaugucccaggaaucauu

SEQ ID NO: 1988224 - RNA, 19 nt, Homo sapiens
  misc_RNA (1)...(19): siRNA sense strand
augagcagauagaucacua

SEQ ID NO: 1988225 - RNA, 19 nt, Homo sapiens
  misc_RNA (1)...(19): siRNA sense strand
uaaggcaaagacucccuaa

SEQ ID NO: 1988226 - RNA, 19 nt, Homo sapiens
  misc_RNA (1)...(19): siRNA sense strand
acaaggaaagccaagacaa

SEQ ID NO: 1988227 - RNA, 19 nt, Homo sapiens
  misc_RNA (1)...(19): siRNA sense strand
ugcgaagccugaugugauc

SEQ ID NO: 1988228 - RNA, 19 nt, Homo sapiens
  misc_RNA (1)...(19): siRNA sense strand
ggaaacacugaaggaugaa

SEQ ID NO: 1988229 - RNA, 19 nt, Homo sapiens
  misc_RNA (1)...(19): siRNA sense strand
gcuauguaagaaagaaaga

SEQ ID NO: 1988230 - RNA, 19 nt, Homo sapiens
  misc_RNA (1)...(19): siRNA sense strand
ggccagagcuuuacacagu

SEQ ID NO: 1988231 - RNA, 19 nt, Homo sapiens
  misc_RNA (1)...(19): siRNA sense strand
gcggugagcuggucugaga

SEQ ID NO: 1988232 - RNA, 19 nt, Homo sapiens
  misc_RNA (1)...(19): siRNA sense strand
ggaggagccugaggaagaa

SEQ ID NO: 1988233 - RNA, 19 nt, Homo sapiens
  misc_RNA (1)...(19): siRNA sense strand
ggaagagaaugggcuguug

SEQ ID NO: 1988234 - RNA, 19 nt, Homo sapiens
  misc_RNA (1)...(19): siRNA sense strand
ucaacucuauccuugcuuu

SEQ ID NO: 1988235 - RNA, 19 nt, Homo sapiens
  misc_RNA (1)...(19): siRNA sense strand
gaguuccgcugccaagugu

SEQ ID NO: 1988236 - RNA, 19 nt, Homo sapiens
  misc_RNA (1)...(19): siRNA sense strand
gcucaaguaucaccuacag

SEQ ID NO: 1988237 - RNA, 19 nt, Homo sapiens
  misc_RNA (1)...(19): siRNA sense strand
gagcccugguuccuuaaga

SEQ ID NO: 1988238 - RNA, 19 nt, Homo sapiens
  misc_RNA (1)...(19): siRNA sense strand
cggaggagccugaggaaga

SEQ ID NO: 1988239 - RNA, 19 nt, Homo sapiens
  misc_RNA (1)...(19): siRNA sense strand
ccggcucgcucaaguauca

SEQ ID NO: 1988240 - RNA, 19 nt, Homo sapiens
  misc_RNA (1)...(19): siRNA sense strand
ucaagggccacaugcguaa

SEQ ID NO: 1988241 - RNA, 19 nt, Homo sapiens
  misc_RNA (1)...(19): siRNA sense strand
ggaguuccgcugccaagug

SEQ ID NO: 1988242 - RNA, 19 nt, Homo sapiens
  misc_RNA (1)...(19): siRNA sense strand
gcucauggccuugcaccuu

SEQ ID NO: 1988243 - RNA, 19 nt, Homo sapiens
  misc_RNA (1)...(19): siRNA sense strand
cuacugcaaaggcaaguuu

SEQ ID NO: 1988244 - RNA, 19 nt, Homo sapiens
  misc_RNA (1)...(19): siRNA sense strand
cagcacaucaccucaaagu

SEQ ID NO: 1988245 - RNA, 19 nt, Homo sapiens
  misc_RNA (1)...(19): siRNA sense strand
acacagucuugguuucuca

SEQ ID NO: 1988246 - RNA, 19 nt, Homo sapiens
  misc_RNA (1)...(19): siRNA sense strand
cgaguaccaucaggagaga

SEQ ID NO: 1988247 - RNA, 19 nt, Homo sapiens
  misc_RNA (1)...(19): siRNA sense strand
gcucagcacaucaccucaa

SEQ ID NO: 1988248 - RNA, 19 nt, Homo sapiens
  misc_RNA (1)...(19): siRNA sense strand
ccacaugcguaagcacaag

SEQ ID NO: 1988249 - RNA, 19 nt, Homo sapiens
  misc_RNA (1)...(19): siRNA sense strand
uuaagaaccacaugaaggu

SEQ ID NO: 1988250 - RNA, 19 nt, Homo sapiens
  misc_RNA (1)...(19): siRNA sense strand
ccagagcuuuacacagucu

SEQ ID NO: 1988251 - RNA, 19 nt, Homo sapiens
  misc_RNA (1)...(19): siRNA sense strand
cucagcacaucaccucaaa

SEQ ID NO: 1988252 - RNA, 19 nt, Homo sapiens
  misc_RNA (1)...(19): siRNA sense strand
gccuguugcuggaguugga

SEQ ID NO: 1988253 - RNA, 19 nt, Homo sapiens
  misc_RNA (1)...(19): siRNA sense strand
gcuuuacacagucuugguu

SEQ ID NO: 1988254 - RNA, 19 nt, Homo sapiens
  misc_RNA (1)...(19): siRNA sense strand
gaagauaccuccuuagaag

SEQ ID NO: 1988255 - RNA, 19 nt, Homo sapiens
  misc_RNA (1)...(19): siRNA sense strand
ggaucacucuuuaucauua

SEQ ID NO: 1988256 - RNA, 19 nt, Homo sapiens
  misc_RNA (1)...(19): siRNA sense strand
ggaugaagaugaagacaaa

SEQ ID NO: 1988257 - RNA, 19 nt, Homo sapiens
  misc_RNA (1)...(19): siRNA sense strand
gaagauggguuggaagaaa

SEQ ID NO: 1988258 - RNA, 19 nt, Homo sapiens
  misc_RNA (1)...(19): siRNA sense strand
gcacugguuucuauuauga

SEQ ID NO: 1988259 - RNA, 19 nt, Homo sapiens
  misc_RNA (1)...(19): siRNA sense strand
gcauggagaugaagucaaa

SEQ ID NO: 1988260 - RNA, 19 nt, Homo sapiens
  misc_RNA (1)...(19): siRNA sense strand
ccacagcacugguuucuau

SEQ ID NO: 1988261 - RNA, 19 nt, Homo sapiens
  misc_RNA (1)...(19): siRNA sense strand
cagauaggaucacucuuua

SEQ ID NO: 1988262 - RNA, 19 nt, Homo sapiens
  misc_RNA (1)...(19): siRNA sense strand
gcagauaggaucacucuuu

SEQ ID NO: 1988263 - RNA, 19 nt, Homo sapiens
  misc_RNA (1)...(19): siRNA sense strand
gcacaauuguuaauggaaa

SEQ ID NO: 1988264 - RNA, 19 nt, Homo sapiens
  misc_RNA (1)...(19): siRNA sense strand
caacaaaggucggaagaug

SEQ ID NO: 1988265 - RNA, 19 nt, Homo sapiens
  misc_RNA (1)...(19): siRNA sense strand
gaguagauuugcaaccuua

SEQ ID NO: 1988266 - RNA, 19 nt, Homo sapiens
  misc_RNA (1)...(19): siRNA sense strand
ccacuggaauuuauuacua

SEQ ID NO: 1988267 - RNA, 19 nt, Homo sapiens
  misc_RNA (1)...(19): siRNA sense strand
gaacauacaagcugcaaug

SEQ ID NO: 1988268 - RNA, 19 nt, Homo sapiens
  misc_RNA (1)...(19): siRNA sense strand
cgagagcgguuuacugaaa

SEQ ID NO: 1988269 - RNA, 19 nt, Homo sapiens
  misc_RNA (1)...(19): siRNA sense strand
caauguaacugcagaagau

SEQ ID NO: 1988270 - RNA, 19 nt, Homo sapiens
  misc_RNA (1)...(19): siRNA sense strand
gaaaagacauugaagaauc

SEQ ID NO: 1988271 - RNA, 19 nt, Homo sapiens
  misc_RNA (1)...(19): siRNA sense strand
gagaaacugucuuauccuu

SEQ ID NO: 1988272 - RNA, 19 nt, Homo sapiens
  misc_RNA (1)...(19): siRNA sense strand
caaaauggcacaauuguua

SEQ ID NO: 1988273 - RNA, 19 nt, Homo sapiens
  misc_RNA (1)...(19): siRNA sense strand
ggagccagcaucugcauua

SEQ ID NO: 1988274 - RNA, 19 nt, Homo sapiens
  misc_RNA (1)...(19): siRNA sense strand
gaaggaugguggaggaaug

SEQ ID NO: 1988275 - RNA, 19 nt, Homo sapiens
  misc_RNA (1)...(19): siRNA sense strand
caaauaaagugacugaacu

SEQ ID NO: 1988276 - RNA, 19 nt, Homo sapiens
  misc_RNA (1)...(19): siRNA sense strand
gacguuagucuuccaaaua

SEQ ID NO: 1988277 - RNA, 19 nt, Homo sapiens
  misc_RNA (1)...(19): siRNA sense strand
cagaacggcuguaccagaa

SEQ ID NO: 1988278 - RNA, 19 nt, Homo sapiens
  misc_RNA (1)...(19): siRNA sense strand
uuagaaggcucaucauuag

SEQ ID NO: 1988279 - RNA, 19 nt, Homo sapiens
  misc_RNA (1)...(19): siRNA sense strand
caaagucacuguuccaacu

SEQ ID NO: 1988280 - RNA, 19 nt, Homo sapiens
  misc_RNA (1)...(19): siRNA sense strand
gaaauuacagacucucaga

SEQ ID NO: 1988281 - RNA, 19 nt, Homo sapiens
  misc_RNA (1)...(19): siRNA sense strand
ggaagauguuggagaagau

SEQ ID NO: 1988282 - RNA, 19 nt, Homo sapiens
  misc_RNA (1)...(19): siRNA sense strand
cuuagaaggcucaucauua

SEQ ID NO: 1988283 - RNA, 19 nt, Homo sapiens
  misc_RNA (1)...(19): siRNA sense strand
ucgagaagcugcugcauca

SEQ ID NO: 1988284 - RNA, 19 nt, Homo sapiens
  misc_RNA (1)...(19): siRNA sense strand
aaagucugauguagaagua

SEQ ID NO: 1988285 - RNA, 19 nt, Homo sapiens
  misc_RNA (1)...(19): siRNA sense strand
aacagaagauaccuccuua

SEQ ID NO: 1988286 - RNA, 19 nt, Homo sapiens
  misc_RNA (1)...(19): siRNA sense strand
gcacgcagguggaagaacu

SEQ ID NO: 1988287 - RNA, 19 nt, Homo sapiens
  misc_RNA (1)...(19): siRNA sense strand
gaauacagaauacgaagau

SEQ ID NO: 1988288 - RNA, 19 nt, Homo sapiens
  misc_RNA (1)...(19): siRNA sense strand
ggcggaagguggagaaguu

SEQ ID NO: 1988289 - RNA, 19 nt, Homo sapiens
  misc_RNA (1)...(19): siRNA sense strand
uaucagacguacuacaaug

SEQ ID NO: 1988290 - RNA, 19 nt, Homo sapiens
  misc_RNA (1)...(19): siRNA sense strand
gagaagauggguuggaaga

SEQ ID NO: 1988291 - RNA, 19 nt, Homo sapiens
  misc_RNA (1)...(19): siRNA sense strand
ggaacauacucuccgaauc

SEQ ID NO: 1988292 - RNA, 19 nt, Homo sapiens
  misc_RNA (1)...(19): siRNA sense strand
gaaaguggucguuaucagu

SEQ ID NO: 1988293 - RNA, 19 nt, Homo sapiens
  misc_RNA (1)...(19): siRNA sense strand
ggaaaguggucguuaucag

SEQ ID NO: 1988294 - RNA, 19 nt, Homo sapiens
  misc_RNA (1)...(19): siRNA sense strand
uaaaugugacccuuacgua

SEQ ID NO: 1988295 - RNA, 19 nt, Homo sapiens
  misc_RNA (1)...(19): siRNA sense strand
aaacuaaaugugacccuua

SEQ ID NO: 1988296 - RNA, 19 nt, Homo sapiens
  misc_RNA (1)...(19): siRNA sense strand
auagacaaguggaccauuu

SEQ ID NO: 1988297 - RNA, 19 nt, Homo sapiens
  misc_RNA (1)...(19): siRNA sense strand
gucauuagaucaccugugu

SEQ ID NO: 1988298 - RNA, 19 nt, Homo sapiens
  misc_RNA (1)...(19): siRNA sense strand
agaggaaggugaaauuaca

SEQ ID NO: 1988299 - RNA, 19 nt, Homo sapiens
  misc_RNA (1)...(19): siRNA sense strand
ucaacaagaucaagcuauc

SEQ ID NO: 1988300 - RNA, 19 nt, Homo sapiens
  misc_RNA (1)...(19): siRNA sense strand
gggagcagguuggaaguga

SEQ ID NO: 1988301 - RNA, 19 nt, Homo sapiens
  misc_RNA (1)...(19): siRNA sense strand
gaacauacucuccgaaucc

SEQ ID NO: 1988302 - RNA, 19 nt, Homo sapiens
  misc_RNA (1)...(19): siRNA sense strand
gcaaugaggaagaaaauuu

SEQ ID NO: 1988303 - RNA, 19 nt, Homo sapiens
  misc_RNA (1)...(19): siRNA sense strand
cagacuggauuuaguuaug

SEQ ID NO: 1988304 - RNA, 19 nt, Homo sapiens
  misc_RNA (1)...(19): siRNA sense strand
caacagaagauaccuccuu

SEQ ID NO: 1988305 - RNA, 19 nt, Homo sapiens
  misc_RNA (1)...(19): siRNA sense strand
cagcacugguuucuauuau

SEQ ID NO: 1988306 - RNA, 19 nt, Homo sapiens
  misc_RNA (1)...(19): siRNA sense strand
gauguucaccuucuccaaa

SEQ ID NO: 1988307 - RNA, 19 nt, Homo sapiens
  misc_RNA (1)...(19): siRNA sense strand
gaucaccuguguugcagau

SEQ ID NO: 1988308 - RNA, 19 nt, Homo sapiens
  misc_RNA (1)...(19): siRNA sense strand
ggaaaaggauuugaacuca

SEQ ID NO: 1988309 - RNA, 19 nt, Homo sapiens
  misc_RNA (1)...(19): siRNA sense strand
cagaagauaccuccuuaga

SEQ ID NO: 1988310 - RNA, 19 nt, Homo sapiens
  misc_RNA (1)...(19): siRNA sense strand
ugucuuauccuuucacauu

SEQ ID NO: 1988311 - RNA, 19 nt, Homo sapiens
  misc_RNA (1)...(19): siRNA sense strand
cagaagauagugaggauga

SEQ ID NO: 1988312 - RNA, 19 nt, Homo sapiens
  misc_RNA (1)...(19): siRNA sense strand
ccagaggaaggugaaauua

SEQ ID NO: 1988313 - RNA, 19 nt, Homo sapiens
  misc_RNA (1)...(19): siRNA sense strand
acguuagucuuccaaauaa

SEQ ID NO: 1988314 - RNA, 19 nt, Homo sapiens
  misc_RNA (1)...(19): siRNA sense strand
ucaguuucauucucgagua

SEQ ID NO: 1988315 - RNA, 19 nt, Homo sapiens
  misc_RNA (1)...(19): siRNA sense strand
cugcaucuguucauucuga

SEQ ID NO: 1988316 - RNA, 19 nt, Homo sapiens
  misc_RNA (1)...(19): siRNA sense strand
cauggagacugauagugaa

SEQ ID NO: 1988317 - RNA, 19 nt, Homo sapiens
  misc_RNA (1)...(19): siRNA sense strand
caucauuagcugaaaguuu

SEQ ID NO: 1988318 - RNA, 19 nt, Homo sapiens
  misc_RNA (1)...(19): siRNA sense strand
ugggagaaaugaagauaau

SEQ ID NO: 1988319 - RNA, 19 nt, Homo sapiens
  misc_RNA (1)...(19): siRNA sense strand
ggaagaacucaguaaaaua

SEQ ID NO: 1988320 - RNA, 19 nt, Homo sapiens
  misc_RNA (1)...(19): siRNA sense strand
caagaucaagcuaucgaaa

SEQ ID NO: 1988321 - RNA, 19 nt, Homo sapiens
  misc_RNA (1)...(19): siRNA sense strand
cacgagagcgguuuacuga

SEQ ID NO: 1988322 - RNA, 19 nt, Homo sapiens
  misc_RNA (1)...(19): siRNA sense strand
gucggaagauguuggagaa

SEQ ID NO: 1988323 - RNA, 19 nt, Homo sapiens
  misc_RNA (1)...(19): siRNA sense strand
gaaauuacugauagcaaca

SEQ ID NO: 1988324 - RNA, 19 nt, Homo sapiens
  misc_RNA (1)...(19): siRNA sense strand
ggagcagguuggaagugaa

SEQ ID NO: 1988325 - RNA, 19 nt, Homo sapiens
  misc_RNA (1)...(19): siRNA sense strand
gcaauguaacugcagaaga

SEQ ID NO: 1988326 - RNA, 19 nt, Homo sapiens
  misc_RNA (1)...(19): siRNA sense strand
aaauaggcauucaucacaa

SEQ ID NO: 1988327 - RNA, 19 nt, Homo sapiens
  misc_RNA (1)...(19): siRNA sense strand
gcuaucgaaacuucuauuu

SEQ ID NO: 1988328 - RNA, 19 nt, Homo sapiens
  misc_RNA (1)...(19): siRNA sense strand
cggaagauguuggagaaga

SEQ ID NO: 1988329 - RNA, 19 nt, Homo sapiens
  misc_RNA (1)...(19): siRNA sense strand
guuauguccuuguggauca

SEQ ID NO: 1988330 - RNA, 19 nt, Homo sapiens
  misc_RNA (1)...(19): siRNA sense strand
gaaguuggugucaguaagu

SEQ ID NO: 1988331 - RNA, 19 nt, Homo sapiens
  misc_RNA (1)...(19): siRNA sense strand
agacuggauuuaguuauga

SEQ ID NO: 1988332 - RNA, 19 nt, Homo sapiens
  misc_RNA (1)...(19): siRNA sense strand
ucacagacuggauuuaguu

SEQ ID NO: 1988333 - RNA, 19 nt, Homo sapiens
  misc_RNA (1)...(19): siRNA sense strand
aucauuagcugaaaguuug

SEQ ID NO: 1988334 - RNA, 19 nt, Homo sapiens
  misc_RNA (1)...(19): siRNA sense strand
gccagcaucugcauuagca

SEQ ID NO: 1988335 - RNA, 19 nt, Homo sapiens
  misc_RNA (1)...(19): siRNA sense strand
ucauggagacugauaguga

SEQ ID NO: 1988336 - RNA, 19 nt, Homo sapiens
  misc_RNA (1)...(19): siRNA sense strand
aggcaaaccauccucauuu

SEQ ID NO: 1988337 - RNA, 19 nt, Homo sapiens
  misc_RNA (1)...(19): siRNA sense strand
acgaagccauuaccaguga

SEQ ID NO: 1988338 - RNA, 19 nt, Homo sapiens
  misc_RNA (1)...(19): siRNA sense strand
uaggaucacucuuuaucau

SEQ ID NO: 1988339 - RNA, 19 nt, Homo sapiens
  misc_RNA (1)...(19): siRNA sense strand
aauaggcauucaucacaaa

SEQ ID NO: 1988340 - RNA, 19 nt, Homo sapiens
  misc_RNA (1)...(19): siRNA sense strand
gagcccaccuucgccuuga

SEQ ID NO: 1988341 - RNA, 19 nt, Homo sapiens
  misc_RNA (1)...(19): siRNA sense strand
gaucaaggcagucaaaaug

SEQ ID NO: 1988342 - RNA, 19 nt, Homo sapiens
  misc_RNA (1)...(19): siRNA sense strand
agacugaggauaguuauga

SEQ ID NO: 1988343 - RNA, 19 nt, Homo sapiens
  misc_RNA (1)...(19): siRNA sense strand
caagcuaucgaaacuucua

SEQ ID NO: 1988344 - RNA, 19 nt, Homo sapiens
  misc_RNA (1)...(19): siRNA sense strand
gaccaugccuuggguaaaa

SEQ ID NO: 1988345 - RNA, 19 nt, Homo sapiens
  misc_RNA (1)...(19): siRNA sense strand
gcacgagagcgguuuacug

SEQ ID NO: 1988346 - RNA, 19 nt, Homo sapiens
  misc_RNA (1)...(19): siRNA sense strand
aaacgccgauccagcuuca

SEQ ID NO: 1988347 - RNA, 19 nt, Homo sapiens
  misc_RNA (1)...(19): siRNA sense strand
ugacguuagucuuccaaau

SEQ ID NO: 1988348 - RNA, 19 nt, Homo sapiens
  misc_RNA (1)...(19): siRNA sense strand
gagaagcugcugcaucaca

SEQ ID NO: 1988349 - RNA, 19 nt, Homo sapiens
  misc_RNA (1)...(19): siRNA sense strand
cauuagaucaccuguguug

SEQ ID NO: 1988350 - RNA, 19 nt, Homo sapiens
  misc_RNA (1)...(19): siRNA sense strand
gguggaagaacucaguaaa

SEQ ID NO: 1988351 - RNA, 19 nt, Homo sapiens
  misc_RNA (1)...(19): siRNA sense strand
gaaaagaaaagauccagau

SEQ ID NO: 1988352 - RNA, 19 nt, Homo sapiens
  misc_RNA (1)...(19): siRNA sense strand
guaaacccugcuacaauug

SEQ ID NO: 1988353 - RNA, 19 nt, Homo sapiens
  misc_RNA (1)...(19): siRNA sense strand
guagaaguacaaacagaga

SEQ ID NO: 1988354 - RNA, 19 nt, Homo sapiens
  misc_RNA (1)...(19): siRNA sense strand
gaugagaacuacuuuguga

SEQ ID NO: 1988355 - RNA, 19 nt, Homo sapiens
  misc_RNA (1)...(19): siRNA sense strand
ggaaagaugccauauauuc

SEQ ID NO: 1988356 - RNA, 19 nt, Homo sapiens
  misc_RNA (1)...(19): siRNA sense strand
ccaacgcagucauuuauua

SEQ ID NO: 1988357 - RNA, 19 nt, Homo sapiens
  misc_RNA (1)...(19): siRNA sense strand
gauaauguguggacagaga

SEQ ID NO: 1988358 - RNA, 19 nt, Homo sapiens
  misc_RNA (1)...(19): siRNA sense strand
gggaaagagucaucucgua

SEQ ID NO: 1988359 - RNA, 19 nt, Homo sapiens
  misc_RNA (1)...(19): siRNA sense strand
gcaagacacugcaagauac

SEQ ID NO: 1988360 - RNA, 19 nt, Homo sapiens
  misc_RNA (1)...(19): siRNA sense strand
ggacaagcuugaaggaaau

SEQ ID NO: 1988361 - RNA, 19 nt, Homo sapiens
  misc_RNA (1)...(19): siRNA sense strand
gcauaaagaucugguguuc

SEQ ID NO: 1988362 - RNA, 19 nt, Homo sapiens
  misc_RNA (1)...(19): siRNA sense strand
cgggaaagaugccauauau

SEQ ID NO: 1988363 - RNA, 19 nt, Homo sapiens
  misc_RNA (1)...(19): siRNA sense strand
gaaagaugccauauauuca

SEQ ID NO: 1988364 - RNA, 19 nt, Homo sapiens
  misc_RNA (1)...(19): siRNA sense strand
gaaacugccuucaggugau

SEQ ID NO: 1988365 - RNA, 19 nt, Homo sapiens
  misc_RNA (1)...(19): siRNA sense strand
ggaguuccguguucucaga

SEQ ID NO: 1988366 - RNA, 19 nt, Homo sapiens
  misc_RNA (1)...(19): siRNA sense strand
gaucuggacuucuuuacca

SEQ ID NO: 1988367 - RNA, 19 nt, Homo sapiens
  misc_RNA (1)...(19): siRNA sense strand
ggcaagacacugcaagaua

SEQ ID NO: 1988368 - RNA, 19 nt, Homo sapiens
  misc_RNA (1)...(19): siRNA sense strand
ggaaauuuaugagguguca

SEQ ID NO: 1988369 - RNA, 19 nt, Homo sapiens
  misc_RNA (1)...(19): siRNA sense strand
cagcugacaucucucuuug

SEQ ID NO: 1988370 - RNA, 19 nt, Homo sapiens
  misc_RNA (1)...(19): siRNA sense strand
gaggagcucuuugcugaug

SEQ ID NO: 1988371 - RNA, 19 nt, Homo sapiens
  misc_RNA (1)...(19): siRNA sense strand
gaacccaacagaggcaaua

SEQ ID NO: 1988372 - RNA, 19 nt, Homo sapiens
  misc_RNA (1)...(19): siRNA sense strand
ucaaagaucggucacauuc

SEQ ID NO: 1988373 - RNA, 19 nt, Homo sapiens
  misc_RNA (1)...(19): siRNA sense strand
acagacaaaugccauguga

SEQ ID NO: 1988374 - RNA, 19 nt, Homo sapiens
  misc_RNA (1)...(19): siRNA sense strand
ggagaaugaucuggacuuc

SEQ ID NO: 1988375 - RNA, 19 nt, Homo sapiens
  misc_RNA (1)...(19): siRNA sense strand
gggaucaucuacuuacuag

SEQ ID NO: 1988376 - RNA, 19 nt, Homo sapiens
  misc_RNA (1)...(19): siRNA sense strand
agaacuacuuugugaacua

SEQ ID NO: 1988377 - RNA, 19 nt, Homo sapiens
  misc_RNA (1)...(19): siRNA sense strand
caacgggaucaucuacuua

SEQ ID NO: 1988378 - RNA, 19 nt, Homo sapiens
  misc_RNA (1)...(19): siRNA sense strand
gcagaauacagaggaauuu

SEQ ID NO: 1988379 - RNA, 19 nt, Homo sapiens
  misc_RNA (1)...(19): siRNA sense strand
gaacuacuuugugaacuac

SEQ ID NO: 1988380 - RNA, 19 nt, Homo sapiens
  misc_RNA (1)...(19): siRNA sense strand
auaaagaucugguguucau

SEQ ID NO: 1988381 - RNA, 19 nt, Homo sapiens
  misc_RNA (1)...(19): siRNA sense strand
gcugaggaguugcaggaaa

SEQ ID NO: 1988382 - RNA, 19 nt, Homo sapiens
  misc_RNA (1)...(19): siRNA sense strand
aagccuggaucaacuuuaa

SEQ ID NO: 1988383 - RNA, 19 nt, Homo sapiens
  misc_RNA (1)...(19): siRNA sense strand
ucaacgggaucaucuacuu

SEQ ID NO: 1988384 - RNA, 19 nt, Homo sapiens
  misc_RNA (1)...(19): siRNA sense strand
acacagagacagacaaaug

SEQ ID NO: 1988385 - RNA, 19 nt, Homo sapiens
  misc_RNA (1)...(19): siRNA sense strand
gaugucagcgagucuguuu

SEQ ID NO: 1988386 - RNA, 19 nt, Homo sapiens
  misc_RNA (1)...(19): siRNA sense strand
aggacaagcuugaaggaaa

SEQ ID NO: 1988387 - RNA, 19 nt, Homo sapiens
  misc_RNA (1)...(19): siRNA sense strand
agccauaacugucacaaga

SEQ ID NO: 1988388 - RNA, 19 nt, Homo sapiens
  misc_RNA (1)...(19): siRNA sense strand
gcugacaucucucuuugag

SEQ ID NO: 1988389 - RNA, 19 nt, Homo sapiens
  misc_RNA (1)...(19): siRNA sense strand
agaggaauuucuccacuug

SEQ ID NO: 1988390 - RNA, 19 nt, Homo sapiens
  misc_RNA (1)...(19): siRNA sense strand
caacgcagucauuuauuau

SEQ ID NO: 1988391 - RNA, 19 nt, Homo sapiens
  misc_RNA (1)...(19): siRNA sense strand
gaggaaugcucucgguuuu

SEQ ID NO: 1988392 - RNA, 19 nt, Homo sapiens
  misc_RNA (1)...(19): siRNA sense strand
ggaguugcaggaaauuuau

SEQ ID NO: 1988393 - RNA, 19 nt, Homo sapiens
  misc_RNA (1)...(19): siRNA sense strand
cagaggaauuucuccacuu

SEQ ID NO: 1988394 - RNA, 19 nt, Homo sapiens
  misc_RNA (1)...(19): siRNA sense strand
uacaaucccuugcuagaca

SEQ ID NO: 1988395 - RNA, 19 nt, Homo sapiens
  misc_RNA (1)...(19): siRNA sense strand
ucgcguaggugauaaugug

SEQ ID NO: 1988396 - RNA, 19 nt, Homo sapiens
  misc_RNA (1)...(19): siRNA sense strand
gcaauagaagccuggauca

SEQ ID NO: 1988397 - RNA, 19 nt, Homo sapiens
  misc_RNA (1)...(19): siRNA sense strand
uguaucagcugacaucucu

SEQ ID NO: 1988398 - RNA, 19 nt, Homo sapiens
  misc_RNA (1)...(19): siRNA sense strand
gugauaauguguggacaga

SEQ ID NO: 1988399 - RNA, 19 nt, Homo sapiens
  misc_RNA (1)...(19): siRNA sense strand
gugcacauuuaccugauug

SEQ ID NO: 1988400 - RNA, 19 nt, Homo sapiens
  misc_RNA (1)...(19): siRNA sense strand
gaagccuggaucaacuuua

SEQ ID NO: 1988401 - RNA, 19 nt, Homo sapiens
  misc_RNA (1)...(19): siRNA sense strand
ggaagauugccagcuguaa

SEQ ID NO: 1988402 - RNA, 19 nt, Homo sapiens
  misc_RNA (1)...(19): siRNA sense strand
acgcagcugugcauaaaga

SEQ ID NO: 1988403 - RNA, 19 nt, Homo sapiens
  misc_RNA (1)...(19): siRNA sense strand
caaggcaucaugaaacugu

SEQ ID NO: 1988404 - RNA, 19 nt, Homo sapiens
  misc_RNA (1)...(19): siRNA sense strand
gcuacaaucccuugcuaga

SEQ ID NO: 1988405 - RNA, 19 nt, Homo sapiens
  misc_RNA (1)...(19): siRNA sense strand
ugacacagagacagacaaa

SEQ ID NO: 1988406 - RNA, 19 nt, Homo sapiens
  misc_RNA (1)...(19): siRNA sense strand
aaagaucggucacauucag

SEQ ID NO: 1988407 - RNA, 19 nt, Homo sapiens
  misc_RNA (1)...(19): siRNA sense strand
ugaggaaugcucucgguuu

SEQ ID NO: 1988408 - RNA, 19 nt, Homo sapiens
  misc_RNA (1)...(19): siRNA sense strand
gcuccugguugauuauauc

SEQ ID NO: 1988409 - RNA, 19 nt, Homo sapiens
  misc_RNA (1)...(19): siRNA sense strand
gcuuaccaauuugcaguuu

SEQ ID NO: 1988410 - RNA, 19 nt, Homo sapiens
  misc_RNA (1)...(19): siRNA sense strand
ucaugaaacugugucuaga

SEQ ID NO: 1988411 - RNA, 19 nt, Homo sapiens
  misc_RNA (1)...(19): siRNA sense strand
gccuggaucaacuuuaaua

SEQ ID NO: 1988412 - RNA, 19 nt, Homo sapiens
  misc_RNA (1)...(19): siRNA sense strand
gauccauguucacuuccaa

SEQ ID NO: 1988413 - RNA, 19 nt, Homo sapiens
  misc_RNA (1)...(19): siRNA sense strand
gggaaagaugccauauauu

SEQ ID NO: 1988414 - RNA, 19 nt, Homo sapiens
  misc_RNA (1)...(19): siRNA sense strand
gcucaaggcaucaugaaac

SEQ ID NO: 1988415 - RNA, 19 nt, Homo sapiens
  misc_RNA (1)...(19): siRNA sense strand
gaauacagaggaauuucuc

SEQ ID NO: 1988416 - RNA, 19 nt, Homo sapiens
  misc_RNA (1)...(19): siRNA sense strand
ugauugugcugcaggaugu

SEQ ID NO: 1988417 - RNA, 19 nt, Homo sapiens
  misc_RNA (1)...(19): siRNA sense strand
uggcagaucggcacaguga

SEQ ID NO: 1988418 - RNA, 19 nt, Homo sapiens
  misc_RNA (1)...(19): siRNA sense strand
ccaauuugcaguuuguguu

SEQ ID NO: 1988419 - RNA, 19 nt, Homo sapiens
  misc_RNA (1)...(19): siRNA sense strand
guaacgggagcaucuaugu

SEQ ID NO: 1988420 - RNA, 19 nt, Homo sapiens
  misc_RNA (1)...(19): siRNA sense strand
agacaaaugccaugugaag

SEQ ID NO: 1988421 - RNA, 19 nt, Homo sapiens
  misc_RNA (1)...(19): siRNA sense strand
cgacucauccagugcuuug

SEQ ID NO: 1988422 - RNA, 19 nt, Homo sapiens
  misc_RNA (1)...(19): siRNA sense strand
ccaugggacugugaaacuu

SEQ ID NO: 1988423 - RNA, 19 nt, Homo sapiens
  misc_RNA (1)...(19): siRNA sense strand
uuaccaauuugcaguuugu

SEQ ID NO: 1988424 - RNA, 19 nt, Homo sapiens
  misc_RNA (1)...(19): siRNA sense strand
ccacuucagccauaacugu

SEQ ID NO: 1988425 - RNA, 19 nt, Homo sapiens
  misc_RNA (1)...(19): siRNA sense strand
gaagauugccagcuguaac

SEQ ID NO: 1988426 - RNA, 19 nt, Homo sapiens
  misc_RNA (1)...(19): siRNA sense strand
acagugauccugagcucua

SEQ ID NO: 1988427 - RNA, 19 nt, Homo sapiens
  misc_RNA (1)...(19): siRNA sense strand
aggaguugcaggaaauuua

SEQ ID NO: 1988428 - RNA, 19 nt, Homo sapiens
  misc_RNA (1)...(19): siRNA sense strand
cugaggaguugcaggaaau

SEQ ID NO: 1988429 - RNA, 19 nt, Homo sapiens
  misc_RNA (1)...(19): siRNA sense strand
ccaucccucuggaagauug

SEQ ID NO: 1988430 - RNA, 19 nt, Homo sapiens
  misc_RNA (1)...(19): siRNA sense strand
agacauguaucagcugaca

SEQ ID NO: 1988431 - RNA, 19 nt, Homo sapiens
  misc_RNA (1)...(19): siRNA sense strand
caauuugcaguuuguguug

SEQ ID NO: 1988432 - RNA, 19 nt, Homo sapiens
  misc_RNA (1)...(19): siRNA sense strand
gcuugacccugccacuuca

SEQ ID NO: 1988433 - RNA, 19 nt, Homo sapiens
  misc_RNA (1)...(19): siRNA sense strand
uugcugaugucaccauuuc

SEQ ID NO: 1988434 - RNA, 19 nt, Homo sapiens
  misc_RNA (1)...(19): siRNA sense strand
gaaugaucuggacuucuuu

SEQ ID NO: 1988435 - RNA, 19 nt, Homo sapiens
  misc_RNA (1)...(19): siRNA sense strand
uggcccagcugcagaauac

SEQ ID NO: 1988436 - RNA, 19 nt, Homo sapiens
  misc_RNA (1)...(19): siRNA sense strand
gagaacuacuuugugaacu

SEQ ID NO: 1988437 - RNA, 19 nt, Homo sapiens
  misc_RNA (1)...(19): siRNA sense strand
ucacucaggacaagcuuga

SEQ ID NO: 1988438 - RNA, 19 nt, Homo sapiens
  misc_RNA (1)...(19): siRNA sense strand
ucagcugacaucucucuuu

SEQ ID NO: 1988439 - RNA, 19 nt, Homo sapiens
  misc_RNA (1)...(19): siRNA sense strand
agagacaacucagcuagag

SEQ ID NO: 1988440 - RNA, 19 nt, Homo sapiens
  misc_RNA (1)...(19): siRNA sense strand
ggaugagaacuacuuugug

SEQ ID NO: 1988441 - RNA, 19 nt, Homo sapiens
  misc_RNA (1)...(19): siRNA sense strand
ggacuucuuuaccaaaccu

SEQ ID NO: 1988442 - RNA, 19 nt, Homo sapiens
  misc_RNA (1)...(19): siRNA sense strand
gaggaguugcaggaaauuu

SEQ ID NO: 1988443 - RNA, 19 nt, Homo sapiens
  misc_RNA (1)...(19): siRNA sense strand
gacagagacaacucagcua

SEQ ID NO: 1988444 - RNA, 19 nt, Homo sapiens
  misc_RNA (1)...(19): siRNA sense strand
ucuccaacgcagucauuua

SEQ ID NO: 1988445 - RNA, 19 nt, Homo sapiens
  misc_RNA (1)...(19): siRNA sense strand
ccgggaaagaugccauaua

SEQ ID NO: 1988446 - RNA, 19 nt, Homo sapiens
  misc_RNA (1)...(19): siRNA sense strand
aaacugccuucaggugaug

SEQ ID NO: 1988447 - RNA, 19 nt, Homo sapiens
  misc_RNA (1)...(19): siRNA sense strand
ccacuugccccaccgcuua

SEQ ID NO: 1988448 - RNA, 19 nt, Homo sapiens
  misc_RNA (1)...(19): siRNA sense strand
aggugcugcuuaccaauuu

SEQ ID NO: 1988449 - RNA, 19 nt, Homo sapiens
  misc_RNA (1)...(19): siRNA sense strand
gcccacaaccgggugauug

SEQ ID NO: 1988450 - RNA, 19 nt, Homo sapiens
  misc_RNA (1)...(19): siRNA sense strand
gaaggaaauuggggagaau

SEQ ID NO: 1988451 - RNA, 19 nt, Homo sapiens
  misc_RNA (1)...(19): siRNA sense strand
auagaagccuggaucaacu

SEQ ID NO: 1988452 - RNA, 19 nt, Homo sapiens
  misc_RNA (1)...(19): siRNA sense strand
caauagaagccuggaucaa

SEQ ID NO: 1988453 - RNA, 19 nt, Homo sapiens
  misc_RNA (1)...(19): siRNA sense strand
ggauggaguuccguguucu

SEQ ID NO: 1988454 - RNA, 19 nt, Homo sapiens
  misc_RNA (1)...(19): siRNA sense strand
gaugagaacuacuuuguga

SEQ ID NO: 1988455 - RNA, 19 nt, Homo sapiens
  misc_RNA (1)...(19): siRNA sense strand
ggaaagaugccauauauuc

SEQ ID NO: 1988456 - RNA, 19 nt, Homo sapiens
  misc_RNA (1)...(19): siRNA sense strand
ccaacgcagucauuuauua

SEQ ID NO: 1988457 - RNA, 19 nt, Homo sapiens
  misc_RNA (1)...(19): siRNA sense strand
gauaauguguggacagaga

SEQ ID NO: 1988458 - RNA, 19 nt, Homo sapiens
  misc_RNA (1)...(19): siRNA sense strand
gggaaagagucaucucgua

SEQ ID NO: 1988459 - RNA, 19 nt, Homo sapiens
  misc_RNA (1)...(19): siRNA sense strand
gcaagacacugcaagauac

SEQ ID NO: 1988460 - RNA, 19 nt, Homo sapiens
  misc_RNA (1)...(19): siRNA sense strand
ggacaagcuugaaggaaau

SEQ ID NO: 1988461 - RNA, 19 nt, Homo sapiens
  misc_RNA (1)...(19): siRNA sense strand
gcauaaagaucugguguuc

SEQ ID NO: 1988462 - RNA, 19 nt, Homo sapiens
  misc_RNA (1)...(19): siRNA sense strand
cgggaaagaugccauauau

SEQ ID NO: 1988463 - RNA, 19 nt, Homo sapiens
  misc_RNA (1)...(19): siRNA sense strand
gaaagaugccauauauuca

SEQ ID NO: 1988464 - RNA, 19 nt, Homo sapiens
  misc_RNA (1)...(19): siRNA sense strand
gaaacugccuucaggugau

SEQ ID NO: 1988465 - RNA, 19 nt, Homo sapiens
  misc_RNA (1)...(19): siRNA sense strand
ggaguuccguguucucaga

SEQ ID NO: 1988466 - RNA, 19 nt, Homo sapiens
  misc_RNA (1)...(19): siRNA sense strand
gaucuggacuucuuuacca

SEQ ID NO: 1988467 - RNA, 19 nt, Homo sapiens
  misc_RNA (1)...(19): siRNA sense strand
ggcaagacacugcaagaua

SEQ ID NO: 1988468 - RNA, 19 nt, Homo sapiens
  misc_RNA (1)...(19): siRNA sense strand
ggaaauuuaugagguguca

SEQ ID NO: 1988469 - RNA, 19 nt, Homo sapiens
  misc_RNA (1)...(19): siRNA sense strand
cagcugacaucucucuuug

SEQ ID NO: 1988470 - RNA, 19 nt, Homo sapiens
  misc_RNA (1)...(19): siRNA sense strand
gaggagcucuuugcugaug

SEQ ID NO: 1988471 - RNA, 19 nt, Homo sapiens
  misc_RNA (1)...(19): siRNA sense strand
gaacccaacagaggcaaua

SEQ ID NO: 1988472 - RNA, 19 nt, Homo sapiens
  misc_RNA (1)...(19): siRNA sense strand
ucaaagaucggucacauuc

SEQ ID NO: 1988473 - RNA, 19 nt, Homo sapiens
  misc_RNA (1)...(19): siRNA sense strand
acagacaaaugccauguga

SEQ ID NO: 1988474 - RNA, 19 nt, Homo sapiens
  misc_RNA (1)...(19): siRNA sense strand
ggagaaugaucuggacuuc

SEQ ID NO: 1988475 - RNA, 19 nt, Homo sapiens
  misc_RNA (1)...(19): siRNA sense strand
gggaucaucuacuuacuag

SEQ ID NO: 1988476 - RNA, 19 nt, Homo sapiens
  misc_RNA (1)...(19): siRNA sense strand
agaacuacuuugugaacua

SEQ ID NO: 1988477 - RNA, 19 nt, Homo sapiens
  misc_RNA (1)...(19): siRNA sense strand
caacgggaucaucuacuua

SEQ ID NO: 1988478 - RNA, 19 nt, Homo sapiens
  misc_RNA (1)...(19): siRNA sense strand
gcagaauacagaggaauuu

SEQ ID NO: 1988479 - RNA, 19 nt, Homo sapiens
  misc_RNA (1)...(19): siRNA sense strand
gaacuacuuugugaacuac

SEQ ID NO: 1988480 - RNA, 19 nt, Homo sapiens
  misc_RNA (1)...(19): siRNA sense strand
auaaagaucugguguucau

SEQ ID NO: 1988481 - RNA, 19 nt, Homo sapiens
  misc_RNA (1)...(19): siRNA sense strand
gcugaggaguugcaggaaa

SEQ ID NO: 1988482 - RNA, 19 nt, Homo sapiens
  misc_RNA (1)...(19): siRNA sense strand
aagccuggaucaacuuuaa

SEQ ID NO: 1988483 - RNA, 19 nt, Homo sapiens
  misc_RNA (1)...(19): siRNA sense strand
ucaacgggaucaucuacuu

SEQ ID NO: 1988484 - RNA, 19 nt, Homo sapiens
  misc_RNA (1)...(19): siRNA sense strand
acacagagacagacaaaug

SEQ ID NO: 1988485 - RNA, 19 nt, Homo sapiens
  misc_RNA (1)...(19): siRNA sense strand
gaugucagcgagucuguuu

SEQ ID NO: 1988486 - RNA, 19 nt, Homo sapiens
  misc_RNA (1)...(19): siRNA sense strand
aggacaagcuugaaggaaa

SEQ ID NO: 1988487 - RNA, 19 nt, Homo sapiens
  misc_RNA (1)...(19): siRNA sense strand
agccauaacugucacaaga

SEQ ID NO: 1988488 - RNA, 19 nt, Homo sapiens
  misc_RNA (1)...(19): siRNA sense strand
gcugacaucucucuuugag

SEQ ID NO: 1988489 - RNA, 19 nt, Homo sapiens
  misc_RNA (1)...(19): siRNA sense strand
agaggaauuucuccacuug

SEQ ID NO: 1988490 - RNA, 19 nt, Homo sapiens
  misc_RNA (1)...(19): siRNA sense strand
caacgcagucauuuauuau

SEQ ID NO: 1988491 - RNA, 19 nt, Homo sapiens
  misc_RNA (1)...(19): siRNA sense strand
gaggaaugcucucgguuuu

SEQ ID NO: 1988492 - RNA, 19 nt, Homo sapiens
  misc_RNA (1)...(19): siRNA sense strand
ggaguugcaggaaauuuau

SEQ ID NO: 1988493 - RNA, 19 nt, Homo sapiens
  misc_RNA (1)...(19): siRNA sense strand
cagaggaauuucuccacuu

SEQ ID NO: 1988494 - RNA, 19 nt, Homo sapiens
  misc_RNA (1)...(19): siRNA sense strand
uacaaucccuugcuagaca

SEQ ID NO: 1988495 - RNA, 19 nt, Homo sapiens
  misc_RNA (1)...(19): siRNA sense strand
ucgcguaggugauaaugug

SEQ ID NO: 1988496 - RNA, 19 nt, Homo sapiens
  misc_RNA (1)...(19): siRNA sense strand
gcaauagaagccuggauca

SEQ ID NO: 1988497 - RNA, 19 nt, Homo sapiens
  misc_RNA (1)...(19): siRNA sense strand
uguaucagcugacaucucu

SEQ ID NO: 1988498 - RNA, 19 nt, Homo sapiens
  misc_RNA (1)...(19): siRNA sense strand
gugauaauguguggacaga

SEQ ID NO: 1988499 - RNA, 19 nt, Homo sapiens
  misc_RNA (1)...(19): siRNA sense strand
gugcacauuuaccugauug

SEQ ID NO: 1988500 - RNA, 19 nt, Homo sapiens
  misc_RNA (1)...(19): siRNA sense strand
gaagccuggaucaacuuua

SEQ ID NO: 1988501 - RNA, 19 nt, Homo sapiens
  misc_RNA (1)...(19): siRNA sense strand
ggaagauugccagcuguaa

SEQ ID NO: 1988502 - RNA, 19 nt, Homo sapiens
  misc_RNA (1)...(19): siRNA sense strand
acgcagcugugcauaaaga

SEQ ID NO: 1988503 - RNA, 19 nt, Homo sapiens
  misc_RNA (1)...(19): siRNA sense strand
caaggcaucaugaaacugu

SEQ ID NO: 1988504 - RNA, 19 nt, Homo sapiens
  misc_RNA (1)...(19): siRNA sense strand
gcuacaaucccuugcuaga

SEQ ID NO: 1988505 - RNA, 19 nt, Homo sapiens
  misc_RNA (1)...(19): siRNA sense strand
ugacacagagacagacaaa

SEQ ID NO: 1988506 - RNA, 19 nt, Homo sapiens
  misc_RNA (1)...(19): siRNA sense strand
aaagaucggucacauucag

SEQ ID NO: 1988507 - RNA, 19 nt, Homo sapiens
  misc_RNA (1)...(19): siRNA sense strand
ugaggaaugcucucgguuu

SEQ ID NO: 1988508 - RNA, 19 nt, Homo sapiens
  misc_RNA (1)...(19): siRNA sense strand
gcuccugguugauuauauc

SEQ ID NO: 1988509 - RNA, 19 nt, Homo sapiens
  misc_RNA (1)...(19): siRNA sense strand
gcuuaccaauuugcaguuu

SEQ ID NO: 1988510 - RNA, 19 nt, Homo sapiens
  misc_RNA (1)...(19): siRNA sense strand
ucaugaaacugugucuaga

SEQ ID NO: 1988511 - RNA, 19 nt, Homo sapiens
  misc_RNA (1)...(19): siRNA sense strand
gccuggaucaacuuuaaua

SEQ ID NO: 1988512 - RNA, 19 nt, Homo sapiens
  misc_RNA (1)...(19): siRNA sense strand
gauccauguucacuuccaa

SEQ ID NO: 1988513 - RNA, 19 nt, Homo sapiens
  misc_RNA (1)...(19): siRNA sense strand
gggaaagaugccauauauu

SEQ ID NO: 1988514 - RNA, 19 nt, Homo sapiens
  misc_RNA (1)...(19): siRNA sense strand
gcucaaggcaucaugaaac

SEQ ID NO: 1988515 - RNA, 19 nt, Homo sapiens
  misc_RNA (1)...(19): siRNA sense strand
gaauacagaggaauuucuc

SEQ ID NO: 1988516 - RNA, 19 nt, Homo sapiens
  misc_RNA (1)...(19): siRNA sense strand
ugauugugcugcaggaugu

SEQ ID NO: 1988517 - RNA, 19 nt, Homo sapiens
  misc_RNA (1)...(19): siRNA sense strand
uggcagaucggcacaguga

SEQ ID NO: 1988518 - RNA, 19 nt, Homo sapiens
  misc_RNA (1)...(19): siRNA sense strand
ccaauuugcaguuuguguu

SEQ ID NO: 1988519 - RNA, 19 nt, Homo sapiens
  misc_RNA (1)...(19): siRNA sense strand
guaacgggagcaucuaugu

SEQ ID NO: 1988520 - RNA, 19 nt, Homo sapiens
  misc_RNA (1)...(19): siRNA sense strand
agacaaaugccaugugaag

SEQ ID NO: 1988521 - RNA, 19 nt, Homo sapiens
  misc_RNA (1)...(19): siRNA sense strand
cgacucauccagugcuuug

SEQ ID NO: 1988522 - RNA, 19 nt, Homo sapiens
  misc_RNA (1)...(19): siRNA sense strand
ccaugggacugugaaacuu

SEQ ID NO: 1988523 - RNA, 19 nt, Homo sapiens
  misc_RNA (1)...(19): siRNA sense strand
uuaccaauuugcaguuugu

SEQ ID NO: 1988524 - RNA, 19 nt, Homo sapiens
  misc_RNA (1)...(19): siRNA sense strand
ccacuucagccauaacugu

SEQ ID NO: 1988525 - RNA, 19 nt, Homo sapiens
  misc_RNA (1)...(19): siRNA sense strand
gaagauugccagcuguaac

SEQ ID NO: 1988526 - RNA, 19 nt, Homo sapiens
  misc_RNA (1)...(19): siRNA sense strand
acagugauccugagcucua

SEQ ID NO: 1988527 - RNA, 19 nt, Homo sapiens
  misc_RNA (1)...(19): siRNA sense strand
aggaguugcaggaaauuua

SEQ ID NO: 1988528 - RNA, 19 nt, Homo sapiens
  misc_RNA (1)...(19): siRNA sense strand
cugaggaguugcaggaaau

SEQ ID NO: 1988529 - RNA, 19 nt, Homo sapiens
  misc_RNA (1)...(19): siRNA sense strand
ccaucccucuggaagauug

SEQ ID NO: 1988530 - RNA, 19 nt, Homo sapiens
  misc_RNA (1)...(19): siRNA sense strand
agacauguaucagcugaca

SEQ ID NO: 1988531 - RNA, 19 nt, Homo sapiens
  misc_RNA (1)...(19): siRNA sense strand
caauuugcaguuuguguug

SEQ ID NO: 1988532 - RNA, 19 nt, Homo sapiens
  misc_RNA (1)...(19): siRNA sense strand
gcuugacccugccacuuca

SEQ ID NO: 1988533 - RNA, 19 nt, Homo sapiens
  misc_RNA (1)...(19): siRNA sense strand
uugcugaugucaccauuuc

SEQ ID NO: 1988534 - RNA, 19 nt, Homo sapiens
  misc_RNA (1)...(19): siRNA sense strand
gaaugaucuggacuucuuu

SEQ ID NO: 1988535 - RNA, 19 nt, Homo sapiens
  misc_RNA (1)...(19): siRNA sense strand
uggcccagcugcagaauac

SEQ ID NO: 1988536 - RNA, 19 nt, Homo sapiens
  misc_RNA (1)...(19): siRNA sense strand
gagaacuacuuugugaacu

SEQ ID NO: 1988537 - RNA, 19 nt, Homo sapiens
  misc_RNA (1)...(19): siRNA sense strand
ucacucaggacaagcuuga

SEQ ID NO: 1988538 - RNA, 19 nt, Homo sapiens
  misc_RNA (1)...(19): siRNA sense strand
ucagcugacaucucucuuu

SEQ ID NO: 1988539 - RNA, 19 nt, Homo sapiens
  misc_RNA (1)...(19): siRNA sense strand
agagacaacucagcuagag

SEQ ID NO: 1988540 - RNA, 19 nt, Homo sapiens
  misc_RNA (1)...(19): siRNA sense strand
ggaugagaacuacuuugug

SEQ ID NO: 1988541 - RNA, 19 nt, Homo sapiens
  misc_RNA (1)...(19): siRNA sense strand
ggacuucuuuaccaaaccu

SEQ ID NO: 1988542 - RNA, 19 nt, Homo sapiens
  misc_RNA (1)...(19): siRNA sense strand
gaggaguugcaggaaauuu

SEQ ID NO: 1988543 - RNA, 19 nt, Homo sapiens
  misc_RNA (1)...(19): siRNA sense strand
gacagagacaacucagcua

SEQ ID NO: 1988544 - RNA, 19 nt, Homo sapiens
  misc_RNA (1)...(19): siRNA sense strand
ucuccaacgcagucauuua

SEQ ID NO: 1988545 - RNA, 19 nt, Homo sapiens
  misc_RNA (1)...(19): siRNA sense strand
ccgggaaagaugccauaua

SEQ ID NO: 1988546 - RNA, 19 nt, Homo sapiens
  misc_RNA (1)...(19): siRNA sense strand
aaacugccuucaggugaug

SEQ ID NO: 1988547 - RNA, 19 nt, Homo sapiens
  misc_RNA (1)...(19): siRNA sense strand
ccacuugccccaccgcuua

SEQ ID NO: 1988548 - RNA, 19 nt, Homo sapiens
  misc_RNA (1)...(19): siRNA sense strand
aggugcugcuuaccaauuu

SEQ ID NO: 1988549 - RNA, 19 nt, Homo sapiens
  misc_RNA (1)...(19): siRNA sense strand
gcccacaaccgggugauug

SEQ ID NO: 1988550 - RNA, 19 nt, Homo sapiens
  misc_RNA (1)...(19): siRNA sense strand
gaaggaaauuggggagaau

SEQ ID NO: 1988551 - RNA, 19 nt, Homo sapiens
  misc_RNA (1)...(19): siRNA sense strand
auagaagccuggaucaacu

SEQ ID NO: 1988552 - RNA, 19 nt, Homo sapiens
  misc_RNA (1)...(19): siRNA sense strand
caauagaagccuggaucaa

SEQ ID NO: 1988553 - RNA, 19 nt, Homo sapiens
  misc_RNA (1)...(19): siRNA sense strand
ggauggaguuccguguucu

SEQ ID NO: 1988554 - RNA, 19 nt, Homo sapiens
  misc_RNA (1)...(19): siRNA sense strand
gcauugaccucuuccuaua

SEQ ID NO: 1988555 - RNA, 19 nt, Homo sapiens
  misc_RNA (1)...(19): siRNA sense strand
gaacagcauugaccucuuc

SEQ ID NO: 1988556 - RNA, 19 nt, Homo sapiens
  misc_RNA (1)...(19): siRNA sense strand
ccaaggaacaaauuaaaug

SEQ ID NO: 1988557 - RNA, 19 nt, Homo sapiens
  misc_RNA (1)...(19): siRNA sense strand
guucucaccugccuguuug

SEQ ID NO: 1988558 - RNA, 19 nt, Homo sapiens
  misc_RNA (1)...(19): siRNA sense strand
guauuaugaugacacauuc

SEQ ID NO: 1988559 - RNA, 19 nt, Homo sapiens
  misc_RNA (1)...(19): siRNA sense strand
ugaaccacauguuaaggaa

SEQ ID NO: 1988560 - RNA, 19 nt, Homo sapiens
  misc_RNA (1)...(19): siRNA sense strand
caaguauuaugaugacaca

SEQ ID NO: 1988561 - RNA, 19 nt, Homo sapiens
  misc_RNA (1)...(19): siRNA sense strand
guaugaccaucgucuacaa

SEQ ID NO: 1988562 - RNA, 19 nt, Homo sapiens
  misc_RNA (1)...(19): siRNA sense strand
uaaggaagaacguggagaa

SEQ ID NO: 1988563 - RNA, 19 nt, Homo sapiens
  misc_RNA (1)...(19): siRNA sense strand
ggacugagagugagauugc

SEQ ID NO: 1988564 - RNA, 19 nt, Homo sapiens
  misc_RNA (1)...(19): siRNA sense strand
caucaaggcuguuuucauc

SEQ ID NO: 1988565 - RNA, 19 nt, Homo sapiens
  misc_RNA (1)...(19): siRNA sense strand
gauggcggcuugacugaac

SEQ ID NO: 1988566 - RNA, 19 nt, Homo sapiens
  misc_RNA (1)...(19): siRNA sense strand
gcugguugcuggagaacau

SEQ ID NO: 1988567 - RNA, 19 nt, Homo sapiens
  misc_RNA (1)...(19): siRNA sense strand
gggcucauccuacgagaau

SEQ ID NO: 1988568 - RNA, 19 nt, Homo sapiens
  misc_RNA (1)...(19): siRNA sense strand
aaccacauguuaaggaaga

SEQ ID NO: 1988569 - RNA, 19 nt, Homo sapiens
  misc_RNA (1)...(19): siRNA sense strand
ugaccaucgucuacaagaa

SEQ ID NO: 1988570 - RNA, 19 nt, Homo sapiens
  misc_RNA (1)...(19): siRNA sense strand
cagcauugaccucuuccua

SEQ ID NO: 1988571 - RNA, 19 nt, Homo sapiens
  misc_RNA (1)...(19): siRNA sense strand
cggcuugacugaacagagu

SEQ ID NO: 1988572 - RNA, 19 nt, Homo sapiens
  misc_RNA (1)...(19): siRNA sense strand
ucucugaaccacauguuaa

SEQ ID NO: 1988573 - RNA, 19 nt, Homo sapiens
  misc_RNA (1)...(19): siRNA sense strand
caaggaacaaauuaaaugg

SEQ ID NO: 1988574 - RNA, 19 nt, Homo sapiens
  misc_RNA (1)...(19): siRNA sense strand
gccaaggaacaaauuaaau

SEQ ID NO: 1988575 - RNA, 19 nt, Homo sapiens
  misc_RNA (1)...(19): siRNA sense strand
cuacgagaaugagcugaug

SEQ ID NO: 1988576 - RNA, 19 nt, Homo sapiens
  misc_RNA (1)...(19): siRNA sense strand
gugugauucuggagaguga

SEQ ID NO: 1988577 - RNA, 19 nt, Homo sapiens
  misc_RNA (1)...(19): siRNA sense strand
ggccaaguauuaugaugac

SEQ ID NO: 1988578 - RNA, 19 nt, Homo sapiens
  misc_RNA (1)...(19): siRNA sense strand
aauggucguuauugaaaug

SEQ ID NO: 1988579 - RNA, 19 nt, Homo sapiens
  misc_RNA (1)...(19): siRNA sense strand
ugaaggagcagaugguuuu

SEQ ID NO: 1988580 - RNA, 19 nt, Homo sapiens
  misc_RNA (1)...(19): siRNA sense strand
ugagagugagauugcauuu

SEQ ID NO: 1988581 - RNA, 19 nt, Homo sapiens
  misc_RNA (1)...(19): siRNA sense strand
ggauggcggugugauucug

SEQ ID NO: 1988582 - RNA, 19 nt, Homo sapiens
  misc_RNA (1)...(19): siRNA sense strand
ugauccagaaggugaauuu

SEQ ID NO: 1988583 - RNA, 19 nt, Homo sapiens
  misc_RNA (1)...(19): siRNA sense strand
cccagcaagugauccagaa

SEQ ID NO: 1988584 - RNA, 19 nt, Homo sapiens
  misc_RNA (1)...(19): siRNA sense strand
ugccaaggaacaaauuaaa

SEQ ID NO: 1988585 - RNA, 19 nt, Homo sapiens
  misc_RNA (1)...(19): siRNA sense strand
gaccaucgucuacaagaac

SEQ ID NO: 1988586 - RNA, 19 nt, Homo sapiens
  misc_RNA (1)...(19): siRNA sense strand
agaacagcauugaccucuu

SEQ ID NO: 1988587 - RNA, 19 nt, Homo sapiens
  misc_RNA (1)...(19): siRNA sense strand
cauggacggagccuucuug

SEQ ID NO: 1988588 - RNA, 19 nt, Homo sapiens
  misc_RNA (1)...(19): siRNA sense strand
ggcugcuggccaaguauua

SEQ ID NO: 1988589 - RNA, 19 nt, Homo sapiens
  misc_RNA (1)...(19): siRNA sense strand
gcaauuggaugcaacauuu

SEQ ID NO: 1988590 - RNA, 19 nt, Homo sapiens
  misc_RNA (1)...(19): siRNA sense strand
ggacauugaugguuuaauu

SEQ ID NO: 1988591 - RNA, 19 nt, Homo sapiens
  misc_RNA (1)...(19): siRNA sense strand
gcaugucucugcuauauuu

SEQ ID NO: 1988592 - RNA, 19 nt, Homo sapiens
  misc_RNA (1)...(19): siRNA sense strand
gaagauaucagcugcauug

SEQ ID NO: 1988593 - RNA, 19 nt, Homo sapiens
  misc_RNA (1)...(19): siRNA sense strand
caggagagguguuauauga

SEQ ID NO: 1988594 - RNA, 19 nt, Homo sapiens
  misc_RNA (1)...(19): siRNA sense strand
gaugugggaucuucgauuu

SEQ ID NO: 1988595 - RNA, 19 nt, Homo sapiens
  misc_RNA (1)...(19): siRNA sense strand
gaaacaaguugacaagcuu

SEQ ID NO: 1988596 - RNA, 19 nt, Homo sapiens
  misc_RNA (1)...(19): siRNA sense strand
ggaaugacccuccagcuuu

SEQ ID NO: 1988597 - RNA, 19 nt, Homo sapiens
  misc_RNA (1)...(19): siRNA sense strand
ggaggaacauuuaauaucu

SEQ ID NO: 1988598 - RNA, 19 nt, Homo sapiens
  misc_RNA (1)...(19): siRNA sense strand
gaaccaggcuugaaaauga

SEQ ID NO: 1988599 - RNA, 19 nt, Homo sapiens
  misc_RNA (1)...(19): siRNA sense strand
gaacagacacuuucaccaa

SEQ ID NO: 1988600 - RNA, 19 nt, Homo sapiens
  misc_RNA (1)...(19): siRNA sense strand
gaacagguccucagaaugg

SEQ ID NO: 1988601 - RNA, 19 nt, Homo sapiens
  misc_RNA (1)...(19): siRNA sense strand
caagaaaccuauuccagau

SEQ ID NO: 1988602 - RNA, 19 nt, Homo sapiens
  misc_RNA (1)...(19): siRNA sense strand
gaaauaccuuccagcaugu

SEQ ID NO: 1988603 - RNA, 19 nt, Homo sapiens
  misc_RNA (1)...(19): siRNA sense strand
ggcagauccugaauuguua

SEQ ID NO: 1988604 - RNA, 19 nt, Homo sapiens
  misc_RNA (1)...(19): siRNA sense strand
ccaauaagcugggugucua

SEQ ID NO: 1988605 - RNA, 19 nt, Homo sapiens
  misc_RNA (1)...(19): siRNA sense strand
gaaugacccuccagcuuug

SEQ ID NO: 1988606 - RNA, 19 nt, Homo sapiens
  misc_RNA (1)...(19): siRNA sense strand
ccgaaauccugcugucuua

SEQ ID NO: 1988607 - RNA, 19 nt, Homo sapiens
  misc_RNA (1)...(19): siRNA sense strand
gaaaauaccuugaacuucu

SEQ ID NO: 1988608 - RNA, 19 nt, Homo sapiens
  misc_RNA (1)...(19): siRNA sense strand
caacagacccucaaaccaa

SEQ ID NO: 1988609 - RNA, 19 nt, Homo sapiens
  misc_RNA (1)...(19): siRNA sense strand
ggacaugaaucaccuaaaa

SEQ ID NO: 1988610 - RNA, 19 nt, Homo sapiens
  misc_RNA (1)...(19): siRNA sense strand
gacuaaagcucaagaugga

SEQ ID NO: 1988611 - RNA, 19 nt, Homo sapiens
  misc_RNA (1)...(19): siRNA sense strand
ggcuuuagcugcaguauug

SEQ ID NO: 1988612 - RNA, 19 nt, Homo sapiens
  misc_RNA (1)...(19): siRNA sense strand
gaccaugcauacccacaua

SEQ ID NO: 1988613 - RNA, 19 nt, Homo sapiens
  misc_RNA (1)...(19): siRNA sense strand
gaugaccgguuaccaguga

SEQ ID NO: 1988614 - RNA, 19 nt, Homo sapiens
  misc_RNA (1)...(19): siRNA sense strand
gaccuuuguuuacaugaua

SEQ ID NO: 1988615 - RNA, 19 nt, Homo sapiens
  misc_RNA (1)...(19): siRNA sense strand
gauccugaauuguuacuga

SEQ ID NO: 1988616 - RNA, 19 nt, Homo sapiens
  misc_RNA (1)...(19): siRNA sense strand
gaggcaaacugguuacguu

SEQ ID NO: 1988617 - RNA, 19 nt, Homo sapiens
  misc_RNA (1)...(19): siRNA sense strand
gaaagagauuguugagucu

SEQ ID NO: 1988618 - RNA, 19 nt, Homo sapiens
  misc_RNA (1)...(19): siRNA sense strand
aagcacagaugguuuaaga

SEQ ID NO: 1988619 - RNA, 19 nt, Homo sapiens
  misc_RNA (1)...(19): siRNA sense strand
cauagcagguggacaagaa

SEQ ID NO: 1988620 - RNA, 19 nt, Homo sapiens
  misc_RNA (1)...(19): siRNA sense strand
cauaaugcauggaaauguu

SEQ ID NO: 1988621 - RNA, 19 nt, Homo sapiens
  misc_RNA (1)...(19): siRNA sense strand
cauggcagauccugaauug

SEQ ID NO: 1988622 - RNA, 19 nt, Homo sapiens
  misc_RNA (1)...(19): siRNA sense strand
uauaugaacuucccaccaa

SEQ ID NO: 1988623 - RNA, 19 nt, Homo sapiens
  misc_RNA (1)...(19): siRNA sense strand
gaaguuaaaggaaguagau

SEQ ID NO: 1988624 - RNA, 19 nt, Homo sapiens
  misc_RNA (1)...(19): siRNA sense strand
uagcugcaguauugacuua

SEQ ID NO: 1988625 - RNA, 19 nt, Homo sapiens
  misc_RNA (1)...(19): siRNA sense strand
acacaguggugcuucgaua

SEQ ID NO: 1988626 - RNA, 19 nt, Homo sapiens
  misc_RNA (1)...(19): siRNA sense strand
aaacacagccgccagaaga

SEQ ID NO: 1988627 - RNA, 19 nt, Homo sapiens
  misc_RNA (1)...(19): siRNA sense strand
gaagguaaacuuugaggau

SEQ ID NO: 1988628 - RNA, 19 nt, Homo sapiens
  misc_RNA (1)...(19): siRNA sense strand
ggagagguguuauaugaac

SEQ ID NO: 1988629 - RNA, 19 nt, Homo sapiens
  misc_RNA (1)...(19): siRNA sense strand
uuacauaucuucugcuucu

SEQ ID NO: 1988630 - RNA, 19 nt, Homo sapiens
  misc_RNA (1)...(19): siRNA sense strand
gcacagaugguuuaagaca

SEQ ID NO: 1988631 - RNA, 19 nt, Homo sapiens
  misc_RNA (1)...(19): siRNA sense strand
cuuaucagcugcuucguuu

SEQ ID NO: 1988632 - RNA, 19 nt, Homo sapiens
  misc_RNA (1)...(19): siRNA sense strand
cagggaauguagagaaauu

SEQ ID NO: 1988633 - RNA, 19 nt, Homo sapiens
  misc_RNA (1)...(19): siRNA sense strand
agaaauuaguugcauguug

SEQ ID NO: 1988634 - RNA, 19 nt, Homo sapiens
  misc_RNA (1)...(19): siRNA sense strand
agaaaccuauuccagauga

SEQ ID NO: 1988635 - RNA, 19 nt, Homo sapiens
  misc_RNA (1)...(19): siRNA sense strand
aagaagaucuaggaaagaa

SEQ ID NO: 1988636 - RNA, 19 nt, Homo sapiens
  misc_RNA (1)...(19): siRNA sense strand
guuuggaguuucuguauga

SEQ ID NO: 1988637 - RNA, 19 nt, Homo sapiens
  misc_RNA (1)...(19): siRNA sense strand
gaagaacuggaaagagauu

SEQ ID NO: 1988638 - RNA, 19 nt, Homo sapiens
  misc_RNA (1)...(19): siRNA sense strand
gaggaugauucucguggaa

SEQ ID NO: 1988639 - RNA, 19 nt, Homo sapiens
  misc_RNA (1)...(19): siRNA sense strand
uggaguuucuguaugauaa

SEQ ID NO: 1988640 - RNA, 19 nt, Homo sapiens
  misc_RNA (1)...(19): siRNA sense strand
caccaggccucuucaccua

SEQ ID NO: 1988641 - RNA, 19 nt, Homo sapiens
  misc_RNA (1)...(19): siRNA sense strand
gaugcaacauuuaguacga

SEQ ID NO: 1988642 - RNA, 19 nt, Homo sapiens
  misc_RNA (1)...(19): siRNA sense strand
acagacaaguucagcauau

SEQ ID NO: 1988643 - RNA, 19 nt, Homo sapiens
  misc_RNA (1)...(19): siRNA sense strand
gagcaccucauucuaaaga

SEQ ID NO: 1988644 - RNA, 19 nt, Homo sapiens
  misc_RNA (1)...(19): siRNA sense strand
guauagugcugccucugaa

SEQ ID NO: 1988645 - RNA, 19 nt, Homo sapiens
  misc_RNA (1)...(19): siRNA sense strand
guacgaaugcuucccuuga

SEQ ID NO: 1988646 - RNA, 19 nt, Homo sapiens
  misc_RNA (1)...(19): siRNA sense strand
gagcauggcagauccugaa

SEQ ID NO: 1988647 - RNA, 19 nt, Homo sapiens
  misc_RNA (1)...(19): siRNA sense strand
gcuagaugaugccagcaaa

SEQ ID NO: 1988648 - RNA, 19 nt, Homo sapiens
  misc_RNA (1)...(19): siRNA sense strand
gaaugcuucccuugagaua

SEQ ID NO: 1988649 - RNA, 19 nt, Homo sapiens
  misc_RNA (1)...(19): siRNA sense strand
gcuaaugaaucugaaaucu

SEQ ID NO: 1988650 - RNA, 19 nt, Homo sapiens
  misc_RNA (1)...(19): siRNA sense strand
ugagaccucugcuuucaug

SEQ ID NO: 1988651 - RNA, 19 nt, Homo sapiens
  misc_RNA (1)...(19): siRNA sense strand
augaagaacuggaaagaga

SEQ ID NO: 1988652 - RNA, 19 nt, Homo sapiens
  misc_RNA (1)...(19): siRNA sense strand
ugagagugcuguugaccuu

SEQ ID NO: 1988653 - RNA, 19 nt, Homo sapiens
  misc_RNA (1)...(19): siRNA sense strand
acagaugguuuaagacaga

SEQ ID NO: 1988654 - RNA, 19 nt, Homo sapiens
  misc_RNA (1)...(19): siRNA sense strand
aauuauagcuggagacaag

SEQ ID NO: 1988655 - RNA, 19 nt, Homo sapiens
  misc_RNA (1)...(19): siRNA sense strand
gaauuagaccucucugauc

SEQ ID NO: 1988656 - RNA, 19 nt, Homo sapiens
  misc_RNA (1)...(19): siRNA sense strand
aagaacagguccucagaau

SEQ ID NO: 1988657 - RNA, 19 nt, Homo sapiens
  misc_RNA (1)...(19): siRNA sense strand
gaaaagaagaucuaggaaa

SEQ ID NO: 1988658 - RNA, 19 nt, Homo sapiens
  misc_RNA (1)...(19): siRNA sense strand
cauaguaacagaaugcauu

SEQ ID NO: 1988659 - RNA, 19 nt, Homo sapiens
  misc_RNA (1)...(19): siRNA sense strand
ucagugagaccucugcuuu

SEQ ID NO: 1988660 - RNA, 19 nt, Homo sapiens
  misc_RNA (1)...(19): siRNA sense strand
caaagaacagguccucaga

SEQ ID NO: 1988661 - RNA, 19 nt, Homo sapiens
  misc_RNA (1)...(19): siRNA sense strand
ggacacuaguacuguagga

SEQ ID NO: 1988662 - RNA, 19 nt, Homo sapiens
  misc_RNA (1)...(19): siRNA sense strand
guagagaaauuaguugcau

SEQ ID NO: 1988663 - RNA, 19 nt, Homo sapiens
  misc_RNA (1)...(19): siRNA sense strand
gacaagcuuucaucaucuu

SEQ ID NO: 1988664 - RNA, 19 nt, Homo sapiens
  misc_RNA (1)...(19): siRNA sense strand
ggaggaagcacagaugguu

SEQ ID NO: 1988665 - RNA, 19 nt, Homo sapiens
  misc_RNA (1)...(19): siRNA sense strand
cuacauaugggaucuaaau

SEQ ID NO: 1988666 - RNA, 19 nt, Homo sapiens
  misc_RNA (1)...(19): siRNA sense strand
aaacuacucagaaggauug

SEQ ID NO: 1988667 - RNA, 19 nt, Homo sapiens
  misc_RNA (1)...(19): siRNA sense strand
gaaacuacucagaaggauu

SEQ ID NO: 1988668 - RNA, 19 nt, Homo sapiens
  misc_RNA (1)...(19): siRNA sense strand
ggaaauguuaauccaaaug

SEQ ID NO: 1988669 - RNA, 19 nt, Homo sapiens
  misc_RNA (1)...(19): siRNA sense strand
gauggaagccacccuuugu

SEQ ID NO: 1988670 - RNA, 19 nt, Homo sapiens
  misc_RNA (1)...(19): siRNA sense strand
gagccaaucaucaaaguca

SEQ ID NO: 1988671 - RNA, 19 nt, Homo sapiens
  misc_RNA (1)...(19): siRNA sense strand
gcauugaaacucgaaacua

SEQ ID NO: 1988672 - RNA, 19 nt, Homo sapiens
  misc_RNA (1)...(19): siRNA sense strand
cauggacacuaguacugua

SEQ ID NO: 1988673 - RNA, 19 nt, Homo sapiens
  misc_RNA (1)...(19): siRNA sense strand
uuagucagguuguaacaga

SEQ ID NO: 1988674 - RNA, 19 nt, Homo sapiens
  misc_RNA (1)...(19): siRNA sense strand
gaaauccugcugucuuauc

SEQ ID NO: 1988675 - RNA, 19 nt, Homo sapiens
  misc_RNA (1)...(19): siRNA sense strand
gaaggauugaccaugcaua

SEQ ID NO: 1988676 - RNA, 19 nt, Homo sapiens
  misc_RNA (1)...(19): siRNA sense strand
cauugaaacucgaaacuac

SEQ ID NO: 1988677 - RNA, 19 nt, Homo sapiens
  misc_RNA (1)...(19): siRNA sense strand
gcaaggagcauugaaacuc

SEQ ID NO: 1988678 - RNA, 19 nt, Homo sapiens
  misc_RNA (1)...(19): siRNA sense strand
ccaagaggaagcuagauga

SEQ ID NO: 1988679 - RNA, 19 nt, Homo sapiens
  misc_RNA (1)...(19): siRNA sense strand
ucacaucaccaaucaugaa

SEQ ID NO: 1988680 - RNA, 19 nt, Homo sapiens
  misc_RNA (1)...(19): siRNA sense strand
agaagaagaugccugaaaa

SEQ ID NO: 1988681 - RNA, 19 nt, Homo sapiens
  misc_RNA (1)...(19): siRNA sense strand
ucacagguaccacaaguug

SEQ ID NO: 1988682 - RNA, 19 nt, Homo sapiens
  misc_RNA (1)...(19): siRNA sense strand
gcagcaccauguguucauu

SEQ ID NO: 1988683 - RNA, 19 nt, Homo sapiens
  misc_RNA (1)...(19): siRNA sense strand
gugagagccuuggauguga

SEQ ID NO: 1988684 - RNA, 19 nt, Homo sapiens
  misc_RNA (1)...(19): siRNA sense strand
augcauacccacauaguua

SEQ ID NO: 1988685 - RNA, 19 nt, Homo sapiens
  misc_RNA (1)...(19): siRNA sense strand
gaugaugccagcaaacguu

SEQ ID NO: 1988686 - RNA, 19 nt, Homo sapiens
  misc_RNA (1)...(19): siRNA sense strand
gaaaagaugcuaagauucu

SEQ ID NO: 1988687 - RNA, 19 nt, Homo sapiens
  misc_RNA (1)...(19): siRNA sense strand
uggaaaagaugcuaagauu

SEQ ID NO: 1988688 - RNA, 19 nt, Homo sapiens
  misc_RNA (1)...(19): siRNA sense strand
cugcgaagaugagucagua

SEQ ID NO: 1988689 - RNA, 19 nt, Homo sapiens
  misc_RNA (1)...(19): siRNA sense strand
gcaauuggaugcaacauuu

SEQ ID NO: 1988690 - RNA, 19 nt, Homo sapiens
  misc_RNA (1)...(19): siRNA sense strand
ggacauugaugguuuaauu

SEQ ID NO: 1988691 - RNA, 19 nt, Homo sapiens
  misc_RNA (1)...(19): siRNA sense strand
gcaugucucugcuauauuu

SEQ ID NO: 1988692 - RNA, 19 nt, Homo sapiens
  misc_RNA (1)...(19): siRNA sense strand
gaagauaucagcugcauug

SEQ ID NO: 1988693 - RNA, 19 nt, Homo sapiens
  misc_RNA (1)...(19): siRNA sense strand
caggagagguguuauauga

SEQ ID NO: 1988694 - RNA, 19 nt, Homo sapiens
  misc_RNA (1)...(19): siRNA sense strand
gaugugggaucuucgauuu

SEQ ID NO: 1988695 - RNA, 19 nt, Homo sapiens
  misc_RNA (1)...(19): siRNA sense strand
gaaacaaguugacaagcuu

SEQ ID NO: 1988696 - RNA, 19 nt, Homo sapiens
  misc_RNA (1)...(19): siRNA sense strand
ggaaugacccuccagcuuu

SEQ ID NO: 1988697 - RNA, 19 nt, Homo sapiens
  misc_RNA (1)...(19): siRNA sense strand
ggaggaacauuuaauaucu

SEQ ID NO: 1988698 - RNA, 19 nt, Homo sapiens
  misc_RNA (1)...(19): siRNA sense strand
gaaccaggcuugaaaauga

SEQ ID NO: 1988699 - RNA, 19 nt, Homo sapiens
  misc_RNA (1)...(19): siRNA sense strand
gaacagacacuuucaccaa

SEQ ID NO: 1988700 - RNA, 19 nt, Homo sapiens
  misc_RNA (1)...(19): siRNA sense strand
gaacagguccucagaaugg

SEQ ID NO: 1988701 - RNA, 19 nt, Homo sapiens
  misc_RNA (1)...(19): siRNA sense strand
caagaaaccuauuccagau

SEQ ID NO: 1988702 - RNA, 19 nt, Homo sapiens
  misc_RNA (1)...(19): siRNA sense strand
gaaauaccuuccagcaugu

SEQ ID NO: 1988703 - RNA, 19 nt, Homo sapiens
  misc_RNA (1)...(19): siRNA sense strand
ggcagauccugaauuguua

SEQ ID NO: 1988704 - RNA, 19 nt, Homo sapiens
  misc_RNA (1)...(19): siRNA sense strand
ccaauaagcugggugucua

SEQ ID NO: 1988705 - RNA, 19 nt, Homo sapiens
  misc_RNA (1)...(19): siRNA sense strand
gaaugacccuccagcuuug

SEQ ID NO: 1988706 - RNA, 19 nt, Homo sapiens
  misc_RNA (1)...(19): siRNA sense strand
ccgaaauccugcugucuua

SEQ ID NO: 1988707 - RNA, 19 nt, Homo sapiens
  misc_RNA (1)...(19): siRNA sense strand
gaaaauaccuugaacuucu

SEQ ID NO: 1988708 - RNA, 19 nt, Homo sapiens
  misc_RNA (1)...(19): siRNA sense strand
caacagacccucaaaccaa

SEQ ID NO: 1988709 - RNA, 19 nt, Homo sapiens
  misc_RNA (1)...(19): siRNA sense strand
ggacaugaaucaccuaaaa

SEQ ID NO: 1988710 - RNA, 19 nt, Homo sapiens
  misc_RNA (1)...(19): siRNA sense strand
gacuaaagcucaagaugga

SEQ ID NO: 1988711 - RNA, 19 nt, Homo sapiens
  misc_RNA (1)...(19): siRNA sense strand
ggcuuuagcugcaguauug

SEQ ID NO: 1988712 - RNA, 19 nt, Homo sapiens
  misc_RNA (1)...(19): siRNA sense strand
gaccaugcauacccacaua

SEQ ID NO: 1988713 - RNA, 19 nt, Homo sapiens
  misc_RNA (1)...(19): siRNA sense strand
gaugaccgguuaccaguga

SEQ ID NO: 1988714 - RNA, 19 nt, Homo sapiens
  misc_RNA (1)...(19): siRNA sense strand
gaccuuuguuuacaugaua

SEQ ID NO: 1988715 - RNA, 19 nt, Homo sapiens
  misc_RNA (1)...(19): siRNA sense strand
gauccugaauuguuacuga

SEQ ID NO: 1988716 - RNA, 19 nt, Homo sapiens
  misc_RNA (1)...(19): siRNA sense strand
gaggcaaacugguuacguu

SEQ ID NO: 1988717 - RNA, 19 nt, Homo sapiens
  misc_RNA (1)...(19): siRNA sense strand
gaaagagauuguugagucu

SEQ ID NO: 1988718 - RNA, 19 nt, Homo sapiens
  misc_RNA (1)...(19): siRNA sense strand
aagcacagaugguuuaaga

SEQ ID NO: 1988719 - RNA, 19 nt, Homo sapiens
  misc_RNA (1)...(19): siRNA sense strand
cauagcagguggacaagaa

SEQ ID NO: 1988720 - RNA, 19 nt, Homo sapiens
  misc_RNA (1)...(19): siRNA sense strand
cauaaugcauggaaauguu

SEQ ID NO: 1988721 - RNA, 19 nt, Homo sapiens
  misc_RNA (1)...(19): siRNA sense strand
cauggcagauccugaauug

SEQ ID NO: 1988722 - RNA, 19 nt, Homo sapiens
  misc_RNA (1)...(19): siRNA sense strand
uauaugaacuucccaccaa

SEQ ID NO: 1988723 - RNA, 19 nt, Homo sapiens
  misc_RNA (1)...(19): siRNA sense strand
gaaguuaaaggaaguagau

SEQ ID NO: 1988724 - RNA, 19 nt, Homo sapiens
  misc_RNA (1)...(19): siRNA sense strand
uagcugcaguauugacuua

SEQ ID NO: 1988725 - RNA, 19 nt, Homo sapiens
  misc_RNA (1)...(19): siRNA sense strand
acacaguggugcuucgaua

SEQ ID NO: 1988726 - RNA, 19 nt, Homo sapiens
  misc_RNA (1)...(19): siRNA sense strand
aaacacagccgccagaaga

SEQ ID NO: 1988727 - RNA, 19 nt, Homo sapiens
  misc_RNA (1)...(19): siRNA sense strand
gaagguaaacuuugaggau

SEQ ID NO: 1988728 - RNA, 19 nt, Homo sapiens
  misc_RNA (1)...(19): siRNA sense strand
ggagagguguuauaugaac

SEQ ID NO: 1988729 - RNA, 19 nt, Homo sapiens
  misc_RNA (1)...(19): siRNA sense strand
uuacauaucuucugcuucu

SEQ ID NO: 1988730 - RNA, 19 nt, Homo sapiens
  misc_RNA (1)...(19): siRNA sense strand
gcacagaugguuuaagaca

SEQ ID NO: 1988731 - RNA, 19 nt, Homo sapiens
  misc_RNA (1)...(19): siRNA sense strand
cuuaucagcugcuucguuu

SEQ ID NO: 1988732 - RNA, 19 nt, Homo sapiens
  misc_RNA (1)...(19): siRNA sense strand
cagggaauguagagaaauu

SEQ ID NO: 1988733 - RNA, 19 nt, Homo sapiens
  misc_RNA (1)...(19): siRNA sense strand
agaaauuaguugcauguug

SEQ ID NO: 1988734 - RNA, 19 nt, Homo sapiens
  misc_RNA (1)...(19): siRNA sense strand
agaaaccuauuccagauga

SEQ ID NO: 1988735 - RNA, 19 nt, Homo sapiens
  misc_RNA (1)...(19): siRNA sense strand
aagaagaucuaggaaagaa

SEQ ID NO: 1988736 - RNA, 19 nt, Homo sapiens
  misc_RNA (1)...(19): siRNA sense strand
guuuggaguuucuguauga

SEQ ID NO: 1988737 - RNA, 19 nt, Homo sapiens
  misc_RNA (1)...(19): siRNA sense strand
gaagaacuggaaagagauu

SEQ ID NO: 1988738 - RNA, 19 nt, Homo sapiens
  misc_RNA (1)...(19): siRNA sense strand
gaggaugauucucguggaa

SEQ ID NO: 1988739 - RNA, 19 nt, Homo sapiens
  misc_RNA (1)...(19): siRNA sense strand
uggaguuucuguaugauaa

SEQ ID NO: 1988740 - RNA, 19 nt, Homo sapiens
  misc_RNA (1)...(19): siRNA sense strand
caccaggccucuucaccua

SEQ ID NO: 1988741 - RNA, 19 nt, Homo sapiens
  misc_RNA (1)...(19): siRNA sense strand
gaugcaacauuuaguacga

SEQ ID NO: 1988742 - RNA, 19 nt, Homo sapiens
  misc_RNA (1)...(19): siRNA sense strand
acagacaaguucagcauau

SEQ ID NO: 1988743 - RNA, 19 nt, Homo sapiens
  misc_RNA (1)...(19): siRNA sense strand
gagcaccucauucuaaaga

SEQ ID NO: 1988744 - RNA, 19 nt, Homo sapiens
  misc_RNA (1)...(19): siRNA sense strand
guauagugcugccucugaa

SEQ ID NO: 1988745 - RNA, 19 nt, Homo sapiens
  misc_RNA (1)...(19): siRNA sense strand
guacgaaugcuucccuuga

SEQ ID NO: 1988746 - RNA, 19 nt, Homo sapiens
  misc_RNA (1)...(19): siRNA sense strand
gagcauggcagauccugaa

SEQ ID NO: 1988747 - RNA, 19 nt, Homo sapiens
  misc_RNA (1)...(19): siRNA sense strand
gcuagaugaugccagcaaa

SEQ ID NO: 1988748 - RNA, 19 nt, Homo sapiens
  misc_RNA (1)...(19): siRNA sense strand
gaaugcuucccuugagaua

SEQ ID NO: 1988749 - RNA, 19 nt, Homo sapiens
  misc_RNA (1)...(19): siRNA sense strand
gcuaaugaaucugaaaucu

SEQ ID NO: 1988750 - RNA, 19 nt, Homo sapiens
  misc_RNA (1)...(19): siRNA sense strand
ugagaccucugcuuucaug

SEQ ID NO: 1988751 - RNA, 19 nt, Homo sapiens
  misc_RNA (1)...(19): siRNA sense strand
augaagaacuggaaagaga

SEQ ID NO: 1988752 - RNA, 19 nt, Homo sapiens
  misc_RNA (1)...(19): siRNA sense strand
ugagagugcuguugaccuu

SEQ ID NO: 1988753 - RNA, 19 nt, Homo sapiens
  misc_RNA (1)...(19): siRNA sense strand
acagaugguuuaagacaga

SEQ ID NO: 1988754 - RNA, 19 nt, Homo sapiens
  misc_RNA (1)...(19): siRNA sense strand
aauuauagcuggagacaag

SEQ ID NO: 1988755 - RNA, 19 nt, Homo sapiens
  misc_RNA (1)...(19): siRNA sense strand
gaauuagaccucucugauc

SEQ ID NO: 1988756 - RNA, 19 nt, Homo sapiens
  misc_RNA (1)...(19): siRNA sense strand
aagaacagguccucagaau

SEQ ID NO: 1988757 - RNA, 19 nt, Homo sapiens
  misc_RNA (1)...(19): siRNA sense strand
gaaaagaagaucuaggaaa

SEQ ID NO: 1988758 - RNA, 19 nt, Homo sapiens
  misc_RNA (1)...(19): siRNA sense strand
cauaguaacagaaugcauu

SEQ ID NO: 1988759 - RNA, 19 nt, Homo sapiens
  misc_RNA (1)...(19): siRNA sense strand
ucagugagaccucugcuuu

SEQ ID NO: 1988760 - RNA, 19 nt, Homo sapiens
  misc_RNA (1)...(19): siRNA sense strand
caaagaacagguccucaga

SEQ ID NO: 1988761 - RNA, 19 nt, Homo sapiens
  misc_RNA (1)...(19): siRNA sense strand
ggacacuaguacuguagga

SEQ ID NO: 1988762 - RNA, 19 nt, Homo sapiens
  misc_RNA (1)...(19): siRNA sense strand
guagagaaauuaguugcau

SEQ ID NO: 1988763 - RNA, 19 nt, Homo sapiens
  misc_RNA (1)...(19): siRNA sense strand
gacaagcuuucaucaucuu

SEQ ID NO: 1988764 - RNA, 19 nt, Homo sapiens
  misc_RNA (1)...(19): siRNA sense strand
ggaggaagcacagaugguu

SEQ ID NO: 1988765 - RNA, 19 nt, Homo sapiens
  misc_RNA (1)...(19): siRNA sense strand
cuacauaugggaucuaaau

SEQ ID NO: 1988766 - RNA, 19 nt, Homo sapiens
  misc_RNA (1)...(19): siRNA sense strand
aaacuacucagaaggauug

SEQ ID NO: 1988767 - RNA, 19 nt, Homo sapiens
  misc_RNA (1)...(19): siRNA sense strand
gaaacuacucagaaggauu

SEQ ID NO: 1988768 - RNA, 19 nt, Homo sapiens
  misc_RNA (1)...(19): siRNA sense strand
ggaaauguuaauccaaaug

SEQ ID NO: 1988769 - RNA, 19 nt, Homo sapiens
  misc_RNA (1)...(19): siRNA sense strand
gauggaagccacccuuugu

SEQ ID NO: 1988770 - RNA, 19 nt, Homo sapiens
  misc_RNA (1)...(19): siRNA sense strand
gagccaaucaucaaaguca

SEQ ID NO: 1988771 - RNA, 19 nt, Homo sapiens
  misc_RNA (1)...(19): siRNA sense strand
gcauugaaacucgaaacua

SEQ ID NO: 1988772 - RNA, 19 nt, Homo sapiens
  misc_RNA (1)...(19): siRNA sense strand
cauggacacuaguacugua

SEQ ID NO: 1988773 - RNA, 19 nt, Homo sapiens
  misc_RNA (1)...(19): siRNA sense strand
uuagucagguuguaacaga

SEQ ID NO: 1988774 - RNA, 19 nt, Homo sapiens
  misc_RNA (1)...(19): siRNA sense strand
gaaauccugcugucuuauc

SEQ ID NO: 1988775 - RNA, 19 nt, Homo sapiens
  misc_RNA (1)...(19): siRNA sense strand
gaaggauugaccaugcaua

SEQ ID NO: 1988776 - RNA, 19 nt, Homo sapiens
  misc_RNA (1)...(19): siRNA sense strand
cauugaaacucgaaacuac

SEQ ID NO: 1988777 - RNA, 19 nt, Homo sapiens
  misc_RNA (1)...(19): siRNA sense strand
gcaaggagcauugaaacuc

SEQ ID NO: 1988778 - RNA, 19 nt, Homo sapiens
  misc_RNA (1)...(19): siRNA sense strand
ccaagaggaagcuagauga

SEQ ID NO: 1988779 - RNA, 19 nt, Homo sapiens
  misc_RNA (1)...(19): siRNA sense strand
ucacaucaccaaucaugaa

SEQ ID NO: 1988780 - RNA, 19 nt, Homo sapiens
  misc_RNA (1)...(19): siRNA sense strand
agaagaagaugccugaaaa

SEQ ID NO: 1988781 - RNA, 19 nt, Homo sapiens
  misc_RNA (1)...(19): siRNA sense strand
ucacagguaccacaaguug

SEQ ID NO: 1988782 - RNA, 19 nt, Homo sapiens
  misc_RNA (1)...(19): siRNA sense strand
gcagcaccauguguucauu

SEQ ID NO: 1988783 - RNA, 19 nt, Homo sapiens
  misc_RNA (1)...(19): siRNA sense strand
gugagagccuuggauguga

SEQ ID NO: 1988784 - RNA, 19 nt, Homo sapiens
  misc_RNA (1)...(19): siRNA sense strand
augcauacccacauaguua

SEQ ID NO: 1988785 - RNA, 19 nt, Homo sapiens
  misc_RNA (1)...(19): siRNA sense strand
gaugaugccagcaaacguu

SEQ ID NO: 1988786 - RNA, 19 nt, Homo sapiens
  misc_RNA (1)...(19): siRNA sense strand
gaaaagaugcuaagauucu

SEQ ID NO: 1988787 - RNA, 19 nt, Homo sapiens
  misc_RNA (1)...(19): siRNA sense strand
uggaaaagaugcuaagauu

SEQ ID NO: 1988788 - RNA, 19 nt, Homo sapiens
  misc_RNA (1)...(19): siRNA sense strand
cugcgaagaugagucagua

SEQ ID NO: 1988789 - RNA, 19 nt, Homo sapiens
  misc_RNA (1)...(19): siRNA sense strand
gaagagagcugaaaacuua

SEQ ID NO: 1988790 - RNA, 19 nt, Homo sapiens
  misc_RNA (1)...(19): siRNA sense strand
gaacgaacauugcaauuga

SEQ ID NO: 1988791 - RNA, 19 nt, Homo sapiens
  misc_RNA (1)...(19): siRNA sense strand
ggaaagagauuauaugaag

SEQ ID NO: 1988792 - RNA, 19 nt, Homo sapiens
  misc_RNA (1)...(19): siRNA sense strand
gaacuacucuaacauuuga

SEQ ID NO: 1988793 - RNA, 19 nt, Homo sapiens
  misc_RNA (1)...(19): siRNA sense strand
ggagugggcuggugcuuua

SEQ ID NO: 1988794 - RNA, 19 nt, Homo sapiens
  misc_RNA (1)...(19): siRNA sense strand
ggacacagcuugcauugga

SEQ ID NO: 1988795 - RNA, 19 nt, Homo sapiens
  misc_RNA (1)...(19): siRNA sense strand
gaaaguggcaaagaaauua

SEQ ID NO: 1988796 - RNA, 19 nt, Homo sapiens
  misc_RNA (1)...(19): siRNA sense strand
gaucagaaguuguuagaga

SEQ ID NO: 1988797 - RNA, 19 nt, Homo sapiens
  misc_RNA (1)...(19): siRNA sense strand
gcaaauaaccuacauguca

SEQ ID NO: 1988798 - RNA, 19 nt, Homo sapiens
  misc_RNA (1)...(19): siRNA sense strand
gaagugguguugcuuugua

SEQ ID NO: 1988799 - RNA, 19 nt, Homo sapiens
  misc_RNA (1)...(19): siRNA sense strand
gagagaaguuguugagaaa

SEQ ID NO: 1988800 - RNA, 19 nt, Homo sapiens
  misc_RNA (1)...(19): siRNA sense strand
ggaaagauguagaguuguu

SEQ ID NO: 1988801 - RNA, 19 nt, Homo sapiens
  misc_RNA (1)...(19): siRNA sense strand
gaaaguacagcaggaauua

SEQ ID NO: 1988802 - RNA, 19 nt, Homo sapiens
  misc_RNA (1)...(19): siRNA sense strand
aaacuacgauugacacuaa

SEQ ID NO: 1988803 - RNA, 19 nt, Homo sapiens
  misc_RNA (1)...(19): siRNA sense strand
uaauugaacugcagaguaa

SEQ ID NO: 1988804 - RNA, 19 nt, Homo sapiens
  misc_RNA (1)...(19): siRNA sense strand
gcuaagaacuuuaaugaca

SEQ ID NO: 1988805 - RNA, 19 nt, Homo sapiens
  misc_RNA (1)...(19): siRNA sense strand
gaacaacuaacgaaucuuu

SEQ ID NO: 1988806 - RNA, 19 nt, Homo sapiens
  misc_RNA (1)...(19): siRNA sense strand
gagauuauaugaagcagaa

SEQ ID NO: 1988807 - RNA, 19 nt, Homo sapiens
  misc_RNA (1)...(19): siRNA sense strand
gaagaccuuugccacuuua

SEQ ID NO: 1988808 - RNA, 19 nt, Homo sapiens
  misc_RNA (1)...(19): siRNA sense strand
ggauaaauguucaagauag

SEQ ID NO: 1988809 - RNA, 19 nt, Homo sapiens
  misc_RNA (1)...(19): siRNA sense strand
gagcaugucuucaguaucu

SEQ ID NO: 1988810 - RNA, 19 nt, Homo sapiens
  misc_RNA (1)...(19): siRNA sense strand
ggagagaaguuacaagcuu

SEQ ID NO: 1988811 - RNA, 19 nt, Homo sapiens
  misc_RNA (1)...(19): siRNA sense strand
cuaaugauguggaaucuuu

SEQ ID NO: 1988812 - RNA, 19 nt, Homo sapiens
  misc_RNA (1)...(19): siRNA sense strand
uaauagagcuguuagaaag

SEQ ID NO: 1988813 - RNA, 19 nt, Homo sapiens
  misc_RNA (1)...(19): siRNA sense strand
gaugagaaguuacaguuau

SEQ ID NO: 1988814 - RNA, 19 nt, Homo sapiens
  misc_RNA (1)...(19): siRNA sense strand
gaucauacuucucugaaug

SEQ ID NO: 1988815 - RNA, 19 nt, Homo sapiens
  misc_RNA (1)...(19): siRNA sense strand
ccacaaagcccagaaauga

SEQ ID NO: 1988816 - RNA, 19 nt, Homo sapiens
  misc_RNA (1)...(19): siRNA sense strand
gaagagaaauacgaagcua

SEQ ID NO: 1988817 - RNA, 19 nt, Homo sapiens
  misc_RNA (1)...(19): siRNA sense strand
gagcuaagaacuuuaauga

SEQ ID NO: 1988818 - RNA, 19 nt, Homo sapiens
  misc_RNA (1)...(19): siRNA sense strand
ggaagaccuuugccacuuu

SEQ ID NO: 1988819 - RNA, 19 nt, Homo sapiens
  misc_RNA (1)...(19): siRNA sense strand
caaauuaucugcaguccau

SEQ ID NO: 1988820 - RNA, 19 nt, Homo sapiens
  misc_RNA (1)...(19): siRNA sense strand
gcaaagucaucuaaaggaa

SEQ ID NO: 1988821 - RNA, 19 nt, Homo sapiens
  misc_RNA (1)...(19): siRNA sense strand
ggaauccuuugggaaauua

SEQ ID NO: 1988822 - RNA, 19 nt, Homo sapiens
  misc_RNA (1)...(19): siRNA sense strand
gagagaaguuacaagcuuu

SEQ ID NO: 1988823 - RNA, 19 nt, Homo sapiens
  misc_RNA (1)...(19): siRNA sense strand
gcaaagaaauuagggaauc

SEQ ID NO: 1988824 - RNA, 19 nt, Homo sapiens
  misc_RNA (1)...(19): siRNA sense strand
gaacauguguccccagaua

SEQ ID NO: 1988825 - RNA, 19 nt, Homo sapiens
  misc_RNA (1)...(19): siRNA sense strand
gaacauugcaauugaaaga

SEQ ID NO: 1988826 - RNA, 19 nt, Homo sapiens
  misc_RNA (1)...(19): siRNA sense strand
gugaaggucuuguacauga

SEQ ID NO: 1988827 - RNA, 19 nt, Homo sapiens
  misc_RNA (1)...(19): siRNA sense strand
ggaaacagcagaugaagga

SEQ ID NO: 1988828 - RNA, 19 nt, Homo sapiens
  misc_RNA (1)...(19): siRNA sense strand
gggcagaacuucaguccuu

SEQ ID NO: 1988829 - RNA, 19 nt, Homo sapiens
  misc_RNA (1)...(19): siRNA sense strand
ggaagugcuuugauucuau

SEQ ID NO: 1988830 - RNA, 19 nt, Homo sapiens
  misc_RNA (1)...(19): siRNA sense strand
ccaugacaauuauguguua

SEQ ID NO: 1988831 - RNA, 19 nt, Homo sapiens
  misc_RNA (1)...(19): siRNA sense strand
uuacagaucuacugaguga

SEQ ID NO: 1988832 - RNA, 19 nt, Homo sapiens
  misc_RNA (1)...(19): siRNA sense strand
caaagcaaauacaagauug

SEQ ID NO: 1988833 - RNA, 19 nt, Homo sapiens
  misc_RNA (1)...(19): siRNA sense strand
caugaugucuguacaagaa

SEQ ID NO: 1988834 - RNA, 19 nt, Homo sapiens
  misc_RNA (1)...(19): siRNA sense strand
gagaaguuguugagaaaga

SEQ ID NO: 1988835 - RNA, 19 nt, Homo sapiens
  misc_RNA (1)...(19): siRNA sense strand
gcaagacagagaacaguua

SEQ ID NO: 1988836 - RNA, 19 nt, Homo sapiens
  misc_RNA (1)...(19): siRNA sense strand
gaagcagucacgagaaaua

SEQ ID NO: 1988837 - RNA, 19 nt, Homo sapiens
  misc_RNA (1)...(19): siRNA sense strand
gcagaaugccgucaaacua

SEQ ID NO: 1988838 - RNA, 19 nt, Homo sapiens
  misc_RNA (1)...(19): siRNA sense strand
caagauagaccuaaugaug

SEQ ID NO: 1988839 - RNA, 19 nt, Homo sapiens
  misc_RNA (1)...(19): siRNA sense strand
cauagaagacaucaaguua

SEQ ID NO: 1988840 - RNA, 19 nt, Homo sapiens
  misc_RNA (1)...(19): siRNA sense strand
gagaacaguuaauucagaa

SEQ ID NO: 1988841 - RNA, 19 nt, Homo sapiens
  misc_RNA (1)...(19): siRNA sense strand
ugaaaucucuucuugaaca

SEQ ID NO: 1988842 - RNA, 19 nt, Homo sapiens
  misc_RNA (1)...(19): siRNA sense strand
aaaggaaacugaagagaau

SEQ ID NO: 1988843 - RNA, 19 nt, Homo sapiens
  misc_RNA (1)...(19): siRNA sense strand
agcagaaacugaugaaaua

SEQ ID NO: 1988844 - RNA, 19 nt, Homo sapiens
  misc_RNA (1)...(19): siRNA sense strand
gagaaauaguguuagaaga

SEQ ID NO: 1988845 - RNA, 19 nt, Homo sapiens
  misc_RNA (1)...(19): siRNA sense strand
guaugaaguugccaagaaa

SEQ ID NO: 1988846 - RNA, 19 nt, Homo sapiens
  misc_RNA (1)...(19): siRNA sense strand
ggauaaagauuugauagag

SEQ ID NO: 1988847 - RNA, 19 nt, Homo sapiens
  misc_RNA (1)...(19): siRNA sense strand
guucgaacaucuuugauug

SEQ ID NO: 1988848 - RNA, 19 nt, Homo sapiens
  misc_RNA (1)...(19): siRNA sense strand
ggaggacuguucaaauuca

SEQ ID NO: 1988849 - RNA, 19 nt, Homo sapiens
  misc_RNA (1)...(19): siRNA sense strand
acaagaaucucaugcugaa

SEQ ID NO: 1988850 - RNA, 19 nt, Homo sapiens
  misc_RNA (1)...(19): siRNA sense strand
aaacuugacggacuaauaa

SEQ ID NO: 1988851 - RNA, 19 nt, Homo sapiens
  misc_RNA (1)...(19): siRNA sense strand
gaacaugaagacucagaaa

SEQ ID NO: 1988852 - RNA, 19 nt, Homo sapiens
  misc_RNA (1)...(19): siRNA sense strand
aaaggaugcaucuguauua

SEQ ID NO: 1988853 - RNA, 19 nt, Homo sapiens
  misc_RNA (1)...(19): siRNA sense strand
gcagagcuaagaacuuuaa

SEQ ID NO: 1988854 - RNA, 19 nt, Homo sapiens
  misc_RNA (1)...(19): siRNA sense strand
ggagcaaagucaucuaaag

SEQ ID NO: 1988855 - RNA, 19 nt, Homo sapiens
  misc_RNA (1)...(19): siRNA sense strand
gaagugcuuugauucuaug

SEQ ID NO: 1988856 - RNA, 19 nt, Homo sapiens
  misc_RNA (1)...(19): siRNA sense strand
gaacaacagaccaauuuua

SEQ ID NO: 1988857 - RNA, 19 nt, Homo sapiens
  misc_RNA (1)...(19): siRNA sense strand
gaggacacacuucagguua

SEQ ID NO: 1988858 - RNA, 19 nt, Homo sapiens
  misc_RNA (1)...(19): siRNA sense strand
agagagaaguuguugagaa

SEQ ID NO: 1988859 - RNA, 19 nt, Homo sapiens
  misc_RNA (1)...(19): siRNA sense strand
caagguuucugauuuguca

SEQ ID NO: 1988860 - RNA, 19 nt, Homo sapiens
  misc_RNA (1)...(19): siRNA sense strand
agucaaagauggaaagaga

SEQ ID NO: 1988861 - RNA, 19 nt, Homo sapiens
  misc_RNA (1)...(19): siRNA sense strand
gcaauugaaagaagaagaa

SEQ ID NO: 1988862 - RNA, 19 nt, Homo sapiens
  misc_RNA (1)...(19): siRNA sense strand
gaaggaagcagaaacugau

SEQ ID NO: 1988863 - RNA, 19 nt, Homo sapiens
  misc_RNA (1)...(19): siRNA sense strand
ggaauuagaggacacacuu

SEQ ID NO: 1988864 - RNA, 19 nt, Homo sapiens
  misc_RNA (1)...(19): siRNA sense strand
ggaaaguacagcaggaauu

SEQ ID NO: 1988865 - RNA, 19 nt, Homo sapiens
  misc_RNA (1)...(19): siRNA sense strand
gaauaugaagguaaacuug

SEQ ID NO: 1988866 - RNA, 19 nt, Homo sapiens
  misc_RNA (1)...(19): siRNA sense strand
uaaaggaaacugaagagaa

SEQ ID NO: 1988867 - RNA, 19 nt, Homo sapiens
  misc_RNA (1)...(19): siRNA sense strand
guaauagagcuguuagaaa

SEQ ID NO: 1988868 - RNA, 19 nt, Homo sapiens
  misc_RNA (1)...(19): siRNA sense strand
uagagucacuuucugaaga

SEQ ID NO: 1988869 - RNA, 19 nt, Homo sapiens
  misc_RNA (1)...(19): siRNA sense strand
uucagaagcuuaauuguga

SEQ ID NO: 1988870 - RNA, 19 nt, Homo sapiens
  misc_RNA (1)...(19): siRNA sense strand
gaauugagugcucuugaaa

SEQ ID NO: 1988871 - RNA, 19 nt, Homo sapiens
  misc_RNA (1)...(19): siRNA sense strand
gaaaucucuucuugaacaa

SEQ ID NO: 1988872 - RNA, 19 nt, Homo sapiens
  misc_RNA (1)...(19): siRNA sense strand
cuugaaaucucuucuugaa

SEQ ID NO: 1988873 - RNA, 19 nt, Homo sapiens
  misc_RNA (1)...(19): siRNA sense strand
uaaacuugacggacuaaua

SEQ ID NO: 1988874 - RNA, 19 nt, Homo sapiens
  misc_RNA (1)...(19): siRNA sense strand
cagugugacuucucaaauu

SEQ ID NO: 1988875 - RNA, 19 nt, Homo sapiens
  misc_RNA (1)...(19): siRNA sense strand
ccaagacucucacuucagu

SEQ ID NO: 1988876 - RNA, 19 nt, Homo sapiens
  misc_RNA (1)...(19): siRNA sense strand
gcacauacguuugauuuug

SEQ ID NO: 1988877 - RNA, 19 nt, Homo sapiens
  misc_RNA (1)...(19): siRNA sense strand
ucaaaagccucgaaaguuu

SEQ ID NO: 1988878 - RNA, 19 nt, Homo sapiens
  misc_RNA (1)...(19): siRNA sense strand
agacauaguuacagagaau

SEQ ID NO: 1988879 - RNA, 19 nt, Homo sapiens
  misc_RNA (1)...(19): siRNA sense strand
uaagaaaucgucuguuuag

SEQ ID NO: 1988880 - RNA, 19 nt, Homo sapiens
  misc_RNA (1)...(19): siRNA sense strand
gcaucuguauuaccugauu

SEQ ID NO: 1988881 - RNA, 19 nt, Homo sapiens
  misc_RNA (1)...(19): siRNA sense strand
ggacaaaguuuuacagagu

SEQ ID NO: 1988882 - RNA, 19 nt, Homo sapiens
  misc_RNA (1)...(19): siRNA sense strand
uaguagacaugaagaagaa

SEQ ID NO: 1988883 - RNA, 19 nt, Homo sapiens
  misc_RNA (1)...(19): siRNA sense strand
gaaauaguguuagaagacu

SEQ ID NO: 1988884 - RNA, 19 nt, Homo sapiens
  misc_RNA (1)...(19): siRNA sense strand
gaaaauuugucgucuccua

SEQ ID NO: 1988885 - RNA, 19 nt, Homo sapiens
  misc_RNA (1)...(19): siRNA sense strand
ggaacuacucuaacauuug

SEQ ID NO: 1988886 - RNA, 19 nt, Homo sapiens
  misc_RNA (1)...(19): siRNA sense strand
gauauuaagcagaagugua

SEQ ID NO: 1988887 - RNA, 19 nt, Homo sapiens
  misc_RNA (1)...(19): siRNA sense strand
gauaaugaauuugcuuugg

SEQ ID NO: 1988888 - RNA, 19 nt, Homo sapiens
  misc_RNA (1)...(19): siRNA sense strand
gaagaagaagucaguaagu

SEQ ID NO: 1988889 - RNA, 19 nt, Homo sapiens
  misc_RNA (1)...(19): siRNA sense strand
gaacaaagccuuccuggau

SEQ ID NO: 1988890 - RNA, 19 nt, Homo sapiens
  misc_RNA (1)...(19): siRNA sense strand
gaagauagccuguguguag

SEQ ID NO: 1988891 - RNA, 19 nt, Homo sapiens
  misc_RNA (1)...(19): siRNA sense strand
gagaauuccuguccacuga

SEQ ID NO: 1988892 - RNA, 19 nt, Homo sapiens
  misc_RNA (1)...(19): siRNA sense strand
gcaguaacaucaccucuuc

SEQ ID NO: 1988893 - RNA, 19 nt, Homo sapiens
  misc_RNA (1)...(19): siRNA sense strand
gaaccaaacuaauuaucca

SEQ ID NO: 1988894 - RNA, 19 nt, Homo sapiens
  misc_RNA (1)...(19): siRNA sense strand
ggaacaagguggugucaag

SEQ ID NO: 1988895 - RNA, 19 nt, Homo sapiens
  misc_RNA (1)...(19): siRNA sense strand
ccaaggaagugaaagucua

SEQ ID NO: 1988896 - RNA, 19 nt, Homo sapiens
  misc_RNA (1)...(19): siRNA sense strand
ccagugaacuuacaagcaa

SEQ ID NO: 1988897 - RNA, 19 nt, Homo sapiens
  misc_RNA (1)...(19): siRNA sense strand
acacagacaccgacaauuu

SEQ ID NO: 1988898 - RNA, 19 nt, Homo sapiens
  misc_RNA (1)...(19): siRNA sense strand
auaguuaucugaucuguga

SEQ ID NO: 1988899 - RNA, 19 nt, Homo sapiens
  misc_RNA (1)...(19): siRNA sense strand
ugaaggaacugagaaacaa

SEQ ID NO: 1988900 - RNA, 19 nt, Homo sapiens
  misc_RNA (1)...(19): siRNA sense strand
ggauaggacugguggaaca

SEQ ID NO: 1988901 - RNA, 19 nt, Homo sapiens
  misc_RNA (1)...(19): siRNA sense strand
acaagguggugucaagaua

SEQ ID NO: 1988902 - RNA, 19 nt, Homo sapiens
  misc_RNA (1)...(19): siRNA sense strand
ccagauaaaccaagugaaa

SEQ ID NO: 1988903 - RNA, 19 nt, Homo sapiens
  misc_RNA (1)...(19): siRNA sense strand
gcuggacgcugucuggauu

SEQ ID NO: 1988904 - RNA, 19 nt, Homo sapiens
  misc_RNA (1)...(19): siRNA sense strand
gagaaaagauggucugcuu

SEQ ID NO: 1988905 - RNA, 19 nt, Homo sapiens
  misc_RNA (1)...(19): siRNA sense strand
caacggaggccaagaccaa

SEQ ID NO: 1988906 - RNA, 19 nt, Homo sapiens
  misc_RNA (1)...(19): siRNA sense strand
gaaacaaggacaccaacau

SEQ ID NO: 1988907 - RNA, 19 nt, Homo sapiens
  misc_RNA (1)...(19): siRNA sense strand
uuacgcagguuauaguuau

SEQ ID NO: 1988908 - RNA, 19 nt, Homo sapiens
  misc_RNA (1)...(19): siRNA sense strand
caauuuggguauucggauu

SEQ ID NO: 1988909 - RNA, 19 nt, Homo sapiens
  misc_RNA (1)...(19): siRNA sense strand
uaacaucaccucuucaucu

SEQ ID NO: 1988910 - RNA, 19 nt, Homo sapiens
  misc_RNA (1)...(19): siRNA sense strand
gaauuccuguccacugaug

SEQ ID NO: 1988911 - RNA, 19 nt, Homo sapiens
  misc_RNA (1)...(19): siRNA sense strand
acaaagccuuccuggauug

SEQ ID NO: 1988912 - RNA, 19 nt, Homo sapiens
  misc_RNA (1)...(19): siRNA sense strand
aaagaccggacuaccauua

SEQ ID NO: 1988913 - RNA, 19 nt, Homo sapiens
  misc_RNA (1)...(19): siRNA sense strand
caaacuaauuauccaugga

SEQ ID NO: 1988914 - RNA, 19 nt, Homo sapiens
  misc_RNA (1)...(19): siRNA sense strand
ugaaggcaccgaucucaaa

SEQ ID NO: 1988915 - RNA, 19 nt, Homo sapiens
  misc_RNA (1)...(19): siRNA sense strand
gaacaagguggugucaaga

SEQ ID NO: 1988916 - RNA, 19 nt, Homo sapiens
  misc_RNA (1)...(19): siRNA sense strand
gcaacgaaugcuaauguga

SEQ ID NO: 1988917 - RNA, 19 nt, Homo sapiens
  misc_RNA (1)...(19): siRNA sense strand
gcgcuuggaugcuggagau

SEQ ID NO: 1988918 - RNA, 19 nt, Homo sapiens
  misc_RNA (1)...(19): siRNA sense strand
aacaaagccuuccuggauu

SEQ ID NO: 1988919 - RNA, 19 nt, Homo sapiens
  misc_RNA (1)...(19): siRNA sense strand
caagcaagugugacuguuu

SEQ ID NO: 1988920 - RNA, 19 nt, Homo sapiens
  misc_RNA (1)...(19): siRNA sense strand
gcaacgcuaugggaaagga

SEQ ID NO: 1988921 - RNA, 19 nt, Homo sapiens
  misc_RNA (1)...(19): siRNA sense strand
caacgaaugcuaaugugau

SEQ ID NO: 1988922 - RNA, 19 nt, Homo sapiens
  misc_RNA (1)...(19): siRNA sense strand
aacaucaccucuucaucua

SEQ ID NO: 1988923 - RNA, 19 nt, Homo sapiens
  misc_RNA (1)...(19): siRNA sense strand
gccguggacuggauuuaug

SEQ ID NO: 1988924 - RNA, 19 nt, Homo sapiens
  misc_RNA (1)...(19): siRNA sense strand
agaccggacuaccauuauu

SEQ ID NO: 1988925 - RNA, 19 nt, Homo sapiens
  misc_RNA (1)...(19): siRNA sense strand
gauaaaccaagugaaauuc

SEQ ID NO: 1988926 - RNA, 19 nt, Homo sapiens
  misc_RNA (1)...(19): siRNA sense strand
gcagcaacgcuaugggaaa

SEQ ID NO: 1988927 - RNA, 19 nt, Homo sapiens
  misc_RNA (1)...(19): siRNA sense strand
ucuaagaucaccauaccua

SEQ ID NO: 1988928 - RNA, 19 nt, Homo sapiens
  misc_RNA (1)...(19): siRNA sense strand
ucagcgcccuggagaauuc

SEQ ID NO: 1988929 - RNA, 19 nt, Homo sapiens
  misc_RNA (1)...(19): siRNA sense strand
caucaccucuucaucuaag

SEQ ID NO: 1988930 - RNA, 19 nt, Homo sapiens
  misc_RNA (1)...(19): siRNA sense strand
gguuauaguuaucugaucu

SEQ ID NO: 1988931 - RNA, 19 nt, Homo sapiens
  misc_RNA (1)...(19): siRNA sense strand
ggauugacacauuuauuag

SEQ ID NO: 1988932 - RNA, 19 nt, Homo sapiens
  misc_RNA (1)...(19): siRNA sense strand
cugggaaccaaacuaauua

SEQ ID NO: 1988933 - RNA, 19 nt, Homo sapiens
  misc_RNA (1)...(19): siRNA sense strand
cuacuucucagcugugaaa

SEQ ID NO: 1988934 - RNA, 19 nt, Homo sapiens
  misc_RNA (1)...(19): siRNA sense strand
gugcaacgaaugcuaaugu

SEQ ID NO: 1988935 - RNA, 19 nt, Homo sapiens
  misc_RNA (1)...(19): siRNA sense strand
aagcaagugugacuguuuc

SEQ ID NO: 1988936 - RNA, 19 nt, Homo sapiens
  misc_RNA (1)...(19): siRNA sense strand
gaccggacuaccauuauug

SEQ ID NO: 1988937 - RNA, 19 nt, Homo sapiens
  misc_RNA (1)...(19): siRNA sense strand
cagcaacgcuaugggaaag

SEQ ID NO: 1988938 - RNA, 19 nt, Homo sapiens
  misc_RNA (1)...(19): siRNA sense strand
ggacaccaacaucgagguu

SEQ ID NO: 1988939 - RNA, 19 nt, Homo sapiens
  misc_RNA (1)...(19): siRNA sense strand
gcagugaccuccaaaacuc

SEQ ID NO: 1988940 - RNA, 19 nt, Homo sapiens
  misc_RNA (1)...(19): siRNA sense strand
ccacacagacaccgacaau

SEQ ID NO: 1988941 - RNA, 19 nt, Homo sapiens
  misc_RNA (1)...(19): siRNA sense strand
aacgaaugcuaaugugauu

SEQ ID NO: 1988942 - RNA, 19 nt, Homo sapiens
  misc_RNA (1)...(19): siRNA sense strand
cuuccuggauugacacauu

SEQ ID NO: 1988943 - RNA, 19 nt, Homo sapiens
  misc_RNA (1)...(19): siRNA sense strand
caccauaccuaagcagcaa

SEQ ID NO: 1988944 - RNA, 19 nt, Homo sapiens
  misc_RNA (1)...(19): siRNA sense strand
aaacaaggacaccaacauc

SEQ ID NO: 1988945 - RNA, 19 nt, Homo sapiens
  misc_RNA (1)...(19): siRNA sense strand
uggauugcuuuaacccuuu

SEQ ID NO: 1988946 - RNA, 19 nt, Homo sapiens
  misc_RNA (1)...(19): siRNA sense strand
cacagacaccgacaauuug

SEQ ID NO: 1988947 - RNA, 19 nt, Homo sapiens
  misc_RNA (1)...(19): siRNA sense strand
gacgcugucuggauugcuu

SEQ ID NO: 1988948 - RNA, 19 nt, Homo sapiens
  misc_RNA (1)...(19): siRNA sense strand
ucugggaaccaaacuaauu

SEQ ID NO: 1988949 - RNA, 19 nt, Homo sapiens
  misc_RNA (1)...(19): siRNA sense strand
gcugugcaccucuacauca

SEQ ID NO: 1988950 - RNA, 19 nt, Homo sapiens
  misc_RNA (1)...(19): siRNA sense strand
ggaagcagugaccuccaaa

SEQ ID NO: 1988951 - RNA, 19 nt, Homo sapiens
  misc_RNA (1)...(19): siRNA sense strand
gugugacuguuuccuguga

SEQ ID NO: 1988952 - RNA, 19 nt, Homo sapiens
  misc_RNA (1)...(19): siRNA sense strand
gaaggcaccgaucucaaag

SEQ ID NO: 1988953 - RNA, 19 nt, Homo sapiens
  misc_RNA (1)...(19): siRNA sense strand
gaagccauccacacagaca

SEQ ID NO: 1988954 - RNA, 19 nt, Homo sapiens
  misc_RNA (1)...(19): siRNA sense strand
cuacaggagucuacuucuc

SEQ ID NO: 1988955 - RNA, 19 nt, Homo sapiens
  misc_RNA (1)...(19): siRNA sense strand
ccacaucauugguguuagc

SEQ ID NO: 1988956 - RNA, 19 nt, Homo sapiens
  misc_RNA (1)...(19): siRNA sense strand
caucagcgcccuggagaau

SEQ ID NO: 1988957 - RNA, 19 nt, Homo sapiens
  misc_RNA (1)...(19): siRNA sense strand
ccaaaacucuggguucaau

SEQ ID NO: 1988958 - RNA, 19 nt, Homo sapiens
  misc_RNA (1)...(19): siRNA sense strand
gaucucaaaguccaguuuc

SEQ ID NO: 1988959 - RNA, 19 nt, Homo sapiens
  misc_RNA (1)...(19): siRNA sense strand
gaggccagcugggacagau

SEQ ID NO: 1988960 - RNA, 19 nt, Homo sapiens
  misc_RNA (1)...(19): siRNA sense strand
ggaaccaaacuaauuaucc

SEQ ID NO: 1988961 - RNA, 19 nt, Homo sapiens
  misc_RNA (1)...(19): siRNA sense strand
cagauaaaccaagugaaau

SEQ ID NO: 1988962 - RNA, 19 nt, Homo sapiens
  misc_RNA (1)...(19): siRNA sense strand
gcagguuauaguuaucuga

SEQ ID NO: 1988963 - RNA, 19 nt, Homo sapiens
  misc_RNA (1)...(19): siRNA sense strand
gauggucugcuuaccugaa

SEQ ID NO: 1988964 - RNA, 19 nt, Homo sapiens
  misc_RNA (1)...(19): siRNA sense strand
uaagaucaccauaccuaag

SEQ ID NO: 1988965 - RNA, 19 nt, Homo sapiens
  misc_RNA (1)...(19): siRNA sense strand
cuaagaucaccauaccuaa

SEQ ID NO: 1988966 - RNA, 19 nt, Homo sapiens
  misc_RNA (1)...(19): siRNA sense strand
gacaccaacaucgagguua

SEQ ID NO: 1988967 - RNA, 19 nt, Homo sapiens
  misc_RNA (1)...(19): siRNA sense strand
ugagaaacaaggacaccaa

SEQ ID NO: 1988968 - RNA, 19 nt, Homo sapiens
  misc_RNA (1)...(19): siRNA sense strand
gaaggaacugagaaacaag

SEQ ID NO: 1988969 - RNA, 19 nt, Homo sapiens
  misc_RNA (1)...(19): siRNA sense strand
aagguggugucaagauaga

SEQ ID NO: 1988970 - RNA, 19 nt, Homo sapiens
  misc_RNA (1)...(19): siRNA sense strand
ggaauccucaauccacauc

SEQ ID NO: 1988971 - RNA, 19 nt, Homo sapiens
  misc_RNA (1)...(19): siRNA sense strand
caccagggccaguguggaa

SEQ ID NO: 1988972 - RNA, 19 nt, Homo sapiens
  misc_RNA (1)...(19): siRNA sense strand
caagguggugucaagauag

SEQ ID NO: 1988973 - RNA, 19 nt, Homo sapiens
  misc_RNA (1)...(19): siRNA sense strand
gaaaagauggucugcuuac

SEQ ID NO: 1988974 - RNA, 19 nt, Homo sapiens
  misc_RNA (1)...(19): siRNA sense strand
guucugcacugcccuuuug

SEQ ID NO: 1988975 - RNA, 19 nt, Homo sapiens
  misc_RNA (1)...(19): siRNA sense strand
acaccaacaucgagguuac

SEQ ID NO: 1988976 - RNA, 19 nt, Homo sapiens
  misc_RNA (1)...(19): siRNA sense strand
ucacuugaaggaacugaga

SEQ ID NO: 1988977 - RNA, 19 nt, Homo sapiens
  misc_RNA (1)...(19): siRNA sense strand
uuccagagcgccaaccuuu

SEQ ID NO: 1988978 - RNA, 19 nt, Homo sapiens
  misc_RNA (1)...(19): siRNA sense strand
acaagcaagugugacuguu

SEQ ID NO: 1988979 - RNA, 19 nt, Homo sapiens
  misc_RNA (1)...(19): siRNA sense strand
ucacagccucguggaguuu

SEQ ID NO: 1988980 - RNA, 19 nt, Homo sapiens
  misc_RNA (1)...(19): siRNA sense strand
aggaagcagugaccuccaa

SEQ ID NO: 1988981 - RNA, 19 nt, Homo sapiens
  misc_RNA (1)...(19): siRNA sense strand
ccugugaccugaagauagc

SEQ ID NO: 1988982 - RNA, 19 nt, Homo sapiens
  misc_RNA (1)...(19): siRNA sense strand
gaaccagugaacuuacaag

SEQ ID NO: 1988983 - RNA, 19 nt, Homo sapiens
  misc_RNA (1)...(19): siRNA sense strand
aauucaaguuucagucuuc

SEQ ID NO: 1988984 - RNA, 19 nt, Homo sapiens
  misc_RNA (1)...(19): siRNA sense strand
ccucguggaguuucacuug

SEQ ID NO: 1988985 - RNA, 19 nt, Homo sapiens
  misc_RNA (1)...(19): siRNA sense strand
caccgacaauuuggguauu

SEQ ID NO: 1988986 - RNA, 19 nt, Homo sapiens
  misc_RNA (1)...(19): siRNA sense strand
ggauucccguuggacaugu

SEQ ID NO: 1988987 - RNA, 19 nt, Homo sapiens
  misc_RNA (1)...(19): siRNA sense strand
uaccugaaccagugaacuu

SEQ ID NO: 1988988 - RNA, 19 nt, Homo sapiens
  misc_RNA (1)...(19): siRNA sense strand
acucugggaaccaaacuaa

SEQ ID NO: 1988989 - RNA, 19 nt, Homo sapiens
  misc_RNA (1)...(19): siRNA sense strand
aaacaaagcuuucaagaca

SEQ ID NO: 1988990 - RNA, 19 nt, Homo sapiens
  misc_RNA (1)...(19): siRNA sense strand
gaaagggaauguaacaaau

SEQ ID NO: 1988991 - RNA, 19 nt, Homo sapiens
  misc_RNA (1)...(19): siRNA sense strand
gaaucgagcuacucacauu

SEQ ID NO: 1988992 - RNA, 19 nt, Homo sapiens
  misc_RNA (1)...(19): siRNA sense strand
uaucaucacuuucuucgua

SEQ ID NO: 1988993 - RNA, 19 nt, Homo sapiens
  misc_RNA (1)...(19): siRNA sense strand
uaacaaauguccucccuau

SEQ ID NO: 1988994 - RNA, 19 nt, Homo sapiens
  misc_RNA (1)...(19): siRNA sense strand
gaaaauacauucccaaaca

SEQ ID NO: 1988995 - RNA, 19 nt, Homo sapiens
  misc_RNA (1)...(19): siRNA sense strand
ccaaagaccuccacuucga

SEQ ID NO: 1988996 - RNA, 19 nt, Homo sapiens
  misc_RNA (1)...(19): siRNA sense strand
caaacagucuuucuugaca

SEQ ID NO: 1988997 - RNA, 19 nt, Homo sapiens
  misc_RNA (1)...(19): siRNA sense strand
gaauuacagaccucuauuu

SEQ ID NO: 1988998 - RNA, 19 nt, Homo sapiens
  misc_RNA (1)...(19): siRNA sense strand
ugacagacaugaugaaagg

SEQ ID NO: 1988999 - RNA, 19 nt, Homo sapiens
  misc_RNA (1)...(19): siRNA sense strand
acaaauguccucccuauga

SEQ ID NO: 1989000 - RNA, 19 nt, Homo sapiens
  misc_RNA (1)...(19): siRNA sense strand
gcugaccaaucacgaauga

SEQ ID NO: 1989001 - RNA, 19 nt, Homo sapiens
  misc_RNA (1)...(19): siRNA sense strand
ugacugauccuacuauguu

SEQ ID NO: 1989002 - RNA, 19 nt, Homo sapiens
  misc_RNA (1)...(19): siRNA sense strand
uagaugaugucgaagaaga

SEQ ID NO: 1989003 - RNA, 19 nt, Homo sapiens
  misc_RNA (1)...(19): siRNA sense strand
caaauguccucccuaugau

SEQ ID NO: 1989004 - RNA, 19 nt, Homo sapiens
  misc_RNA (1)...(19): siRNA sense strand
ugaaagggaauguaacaaa

SEQ ID NO: 1989005 - RNA, 19 nt, Homo sapiens
  misc_RNA (1)...(19): siRNA sense strand
uaaugccgcugaccaauca

SEQ ID NO: 1989006 - RNA, 19 nt, Homo sapiens
  misc_RNA (1)...(19): siRNA sense strand
ggcacuagaugaugucgaa

SEQ ID NO: 1989007 - RNA, 19 nt, Homo sapiens
  misc_RNA (1)...(19): siRNA sense strand
guacuuccucaauguauuu

SEQ ID NO: 1989008 - RNA, 19 nt, Homo sapiens
  misc_RNA (1)...(19): siRNA sense strand
gagcauuuacucucugauu

SEQ ID NO: 1989009 - RNA, 19 nt, Homo sapiens
  misc_RNA (1)...(19): siRNA sense strand
caacccagaggauggauuu

SEQ ID NO: 1989010 - RNA, 19 nt, Homo sapiens
  misc_RNA (1)...(19): siRNA sense strand
ggaauuacagaccucuauu

SEQ ID NO: 1989011 - RNA, 19 nt, Homo sapiens
  misc_RNA (1)...(19): siRNA sense strand
acaaagcuuucaagacaga

SEQ ID NO: 1989012 - RNA, 19 nt, Homo sapiens
  misc_RNA (1)...(19): siRNA sense strand
ccacugacccuccguuuua

SEQ ID NO: 1989013 - RNA, 19 nt, Homo sapiens
  misc_RNA (1)...(19): siRNA sense strand
gaugaaagggaauguaaca

SEQ ID NO: 1989014 - RNA, 19 nt, Homo sapiens
  misc_RNA (1)...(19): siRNA sense strand
gguacuuccucaauguauu

SEQ ID NO: 1989015 - RNA, 19 nt, Homo sapiens
  misc_RNA (1)...(19): siRNA sense strand
gagcuacucacauuagaug

SEQ ID NO: 1989016 - RNA, 19 nt, Homo sapiens
  misc_RNA (1)...(19): siRNA sense strand
ggccaaagaccuccacuuc

SEQ ID NO: 1989017 - RNA, 19 nt, Homo sapiens
  misc_RNA (1)...(19): siRNA sense strand
caaccaaggucccauuucc

SEQ ID NO: 1989018 - RNA, 19 nt, Homo sapiens
  misc_RNA (1)...(19): siRNA sense strand
agacagagugggaagcuuu

SEQ ID NO: 1989019 - RNA, 19 nt, Homo sapiens
  misc_RNA (1)...(19): siRNA sense strand
cccaaacagucuuucuuga

SEQ ID NO: 1989020 - RNA, 19 nt, Homo sapiens
  misc_RNA (1)...(19): siRNA sense strand
caaggaaucgagcuacuca

SEQ ID NO: 1989021 - RNA, 19 nt, Homo sapiens
  misc_RNA (1)...(19): siRNA sense strand
gcucacccaggaacaagua

SEQ ID NO: 1989022 - RNA, 19 nt, Homo sapiens
  misc_RNA (1)...(19): siRNA sense strand
aagggaauguaacaaaugu

SEQ ID NO: 1989023 - RNA, 19 nt, Homo sapiens
  misc_RNA (1)...(19): siRNA sense strand
caaagaccuccacuucgaa

SEQ ID NO: 1989024 - RNA, 19 nt, Homo sapiens
  misc_RNA (1)...(19): siRNA sense strand
ggaacaaguaucugacagu

SEQ ID NO: 1989025 - RNA, 19 nt, Homo sapiens
  misc_RNA (1)...(19): siRNA sense strand
gaagcucacccaggaacaa

SEQ ID NO: 1989026 - RNA, 19 nt, Homo sapiens
  misc_RNA (1)...(19): siRNA sense strand
caccuucuccuaugacuga

SEQ ID NO: 1989027 - RNA, 19 nt, Homo sapiens
  misc_RNA (1)...(19): siRNA sense strand
ccaucguuaucaucacuuu

SEQ ID NO: 1989028 - RNA, 19 nt, Homo sapiens
  misc_RNA (1)...(19): siRNA sense strand
gaagagcucauggccaaag

SEQ ID NO: 1989029 - RNA, 19 nt, Homo sapiens
  misc_RNA (1)...(19): siRNA sense strand
acuagaugaugucgaagaa

SEQ ID NO: 1989030 - RNA, 19 nt, Homo sapiens
  misc_RNA (1)...(19): siRNA sense strand
cuuuggagcugacggauca

SEQ ID NO: 1989031 - RNA, 19 nt, Homo sapiens
  misc_RNA (1)...(19): siRNA sense strand
ggaucaacaugacauucuc

SEQ ID NO: 1989032 - RNA, 19 nt, Homo sapiens
  misc_RNA (1)...(19): siRNA sense strand
guagugccaccuucuccua

SEQ ID NO: 1989033 - RNA, 19 nt, Homo sapiens
  misc_RNA (1)...(19): siRNA sense strand
ccacuucgaaggcauguuc

SEQ ID NO: 1989034 - RNA, 19 nt, Homo sapiens
  misc_RNA (1)...(19): siRNA sense strand
caaacaaagcuuucaagac

SEQ ID NO: 1989035 - RNA, 19 nt, Homo sapiens
  misc_RNA (1)...(19): siRNA sense strand
acaaacaaagcuuucaaga

SEQ ID NO: 1989036 - RNA, 19 nt, Homo sapiens
  misc_RNA (1)...(19): siRNA sense strand
ccugguacuuccucaaugu

SEQ ID NO: 1989037 - RNA, 19 nt, Homo sapiens
  misc_RNA (1)...(19): siRNA sense strand
gugccaccuucuccuauga

SEQ ID NO: 1989038 - RNA, 19 nt, Homo sapiens
  misc_RNA (1)...(19): siRNA sense strand
ccuacuauguugacagaca

SEQ ID NO: 1989039 - RNA, 19 nt, Homo sapiens
  misc_RNA (1)...(19): siRNA sense strand
gacagucaaguccuaauuc

SEQ ID NO: 1989040 - RNA, 19 nt, Homo sapiens
  misc_RNA (1)...(19): siRNA sense strand
caacaacccagaggaugga

SEQ ID NO: 1989041 - RNA, 19 nt, Homo sapiens
  misc_RNA (1)...(19): siRNA sense strand
aaagggaauguaacaaaug

SEQ ID NO: 1989042 - RNA, 19 nt, Homo sapiens
  misc_RNA (1)...(19): siRNA sense strand
gacugauccuacuauguug

SEQ ID NO: 1989043 - RNA, 19 nt, Homo sapiens
  misc_RNA (1)...(19): siRNA sense strand
agucaaguccuaauucgaa

SEQ ID NO: 1989044 - RNA, 19 nt, Homo sapiens
  misc_RNA (1)...(19): siRNA sense strand
gaaugaugcaggagcagau

SEQ ID NO: 1989045 - RNA, 19 nt, Homo sapiens
  misc_RNA (1)...(19): siRNA sense strand
gcagaguccucagggaaaa

SEQ ID NO: 1989046 - RNA, 19 nt, Homo sapiens
  misc_RNA (1)...(19): siRNA sense strand
ucacaaccaaggucccauu

SEQ ID NO: 1989047 - RNA, 19 nt, Homo sapiens
  misc_RNA (1)...(19): siRNA sense strand
gcagacacaaacaaagcuu

SEQ ID NO: 1989048 - RNA, 19 nt, Homo sapiens
  misc_RNA (1)...(19): siRNA sense strand
gauaaugccgcugaccaau

SEQ ID NO: 1989049 - RNA, 19 nt, Homo sapiens
  misc_RNA (1)...(19): siRNA sense strand
gaucaacaugacauucuca

SEQ ID NO: 1989050 - RNA, 19 nt, Homo sapiens
  misc_RNA (1)...(19): siRNA sense strand
gcauuuacucucugauucu

SEQ ID NO: 1989051 - RNA, 19 nt, Homo sapiens
  misc_RNA (1)...(19): siRNA sense strand
caugacauucucaggcuuu

SEQ ID NO: 1989052 - RNA, 19 nt, Homo sapiens
  misc_RNA (1)...(19): siRNA sense strand
guggauggaucaacaugac

SEQ ID NO: 1989053 - RNA, 19 nt, Homo sapiens
  misc_RNA (1)...(19): siRNA sense strand
gcccgcagacacaaacaaa

SEQ ID NO: 1989054 - RNA, 19 nt, Homo sapiens
  misc_RNA (1)...(19): siRNA sense strand
cggagcauuuacucucuga

SEQ ID NO: 1989055 - RNA, 19 nt, Homo sapiens
  misc_RNA (1)...(19): siRNA sense strand
aaucgagcuacucacauua

SEQ ID NO: 1989056 - RNA, 19 nt, Homo sapiens
  misc_RNA (1)...(19): siRNA sense strand
uaugacugauccuacuaug

SEQ ID NO: 1989057 - RNA, 19 nt, Homo sapiens
  misc_RNA (1)...(19): siRNA sense strand
acacaaacaaagcuuucaa

SEQ ID NO: 1989058 - RNA, 19 nt, Homo sapiens
  misc_RNA (1)...(19): siRNA sense strand
gaugcauccugggugaguu

SEQ ID NO: 1989059 - RNA, 19 nt, Homo sapiens
  misc_RNA (1)...(19): siRNA sense strand
ggaaucgagcuacucacau

SEQ ID NO: 1989060 - RNA, 19 nt, Homo sapiens
  misc_RNA (1)...(19): siRNA sense strand
gauggaucaacaugacauu

SEQ ID NO: 1989061 - RNA, 19 nt, Homo sapiens
  misc_RNA (1)...(19): siRNA sense strand
ccaaacagucuuucuugac

SEQ ID NO: 1989062 - RNA, 19 nt, Homo sapiens
  misc_RNA (1)...(19): siRNA sense strand
gguccuacccaucguuauc

SEQ ID NO: 1989063 - RNA, 19 nt, Homo sapiens
  misc_RNA (1)...(19): siRNA sense strand
ggcagggccagaacuguug

SEQ ID NO: 1989064 - RNA, 19 nt, Homo sapiens
  misc_RNA (1)...(19): siRNA sense strand
caagaagcucacccaggaa

SEQ ID NO: 1989065 - RNA, 19 nt, Homo sapiens
  misc_RNA (1)...(19): siRNA sense strand
aaggucccauuuccacuga

SEQ ID NO: 1989066 - RNA, 19 nt, Homo sapiens
  misc_RNA (1)...(19): siRNA sense strand
ugaguucugcauccuggua

SEQ ID NO: 1989067 - RNA, 19 nt, Homo sapiens
  misc_RNA (1)...(19): siRNA sense strand
ucgagcuacucacauuaga

SEQ ID NO: 1989068 - RNA, 19 nt, Homo sapiens
  misc_RNA (1)...(19): siRNA sense strand
gguggauggaucaacauga

SEQ ID NO: 1989069 - RNA, 19 nt, Homo sapiens
  misc_RNA (1)...(19): siRNA sense strand
ucccaaacagucuuucuug

SEQ ID NO: 1989070 - RNA, 19 nt, Homo sapiens
  misc_RNA (1)...(19): siRNA sense strand
gcaaggaaucgagcuacuc

SEQ ID NO: 1989071 - RNA, 19 nt, Homo sapiens
  misc_RNA (1)...(19): siRNA sense strand
ggauggaucaacaugacau

SEQ ID NO: 1989072 - RNA, 19 nt, Homo sapiens
  misc_RNA (1)...(19): siRNA sense strand
guugacagacaugaugaaa

SEQ ID NO: 1989073 - RNA, 19 nt, Homo sapiens
  misc_RNA (1)...(19): siRNA sense strand
gacagagugggaagcuuug

SEQ ID NO: 1989074 - RNA, 19 nt, Homo sapiens
  misc_RNA (1)...(19): siRNA sense strand
agacacaaacaaagcuuuc

SEQ ID NO: 1989075 - RNA, 19 nt, Homo sapiens
  misc_RNA (1)...(19): siRNA sense strand
cagacacaaacaaagcuuu

SEQ ID NO: 1989076 - RNA, 19 nt, Homo sapiens
  misc_RNA (1)...(19): siRNA sense strand
gauucugggccaagauaau

SEQ ID NO: 1989077 - RNA, 19 nt, Homo sapiens
  misc_RNA (1)...(19): siRNA sense strand
cagucuuucuugacacgaa

SEQ ID NO: 1989078 - RNA, 19 nt, Homo sapiens
  misc_RNA (1)...(19): siRNA sense strand
cuacccaucguuaucauca

SEQ ID NO: 1989079 - RNA, 19 nt, Homo sapiens
  misc_RNA (1)...(19): siRNA sense strand
caugaugaaagggaaugua

SEQ ID NO: 1989080 - RNA, 19 nt, Homo sapiens
  misc_RNA (1)...(19): siRNA sense strand
gugguccuacccaucguua

SEQ ID NO: 1989081 - RNA, 19 nt, Homo sapiens
  misc_RNA (1)...(19): siRNA sense strand
agcauuuacucucugauuc

SEQ ID NO: 1989082 - RNA, 19 nt, Homo sapiens
  misc_RNA (1)...(19): siRNA sense strand
cuacucacauuagaugcau

SEQ ID NO: 1989083 - RNA, 19 nt, Homo sapiens
  misc_RNA (1)...(19): siRNA sense strand
cacaaccaaggucccauuu

SEQ ID NO: 1989084 - RNA, 19 nt, Homo sapiens
  misc_RNA (1)...(19): siRNA sense strand
cagggaaaauggaaaauac

SEQ ID NO: 1989085 - RNA, 19 nt, Homo sapiens
  misc_RNA (1)...(19): siRNA sense strand
augaugaaagggaauguaa

SEQ ID NO: 1989086 - RNA, 19 nt, Homo sapiens
  misc_RNA (1)...(19): siRNA sense strand
ggagaaagcugccucagaa

SEQ ID NO: 1989087 - RNA, 19 nt, Homo sapiens
  misc_RNA (1)...(19): siRNA sense strand
ggaagaagaugaugaugaa

SEQ ID NO: 1989088 - RNA, 19 nt, Homo sapiens
  misc_RNA (1)...(19): siRNA sense strand
ggaaacugcugucgucuuu

SEQ ID NO: 1989089 - RNA, 19 nt, Homo sapiens
  misc_RNA (1)...(19): siRNA sense strand
guacagaaauuacuggaaa

SEQ ID NO: 1989090 - RNA, 19 nt, Homo sapiens
  misc_RNA (1)...(19): siRNA sense strand
gcaauuggaagaccuauua

SEQ ID NO: 1989091 - RNA, 19 nt, Homo sapiens
  misc_RNA (1)...(19): siRNA sense strand
ggaaauaccucguccuucu

SEQ ID NO: 1989092 - RNA, 19 nt, Homo sapiens
  misc_RNA (1)...(19): siRNA sense strand
gaucuugucuuaaaugaug

SEQ ID NO: 1989093 - RNA, 19 nt, Homo sapiens
  misc_RNA (1)...(19): siRNA sense strand
uagaugagcuugacacuga

SEQ ID NO: 1989094 - RNA, 19 nt, Homo sapiens
  misc_RNA (1)...(19): siRNA sense strand
ggaaugaagucaguauuug

SEQ ID NO: 1989095 - RNA, 19 nt, Homo sapiens
  misc_RNA (1)...(19): siRNA sense strand
gaacaucuuugaccugugu

SEQ ID NO: 1989096 - RNA, 19 nt, Homo sapiens
  misc_RNA (1)...(19): siRNA sense strand
uaacaaauuugccacagaa

SEQ ID NO: 1989097 - RNA, 19 nt, Homo sapiens
  misc_RNA (1)...(19): siRNA sense strand
gacaucaucuuaucucuga

SEQ ID NO: 1989098 - RNA, 19 nt, Homo sapiens
  misc_RNA (1)...(19): siRNA sense strand
ggaaagaguuugcaugcau

SEQ ID NO: 1989099 - RNA, 19 nt, Homo sapiens
  misc_RNA (1)...(19): siRNA sense strand
ugacaacucugauuuggaa

SEQ ID NO: 1989100 - RNA, 19 nt, Homo sapiens
  misc_RNA (1)...(19): siRNA sense strand
gcagaaagcagauguuguu

SEQ ID NO: 1989101 - RNA, 19 nt, Homo sapiens
  misc_RNA (1)...(19): siRNA sense strand
guagguaucagcauuauuu

SEQ ID NO: 1989102 - RNA, 19 nt, Homo sapiens
  misc_RNA (1)...(19): siRNA sense strand
gaagcucuauaauguguuu

SEQ ID NO: 1989103 - RNA, 19 nt, Homo sapiens
  misc_RNA (1)...(19): siRNA sense strand
gggcaucauuuccaaagua

SEQ ID NO: 1989104 - RNA, 19 nt, Homo sapiens
  misc_RNA (1)...(19): siRNA sense strand
caggaugucucaauugauu

SEQ ID NO: 1989105 - RNA, 19 nt, Homo sapiens
  misc_RNA (1)...(19): siRNA sense strand
gcaacugacuacaaaccua

SEQ ID NO: 1989106 - RNA, 19 nt, Homo sapiens
  misc_RNA (1)...(19): siRNA sense strand
gauggcggaugcuuugaua

SEQ ID NO: 1989107 - RNA, 19 nt, Homo sapiens
  misc_RNA (1)...(19): siRNA sense strand
ggacuggaggugaucauua

SEQ ID NO: 1989108 - RNA, 19 nt, Homo sapiens
  misc_RNA (1)...(19): siRNA sense strand
gcaggcagaugaugaagau

SEQ ID NO: 1989109 - RNA, 19 nt, Homo sapiens
  misc_RNA (1)...(19): siRNA sense strand
gacuggaggugaucauuaa

SEQ ID NO: 1989110 - RNA, 19 nt, Homo sapiens
  misc_RNA (1)...(19): siRNA sense strand
gaacagauuguggaaauga

SEQ ID NO: 1989111 - RNA, 19 nt, Homo sapiens
  misc_RNA (1)...(19): siRNA sense strand
gaacuauacccugugguua

SEQ ID NO: 1989112 - RNA, 19 nt, Homo sapiens
  misc_RNA (1)...(19): siRNA sense strand
uaaugcaacugacuacaaa

SEQ ID NO: 1989113 - RNA, 19 nt, Homo sapiens
  misc_RNA (1)...(19): siRNA sense strand
guacaaggcaugcucauau

SEQ ID NO: 1989114 - RNA, 19 nt, Homo sapiens
  misc_RNA (1)...(19): siRNA sense strand
gaucaguacuuuggagauu

SEQ ID NO: 1989115 - RNA, 19 nt, Homo sapiens
  misc_RNA (1)...(19): siRNA sense strand
agacauugcugccaacuau

SEQ ID NO: 1989116 - RNA, 19 nt, Homo sapiens
  misc_RNA (1)...(19): siRNA sense strand
ugaugaagaugacuuaaug

SEQ ID NO: 1989117 - RNA, 19 nt, Homo sapiens
  misc_RNA (1)...(19): siRNA sense strand
gaggaacugugccaccuuu

SEQ ID NO: 1989118 - RNA, 19 nt, Homo sapiens
  misc_RNA (1)...(19): siRNA sense strand
gaaugacacugugcgcuuu

SEQ ID NO: 1989119 - RNA, 19 nt, Homo sapiens
  misc_RNA (1)...(19): siRNA sense strand
ucaauuugcuucucauuuc

SEQ ID NO: 1989120 - RNA, 19 nt, Homo sapiens
  misc_RNA (1)...(19): siRNA sense strand
ggaauugucgagaaucuuu

SEQ ID NO: 1989121 - RNA, 19 nt, Homo sapiens
  misc_RNA (1)...(19): siRNA sense strand
gaagcaaacuaaugauguc

SEQ ID NO: 1989122 - RNA, 19 nt, Homo sapiens
  misc_RNA (1)...(19): siRNA sense strand
guuaggaggugcuauggaa

SEQ ID NO: 1989123 - RNA, 19 nt, Homo sapiens
  misc_RNA (1)...(19): siRNA sense strand
gaagaucacuauguugagu

SEQ ID NO: 1989124 - RNA, 19 nt, Homo sapiens
  misc_RNA (1)...(19): siRNA sense strand
ccaccuuucucccucuuua

SEQ ID NO: 1989125 - RNA, 19 nt, Homo sapiens
  misc_RNA (1)...(19): siRNA sense strand
ggaaugugguucaguccaa

SEQ ID NO: 1989126 - RNA, 19 nt, Homo sapiens
  misc_RNA (1)...(19): siRNA sense strand
ggagggaauugucgagaau

SEQ ID NO: 1989127 - RNA, 19 nt, Homo sapiens
  misc_RNA (1)...(19): siRNA sense strand
cacagaagaucacuauguu

SEQ ID NO: 1989128 - RNA, 19 nt, Homo sapiens
  misc_RNA (1)...(19): siRNA sense strand
ucugagugaugaugaaaua

SEQ ID NO: 1989129 - RNA, 19 nt, Homo sapiens
  misc_RNA (1)...(19): siRNA sense strand
ggagcuacuucccauauuc

SEQ ID NO: 1989130 - RNA, 19 nt, Homo sapiens
  misc_RNA (1)...(19): siRNA sense strand
gagcugaugauguucuaua

SEQ ID NO: 1989131 - RNA, 19 nt, Homo sapiens
  misc_RNA (1)...(19): siRNA sense strand
gggaaugaagucaguauuu

SEQ ID NO: 1989132 - RNA, 19 nt, Homo sapiens
  misc_RNA (1)...(19): siRNA sense strand
uacaaggcaugcucauaua

SEQ ID NO: 1989133 - RNA, 19 nt, Homo sapiens
  misc_RNA (1)...(19): siRNA sense strand
cugaugauguucuauauug

SEQ ID NO: 1989134 - RNA, 19 nt, Homo sapiens
  misc_RNA (1)...(19): siRNA sense strand
gaaugaagucaguauuuga

SEQ ID NO: 1989135 - RNA, 19 nt, Homo sapiens
  misc_RNA (1)...(19): siRNA sense strand
ugacaccgaugauuuagau

SEQ ID NO: 1989136 - RNA, 19 nt, Homo sapiens
  misc_RNA (1)...(19): siRNA sense strand
caaauggacuggaggugau

SEQ ID NO: 1989137 - RNA, 19 nt, Homo sapiens
  misc_RNA (1)...(19): siRNA sense strand
ccacaaguuugacaaguuc

SEQ ID NO: 1989138 - RNA, 19 nt, Homo sapiens
  misc_RNA (1)...(19): siRNA sense strand
ggaagcuucuggagacaug

SEQ ID NO: 1989139 - RNA, 19 nt, Homo sapiens
  misc_RNA (1)...(19): siRNA sense strand
gaacauggacacaguaugc

SEQ ID NO: 1989140 - RNA, 19 nt, Homo sapiens
  misc_RNA (1)...(19): siRNA sense strand
gaaauaccucguccuucua

SEQ ID NO: 1989141 - RNA, 19 nt, Homo sapiens
  misc_RNA (1)...(19): siRNA sense strand
gcaccaauuauacccuuua

SEQ ID NO: 1989142 - RNA, 19 nt, Homo sapiens
  misc_RNA (1)...(19): siRNA sense strand
ggauggaggauuaaagaaa

SEQ ID NO: 1989143 - RNA, 19 nt, Homo sapiens
  misc_RNA (1)...(19): siRNA sense strand
gagcugauccagaguguau

SEQ ID NO: 1989144 - RNA, 19 nt, Homo sapiens
  misc_RNA (1)...(19): siRNA sense strand
ugacagcucugacaacucu

SEQ ID NO: 1989145 - RNA, 19 nt, Homo sapiens
  misc_RNA (1)...(19): siRNA sense strand
gaacugugccaccuuuaau

SEQ ID NO: 1989146 - RNA, 19 nt, Homo sapiens
  misc_RNA (1)...(19): siRNA sense strand
caccuacgcuggacaguau

SEQ ID NO: 1989147 - RNA, 19 nt, Homo sapiens
  misc_RNA (1)...(19): siRNA sense strand
gauacgaaaccaucuuauu

SEQ ID NO: 1989148 - RNA, 19 nt, Homo sapiens
  misc_RNA (1)...(19): siRNA sense strand
ccagaucgcauguuuguug

SEQ ID NO: 1989149 - RNA, 19 nt, Homo sapiens
  misc_RNA (1)...(19): siRNA sense strand
ggaacugugccaccuuuaa

SEQ ID NO: 1989150 - RNA, 19 nt, Homo sapiens
  misc_RNA (1)...(19): siRNA sense strand
ggaugaggcuggaucuaca

SEQ ID NO: 1989151 - RNA, 19 nt, Homo sapiens
  misc_RNA (1)...(19): siRNA sense strand
cacgggagcugaugauguu

SEQ ID NO: 1989152 - RNA, 19 nt, Homo sapiens
  misc_RNA (1)...(19): siRNA sense strand
cagaagaucacuauguuga

SEQ ID NO: 1989153 - RNA, 19 nt, Homo sapiens
  misc_RNA (1)...(19): siRNA sense strand
cuggugaacuugaucagua

SEQ ID NO: 1989154 - RNA, 19 nt, Homo sapiens
  misc_RNA (1)...(19): siRNA sense strand
ggaguguucucaugcuuca

SEQ ID NO: 1989155 - RNA, 19 nt, Homo sapiens
  misc_RNA (1)...(19): siRNA sense strand
ugucugauguggugaacua

SEQ ID NO: 1989156 - RNA, 19 nt, Homo sapiens
  misc_RNA (1)...(19): siRNA sense strand
gaggauggaggauuaaaga

SEQ ID NO: 1989157 - RNA, 19 nt, Homo sapiens
  misc_RNA (1)...(19): siRNA sense strand
gacaugguaccuauccuua

SEQ ID NO: 1989158 - RNA, 19 nt, Homo sapiens
  misc_RNA (1)...(19): siRNA sense strand
uaucaucaauugugugugu

SEQ ID NO: 1989159 - RNA, 19 nt, Homo sapiens
  misc_RNA (1)...(19): siRNA sense strand
caaacuuucuugugugcaa

SEQ ID NO: 1989160 - RNA, 19 nt, Homo sapiens
  misc_RNA (1)...(19): siRNA sense strand
aaacugcugucgucuuuca

SEQ ID NO: 1989161 - RNA, 19 nt, Homo sapiens
  misc_RNA (1)...(19): siRNA sense strand
ugaugacaccgaugauuua

SEQ ID NO: 1989162 - RNA, 19 nt, Homo sapiens
  misc_RNA (1)...(19): siRNA sense strand
agucagcacuucagauuau

SEQ ID NO: 1989163 - RNA, 19 nt, Homo sapiens
  misc_RNA (1)...(19): siRNA sense strand
ggauggagaccaagaggaa

SEQ ID NO: 1989164 - RNA, 19 nt, Homo sapiens
  misc_RNA (1)...(19): siRNA sense strand
gcucugacaacucugauuu

SEQ ID NO: 1989165 - RNA, 19 nt, Homo sapiens
  misc_RNA (1)...(19): siRNA sense strand
gaagucaguauuugauaug

SEQ ID NO: 1989166 - RNA, 19 nt, Homo sapiens
  misc_RNA (1)...(19): siRNA sense strand
cagaguaucuuagagaaca

SEQ ID NO: 1989167 - RNA, 19 nt, Homo sapiens
  misc_RNA (1)...(19): siRNA sense strand
gaaaaccacuucucauugg

SEQ ID NO: 1989168 - RNA, 19 nt, Homo sapiens
  misc_RNA (1)...(19): siRNA sense strand
ugaaugcacuggugaaugc

SEQ ID NO: 1989169 - RNA, 19 nt, Homo sapiens
  misc_RNA (1)...(19): siRNA sense strand
gcaagcgccaauaaacuuu

SEQ ID NO: 1989170 - RNA, 19 nt, Homo sapiens
  misc_RNA (1)...(19): siRNA sense strand
caaguaugcugcugaacuc

SEQ ID NO: 1989171 - RNA, 19 nt, Homo sapiens
  misc_RNA (1)...(19): siRNA sense strand
aaacugaagaguaucguaa

SEQ ID NO: 1989172 - RNA, 19 nt, Homo sapiens
  misc_RNA (1)...(19): siRNA sense strand
uggaagaccuauuaugcaa

SEQ ID NO: 1989173 - RNA, 19 nt, Homo sapiens
  misc_RNA (1)...(19): siRNA sense strand
ggaaccagcugaaguuuuc

SEQ ID NO: 1989174 - RNA, 19 nt, Homo sapiens
  misc_RNA (1)...(19): siRNA sense strand
gcccagcgcagcuauauug

SEQ ID NO: 1989175 - RNA, 19 nt, Homo sapiens
  misc_RNA (1)...(19): siRNA sense strand
gcauggccuugcgcaaaua

SEQ ID NO: 1989176 - RNA, 19 nt, Homo sapiens
  misc_RNA (1)...(19): siRNA sense strand
ucaggaugcugccaugcua

SEQ ID NO: 1989177 - RNA, 19 nt, Homo sapiens
  misc_RNA (1)...(19): siRNA sense strand
gacucauucuccaauauuu

SEQ ID NO: 1989178 - RNA, 19 nt, Homo sapiens
  misc_RNA (1)...(19): siRNA sense strand
uaaagcaccuagcaucucu

SEQ ID NO: 1989179 - RNA, 19 nt, Homo sapiens
  misc_RNA (1)...(19): siRNA sense strand
uuaccaggaugucucaauu

SEQ ID NO: 1989180 - RNA, 19 nt, Homo sapiens
  misc_RNA (1)...(19): siRNA sense strand
gaaacugaagaguaucgua

SEQ ID NO: 1989181 - RNA, 19 nt, Homo sapiens
  misc_RNA (1)...(19): siRNA sense strand
uaaagggcuuggagaaaca

SEQ ID NO: 1989182 - RNA, 19 nt, Homo sapiens
  misc_RNA (1)...(19): siRNA sense strand
guaugcugcugaacucauu

SEQ ID NO: 1989183 - RNA, 19 nt, Homo sapiens
  misc_RNA (1)...(19): siRNA sense strand
caucucuccugcuccauaa

SEQ ID NO: 1989184 - RNA, 19 nt, Homo sapiens
  misc_RNA (1)...(19): siRNA sense strand
ggaggaggacgacaauaau

SEQ ID NO: 1989185 - RNA, 19 nt, Homo sapiens
  misc_RNA (1)...(19): siRNA sense strand
ggagcuagcaaaccuucua

SEQ ID NO: 1989186 - RNA, 19 nt, Homo sapiens
  misc_RNA (1)...(19): siRNA sense strand
ggacaucgcaccaucagua

SEQ ID NO: 1989187 - RNA, 19 nt, Homo sapiens
  misc_RNA (1)...(19): siRNA sense strand
gcaguguucuggaucauuu

SEQ ID NO: 1989188 - RNA, 19 nt, Homo sapiens
  misc_RNA (1)...(19): siRNA sense strand
cgaagcugcuggauaauuu

SEQ ID NO: 1989189 - RNA, 19 nt, Homo sapiens
  misc_RNA (1)...(19): siRNA sense strand
guucugcccuuuauauuaa

SEQ ID NO: 1989190 - RNA, 19 nt, Homo sapiens
  misc_RNA (1)...(19): siRNA sense strand
ggacuuaccgccauaugua

SEQ ID NO: 1989191 - RNA, 19 nt, Homo sapiens
  misc_RNA (1)...(19): siRNA sense strand
ucaagaagcucaucucucu

SEQ ID NO: 1989192 - RNA, 19 nt, Homo sapiens
  misc_RNA (1)...(19): siRNA sense strand
uggcaauccugcugucuua

SEQ ID NO: 1989193 - RNA, 19 nt, Homo sapiens
  misc_RNA (1)...(19): siRNA sense strand
cuacaaccaucuuaaugaa

SEQ ID NO: 1989194 - RNA, 19 nt, Homo sapiens
  misc_RNA (1)...(19): siRNA sense strand
acccgaagcugcuggauaa

SEQ ID NO: 1989195 - RNA, 19 nt, Homo sapiens
  misc_RNA (1)...(19): siRNA sense strand
cgacgguucugcccuuuau

SEQ ID NO: 1989196 - RNA, 19 nt, Homo sapiens
  misc_RNA (1)...(19): siRNA sense strand
gaaagaaaagccuaaauug

SEQ ID NO: 1989197 - RNA, 19 nt, Homo sapiens
  misc_RNA (1)...(19): siRNA sense strand
gguucugcccuuuauauua

SEQ ID NO: 1989198 - RNA, 19 nt, Homo sapiens
  misc_RNA (1)...(19): siRNA sense strand
caagagaggcagcucaaga

SEQ ID NO: 1989199 - RNA, 19 nt, Homo sapiens
  misc_RNA (1)...(19): siRNA sense strand
gcucuauccuguguaacua

SEQ ID NO: 1989200 - RNA, 19 nt, Homo sapiens
  misc_RNA (1)...(19): siRNA sense strand
cuacaaggccaucgaaaug

SEQ ID NO: 1989201 - RNA, 19 nt, Homo sapiens
  misc_RNA (1)...(19): siRNA sense strand
gcaucugugugcugacuga

SEQ ID NO: 1989202 - RNA, 19 nt, Homo sapiens
  misc_RNA (1)...(19): siRNA sense strand
auauguaccuucucuguug

SEQ ID NO: 1989203 - RNA, 19 nt, Homo sapiens
  misc_RNA (1)...(19): siRNA sense strand
uaacuggcaugugggugua

SEQ ID NO: 1989204 - RNA, 19 nt, Homo sapiens
  misc_RNA (1)...(19): siRNA sense strand
gaucuuuccagucuucuga

SEQ ID NO: 1989205 - RNA, 19 nt, Homo sapiens
  misc_RNA (1)...(19): siRNA sense strand
guagcaguguucuggauca

SEQ ID NO: 1989206 - RNA, 19 nt, Homo sapiens
  misc_RNA (1)...(19): siRNA sense strand
uaccuucucuguuggcuau

SEQ ID NO: 1989207 - RNA, 19 nt, Homo sapiens
  misc_RNA (1)...(19): siRNA sense strand
uuacugcucuauccugugu

SEQ ID NO: 1989208 - RNA, 19 nt, Homo sapiens
  misc_RNA (1)...(19): siRNA sense strand
guguuggccuuuccuguug

SEQ ID NO: 1989209 - RNA, 19 nt, Homo sapiens
  misc_RNA (1)...(19): siRNA sense strand
gacguucauugaucugguu

SEQ ID NO: 1989210 - RNA, 19 nt, Homo sapiens
  misc_RNA (1)...(19): siRNA sense strand
ucuacaaccaucuuaauga

SEQ ID NO: 1989211 - RNA, 19 nt, Homo sapiens
  misc_RNA (1)...(19): siRNA sense strand
ucauugaucugguuaucca

SEQ ID NO: 1989212 - RNA, 19 nt, Homo sapiens
  misc_RNA (1)...(19): siRNA sense strand
ggucuacaaccaucuuaau

SEQ ID NO: 1989213 - RNA, 19 nt, Homo sapiens
  misc_RNA (1)...(19): siRNA sense strand
uaacuacaaggccaucgaa

SEQ ID NO: 1989214 - RNA, 19 nt, Homo sapiens
  misc_RNA (1)...(19): siRNA sense strand
acaaccaucuuaaugaacu

SEQ ID NO: 1989215 - RNA, 19 nt, Homo sapiens
  misc_RNA (1)...(19): siRNA sense strand
aagagaggcagcucaagaa

SEQ ID NO: 1989216 - RNA, 19 nt, Homo sapiens
  misc_RNA (1)...(19): siRNA sense strand
agaaaagccuaaauuggaa

SEQ ID NO: 1989217 - RNA, 19 nt, Homo sapiens
  misc_RNA (1)...(19): siRNA sense strand
gaaauuccugacguucauu

SEQ ID NO: 1989218 - RNA, 19 nt, Homo sapiens
  misc_RNA (1)...(19): siRNA sense strand
agaaaaguauggaagaaga

SEQ ID NO: 1989219 - RNA, 19 nt, Homo sapiens
  misc_RNA (1)...(19): siRNA sense strand
caaccaucuuaaugaacuu

SEQ ID NO: 1989220 - RNA, 19 nt, Homo sapiens
  misc_RNA (1)...(19): siRNA sense strand
guucauugaucugguuauc

SEQ ID NO: 1989221 - RNA, 19 nt, Homo sapiens
  misc_RNA (1)...(19): siRNA sense strand
gguuauccaggcugucuuu

SEQ ID NO: 1989222 - RNA, 19 nt, Homo sapiens
  misc_RNA (1)...(19): siRNA sense strand
ugacagagagaugauauac

SEQ ID NO: 1989223 - RNA, 19 nt, Homo sapiens
  misc_RNA (1)...(19): siRNA sense strand
guauggaagaagagaaaga

SEQ ID NO: 1989224 - RNA, 19 nt, Homo sapiens
  misc_RNA (1)...(19): siRNA sense strand
ccaucgaaaugcccucaca

SEQ ID NO: 1989225 - RNA, 19 nt, Homo sapiens
  misc_RNA (1)...(19): siRNA sense strand
cuucucuguuggcuauaua

SEQ ID NO: 1989226 - RNA, 19 nt, Homo sapiens
  misc_RNA (1)...(19): siRNA sense strand
ccauauguaccuucucugu

SEQ ID NO: 1989227 - RNA, 19 nt, Homo sapiens
  misc_RNA (1)...(19): siRNA sense strand
caauccugcugucuuacug

SEQ ID NO: 1989228 - RNA, 19 nt, Homo sapiens
  misc_RNA (1)...(19): siRNA sense strand
gacuggauguuagcugugu

SEQ ID NO: 1989229 - RNA, 19 nt, Homo sapiens
  misc_RNA (1)...(19): siRNA sense strand
ccgaagcugcuggauaauu

SEQ ID NO: 1989230 - RNA, 19 nt, Homo sapiens
  misc_RNA (1)...(19): siRNA sense strand
aagaaaagccuaaauugga

SEQ ID NO: 1989231 - RNA, 19 nt, Homo sapiens
  misc_RNA (1)...(19): siRNA sense strand
ggaagaagagaaagaaaag

SEQ ID NO: 1989232 - RNA, 19 nt, Homo sapiens
  misc_RNA (1)...(19): siRNA sense strand
cauauguaccuucucuguu

SEQ ID NO: 1989233 - RNA, 19 nt, Homo sapiens
  misc_RNA (1)...(19): siRNA sense strand
gacaucgcaccaucaguau

SEQ ID NO: 1989234 - RNA, 19 nt, Homo sapiens
  misc_RNA (1)...(19): siRNA sense strand
cauuuaugccuaugacaga

SEQ ID NO: 1989235 - RNA, 19 nt, Homo sapiens
  misc_RNA (1)...(19): siRNA sense strand
uauggaagaagagaaagaa

SEQ ID NO: 1989236 - RNA, 19 nt, Homo sapiens
  misc_RNA (1)...(19): siRNA sense strand
acugcucuauccuguguaa

SEQ ID NO: 1989237 - RNA, 19 nt, Homo sapiens
  misc_RNA (1)...(19): siRNA sense strand
cgccauauguaccuucucu

SEQ ID NO: 1989238 - RNA, 19 nt, Homo sapiens
  misc_RNA (1)...(19): siRNA sense strand
uaugacagagagaugauau

SEQ ID NO: 1989239 - RNA, 19 nt, Homo sapiens
  misc_RNA (1)...(19): siRNA sense strand
gugggaaccaggagcaaga

SEQ ID NO: 1989240 - RNA, 19 nt, Homo sapiens
  misc_RNA (1)...(19): siRNA sense strand
cuacggagggagcuggaaa

SEQ ID NO: 1989241 - RNA, 19 nt, Homo sapiens
  misc_RNA (1)...(19): siRNA sense strand
gcaauccugcugucuuacu

SEQ ID NO: 1989242 - RNA, 19 nt, Homo sapiens
  misc_RNA (1)...(19): siRNA sense strand
gugcugggugcaucaugua

SEQ ID NO: 1989243 - RNA, 19 nt, Homo sapiens
  misc_RNA (1)...(19): siRNA sense strand
gcucaagaagcucaucucu

SEQ ID NO: 1989244 - RNA, 19 nt, Homo sapiens
  misc_RNA (1)...(19): siRNA sense strand
cuggaucauuuaugccuau

SEQ ID NO: 1989245 - RNA, 19 nt, Homo sapiens
  misc_RNA (1)...(19): siRNA sense strand
agcaggagcagcggacuua

SEQ ID NO: 1989246 - RNA, 19 nt, Homo sapiens
  misc_RNA (1)...(19): siRNA sense strand
guggcugaaucacggaaug

SEQ ID NO: 1989247 - RNA, 19 nt, Homo sapiens
  misc_RNA (1)...(19): siRNA sense strand
gaaugcacacgacgguucu

SEQ ID NO: 1989248 - RNA, 19 nt, Homo sapiens
  misc_RNA (1)...(19): siRNA sense strand
aaguauggaagaagagaaa

SEQ ID NO: 1989249 - RNA, 19 nt, Homo sapiens
  misc_RNA (1)...(19): siRNA sense strand
uaaugaacuuccuguaccu

SEQ ID NO: 1989250 - RNA, 19 nt, Homo sapiens
  misc_RNA (1)...(19): siRNA sense strand
aaucaugccuaaacucaaa

SEQ ID NO: 1989251 - RNA, 19 nt, Homo sapiens
  misc_RNA (1)...(19): siRNA sense strand
caucagaaccuccaggaaa

SEQ ID NO: 1989252 - RNA, 19 nt, Homo sapiens
  misc_RNA (1)...(19): siRNA sense strand
cgucgaggcuggagcuaaa

SEQ ID NO: 1989253 - RNA, 19 nt, Homo sapiens
  misc_RNA (1)...(19): siRNA sense strand
ccacaaagacggugcaucu

SEQ ID NO: 1989254 - RNA, 19 nt, Homo sapiens
  misc_RNA (1)...(19): siRNA sense strand
cugaggugaucaaugaaua

SEQ ID NO: 1989255 - RNA, 19 nt, Homo sapiens
  misc_RNA (1)...(19): siRNA sense strand
gagauggacguaaggaaga

SEQ ID NO: 1989256 - RNA, 19 nt, Homo sapiens
  misc_RNA (1)...(19): siRNA sense strand
agaaagcacuggccaacca

SEQ ID NO: 1989257 - RNA, 19 nt, Homo sapiens
  misc_RNA (1)...(19): siRNA sense strand
gaagguggauuuucugaag

SEQ ID NO: 1989258 - RNA, 19 nt, Homo sapiens
  misc_RNA (1)...(19): siRNA sense strand
ccagcgagaugcggaguga

SEQ ID NO: 1989259 - RNA, 19 nt, Homo sapiens
  misc_RNA (1)...(19): siRNA sense strand
cgagcaaaccggccucuga

SEQ ID NO: 1989260 - RNA, 19 nt, Homo sapiens
  misc_RNA (1)...(19): siRNA sense strand
cgaaucaugccuaaacuca

SEQ ID NO: 1989261 - RNA, 19 nt, Homo sapiens
  misc_RNA (1)...(19): siRNA sense strand
gaccuccuccucagagaaa

SEQ ID NO: 1989262 - RNA, 19 nt, Homo sapiens
  misc_RNA (1)...(19): siRNA sense strand
gaggugaucaaugaauauu

SEQ ID NO: 1989263 - RNA, 19 nt, Homo sapiens
  misc_RNA (1)...(19): siRNA sense strand
gagcagcacacgcagaagu

SEQ ID NO: 1989264 - RNA, 19 nt, Homo sapiens
  misc_RNA (1)...(19): siRNA sense strand
gaugcggagugagcuacua

SEQ ID NO: 1989265 - RNA, 19 nt, Homo sapiens
  misc_RNA (1)...(19): siRNA sense strand
cccagagugucaucaagaa

SEQ ID NO: 1989266 - RNA, 19 nt, Homo sapiens
  misc_RNA (1)...(19): siRNA sense strand
ucauucgaaucaugccuaa

SEQ ID NO: 1989267 - RNA, 19 nt, Homo sapiens
  misc_RNA (1)...(19): siRNA sense strand
cugcagagccugagaugga

SEQ ID NO: 1989268 - RNA, 19 nt, Homo sapiens
  misc_RNA (1)...(19): siRNA sense strand
gaagguccacgcgagcaaa

SEQ ID NO: 1989269 - RNA, 19 nt, Homo sapiens
  misc_RNA (1)...(19): siRNA sense strand
gaaucaugccuaaacucaa

SEQ ID NO: 1989270 - RNA, 19 nt, Homo sapiens
  misc_RNA (1)...(19): siRNA sense strand
ggucccagccagugaguga

SEQ ID NO: 1989271 - RNA, 19 nt, Homo sapiens
  misc_RNA (1)...(19): siRNA sense strand
ggugaucaaugaauauucc

SEQ ID NO: 1989272 - RNA, 19 nt, Homo sapiens
  misc_RNA (1)...(19): siRNA sense strand
gcccagagugucaucaaga

SEQ ID NO: 1989273 - RNA, 19 nt, Homo sapiens
  misc_RNA (1)...(19): siRNA sense strand
ccucuucauucgaaucaug

SEQ ID NO: 1989274 - RNA, 19 nt, Homo sapiens
  misc_RNA (1)...(19): siRNA sense strand
aggaaaagcuggcggaaga

SEQ ID NO: 1989275 - RNA, 19 nt, Homo sapiens
  misc_RNA (1)...(19): siRNA sense strand
gaaccuggagaaacugaag

SEQ ID NO: 1989276 - RNA, 19 nt, Homo sapiens
  misc_RNA (1)...(19): siRNA sense strand
gaaaauggcggaccagaac

SEQ ID NO: 1989277 - RNA, 19 nt, Homo sapiens
  misc_RNA (1)...(19): siRNA sense strand
gcucugggccaugcucauu

SEQ ID NO: 1989278 - RNA, 19 nt, Homo sapiens
  misc_RNA (1)...(19): siRNA sense strand
aguggcgccuggagaagua

SEQ ID NO: 1989279 - RNA, 19 nt, Homo sapiens
  misc_RNA (1)...(19): siRNA sense strand
agagugucaucaagaagga

SEQ ID NO: 1989280 - RNA, 19 nt, Homo sapiens
  misc_RNA (1)...(19): siRNA sense strand
ucugggccaugcucauuau

SEQ ID NO: 1989281 - RNA, 19 nt, Homo sapiens
  misc_RNA (1)...(19): siRNA sense strand
gggccaugcucauuaucgu

SEQ ID NO: 1989282 - RNA, 19 nt, Homo sapiens
  misc_RNA (1)...(19): siRNA sense strand
aaagcuggcggaagagaug

SEQ ID NO: 1989283 - RNA, 19 nt, Homo sapiens
  misc_RNA (1)...(19): siRNA sense strand
uaucgucugcuucaucuuc

SEQ ID NO: 1989284 - RNA, 19 nt, Homo sapiens
  misc_RNA (1)...(19): siRNA sense strand
guacgugggagcccuagag

SEQ ID NO: 1989285 - RNA, 19 nt, Homo sapiens
  misc_RNA (1)...(19): siRNA sense strand
ugaggugaucaaugaauau

SEQ ID NO: 1989286 - RNA, 19 nt, Homo sapiens
  misc_RNA (1)...(19): siRNA sense strand
gaauaaagcuacacuguug

SEQ ID NO: 1989287 - RNA, 19 nt, Homo sapiens
  misc_RNA (1)...(19): siRNA sense strand
ccacacaguucauguauua

SEQ ID NO: 1989288 - RNA, 19 nt, Homo sapiens
  misc_RNA (1)...(19): siRNA sense strand
caaguaaucucuucaauag

SEQ ID NO: 1989289 - RNA, 19 nt, Homo sapiens
  misc_RNA (1)...(19): siRNA sense strand
gaaauucaaucuagggaaa

SEQ ID NO: 1989290 - RNA, 19 nt, Homo sapiens
  misc_RNA (1)...(19): siRNA sense strand
caagucaccucuuaaguuu

SEQ ID NO: 1989291 - RNA, 19 nt, Homo sapiens
  misc_RNA (1)...(19): siRNA sense strand
caaaucagguccuaaagaa

SEQ ID NO: 1989292 - RNA, 19 nt, Homo sapiens
  misc_RNA (1)...(19): siRNA sense strand
ggacaggaccuaauaauuc

SEQ ID NO: 1989293 - RNA, 19 nt, Homo sapiens
  misc_RNA (1)...(19): siRNA sense strand
caaguaaaccuguagauuu

SEQ ID NO: 1989294 - RNA, 19 nt, Homo sapiens
  misc_RNA (1)...(19): siRNA sense strand
gaagaucucugcguuugaa

SEQ ID NO: 1989295 - RNA, 19 nt, Homo sapiens
  misc_RNA (1)...(19): siRNA sense strand
ugaagaaggugaauaugaa

SEQ ID NO: 1989296 - RNA, 19 nt, Homo sapiens
  misc_RNA (1)...(19): siRNA sense strand
gaagauagcccagaggaaa

SEQ ID NO: 1989297 - RNA, 19 nt, Homo sapiens
  misc_RNA (1)...(19): siRNA sense strand
gaacagaaguccaugucau

SEQ ID NO: 1989298 - RNA, 19 nt, Homo sapiens
  misc_RNA (1)...(19): siRNA sense strand
uacagacucuuaucgauua

SEQ ID NO: 1989299 - RNA, 19 nt, Homo sapiens
  misc_RNA (1)...(19): siRNA sense strand
aaagucaagucaccucuua

SEQ ID NO: 1989300 - RNA, 19 nt, Homo sapiens
  misc_RNA (1)...(19): siRNA sense strand
gaggaaaccuuacuaacuc

SEQ ID NO: 1989301 - RNA, 19 nt, Homo sapiens
  misc_RNA (1)...(19): siRNA sense strand
gggcauuucuucugggaua

SEQ ID NO: 1989302 - RNA, 19 nt, Homo sapiens
  misc_RNA (1)...(19): siRNA sense strand
agaaguagaugcaaaugaa

SEQ ID NO: 1989303 - RNA, 19 nt, Homo sapiens
  misc_RNA (1)...(19): siRNA sense strand
caacucagaugaagaugga

SEQ ID NO: 1989304 - RNA, 19 nt, Homo sapiens
  misc_RNA (1)...(19): siRNA sense strand
guacaaagguucuccaaaa

SEQ ID NO: 1989305 - RNA, 19 nt, Homo sapiens
  misc_RNA (1)...(19): siRNA sense strand
caaauuaccggaugucuug

SEQ ID NO: 1989306 - RNA, 19 nt, Homo sapiens
  misc_RNA (1)...(19): siRNA sense strand
aaagguuucugaucacaua

SEQ ID NO: 1989307 - RNA, 19 nt, Homo sapiens
  misc_RNA (1)...(19): siRNA sense strand
guaaaccuguagauuugua

SEQ ID NO: 1989308 - RNA, 19 nt, Homo sapiens
  misc_RNA (1)...(19): siRNA sense strand
uaaaguggaucauggugaa

SEQ ID NO: 1989309 - RNA, 19 nt, Homo sapiens
  misc_RNA (1)...(19): siRNA sense strand
ggaagggccugguacaaag

SEQ ID NO: 1989310 - RNA, 19 nt, Homo sapiens
  misc_RNA (1)...(19): siRNA sense strand
aaacagcagucauuggaaa

SEQ ID NO: 1989311 - RNA, 19 nt, Homo sapiens
  misc_RNA (1)...(19): siRNA sense strand
caagaauucuccagugaug

SEQ ID NO: 1989312 - RNA, 19 nt, Homo sapiens
  misc_RNA (1)...(19): siRNA sense strand
gacaggaccuaauaauuca

SEQ ID NO: 1989313 - RNA, 19 nt, Homo sapiens
  misc_RNA (1)...(19): siRNA sense strand
ggaaguccaucaagcacaa

SEQ ID NO: 1989314 - RNA, 19 nt, Homo sapiens
  misc_RNA (1)...(19): siRNA sense strand
guucuggugucaauagaua

SEQ ID NO: 1989315 - RNA, 19 nt, Homo sapiens
  misc_RNA (1)...(19): siRNA sense strand
guggagcacuaaauaaauu

SEQ ID NO: 1989316 - RNA, 19 nt, Homo sapiens
  misc_RNA (1)...(19): siRNA sense strand
gaaagugcaucaaaagauu

SEQ ID NO: 1989317 - RNA, 19 nt, Homo sapiens
  misc_RNA (1)...(19): siRNA sense strand
ccaaguaaucucuucaaua

SEQ ID NO: 1989318 - RNA, 19 nt, Homo sapiens
  misc_RNA (1)...(19): siRNA sense strand
gaucacauacagugguuua

SEQ ID NO: 1989319 - RNA, 19 nt, Homo sapiens
  misc_RNA (1)...(19): siRNA sense strand
ucucaugguuucucaagua

SEQ ID NO: 1989320 - RNA, 19 nt, Homo sapiens
  misc_RNA (1)...(19): siRNA sense strand
ugauacagcuucuccuuug

SEQ ID NO: 1989321 - RNA, 19 nt, Homo sapiens
  misc_RNA (1)...(19): siRNA sense strand
gauauugcgggacuucuua

SEQ ID NO: 1989322 - RNA, 19 nt, Homo sapiens
  misc_RNA (1)...(19): siRNA sense strand
ugaaacuccuggugaauau

SEQ ID NO: 1989323 - RNA, 19 nt, Homo sapiens
  misc_RNA (1)...(19): siRNA sense strand
gcaguaguacagacucuua

SEQ ID NO: 1989324 - RNA, 19 nt, Homo sapiens
  misc_RNA (1)...(19): siRNA sense strand
ccaaagaaagguucagaaa

SEQ ID NO: 1989325 - RNA, 19 nt, Homo sapiens
  misc_RNA (1)...(19): siRNA sense strand
gaguauagcagacaaccua

SEQ ID NO: 1989326 - RNA, 19 nt, Homo sapiens
  misc_RNA (1)...(19): siRNA sense strand
cagaggcagucaucaguaa

SEQ ID NO: 1989327 - RNA, 19 nt, Homo sapiens
  misc_RNA (1)...(19): siRNA sense strand
gauuaugcaucagauauug

SEQ ID NO: 1989328 - RNA, 19 nt, Homo sapiens
  misc_RNA (1)...(19): siRNA sense strand
aaguaaaccuguagauuug

SEQ ID NO: 1989329 - RNA, 19 nt, Homo sapiens
  misc_RNA (1)...(19): siRNA sense strand
gaagggucaucucagaguu

SEQ ID NO: 1989330 - RNA, 19 nt, Homo sapiens
  misc_RNA (1)...(19): siRNA sense strand
ucagaagggucaucucaga

SEQ ID NO: 1989331 - RNA, 19 nt, Homo sapiens
  misc_RNA (1)...(19): siRNA sense strand
agaaagaauugcccagcua

SEQ ID NO: 1989332 - RNA, 19 nt, Homo sapiens
  misc_RNA (1)...(19): siRNA sense strand
gaagaaggugaauaugaaa

SEQ ID NO: 1989333 - RNA, 19 nt, Homo sapiens
  misc_RNA (1)...(19): siRNA sense strand
gcucuuuccucuuguauag

SEQ ID NO: 1989334 - RNA, 19 nt, Homo sapiens
  misc_RNA (1)...(19): siRNA sense strand
agaugaagauggaacauga

SEQ ID NO: 1989335 - RNA, 19 nt, Homo sapiens
  misc_RNA (1)...(19): siRNA sense strand
gaugaaaaguuaccaaaga

SEQ ID NO: 1989336 - RNA, 19 nt, Homo sapiens
  misc_RNA (1)...(19): siRNA sense strand
gacagaacauagaaagguu

SEQ ID NO: 1989337 - RNA, 19 nt, Homo sapiens
  misc_RNA (1)...(19): siRNA sense strand
agaauaugauggaagguaa

SEQ ID NO: 1989338 - RNA, 19 nt, Homo sapiens
  misc_RNA (1)...(19): siRNA sense strand
gcacagaggaaaagaauaa

SEQ ID NO: 1989339 - RNA, 19 nt, Homo sapiens
  misc_RNA (1)...(19): siRNA sense strand
uauuacaccucaagaagaa

SEQ ID NO: 1989340 - RNA, 19 nt, Homo sapiens
  misc_RNA (1)...(19): siRNA sense strand
guacagacucuuaucgauu

SEQ ID NO: 1989341 - RNA, 19 nt, Homo sapiens
  misc_RNA (1)...(19): siRNA sense strand
aaagauaccagccauguug

SEQ ID NO: 1989342 - RNA, 19 nt, Homo sapiens
  misc_RNA (1)...(19): siRNA sense strand
ucaaaucagugagcuguga

SEQ ID NO: 1989343 - RNA, 19 nt, Homo sapiens
  misc_RNA (1)...(19): siRNA sense strand
gagaauaugauggaaggua

SEQ ID NO: 1989344 - RNA, 19 nt, Homo sapiens
  misc_RNA (1)...(19): siRNA sense strand
gacaaaguguaggagauuu

SEQ ID NO: 1989345 - RNA, 19 nt, Homo sapiens
  misc_RNA (1)...(19): siRNA sense strand
gaaagaauugcccagcuau

SEQ ID NO: 1989346 - RNA, 19 nt, Homo sapiens
  misc_RNA (1)...(19): siRNA sense strand
ggucuacuacaguuuauaa

SEQ ID NO: 1989347 - RNA, 19 nt, Homo sapiens
  misc_RNA (1)...(19): siRNA sense strand
ugugaagagucaaauauug

SEQ ID NO: 1989348 - RNA, 19 nt, Homo sapiens
  misc_RNA (1)...(19): siRNA sense strand
ucaagucaccucuuaaguu

SEQ ID NO: 1989349 - RNA, 19 nt, Homo sapiens
  misc_RNA (1)...(19): siRNA sense strand
caaaugacagaacauagaa

SEQ ID NO: 1989350 - RNA, 19 nt, Homo sapiens
  misc_RNA (1)...(19): siRNA sense strand
uaugauggaagguaacuua

SEQ ID NO: 1989351 - RNA, 19 nt, Homo sapiens
  misc_RNA (1)...(19): siRNA sense strand
ccuucaaacucaaacauuu

SEQ ID NO: 1989352 - RNA, 19 nt, Homo sapiens
  misc_RNA (1)...(19): siRNA sense strand
ggaaggcuuugaagaaggu

SEQ ID NO: 1989353 - RNA, 19 nt, Homo sapiens
  misc_RNA (1)...(19): siRNA sense strand
ggaacaaauuaccggaugu

SEQ ID NO: 1989354 - RNA, 19 nt, Homo sapiens
  misc_RNA (1)...(19): siRNA sense strand
gcgacuaguuggaacaaau

SEQ ID NO: 1989355 - RNA, 19 nt, Homo sapiens
  misc_RNA (1)...(19): siRNA sense strand
gaauugcccagcuaucuga

SEQ ID NO: 1989356 - RNA, 19 nt, Homo sapiens
  misc_RNA (1)...(19): siRNA sense strand
gcaccuccuugugauauug

SEQ ID NO: 1989357 - RNA, 19 nt, Homo sapiens
  misc_RNA (1)...(19): siRNA sense strand
gcauggaguuacccucgaa

SEQ ID NO: 1989358 - RNA, 19 nt, Homo sapiens
  misc_RNA (1)...(19): siRNA sense strand
ucacaaaugacagaacaua

SEQ ID NO: 1989359 - RNA, 19 nt, Homo sapiens
  misc_RNA (1)...(19): siRNA sense strand
cuccagugaugaagaaaua

SEQ ID NO: 1989360 - RNA, 19 nt, Homo sapiens
  misc_RNA (1)...(19): siRNA sense strand
guacauugccaguagauuc

SEQ ID NO: 1989361 - RNA, 19 nt, Homo sapiens
  misc_RNA (1)...(19): siRNA sense strand
gaucugacuaaucaugaua

SEQ ID NO: 1989362 - RNA, 19 nt, Homo sapiens
  misc_RNA (1)...(19): siRNA sense strand
gaucucugcguuugaaauu

SEQ ID NO: 1989363 - RNA, 19 nt, Homo sapiens
  misc_RNA (1)...(19): siRNA sense strand
caugguuucucaaguaaga

SEQ ID NO: 1989364 - RNA, 19 nt, Homo sapiens
  misc_RNA (1)...(19): siRNA sense strand
gaaaauaacaugaccaaag

SEQ ID NO: 1989365 - RNA, 19 nt, Homo sapiens
  misc_RNA (1)...(19): siRNA sense strand
gaucgcaggagacaugaaa

SEQ ID NO: 1989366 - RNA, 19 nt, Homo sapiens
  misc_RNA (1)...(19): siRNA sense strand
gaguuacccucgaaaucuu

SEQ ID NO: 1989367 - RNA, 19 nt, Homo sapiens
  misc_RNA (1)...(19): siRNA sense strand
uaucaaaucagguccuaaa

SEQ ID NO: 1989368 - RNA, 19 nt, Homo sapiens
  misc_RNA (1)...(19): siRNA sense strand
guauagaaagugcaucaaa

SEQ ID NO: 1989369 - RNA, 19 nt, Homo sapiens
  misc_RNA (1)...(19): siRNA sense strand
agaaagagaagacaaagug

SEQ ID NO: 1989370 - RNA, 19 nt, Homo sapiens
  misc_RNA (1)...(19): siRNA sense strand
gaucugugauucgccuaaa

SEQ ID NO: 1989371 - RNA, 19 nt, Homo sapiens
  misc_RNA (1)...(19): siRNA sense strand
gaaugagaauaugauggaa

SEQ ID NO: 1989372 - RNA, 19 nt, Homo sapiens
  misc_RNA (1)...(19): siRNA sense strand
gaacucaccccuuccaauu

SEQ ID NO: 1989373 - RNA, 19 nt, Homo sapiens
  misc_RNA (1)...(19): siRNA sense strand
guagaaaagucaccugcua

SEQ ID NO: 1989374 - RNA, 19 nt, Homo sapiens
  misc_RNA (1)...(19): siRNA sense strand
ucaggaauguuucucuuag

SEQ ID NO: 1989375 - RNA, 19 nt, Homo sapiens
  misc_RNA (1)...(19): siRNA sense strand
aaagagaagacaaagugua

SEQ ID NO: 1989376 - RNA, 19 nt, Homo sapiens
  misc_RNA (1)...(19): siRNA sense strand
auaaauaacaggguccuua

SEQ ID NO: 1989377 - RNA, 19 nt, Homo sapiens
  misc_RNA (1)...(19): siRNA sense strand
cccaaaggauaaacuaaau

SEQ ID NO: 1989378 - RNA, 19 nt, Homo sapiens
  misc_RNA (1)...(19): siRNA sense strand
caaaggagaaauaugaaca

SEQ ID NO: 1989379 - RNA, 19 nt, Homo sapiens
  misc_RNA (1)...(19): siRNA sense strand
ucgaagaucucugcguuug

SEQ ID NO: 1989380 - RNA, 19 nt, Homo sapiens
  misc_RNA (1)...(19): siRNA sense strand
gguaucaguucacaucgau

SEQ ID NO: 1989381 - RNA, 19 nt, Homo sapiens
  misc_RNA (1)...(19): siRNA sense strand
ggugaagguugccuaucuu

SEQ ID NO: 1989382 - RNA, 19 nt, Homo sapiens
  misc_RNA (1)...(19): siRNA sense strand
ucagugaaugcuucucuua

SEQ ID NO: 1989383 - RNA, 19 nt, Homo sapiens
  misc_RNA (1)...(19): siRNA sense strand
ggaguuacccucgaaaucu

SEQ ID NO: 1989384 - RNA, 19 nt, Homo sapiens
  misc_RNA (1)...(19): siRNA sense strand
aaaccuaggccuaugagaa

SEQ ID NO: 1989385 - RNA, 19 nt, Homo sapiens
  misc_RNA (1)...(19): siRNA sense strand
aaagaaagguucagaaaag

SEQ ID NO: 1989386 - RNA, 19 nt, Homo sapiens
  misc_RNA (1)...(19): siRNA sense strand
ggagaaacguggaacauug

SEQ ID NO: 1989387 - RNA, 19 nt, Homo sapiens
  misc_RNA (1)...(19): siRNA sense strand
gaacuggacugaugaccaa

SEQ ID NO: 1989388 - RNA, 19 nt, Homo sapiens
  misc_RNA (1)...(19): siRNA sense strand
gaugagaacuggacugaug

SEQ ID NO: 1989389 - RNA, 19 nt, Homo sapiens
  misc_RNA (1)...(19): siRNA sense strand
ggaaguugcugcccaaugu

SEQ ID NO: 1989390 - RNA, 19 nt, Homo sapiens
  misc_RNA (1)...(19): siRNA sense strand
gggaaggacugcauuaaug

SEQ ID NO: 1989391 - RNA, 19 nt, Homo sapiens
  misc_RNA (1)...(19): siRNA sense strand
ccagagcucucaugcagua

SEQ ID NO: 1989392 - RNA, 19 nt, Homo sapiens
  misc_RNA (1)...(19): siRNA sense strand
caacuaagccuucuuccuu

SEQ ID NO: 1989393 - RNA, 19 nt, Homo sapiens
  misc_RNA (1)...(19): siRNA sense strand
gcagaugguugcuguacuu

SEQ ID NO: 1989394 - RNA, 19 nt, Homo sapiens
  misc_RNA (1)...(19): siRNA sense strand
ggacagcuaugaaacucaa

SEQ ID NO: 1989395 - RNA, 19 nt, Homo sapiens
  misc_RNA (1)...(19): siRNA sense strand
gcagacaauuucuaccaaa

SEQ ID NO: 1989396 - RNA, 19 nt, Homo sapiens
  misc_RNA (1)...(19): siRNA sense strand
ggaaaugugugcccugauc

SEQ ID NO: 1989397 - RNA, 19 nt, Homo sapiens
  misc_RNA (1)...(19): siRNA sense strand
ggagacauguuucgaaugg

SEQ ID NO: 1989398 - RNA, 19 nt, Homo sapiens
  misc_RNA (1)...(19): siRNA sense strand
ggacagaccugcacaaacc

SEQ ID NO: 1989399 - RNA, 19 nt, Homo sapiens
  misc_RNA (1)...(19): siRNA sense strand
ggagagugcugcccagugu

SEQ ID NO: 1989400 - RNA, 19 nt, Homo sapiens
  misc_RNA (1)...(19): siRNA sense strand
gaagacgacugcacauucu

SEQ ID NO: 1989401 - RNA, 19 nt, Homo sapiens
  misc_RNA (1)...(19): siRNA sense strand
cauaaucugugacaaguau

SEQ ID NO: 1989402 - RNA, 19 nt, Homo sapiens
  misc_RNA (1)...(19): siRNA sense strand
ccacuuggauugcugaaga

SEQ ID NO: 1989403 - RNA, 19 nt, Homo sapiens
  misc_RNA (1)...(19): siRNA sense strand
gcaauaacagcguaccuaa

SEQ ID NO: 1989404 - RNA, 19 nt, Homo sapiens
  misc_RNA (1)...(19): siRNA sense strand
gaagacacaauuccaaaga

SEQ ID NO: 1989405 - RNA, 19 nt, Homo sapiens
  misc_RNA (1)...(19): siRNA sense strand
ggacagugcugcccaucau

SEQ ID NO: 1989406 - RNA, 19 nt, Homo sapiens
  misc_RNA (1)...(19): siRNA sense strand
gcacggcugugacaucugu

SEQ ID NO: 1989407 - RNA, 19 nt, Homo sapiens
  misc_RNA (1)...(19): siRNA sense strand
ggaaagugcugugaugucu

SEQ ID NO: 1989408 - RNA, 19 nt, Homo sapiens
  misc_RNA (1)...(19): siRNA sense strand
ccagguagauuacagagau

SEQ ID NO: 1989409 - RNA, 19 nt, Homo sapiens
  misc_RNA (1)...(19): siRNA sense strand
gcugugaugucuuugaaug

SEQ ID NO: 1989410 - RNA, 19 nt, Homo sapiens
  misc_RNA (1)...(19): siRNA sense strand
agaaauguaugucccagaa

SEQ ID NO: 1989411 - RNA, 19 nt, Homo sapiens
  misc_RNA (1)...(19): siRNA sense strand
ggaagacgacugcacauuc

SEQ ID NO: 1989412 - RNA, 19 nt, Homo sapiens
  misc_RNA (1)...(19): siRNA sense strand
uuggauugcugaagaauaa

SEQ ID NO: 1989413 - RNA, 19 nt, Homo sapiens
  misc_RNA (1)...(19): siRNA sense strand
gcucaguacucccuccauu

SEQ ID NO: 1989414 - RNA, 19 nt, Homo sapiens
  misc_RNA (1)...(19): siRNA sense strand
cagagaaugcuaagaauug

SEQ ID NO: 1989415 - RNA, 19 nt, Homo sapiens
  misc_RNA (1)...(19): siRNA sense strand
gcagcaaucccuuugaguu

SEQ ID NO: 1989416 - RNA, 19 nt, Homo sapiens
  misc_RNA (1)...(19): siRNA sense strand
aauaacagcguaccuaauu

SEQ ID NO: 1989417 - RNA, 19 nt, Homo sapiens
  misc_RNA (1)...(19): siRNA sense strand
cuaugaaacucaagucaga

SEQ ID NO: 1989418 - RNA, 19 nt, Homo sapiens
  misc_RNA (1)...(19): siRNA sense strand
aaagccagccugcguauuu

SEQ ID NO: 1989419 - RNA, 19 nt, Homo sapiens
  misc_RNA (1)...(19): siRNA sense strand
gaaugcuacugucucaaug

SEQ ID NO: 1989420 - RNA, 19 nt, Homo sapiens
  misc_RNA (1)...(19): siRNA sense strand
gaagaaccaaccaucauca

SEQ ID NO: 1989421 - RNA, 19 nt, Homo sapiens
  misc_RNA (1)...(19): siRNA sense strand
ggaaugcccuccuguucag

SEQ ID NO: 1989422 - RNA, 19 nt, Homo sapiens
  misc_RNA (1)...(19): siRNA sense strand
gagaaacguggaacauuga

SEQ ID NO: 1989423 - RNA, 19 nt, Homo sapiens
  misc_RNA (1)...(19): siRNA sense strand
aaagagaauugaagaagag

SEQ ID NO: 1989424 - RNA, 19 nt, Homo sapiens
  misc_RNA (1)...(19): siRNA sense strand
auaacagcguaccuaauua

SEQ ID NO: 1989425 - RNA, 19 nt, Homo sapiens
  misc_RNA (1)...(19): siRNA sense strand
ggaaugcuacugucucaau

SEQ ID NO: 1989426 - RNA, 19 nt, Homo sapiens
  misc_RNA (1)...(19): siRNA sense strand
cagcaaucccuuugaguuu

SEQ ID NO: 1989427 - RNA, 19 nt, Homo sapiens
  misc_RNA (1)...(19): siRNA sense strand
gcuaagaauugcagaacca

SEQ ID NO: 1989428 - RNA, 19 nt, Homo sapiens
  misc_RNA (1)...(19): siRNA sense strand
gaagaagagaagccagauu

SEQ ID NO: 1989429 - RNA, 19 nt, Homo sapiens
  misc_RNA (1)...(19): siRNA sense strand
gugugaagauccaguguau

SEQ ID NO: 1989430 - RNA, 19 nt, Homo sapiens
  misc_RNA (1)...(19): siRNA sense strand
ggacuccauugccucaguu

SEQ ID NO: 1989431 - RNA, 19 nt, Homo sapiens
  misc_RNA (1)...(19): siRNA sense strand
gaacugucccuucgguuuc

SEQ ID NO: 1989432 - RNA, 19 nt, Homo sapiens
  misc_RNA (1)...(19): siRNA sense strand
gaagauccaguguauccuu

SEQ ID NO: 1989433 - RNA, 19 nt, Homo sapiens
  misc_RNA (1)...(19): siRNA sense strand
auaaucagcuaguaucugu

SEQ ID NO: 1989434 - RNA, 19 nt, Homo sapiens
  misc_RNA (1)...(19): siRNA sense strand
gcacccaagugaagauucu

SEQ ID NO: 1989435 - RNA, 19 nt, Homo sapiens
  misc_RNA (1)...(19): siRNA sense strand
ggacugcauuaaugguuuc

SEQ ID NO: 1989436 - RNA, 19 nt, Homo sapiens
  misc_RNA (1)...(19): siRNA sense strand
ugaagauucuguucugauc

SEQ ID NO: 1989437 - RNA, 19 nt, Homo sapiens
  misc_RNA (1)...(19): siRNA sense strand
gauaugugccuuucagcuu

SEQ ID NO: 1989438 - RNA, 19 nt, Homo sapiens
  misc_RNA (1)...(19): siRNA sense strand
gagcucucaugcaguaaga

SEQ ID NO: 1989439 - RNA, 19 nt, Homo sapiens
  misc_RNA (1)...(19): siRNA sense strand
caagaagugcagacccaua

SEQ ID NO: 1989440 - RNA, 19 nt, Homo sapiens
  misc_RNA (1)...(19): siRNA sense strand
caaacgcgaucacaauggu

SEQ ID NO: 1989441 - RNA, 19 nt, Homo sapiens
  misc_RNA (1)...(19): siRNA sense strand
ccaguucucuccacguugu

SEQ ID NO: 1989442 - RNA, 19 nt, Homo sapiens
  misc_RNA (1)...(19): siRNA sense strand
uaugugccuuucagcuuua

SEQ ID NO: 1989443 - RNA, 19 nt, Homo sapiens
  misc_RNA (1)...(19): siRNA sense strand
agaaccagaugcaagauuc

SEQ ID NO: 1989444 - RNA, 19 nt, Homo sapiens
  misc_RNA (1)...(19): siRNA sense strand
cauaaacaccgaggaacua

SEQ ID NO: 1989445 - RNA, 19 nt, Homo sapiens
  misc_RNA (1)...(19): siRNA sense strand
uuaucaaacugcacucuga

SEQ ID NO: 1989446 - RNA, 19 nt, Homo sapiens
  misc_RNA (1)...(19): siRNA sense strand
ugaacauacuagugucaaa

SEQ ID NO: 1989447 - RNA, 19 nt, Homo sapiens
  misc_RNA (1)...(19): siRNA sense strand
caauguguccagaaaugua

SEQ ID NO: 1989448 - RNA, 19 nt, Homo sapiens
  misc_RNA (1)...(19): siRNA sense strand
ggacgggugcugugugaga

SEQ ID NO: 1989449 - RNA, 19 nt, Homo sapiens
  misc_RNA (1)...(19): siRNA sense strand
gaugguugcuguacuuugc

SEQ ID NO: 1989450 - RNA, 19 nt, Homo sapiens
  misc_RNA (1)...(19): siRNA sense strand
aagccagccugcguauuua

SEQ ID NO: 1989451 - RNA, 19 nt, Homo sapiens
  misc_RNA (1)...(19): siRNA sense strand
gcccaaggcccaagaagug

SEQ ID NO: 1989452 - RNA, 19 nt, Homo sapiens
  misc_RNA (1)...(19): siRNA sense strand
aagaagagaagccagauug

SEQ ID NO: 1989453 - RNA, 19 nt, Homo sapiens
  misc_RNA (1)...(19): siRNA sense strand
ccagagaaugcuaagaauu

SEQ ID NO: 1989454 - RNA, 19 nt, Homo sapiens
  misc_RNA (1)...(19): siRNA sense strand
ggacaguucccagagaaug

SEQ ID NO: 1989455 - RNA, 19 nt, Homo sapiens
  misc_RNA (1)...(19): siRNA sense strand
gcauuccuauucaucaauc

SEQ ID NO: 1989456 - RNA, 19 nt, Homo sapiens
  misc_RNA (1)...(19): siRNA sense strand
guugugguucccauaauua

SEQ ID NO: 1989457 - RNA, 19 nt, Homo sapiens
  misc_RNA (1)...(19): siRNA sense strand
cagguagauuacagagaua

SEQ ID NO: 1989458 - RNA, 19 nt, Homo sapiens
  misc_RNA (1)...(19): siRNA sense strand
cccaauguguccagaaaug

SEQ ID NO: 1989459 - RNA, 19 nt, Homo sapiens
  misc_RNA (1)...(19): siRNA sense strand
gaacauugacuccuguacu

SEQ ID NO: 1989460 - RNA, 19 nt, Homo sapiens
  misc_RNA (1)...(19): siRNA sense strand
gaagugcagacccauaauc

SEQ ID NO: 1989461 - RNA, 19 nt, Homo sapiens
  misc_RNA (1)...(19): siRNA sense strand
ggaaggacugcauuaaugg

SEQ ID NO: 1989462 - RNA, 19 nt, Homo sapiens
  misc_RNA (1)...(19): siRNA sense strand
gugcugugaugucuuugaa

SEQ ID NO: 1989463 - RNA, 19 nt, Homo sapiens
  misc_RNA (1)...(19): siRNA sense strand
guacuuugccaacaagaug

SEQ ID NO: 1989464 - RNA, 19 nt, Homo sapiens
  misc_RNA (1)...(19): siRNA sense strand
cagacuaacugcagauggu

SEQ ID NO: 1989465 - RNA, 19 nt, Homo sapiens
  misc_RNA (1)...(19): siRNA sense strand
ggcagacaauuucuaccaa

SEQ ID NO: 1989466 - RNA, 19 nt, Homo sapiens
  misc_RNA (1)...(19): siRNA sense strand
guggacaguucccagagaa

SEQ ID NO: 1989467 - RNA, 19 nt, Homo sapiens
  misc_RNA (1)...(19): siRNA sense strand
gguggacaguucccagaga

SEQ ID NO: 1989468 - RNA, 19 nt, Homo sapiens
  misc_RNA (1)...(19): siRNA sense strand
cugcauugauagcguaauu

SEQ ID NO: 1989469 - RNA, 19 nt, Homo sapiens
  misc_RNA (1)...(19): siRNA sense strand
gauccaguguauccuuuua

SEQ ID NO: 1989470 - RNA, 19 nt, Homo sapiens
  misc_RNA (1)...(19): siRNA sense strand
aaugggaaaugugaaugua

SEQ ID NO: 1989471 - RNA, 19 nt, Homo sapiens
  misc_RNA (1)...(19): siRNA sense strand
gauggagacauguuucgaa

SEQ ID NO: 1989472 - RNA, 19 nt, Homo sapiens
  misc_RNA (1)...(19): siRNA sense strand
cgggaaaccugaacauacu

SEQ ID NO: 1989473 - RNA, 19 nt, Homo sapiens
  misc_RNA (1)...(19): siRNA sense strand
aagacacaauuccaaagaa

SEQ ID NO: 1989474 - RNA, 19 nt, Homo sapiens
  misc_RNA (1)...(19): siRNA sense strand
ucaguacucccuccauuug

SEQ ID NO: 1989475 - RNA, 19 nt, Homo sapiens
  misc_RNA (1)...(19): siRNA sense strand
gaaaugugugcccugauca

SEQ ID NO: 1989476 - RNA, 19 nt, Homo sapiens
  misc_RNA (1)...(19): siRNA sense strand
agaauaagcacggcuguga

SEQ ID NO: 1989477 - RNA, 19 nt, Homo sapiens
  misc_RNA (1)...(19): siRNA sense strand
cugcauuaaugguuucaaa

SEQ ID NO: 1989478 - RNA, 19 nt, Homo sapiens
  misc_RNA (1)...(19): siRNA sense strand
aagaagugcagacccauaa

SEQ ID NO: 1989479 - RNA, 19 nt, Homo sapiens
  misc_RNA (1)...(19): siRNA sense strand
gcugcaauauaaucaaugg

SEQ ID NO: 1989480 - RNA, 19 nt, Homo sapiens
  misc_RNA (1)...(19): siRNA sense strand
uagcauuccuauucaucaa

SEQ ID NO: 1989481 - RNA, 19 nt, Homo sapiens
  misc_RNA (1)...(19): siRNA sense strand
agacacaauuccaaagaag

SEQ ID NO: 1989482 - RNA, 19 nt, Homo sapiens
  misc_RNA (1)...(19): siRNA sense strand
uagaagacacaauuccaaa

SEQ ID NO: 1989483 - RNA, 19 nt, Homo sapiens
  misc_RNA (1)...(19): siRNA sense strand
cugcauagaagacacaauu

SEQ ID NO: 1989484 - RNA, 19 nt, Homo sapiens
  misc_RNA (1)...(19): siRNA sense strand
gcccuucuguauccuguga

SEQ ID NO: 1989485 - RNA, 19 nt, Homo sapiens
  misc_RNA (1)...(19): siRNA sense strand
gcauugauagcguaauuag

SEQ ID NO: 1989486 - RNA, 19 nt, Homo sapiens
  misc_RNA (1)...(19): siRNA sense strand
ggacauggauuaccugaaa

SEQ ID NO: 1989487 - RNA, 19 nt, Homo sapiens
  misc_RNA (1)...(19): siRNA sense strand
gagcaaacaugcccagaaa

SEQ ID NO: 1989488 - RNA, 19 nt, Homo sapiens
  misc_RNA (1)...(19): siRNA sense strand
gagaaacgcucaugggaau

SEQ ID NO: 1989489 - RNA, 19 nt, Homo sapiens
  misc_RNA (1)...(19): siRNA sense strand
gcagacaacucuucagcaa

SEQ ID NO: 1989490 - RNA, 19 nt, Homo sapiens
  misc_RNA (1)...(19): siRNA sense strand
gaagagagccucccaggau

SEQ ID NO: 1989491 - RNA, 19 nt, Homo sapiens
  misc_RNA (1)...(19): siRNA sense strand
ggauguacucuguuuauua

SEQ ID NO: 1989492 - RNA, 19 nt, Homo sapiens
  misc_RNA (1)...(19): siRNA sense strand
gaaacaaguucccagaaag

SEQ ID NO: 1989493 - RNA, 19 nt, Homo sapiens
  misc_RNA (1)...(19): siRNA sense strand
gaaggaggauacagaguuc

SEQ ID NO: 1989494 - RNA, 19 nt, Homo sapiens
  misc_RNA (1)...(19): siRNA sense strand
gggaggaccuggaagaaga

SEQ ID NO: 1989495 - RNA, 19 nt, Homo sapiens
  misc_RNA (1)...(19): siRNA sense strand
ugaagaaucucccgaaugg

SEQ ID NO: 1989496 - RNA, 19 nt, Homo sapiens
  misc_RNA (1)...(19): siRNA sense strand
gaagcaagcucugaaaugc

SEQ ID NO: 1989497 - RNA, 19 nt, Homo sapiens
  misc_RNA (1)...(19): siRNA sense strand
ggauacaucuuuguggauu

SEQ ID NO: 1989498 - RNA, 19 nt, Homo sapiens
  misc_RNA (1)...(19): siRNA sense strand
agaaacaaguucccagaaa

SEQ ID NO: 1989499 - RNA, 19 nt, Homo sapiens
  misc_RNA (1)...(19): siRNA sense strand
gacauuggcucggaagaaa

SEQ ID NO: 1989500 - RNA, 19 nt, Homo sapiens
  misc_RNA (1)...(19): siRNA sense strand
caccaaagauggcaaguuc

SEQ ID NO: 1989501 - RNA, 19 nt, Homo sapiens
  misc_RNA (1)...(19): siRNA sense strand
ggaggaagaggaagaagaa

SEQ ID NO: 1989502 - RNA, 19 nt, Homo sapiens
  misc_RNA (1)...(19): siRNA sense strand
ggaagaggaagaagaagaa

SEQ ID NO: 1989503 - RNA, 19 nt, Homo sapiens
  misc_RNA (1)...(19): siRNA sense strand
uaagaaagaugagaagaag

SEQ ID NO: 1989504 - RNA, 19 nt, Homo sapiens
  misc_RNA (1)...(19): siRNA sense strand
gaaacgcucaugggaauaa

SEQ ID NO: 1989505 - RNA, 19 nt, Homo sapiens
  misc_RNA (1)...(19): siRNA sense strand
caaagaauaccaccaaauc

SEQ ID NO: 1989506 - RNA, 19 nt, Homo sapiens
  misc_RNA (1)...(19): siRNA sense strand
gaaagcagaccaccuccaa

SEQ ID NO: 1989507 - RNA, 19 nt, Homo sapiens
  misc_RNA (1)...(19): siRNA sense strand
gaaggaggcccaggacaaa

SEQ ID NO: 1989508 - RNA, 19 nt, Homo sapiens
  misc_RNA (1)...(19): siRNA sense strand
gcaggaugcuccacguguu

SEQ ID NO: 1989509 - RNA, 19 nt, Homo sapiens
  misc_RNA (1)...(19): siRNA sense strand
ggaaggagcagacaacucu

SEQ ID NO: 1989510 - RNA, 19 nt, Homo sapiens
  misc_RNA (1)...(19): siRNA sense strand
gagcgaagcaagacuguga

SEQ ID NO: 1989511 - RNA, 19 nt, Homo sapiens
  misc_RNA (1)...(19): siRNA sense strand
gaacuucgacuccgauucu

SEQ ID NO: 1989512 - RNA, 19 nt, Homo sapiens
  misc_RNA (1)...(19): siRNA sense strand
aagagaagcugaaggaagu

SEQ ID NO: 1989513 - RNA, 19 nt, Homo sapiens
  misc_RNA (1)...(19): siRNA sense strand
gaaggaagccagcgaggau

SEQ ID NO: 1989514 - RNA, 19 nt, Homo sapiens
  misc_RNA (1)...(19): siRNA sense strand
gcacagaagcauuucaaca

SEQ ID NO: 1989515 - RNA, 19 nt, Homo sapiens
  misc_RNA (1)...(19): siRNA sense strand
acacagaggcuucggcuuu

SEQ ID NO: 1989516 - RNA, 19 nt, Homo sapiens
  misc_RNA (1)...(19): siRNA sense strand
agacaacucuucagcaaag

SEQ ID NO: 1989517 - RNA, 19 nt, Homo sapiens
  misc_RNA (1)...(19): siRNA sense strand
ggagugaggccgaggaaga

SEQ ID NO: 1989518 - RNA, 19 nt, Homo sapiens
  misc_RNA (1)...(19): siRNA sense strand
auacagaguuccaggaguu

SEQ ID NO: 1989519 - RNA, 19 nt, Homo sapiens
  misc_RNA (1)...(19): siRNA sense strand
cagaagcauuucaacaaga

SEQ ID NO: 1989520 - RNA, 19 nt, Homo sapiens
  misc_RNA (1)...(19): siRNA sense strand
gauacaucuuuguggauuu

SEQ ID NO: 1989521 - RNA, 19 nt, Homo sapiens
  misc_RNA (1)...(19): siRNA sense strand
cuccagaaauuaagaaaga

SEQ ID NO: 1989522 - RNA, 19 nt, Homo sapiens
  misc_RNA (1)...(19): siRNA sense strand
caacagaagagaagcugaa

SEQ ID NO: 1989523 - RNA, 19 nt, Homo sapiens
  misc_RNA (1)...(19): siRNA sense strand
gaagcaagacugugauucu

SEQ ID NO: 1989524 - RNA, 19 nt, Homo sapiens
  misc_RNA (1)...(19): siRNA sense strand
agaggaaagugaagaugaa

SEQ ID NO: 1989525 - RNA, 19 nt, Homo sapiens
  misc_RNA (1)...(19): siRNA sense strand
gcaaugaagaggaagugaa

SEQ ID NO: 1989526 - RNA, 19 nt, Homo sapiens
  misc_RNA (1)...(19): siRNA sense strand
gaagcugaaggaaguguuu

SEQ ID NO: 1989527 - RNA, 19 nt, Homo sapiens
  misc_RNA (1)...(19): siRNA sense strand
caucuaccaucaagaagga

SEQ ID NO: 1989528 - RNA, 19 nt, Homo sapiens
  misc_RNA (1)...(19): siRNA sense strand
cuacuacuccagaaauuaa

SEQ ID NO: 1989529 - RNA, 19 nt, Homo sapiens
  misc_RNA (1)...(19): siRNA sense strand
gguuuggauuuguggaaua

SEQ ID NO: 1989530 - RNA, 19 nt, Homo sapiens
  misc_RNA (1)...(19): siRNA sense strand
gaucgucguccuacaagaa

SEQ ID NO: 1989531 - RNA, 19 nt, Homo sapiens
  misc_RNA (1)...(19): siRNA sense strand
ggaggaagaggaaagugaa

SEQ ID NO: 1989532 - RNA, 19 nt, Homo sapiens
  misc_RNA (1)...(19): siRNA sense strand
agaaagaugagaagaagaa

SEQ ID NO: 1989533 - RNA, 19 nt, Homo sapiens
  misc_RNA (1)...(19): siRNA sense strand
ggaugaaggaggagcguuu

SEQ ID NO: 1989534 - RNA, 19 nt, Homo sapiens
  misc_RNA (1)...(19): siRNA sense strand
gaagugaagcaagcucuga

SEQ ID NO: 1989535 - RNA, 19 nt, Homo sapiens
  misc_RNA (1)...(19): siRNA sense strand
cagaagagaagcugaagga

SEQ ID NO: 1989536 - RNA, 19 nt, Homo sapiens
  misc_RNA (1)...(19): siRNA sense strand
cacagaagcauuucaacaa

SEQ ID NO: 1989537 - RNA, 19 nt, Homo sapiens
  misc_RNA (1)...(19): siRNA sense strand
caacuggaacacacuauuc

SEQ ID NO: 1989538 - RNA, 19 nt, Homo sapiens
  misc_RNA (1)...(19): siRNA sense strand
ggagcaaacaugcccagaa

SEQ ID NO: 1989539 - RNA, 19 nt, Homo sapiens
  misc_RNA (1)...(19): siRNA sense strand
ugaaggaggauacagaguu

SEQ ID NO: 1989540 - RNA, 19 nt, Homo sapiens
  misc_RNA (1)...(19): siRNA sense strand
cgacugaucgugaagaauc

SEQ ID NO: 1989541 - RNA, 19 nt, Homo sapiens
  misc_RNA (1)...(19): siRNA sense strand
caaaggcagcugugcagaa

SEQ ID NO: 1989542 - RNA, 19 nt, Homo sapiens
  misc_RNA (1)...(19): siRNA sense strand
agaaggcacagaagcauuu

SEQ ID NO: 1989543 - RNA, 19 nt, Homo sapiens
  misc_RNA (1)...(19): siRNA sense strand
cagcagagccagaaacagu

SEQ ID NO: 1989544 - RNA, 19 nt, Homo sapiens
  misc_RNA (1)...(19): siRNA sense strand
gaaagaugagaagaagaaa

SEQ ID NO: 1989545 - RNA, 19 nt, Homo sapiens
  misc_RNA (1)...(19): siRNA sense strand
cccaggauguacucuguuu

SEQ ID NO: 1989546 - RNA, 19 nt, Homo sapiens
  misc_RNA (1)...(19): siRNA sense strand
guacggaaccugcccuaca

SEQ ID NO: 1989547 - RNA, 19 nt, Homo sapiens
  misc_RNA (1)...(19): siRNA sense strand
ccauucgaauugugagaaa

SEQ ID NO: 1989548 - RNA, 19 nt, Homo sapiens
  misc_RNA (1)...(19): siRNA sense strand
ccaguggccauucgaauug

SEQ ID NO: 1989549 - RNA, 19 nt, Homo sapiens
  misc_RNA (1)...(19): siRNA sense strand
gaaaccagcaaaccagaag

SEQ ID NO: 1989550 - RNA, 19 nt, Homo sapiens
  misc_RNA (1)...(19): siRNA sense strand
ggaagaggaaagugaagau

SEQ ID NO: 1989551 - RNA, 19 nt, Homo sapiens
  misc_RNA (1)...(19): siRNA sense strand
gugacuaccugaacuucga

SEQ ID NO: 1989552 - RNA, 19 nt, Homo sapiens
  misc_RNA (1)...(19): siRNA sense strand
gcagacccuucagcuguga

SEQ ID NO: 1989553 - RNA, 19 nt, Homo sapiens
  misc_RNA (1)...(19): siRNA sense strand
gcagaccaccuccaagauc

SEQ ID NO: 1989554 - RNA, 19 nt, Homo sapiens
  misc_RNA (1)...(19): siRNA sense strand
ggaggaggaggaagaggaa

SEQ ID NO: 1989555 - RNA, 19 nt, Homo sapiens
  misc_RNA (1)...(19): siRNA sense strand
ccaagacacaccuucagaa

SEQ ID NO: 1989556 - RNA, 19 nt, Homo sapiens
  misc_RNA (1)...(19): siRNA sense strand
gauggcaaguuccgcaagu

SEQ ID NO: 1989557 - RNA, 19 nt, Homo sapiens
  misc_RNA (1)...(19): siRNA sense strand
gaagaggaaagugaagaug

SEQ ID NO: 1989558 - RNA, 19 nt, Homo sapiens
  misc_RNA (1)...(19): siRNA sense strand
acagaagcauuucaacaag

SEQ ID NO: 1989559 - RNA, 19 nt, Homo sapiens
  misc_RNA (1)...(19): siRNA sense strand
caagcaggaugcgaagaga

SEQ ID NO: 1989560 - RNA, 19 nt, Homo sapiens
  misc_RNA (1)...(19): siRNA sense strand
gcugcuccaucuccaagaa

SEQ ID NO: 1989561 - RNA, 19 nt, Homo sapiens
  misc_RNA (1)...(19): siRNA sense strand
caggaugcuccacguguua

SEQ ID NO: 1989562 - RNA, 19 nt, Homo sapiens
  misc_RNA (1)...(19): siRNA sense strand
ccaaagaauaccaccaaau

SEQ ID NO: 1989563 - RNA, 19 nt, Homo sapiens
  misc_RNA (1)...(19): siRNA sense strand
ugaagcaagcucugaaaug

SEQ ID NO: 1989564 - RNA, 19 nt, Homo sapiens
  misc_RNA (1)...(19): siRNA sense strand
aaacaugcccagaaaccaa

SEQ ID NO: 1989565 - RNA, 19 nt, Homo sapiens
  misc_RNA (1)...(19): siRNA sense strand
gcgaggagcagacccuuca

SEQ ID NO: 1989566 - RNA, 19 nt, Homo sapiens
  misc_RNA (1)...(19): siRNA sense strand
caucuggccuauuccaagu

SEQ ID NO: 1989567 - RNA, 19 nt, Homo sapiens
  misc_RNA (1)...(19): siRNA sense strand
aaaggcagcugugcagaag

SEQ ID NO: 1989568 - RNA, 19 nt, Homo sapiens
  misc_RNA (1)...(19): siRNA sense strand
ucacagcacccacuuguac

SEQ ID NO: 1989569 - RNA, 19 nt, Homo sapiens
  misc_RNA (1)...(19): siRNA sense strand
cacagaggcuucggcuuug

SEQ ID NO: 1989570 - RNA, 19 nt, Homo sapiens
  misc_RNA (1)...(19): siRNA sense strand
ccagaaacagugccugaug

SEQ ID NO: 1989571 - RNA, 19 nt, Homo sapiens
  misc_RNA (1)...(19): siRNA sense strand
gcauucaucaccuucaugu

SEQ ID NO: 1989572 - RNA, 19 nt, Homo sapiens
  misc_RNA (1)...(19): siRNA sense strand
ucgacagccugaccaagaa

SEQ ID NO: 1989573 - RNA, 19 nt, Homo sapiens
  misc_RNA (1)...(19): siRNA sense strand
agacagagaaaccagcaaa

SEQ ID NO: 1989574 - RNA, 19 nt, Homo sapiens
  misc_RNA (1)...(19): siRNA sense strand
caggauguacucuguuuau

SEQ ID NO: 1989575 - RNA, 19 nt, Homo sapiens
  misc_RNA (1)...(19): siRNA sense strand
ccaaaagacucuacuacuc

SEQ ID NO: 1989576 - RNA, 19 nt, Homo sapiens
  misc_RNA (1)...(19): siRNA sense strand
aaagcggucugugguguug

SEQ ID NO: 1989577 - RNA, 19 nt, Homo sapiens
  misc_RNA (1)...(19): siRNA sense strand
ggaggaggaagaggaagaa

SEQ ID NO: 1989578 - RNA, 19 nt, Homo sapiens
  misc_RNA (1)...(19): siRNA sense strand
ggaagaggaggaggaggaa

SEQ ID NO: 1989579 - RNA, 19 nt, Homo sapiens
  misc_RNA (1)...(19): siRNA sense strand
gaauaaaacaggauacauc

SEQ ID NO: 1989580 - RNA, 19 nt, Homo sapiens
  misc_RNA (1)...(19): siRNA sense strand
gacauggauuaccugaaau

SEQ ID NO: 1989581 - RNA, 19 nt, Homo sapiens
  misc_RNA (1)...(19): siRNA sense strand
gaaaugcaaccgggaguac

SEQ ID NO: 1989582 - RNA, 19 nt, Homo sapiens
  misc_RNA (1)...(19): siRNA sense strand
ccaagaagaagaacaaagc

SEQ ID NO: 1989583 - RNA, 19 nt, Homo sapiens
  misc_RNA (1)...(19): siRNA sense strand
ugacacaacagaagagaag

SEQ ID NO: 1989584 - RNA, 19 nt, Homo sapiens
  misc_RNA (1)...(19): siRNA sense strand
gagagccucccaggaugua

SEQ ID NO: 1989585 - RNA, 19 nt, Homo sapiens
  misc_RNA (1)...(19): siRNA sense strand
aagcagaccaccuccaaga

SEQ ID NO: 1989586 - RNA, 19 nt, Homo sapiens
  misc_RNA (1)...(19): siRNA sense strand
ggacauggauuaccugaaa

SEQ ID NO: 1989587 - RNA, 19 nt, Homo sapiens
  misc_RNA (1)...(19): siRNA sense strand
gagcaaacaugcccagaaa

SEQ ID NO: 1989588 - RNA, 19 nt, Homo sapiens
  misc_RNA (1)...(19): siRNA sense strand
gagaaacgcucaugggaau

SEQ ID NO: 1989589 - RNA, 19 nt, Homo sapiens
  misc_RNA (1)...(19): siRNA sense strand
gcagacaacucuucagcaa

SEQ ID NO: 1989590 - RNA, 19 nt, Homo sapiens
  misc_RNA (1)...(19): siRNA sense strand
gaagagagccucccaggau

SEQ ID NO: 1989591 - RNA, 19 nt, Homo sapiens
  misc_RNA (1)...(19): siRNA sense strand
ggauguacucuguuuauua

SEQ ID NO: 1989592 - RNA, 19 nt, Homo sapiens
  misc_RNA (1)...(19): siRNA sense strand
gaaacaaguucccagaaag

SEQ ID NO: 1989593 - RNA, 19 nt, Homo sapiens
  misc_RNA (1)...(19): siRNA sense strand
gaaggaggauacagaguuc

SEQ ID NO: 1989594 - RNA, 19 nt, Homo sapiens
  misc_RNA (1)...(19): siRNA sense strand
gggaggaccuggaagaaga

SEQ ID NO: 1989595 - RNA, 19 nt, Homo sapiens
  misc_RNA (1)...(19): siRNA sense strand
ugaagaaucucccgaaugg

SEQ ID NO: 1989596 - RNA, 19 nt, Homo sapiens
  misc_RNA (1)...(19): siRNA sense strand
gaagcaagcucugaaaugc

SEQ ID NO: 1989597 - RNA, 19 nt, Homo sapiens
  misc_RNA (1)...(19): siRNA sense strand
ggauacaucuuuguggauu

SEQ ID NO: 1989598 - RNA, 19 nt, Homo sapiens
  misc_RNA (1)...(19): siRNA sense strand
agaaacaaguucccagaaa

SEQ ID NO: 1989599 - RNA, 19 nt, Homo sapiens
  misc_RNA (1)...(19): siRNA sense strand
gacauuggcucggaagaaa

SEQ ID NO: 1989600 - RNA, 19 nt, Homo sapiens
  misc_RNA (1)...(19): siRNA sense strand
caccaaagauggcaaguuc

SEQ ID NO: 1989601 - RNA, 19 nt, Homo sapiens
  misc_RNA (1)...(19): siRNA sense strand
ggaggaagaggaagaagaa

SEQ ID NO: 1989602 - RNA, 19 nt, Homo sapiens
  misc_RNA (1)...(19): siRNA sense strand
ggaagaggaagaagaagaa

SEQ ID NO: 1989603 - RNA, 19 nt, Homo sapiens
  misc_RNA (1)...(19): siRNA sense strand
uaagaaagaugagaagaag

SEQ ID NO: 1989604 - RNA, 19 nt, Homo sapiens
  misc_RNA (1)...(19): siRNA sense strand
gaaacgcucaugggaauaa

SEQ ID NO: 1989605 - RNA, 19 nt, Homo sapiens
  misc_RNA (1)...(19): siRNA sense strand
caaagaauaccaccaaauc

SEQ ID NO: 1989606 - RNA, 19 nt, Homo sapiens
  misc_RNA (1)...(19): siRNA sense strand
gaaagcagaccaccuccaa

SEQ ID NO: 1989607 - RNA, 19 nt, Homo sapiens
  misc_RNA (1)...(19): siRNA sense strand
gaaggaggcccaggacaaa

SEQ ID NO: 1989608 - RNA, 19 nt, Homo sapiens
  misc_RNA (1)...(19): siRNA sense strand
gcaggaugcuccacguguu

SEQ ID NO: 1989609 - RNA, 19 nt, Homo sapiens
  misc_RNA (1)...(19): siRNA sense strand
ggaaggagcagacaacucu

SEQ ID NO: 1989610 - RNA, 19 nt, Homo sapiens
  misc_RNA (1)...(19): siRNA sense strand
gagcgaagcaagacuguga

SEQ ID NO: 1989611 - RNA, 19 nt, Homo sapiens
  misc_RNA (1)...(19): siRNA sense strand
gaacuucgacuccgauucu

SEQ ID NO: 1989612 - RNA, 19 nt, Homo sapiens
  misc_RNA (1)...(19): siRNA sense strand
aagagaagcugaaggaagu

SEQ ID NO: 1989613 - RNA, 19 nt, Homo sapiens
  misc_RNA (1)...(19): siRNA sense strand
gaaggaagccagcgaggau

SEQ ID NO: 1989614 - RNA, 19 nt, Homo sapiens
  misc_RNA (1)...(19): siRNA sense strand
gcacagaagcauuucaaca

SEQ ID NO: 1989615 - RNA, 19 nt, Homo sapiens
  misc_RNA (1)...(19): siRNA sense strand
acacagaggcuucggcuuu

SEQ ID NO: 1989616 - RNA, 19 nt, Homo sapiens
  misc_RNA (1)...(19): siRNA sense strand
agacaacucuucagcaaag

SEQ ID NO: 1989617 - RNA, 19 nt, Homo sapiens
  misc_RNA (1)...(19): siRNA sense strand
ggagugaggccgaggaaga

SEQ ID NO: 1989618 - RNA, 19 nt, Homo sapiens
  misc_RNA (1)...(19): siRNA sense strand
auacagaguuccaggaguu

SEQ ID NO: 1989619 - RNA, 19 nt, Homo sapiens
  misc_RNA (1)...(19): siRNA sense strand
cagaagcauuucaacaaga

SEQ ID NO: 1989620 - RNA, 19 nt, Homo sapiens
  misc_RNA (1)...(19): siRNA sense strand
gauacaucuuuguggauuu

SEQ ID NO: 1989621 - RNA, 19 nt, Homo sapiens
  misc_RNA (1)...(19): siRNA sense strand
cuccagaaauuaagaaaga

SEQ ID NO: 1989622 - RNA, 19 nt, Homo sapiens
  misc_RNA (1)...(19): siRNA sense strand
caacagaagagaagcugaa

SEQ ID NO: 1989623 - RNA, 19 nt, Homo sapiens
  misc_RNA (1)...(19): siRNA sense strand
gaagcaagacugugauucu

SEQ ID NO: 1989624 - RNA, 19 nt, Homo sapiens
  misc_RNA (1)...(19): siRNA sense strand
agaggaaagugaagaugaa

SEQ ID NO: 1989625 - RNA, 19 nt, Homo sapiens
  misc_RNA (1)...(19): siRNA sense strand
gcaaugaagaggaagugaa

SEQ ID NO: 1989626 - RNA, 19 nt, Homo sapiens
  misc_RNA (1)...(19): siRNA sense strand
gaagcugaaggaaguguuu

SEQ ID NO: 1989627 - RNA, 19 nt, Homo sapiens
  misc_RNA (1)...(19): siRNA sense strand
caucuaccaucaagaagga

SEQ ID NO: 1989628 - RNA, 19 nt, Homo sapiens
  misc_RNA (1)...(19): siRNA sense strand
cuacuacuccagaaauuaa

SEQ ID NO: 1989629 - RNA, 19 nt, Homo sapiens
  misc_RNA (1)...(19): siRNA sense strand
gguuuggauuuguggaaua

SEQ ID NO: 1989630 - RNA, 19 nt, Homo sapiens
  misc_RNA (1)...(19): siRNA sense strand
gaucgucguccuacaagaa

SEQ ID NO: 1989631 - RNA, 19 nt, Homo sapiens
  misc_RNA (1)...(19): siRNA sense strand
ggaggaagaggaaagugaa

SEQ ID NO: 1989632 - RNA, 19 nt, Homo sapiens
  misc_RNA (1)...(19): siRNA sense strand
agaaagaugagaagaagaa

SEQ ID NO: 1989633 - RNA, 19 nt, Homo sapiens
  misc_RNA (1)...(19): siRNA sense strand
ggaugaaggaggagcguuu

SEQ ID NO: 1989634 - RNA, 19 nt, Homo sapiens
  misc_RNA (1)...(19): siRNA sense strand
gaagugaagcaagcucuga

SEQ ID NO: 1989635 - RNA, 19 nt, Homo sapiens
  misc_RNA (1)...(19): siRNA sense strand
cagaagagaagcugaagga

SEQ ID NO: 1989636 - RNA, 19 nt, Homo sapiens
  misc_RNA (1)...(19): siRNA sense strand
cacagaagcauuucaacaa

SEQ ID NO: 1989637 - RNA, 19 nt, Homo sapiens
  misc_RNA (1)...(19): siRNA sense strand
caacuggaacacacuauuc

SEQ ID NO: 1989638 - RNA, 19 nt, Homo sapiens
  misc_RNA (1)...(19): siRNA sense strand
ggagcaaacaugcccagaa

SEQ ID NO: 1989639 - RNA, 19 nt, Homo sapiens
  misc_RNA (1)...(19): siRNA sense strand
ugaaggaggauacagaguu

SEQ ID NO: 1989640 - RNA, 19 nt, Homo sapiens
  misc_RNA (1)...(19): siRNA sense strand
cgacugaucgugaagaauc

SEQ ID NO: 1989641 - RNA, 19 nt, Homo sapiens
  misc_RNA (1)...(19): siRNA sense strand
caaaggcagcugugcagaa

SEQ ID NO: 1989642 - RNA, 19 nt, Homo sapiens
  misc_RNA (1)...(19): siRNA sense strand
agaaggcacagaagcauuu

SEQ ID NO: 1989643 - RNA, 19 nt, Homo sapiens
  misc_RNA (1)...(19): siRNA sense strand
cagcagagccagaaacagu

SEQ ID NO: 1989644 - RNA, 19 nt, Homo sapiens
  misc_RNA (1)...(19): siRNA sense strand
gaaagaugagaagaagaaa

SEQ ID NO: 1989645 - RNA, 19 nt, Homo sapiens
  misc_RNA (1)...(19): siRNA sense strand
cccaggauguacucuguuu

SEQ ID NO: 1989646 - RNA, 19 nt, Homo sapiens
  misc_RNA (1)...(19): siRNA sense strand
guacggaaccugcccuaca

SEQ ID NO: 1989647 - RNA, 19 nt, Homo sapiens
  misc_RNA (1)...(19): siRNA sense strand
ccauucgaauugugagaaa

SEQ ID NO: 1989648 - RNA, 19 nt, Homo sapiens
  misc_RNA (1)...(19): siRNA sense strand
ccaguggccauucgaauug

SEQ ID NO: 1989649 - RNA, 19 nt, Homo sapiens
  misc_RNA (1)...(19): siRNA sense strand
gaaaccagcaaaccagaag

SEQ ID NO: 1989650 - RNA, 19 nt, Homo sapiens
  misc_RNA (1)...(19): siRNA sense strand
ggaagaggaaagugaagau

SEQ ID NO: 1989651 - RNA, 19 nt, Homo sapiens
  misc_RNA (1)...(19): siRNA sense strand
gugacuaccugaacuucga

SEQ ID NO: 1989652 - RNA, 19 nt, Homo sapiens
  misc_RNA (1)...(19): siRNA sense strand
gcagacccuucagcuguga

SEQ ID NO: 1989653 - RNA, 19 nt, Homo sapiens
  misc_RNA (1)...(19): siRNA sense strand
gcagaccaccuccaagauc

SEQ ID NO: 1989654 - RNA, 19 nt, Homo sapiens
  misc_RNA (1)...(19): siRNA sense strand
ggaggaggaggaagaggaa

SEQ ID NO: 1989655 - RNA, 19 nt, Homo sapiens
  misc_RNA (1)...(19): siRNA sense strand
ccaagacacaccuucagaa

SEQ ID NO: 1989656 - RNA, 19 nt, Homo sapiens
  misc_RNA (1)...(19): siRNA sense strand
gauggcaaguuccgcaagu

SEQ ID NO: 1989657 - RNA, 19 nt, Homo sapiens
  misc_RNA (1)...(19): siRNA sense strand
gaagaggaaagugaagaug

SEQ ID NO: 1989658 - RNA, 19 nt, Homo sapiens
  misc_RNA (1)...(19): siRNA sense strand
acagaagcauuucaacaag

SEQ ID NO: 1989659 - RNA, 19 nt, Homo sapiens
  misc_RNA (1)...(19): siRNA sense strand
caagcaggaugcgaagaga

SEQ ID NO: 1989660 - RNA, 19 nt, Homo sapiens
  misc_RNA (1)...(19): siRNA sense strand
gcugcuccaucuccaagaa

SEQ ID NO: 1989661 - RNA, 19 nt, Homo sapiens
  misc_RNA (1)...(19): siRNA sense strand
caggaugcuccacguguua

SEQ ID NO: 1989662 - RNA, 19 nt, Homo sapiens
  misc_RNA (1)...(19): siRNA sense strand
ccaaagaauaccaccaaau

SEQ ID NO: 1989663 - RNA, 19 nt, Homo sapiens
  misc_RNA (1)...(19): siRNA sense strand
ugaagcaagcucugaaaug

SEQ ID NO: 1989664 - RNA, 19 nt, Homo sapiens
  misc_RNA (1)...(19): siRNA sense strand
aaacaugcccagaaaccaa

SEQ ID NO: 1989665 - RNA, 19 nt, Homo sapiens
  misc_RNA (1)...(19): siRNA sense strand
gcgaggagcagacccuuca

SEQ ID NO: 1989666 - RNA, 19 nt, Homo sapiens
  misc_RNA (1)...(19): siRNA sense strand
caucuggccuauuccaagu

SEQ ID NO: 1989667 - RNA, 19 nt, Homo sapiens
  misc_RNA (1)...(19): siRNA sense strand
aaaggcagcugugcagaag

SEQ ID NO: 1989668 - RNA, 19 nt, Homo sapiens
  misc_RNA (1)...(19): siRNA sense strand
ucacagcacccacuuguac

SEQ ID NO: 1989669 - RNA, 19 nt, Homo sapiens
  misc_RNA (1)...(19): siRNA sense strand
cacagaggcuucggcuuug

SEQ ID NO: 1989670 - RNA, 19 nt, Homo sapiens
  misc_RNA (1)...(19): siRNA sense strand
ccagaaacagugccugaug

SEQ ID NO: 1989671 - RNA, 19 nt, Homo sapiens
  misc_RNA (1)...(19): siRNA sense strand
gcauucaucaccuucaugu

SEQ ID NO: 1989672 - RNA, 19 nt, Homo sapiens
  misc_RNA (1)...(19): siRNA sense strand
ucgacagccugaccaagaa

SEQ ID NO: 1989673 - RNA, 19 nt, Homo sapiens
  misc_RNA (1)...(19): siRNA sense strand
agacagagaaaccagcaaa

SEQ ID NO: 1989674 - RNA, 19 nt, Homo sapiens
  misc_RNA (1)...(19): siRNA sense strand
caggauguacucuguuuau

SEQ ID NO: 1989675 - RNA, 19 nt, Homo sapiens
  misc_RNA (1)...(19): siRNA sense strand
ccaaaagacucuacuacuc

SEQ ID NO: 1989676 - RNA, 19 nt, Homo sapiens
  misc_RNA (1)...(19): siRNA sense strand
aaagcggucugugguguug

SEQ ID NO: 1989677 - RNA, 19 nt, Homo sapiens
  misc_RNA (1)...(19): siRNA sense strand
ggaggaggaagaggaagaa

SEQ ID NO: 1989678 - RNA, 19 nt, Homo sapiens
  misc_RNA (1)...(19): siRNA sense strand
ggaagaggaggaggaggaa

SEQ ID NO: 1989679 - RNA, 19 nt, Homo sapiens
  misc_RNA (1)...(19): siRNA sense strand
gaauaaaacaggauacauc

SEQ ID NO: 1989680 - RNA, 19 nt, Homo sapiens
  misc_RNA (1)...(19): siRNA sense strand
gacauggauuaccugaaau

SEQ ID NO: 1989681 - RNA, 19 nt, Homo sapiens
  misc_RNA (1)...(19): siRNA sense strand
gaaaugcaaccgggaguac

SEQ ID NO: 1989682 - RNA, 19 nt, Homo sapiens
  misc_RNA (1)...(19): siRNA sense strand
ccaagaagaagaacaaagc

SEQ ID NO: 1989683 - RNA, 19 nt, Homo sapiens
  misc_RNA (1)...(19): siRNA sense strand
ugacacaacagaagagaag

SEQ ID NO: 1989684 - RNA, 19 nt, Homo sapiens
  misc_RNA (1)...(19): siRNA sense strand
gagagccucccaggaugua

SEQ ID NO: 1989685 - RNA, 19 nt, Homo sapiens
  misc_RNA (1)...(19): siRNA sense strand
aagcagaccaccuccaaga

SEQ ID NO: 1989686 - RNA, 19 nt, Homo sapiens
  misc_RNA (1)...(19): siRNA sense strand
ggaauauacugaccuguug

SEQ ID NO: 1989687 - RNA, 19 nt, Homo sapiens
  misc_RNA (1)...(19): siRNA sense strand
ggaaggacgcacccuguua

SEQ ID NO: 1989688 - RNA, 19 nt, Homo sapiens
  misc_RNA (1)...(19): siRNA sense strand
ggacgcacccuguuaugaa

SEQ ID NO: 1989689 - RNA, 19 nt, Homo sapiens
  misc_RNA (1)...(19): siRNA sense strand
gaaggacgcacccuguuau

SEQ ID NO: 1989690 - RNA, 19 nt, Homo sapiens
  misc_RNA (1)...(19): siRNA sense strand
ccagagacauccucagcuu

SEQ ID NO: 1989691 - RNA, 19 nt, Homo sapiens
  misc_RNA (1)...(19): siRNA sense strand
gccaagaccugcagcacau

SEQ ID NO: 1989692 - RNA, 19 nt, Homo sapiens
  misc_RNA (1)...(19): siRNA sense strand
gggaauauacugaccuguu

SEQ ID NO: 1989693 - RNA, 19 nt, Homo sapiens
  misc_RNA (1)...(19): siRNA sense strand
caaaagaugcccacaggua

SEQ ID NO: 1989694 - RNA, 19 nt, Homo sapiens
  misc_RNA (1)...(19): siRNA sense strand
gacucugccuccugucuuu

SEQ ID NO: 1989695 - RNA, 19 nt, Homo sapiens
  misc_RNA (1)...(19): siRNA sense strand
guuaugaaucugauacuga

SEQ ID NO: 1989696 - RNA, 19 nt, Homo sapiens
  misc_RNA (1)...(19): siRNA sense strand
gacgcacccuguuaugaau

SEQ ID NO: 1989697 - RNA, 19 nt, Homo sapiens
  misc_RNA (1)...(19): siRNA sense strand
gacuguggcugcugcaaca

SEQ ID NO: 1989698 - RNA, 19 nt, Homo sapiens
  misc_RNA (1)...(19): siRNA sense strand
cagcacaucagcaaccaaa

SEQ ID NO: 1989699 - RNA, 19 nt, Homo sapiens
  misc_RNA (1)...(19): siRNA sense strand
caucagaauccacuacugu

SEQ ID NO: 1989700 - RNA, 19 nt, Homo sapiens
  misc_RNA (1)...(19): siRNA sense strand
aaagaugcccacagguaaa

SEQ ID NO: 1989701 - RNA, 19 nt, Homo sapiens
  misc_RNA (1)...(19): siRNA sense strand
gaauauacugaccuguugu

SEQ ID NO: 1989702 - RNA, 19 nt, Homo sapiens
  misc_RNA (1)...(19): siRNA sense strand
gggaaggacgcacccuguu

SEQ ID NO: 1989703 - RNA, 19 nt, Homo sapiens
  misc_RNA (1)...(19): siRNA sense strand
caacaucagaauccacuac

SEQ ID NO: 1989704 - RNA, 19 nt, Homo sapiens
  misc_RNA (1)...(19): siRNA sense strand
aauauacugaccuguugua

SEQ ID NO: 1989705 - RNA, 19 nt, Homo sapiens
  misc_RNA (1)...(19): siRNA sense strand
ccagcucccuccuguccau

SEQ ID NO: 1989706 - RNA, 19 nt, Homo sapiens
  misc_RNA (1)...(19): siRNA sense strand
caagaccugcagcacauca

SEQ ID NO: 1989707 - RNA, 19 nt, Homo sapiens
  misc_RNA (1)...(19): siRNA sense strand
aaaagaugcccacagguaa

SEQ ID NO: 1989708 - RNA, 19 nt, Homo sapiens
  misc_RNA (1)...(19): siRNA sense strand
caucgaugcucuacaguua

SEQ ID NO: 1989709 - RNA, 19 nt, Homo sapiens
  misc_RNA (1)...(19): siRNA sense strand
ggaaugaaguuaccacauc

SEQ ID NO: 1989710 - RNA, 19 nt, Homo sapiens
  misc_RNA (1)...(19): siRNA sense strand
ccaggaagauguugaagaa

SEQ ID NO: 1989711 - RNA, 19 nt, Homo sapiens
  misc_RNA (1)...(19): siRNA sense strand
gaagaaguuuggagauaug

SEQ ID NO: 1989712 - RNA, 19 nt, Homo sapiens
  misc_RNA (1)...(19): siRNA sense strand
gaaguuuggagauauguua

SEQ ID NO: 1989713 - RNA, 19 nt, Homo sapiens
  misc_RNA (1)...(19): siRNA sense strand
ggagauauguuauucugau

SEQ ID NO: 1989714 - RNA, 19 nt, Homo sapiens
  misc_RNA (1)...(19): siRNA sense strand
ggaagauguugaagaaguu

SEQ ID NO: 1989715 - RNA, 19 nt, Homo sapiens
  misc_RNA (1)...(19): siRNA sense strand
gcaaugauaugaauaaucc

SEQ ID NO: 1989716 - RNA, 19 nt, Homo sapiens
  misc_RNA (1)...(19): siRNA sense strand
gaaaauggcgagaaaauaa

SEQ ID NO: 1989717 - RNA, 19 nt, Homo sapiens
  misc_RNA (1)...(19): siRNA sense strand
ucaggaaauucuucaagua

SEQ ID NO: 1989718 - RNA, 19 nt, Homo sapiens
  misc_RNA (1)...(19): siRNA sense strand
gguauuaucugccaugaag

SEQ ID NO: 1989719 - RNA, 19 nt, Homo sapiens
  misc_RNA (1)...(19): siRNA sense strand
gguacgaggucacugauga

SEQ ID NO: 1989720 - RNA, 19 nt, Homo sapiens
  misc_RNA (1)...(19): siRNA sense strand
gaacuaagccaggaagaug

SEQ ID NO: 1989721 - RNA, 19 nt, Homo sapiens
  misc_RNA (1)...(19): siRNA sense strand
ugaagugccuagcaaauug

SEQ ID NO: 1989722 - RNA, 19 nt, Homo sapiens
  misc_RNA (1)...(19): siRNA sense strand
aaacacagacaacacuuua

SEQ ID NO: 1989723 - RNA, 19 nt, Homo sapiens
  misc_RNA (1)...(19): siRNA sense strand
gaagaagucauaaauccaa

SEQ ID NO: 1989724 - RNA, 19 nt, Homo sapiens
  misc_RNA (1)...(19): siRNA sense strand
ugacaaaccuacaaucaag

SEQ ID NO: 1989725 - RNA, 19 nt, Homo sapiens
  misc_RNA (1)...(19): siRNA sense strand
acaaccagcucuucagauu

SEQ ID NO: 1989726 - RNA, 19 nt, Homo sapiens
  misc_RNA (1)...(19): siRNA sense strand
cgagauguauucagaacaa

SEQ ID NO: 1989727 - RNA, 19 nt, Homo sapiens
  misc_RNA (1)...(19): siRNA sense strand
aaacuuaucucguagaacu

SEQ ID NO: 1989728 - RNA, 19 nt, Homo sapiens
  misc_RNA (1)...(19): siRNA sense strand
gcaggaaugccucuaagaa

SEQ ID NO: 1989729 - RNA, 19 nt, Homo sapiens
  misc_RNA (1)...(19): siRNA sense strand
ccaaaguuccguagucuaa

SEQ ID NO: 1989730 - RNA, 19 nt, Homo sapiens
  misc_RNA (1)...(19): siRNA sense strand
gauuagugcucaggaguuu

SEQ ID NO: 1989731 - RNA, 19 nt, Homo sapiens
  misc_RNA (1)...(19): siRNA sense strand
ccacgaagguauccagaau

SEQ ID NO: 1989732 - RNA, 19 nt, Homo sapiens
  misc_RNA (1)...(19): siRNA sense strand
gcucuacaguuauguuguu

SEQ ID NO: 1989733 - RNA, 19 nt, Homo sapiens
  misc_RNA (1)...(19): siRNA sense strand
gaaguuacaaggcaacaga

SEQ ID NO: 1989734 - RNA, 19 nt, Homo sapiens
  misc_RNA (1)...(19): siRNA sense strand
ugaagaaguuuggagauau

SEQ ID NO: 1989735 - RNA, 19 nt, Homo sapiens
  misc_RNA (1)...(19): siRNA sense strand
caacauggccaauacaagu

SEQ ID NO: 1989736 - RNA, 19 nt, Homo sapiens
  misc_RNA (1)...(19): siRNA sense strand
cguaugauuucccgaauga

SEQ ID NO: 1989737 - RNA, 19 nt, Homo sapiens
  misc_RNA (1)...(19): siRNA sense strand
gcaacagacuauccaacug

SEQ ID NO: 1989738 - RNA, 19 nt, Homo sapiens
  misc_RNA (1)...(19): siRNA sense strand
ccaacuuacucauacugua

SEQ ID NO: 1989739 - RNA, 19 nt, Homo sapiens
  misc_RNA (1)...(19): siRNA sense strand
gaaugaaguuaccacaucu

SEQ ID NO: 1989740 - RNA, 19 nt, Homo sapiens
  misc_RNA (1)...(19): siRNA sense strand
cgaaacuuaucucguagaa

SEQ ID NO: 1989741 - RNA, 19 nt, Homo sapiens
  misc_RNA (1)...(19): siRNA sense strand
ccaagaagcaaugauauga

SEQ ID NO: 1989742 - RNA, 19 nt, Homo sapiens
  misc_RNA (1)...(19): siRNA sense strand
gcaguggauuggcuuuaug

SEQ ID NO: 1989743 - RNA, 19 nt, Homo sapiens
  misc_RNA (1)...(19): siRNA sense strand
aacaggaguuuaccucuaa

SEQ ID NO: 1989744 - RNA, 19 nt, Homo sapiens
  misc_RNA (1)...(19): siRNA sense strand
aggcauggauuacauuuau

SEQ ID NO: 1989745 - RNA, 19 nt, Homo sapiens
  misc_RNA (1)...(19): siRNA sense strand
guuaugcugugcugaagaa

SEQ ID NO: 1989746 - RNA, 19 nt, Homo sapiens
  misc_RNA (1)...(19): siRNA sense strand
ggauuggcuuuaugaccua

SEQ ID NO: 1989747 - RNA, 19 nt, Homo sapiens
  misc_RNA (1)...(19): siRNA sense strand
uugaagaaguuuggagaua

SEQ ID NO: 1989748 - RNA, 19 nt, Homo sapiens
  misc_RNA (1)...(19): siRNA sense strand
cgaggucacugaugauaca

SEQ ID NO: 1989749 - RNA, 19 nt, Homo sapiens
  misc_RNA (1)...(19): siRNA sense strand
gaacgagauguauucagaa

SEQ ID NO: 1989750 - RNA, 19 nt, Homo sapiens
  misc_RNA (1)...(19): siRNA sense strand
acgaagguauccagaauug

SEQ ID NO: 1989751 - RNA, 19 nt, Homo sapiens
  misc_RNA (1)...(19): siRNA sense strand
gagcaggaaugccucuaag

SEQ ID NO: 1989752 - RNA, 19 nt, Homo sapiens
  misc_RNA (1)...(19): siRNA sense strand
gcaaauuggccaagaagca

SEQ ID NO: 1989753 - RNA, 19 nt, Homo sapiens
  misc_RNA (1)...(19): siRNA sense strand
gaagguauccagaauugag

SEQ ID NO: 1989754 - RNA, 19 nt, Homo sapiens
  misc_RNA (1)...(19): siRNA sense strand
acacagacaacacuuuaaa

SEQ ID NO: 1989755 - RNA, 19 nt, Homo sapiens
  misc_RNA (1)...(19): siRNA sense strand
caaacuucaugaugcaaug

SEQ ID NO: 1989756 - RNA, 19 nt, Homo sapiens
  misc_RNA (1)...(19): siRNA sense strand
uagaagaagucauaaaucc

SEQ ID NO: 1989757 - RNA, 19 nt, Homo sapiens
  misc_RNA (1)...(19): siRNA sense strand
aaaccaaaguuccguaguc

SEQ ID NO: 1989758 - RNA, 19 nt, Homo sapiens
  misc_RNA (1)...(19): siRNA sense strand
gauaacaaccagcucuuca

SEQ ID NO: 1989759 - RNA, 19 nt, Homo sapiens
  misc_RNA (1)...(19): siRNA sense strand
aaaguuccguagucuaaga

SEQ ID NO: 1989760 - RNA, 19 nt, Homo sapiens
  misc_RNA (1)...(19): siRNA sense strand
cuacaguuauguuguuugu

SEQ ID NO: 1989761 - RNA, 19 nt, Homo sapiens
  misc_RNA (1)...(19): siRNA sense strand
gcugcaaccucauuuagag

SEQ ID NO: 1989762 - RNA, 19 nt, Homo sapiens
  misc_RNA (1)...(19): siRNA sense strand
aaguaaacguggaguaguu

SEQ ID NO: 1989763 - RNA, 19 nt, Homo sapiens
  misc_RNA (1)...(19): siRNA sense strand
caggaaugccucuaagaaa

SEQ ID NO: 1989764 - RNA, 19 nt, Homo sapiens
  misc_RNA (1)...(19): siRNA sense strand
cugaaccucuacuuacuuu

SEQ ID NO: 1989765 - RNA, 19 nt, Homo sapiens
  misc_RNA (1)...(19): siRNA sense strand
caagaagcaaugauaugaa

SEQ ID NO: 1989766 - RNA, 19 nt, Homo sapiens
  misc_RNA (1)...(19): siRNA sense strand
aaccagcucuucagauuuc

SEQ ID NO: 1989767 - RNA, 19 nt, Homo sapiens
  misc_RNA (1)...(19): siRNA sense strand
uccuggagauggacuauuu

SEQ ID NO: 1989768 - RNA, 19 nt, Homo sapiens
  misc_RNA (1)...(19): siRNA sense strand
gccaugaagugccuagcaa

SEQ ID NO: 1989769 - RNA, 19 nt, Homo sapiens
  misc_RNA (1)...(19): siRNA sense strand
uaacaaccagcucuucaga

SEQ ID NO: 1989770 - RNA, 19 nt, Homo sapiens
  misc_RNA (1)...(19): siRNA sense strand
ggugacaaaccuacaauca

SEQ ID NO: 1989771 - RNA, 19 nt, Homo sapiens
  misc_RNA (1)...(19): siRNA sense strand
ggaaaauggcgagaaaaua

SEQ ID NO: 1989772 - RNA, 19 nt, Homo sapiens
  misc_RNA (1)...(19): siRNA sense strand
ccugcaacuucgccacuua

SEQ ID NO: 1989773 - RNA, 19 nt, Homo sapiens
  misc_RNA (1)...(19): siRNA sense strand
caaccagcucuucagauuu

SEQ ID NO: 1989774 - RNA, 19 nt, Homo sapiens
  misc_RNA (1)...(19): siRNA sense strand
gaagauguugaagaaguuu

SEQ ID NO: 1989775 - RNA, 19 nt, Homo sapiens
  misc_RNA (1)...(19): siRNA sense strand
ggucacugaugauacauac

SEQ ID NO: 1989776 - RNA, 19 nt, Homo sapiens
  misc_RNA (1)...(19): siRNA sense strand
uaaacguggaguaguuaua

SEQ ID NO: 1989777 - RNA, 19 nt, Homo sapiens
  misc_RNA (1)...(19): siRNA sense strand
gagauauguuauucugauc

SEQ ID NO: 1989778 - RNA, 19 nt, Homo sapiens
  misc_RNA (1)...(19): siRNA sense strand
ccuagaagaagucauaaau

SEQ ID NO: 1989779 - RNA, 19 nt, Homo sapiens
  misc_RNA (1)...(19): siRNA sense strand
guuccguagucuaagauaa

SEQ ID NO: 1989780 - RNA, 19 nt, Homo sapiens
  misc_RNA (1)...(19): siRNA sense strand
aggaagauguugaagaagu

SEQ ID NO: 1989781 - RNA, 19 nt, Homo sapiens
  misc_RNA (1)...(19): siRNA sense strand
gaaguuaccacaucuuuuc

SEQ ID NO: 1989782 - RNA, 19 nt, Homo sapiens
  misc_RNA (1)...(19): siRNA sense strand
cuagcaaauuggccaagaa

SEQ ID NO: 1989783 - RNA, 19 nt, Homo sapiens
  misc_RNA (1)...(19): siRNA sense strand
agaaguggaucuugaugag

SEQ ID NO: 1989784 - RNA, 19 nt, Homo sapiens
  misc_RNA (1)...(19): siRNA sense strand
caaauuggccaagaagcaa

SEQ ID NO: 1989785 - RNA, 19 nt, Homo sapiens
  misc_RNA (1)...(19): siRNA sense strand
uuacaaggcaacagacuau

SEQ ID NO: 1989786 - RNA, 19 nt, Homo sapiens
  misc_RNA (1)...(19): siRNA sense strand
caaccaaugcugauuuuaa

SEQ ID NO: 1989787 - RNA, 19 nt, Homo sapiens
  misc_RNA (1)...(19): siRNA sense strand
gcccaaacuucaugaugca

SEQ ID NO: 1989788 - RNA, 19 nt, Homo sapiens
  misc_RNA (1)...(19): siRNA sense strand
gauaugcccaaacuucaug

SEQ ID NO: 1989789 - RNA, 19 nt, Homo sapiens
  misc_RNA (1)...(19): siRNA sense strand
gcgagaaaauaaagcauga

SEQ ID NO: 1989790 - RNA, 19 nt, Homo sapiens
  misc_RNA (1)...(19): siRNA sense strand
guugauaugcccaaacuuc

SEQ ID NO: 1989791 - RNA, 19 nt, Homo sapiens
  misc_RNA (1)...(19): siRNA sense strand
gauuugaacgagauguauu

SEQ ID NO: 1989792 - RNA, 19 nt, Homo sapiens
  misc_RNA (1)...(19): siRNA sense strand
gauggacuauuugcuccuu

SEQ ID NO: 1989793 - RNA, 19 nt, Homo sapiens
  misc_RNA (1)...(19): siRNA sense strand
ggaucaucaucaggaaauu

SEQ ID NO: 1989794 - RNA, 19 nt, Homo sapiens
  misc_RNA (1)...(19): siRNA sense strand
guuuggagauauguuauuc

SEQ ID NO: 1989795 - RNA, 19 nt, Homo sapiens
  misc_RNA (1)...(19): siRNA sense strand
gcguaugauuucccgaaug

SEQ ID NO: 1989796 - RNA, 19 nt, Homo sapiens
  misc_RNA (1)...(19): siRNA sense strand
ucgaugcucuacaguuaug

SEQ ID NO: 1989797 - RNA, 19 nt, Homo sapiens
  misc_RNA (1)...(19): siRNA sense strand
gccaagaagcaaugauaug

SEQ ID NO: 1989798 - RNA, 19 nt, Homo sapiens
  misc_RNA (1)...(19): siRNA sense strand
uaaaaggcauggauuacau

SEQ ID NO: 1989799 - RNA, 19 nt, Homo sapiens
  misc_RNA (1)...(19): siRNA sense strand
gugacaaaccuacaaucaa

SEQ ID NO: 1989800 - RNA, 19 nt, Homo sapiens
  misc_RNA (1)...(19): siRNA sense strand
caaguaauuccccaauaua

SEQ ID NO: 1989801 - RNA, 19 nt, Homo sapiens
  misc_RNA (1)...(19): siRNA sense strand
ucagauuuccugcaacuuc

SEQ ID NO: 1989802 - RNA, 19 nt, Homo sapiens
  misc_RNA (1)...(19): siRNA sense strand
uagagaggguugccaucga

SEQ ID NO: 1989803 - RNA, 19 nt, Homo sapiens
  misc_RNA (1)...(19): siRNA sense strand
gaaccucuacuuacuuuug

SEQ ID NO: 1989804 - RNA, 19 nt, Homo sapiens
  misc_RNA (1)...(19): siRNA sense strand
uggccaagaagcaaugaua

SEQ ID NO: 1989805 - RNA, 19 nt, Homo sapiens
  misc_RNA (1)...(19): siRNA sense strand
acaaguaauuccccaauau

SEQ ID NO: 1989806 - RNA, 19 nt, Homo sapiens
  misc_RNA (1)...(19): siRNA sense strand
auucugaucuaccugcaaa

SEQ ID NO: 1989807 - RNA, 19 nt, Homo sapiens
  misc_RNA (1)...(19): siRNA sense strand
gugcucaggaguuugauga

SEQ ID NO: 1989808 - RNA, 19 nt, Homo sapiens
  misc_RNA (1)...(19): siRNA sense strand
ucaaacagauucccaugaa

SEQ ID NO: 1989809 - RNA, 19 nt, Homo sapiens
  misc_RNA (1)...(19): siRNA sense strand
gcaauacuaucuccaucuu

SEQ ID NO: 1989810 - RNA, 19 nt, Homo sapiens
  misc_RNA (1)...(19): siRNA sense strand
ggcauuggcuguuuacaag

SEQ ID NO: 1989811 - RNA, 19 nt, Homo sapiens
  misc_RNA (1)...(19): siRNA sense strand
cuacuaugaugguguguau

SEQ ID NO: 1989812 - RNA, 19 nt, Homo sapiens
  misc_RNA (1)...(19): siRNA sense strand
gacaagcaagugccugaua

SEQ ID NO: 1989813 - RNA, 19 nt, Homo sapiens
  misc_RNA (1)...(19): siRNA sense strand
caagugggccauugagcua

SEQ ID NO: 1989814 - RNA, 19 nt, Homo sapiens
  misc_RNA (1)...(19): siRNA sense strand
gguuuggucuaucucauug

SEQ ID NO: 1989815 - RNA, 19 nt, Homo sapiens
  misc_RNA (1)...(19): siRNA sense strand
gauaccagcgugcaagaga

SEQ ID NO: 1989816 - RNA, 19 nt, Homo sapiens
  misc_RNA (1)...(19): siRNA sense strand
guacauggcaggcaauacu

SEQ ID NO: 1989817 - RNA, 19 nt, Homo sapiens
  misc_RNA (1)...(19): siRNA sense strand
ggacuguuaccuacacaug

SEQ ID NO: 1989818 - RNA, 19 nt, Homo sapiens
  misc_RNA (1)...(19): siRNA sense strand
ccugauggguuuggcauug

SEQ ID NO: 1989819 - RNA, 19 nt, Homo sapiens
  misc_RNA (1)...(19): siRNA sense strand
ucaagauguuagaaaguuc

SEQ ID NO: 1989820 - RNA, 19 nt, Homo sapiens
  misc_RNA (1)...(19): siRNA sense strand
guuuggcauuggcuguuua

SEQ ID NO: 1989821 - RNA, 19 nt, Homo sapiens
  misc_RNA (1)...(19): siRNA sense strand
gguuuggcauuggcuguuu

SEQ ID NO: 1989822 - RNA, 19 nt, Homo sapiens
  misc_RNA (1)...(19): siRNA sense strand
acaagcaagugccugauac

SEQ ID NO: 1989823 - RNA, 19 nt, Homo sapiens
  misc_RNA (1)...(19): siRNA sense strand
gaaaguucaagccagaagu

SEQ ID NO: 1989824 - RNA, 19 nt, Homo sapiens
  misc_RNA (1)...(19): siRNA sense strand
cauuggcuguuuacaagug

SEQ ID NO: 1989825 - RNA, 19 nt, Homo sapiens
  misc_RNA (1)...(19): siRNA sense strand
cuacacaugcaucggauug

SEQ ID NO: 1989826 - RNA, 19 nt, Homo sapiens
  misc_RNA (1)...(19): siRNA sense strand
gcacuuauggccauuucag

SEQ ID NO: 1989827 - RNA, 19 nt, Homo sapiens
  misc_RNA (1)...(19): siRNA sense strand
acaugcaucggauugguua

SEQ ID NO: 1989828 - RNA, 19 nt, Homo sapiens
  misc_RNA (1)...(19): siRNA sense strand
cagccacuuucaagauguu

SEQ ID NO: 1989829 - RNA, 19 nt, Homo sapiens
  misc_RNA (1)...(19): siRNA sense strand
acuaugaugguguguauga

SEQ ID NO: 1989830 - RNA, 19 nt, Homo sapiens
  misc_RNA (1)...(19): siRNA sense strand
aaaguucaagccagaaguu

SEQ ID NO: 1989831 - RNA, 19 nt, Homo sapiens
  misc_RNA (1)...(19): siRNA sense strand
caagauguuagaaaguuca

SEQ ID NO: 1989832 - RNA, 19 nt, Homo sapiens
  misc_RNA (1)...(19): siRNA sense strand
ggguuuggucuaucucauu

SEQ ID NO: 1989833 - RNA, 19 nt, Homo sapiens
  misc_RNA (1)...(19): siRNA sense strand
ggauugguuagccuucauu

SEQ ID NO: 1989834 - RNA, 19 nt, Homo sapiens
  misc_RNA (1)...(19): siRNA sense strand
ucagccacuuucaagaugu

SEQ ID NO: 1989835 - RNA, 19 nt, Homo sapiens
  misc_RNA (1)...(19): siRNA sense strand
ccacuuucaagauguuaga

SEQ ID NO: 1989836 - RNA, 19 nt, Homo sapiens
  misc_RNA (1)...(19): siRNA sense strand
cuacccagucgguuacuug

SEQ ID NO: 1989837 - RNA, 19 nt, Homo sapiens
  misc_RNA (1)...(19): siRNA sense strand
acacaugcaucggauuggu

SEQ ID NO: 1989838 - RNA, 19 nt, Homo sapiens
  misc_RNA (1)...(19): siRNA sense strand
uggcauuggcuguuuacaa

SEQ ID NO: 1989839 - RNA, 19 nt, Homo sapiens
  misc_RNA (1)...(19): siRNA sense strand
gaacggauccuguguauaa

SEQ ID NO: 1989840 - RNA, 19 nt, Homo sapiens
  misc_RNA (1)...(19): siRNA sense strand
gcacagguuuguucgauga

SEQ ID NO: 1989841 - RNA, 19 nt, Homo sapiens
  misc_RNA (1)...(19): siRNA sense strand
agaaagaaaugcacgauug

SEQ ID NO: 1989842 - RNA, 19 nt, Homo sapiens
  misc_RNA (1)...(19): siRNA sense strand
guacaugucuugcggugaa

SEQ ID NO: 1989843 - RNA, 19 nt, Homo sapiens
  misc_RNA (1)...(19): siRNA sense strand
aaaccaagcugaaggaauc

SEQ ID NO: 1989844 - RNA, 19 nt, Homo sapiens
  misc_RNA (1)...(19): siRNA sense strand
gauaaaggcauucagaaau

SEQ ID NO: 1989845 - RNA, 19 nt, Homo sapiens
  misc_RNA (1)...(19): siRNA sense strand
caauguggaugcagaaguu

SEQ ID NO: 1989846 - RNA, 19 nt, Homo sapiens
  misc_RNA (1)...(19): siRNA sense strand
caacucaggcuccuacaaa

SEQ ID NO: 1989847 - RNA, 19 nt, Homo sapiens
  misc_RNA (1)...(19): siRNA sense strand
acaagaagcuggagucucu

SEQ ID NO: 1989848 - RNA, 19 nt, Homo sapiens
  misc_RNA (1)...(19): siRNA sense strand
gggaacggauccuguguau

SEQ ID NO: 1989849 - RNA, 19 nt, Homo sapiens
  misc_RNA (1)...(19): siRNA sense strand
cagcugagcccugucaaua

SEQ ID NO: 1989850 - RNA, 19 nt, Homo sapiens
  misc_RNA (1)...(19): siRNA sense strand
gaaaugcacgauuggaaug

SEQ ID NO: 1989851 - RNA, 19 nt, Homo sapiens
  misc_RNA (1)...(19): siRNA sense strand
caauauccaucccaguuau

SEQ ID NO: 1989852 - RNA, 19 nt, Homo sapiens
  misc_RNA (1)...(19): siRNA sense strand
gcacacaguggcucucuga

SEQ ID NO: 1989853 - RNA, 19 nt, Homo sapiens
  misc_RNA (1)...(19): siRNA sense strand
cacaauggcagauggguua

SEQ ID NO: 1989854 - RNA, 19 nt, Homo sapiens
  misc_RNA (1)...(19): siRNA sense strand
gcugagcccugucaauauc

SEQ ID NO: 1989855 - RNA, 19 nt, Homo sapiens
  misc_RNA (1)...(19): siRNA sense strand
caaaccgccucaugagaga

SEQ ID NO: 1989856 - RNA, 19 nt, Homo sapiens
  misc_RNA (1)...(19): siRNA sense strand
ucaaacaggucaucgaaac

SEQ ID NO: 1989857 - RNA, 19 nt, Homo sapiens
  misc_RNA (1)...(19): siRNA sense strand
ggagauagcauagccaaca

SEQ ID NO: 1989858 - RNA, 19 nt, Homo sapiens
  misc_RNA (1)...(19): siRNA sense strand
ucaauauccaucccaguua

SEQ ID NO: 1989859 - RNA, 19 nt, Homo sapiens
  misc_RNA (1)...(19): siRNA sense strand
gaaaccagguagugaagcu

SEQ ID NO: 1989860 - RNA, 19 nt, Homo sapiens
  misc_RNA (1)...(19): siRNA sense strand
caagcggucuucuucuuca

SEQ ID NO: 1989861 - RNA, 19 nt, Homo sapiens
  misc_RNA (1)...(19): siRNA sense strand
gugaaaucguggagcuuaa

SEQ ID NO: 1989862 - RNA, 19 nt, Homo sapiens
  misc_RNA (1)...(19): siRNA sense strand
ccaguuggcacucaaagaa

SEQ ID NO: 1989863 - RNA, 19 nt, Homo sapiens
  misc_RNA (1)...(19): siRNA sense strand
ugacagggagcuacuggua

SEQ ID NO: 1989864 - RNA, 19 nt, Homo sapiens
  misc_RNA (1)...(19): siRNA sense strand
gaacugugccuagacuuuc

SEQ ID NO: 1989865 - RNA, 19 nt, Homo sapiens
  misc_RNA (1)...(19): siRNA sense strand
gaaagaaaugcacgauugg

SEQ ID NO: 1989866 - RNA, 19 nt, Homo sapiens
  misc_RNA (1)...(19): siRNA sense strand
gagcagcacaggcagcauu

SEQ ID NO: 1989867 - RNA, 19 nt, Homo sapiens
  misc_RNA (1)...(19): siRNA sense strand
uaagaaggaaucaaaguca

SEQ ID NO: 1989868 - RNA, 19 nt, Homo sapiens
  misc_RNA (1)...(19): siRNA sense strand
gcauucaguccucucgaua

SEQ ID NO: 1989869 - RNA, 19 nt, Homo sapiens
  misc_RNA (1)...(19): siRNA sense strand
gcucaaacaggucaucgaa

SEQ ID NO: 1989870 - RNA, 19 nt, Homo sapiens
  misc_RNA (1)...(19): siRNA sense strand
gaagccaggaaagagauua

SEQ ID NO: 1989871 - RNA, 19 nt, Homo sapiens
  misc_RNA (1)...(19): siRNA sense strand
ucaaagaagccaggaaaga

SEQ ID NO: 1989872 - RNA, 19 nt, Homo sapiens
  misc_RNA (1)...(19): siRNA sense strand
uccaagaaauccaaacuca

SEQ ID NO: 1989873 - RNA, 19 nt, Homo sapiens
  misc_RNA (1)...(19): siRNA sense strand
aaagauaaaggcauucaga

SEQ ID NO: 1989874 - RNA, 19 nt, Homo sapiens
  misc_RNA (1)...(19): siRNA sense strand
auucaguccucucgauaua

SEQ ID NO: 1989875 - RNA, 19 nt, Homo sapiens
  misc_RNA (1)...(19): siRNA sense strand
gaaagaggugacagugaga

SEQ ID NO: 1989876 - RNA, 19 nt, Homo sapiens
  misc_RNA (1)...(19): siRNA sense strand
aaagucaggccuugugaaa

SEQ ID NO: 1989877 - RNA, 19 nt, Homo sapiens
  misc_RNA (1)...(19): siRNA sense strand
gagcgccgacuccaugaaa

SEQ ID NO: 1989878 - RNA, 19 nt, Homo sapiens
  misc_RNA (1)...(19): siRNA sense strand
gaagacacccucagaugcu

SEQ ID NO: 1989879 - RNA, 19 nt, Homo sapiens
  misc_RNA (1)...(19): siRNA sense strand
gccuagacuuuccauguga

SEQ ID NO: 1989880 - RNA, 19 nt, Homo sapiens
  misc_RNA (1)...(19): siRNA sense strand
caugaaagggaaagugaaa

SEQ ID NO: 1989881 - RNA, 19 nt, Homo sapiens
  misc_RNA (1)...(19): siRNA sense strand
caaagaagccaggaaagag

SEQ ID NO: 1989882 - RNA, 19 nt, Homo sapiens
  misc_RNA (1)...(19): siRNA sense strand
uggaaugguuggugaagga

SEQ ID NO: 1989883 - RNA, 19 nt, Homo sapiens
  misc_RNA (1)...(19): siRNA sense strand
cgaacugugccuagacuuu

SEQ ID NO: 1989884 - RNA, 19 nt, Homo sapiens
  misc_RNA (1)...(19): siRNA sense strand
ggauugaggaggaguguca

SEQ ID NO: 1989885 - RNA, 19 nt, Homo sapiens
  misc_RNA (1)...(19): siRNA sense strand
gcaagcggucuucuucuuc

SEQ ID NO: 1989886 - RNA, 19 nt, Homo sapiens
  misc_RNA (1)...(19): siRNA sense strand
cagcacagguuuguucgau

SEQ ID NO: 1989887 - RNA, 19 nt, Homo sapiens
  misc_RNA (1)...(19): siRNA sense strand
agauaaaggcauucagaaa

SEQ ID NO: 1989888 - RNA, 19 nt, Homo sapiens
  misc_RNA (1)...(19): siRNA sense strand
caaacccagagcaguauuu

SEQ ID NO: 1989889 - RNA, 19 nt, Homo sapiens
  misc_RNA (1)...(19): siRNA sense strand
gggacgaacugugccuaga

SEQ ID NO: 1989890 - RNA, 19 nt, Homo sapiens
  misc_RNA (1)...(19): siRNA sense strand
gugaagacacccucagaug

SEQ ID NO: 1989891 - RNA, 19 nt, Homo sapiens
  misc_RNA (1)...(19): siRNA sense strand
aaagaagccaggaaagaga

SEQ ID NO: 1989892 - RNA, 19 nt, Homo sapiens
  misc_RNA (1)...(19): siRNA sense strand
ccucaugggcggaguaaug

SEQ ID NO: 1989893 - RNA, 19 nt, Homo sapiens
  misc_RNA (1)...(19): siRNA sense strand
gucaauauccaucccaguu

SEQ ID NO: 1989894 - RNA, 19 nt, Homo sapiens
  misc_RNA (1)...(19): siRNA sense strand
cagacucgauggagagcuu

SEQ ID NO: 1989895 - RNA, 19 nt, Homo sapiens
  misc_RNA (1)...(19): siRNA sense strand
gagcugcugcccauaguca

SEQ ID NO: 1989896 - RNA, 19 nt, Homo sapiens
  misc_RNA (1)...(19): siRNA sense strand
cagaaagaggugacaguga

SEQ ID NO: 1989897 - RNA, 19 nt, Homo sapiens
  misc_RNA (1)...(19): siRNA sense strand
ucaguccucucgauauaag

SEQ ID NO: 1989898 - RNA, 19 nt, Homo sapiens
  misc_RNA (1)...(19): siRNA sense strand
ggcauucaguacucagaga

SEQ ID NO: 1989899 - RNA, 19 nt, Homo sapiens
  misc_RNA (1)...(19): siRNA sense strand
gcagcuuccugguggaucu

SEQ ID NO: 1989900 - RNA, 19 nt, Homo sapiens
  misc_RNA (1)...(19): siRNA sense strand
gagauagcauagccaacag

SEQ ID NO: 1989901 - RNA, 19 nt, Homo sapiens
  misc_RNA (1)...(19): siRNA sense strand
ccaggaaagagauuaaaca

SEQ ID NO: 1989902 - RNA, 19 nt, Homo sapiens
  misc_RNA (1)...(19): siRNA sense strand
guaauggagcuucgucaca

SEQ ID NO: 1989903 - RNA, 19 nt, Homo sapiens
  misc_RNA (1)...(19): siRNA sense strand
ugccuuagugguugauuua

SEQ ID NO: 1989904 - RNA, 19 nt, Homo sapiens
  misc_RNA (1)...(19): siRNA sense strand
ugacagccaccaccacaga

SEQ ID NO: 1989905 - RNA, 19 nt, Homo sapiens
  misc_RNA (1)...(19): siRNA sense strand
ugaaagggaaagugaaauc

SEQ ID NO: 1989906 - RNA, 19 nt, Homo sapiens
  misc_RNA (1)...(19): siRNA sense strand
cagaaagaaaugcacgauu

SEQ ID NO: 1989907 - RNA, 19 nt, Homo sapiens
  misc_RNA (1)...(19): siRNA sense strand
ugagagagcuggauuuugc

SEQ ID NO: 1989908 - RNA, 19 nt, Homo sapiens
  misc_RNA (1)...(19): siRNA sense strand
caaagucaggccuugugaa

SEQ ID NO: 1989909 - RNA, 19 nt, Homo sapiens
  misc_RNA (1)...(19): siRNA sense strand
auggagagcuucccagagu

SEQ ID NO: 1989910 - RNA, 19 nt, Homo sapiens
  misc_RNA (1)...(19): siRNA sense strand
gagauuaaacagcucaaac

SEQ ID NO: 1989911 - RNA, 19 nt, Homo sapiens
  misc_RNA (1)...(19): siRNA sense strand
gaaaucguggagcuuaagu

SEQ ID NO: 1989912 - RNA, 19 nt, Homo sapiens
  misc_RNA (1)...(19): siRNA sense strand
cuacaaaggaagcgacugu

SEQ ID NO: 1989913 - RNA, 19 nt, Homo sapiens
  misc_RNA (1)...(19): siRNA sense strand
gcaacucaggcuccuacaa

SEQ ID NO: 1989914 - RNA, 19 nt, Homo sapiens
  misc_RNA (1)...(19): siRNA sense strand
gucagugucuccugugaag

SEQ ID NO: 1989915 - RNA, 19 nt, Homo sapiens
  misc_RNA (1)...(19): siRNA sense strand
ccaguuaugcaccuucuuc

SEQ ID NO: 1989916 - RNA, 19 nt, Homo sapiens
  misc_RNA (1)...(19): siRNA sense strand
ggaacggauccuguguaua

SEQ ID NO: 1989917 - RNA, 19 nt, Homo sapiens
  misc_RNA (1)...(19): siRNA sense strand
cuacagcccagccaucuca

SEQ ID NO: 1989918 - RNA, 19 nt, Homo sapiens
  misc_RNA (1)...(19): siRNA sense strand
gugccuagacuuuccaugu

SEQ ID NO: 1989919 - RNA, 19 nt, Homo sapiens
  misc_RNA (1)...(19): siRNA sense strand
gacgaacugugccuagacu

SEQ ID NO: 1989920 - RNA, 19 nt, Homo sapiens
  misc_RNA (1)...(19): siRNA sense strand
aagaaaugcacgauuggaa

SEQ ID NO: 1989921 - RNA, 19 nt, Homo sapiens
  misc_RNA (1)...(19): siRNA sense strand
agaaaugcacgauuggaau

SEQ ID NO: 1989922 - RNA, 19 nt, Homo sapiens
  misc_RNA (1)...(19): siRNA sense strand
acucaaagaagccaggaaa

SEQ ID NO: 1989923 - RNA, 19 nt, Homo sapiens
  misc_RNA (1)...(19): siRNA sense strand
gaaagggaaagugaaaucg

SEQ ID NO: 1989924 - RNA, 19 nt, Homo sapiens
  misc_RNA (1)...(19): siRNA sense strand
gcuuggcugauaaagauaa

SEQ ID NO: 1989925 - RNA, 19 nt, Homo sapiens
  misc_RNA (1)...(19): siRNA sense strand
gucccucucugccuuagug

SEQ ID NO: 1989926 - RNA, 19 nt, Homo sapiens
  misc_RNA (1)...(19): siRNA sense strand
agugaaaucguggagcuua

SEQ ID NO: 1989927 - RNA, 19 nt, Homo sapiens
  misc_RNA (1)...(19): siRNA sense strand
ucaaagucaggccuuguga

SEQ ID NO: 1989928 - RNA, 19 nt, Homo sapiens
  misc_RNA (1)...(19): siRNA sense strand
aagauaaaggcauucagaa

SEQ ID NO: 1989929 - RNA, 19 nt, Homo sapiens
  misc_RNA (1)...(19): siRNA sense strand
agauuaaacagcucaaaca

SEQ ID NO: 1989930 - RNA, 19 nt, Homo sapiens
  misc_RNA (1)...(19): siRNA sense strand
gcaccgccuuccguaucaa

SEQ ID NO: 1989931 - RNA, 19 nt, Homo sapiens
  misc_RNA (1)...(19): siRNA sense strand
gugguugauuuaacuccaa

SEQ ID NO: 1989932 - RNA, 19 nt, Homo sapiens
  misc_RNA (1)...(19): siRNA sense strand
ugccuagacuuuccaugug

SEQ ID NO: 1989933 - RNA, 19 nt, Homo sapiens
  misc_RNA (1)...(19): siRNA sense strand
ggacauaaacauccaaaac

SEQ ID NO: 1989934 - RNA, 19 nt, Homo sapiens
  misc_RNA (1)...(19): siRNA sense strand
agcaagcggucuucuucuu

SEQ ID NO: 1989935 - RNA, 19 nt, Homo sapiens
  misc_RNA (1)...(19): siRNA sense strand
accuggagcuugugcauuc

SEQ ID NO: 1989936 - RNA, 19 nt, Homo sapiens
  misc_RNA (1)...(19): siRNA sense strand
cuggugaccuggagcuugu

SEQ ID NO: 1989937 - RNA, 19 nt, Homo sapiens
  misc_RNA (1)...(19): siRNA sense strand
cuuagugguugauuuaacu

SEQ ID NO: 1989938 - RNA, 19 nt, Homo sapiens
  misc_RNA (1)...(19): siRNA sense strand
guucugugggcauucagua

SEQ ID NO: 1989939 - RNA, 19 nt, Homo sapiens
  misc_RNA (1)...(19): siRNA sense strand
ggaugaaggugggaagaaa

SEQ ID NO: 1989940 - RNA, 19 nt, Homo sapiens
  misc_RNA (1)...(19): siRNA sense strand
guacagccauuguguccuu

SEQ ID NO: 1989941 - RNA, 19 nt, Homo sapiens
  misc_RNA (1)...(19): siRNA sense strand
ggaaggaaccguagcuugu

SEQ ID NO: 1989942 - RNA, 19 nt, Homo sapiens
  misc_RNA (1)...(19): siRNA sense strand
gugaagugcugcccauaga

SEQ ID NO: 1989943 - RNA, 19 nt, Homo sapiens
  misc_RNA (1)...(19): siRNA sense strand
ugacuggccuucaggaugu

SEQ ID NO: 1989944 - RNA, 19 nt, Homo sapiens
  misc_RNA (1)...(19): siRNA sense strand
ucaaguacgucuacaaacu

SEQ ID NO: 1989945 - RNA, 19 nt, Homo sapiens
  misc_RNA (1)...(19): siRNA sense strand
gaaggugggaagaaagauu

SEQ ID NO: 1989946 - RNA, 19 nt, Homo sapiens
  misc_RNA (1)...(19): siRNA sense strand
ucaaggugcugccuacuag

SEQ ID NO: 1989947 - RNA, 19 nt, Homo sapiens
  misc_RNA (1)...(19): siRNA sense strand
gaaggaaccguagcuuguu

SEQ ID NO: 1989948 - RNA, 19 nt, Homo sapiens
  misc_RNA (1)...(19): siRNA sense strand
gagggaaaguugggacguu

SEQ ID NO: 1989949 - RNA, 19 nt, Homo sapiens
  misc_RNA (1)...(19): siRNA sense strand
caacuccccuaucacuuua

SEQ ID NO: 1989950 - RNA, 19 nt, Homo sapiens
  misc_RNA (1)...(19): siRNA sense strand
caaaucauacuccuacagu

SEQ ID NO: 1989951 - RNA, 19 nt, Homo sapiens
  misc_RNA (1)...(19): siRNA sense strand
gcgcuggaguguguaguga

SEQ ID NO: 1989952 - RNA, 19 nt, Homo sapiens
  misc_RNA (1)...(19): siRNA sense strand
cgaaaauucuauucuguga

SEQ ID NO: 1989953 - RNA, 19 nt, Homo sapiens
  misc_RNA (1)...(19): siRNA sense strand
gaacagcccgaaccuacca

SEQ ID NO: 1989954 - RNA, 19 nt, Homo sapiens
  misc_RNA (1)...(19): siRNA sense strand
ugaaguggagauugcauuu

SEQ ID NO: 1989955 - RNA, 19 nt, Homo sapiens
  misc_RNA (1)...(19): siRNA sense strand
gccgcagccuccaucuaua

SEQ ID NO: 1989956 - RNA, 19 nt, Homo sapiens
  misc_RNA (1)...(19): siRNA sense strand
aaggaaccguagcuuguuu

SEQ ID NO: 1989957 - RNA, 19 nt, Homo sapiens
  misc_RNA (1)...(19): siRNA sense strand
aaucauacuccuacaguga

SEQ ID NO: 1989958 - RNA, 19 nt, Homo sapiens
  misc_RNA (1)...(19): siRNA sense strand
ggagauugcauuuugaauu

SEQ ID NO: 1989959 - RNA, 19 nt, Homo sapiens
  misc_RNA (1)...(19): siRNA sense strand
ucuacaaacugaccauugg

SEQ ID NO: 1989960 - RNA, 19 nt, Homo sapiens
  misc_RNA (1)...(19): siRNA sense strand
cagccuccaucuauacaau

SEQ ID NO: 1989961 - RNA, 19 nt, Homo sapiens
  misc_RNA (1)...(19): siRNA sense strand
gccaguguauccuuucuac

SEQ ID NO: 1989962 - RNA, 19 nt, Homo sapiens
  misc_RNA (1)...(19): siRNA sense strand
gccauuguguccuugaagu

SEQ ID NO: 1989963 - RNA, 19 nt, Homo sapiens
  misc_RNA (1)...(19): siRNA sense strand
gaauccugccuacauacaa

SEQ ID NO: 1989964 - RNA, 19 nt, Homo sapiens
  misc_RNA (1)...(19): siRNA sense strand
ggaauccugccuacauaca

SEQ ID NO: 1989965 - RNA, 19 nt, Homo sapiens
  misc_RNA (1)...(19): siRNA sense strand
cccuaucacuuuacucaga

SEQ ID NO: 1989966 - RNA, 19 nt, Homo sapiens
  misc_RNA (1)...(19): siRNA sense strand
caaguacgucuacaaacug

SEQ ID NO: 1989967 - RNA, 19 nt, Homo sapiens
  misc_RNA (1)...(19): siRNA sense strand
gccuccaucuauacaauau

SEQ ID NO: 1989968 - RNA, 19 nt, Homo sapiens
  misc_RNA (1)...(19): siRNA sense strand
gguggggaccuuaaacuua

SEQ ID NO: 1989969 - RNA, 19 nt, Homo sapiens
  misc_RNA (1)...(19): siRNA sense strand
cuccaucuauacaauauca

SEQ ID NO: 1989970 - RNA, 19 nt, Homo sapiens
  misc_RNA (1)...(19): siRNA sense strand
ucugugaccugaggcuuga

SEQ ID NO: 1989971 - RNA, 19 nt, Homo sapiens
  misc_RNA (1)...(19): siRNA sense strand
gagcaaguaccuguagaca

SEQ ID NO: 1989972 - RNA, 19 nt, Homo sapiens
  misc_RNA (1)...(19): siRNA sense strand
agggaaaguugggacguuu

SEQ ID NO: 1989973 - RNA, 19 nt, Homo sapiens
  misc_RNA (1)...(19): siRNA sense strand
aaguacgucuacaaacuga

SEQ ID NO: 1989974 - RNA, 19 nt, Homo sapiens
  misc_RNA (1)...(19): siRNA sense strand
agucaaguacgucuacaaa

SEQ ID NO: 1989975 - RNA, 19 nt, Homo sapiens
  misc_RNA (1)...(19): siRNA sense strand
ggaaaguugggacguuugg

SEQ ID NO: 1989976 - RNA, 19 nt, Homo sapiens
  misc_RNA (1)...(19): siRNA sense strand
gauggccgagggaaaguug

SEQ ID NO: 1989977 - RNA, 19 nt, Homo sapiens
  misc_RNA (1)...(19): siRNA sense strand
cuacauacaacuagaacca

SEQ ID NO: 1989978 - RNA, 19 nt, Homo sapiens
  misc_RNA (1)...(19): siRNA sense strand
ggacguuuggcaucuucaa

SEQ ID NO: 1989979 - RNA, 19 nt, Homo sapiens
  misc_RNA (1)...(19): siRNA sense strand
cagcuucucccucccaauc

SEQ ID NO: 1989980 - RNA, 19 nt, Homo sapiens
  misc_RNA (1)...(19): siRNA sense strand
gcaguuuucagucagcuua

SEQ ID NO: 1989981 - RNA, 19 nt, Homo sapiens
  misc_RNA (1)...(19): siRNA sense strand
gaugaaggugggaagaaag

SEQ ID NO: 1989982 - RNA, 19 nt, Homo sapiens
  misc_RNA (1)...(19): siRNA sense strand
cagccauuguguccuugaa

SEQ ID NO: 1989983 - RNA, 19 nt, Homo sapiens
  misc_RNA (1)...(19): siRNA sense strand
ccuucaggauguccgguuu

SEQ ID NO: 1989984 - RNA, 19 nt, Homo sapiens
  misc_RNA (1)...(19): siRNA sense strand
cccauccaguccauucuug

SEQ ID NO: 1989985 - RNA, 19 nt, Homo sapiens
  misc_RNA (1)...(19): siRNA sense strand
gcaccagcaccauaaccau

SEQ ID NO: 1989986 - RNA, 19 nt, Homo sapiens
  misc_RNA (1)...(19): siRNA sense strand
gggaaaguugggacguuug

SEQ ID NO: 1989987 - RNA, 19 nt, Homo sapiens
  misc_RNA (1)...(19): siRNA sense strand
gaaagauucauggcuagcu

SEQ ID NO: 1989988 - RNA, 19 nt, Homo sapiens
  misc_RNA (1)...(19): siRNA sense strand
gacaacagcuguauauuua

SEQ ID NO: 1989989 - RNA, 19 nt, Homo sapiens
  misc_RNA (1)...(19): siRNA sense strand
gaaagucacuaaaccauau

SEQ ID NO: 1989990 - RNA, 19 nt, Homo sapiens
  misc_RNA (1)...(19): siRNA sense strand
ggaaagaccugaagaagag

SEQ ID NO: 1989991 - RNA, 19 nt, Homo sapiens
  misc_RNA (1)...(19): siRNA sense strand
ggagaaaccuuuauucgau

SEQ ID NO: 1989992 - RNA, 19 nt, Homo sapiens
  misc_RNA (1)...(19): siRNA sense strand
agaaauagcugcagagaga

SEQ ID NO: 1989993 - RNA, 19 nt, Homo sapiens
  misc_RNA (1)...(19): siRNA sense strand
gaacaggugucaaagaagu

SEQ ID NO: 1989994 - RNA, 19 nt, Homo sapiens
  misc_RNA (1)...(19): siRNA sense strand
gagaaaccuuuauucgaua

SEQ ID NO: 1989995 - RNA, 19 nt, Homo sapiens
  misc_RNA (1)...(19): siRNA sense strand
gagccaaugucgagaguuu

SEQ ID NO: 1989996 - RNA, 19 nt, Homo sapiens
  misc_RNA (1)...(19): siRNA sense strand
aaacggauauguccaauuc

SEQ ID NO: 1989997 - RNA, 19 nt, Homo sapiens
  misc_RNA (1)...(19): siRNA sense strand
cagaacaggugucaaagaa

SEQ ID NO: 1989998 - RNA, 19 nt, Homo sapiens
  misc_RNA (1)...(19): siRNA sense strand
ucaaagaaguggcaaggaa

SEQ ID NO: 1989999 - RNA, 19 nt, Homo sapiens
  misc_RNA (1)...(19): siRNA sense strand
gagacaggcucuaggagaa

SEQ ID NO: 1990000 - RNA, 19 nt, Homo sapiens
  misc_RNA (1)...(19): siRNA sense strand
ccucaacucucuucuagaa

SEQ ID NO: 1990001 - RNA, 19 nt, Homo sapiens
  misc_RNA (1)...(19): siRNA sense strand
ccagaguuaucaaccuuua

SEQ ID NO: 1990002 - RNA, 19 nt, Homo sapiens
  misc_RNA (1)...(19): siRNA sense strand
gcaagagugauaugugaua

SEQ ID NO: 1990003 - RNA, 19 nt, Homo sapiens
  misc_RNA (1)...(19): siRNA sense strand
guuggagaaugaagaaaua

SEQ ID NO: 1990004 - RNA, 19 nt, Homo sapiens
  misc_RNA (1)...(19): siRNA sense strand
aauaugaguuggagaauga

SEQ ID NO: 1990005 - RNA, 19 nt, Homo sapiens
  misc_RNA (1)...(19): siRNA sense strand
ugacaacagcuguauauuu

SEQ ID NO: 1990006 - RNA, 19 nt, Homo sapiens
  misc_RNA (1)...(19): siRNA sense strand
gacuaucccugcacacuuu

SEQ ID NO: 1990007 - RNA, 19 nt, Homo sapiens
  misc_RNA (1)...(19): siRNA sense strand
caaaugucauggagagaaa

SEQ ID NO: 1990008 - RNA, 19 nt, Homo sapiens
  misc_RNA (1)...(19): siRNA sense strand
gaaguggcaaggaaauaua

SEQ ID NO: 1990009 - RNA, 19 nt, Homo sapiens
  misc_RNA (1)...(19): siRNA sense strand
gagguuaucuugaagugau

SEQ ID NO: 1990010 - RNA, 19 nt, Homo sapiens
  misc_RNA (1)...(19): siRNA sense strand
gaagugauaccaaauccaa

SEQ ID NO: 1990011 - RNA, 19 nt, Homo sapiens
  misc_RNA (1)...(19): siRNA sense strand
gaaaggcacccggauagaa

SEQ ID NO: 1990012 - RNA, 19 nt, Homo sapiens
  misc_RNA (1)...(19): siRNA sense strand
caagguacauugcaaagag

SEQ ID NO: 1990013 - RNA, 19 nt, Homo sapiens
  misc_RNA (1)...(19): siRNA sense strand
ggaagaaagucacuaaacc

SEQ ID NO: 1990014 - RNA, 19 nt, Homo sapiens
  misc_RNA (1)...(19): siRNA sense strand
caaggaagaaagucacuaa

SEQ ID NO: 1990015 - RNA, 19 nt, Homo sapiens
  misc_RNA (1)...(19): siRNA sense strand
caacagcaugaacacauua

SEQ ID NO: 1990016 - RNA, 19 nt, Homo sapiens
  misc_RNA (1)...(19): siRNA sense strand
ucaacucucuucuagaaug

SEQ ID NO: 1990017 - RNA, 19 nt, Homo sapiens
  misc_RNA (1)...(19): siRNA sense strand
ccaacagcaugaacacauu

SEQ ID NO: 1990018 - RNA, 19 nt, Homo sapiens
  misc_RNA (1)...(19): siRNA sense strand
caaaggacaaugaaaugaa

SEQ ID NO: 1990019 - RNA, 19 nt, Homo sapiens
  misc_RNA (1)...(19): siRNA sense strand
gaagugggagaaacggaua

SEQ ID NO: 1990020 - RNA, 19 nt, Homo sapiens
  misc_RNA (1)...(19): siRNA sense strand
caacucucuucuagaauga

SEQ ID NO: 1990021 - RNA, 19 nt, Homo sapiens
  misc_RNA (1)...(19): siRNA sense strand
gaaagugagccaugguguu

SEQ ID NO: 1990022 - RNA, 19 nt, Homo sapiens
  misc_RNA (1)...(19): siRNA sense strand
gagaaaggcacccggauag

SEQ ID NO: 1990023 - RNA, 19 nt, Homo sapiens
  misc_RNA (1)...(19): siRNA sense strand
gaagaaauagcugcagaga

SEQ ID NO: 1990024 - RNA, 19 nt, Homo sapiens
  misc_RNA (1)...(19): siRNA sense strand
gaagaaagucacuaaacca

SEQ ID NO: 1990025 - RNA, 19 nt, Homo sapiens
  misc_RNA (1)...(19): siRNA sense strand
caaagaaguggcaaggaaa

SEQ ID NO: 1990026 - RNA, 19 nt, Homo sapiens
  misc_RNA (1)...(19): siRNA sense strand
gcaggaggacucaacaaga

SEQ ID NO: 1990027 - RNA, 19 nt, Homo sapiens
  misc_RNA (1)...(19): siRNA sense strand
gaagaagagugugccuaca

SEQ ID NO: 1990028 - RNA, 19 nt, Homo sapiens
  misc_RNA (1)...(19): siRNA sense strand
ggauauguccaauucaaau

SEQ ID NO: 1990029 - RNA, 19 nt, Homo sapiens
  misc_RNA (1)...(19): siRNA sense strand
ggaugucgauaggaagaaa

SEQ ID NO: 1990030 - RNA, 19 nt, Homo sapiens
  misc_RNA (1)...(19): siRNA sense strand
gagaaacggauauguccaa

SEQ ID NO: 1990031 - RNA, 19 nt, Homo sapiens
  misc_RNA (1)...(19): siRNA sense strand
ggacucaacaagagaugaa

SEQ ID NO: 1990032 - RNA, 19 nt, Homo sapiens
  misc_RNA (1)...(19): siRNA sense strand
aaagugagccaugguguuu

SEQ ID NO: 1990033 - RNA, 19 nt, Homo sapiens
  misc_RNA (1)...(19): siRNA sense strand
aacaagagaugaaggcaau

SEQ ID NO: 1990034 - RNA, 19 nt, Homo sapiens
  misc_RNA (1)...(19): siRNA sense strand
caacagcaaacccuuacuu

SEQ ID NO: 1990035 - RNA, 19 nt, Homo sapiens
  misc_RNA (1)...(19): siRNA sense strand
ccucagaacaggugucaaa

SEQ ID NO: 1990036 - RNA, 19 nt, Homo sapiens
  misc_RNA (1)...(19): siRNA sense strand
cugcaagagugauauguga

SEQ ID NO: 1990037 - RNA, 19 nt, Homo sapiens
  misc_RNA (1)...(19): siRNA sense strand
caaauccaaaggacaauga

SEQ ID NO: 1990038 - RNA, 19 nt, Homo sapiens
  misc_RNA (1)...(19): siRNA sense strand
gcucuaggagaaaccuuua

SEQ ID NO: 1990039 - RNA, 19 nt, Homo sapiens
  misc_RNA (1)...(19): siRNA sense strand
gaaacggauauguccaauu

SEQ ID NO: 1990040 - RNA, 19 nt, Homo sapiens
  misc_RNA (1)...(19): siRNA sense strand
auaauuacauugccagcuu

SEQ ID NO: 1990041 - RNA, 19 nt, Homo sapiens
  misc_RNA (1)...(19): siRNA sense strand
caggaggacucaacaagag

SEQ ID NO: 1990042 - RNA, 19 nt, Homo sapiens
  misc_RNA (1)...(19): siRNA sense strand
gaacugcaagagugauaug

SEQ ID NO: 1990043 - RNA, 19 nt, Homo sapiens
  misc_RNA (1)...(19): siRNA sense strand
caccucaacucucuucuag

SEQ ID NO: 1990044 - RNA, 19 nt, Homo sapiens
  misc_RNA (1)...(19): siRNA sense strand
caacugaagugggagaaac

SEQ ID NO: 1990045 - RNA, 19 nt, Homo sapiens
  misc_RNA (1)...(19): siRNA sense strand
agaaauaugaguuggagaa

SEQ ID NO: 1990046 - RNA, 19 nt, Homo sapiens
  misc_RNA (1)...(19): siRNA sense strand
gaaggacaaggaagaaagu

SEQ ID NO: 1990047 - RNA, 19 nt, Homo sapiens
  misc_RNA (1)...(19): siRNA sense strand
ggacuucauagcaguaaug

SEQ ID NO: 1990048 - RNA, 19 nt, Homo sapiens
  misc_RNA (1)...(19): siRNA sense strand
cagcaacagcaaacccuua

SEQ ID NO: 1990049 - RNA, 19 nt, Homo sapiens
  misc_RNA (1)...(19): siRNA sense strand
gcacccggauagaaaauaa

SEQ ID NO: 1990050 - RNA, 19 nt, Homo sapiens
  misc_RNA (1)...(19): siRNA sense strand
guuaucaaccuuuagaguu

SEQ ID NO: 1990051 - RNA, 19 nt, Homo sapiens
  misc_RNA (1)...(19): siRNA sense strand
ccaaaggacaaugaaauga

SEQ ID NO: 1990052 - RNA, 19 nt, Homo sapiens
  misc_RNA (1)...(19): siRNA sense strand
gcuuucugcuuucaucuau

SEQ ID NO: 1990053 - RNA, 19 nt, Homo sapiens
  misc_RNA (1)...(19): siRNA sense strand
ggugcuggcugcaacuguu

SEQ ID NO: 1990054 - RNA, 19 nt, Homo sapiens
  misc_RNA (1)...(19): siRNA sense strand
uaaacuaggcucagcaaca

SEQ ID NO: 1990055 - RNA, 19 nt, Homo sapiens
  misc_RNA (1)...(19): siRNA sense strand
aaaggcacccggauagaaa

SEQ ID NO: 1990056 - RNA, 19 nt, Homo sapiens
  misc_RNA (1)...(19): siRNA sense strand
gagacuggauuuugugauu

SEQ ID NO: 1990057 - RNA, 19 nt, Homo sapiens
  misc_RNA (1)...(19): siRNA sense strand
agagaaaggcacccggaua

SEQ ID NO: 1990058 - RNA, 19 nt, Homo sapiens
  misc_RNA (1)...(19): siRNA sense strand
agaaagucacuaaaccaua

SEQ ID NO: 1990059 - RNA, 19 nt, Homo sapiens
  misc_RNA (1)...(19): siRNA sense strand
gaaauaugaguuggagaau

SEQ ID NO: 1990060 - RNA, 19 nt, Homo sapiens
  misc_RNA (1)...(19): siRNA sense strand
aaacuaggcucagcaacag

SEQ ID NO: 1990061 - RNA, 19 nt, Homo sapiens
  misc_RNA (1)...(19): siRNA sense strand
gccgaaagcguuauuccaa

SEQ ID NO: 1990062 - RNA, 19 nt, Homo sapiens
  misc_RNA (1)...(19): siRNA sense strand
agggacagcagucaaauuu

SEQ ID NO: 1990063 - RNA, 19 nt, Homo sapiens
  misc_RNA (1)...(19): siRNA sense strand
cggcuuagauggacuucau

SEQ ID NO: 1990064 - RNA, 19 nt, Homo sapiens
  misc_RNA (1)...(19): siRNA sense strand
cagcaaacccuuacuuggu

SEQ ID NO: 1990065 - RNA, 19 nt, Homo sapiens
  misc_RNA (1)...(19): siRNA sense strand
uggcaggacucuugaagca

SEQ ID NO: 1990066 - RNA, 19 nt, Homo sapiens
  misc_RNA (1)...(19): siRNA sense strand
ucucuuuccugccugaauu

SEQ ID NO: 1990067 - RNA, 19 nt, Homo sapiens
  misc_RNA (1)...(19): siRNA sense strand
caagagaugaaggcaauga

SEQ ID NO: 1990068 - RNA, 19 nt, Homo sapiens
  misc_RNA (1)...(19): siRNA sense strand
gccaugggcugacagaacu

SEQ ID NO: 1990069 - RNA, 19 nt, Homo sapiens
  misc_RNA (1)...(19): siRNA sense strand
cugcagagagaaauaaauu

SEQ ID NO: 1990070 - RNA, 19 nt, Homo sapiens
  misc_RNA (1)...(19): siRNA sense strand
cagcaugaacacauuaaga

SEQ ID NO: 1990071 - RNA, 19 nt, Homo sapiens
  misc_RNA (1)...(19): siRNA sense strand
gcauuuacccucagaacag

SEQ ID NO: 1990072 - RNA, 19 nt, Homo sapiens
  misc_RNA (1)...(19): siRNA sense strand
gauauguccaauucaaaug

SEQ ID NO: 1990073 - RNA, 19 nt, Homo sapiens
  misc_RNA (1)...(19): siRNA sense strand
acuagaagaugcccuugug

SEQ ID NO: 1990074 - RNA, 19 nt, Homo sapiens
  misc_RNA (1)...(19): siRNA sense strand
uaauagcgacauaguccua

SEQ ID NO: 1990075 - RNA, 19 nt, Homo sapiens
  misc_RNA (1)...(19): siRNA sense strand
cauaagagccacauguuuu

SEQ ID NO: 1990076 - RNA, 19 nt, Homo sapiens
  misc_RNA (1)...(19): siRNA sense strand
uaagaaggacaaggaagaa

SEQ ID NO: 1990077 - RNA, 19 nt, Homo sapiens
  misc_RNA (1)...(19): siRNA sense strand
gaagccaacagcaugaaca

SEQ ID NO: 1990078 - RNA, 19 nt, Homo sapiens
  misc_RNA (1)...(19): siRNA sense strand
aaauaugaguuggagaaug

SEQ ID NO: 1990079 - RNA, 19 nt, Homo sapiens
  misc_RNA (1)...(19): siRNA sense strand
gaaagcguuauuccaagga

SEQ ID NO: 1990080 - RNA, 19 nt, Homo sapiens
  misc_RNA (1)...(19): siRNA sense strand
uuaagaaggacaaggaaga

SEQ ID NO: 1990081 - RNA, 19 nt, Homo sapiens
  misc_RNA (1)...(19): siRNA sense strand
gcucagcugauaaugcauu

SEQ ID NO: 1990082 - RNA, 19 nt, Homo sapiens
  misc_RNA (1)...(19): siRNA sense strand
gagggacagcagucaaauu

SEQ ID NO: 1990083 - RNA, 19 nt, Homo sapiens
  misc_RNA (1)...(19): siRNA sense strand
ccauauguuuguucaacug

SEQ ID NO: 1990084 - RNA, 19 nt, Homo sapiens
  misc_RNA (1)...(19): siRNA sense strand
ccuccaguuuguacgauuu

SEQ ID NO: 1990085 - RNA, 19 nt, Homo sapiens
  misc_RNA (1)...(19): siRNA sense strand
ucagggauuuugucucaua

SEQ ID NO: 1990086 - RNA, 19 nt, Homo sapiens
  misc_RNA (1)...(19): siRNA sense strand
uuguugccaugaagaaaua

SEQ ID NO: 1990087 - RNA, 19 nt, Homo sapiens
  misc_RNA (1)...(19): siRNA sense strand
caugaagaaauaugaguug

SEQ ID NO: 1990088 - RNA, 19 nt, Homo sapiens
  misc_RNA (1)...(19): siRNA sense strand
guaaagaucuggaauauga

SEQ ID NO: 1990089 - RNA, 19 nt, Homo sapiens
  misc_RNA (1)...(19): siRNA sense strand
caacugagcaggcauauua

SEQ ID NO: 1990090 - RNA, 19 nt, Homo sapiens
  misc_RNA (1)...(19): siRNA sense strand
gaaaggaucuuaaguacca

SEQ ID NO: 1990091 - RNA, 19 nt, Homo sapiens
  misc_RNA (1)...(19): siRNA sense strand
gaugugauccgccuuauua

SEQ ID NO: 1990092 - RNA, 19 nt, Homo sapiens
  misc_RNA (1)...(19): siRNA sense strand
ggacagauauuaccgucaa

SEQ ID NO: 1990093 - RNA, 19 nt, Homo sapiens
  misc_RNA (1)...(19): siRNA sense strand
gagcaggcauauuaaguuu

SEQ ID NO: 1990094 - RNA, 19 nt, Homo sapiens
  misc_RNA (1)...(19): siRNA sense strand
caagauggacauuacauua

SEQ ID NO: 1990095 - RNA, 19 nt, Homo sapiens
  misc_RNA (1)...(19): siRNA sense strand
ucaaagauguggaagaaga

SEQ ID NO: 1990096 - RNA, 19 nt, Homo sapiens
  misc_RNA (1)...(19): siRNA sense strand
ggccauuccuccuuuguua

SEQ ID NO: 1990097 - RNA, 19 nt, Homo sapiens
  misc_RNA (1)...(19): siRNA sense strand
caaggcagcugucaaagau

SEQ ID NO: 1990098 - RNA, 19 nt, Homo sapiens
  misc_RNA (1)...(19): siRNA sense strand
cagcagagauacagaaaug

SEQ ID NO: 1990099 - RNA, 19 nt, Homo sapiens
  misc_RNA (1)...(19): siRNA sense strand
ggaaaacccugaaggaauu

SEQ ID NO: 1990100 - RNA, 19 nt, Homo sapiens
  misc_RNA (1)...(19): siRNA sense strand
gcacaucacccucaucaga

SEQ ID NO: 1990101 - RNA, 19 nt, Homo sapiens
  misc_RNA (1)...(19): siRNA sense strand
gaagcaacauuuacacaag

SEQ ID NO: 1990102 - RNA, 19 nt, Homo sapiens
  misc_RNA (1)...(19): siRNA sense strand
ucagaaaggaucuuaagua

SEQ ID NO: 1990103 - RNA, 19 nt, Homo sapiens
  misc_RNA (1)...(19): siRNA sense strand
gaaaucacauguggagugu

SEQ ID NO: 1990104 - RNA, 19 nt, Homo sapiens
  misc_RNA (1)...(19): siRNA sense strand
ugauagagcuccgugaauu

SEQ ID NO: 1990105 - RNA, 19 nt, Homo sapiens
  misc_RNA (1)...(19): siRNA sense strand
ggacaauguuuaaggagau

SEQ ID NO: 1990106 - RNA, 19 nt, Homo sapiens
  misc_RNA (1)...(19): siRNA sense strand
guauggaacuuuacuacug

SEQ ID NO: 1990107 - RNA, 19 nt, Homo sapiens
  misc_RNA (1)...(19): siRNA sense strand
aaacacagccagagcgaua

SEQ ID NO: 1990108 - RNA, 19 nt, Homo sapiens
  misc_RNA (1)...(19): siRNA sense strand
caucagaacccgauugcua

SEQ ID NO: 1990109 - RNA, 19 nt, Homo sapiens
  misc_RNA (1)...(19): siRNA sense strand
cagaaaggaucuuaaguac

SEQ ID NO: 1990110 - RNA, 19 nt, Homo sapiens
  misc_RNA (1)...(19): siRNA sense strand
gugaauggaucuacugugu

SEQ ID NO: 1990111 - RNA, 19 nt, Homo sapiens
  misc_RNA (1)...(19): siRNA sense strand
ggacauuacauuauuagug

SEQ ID NO: 1990112 - RNA, 19 nt, Homo sapiens
  misc_RNA (1)...(19): siRNA sense strand
ggccuuagcuggcgaaguc

SEQ ID NO: 1990113 - RNA, 19 nt, Homo sapiens
  misc_RNA (1)...(19): siRNA sense strand
gcagagauacagaaauguu

SEQ ID NO: 1990114 - RNA, 19 nt, Homo sapiens
  misc_RNA (1)...(19): siRNA sense strand
ugucaaagauguggaagaa

SEQ ID NO: 1990115 - RNA, 19 nt, Homo sapiens
  misc_RNA (1)...(19): siRNA sense strand
gcaaggcagcugucaaaga

SEQ ID NO: 1990116 - RNA, 19 nt, Homo sapiens
  misc_RNA (1)...(19): siRNA sense strand
agaaggaugugauugguau

SEQ ID NO: 1990117 - RNA, 19 nt, Homo sapiens
  misc_RNA (1)...(19): siRNA sense strand
gcaggcauauuaaguuugg

SEQ ID NO: 1990118 - RNA, 19 nt, Homo sapiens
  misc_RNA (1)...(19): siRNA sense strand
gcuauacagucucugaaau

SEQ ID NO: 1990119 - RNA, 19 nt, Homo sapiens
  misc_RNA (1)...(19): siRNA sense strand
gaacuuuacuacuggaaaa

SEQ ID NO: 1990120 - RNA, 19 nt, Homo sapiens
  misc_RNA (1)...(19): siRNA sense strand
gauagcagucagauccuua

SEQ ID NO: 1990121 - RNA, 19 nt, Homo sapiens
  misc_RNA (1)...(19): siRNA sense strand
cauauuaaguuuggucaga

SEQ ID NO: 1990122 - RNA, 19 nt, Homo sapiens
  misc_RNA (1)...(19): siRNA sense strand
gaagauggacuccuaaagc

SEQ ID NO: 1990123 - RNA, 19 nt, Homo sapiens
  misc_RNA (1)...(19): siRNA sense strand
ccagagcgauauauucauc

SEQ ID NO: 1990124 - RNA, 19 nt, Homo sapiens
  misc_RNA (1)...(19): siRNA sense strand
cagugaagauggacuccua

SEQ ID NO: 1990125 - RNA, 19 nt, Homo sapiens
  misc_RNA (1)...(19): siRNA sense strand
ggccaggucuuacuuugau

SEQ ID NO: 1990126 - RNA, 19 nt, Homo sapiens
  misc_RNA (1)...(19): siRNA sense strand
cagagauacagaaauguua

SEQ ID NO: 1990127 - RNA, 19 nt, Homo sapiens
  misc_RNA (1)...(19): siRNA sense strand
cuaaagcucuggaaaccau

SEQ ID NO: 1990128 - RNA, 19 nt, Homo sapiens
  misc_RNA (1)...(19): siRNA sense strand
gcacgagaaggaugugauu

SEQ ID NO: 1990129 - RNA, 19 nt, Homo sapiens
  misc_RNA (1)...(19): siRNA sense strand
uaacgaagcaacauuuaca

SEQ ID NO: 1990130 - RNA, 19 nt, Homo sapiens
  misc_RNA (1)...(19): siRNA sense strand
uauacagucucugaaauug

SEQ ID NO: 1990131 - RNA, 19 nt, Homo sapiens
  misc_RNA (1)...(19): siRNA sense strand
gggaggacuuugugcucua

SEQ ID NO: 1990132 - RNA, 19 nt, Homo sapiens
  misc_RNA (1)...(19): siRNA sense strand
gauggaaguagcaaagaaa

SEQ ID NO: 1990133 - RNA, 19 nt, Homo sapiens
  misc_RNA (1)...(19): siRNA sense strand
caucucgucucauggcauu

SEQ ID NO: 1990134 - RNA, 19 nt, Homo sapiens
  misc_RNA (1)...(19): siRNA sense strand
gagaaggaugugauuggua

SEQ ID NO: 1990135 - RNA, 19 nt, Homo sapiens
  misc_RNA (1)...(19): siRNA sense strand
gaagaccacagaauguuca

SEQ ID NO: 1990136 - RNA, 19 nt, Homo sapiens
  misc_RNA (1)...(19): siRNA sense strand
gauagagcuccgugaauug

SEQ ID NO: 1990137 - RNA, 19 nt, Homo sapiens
  misc_RNA (1)...(19): siRNA sense strand
uaaguuuggucagaaauca

SEQ ID NO: 1990138 - RNA, 19 nt, Homo sapiens
  misc_RNA (1)...(19): siRNA sense strand
aaagagaagagcagcaauu

SEQ ID NO: 1990139 - RNA, 19 nt, Homo sapiens
  misc_RNA (1)...(19): siRNA sense strand
caaacacgguggucaucau

SEQ ID NO: 1990140 - RNA, 19 nt, Homo sapiens
  misc_RNA (1)...(19): siRNA sense strand
guuaacgaagcaacauuua

SEQ ID NO: 1990141 - RNA, 19 nt, Homo sapiens
  misc_RNA (1)...(19): siRNA sense strand
cagaguggacaauguuuaa

SEQ ID NO: 1990142 - RNA, 19 nt, Homo sapiens
  misc_RNA (1)...(19): siRNA sense strand
ccauugggauacuguguug

SEQ ID NO: 1990143 - RNA, 19 nt, Homo sapiens
  misc_RNA (1)...(19): siRNA sense strand
ggaauaugaagaccacaga

SEQ ID NO: 1990144 - RNA, 19 nt, Homo sapiens
  misc_RNA (1)...(19): siRNA sense strand
gauauauucaucuggagaa

SEQ ID NO: 1990145 - RNA, 19 nt, Homo sapiens
  misc_RNA (1)...(19): siRNA sense strand
gaccacagaauguucaaau

SEQ ID NO: 1990146 - RNA, 19 nt, Homo sapiens
  misc_RNA (1)...(19): siRNA sense strand
aagcaacauuuacacaaga

SEQ ID NO: 1990147 - RNA, 19 nt, Homo sapiens
  misc_RNA (1)...(19): siRNA sense strand
caguuuacaucgggcguua

SEQ ID NO: 1990148 - RNA, 19 nt, Homo sapiens
  misc_RNA (1)...(19): siRNA sense strand
ucagaguggacaauguuua

SEQ ID NO: 1990149 - RNA, 19 nt, Homo sapiens
  misc_RNA (1)...(19): siRNA sense strand
gacaauguuuaaggagauu

SEQ ID NO: 1990150 - RNA, 19 nt, Homo sapiens
  misc_RNA (1)...(19): siRNA sense strand
gcagcagcaucagggauug

SEQ ID NO: 1990151 - RNA, 19 nt, Homo sapiens
  misc_RNA (1)...(19): siRNA sense strand
gcaaacuggagagaacuuu

SEQ ID NO: 1990152 - RNA, 19 nt, Homo sapiens
  misc_RNA (1)...(19): siRNA sense strand
ccacagaauguucaaauac

SEQ ID NO: 1990153 - RNA, 19 nt, Homo sapiens
  misc_RNA (1)...(19): siRNA sense strand
cuguaaagaucuggaauau

SEQ ID NO: 1990154 - RNA, 19 nt, Homo sapiens
  misc_RNA (1)...(19): siRNA sense strand
gauucagaguggacaaugu

SEQ ID NO: 1990155 - RNA, 19 nt, Homo sapiens
  misc_RNA (1)...(19): siRNA sense strand
aagcuucaguucugguaaa

SEQ ID NO: 1990156 - RNA, 19 nt, Homo sapiens
  misc_RNA (1)...(19): siRNA sense strand
gaauaugaagaccacagaa

SEQ ID NO: 1990157 - RNA, 19 nt, Homo sapiens
  misc_RNA (1)...(19): siRNA sense strand
cgaagcaacauuuacacaa

SEQ ID NO: 1990158 - RNA, 19 nt, Homo sapiens
  misc_RNA (1)...(19): siRNA sense strand
ugucaccugucuaagcuuu

SEQ ID NO: 1990159 - RNA, 19 nt, Homo sapiens
  misc_RNA (1)...(19): siRNA sense strand
agauggaaguagcaaagaa

SEQ ID NO: 1990160 - RNA, 19 nt, Homo sapiens
  misc_RNA (1)...(19): siRNA sense strand
acuacugugucucugaaua

SEQ ID NO: 1990161 - RNA, 19 nt, Homo sapiens
  misc_RNA (1)...(19): siRNA sense strand
cgucaacagugugauucua

SEQ ID NO: 1990162 - RNA, 19 nt, Homo sapiens
  misc_RNA (1)...(19): siRNA sense strand
ugauggcacuguaaagauc

SEQ ID NO: 1990163 - RNA, 19 nt, Homo sapiens
  misc_RNA (1)...(19): siRNA sense strand
acagaaauguuagcaacug

SEQ ID NO: 1990164 - RNA, 19 nt, Homo sapiens
  misc_RNA (1)...(19): siRNA sense strand
caaagauguggaagaagaa

SEQ ID NO: 1990165 - RNA, 19 nt, Homo sapiens
  misc_RNA (1)...(19): siRNA sense strand
cuauacagucucugaaauu

SEQ ID NO: 1990166 - RNA, 19 nt, Homo sapiens
  misc_RNA (1)...(19): siRNA sense strand
uggacagcauugagaguuu

SEQ ID NO: 1990167 - RNA, 19 nt, Homo sapiens
  misc_RNA (1)...(19): siRNA sense strand
accacagaauguucaaaua

SEQ ID NO: 1990168 - RNA, 19 nt, Homo sapiens
  misc_RNA (1)...(19): siRNA sense strand
uuacacaagauggacauua

SEQ ID NO: 1990169 - RNA, 19 nt, Homo sapiens
  misc_RNA (1)...(19): siRNA sense strand
gaaggagaacaguuuacau

SEQ ID NO: 1990170 - RNA, 19 nt, Homo sapiens
  misc_RNA (1)...(19): siRNA sense strand
ggaacuuuacuacuggaaa

SEQ ID NO: 1990171 - RNA, 19 nt, Homo sapiens
  misc_RNA (1)...(19): siRNA sense strand
uguggagugugcucgauuu

SEQ ID NO: 1990172 - RNA, 19 nt, Homo sapiens
  misc_RNA (1)...(19): siRNA sense strand
agaacccgauugcuaccua

SEQ ID NO: 1990173 - RNA, 19 nt, Homo sapiens
  misc_RNA (1)...(19): siRNA sense strand
aaacuggagagaacuuuga

SEQ ID NO: 1990174 - RNA, 19 nt, Homo sapiens
  misc_RNA (1)...(19): siRNA sense strand
gaucaaacacgguggucau

SEQ ID NO: 1990175 - RNA, 19 nt, Homo sapiens
  misc_RNA (1)...(19): siRNA sense strand
gcuguccucugcauguguu

SEQ ID NO: 1990176 - RNA, 19 nt, Homo sapiens
  misc_RNA (1)...(19): siRNA sense strand
ugagcaggcauauuaaguu

SEQ ID NO: 1990177 - RNA, 19 nt, Homo sapiens
  misc_RNA (1)...(19): siRNA sense strand
ugacagugcacgagaagga

SEQ ID NO: 1990178 - RNA, 19 nt, Homo sapiens
  misc_RNA (1)...(19): siRNA sense strand
ggacagcauugagaguuuu

SEQ ID NO: 1990179 - RNA, 19 nt, Homo sapiens
  misc_RNA (1)...(19): siRNA sense strand
gcacuguaaagaucuggaa

SEQ ID NO: 1990180 - RNA, 19 nt, Homo sapiens
  misc_RNA (1)...(19): siRNA sense strand
acacaacugagcaggcaua

SEQ ID NO: 1990181 - RNA, 19 nt, Homo sapiens
  misc_RNA (1)...(19): siRNA sense strand
cgagaaggaugugauuggu

SEQ ID NO: 1990182 - RNA, 19 nt, Homo sapiens
  misc_RNA (1)...(19): siRNA sense strand
acuuugugcucuacuguuu

SEQ ID NO: 1990183 - RNA, 19 nt, Homo sapiens
  misc_RNA (1)...(19): siRNA sense strand
gacauuaacaguggccauu

SEQ ID NO: 1990184 - RNA, 19 nt, Homo sapiens
  misc_RNA (1)...(19): siRNA sense strand
gaagcuucaguucugguaa

SEQ ID NO: 1990185 - RNA, 19 nt, Homo sapiens
  misc_RNA (1)...(19): siRNA sense strand
uacacaagauggacauuac

SEQ ID NO: 1990186 - RNA, 19 nt, Homo sapiens
  misc_RNA (1)...(19): siRNA sense strand
ggauugcuuccuccuggua

SEQ ID NO: 1990187 - RNA, 19 nt, Homo sapiens
  misc_RNA (1)...(19): siRNA sense strand
ggaugugauugguauugca

SEQ ID NO: 1990188 - RNA, 19 nt, Homo sapiens
  misc_RNA (1)...(19): siRNA sense strand
ggaaauggauccugagaaa

SEQ ID NO: 1990189 - RNA, 19 nt, Homo sapiens
  misc_RNA (1)...(19): siRNA sense strand
uauguuaccuccagaauua

SEQ ID NO: 1990190 - RNA, 19 nt, Homo sapiens
  misc_RNA (1)...(19): siRNA sense strand
gaaagaauaucguguccaa

SEQ ID NO: 1990191 - RNA, 19 nt, Homo sapiens
  misc_RNA (1)...(19): siRNA sense strand
gggaaaggaucaaguaauu

SEQ ID NO: 1990192 - RNA, 19 nt, Homo sapiens
  misc_RNA (1)...(19): siRNA sense strand
ggagauaccugggcuauau

SEQ ID NO: 1990193 - RNA, 19 nt, Homo sapiens
  misc_RNA (1)...(19): siRNA sense strand
gaacaucacugugcaagga

SEQ ID NO: 1990194 - RNA, 19 nt, Homo sapiens
  misc_RNA (1)...(19): siRNA sense strand
gacaauagcugagaugaga

SEQ ID NO: 1990195 - RNA, 19 nt, Homo sapiens
  misc_RNA (1)...(19): siRNA sense strand
gcagggaggcucuuuagua

SEQ ID NO: 1990196 - RNA, 19 nt, Homo sapiens
  misc_RNA (1)...(19): siRNA sense strand
gaaaggaucaaguaauuug

SEQ ID NO: 1990197 - RNA, 19 nt, Homo sapiens
  misc_RNA (1)...(19): siRNA sense strand
gaacgaacgugggaaagga

SEQ ID NO: 1990198 - RNA, 19 nt, Homo sapiens
  misc_RNA (1)...(19): siRNA sense strand
gaacaauacgcaaagauga

SEQ ID NO: 1990199 - RNA, 19 nt, Homo sapiens
  misc_RNA (1)...(19): siRNA sense strand
cagggaggcucuuuaguaa

SEQ ID NO: 1990200 - RNA, 19 nt, Homo sapiens
  misc_RNA (1)...(19): siRNA sense strand
ugaagaagguguacaggaa

SEQ ID NO: 1990201 - RNA, 19 nt, Homo sapiens
  misc_RNA (1)...(19): siRNA sense strand
ccagacaucuugaccacua

SEQ ID NO: 1990202 - RNA, 19 nt, Homo sapiens
  misc_RNA (1)...(19): siRNA sense strand
ucaagccucucacaauuaa

SEQ ID NO: 1990203 - RNA, 19 nt, Homo sapiens
  misc_RNA (1)...(19): siRNA sense strand
ggaagggucugcaaugagu

SEQ ID NO: 1990204 - RNA, 19 nt, Homo sapiens
  misc_RNA (1)...(19): siRNA sense strand
aaagggagauuuagacuuc

SEQ ID NO: 1990205 - RNA, 19 nt, Homo sapiens
  misc_RNA (1)...(19): siRNA sense strand
gccaaaagcccuuauauua

SEQ ID NO: 1990206 - RNA, 19 nt, Homo sapiens
  misc_RNA (1)...(19): siRNA sense strand
ggacaggcuccaauagaua

SEQ ID NO: 1990207 - RNA, 19 nt, Homo sapiens
  misc_RNA (1)...(19): siRNA sense strand
uauacaaucugucaccuaa

SEQ ID NO: 1990208 - RNA, 19 nt, Homo sapiens
  misc_RNA (1)...(19): siRNA sense strand
ggaauggauugaaggcaaa

SEQ ID NO: 1990209 - RNA, 19 nt, Homo sapiens
  misc_RNA (1)...(19): siRNA sense strand
gaaggcaaagaaagaaaua

SEQ ID NO: 1990210 - RNA, 19 nt, Homo sapiens
  misc_RNA (1)...(19): siRNA sense strand
gcaaagcgaccaggaauug

SEQ ID NO: 1990211 - RNA, 19 nt, Homo sapiens
  misc_RNA (1)...(19): siRNA sense strand
gacacuggauguagaacua

SEQ ID NO: 1990212 - RNA, 19 nt, Homo sapiens
  misc_RNA (1)...(19): siRNA sense strand
gauuuagacuucacuuaug

SEQ ID NO: 1990213 - RNA, 19 nt, Homo sapiens
  misc_RNA (1)...(19): siRNA sense strand
ggaaauggccaaggaaaug

SEQ ID NO: 1990214 - RNA, 19 nt, Homo sapiens
  misc_RNA (1)...(19): siRNA sense strand
ugaaagacacccucaaaga

SEQ ID NO: 1990215 - RNA, 19 nt, Homo sapiens
  misc_RNA (1)...(19): siRNA sense strand
gaucagaaaucggagaagu

SEQ ID NO: 1990216 - RNA, 19 nt, Homo sapiens
  misc_RNA (1)...(19): siRNA sense strand
gaacauuacugcacaaaag

SEQ ID NO: 1990217 - RNA, 19 nt, Homo sapiens
  misc_RNA (1)...(19): siRNA sense strand
ccugagaaauuaaagauuc

SEQ ID NO: 1990218 - RNA, 19 nt, Homo sapiens
  misc_RNA (1)...(19): siRNA sense strand
gcagggaggugccuacaac

SEQ ID NO: 1990219 - RNA, 19 nt, Homo sapiens
  misc_RNA (1)...(19): siRNA sense strand
aaauggauccugagaaauu

SEQ ID NO: 1990220 - RNA, 19 nt, Homo sapiens
  misc_RNA (1)...(19): siRNA sense strand
uaaaggacaacuugaaaga

SEQ ID NO: 1990221 - RNA, 19 nt, Homo sapiens
  misc_RNA (1)...(19): siRNA sense strand
ggaaaggaucaaguaauuu

SEQ ID NO: 1990222 - RNA, 19 nt, Homo sapiens
  misc_RNA (1)...(19): siRNA sense strand
cuucaagccucucacaauu

SEQ ID NO: 1990223 - RNA, 19 nt, Homo sapiens
  misc_RNA (1)...(19): siRNA sense strand
cuacacaaagggagauuua

SEQ ID NO: 1990224 - RNA, 19 nt, Homo sapiens
  misc_RNA (1)...(19): siRNA sense strand
gaaagacacccucaaagac

SEQ ID NO: 1990225 - RNA, 19 nt, Homo sapiens
  misc_RNA (1)...(19): siRNA sense strand
aaauaaaggugccucaucu

SEQ ID NO: 1990226 - RNA, 19 nt, Homo sapiens
  misc_RNA (1)...(19): siRNA sense strand
gccauucgauugcuauaug

SEQ ID NO: 1990227 - RNA, 19 nt, Homo sapiens
  misc_RNA (1)...(19): siRNA sense strand
gagauuuagacuucacuua

SEQ ID NO: 1990228 - RNA, 19 nt, Homo sapiens
  misc_RNA (1)...(19): siRNA sense strand
gcaaggagacgugguuguu

SEQ ID NO: 1990229 - RNA, 19 nt, Homo sapiens
  misc_RNA (1)...(19): siRNA sense strand
ggacuggcaugcuaaacca

SEQ ID NO: 1990230 - RNA, 19 nt, Homo sapiens
  misc_RNA (1)...(19): siRNA sense strand
gaaagugagcaaucagaug

SEQ ID NO: 1990231 - RNA, 19 nt, Homo sapiens
  misc_RNA (1)...(19): siRNA sense strand
gauauuccagcuucaguuu

SEQ ID NO: 1990232 - RNA, 19 nt, Homo sapiens
  misc_RNA (1)...(19): siRNA sense strand
gaugaacuucugacacuuu

SEQ ID NO: 1990233 - RNA, 19 nt, Homo sapiens
  misc_RNA (1)...(19): siRNA sense strand
gaauuauugugauguccuu

SEQ ID NO: 1990234 - RNA, 19 nt, Homo sapiens
  misc_RNA (1)...(19): siRNA sense strand
gaauggaugucgcccuuac

SEQ ID NO: 1990235 - RNA, 19 nt, Homo sapiens
  misc_RNA (1)...(19): siRNA sense strand
ggacuuucaccaucccaua

SEQ ID NO: 1990236 - RNA, 19 nt, Homo sapiens
  misc_RNA (1)...(19): siRNA sense strand
uuacugugauguacucauu

SEQ ID NO: 1990237 - RNA, 19 nt, Homo sapiens
  misc_RNA (1)...(19): siRNA sense strand
gcaacccuaugaacaauac

SEQ ID NO: 1990238 - RNA, 19 nt, Homo sapiens
  misc_RNA (1)...(19): siRNA sense strand
ccucucagcucgccacaga

SEQ ID NO: 1990239 - RNA, 19 nt, Homo sapiens
  misc_RNA (1)...(19): siRNA sense strand
cuagguaguucuuccuuug

SEQ ID NO: 1990240 - RNA, 19 nt, Homo sapiens
  misc_RNA (1)...(19): siRNA sense strand
ucaccaagccugaguuaga

SEQ ID NO: 1990241 - RNA, 19 nt, Homo sapiens
  misc_RNA (1)...(19): siRNA sense strand
ugaguuagaugcaugugau

SEQ ID NO: 1990242 - RNA, 19 nt, Homo sapiens
  misc_RNA (1)...(19): siRNA sense strand
aauggauccugagaaauua

SEQ ID NO: 1990243 - RNA, 19 nt, Homo sapiens
  misc_RNA (1)...(19): siRNA sense strand
aaagugagcaaucagauga

SEQ ID NO: 1990244 - RNA, 19 nt, Homo sapiens
  misc_RNA (1)...(19): siRNA sense strand
guuucacacuggauucaua

SEQ ID NO: 1990245 - RNA, 19 nt, Homo sapiens
  misc_RNA (1)...(19): siRNA sense strand
ccaaaagcccuuauauuaa

SEQ ID NO: 1990246 - RNA, 19 nt, Homo sapiens
  misc_RNA (1)...(19): siRNA sense strand
uagcugagaugagaaagga

SEQ ID NO: 1990247 - RNA, 19 nt, Homo sapiens
  misc_RNA (1)...(19): siRNA sense strand
gaggacaggcuccaauaga

SEQ ID NO: 1990248 - RNA, 19 nt, Homo sapiens
  misc_RNA (1)...(19): siRNA sense strand
ggaauuggacuuucaccau

SEQ ID NO: 1990249 - RNA, 19 nt, Homo sapiens
  misc_RNA (1)...(19): siRNA sense strand
gaagucauucugugaggaa

SEQ ID NO: 1990250 - RNA, 19 nt, Homo sapiens
  misc_RNA (1)...(19): siRNA sense strand
gcacagauuuugaacgaau

SEQ ID NO: 1990251 - RNA, 19 nt, Homo sapiens
  misc_RNA (1)...(19): siRNA sense strand
gauugaaggcaaagaaaga

SEQ ID NO: 1990252 - RNA, 19 nt, Homo sapiens
  misc_RNA (1)...(19): siRNA sense strand
gaauaucguguccaagaug

SEQ ID NO: 1990253 - RNA, 19 nt, Homo sapiens
  misc_RNA (1)...(19): siRNA sense strand
gaggaaauggccaaggaaa

SEQ ID NO: 1990254 - RNA, 19 nt, Homo sapiens
  misc_RNA (1)...(19): siRNA sense strand
ccaggaggcuuuggaaugg

SEQ ID NO: 1990255 - RNA, 19 nt, Homo sapiens
  misc_RNA (1)...(19): siRNA sense strand
ucaggaaagugagcaauca

SEQ ID NO: 1990256 - RNA, 19 nt, Homo sapiens
  misc_RNA (1)...(19): siRNA sense strand
uacaaucugugaccagcua

SEQ ID NO: 1990257 - RNA, 19 nt, Homo sapiens
  misc_RNA (1)...(19): siRNA sense strand
gggcaacccuaugaacaau

SEQ ID NO: 1990258 - RNA, 19 nt, Homo sapiens
  misc_RNA (1)...(19): siRNA sense strand
gguugggacuggcaugcua

SEQ ID NO: 1990259 - RNA, 19 nt, Homo sapiens
  misc_RNA (1)...(19): siRNA sense strand
agaccacgcugcccuagug

SEQ ID NO: 1990260 - RNA, 19 nt, Homo sapiens
  misc_RNA (1)...(19): siRNA sense strand
agaaaucggagaagucauu

SEQ ID NO: 1990261 - RNA, 19 nt, Homo sapiens
  misc_RNA (1)...(19): siRNA sense strand
uaaccuaaaggacaacuug

SEQ ID NO: 1990262 - RNA, 19 nt, Homo sapiens
  misc_RNA (1)...(19): siRNA sense strand
aaugaugccuggucugaau

SEQ ID NO: 1990263 - RNA, 19 nt, Homo sapiens
  misc_RNA (1)...(19): siRNA sense strand
aagaauaucguguccaaga

SEQ ID NO: 1990264 - RNA, 19 nt, Homo sapiens
  misc_RNA (1)...(19): siRNA sense strand
cagagcaggugaagaaggu

SEQ ID NO: 1990265 - RNA, 19 nt, Homo sapiens
  misc_RNA (1)...(19): siRNA sense strand
aaggacaacuugaaagaca

SEQ ID NO: 1990266 - RNA, 19 nt, Homo sapiens
  misc_RNA (1)...(19): siRNA sense strand
ggaaagugagcaaucagau

SEQ ID NO: 1990267 - RNA, 19 nt, Homo sapiens
  misc_RNA (1)...(19): siRNA sense strand
ccacuacacaguauacaau

SEQ ID NO: 1990268 - RNA, 19 nt, Homo sapiens
  misc_RNA (1)...(19): siRNA sense strand
gaaccgacccaacuacaac

SEQ ID NO: 1990269 - RNA, 19 nt, Homo sapiens
  misc_RNA (1)...(19): siRNA sense strand
ucuguaaucucuacucuac

SEQ ID NO: 1990270 - RNA, 19 nt, Homo sapiens
  misc_RNA (1)...(19): siRNA sense strand
gaugucgcccuuacuguga

SEQ ID NO: 1990271 - RNA, 19 nt, Homo sapiens
  misc_RNA (1)...(19): siRNA sense strand
caauuaagucgaucacugu

SEQ ID NO: 1990272 - RNA, 19 nt, Homo sapiens
  misc_RNA (1)...(19): siRNA sense strand
uacaaucugucaccuaagu

SEQ ID NO: 1990273 - RNA, 19 nt, Homo sapiens
  misc_RNA (1)...(19): siRNA sense strand
acacaaagggagauuuaga

SEQ ID NO: 1990274 - RNA, 19 nt, Homo sapiens
  misc_RNA (1)...(19): siRNA sense strand
gaaauggauccugagaaau

SEQ ID NO: 1990275 - RNA, 19 nt, Homo sapiens
  misc_RNA (1)...(19): siRNA sense strand
gaugagaaaggaggaaaug

SEQ ID NO: 1990276 - RNA, 19 nt, Homo sapiens
  misc_RNA (1)...(19): siRNA sense strand
caauagcugagaugagaaa

SEQ ID NO: 1990277 - RNA, 19 nt, Homo sapiens
  misc_RNA (1)...(19): siRNA sense strand
auucugaacuacugaguga

SEQ ID NO: 1990278 - RNA, 19 nt, Homo sapiens
  misc_RNA (1)...(19): siRNA sense strand
caccaauucugaacuacug

SEQ ID NO: 1990279 - RNA, 19 nt, Homo sapiens
  misc_RNA (1)...(19): siRNA sense strand
gacaggcuccaauagauau

SEQ ID NO: 1990280 - RNA, 19 nt, Homo sapiens
  misc_RNA (1)...(19): siRNA sense strand
caaggagacgugguuguuu

SEQ ID NO: 1990281 - RNA, 19 nt, Homo sapiens
  misc_RNA (1)...(19): siRNA sense strand
ccuaaaggacaacuugaaa

SEQ ID NO: 1990282 - RNA, 19 nt, Homo sapiens
  misc_RNA (1)...(19): siRNA sense strand
gaccaggaauuggacuuuc

SEQ ID NO: 1990283 - RNA, 19 nt, Homo sapiens
  misc_RNA (1)...(19): siRNA sense strand
cuacugggcaacccuauga

SEQ ID NO: 1990284 - RNA, 19 nt, Homo sapiens
  misc_RNA (1)...(19): siRNA sense strand
cacaucuucuagagugaua

SEQ ID NO: 1990285 - RNA, 19 nt, Homo sapiens
  misc_RNA (1)...(19): siRNA sense strand
guuagaugcaugugaugua

SEQ ID NO: 1990286 - RNA, 19 nt, Homo sapiens
  misc_RNA (1)...(19): siRNA sense strand
aaagacacccucaaagaca

SEQ ID NO: 1990287 - RNA, 19 nt, Homo sapiens
  misc_RNA (1)...(19): siRNA sense strand
gaacgaaugaaagaauauc

SEQ ID NO: 1990288 - RNA, 19 nt, Homo sapiens
  misc_RNA (1)...(19): siRNA sense strand
ggacuggccuggagcauuu

SEQ ID NO: 1990289 - RNA, 19 nt, Homo sapiens
  misc_RNA (1)...(19): siRNA sense strand
gagaagcggucagcaauuu

SEQ ID NO: 1990290 - RNA, 19 nt, Homo sapiens
  misc_RNA (1)...(19): siRNA sense strand
gauauuacuuucacacuga

SEQ ID NO: 1990291 - RNA, 19 nt, Homo sapiens
  misc_RNA (1)...(19): siRNA sense strand
ggaggagucugcugaagaa

SEQ ID NO: 1990292 - RNA, 19 nt, Homo sapiens
  misc_RNA (1)...(19): siRNA sense strand
cuuaagagcuuucaacuug

SEQ ID NO: 1990293 - RNA, 19 nt, Homo sapiens
  misc_RNA (1)...(19): siRNA sense strand
ggagucagauacagaguuu

SEQ ID NO: 1990294 - RNA, 19 nt, Homo sapiens
  misc_RNA (1)...(19): siRNA sense strand
acacagaucucaaccagaa

SEQ ID NO: 1990295 - RNA, 19 nt, Homo sapiens
  misc_RNA (1)...(19): siRNA sense strand
ugaccuggauguccucuua

SEQ ID NO: 1990296 - RNA, 19 nt, Homo sapiens
  misc_RNA (1)...(19): siRNA sense strand
ccagaggugcuuagaauua

SEQ ID NO: 1990297 - RNA, 19 nt, Homo sapiens
  misc_RNA (1)...(19): siRNA sense strand
ggaagcgcauuacuuucua

SEQ ID NO: 1990298 - RNA, 19 nt, Homo sapiens
  misc_RNA (1)...(19): siRNA sense strand
gagaagggauauuacuuuc

SEQ ID NO: 1990299 - RNA, 19 nt, Homo sapiens
  misc_RNA (1)...(19): siRNA sense strand
gaugaagaccucgaaauaa

SEQ ID NO: 1990300 - RNA, 19 nt, Homo sapiens
  misc_RNA (1)...(19): siRNA sense strand
ugagucggcuucagaauug

SEQ ID NO: 1990301 - RNA, 19 nt, Homo sapiens
  misc_RNA (1)...(19): siRNA sense strand
gaauugcgcucucucugau

SEQ ID NO: 1990302 - RNA, 19 nt, Homo sapiens
  misc_RNA (1)...(19): siRNA sense strand
ggaacuggauaucugagaa

SEQ ID NO: 1990303 - RNA, 19 nt, Homo sapiens
  misc_RNA (1)...(19): siRNA sense strand
ccagaggacuauucacuau

SEQ ID NO: 1990304 - RNA, 19 nt, Homo sapiens
  misc_RNA (1)...(19): siRNA sense strand
gaagaccucgaaauaauug

SEQ ID NO: 1990305 - RNA, 19 nt, Homo sapiens
  misc_RNA (1)...(19): siRNA sense strand
ugaugaagaccucgaaaua

SEQ ID NO: 1990306 - RNA, 19 nt, Homo sapiens
  misc_RNA (1)...(19): siRNA sense strand
gaaaagccccuccuuacua

SEQ ID NO: 1990307 - RNA, 19 nt, Homo sapiens
  misc_RNA (1)...(19): siRNA sense strand
gaagaaaagccccuccuua

SEQ ID NO: 1990308 - RNA, 19 nt, Homo sapiens
  misc_RNA (1)...(19): siRNA sense strand
gcaauagcaaggccaguaa

SEQ ID NO: 1990309 - RNA, 19 nt, Homo sapiens
  misc_RNA (1)...(19): siRNA sense strand
gaagggauauuacuuucac

SEQ ID NO: 1990310 - RNA, 19 nt, Homo sapiens
  misc_RNA (1)...(19): siRNA sense strand
gugacgcucugaagaauug

SEQ ID NO: 1990311 - RNA, 19 nt, Homo sapiens
  misc_RNA (1)...(19): siRNA sense strand
gcucugaagaauuggauua

SEQ ID NO: 1990312 - RNA, 19 nt, Homo sapiens
  misc_RNA (1)...(19): siRNA sense strand
gggacgauguuaaguuuca

SEQ ID NO: 1990313 - RNA, 19 nt, Homo sapiens
  misc_RNA (1)...(19): siRNA sense strand
ggaauuauaucuggaagcu

SEQ ID NO: 1990314 - RNA, 19 nt, Homo sapiens
  misc_RNA (1)...(19): siRNA sense strand
gaaggaauuauaucuggaa

SEQ ID NO: 1990315 - RNA, 19 nt, Homo sapiens
  misc_RNA (1)...(19): siRNA sense strand
ugauagcucuguucuggaa

SEQ ID NO: 1990316 - RNA, 19 nt, Homo sapiens
  misc_RNA (1)...(19): siRNA sense strand
gaaaccaaaucggaagcaa

SEQ ID NO: 1990317 - RNA, 19 nt, Homo sapiens
  misc_RNA (1)...(19): siRNA sense strand
ugagaagggauauuacuuu

SEQ ID NO: 1990318 - RNA, 19 nt, Homo sapiens
  misc_RNA (1)...(19): siRNA sense strand
agucagagcccucaucaaa

SEQ ID NO: 1990319 - RNA, 19 nt, Homo sapiens
  misc_RNA (1)...(19): siRNA sense strand
ggaccaaccagaacucuuc

SEQ ID NO: 1990320 - RNA, 19 nt, Homo sapiens
  misc_RNA (1)...(19): siRNA sense strand
gagcaauagaugcauuuaa

SEQ ID NO: 1990321 - RNA, 19 nt, Homo sapiens
  misc_RNA (1)...(19): siRNA sense strand
gcagaaaaguaaagaacaa

SEQ ID NO: 1990322 - RNA, 19 nt, Homo sapiens
  misc_RNA (1)...(19): siRNA sense strand
gcccucaguuugcaaagaa

SEQ ID NO: 1990323 - RNA, 19 nt, Homo sapiens
  misc_RNA (1)...(19): siRNA sense strand
cagauacaaccuaggaaua

SEQ ID NO: 1990324 - RNA, 19 nt, Homo sapiens
  misc_RNA (1)...(19): siRNA sense strand
cuagugagaagggauauua

SEQ ID NO: 1990325 - RNA, 19 nt, Homo sapiens
  misc_RNA (1)...(19): siRNA sense strand
gaagucagagcccucauca

SEQ ID NO: 1990326 - RNA, 19 nt, Homo sapiens
  misc_RNA (1)...(19): siRNA sense strand
aaagcgcccucaacucuga

SEQ ID NO: 1990327 - RNA, 19 nt, Homo sapiens
  misc_RNA (1)...(19): siRNA sense strand
aaccaaaucggaagcaaua

SEQ ID NO: 1990328 - RNA, 19 nt, Homo sapiens
  misc_RNA (1)...(19): siRNA sense strand
uaagagcuuucaacuugga

SEQ ID NO: 1990329 - RNA, 19 nt, Homo sapiens
  misc_RNA (1)...(19): siRNA sense strand
uaacccaggcggagaauga

SEQ ID NO: 1990330 - RNA, 19 nt, Homo sapiens
  misc_RNA (1)...(19): siRNA sense strand
augaagaccucgaaauaau

SEQ ID NO: 1990331 - RNA, 19 nt, Homo sapiens
  misc_RNA (1)...(19): siRNA sense strand
cccggagacuucauccuua

SEQ ID NO: 1990332 - RNA, 19 nt, Homo sapiens
  misc_RNA (1)...(19): siRNA sense strand
gagcaggaaucagcagcaa

SEQ ID NO: 1990333 - RNA, 19 nt, Homo sapiens
  misc_RNA (1)...(19): siRNA sense strand
aaaccacuccuuagaagaa

SEQ ID NO: 1990334 - RNA, 19 nt, Homo sapiens
  misc_RNA (1)...(19): siRNA sense strand
agaaaccacuccuuagaag

SEQ ID NO: 1990335 - RNA, 19 nt, Homo sapiens
  misc_RNA (1)...(19): siRNA sense strand
gcaaagaaagagcaggaau

SEQ ID NO: 1990336 - RNA, 19 nt, Homo sapiens
  misc_RNA (1)...(19): siRNA sense strand
ggaggaacuggauaucuga

SEQ ID NO: 1990337 - RNA, 19 nt, Homo sapiens
  misc_RNA (1)...(19): siRNA sense strand
gcaagcagaaugggaagaa

SEQ ID NO: 1990338 - RNA, 19 nt, Homo sapiens
  misc_RNA (1)...(19): siRNA sense strand
gaaaccacuccuuagaaga

SEQ ID NO: 1990339 - RNA, 19 nt, Homo sapiens
  misc_RNA (1)...(19): siRNA sense strand
ccaguaacauccaauacag

SEQ ID NO: 1990340 - RNA, 19 nt, Homo sapiens
  misc_RNA (1)...(19): siRNA sense strand
ccugcaaucucugggaaua

SEQ ID NO: 1990341 - RNA, 19 nt, Homo sapiens
  misc_RNA (1)...(19): siRNA sense strand
guaaccaucucggcuagug

SEQ ID NO: 1990342 - RNA, 19 nt, Homo sapiens
  misc_RNA (1)...(19): siRNA sense strand
ccaagaagcccagaaccaa

SEQ ID NO: 1990343 - RNA, 19 nt, Homo sapiens
  misc_RNA (1)...(19): siRNA sense strand
ucgaugacuuucucuguga

SEQ ID NO: 1990344 - RNA, 19 nt, Homo sapiens
  misc_RNA (1)...(19): siRNA sense strand
gcaggaaucagcagcaagu

SEQ ID NO: 1990345 - RNA, 19 nt, Homo sapiens
  misc_RNA (1)...(19): siRNA sense strand
gauacaaccuaggaauaag

SEQ ID NO: 1990346 - RNA, 19 nt, Homo sapiens
  misc_RNA (1)...(19): siRNA sense strand
gaguggagaauuuaauaga

SEQ ID NO: 1990347 - RNA, 19 nt, Homo sapiens
  misc_RNA (1)...(19): siRNA sense strand
ccuuagaucuagacauuca

SEQ ID NO: 1990348 - RNA, 19 nt, Homo sapiens
  misc_RNA (1)...(19): siRNA sense strand
uaaagaacaaggauaugga

SEQ ID NO: 1990349 - RNA, 19 nt, Homo sapiens
  misc_RNA (1)...(19): siRNA sense strand
ugaagaccucgaaauaauu

SEQ ID NO: 1990350 - RNA, 19 nt, Homo sapiens
  misc_RNA (1)...(19): siRNA sense strand
caaagaaagagcaggaauc

SEQ ID NO: 1990351 - RNA, 19 nt, Homo sapiens
  misc_RNA (1)...(19): siRNA sense strand
acaaggauauggaaaacua

SEQ ID NO: 1990352 - RNA, 19 nt, Homo sapiens
  misc_RNA (1)...(19): siRNA sense strand
ggccuuggcugugaguuau

SEQ ID NO: 1990353 - RNA, 19 nt, Homo sapiens
  misc_RNA (1)...(19): siRNA sense strand
gaaugaaaaugaacaagca

SEQ ID NO: 1990354 - RNA, 19 nt, Homo sapiens
  misc_RNA (1)...(19): siRNA sense strand
cggaggaacuggauaucug

SEQ ID NO: 1990355 - RNA, 19 nt, Homo sapiens
  misc_RNA (1)...(19): siRNA sense strand
caagcagaaugggaagaaa

SEQ ID NO: 1990356 - RNA, 19 nt, Homo sapiens
  misc_RNA (1)...(19): siRNA sense strand
gaagcgcauuacuuucuag

SEQ ID NO: 1990357 - RNA, 19 nt, Homo sapiens
  misc_RNA (1)...(19): siRNA sense strand
cuagaaaccacuccuuaga

SEQ ID NO: 1990358 - RNA, 19 nt, Homo sapiens
  misc_RNA (1)...(19): siRNA sense strand
ucuggaagcugcccaccaa

SEQ ID NO: 1990359 - RNA, 19 nt, Homo sapiens
  misc_RNA (1)...(19): siRNA sense strand
uagaaaccacuccuuagaa

SEQ ID NO: 1990360 - RNA, 19 nt, Homo sapiens
  misc_RNA (1)...(19): siRNA sense strand
gggaagcgcauuacuuucu

SEQ ID NO: 1990361 - RNA, 19 nt, Homo sapiens
  misc_RNA (1)...(19): siRNA sense strand
aaagaaagagcaggaauca

SEQ ID NO: 1990362 - RNA, 19 nt, Homo sapiens
  misc_RNA (1)...(19): siRNA sense strand
agauacaaccuaggaauaa

SEQ ID NO: 1990363 - RNA, 19 nt, Homo sapiens
  misc_RNA (1)...(19): siRNA sense strand
cuccagaggugcuuagaau

SEQ ID NO: 1990364 - RNA, 19 nt, Homo sapiens
  misc_RNA (1)...(19): siRNA sense strand
ggacacaugcagaaaagua

SEQ ID NO: 1990365 - RNA, 19 nt, Homo sapiens
  misc_RNA (1)...(19): siRNA sense strand
guaaagaacaaggauaugg

SEQ ID NO: 1990366 - RNA, 19 nt, Homo sapiens
  misc_RNA (1)...(19): siRNA sense strand
guucauggaagcagcaauu

SEQ ID NO: 1990367 - RNA, 19 nt, Homo sapiens
  misc_RNA (1)...(19): siRNA sense strand
gaaccaagaagcccagaac

SEQ ID NO: 1990368 - RNA, 19 nt, Homo sapiens
  misc_RNA (1)...(19): siRNA sense strand
aagcagcaguggagucaga

SEQ ID NO: 1990369 - RNA, 19 nt, Homo sapiens
  misc_RNA (1)...(19): siRNA sense strand
gggaggagucugcugaaga

SEQ ID NO: 1990370 - RNA, 19 nt, Homo sapiens
  misc_RNA (1)...(19): siRNA sense strand
ggauaacccaggcggagaa

SEQ ID NO: 1990371 - RNA, 19 nt, Homo sapiens
  misc_RNA (1)...(19): siRNA sense strand
auccuuagaucuagacauu

SEQ ID NO: 1990372 - RNA, 19 nt, Homo sapiens
  misc_RNA (1)...(19): siRNA sense strand
gauaagaugcaagcagaau

SEQ ID NO: 1990373 - RNA, 19 nt, Homo sapiens
  misc_RNA (1)...(19): siRNA sense strand
gauacagaguuuugggaua

SEQ ID NO: 1990374 - RNA, 19 nt, Homo sapiens
  misc_RNA (1)...(19): siRNA sense strand
aaaucauccucaucuagaa

SEQ ID NO: 1990375 - RNA, 19 nt, Homo sapiens
  misc_RNA (1)...(19): siRNA sense strand
ugaaugagcaacaagaaag

SEQ ID NO: 1990376 - RNA, 19 nt, Homo sapiens
  misc_RNA (1)...(19): siRNA sense strand
gccagaggacuauucacua

SEQ ID NO: 1990377 - RNA, 19 nt, Homo sapiens
  misc_RNA (1)...(19): siRNA sense strand
gaacaaggauauggaaaac

SEQ ID NO: 1990378 - RNA, 19 nt, Homo sapiens
  misc_RNA (1)...(19): siRNA sense strand
ggauaucugagaaccaaga

SEQ ID NO: 1990379 - RNA, 19 nt, Homo sapiens
  misc_RNA (1)...(19): siRNA sense strand
gcucuuaugguccucagaa

SEQ ID NO: 1990380 - RNA, 19 nt, Homo sapiens
  misc_RNA (1)...(19): siRNA sense strand
ccaaagccaagaagucaga

SEQ ID NO: 1990381 - RNA, 19 nt, Homo sapiens
  misc_RNA (1)...(19): siRNA sense strand
cagagaagcggucagcaau

SEQ ID NO: 1990382 - RNA, 19 nt, Homo sapiens
  misc_RNA (1)...(19): siRNA sense strand
gagacuucauccuuagauc

SEQ ID NO: 1990383 - RNA, 19 nt, Homo sapiens
  misc_RNA (1)...(19): siRNA sense strand
aaacuaagcagugaugaag

SEQ ID NO: 1990384 - RNA, 19 nt, Homo sapiens
  misc_RNA (1)...(19): siRNA sense strand
agaggacuauucacuaugg

SEQ ID NO: 1990385 - RNA, 19 nt, Homo sapiens
  misc_RNA (1)...(19): siRNA sense strand
cauggaagcagcaauucuu

SEQ ID NO: 1990386 - RNA, 19 nt, Homo sapiens
  misc_RNA (1)...(19): siRNA sense strand
ggacauccaauggcagaga

SEQ ID NO: 1990387 - RNA, 19 nt, Homo sapiens
  misc_RNA (1)...(19): siRNA sense strand
aaagaacaaggauauggaa

SEQ ID NO: 1990388 - RNA, 19 nt, Homo sapiens
  misc_RNA (1)...(19): siRNA sense strand
gaagauauccggugcaaau

SEQ ID NO: 1990389 - RNA, 19 nt, Homo sapiens
  misc_RNA (1)...(19): siRNA sense strand
caacaagaguucugaagau

SEQ ID NO: 1990390 - RNA, 19 nt, Homo sapiens
  misc_RNA (1)...(19): siRNA sense strand
caagaguucugaagauauc

SEQ ID NO: 1990391 - RNA, 19 nt, Homo sapiens
  misc_RNA (1)...(19): siRNA sense strand
aaacaucagugggcacauu

SEQ ID NO: 1990392 - RNA, 19 nt, Homo sapiens
  misc_RNA (1)...(19): siRNA sense strand
aacaagaguucugaagaua

SEQ ID NO: 1990393 - RNA, 19 nt, Homo sapiens
  misc_RNA (1)...(19): siRNA sense strand
ggcacaagaugcucagcua

SEQ ID NO: 1990394 - RNA, 19 nt, Homo sapiens
  misc_RNA (1)...(19): siRNA sense strand
cugagcaacugcacaauga

SEQ ID NO: 1990395 - RNA, 19 nt, Homo sapiens
  misc_RNA (1)...(19): siRNA sense strand
cuacauggccuuccugaug

SEQ ID NO: 1990396 - RNA, 19 nt, Homo sapiens
  misc_RNA (1)...(19): siRNA sense strand
acaaugaggaggagaauga

SEQ ID NO: 1990397 - RNA, 19 nt, Homo sapiens
  misc_RNA (1)...(19): siRNA sense strand
ccaucaaggucaucauugu

SEQ ID NO: 1990398 - RNA, 19 nt, Homo sapiens
  misc_RNA (1)...(19): siRNA sense strand
ggucaucauugucaucuac

SEQ ID NO: 1990399 - RNA, 19 nt, Homo sapiens
  misc_RNA (1)...(19): siRNA sense strand
ccaacaagaguucugaaga

SEQ ID NO: 1990400 - RNA, 19 nt, Homo sapiens
  misc_RNA (1)...(19): siRNA sense strand
aaaugcaucuguccaccuu

SEQ ID NO: 1990401 - RNA, 19 nt, Homo sapiens
  misc_RNA (1)...(19): siRNA sense strand
gcacauuuacaaccagaau

SEQ ID NO: 1990402 - RNA, 19 nt, Homo sapiens
  misc_RNA (1)...(19): siRNA sense strand
ugaggaugcucgcucuaug

SEQ ID NO: 1990403 - RNA, 19 nt, Homo sapiens
  misc_RNA (1)...(19): siRNA sense strand
ucagugggcacauuuacaa

SEQ ID NO: 1990404 - RNA, 19 nt, Homo sapiens
  misc_RNA (1)...(19): siRNA sense strand
gcacaaugaggaggagaau

SEQ ID NO: 1990405 - RNA, 19 nt, Homo sapiens
  misc_RNA (1)...(19): siRNA sense strand
gcaucuguccaccuuauag

SEQ ID NO: 1990406 - RNA, 19 nt, Homo sapiens
  misc_RNA (1)...(19): siRNA sense strand
acaagaguucugaagauau

SEQ ID NO: 1990407 - RNA, 19 nt, Homo sapiens
  misc_RNA (1)...(19): siRNA sense strand
gcaccaccaccaucaaggu

SEQ ID NO: 1990408 - RNA, 19 nt, Homo sapiens
  misc_RNA (1)...(19): siRNA sense strand
gcugaagccaacaagaguu

SEQ ID NO: 1990409 - RNA, 19 nt, Homo sapiens
  misc_RNA (1)...(19): siRNA sense strand
caccaucaaggucaucauu

SEQ ID NO: 1990410 - RNA, 19 nt, Homo sapiens
  misc_RNA (1)...(19): siRNA sense strand
cugaagauauccggugcaa

SEQ ID NO: 1990411 - RNA, 19 nt, Homo sapiens
  misc_RNA (1)...(19): siRNA sense strand
ugggugcccuguugcucua

SEQ ID NO: 1990412 - RNA, 19 nt, Homo sapiens
  misc_RNA (1)...(19): siRNA sense strand
cagcugaagccaacaagag

SEQ ID NO: 1990413 - RNA, 19 nt, Homo sapiens
  misc_RNA (1)...(19): siRNA sense strand
gaggaugcucgcucuaugg

SEQ ID NO: 1990414 - RNA, 19 nt, Homo sapiens
  misc_RNA (1)...(19): siRNA sense strand
augcaucuguccaccuuau

SEQ ID NO: 1990415 - RNA, 19 nt, Homo sapiens
  misc_RNA (1)...(19): siRNA sense strand
uggcuguggucggguguuu

SEQ ID NO: 1990416 - RNA, 19 nt, Homo sapiens
  misc_RNA (1)...(19): siRNA sense strand
gcagcaccaccaccaucaa

SEQ ID NO: 1990417 - RNA, 19 nt, Homo sapiens
  misc_RNA (1)...(19): siRNA sense strand
caucuguccaccuuauaga

SEQ ID NO: 1990418 - RNA, 19 nt, Homo sapiens
  misc_RNA (1)...(19): siRNA sense strand
ggaggagaaugaggaugcu

SEQ ID NO: 1990419 - RNA, 19 nt, Homo sapiens
  misc_RNA (1)...(19): siRNA sense strand
uggacccucugauccgaaa

SEQ ID NO: 1990420 - RNA, 19 nt, Homo sapiens
  misc_RNA (1)...(19): siRNA sense strand
gaagccaacaagaguucug

SEQ ID NO: 1990421 - RNA, 19 nt, Homo sapiens
  misc_RNA (1)...(19): siRNA sense strand
ugaagcugguggugaauuu

SEQ ID NO: 1990422 - RNA, 19 nt, Homo sapiens
  misc_RNA (1)...(19): siRNA sense strand
ugaauuuccucuucuacuu

SEQ ID NO: 1990423 - RNA, 19 nt, Homo sapiens
  misc_RNA (1)...(19): siRNA sense strand
gaauuuccucuucuacuuu

SEQ ID NO: 1990424 - RNA, 19 nt, Homo sapiens
  misc_RNA (1)...(19): siRNA sense strand
gguggugaauuuccucuuc

SEQ ID NO: 1990425 - RNA, 19 nt, Homo sapiens
  misc_RNA (1)...(19): siRNA sense strand
ggaacgaaauccggaaggu

SEQ ID NO: 1990426 - RNA, 19 nt, Homo sapiens
  misc_RNA (1)...(19): siRNA sense strand
gcagagucguccgggaaga

SEQ ID NO: 1990427 - RNA, 19 nt, Homo sapiens
  misc_RNA (1)...(19): siRNA sense strand
uggugaagcugguggugaa

SEQ ID NO: 1990428 - RNA, 19 nt, Homo sapiens
  misc_RNA (1)...(19): siRNA sense strand
gcagcgaggagcaguguca

SEQ ID NO: 1990429 - RNA, 19 nt, Homo sapiens
  misc_RNA (1)...(19): siRNA sense strand
ggaaggugacgggcaagga

SEQ ID NO: 1990430 - RNA, 19 nt, Homo sapiens
  misc_RNA (1)...(19): siRNA sense strand
uggugaauuuccucuucua

SEQ ID NO: 1990431 - RNA, 19 nt, Homo sapiens
  misc_RNA (1)...(19): siRNA sense strand
cccggcaccuucuccauca

SEQ ID NO: 1990432 - RNA, 19 nt, Homo sapiens
  misc_RNA (1)...(19): siRNA sense strand
uugaggacccugagaggaa

SEQ ID NO: 1990433 - RNA, 19 nt, Homo sapiens
  misc_RNA (1)...(19): siRNA sense strand
gagaagaccagaucuauga

SEQ ID NO: 1990434 - RNA, 19 nt, Homo sapiens
  misc_RNA (1)...(19): siRNA sense strand
ggacauguuugcacuacuu

SEQ ID NO: 1990435 - RNA, 19 nt, Homo sapiens
  misc_RNA (1)...(19): siRNA sense strand
gaaggugucagccacaaga

SEQ ID NO: 1990436 - RNA, 19 nt, Homo sapiens
  misc_RNA (1)...(19): siRNA sense strand
ggagaagaccagaucuaug

SEQ ID NO: 1990437 - RNA, 19 nt, Homo sapiens
  misc_RNA (1)...(19): siRNA sense strand
gagaaggugucagccacaa

SEQ ID NO: 1990438 - RNA, 19 nt, Homo sapiens
  misc_RNA (1)...(19): siRNA sense strand
ggacucuacccuccucuga

SEQ ID NO: 1990439 - RNA, 19 nt, Homo sapiens
  misc_RNA (1)...(19): siRNA sense strand
acucuacccuccucugaaa

SEQ ID NO: 1990440 - RNA, 19 nt, Homo sapiens
  misc_RNA (1)...(19): siRNA sense strand
gugcagacauugguguuuc

SEQ ID NO: 1990441 - RNA, 19 nt, Homo sapiens
  misc_RNA (1)...(19): siRNA sense strand
cuaugaagcccaccaacaa

SEQ ID NO: 1990442 - RNA, 19 nt, Homo sapiens
  misc_RNA (1)...(19): siRNA sense strand
ccucuggacucaaauaaaa

SEQ ID NO: 1990443 - RNA, 19 nt, Homo sapiens
  misc_RNA (1)...(19): siRNA sense strand
gaagaccagaucuaugaag

SEQ ID NO: 1990444 - RNA, 19 nt, Homo sapiens
  misc_RNA (1)...(19): siRNA sense strand
ggugucagccacaagagaa

SEQ ID NO: 1990445 - RNA, 19 nt, Homo sapiens
  misc_RNA (1)...(19): siRNA sense strand
gaggggcucuggaggcauu

SEQ ID NO: 1990446 - RNA, 19 nt, Homo sapiens
  misc_RNA (1)...(19): siRNA sense strand
ggcugggagugcagacauu

SEQ ID NO: 1990447 - RNA, 19 nt, Homo sapiens
  misc_RNA (1)...(19): siRNA sense strand
gaucuaugaagcccaccaa

SEQ ID NO: 1990448 - RNA, 19 nt, Homo sapiens
  misc_RNA (1)...(19): siRNA sense strand
uggagaagaccagaucuau

SEQ ID NO: 1990449 - RNA, 19 nt, Homo sapiens
  misc_RNA (1)...(19): siRNA sense strand
caggacauguuugcacuac

SEQ ID NO: 1990450 - RNA, 19 nt, Homo sapiens
  misc_RNA (1)...(19): siRNA sense strand
gcucuggaggcauugcuau

SEQ ID NO: 1990451 - RNA, 19 nt, Homo sapiens
  misc_RNA (1)...(19): siRNA sense strand
gaagaacacacauuacuau

SEQ ID NO: 1990452 - RNA, 19 nt, Homo sapiens
  misc_RNA (1)...(19): siRNA sense strand
gaacacacauuacuaugac

SEQ ID NO: 1990453 - RNA, 19 nt, Homo sapiens
  misc_RNA (1)...(19): siRNA sense strand
caacuacuaugccuucuuc

SEQ ID NO: 1990454 - RNA, 19 nt, Homo sapiens
  misc_RNA (1)...(19): siRNA sense strand
gcaagaacgucuacaaagc

SEQ ID NO: 1990455 - RNA, 19 nt, Homo sapiens
  misc_RNA (1)...(19): siRNA sense strand
ggagggcgcugucauuguc

SEQ ID NO: 1990456 - RNA, 19 nt, Homo sapiens
  misc_RNA (1)...(19): siRNA sense strand
ggaagcagcacacaagaca

SEQ ID NO: 1990457 - RNA, 19 nt, Homo sapiens
  misc_RNA (1)...(19): siRNA sense strand
gacuucaacuggcgcauga

SEQ ID NO: 1990458 - RNA, 19 nt, Homo sapiens
  misc_RNA (1)...(19): siRNA sense strand
ugaagaacacacauuacua

SEQ ID NO: 1990459 - RNA, 19 nt, Homo sapiens
  misc_RNA (1)...(19): siRNA sense strand
uaucagcuguacucccuaa

SEQ ID NO: 1990460 - RNA, 19 nt, Homo sapiens
  misc_RNA (1)...(19): siRNA sense strand
cagcuguacucccuaaugu

SEQ ID NO: 1990461 - RNA, 19 nt, Homo sapiens
  misc_RNA (1)...(19): siRNA sense strand
gcgcugucauugucuauca

SEQ ID NO: 1990462 - RNA, 19 nt, Homo sapiens
  misc_RNA (1)...(19): siRNA sense strand
gggcaaggccuacucauac

SEQ ID NO: 1990463 - RNA, 19 nt, Homo sapiens
  misc_RNA (1)...(19): siRNA sense strand
cagcaagaacgucuacaaa

SEQ ID NO: 1990464 - RNA, 19 nt, Homo sapiens
  misc_RNA (1)...(19): siRNA sense strand
gcagugagguggaguuccu

SEQ ID NO: 1990465 - RNA, 19 nt, Homo sapiens
  misc_RNA (1)...(19): siRNA sense strand
gcugagcgccuacuaugug

SEQ ID NO: 1990466 - RNA, 19 nt, Homo sapiens
  misc_RNA (1)...(19): siRNA sense strand
ucccuaauguccucugaaa

SEQ ID NO: 1990467 - RNA, 19 nt, Homo sapiens
  misc_RNA (1)...(19): siRNA sense strand
gcacacaagacagcuguau

SEQ ID NO: 1990468 - RNA, 19 nt, Homo sapiens
  misc_RNA (1)...(19): siRNA sense strand
gggacuaccuccugacacu

SEQ ID NO: 1990469 - RNA, 19 nt, Homo sapiens
  misc_RNA (1)...(19): siRNA sense strand
agaacacacauuacuauga

SEQ ID NO: 1990470 - RNA, 19 nt, Homo sapiens
  misc_RNA (1)...(19): siRNA sense strand
ucaguggccuggcaaagag

SEQ ID NO: 1990471 - RNA, 19 nt, Homo sapiens
  misc_RNA (1)...(19): siRNA sense strand
ccucugacgucucccacuu

SEQ ID NO: 1990472 - RNA, 19 nt, Homo sapiens
  misc_RNA (1)...(19): siRNA sense strand
ggaccuacuccuuccugaa

SEQ ID NO: 1990473 - RNA, 19 nt, Homo sapiens
  misc_RNA (1)...(19): siRNA sense strand
ucgugaagaacacacauua

SEQ ID NO: 1990474 - RNA, 19 nt, Homo sapiens
  misc_RNA (1)...(19): siRNA sense strand
ccuacuauguggccuuugu

SEQ ID NO: 1990475 - RNA, 19 nt, Homo sapiens
  misc_RNA (1)...(19): siRNA sense strand
ccacuuccgcuuccauuuc

SEQ ID NO: 1990476 - RNA, 19 nt, Homo sapiens
  misc_RNA (1)...(19): siRNA sense strand
gcuggagggcgcugucauu

SEQ ID NO: 1990477 - RNA, 19 nt, Homo sapiens
  misc_RNA (1)...(19): siRNA sense strand
acacaagacagcuguaugg

SEQ ID NO: 1990478 - RNA, 19 nt, Homo sapiens
  misc_RNA (1)...(19): siRNA sense strand
gcaccuccgugauccucau

SEQ ID NO: 1990479 - RNA, 19 nt, Homo sapiens
  misc_RNA (1)...(19): siRNA sense strand
ggauguacauuccguuccu

SEQ ID NO: 1990480 - RNA, 19 nt, Homo sapiens
  misc_RNA (1)...(19): siRNA sense strand
ucaacuggcgcaugaagga

SEQ ID NO: 1990481 - RNA, 19 nt, Homo sapiens
  misc_RNA (1)...(19): siRNA sense strand
gugaagaacacacauuacu

SEQ ID NO: 1990482 - RNA, 19 nt, Homo sapiens
  misc_RNA (1)...(19): siRNA sense strand
ggcaaggccuacucauacu

SEQ ID NO: 1990483 - RNA, 19 nt, Homo sapiens
  misc_RNA (1)...(19): siRNA sense strand
gcaacuacuaugccuucuu

SEQ ID NO: 1990484 - RNA, 19 nt, Homo sapiens
  misc_RNA (1)...(19): siRNA sense strand
gcacagcaagaacgucuac

SEQ ID NO: 1990485 - RNA, 19 nt, Homo sapiens
  misc_RNA (1)...(19): siRNA sense strand
acaaagccguaggccacua

SEQ ID NO: 1990486 - RNA, 19 nt, Homo sapiens
  misc_RNA (1)...(19): siRNA sense strand
cuacuaugccuucuucaag

SEQ ID NO: 1990487 - RNA, 19 nt, Homo sapiens
  misc_RNA (1)...(19): siRNA sense strand
ugggcaaggccuacucaua

SEQ ID NO: 1990488 - RNA, 19 nt, Homo sapiens
  misc_RNA (1)...(19): siRNA sense strand
cagcacccguggacugaag

SEQ ID NO: 1990489 - RNA, 19 nt, Homo sapiens
  misc_RNA (1)...(19): siRNA sense strand
uggaguuccucaagaugga

SEQ ID NO: 1990490 - RNA, 19 nt, Homo sapiens
  misc_RNA (1)...(19): siRNA sense strand
gaccuacuccuuccugaac

SEQ ID NO: 1990491 - RNA, 19 nt, Homo sapiens
  misc_RNA (1)...(19): siRNA sense strand
gcgcugguccugugaacuc

SEQ ID NO: 1990492 - RNA, 19 nt, Homo sapiens
  misc_RNA (1)...(19): siRNA sense strand
ggacugaagaaugcaugug

SEQ ID NO: 1990493 - RNA, 19 nt, Homo sapiens
  misc_RNA (1)...(19): siRNA sense strand
gucaguggccuggcaaaga

SEQ ID NO: 1990494 - RNA, 19 nt, Homo sapiens
  misc_RNA (1)...(19): siRNA sense strand
guuccucugcuauccguuu

SEQ ID NO: 1990495 - RNA, 19 nt, Homo sapiens
  misc_RNA (1)...(19): siRNA sense strand
gaagacagcucgugaaauc

SEQ ID NO: 1990496 - RNA, 19 nt, Homo sapiens
  misc_RNA (1)...(19): siRNA sense strand
gagcucaguugggauuuaa

SEQ ID NO: 1990497 - RNA, 19 nt, Homo sapiens
  misc_RNA (1)...(19): siRNA sense strand
ggagcucaguugggauuua

SEQ ID NO: 1990498 - RNA, 19 nt, Homo sapiens
  misc_RNA (1)...(19): siRNA sense strand
acaaugaguugacccaguu

SEQ ID NO: 1990499 - RNA, 19 nt, Homo sapiens
  misc_RNA (1)...(19): siRNA sense strand
gcuucuuucccuacaauua

SEQ ID NO: 1990500 - RNA, 19 nt, Homo sapiens
  misc_RNA (1)...(19): siRNA sense strand
gcgcuucuuucccuacaau

SEQ ID NO: 1990501 - RNA, 19 nt, Homo sapiens
  misc_RNA (1)...(19): siRNA sense strand
ugacucugaugcacauaga

SEQ ID NO: 1990502 - RNA, 19 nt, Homo sapiens
  misc_RNA (1)...(19): siRNA sense strand
gaaccaucacacugaagaa

SEQ ID NO: 1990503 - RNA, 19 nt, Homo sapiens
  misc_RNA (1)...(19): siRNA sense strand
acagccggauuccuuauga

SEQ ID NO: 1990504 - RNA, 19 nt, Homo sapiens
  misc_RNA (1)...(19): siRNA sense strand
caaggugauuccugacucu

SEQ ID NO: 1990505 - RNA, 19 nt, Homo sapiens
  misc_RNA (1)...(19): siRNA sense strand
ggacagccggauuccuuau

SEQ ID NO: 1990506 - RNA, 19 nt, Homo sapiens
  misc_RNA (1)...(19): siRNA sense strand
gcaaggcuguugagauccu

SEQ ID NO: 1990507 - RNA, 19 nt, Homo sapiens
  misc_RNA (1)...(19): siRNA sense strand
ggugauuccugacucugau

SEQ ID NO: 1990508 - RNA, 19 nt, Homo sapiens
  misc_RNA (1)...(19): siRNA sense strand
agagaggacugugcacuag

SEQ ID NO: 1990509 - RNA, 19 nt, Homo sapiens
  misc_RNA (1)...(19): siRNA sense strand
aggaaaggccucccagcua

SEQ ID NO: 1990510 - RNA, 19 nt, Homo sapiens
  misc_RNA (1)...(19): siRNA sense strand
ggaaggggaccaaguucua

SEQ ID NO: 1990511 - RNA, 19 nt, Homo sapiens
  misc_RNA (1)...(19): siRNA sense strand
cgaaccaucacacugaaga

SEQ ID NO: 1990512 - RNA, 19 nt, Homo sapiens
  misc_RNA (1)...(19): siRNA sense strand
uaacauccgaggaggaaag

SEQ ID NO: 1990513 - RNA, 19 nt, Homo sapiens
  misc_RNA (1)...(19): siRNA sense strand
aagagaggacugugcacua

SEQ ID NO: 1990514 - RNA, 19 nt, Homo sapiens
  misc_RNA (1)...(19): siRNA sense strand
cagcuaggcaucuucaucu

SEQ ID NO: 1990515 - RNA, 19 nt, Homo sapiens
  misc_RNA (1)...(19): siRNA sense strand
gcaggaaggggaccaaguu

SEQ ID NO: 1990516 - RNA, 19 nt, Homo sapiens
  misc_RNA (1)...(19): siRNA sense strand
cugaagacagcucgugaaa

SEQ ID NO: 1990517 - RNA, 19 nt, Homo sapiens
  misc_RNA (1)...(19): siRNA sense strand
gaccaaguucuagcuguga

SEQ ID NO: 1990518 - RNA, 19 nt, Homo sapiens
  misc_RNA (1)...(19): siRNA sense strand
cacccggacuacaacaaug

SEQ ID NO: 1990519 - RNA, 19 nt, Homo sapiens
  misc_RNA (1)...(19): siRNA sense strand
gcucaguugggauuuaaca

SEQ ID NO: 1990520 - RNA, 19 nt, Homo sapiens
  misc_RNA (1)...(19): siRNA sense strand
gccggauuccuuaugauga

SEQ ID NO: 1990521 - RNA, 19 nt, Homo sapiens
  misc_RNA (1)...(19): siRNA sense strand
ucaguugggauuuaacauc

SEQ ID NO: 1990522 - RNA, 19 nt, Homo sapiens
  misc_RNA (1)...(19): siRNA sense strand
gaugacuacccggugguuu

SEQ ID NO: 1990523 - RNA, 19 nt, Homo sapiens
  misc_RNA (1)...(19): siRNA sense strand
gcaucuucaucuccaaggu

SEQ ID NO: 1990524 - RNA, 19 nt, Homo sapiens
  misc_RNA (1)...(19): siRNA sense strand
caacauaucugcacaggua

SEQ ID NO: 1990525 - RNA, 19 nt, Homo sapiens
  misc_RNA (1)...(19): siRNA sense strand
acaaugggcuucuuuauga

SEQ ID NO: 1990526 - RNA, 19 nt, Homo sapiens
  misc_RNA (1)...(19): siRNA sense strand
ucaggaaucuggcuggaua

SEQ ID NO: 1990527 - RNA, 19 nt, Homo sapiens
  misc_RNA (1)...(19): siRNA sense strand
gcacagguauuugggauca

SEQ ID NO: 1990528 - RNA, 19 nt, Homo sapiens
  misc_RNA (1)...(19): siRNA sense strand
caguacggcuccaucaaua

SEQ ID NO: 1990529 - RNA, 19 nt, Homo sapiens
  misc_RNA (1)...(19): siRNA sense strand
ucaaggagaaaccuaaaua

SEQ ID NO: 1990530 - RNA, 19 nt, Homo sapiens
  misc_RNA (1)...(19): siRNA sense strand
gagcuugccuaccacauca

SEQ ID NO: 1990531 - RNA, 19 nt, Homo sapiens
  misc_RNA (1)...(19): siRNA sense strand
gggaucaucuuuaccaucu

SEQ ID NO: 1990532 - RNA, 19 nt, Homo sapiens
  misc_RNA (1)...(19): siRNA sense strand
gcacaaugggcuucuuuau

SEQ ID NO: 1990533 - RNA, 19 nt, Homo sapiens
  misc_RNA (1)...(19): siRNA sense strand
ucaauaacaucuucaugca

SEQ ID NO: 1990534 - RNA, 19 nt, Homo sapiens
  misc_RNA (1)...(19): siRNA sense strand
gaaccaagccugggaacau

SEQ ID NO: 1990535 - RNA, 19 nt, Homo sapiens
  misc_RNA (1)...(19): siRNA sense strand
gaauugcgauuggguucuu

SEQ ID NO: 1990536 - RNA, 19 nt, Homo sapiens
  misc_RNA (1)...(19): siRNA sense strand
acagaaagcaaacaaagaa

SEQ ID NO: 1990537 - RNA, 19 nt, Homo sapiens
  misc_RNA (1)...(19): siRNA sense strand
ccacugggauuugaguuug

SEQ ID NO: 1990538 - RNA, 19 nt, Homo sapiens
  misc_RNA (1)...(19): siRNA sense strand
ugugcuacaugcugacuua

SEQ ID NO: 1990539 - RNA, 19 nt, Homo sapiens
  misc_RNA (1)...(19): siRNA sense strand
gggacgagcuugccuacca

SEQ ID NO: 1990540 - RNA, 19 nt, Homo sapiens
  misc_RNA (1)...(19): siRNA sense strand
guauuugggaucaucuuua

SEQ ID NO: 1990541 - RNA, 19 nt, Homo sapiens
  misc_RNA (1)...(19): siRNA sense strand
caucacugcuggcacaaug

SEQ ID NO: 1990542 - RNA, 19 nt, Homo sapiens
  misc_RNA (1)...(19): siRNA sense strand
caaagagacaacccuggua

SEQ ID NO: 1990543 - RNA, 19 nt, Homo sapiens
  misc_RNA (1)...(19): siRNA sense strand
gagcaacaccagcaaagug

SEQ ID NO: 1990544 - RNA, 19 nt, Homo sapiens
  misc_RNA (1)...(19): siRNA sense strand
agaagugaaugcuggaaga

SEQ ID NO: 1990545 - RNA, 19 nt, Homo sapiens
  misc_RNA (1)...(19): siRNA sense strand
ccagauuauugacaacuau

SEQ ID NO: 1990546 - RNA, 19 nt, Homo sapiens
  misc_RNA (1)...(19): siRNA sense strand
gccagauuauugacaacua

SEQ ID NO: 1990547 - RNA, 19 nt, Homo sapiens
  misc_RNA (1)...(19): siRNA sense strand
gcauggugguguacacguu

SEQ ID NO: 1990548 - RNA, 19 nt, Homo sapiens
  misc_RNA (1)...(19): siRNA sense strand
uggcuuggcugcuggagaa

SEQ ID NO: 1990549 - RNA, 19 nt, Homo sapiens
  misc_RNA (1)...(19): siRNA sense strand
gaaagcaaacaaagaaacu

SEQ ID NO: 1990550 - RNA, 19 nt, Homo sapiens
  misc_RNA (1)...(19): siRNA sense strand
gcugugaucucaggaaucu

SEQ ID NO: 1990551 - RNA, 19 nt, Homo sapiens
  misc_RNA (1)...(19): siRNA sense strand
caaggagaaaccuaaauau

SEQ ID NO: 1990552 - RNA, 19 nt, Homo sapiens
  misc_RNA (1)...(19): siRNA sense strand
ccucauccuugucaucauu

SEQ ID NO: 1990553 - RNA, 19 nt, Homo sapiens
  misc_RNA (1)...(19): siRNA sense strand
agugaaugcuggaagaauu

SEQ ID NO: 1990554 - RNA, 19 nt, Homo sapiens
  misc_RNA (1)...(19): siRNA sense strand
gacagaaagcaaacaaaga

SEQ ID NO: 1990555 - RNA, 19 nt, Homo sapiens
  misc_RNA (1)...(19): siRNA sense strand
ggagacagaaagcaaacaa

SEQ ID NO: 1990556 - RNA, 19 nt, Homo sapiens
  misc_RNA (1)...(19): siRNA sense strand
gaauuggccugacgaucgu

SEQ ID NO: 1990557 - RNA, 19 nt, Homo sapiens
  misc_RNA (1)...(19): siRNA sense strand
gagcucacguacccagaau

SEQ ID NO: 1990558 - RNA, 19 nt, Homo sapiens
  misc_RNA (1)...(19): siRNA sense strand
gcuacaugcugacuuacau

SEQ ID NO: 1990559 - RNA, 19 nt, Homo sapiens
  misc_RNA (1)...(19): siRNA sense strand
caacccugguagucuauau

SEQ ID NO: 1990560 - RNA, 19 nt, Homo sapiens
  misc_RNA (1)...(19): siRNA sense strand
caucaccuauggucugaau

SEQ ID NO: 1990561 - RNA, 19 nt, Homo sapiens
  misc_RNA (1)...(19): siRNA sense strand
cagcaucauguucuauaua

SEQ ID NO: 1990562 - RNA, 19 nt, Homo sapiens
  misc_RNA (1)...(19): siRNA sense strand
gcaacuccuuucaguggau

SEQ ID NO: 1990563 - RNA, 19 nt, Homo sapiens
  misc_RNA (1)...(19): siRNA sense strand
ucacguacccagaaucaga

SEQ ID NO: 1990564 - RNA, 19 nt, Homo sapiens
  misc_RNA (1)...(19): siRNA sense strand
gaagugaaugcuggaagaa

SEQ ID NO: 1990565 - RNA, 19 nt, Homo sapiens
  misc_RNA (1)...(19): siRNA sense strand
gguagucuauaucaugaca

SEQ ID NO: 1990566 - RNA, 19 nt, Homo sapiens
  misc_RNA (1)...(19): siRNA sense strand
gccuugaccucuccugaug

SEQ ID NO: 1990567 - RNA, 19 nt, Homo sapiens
  misc_RNA (1)...(19): siRNA sense strand
ggagagcaacaccagcaaa

SEQ ID NO: 1990568 - RNA, 19 nt, Homo sapiens
  misc_RNA (1)...(19): siRNA sense strand
gcacuucuacggugucagu

SEQ ID NO: 1990569 - RNA, 19 nt, Homo sapiens
  misc_RNA (1)...(19): siRNA sense strand
ccugaugccucauacuuag

SEQ ID NO: 1990570 - RNA, 19 nt, Homo sapiens
  misc_RNA (1)...(19): siRNA sense strand
ucagugccuuugccauuga

SEQ ID NO: 1990571 - RNA, 19 nt, Homo sapiens
  misc_RNA (1)...(19): siRNA sense strand
ucagcaucauguucuauau

SEQ ID NO: 1990572 - RNA, 19 nt, Homo sapiens
  misc_RNA (1)...(19): siRNA sense strand
gggcugugaucucaggaau

SEQ ID NO: 1990573 - RNA, 19 nt, Homo sapiens
  misc_RNA (1)...(19): siRNA sense strand
gcauggugaucuggcacua

SEQ ID NO: 1990574 - RNA, 19 nt, Homo sapiens
  misc_RNA (1)...(19): siRNA sense strand
guguacacguuuaccuuga

SEQ ID NO: 1990575 - RNA, 19 nt, Homo sapiens
  misc_RNA (1)...(19): siRNA sense strand
gagacagaaagcaaacaaa

SEQ ID NO: 1990576 - RNA, 19 nt, Homo sapiens
  misc_RNA (1)...(19): siRNA sense strand
cacaaugggcuucuuuaug

SEQ ID NO: 1990577 - RNA, 19 nt, Homo sapiens
  misc_RNA (1)...(19): siRNA sense strand
cugguagucuauaucauga

SEQ ID NO: 1990578 - RNA, 19 nt, Homo sapiens
  misc_RNA (1)...(19): siRNA sense strand
gcucacguacccagaauca

SEQ ID NO: 1990579 - RNA, 19 nt, Homo sapiens
  misc_RNA (1)...(19): siRNA sense strand
gucagugccuuugccauug

SEQ ID NO: 1990580 - RNA, 19 nt, Homo sapiens
  misc_RNA (1)...(19): siRNA sense strand
ggcacaaugggcuucuuua

SEQ ID NO: 1990581 - RNA, 19 nt, Homo sapiens
  misc_RNA (1)...(19): siRNA sense strand
ccugaagccgcaucucuuu

SEQ ID NO: 1990582 - RNA, 19 nt, Homo sapiens
  misc_RNA (1)...(19): siRNA sense strand
cagaaagcaaacaaagaaa

SEQ ID NO: 1990583 - RNA, 19 nt, Homo sapiens
  misc_RNA (1)...(19): siRNA sense strand
gguauuugggaucaucuuu

SEQ ID NO: 1990584 - RNA, 19 nt, Homo sapiens
  misc_RNA (1)...(19): siRNA sense strand
ggagcucacguacccagaa

SEQ ID NO: 1990585 - RNA, 19 nt, Homo sapiens
  misc_RNA (1)...(19): siRNA sense strand
ccaguacggcuccaucaau

SEQ ID NO: 1990586 - RNA, 19 nt, Homo sapiens
  misc_RNA (1)...(19): siRNA sense strand
gagagcaacaccagcaaag

SEQ ID NO: 1990587 - RNA, 19 nt, Homo sapiens
  misc_RNA (1)...(19): siRNA sense strand
gcccucacugcauucauua

SEQ ID NO: 1990588 - RNA, 19 nt, Homo sapiens
  misc_RNA (1)...(19): siRNA sense strand
gaagaagugaaugcuggaa

SEQ ID NO: 1990589 - RNA, 19 nt, Homo sapiens
  misc_RNA (1)...(19): siRNA sense strand
gugaaugcuggaagaauug

SEQ ID NO: 1990590 - RNA, 19 nt, Homo sapiens
  misc_RNA (1)...(19): siRNA sense strand
agacagaaagcaaacaaag

SEQ ID NO: 1990591 - RNA, 19 nt, Homo sapiens
  misc_RNA (1)...(19): siRNA sense strand
ucccagggccagauuauug

SEQ ID NO: 1990592 - RNA, 19 nt, Homo sapiens
  misc_RNA (1)...(19): siRNA sense strand
gaagaauuggccugacgau

SEQ ID NO: 1990593 - RNA, 19 nt, Homo sapiens
  misc_RNA (1)...(19): siRNA sense strand
guucaaggagaaaccuaaa

SEQ ID NO: 1990594 - RNA, 19 nt, Homo sapiens
  misc_RNA (1)...(19): siRNA sense strand
uauuugggaucaucuuuac

SEQ ID NO: 1990595 - RNA, 19 nt, Homo sapiens
  misc_RNA (1)...(19): siRNA sense strand
ugucagugccuuugccauu

SEQ ID NO: 1990596 - RNA, 19 nt, Homo sapiens
  misc_RNA (1)...(19): siRNA sense strand
gucaucaccuauggucuga

SEQ ID NO: 1990597 - RNA, 19 nt, Homo sapiens
  misc_RNA (1)...(19): siRNA sense strand
cauaucugcacagguauuu

SEQ ID NO: 1990598 - RNA, 19 nt, Homo sapiens
  misc_RNA (1)...(19): siRNA sense strand
uguacacguuuaccuugaa

SEQ ID NO: 1990599 - RNA, 19 nt, Homo sapiens
  misc_RNA (1)...(19): siRNA sense strand
ucauuguguucaaggagaa

SEQ ID NO: 1990600 - RNA, 19 nt, Homo sapiens
  misc_RNA (1)...(19): siRNA sense strand
aaggagaaaccuaaauauc

SEQ ID NO: 1990601 - RNA, 19 nt, Homo sapiens
  misc_RNA (1)...(19): siRNA sense strand
guacacguuuaccuugaac

SEQ ID NO: 1990602 - RNA, 19 nt, Homo sapiens
  misc_RNA (1)...(19): siRNA sense strand
ugaaucgcauggugaucug

SEQ ID NO: 1990603 - RNA, 19 nt, Homo sapiens
  misc_RNA (1)...(19): siRNA sense strand
ucccugagcuaugccuuga

SEQ ID NO: 1990604 - RNA, 19 nt, Homo sapiens
  misc_RNA (1)...(19): siRNA sense strand
guacggcuccaucaauaac

SEQ ID NO: 1990605 - RNA, 19 nt, Homo sapiens
  misc_RNA (1)...(19): siRNA sense strand
ccugguagucuauaucaug

SEQ ID NO: 1990606 - RNA, 19 nt, Homo sapiens
  misc_RNA (1)...(19): siRNA sense strand
gccgugguccugguguuua

SEQ ID NO: 1990607 - RNA, 19 nt, Homo sapiens
  misc_RNA (1)...(19): siRNA sense strand
caucaauaacaucuucaug

SEQ ID NO: 1990608 - RNA, 19 nt, Homo sapiens
  misc_RNA (1)...(19): siRNA sense strand
agaaacucuugagaacaaa

SEQ ID NO: 1990609 - RNA, 19 nt, Homo sapiens
  misc_RNA (1)...(19): siRNA sense strand
agcccucacugcauucauu

SEQ ID NO: 1990610 - RNA, 19 nt, Homo sapiens
  misc_RNA (1)...(19): siRNA sense strand
caucccagcgucuccauca

SEQ ID NO: 1990611 - RNA, 19 nt, Homo sapiens
  misc_RNA (1)...(19): siRNA sense strand
gauuauugacaacuaugga

SEQ ID NO: 1990612 - RNA, 19 nt, Homo sapiens
  misc_RNA (1)...(19): siRNA sense strand
uaggagguguggccacucu

SEQ ID NO: 1990613 - RNA, 19 nt, Homo sapiens
  misc_RNA (1)...(19): siRNA sense strand
cuccaucaauaacaucuuc

SEQ ID NO: 1990614 - RNA, 19 nt, Homo sapiens
  misc_RNA (1)...(19): siRNA sense strand
gcuaaugagguuucaacag

SEQ ID NO: 1990615 - RNA, 19 nt, Homo sapiens
  misc_RNA (1)...(19): siRNA sense strand
cuuggcugcuggagaaguu

SEQ ID NO: 1990616 - RNA, 19 nt, Homo sapiens
  misc_RNA (1)...(19): siRNA sense strand
uguccacucuucugaaucg

SEQ ID NO: 1990617 - RNA, 19 nt, Homo sapiens
  misc_RNA (1)...(19): siRNA sense strand
ucaacuuugugcugcuugu

SEQ ID NO: 1990618 - RNA, 19 nt, Homo sapiens
  misc_RNA (1)...(19): siRNA sense strand
cagcuuggaauugcgauug

SEQ ID NO: 1990619 - RNA, 19 nt, Homo sapiens
  misc_RNA (1)...(19): siRNA sense strand
gaggauaguagucacuuua

SEQ ID NO: 1990620 - RNA, 19 nt, Homo sapiens
  misc_RNA (1)...(19): siRNA sense strand
gauaguagucacuuuauug

SEQ ID NO: 1990621 - RNA, 19 nt, Homo sapiens
  misc_RNA (1)...(19): siRNA sense strand
aaaccagacuaccuuaauu

SEQ ID NO: 1990622 - RNA, 19 nt, Homo sapiens
  misc_RNA (1)...(19): siRNA sense strand
ggauaguagucacuuuauu

SEQ ID NO: 1990623 - RNA, 19 nt, Homo sapiens
  misc_RNA (1)...(19): siRNA sense strand
gagccaguuuccuaucuuu

SEQ ID NO: 1990624 - RNA, 19 nt, Homo sapiens
  misc_RNA (1)...(19): siRNA sense strand
ggccuuggcuuuccucuca

SEQ ID NO: 1990625 - RNA, 19 nt, Homo sapiens
  misc_RNA (1)...(19): siRNA sense strand
ccucaagcaccaucacuua

SEQ ID NO: 1990626 - RNA, 19 nt, Homo sapiens
  misc_RNA (1)...(19): siRNA sense strand
gaagccauagucacaguaa

SEQ ID NO: 1990627 - RNA, 19 nt, Homo sapiens
  misc_RNA (1)...(19): siRNA sense strand
ugguuugccuuccuuauuu

SEQ ID NO: 1990628 - RNA, 19 nt, Homo sapiens
  misc_RNA (1)...(19): siRNA sense strand
gcccaaagccagcauuaug

SEQ ID NO: 1990629 - RNA, 19 nt, Homo sapiens
  misc_RNA (1)...(19): siRNA sense strand
uuacucagauggcuuaugg

SEQ ID NO: 1990630 - RNA, 19 nt, Homo sapiens
  misc_RNA (1)...(19): siRNA sense strand
ucacuuuauuggccacuuu

SEQ ID NO: 1990631 - RNA, 19 nt, Homo sapiens
  misc_RNA (1)...(19): siRNA sense strand
aagacacagugcuaucaua

SEQ ID NO: 1990632 - RNA, 19 nt, Homo sapiens
  misc_RNA (1)...(19): siRNA sense strand
gcaagacacagugcuauca

SEQ ID NO: 1990633 - RNA, 19 nt, Homo sapiens
  misc_RNA (1)...(19): siRNA sense strand
gggaguagcauuccaccuu

SEQ ID NO: 1990634 - RNA, 19 nt, Homo sapiens
  misc_RNA (1)...(19): siRNA sense strand
caaaccagacuaccuuaau

SEQ ID NO: 1990635 - RNA, 19 nt, Homo sapiens
  misc_RNA (1)...(19): siRNA sense strand
ggagccaguuuccuaucuu

SEQ ID NO: 1990636 - RNA, 19 nt, Homo sapiens
  misc_RNA (1)...(19): siRNA sense strand
caccaucacuuaccuaacu

SEQ ID NO: 1990637 - RNA, 19 nt, Homo sapiens
  misc_RNA (1)...(19): siRNA sense strand
acacagugcuaucauacau

SEQ ID NO: 1990638 - RNA, 19 nt, Homo sapiens
  misc_RNA (1)...(19): siRNA sense strand
cauagucacaguaauaaug

SEQ ID NO: 1990639 - RNA, 19 nt, Homo sapiens
  misc_RNA (1)...(19): siRNA sense strand
aagccagcauuauguguaa

SEQ ID NO: 1990640 - RNA, 19 nt, Homo sapiens
  misc_RNA (1)...(19): siRNA sense strand
guuuaaagcccugaggaua

SEQ ID NO: 1990641 - RNA, 19 nt, Homo sapiens
  misc_RNA (1)...(19): siRNA sense strand
gaguagcauuccaccuuga

SEQ ID NO: 1990642 - RNA, 19 nt, Homo sapiens
  misc_RNA (1)...(19): siRNA sense strand
aauaauggguaugggagua

SEQ ID NO: 1990643 - RNA, 19 nt, Homo sapiens
  misc_RNA (1)...(19): siRNA sense strand
uaucccaacugguuuaaag

SEQ ID NO: 1990644 - RNA, 19 nt, Homo sapiens
  misc_RNA (1)...(19): siRNA sense strand
ucacaguaauaauggguau

SEQ ID NO: 1990645 - RNA, 19 nt, Homo sapiens
  misc_RNA (1)...(19): siRNA sense strand
cacauuaucccaacugguu

SEQ ID NO: 1990646 - RNA, 19 nt, Homo sapiens
  misc_RNA (1)...(19): siRNA sense strand
cagacuaccuuaauuuagc

SEQ ID NO: 1990647 - RNA, 19 nt, Homo sapiens
  misc_RNA (1)...(19): siRNA sense strand
gccauagucacaguaauaa

SEQ ID NO: 1990648 - RNA, 19 nt, Homo sapiens
  misc_RNA (1)...(19): siRNA sense strand
ugaggauaguagucacuuu

SEQ ID NO: 1990649 - RNA, 19 nt, Homo sapiens
  misc_RNA (1)...(19): siRNA sense strand
gcauuccaccuugaacuuu

SEQ ID NO: 1990650 - RNA, 19 nt, Homo sapiens
  misc_RNA (1)...(19): siRNA sense strand
ccaaaccagacuaccuuaa

SEQ ID NO: 1990651 - RNA, 19 nt, Homo sapiens
  misc_RNA (1)...(19): siRNA sense strand
aaagccagcauuaugugua

SEQ ID NO: 1990652 - RNA, 19 nt, Homo sapiens
  misc_RNA (1)...(19): siRNA sense strand
uuaaagcccugaggauagu

SEQ ID NO: 1990653 - RNA, 19 nt, Homo sapiens
  misc_RNA (1)...(19): siRNA sense strand
ccaguuuccuaucuuucuu

SEQ ID NO: 1990654 - RNA, 19 nt, Homo sapiens
  misc_RNA (1)...(19): siRNA sense strand
agccauagucacaguaaua

SEQ ID NO: 1990655 - RNA, 19 nt, Homo sapiens
  misc_RNA (1)...(19): siRNA sense strand
agaagguaguccagccaaa

SEQ ID NO: 1990656 - RNA, 19 nt, Homo sapiens
  misc_RNA (1)...(19): siRNA sense strand
cauuaucccaacugguuua

SEQ ID NO: 1990657 - RNA, 19 nt, Homo sapiens
  misc_RNA (1)...(19): siRNA sense strand
aaccagacuaccuuaauuu

SEQ ID NO: 1990658 - RNA, 19 nt, Homo sapiens
  misc_RNA (1)...(19): siRNA sense strand
gccaaaccagacuaccuua

SEQ ID NO: 1990659 - RNA, 19 nt, Homo sapiens
  misc_RNA (1)...(19): siRNA sense strand
cagcccaaagccagcauua

SEQ ID NO: 1990660 - RNA, 19 nt, Homo sapiens
  misc_RNA (1)...(19): siRNA sense strand
ccaaagccagcauuaugug

SEQ ID NO: 1990661 - RNA, 19 nt, Homo sapiens
  misc_RNA (1)...(19): siRNA sense strand
uuauggagccaguuuccua

SEQ ID NO: 1990662 - RNA, 19 nt, Homo sapiens
  misc_RNA (1)...(19): siRNA sense strand
aagacuuagugaagccaua

SEQ ID NO: 1990663 - RNA, 19 nt, Homo sapiens
  misc_RNA (1)...(19): siRNA sense strand
gguuugccuuccuuauuuc

SEQ ID NO: 1990664 - RNA, 19 nt, Homo sapiens
  misc_RNA (1)...(19): siRNA sense strand
ccagacuaccuuaauuuag

SEQ ID NO: 1990665 - RNA, 19 nt, Homo sapiens
  misc_RNA (1)...(19): siRNA sense strand
accagacuaccuuaauuua

SEQ ID NO: 1990666 - RNA, 19 nt, Homo sapiens
  misc_RNA (1)...(19): siRNA sense strand
gaagguaguccagccaaac

SEQ ID NO: 1990667 - RNA, 19 nt, Homo sapiens
  misc_RNA (1)...(19): siRNA sense strand
ucugaaagacuuagugaag

SEQ ID NO: 1990668 - RNA, 19 nt, Homo sapiens
  misc_RNA (1)...(19): siRNA sense strand
uauaugagcaagacacagu

SEQ ID NO: 1990669 - RNA, 19 nt, Homo sapiens
  misc_RNA (1)...(19): siRNA sense strand
ccucucauuuccagcguau

SEQ ID NO: 1990670 - RNA, 19 nt, Homo sapiens
  misc_RNA (1)...(19): siRNA sense strand
caaagccagcauuaugugu

SEQ ID NO: 1990671 - RNA, 19 nt, Homo sapiens
  misc_RNA (1)...(19): siRNA sense strand
cagcguauaugagcaagac

SEQ ID NO: 1990672 - RNA, 19 nt, Homo sapiens
  misc_RNA (1)...(19): siRNA sense strand
ucucauuuccagcguauau

SEQ ID NO: 1990673 - RNA, 19 nt, Homo sapiens
  misc_RNA (1)...(19): siRNA sense strand
guaacucuggcaggacuaa

SEQ ID NO: 1990674 - RNA, 19 nt, Homo sapiens
  misc_RNA (1)...(19): siRNA sense strand
uugccuuccuuauuucuga

SEQ ID NO: 1990675 - RNA, 19 nt, Homo sapiens
  misc_RNA (1)...(19): siRNA sense strand
caagacacagugcuaucau

SEQ ID NO: 1990676 - RNA, 19 nt, Homo sapiens
  misc_RNA (1)...(19): siRNA sense strand
cccaaagccagcauuaugu

SEQ ID NO: 1990677 - RNA, 19 nt, Homo sapiens
  misc_RNA (1)...(19): siRNA sense strand
cagaugggguuuugcucua

SEQ ID NO: 1990678 - RNA, 19 nt, Homo sapiens
  misc_RNA (1)...(19): siRNA sense strand
gggaucagaugggguuuug

SEQ ID NO: 1990679 - RNA, 19 nt, Homo sapiens
  misc_RNA (1)...(19): siRNA sense strand
ggguaugggaguagcauuc

SEQ ID NO: 1990680 - RNA, 19 nt, Homo sapiens
  misc_RNA (1)...(19): siRNA sense strand
caagcaccaucacuuaccu

SEQ ID NO: 1990681 - RNA, 19 nt, Homo sapiens
  misc_RNA (1)...(19): siRNA sense strand
uuuaaagcccugaggauag

SEQ ID NO: 1990682 - RNA, 19 nt, Homo sapiens
  misc_RNA (1)...(19): siRNA sense strand
gaugagagauucuguauug

SEQ ID NO: 1990683 - RNA, 19 nt, Homo sapiens
  misc_RNA (1)...(19): siRNA sense strand
ggauuaaccucccaggaua

SEQ ID NO: 1990684 - RNA, 19 nt, Homo sapiens
  misc_RNA (1)...(19): siRNA sense strand
guaauugucuggaucguuu

SEQ ID NO: 1990685 - RNA, 19 nt, Homo sapiens
  misc_RNA (1)...(19): siRNA sense strand
gaacaucguuaccguaucu

SEQ ID NO: 1990686 - RNA, 19 nt, Homo sapiens
  misc_RNA (1)...(19): siRNA sense strand
ucaccgagcuguuauccua

SEQ ID NO: 1990687 - RNA, 19 nt, Homo sapiens
  misc_RNA (1)...(19): siRNA sense strand
gaaggcagcgccaauaaga

SEQ ID NO: 1990688 - RNA, 19 nt, Homo sapiens
  misc_RNA (1)...(19): siRNA sense strand
gauacaacauugaacagau

SEQ ID NO: 1990689 - RNA, 19 nt, Homo sapiens
  misc_RNA (1)...(19): siRNA sense strand
gagagauucuguauugaca

SEQ ID NO: 1990690 - RNA, 19 nt, Homo sapiens
  misc_RNA (1)...(19): siRNA sense strand
auacgcaggugauugcaua

SEQ ID NO: 1990691 - RNA, 19 nt, Homo sapiens
  misc_RNA (1)...(19): siRNA sense strand
gaaauacgcaggugauugc

SEQ ID NO: 1990692 - RNA, 19 nt, Homo sapiens
  misc_RNA (1)...(19): siRNA sense strand
ggaaauacgcaggugauug

SEQ ID NO: 1990693 - RNA, 19 nt, Homo sapiens
  misc_RNA (1)...(19): siRNA sense strand
gggauccugucuuucauug

SEQ ID NO: 1990694 - RNA, 19 nt, Homo sapiens
  misc_RNA (1)...(19): siRNA sense strand
gagaugauggcaacaaugu

SEQ ID NO: 1990695 - RNA, 19 nt, Homo sapiens
  misc_RNA (1)...(19): siRNA sense strand
gauccugucuuucauugag

SEQ ID NO: 1990696 - RNA, 19 nt, Homo sapiens
  misc_RNA (1)...(19): siRNA sense strand
gcucgagugcugaagauuu

SEQ ID NO: 1990697 - RNA, 19 nt, Homo sapiens
  misc_RNA (1)...(19): siRNA sense strand
ggagugggguguaauguga

SEQ ID NO: 1990698 - RNA, 19 nt, Homo sapiens
  misc_RNA (1)...(19): siRNA sense strand
gggaaaccaucgauauugc

SEQ ID NO: 1990699 - RNA, 19 nt, Homo sapiens
  misc_RNA (1)...(19): siRNA sense strand
guaugugaguggaggaaau

SEQ ID NO: 1990700 - RNA, 19 nt, Homo sapiens
  misc_RNA (1)...(19): siRNA sense strand
ggugugaaccacuguauag

SEQ ID NO: 1990701 - RNA, 19 nt, Homo sapiens
  misc_RNA (1)...(19): siRNA sense strand
auacaacauugaacagaug

SEQ ID NO: 1990702 - RNA, 19 nt, Homo sapiens
  misc_RNA (1)...(19): siRNA sense strand
ggauggacgucucauucuc

SEQ ID NO: 1990703 - RNA, 19 nt, Homo sapiens
  misc_RNA (1)...(19): siRNA sense strand
uggcccaacuguggaauaa

SEQ ID NO: 1990704 - RNA, 19 nt, Homo sapiens
  misc_RNA (1)...(19): siRNA sense strand
gacaauggagcgaugauag

SEQ ID NO: 1990705 - RNA, 19 nt, Homo sapiens
  misc_RNA (1)...(19): siRNA sense strand
gauauugcaguggguaauu

SEQ ID NO: 1990706 - RNA, 19 nt, Homo sapiens
  misc_RNA (1)...(19): siRNA sense strand
caggauaucgacugcauug

SEQ ID NO: 1990707 - RNA, 19 nt, Homo sapiens
  misc_RNA (1)...(19): siRNA sense strand
agagguaucggacagauga

SEQ ID NO: 1990708 - RNA, 19 nt, Homo sapiens
  misc_RNA (1)...(19): siRNA sense strand
ggauacaacauugaacaga

SEQ ID NO: 1990709 - RNA, 19 nt, Homo sapiens
  misc_RNA (1)...(19): siRNA sense strand
gaggaaauacgcaggugau

SEQ ID NO: 1990710 - RNA, 19 nt, Homo sapiens
  misc_RNA (1)...(19): siRNA sense strand
guaucggacagaugaagua

SEQ ID NO: 1990711 - RNA, 19 nt, Homo sapiens
  misc_RNA (1)...(19): siRNA sense strand
ggagaugauggcaacaaug

SEQ ID NO: 1990712 - RNA, 19 nt, Homo sapiens
  misc_RNA (1)...(19): siRNA sense strand
ggaacaucguuaccguauc

SEQ ID NO: 1990713 - RNA, 19 nt, Homo sapiens
  misc_RNA (1)...(19): siRNA sense strand
gauggacgucucauucuca

SEQ ID NO: 1990714 - RNA, 19 nt, Homo sapiens
  misc_RNA (1)...(19): siRNA sense strand
aggcaucaccgagcuguua

SEQ ID NO: 1990715 - RNA, 19 nt, Homo sapiens
  misc_RNA (1)...(19): siRNA sense strand
ugacaauggagcgaugaua

SEQ ID NO: 1990716 - RNA, 19 nt, Homo sapiens
  misc_RNA (1)...(19): siRNA sense strand
gcccaacuguggaauaagc

SEQ ID NO: 1990717 - RNA, 19 nt, Homo sapiens
  misc_RNA (1)...(19): siRNA sense strand
aggcagcgccaauaagauu

SEQ ID NO: 1990718 - RNA, 19 nt, Homo sapiens
  misc_RNA (1)...(19): siRNA sense strand
ucggacagaugaaguagag

SEQ ID NO: 1990719 - RNA, 19 nt, Homo sapiens
  misc_RNA (1)...(19): siRNA sense strand
gagcgagccauggcacauu

SEQ ID NO: 1990720 - RNA, 19 nt, Homo sapiens
  misc_RNA (1)...(19): siRNA sense strand
cgacccaaguccaggauac

SEQ ID NO: 1990721 - RNA, 19 nt, Homo sapiens
  misc_RNA (1)...(19): siRNA sense strand
uaugugaguggaggaaaua

SEQ ID NO: 1990722 - RNA, 19 nt, Homo sapiens
  misc_RNA (1)...(19): siRNA sense strand
gauuaaccucccaggauau

SEQ ID NO: 1990723 - RNA, 19 nt, Homo sapiens
  misc_RNA (1)...(19): siRNA sense strand
gcaaugcugguagagauca

SEQ ID NO: 1990724 - RNA, 19 nt, Homo sapiens
  misc_RNA (1)...(19): siRNA sense strand
uugcaaugcugguagagau

SEQ ID NO: 1990725 - RNA, 19 nt, Homo sapiens
  misc_RNA (1)...(19): siRNA sense strand
ggaaaccaucgauauugca

SEQ ID NO: 1990726 - RNA, 19 nt, Homo sapiens
  misc_RNA (1)...(19): siRNA sense strand
caucguuaccguaucuuug

SEQ ID NO: 1990727 - RNA, 19 nt, Homo sapiens
  misc_RNA (1)...(19): siRNA sense strand
cauacucggaacaucguua

SEQ ID NO: 1990728 - RNA, 19 nt, Homo sapiens
  misc_RNA (1)...(19): siRNA sense strand
cggaacaucguuaccguau

SEQ ID NO: 1990729 - RNA, 19 nt, Homo sapiens
  misc_RNA (1)...(19): siRNA sense strand
gggugugaaccacuguaua

SEQ ID NO: 1990730 - RNA, 19 nt, Homo sapiens
  misc_RNA (1)...(19): siRNA sense strand
caggauacaacauugaaca

SEQ ID NO: 1990731 - RNA, 19 nt, Homo sapiens
  misc_RNA (1)...(19): siRNA sense strand
guauaggccacauugagau

SEQ ID NO: 1990732 - RNA, 19 nt, Homo sapiens
  misc_RNA (1)...(19): siRNA sense strand
uguauaggccacauugaga

SEQ ID NO: 1990733 - RNA, 19 nt, Homo sapiens
  misc_RNA (1)...(19): siRNA sense strand
acauugaacagauggcaaa

SEQ ID NO: 1990734 - RNA, 19 nt, Homo sapiens
  misc_RNA (1)...(19): siRNA sense strand
cucgagugcugaagauuuc

SEQ ID NO: 1990735 - RNA, 19 nt, Homo sapiens
  misc_RNA (1)...(19): siRNA sense strand
aguccaggauacaacauug

SEQ ID NO: 1990736 - RNA, 19 nt, Homo sapiens
  misc_RNA (1)...(19): siRNA sense strand
uggauuaaccucccaggau

SEQ ID NO: 1990737 - RNA, 19 nt, Homo sapiens
  misc_RNA (1)...(19): siRNA sense strand
gagugcugaagauuucuaa

SEQ ID NO: 1990738 - RNA, 19 nt, Homo sapiens
  misc_RNA (1)...(19): siRNA sense strand
caggcuggcugggagaugu

SEQ ID NO: 1990739 - RNA, 19 nt, Homo sapiens
  misc_RNA (1)...(19): siRNA sense strand
ugucuuucauugaggaugu

SEQ ID NO: 1990740 - RNA, 19 nt, Homo sapiens
  misc_RNA (1)...(19): siRNA sense strand
uggcaaagcgaggcaagaa

SEQ ID NO: 1990741 - RNA, 19 nt, Homo sapiens
  misc_RNA (1)...(19): siRNA sense strand
ugcugaagauuucuaacga

SEQ ID NO: 1990742 - RNA, 19 nt, Homo sapiens
  misc_RNA (1)...(19): siRNA sense strand
ccaaguccaggauacaaca

SEQ ID NO: 1990743 - RNA, 19 nt, Homo sapiens
  misc_RNA (1)...(19): siRNA sense strand
uugaaggcagcgccaauaa

SEQ ID NO: 1990744 - RNA, 19 nt, Homo sapiens
  misc_RNA (1)...(19): siRNA sense strand
aggagaugauggcaacaau

SEQ ID NO: 1990745 - RNA, 19 nt, Homo sapiens
  misc_RNA (1)...(19): siRNA sense strand
gggauggacgucucauucu

SEQ ID NO: 1990746 - RNA, 19 nt, Homo sapiens
  misc_RNA (1)...(19): siRNA sense strand
ggacacaggaccccacuca

SEQ ID NO: 1990747 - RNA, 19 nt, Homo sapiens
  misc_RNA (1)...(19): siRNA sense strand
ggaagaugcuuucuacaaa

SEQ ID NO: 1990748 - RNA, 19 nt, Homo sapiens
  misc_RNA (1)...(19): siRNA sense strand
aagaggagcuugaggauga

SEQ ID NO: 1990749 - RNA, 19 nt, Homo sapiens
  misc_RNA (1)...(19): siRNA sense strand
gaaagugggagauacauug

SEQ ID NO: 1990750 - RNA, 19 nt, Homo sapiens
  misc_RNA (1)...(19): siRNA sense strand
caaguuacgugcaccaaau

SEQ ID NO: 1990751 - RNA, 19 nt, Homo sapiens
  misc_RNA (1)...(19): siRNA sense strand
gagggacaccuucaucaua

SEQ ID NO: 1990752 - RNA, 19 nt, Homo sapiens
  misc_RNA (1)...(19): siRNA sense strand
gguaugauguuguccugaa

SEQ ID NO: 1990753 - RNA, 19 nt, Homo sapiens
  misc_RNA (1)...(19): siRNA sense strand
gcaggaacagagacaguua

SEQ ID NO: 1990754 - RNA, 19 nt, Homo sapiens
  misc_RNA (1)...(19): siRNA sense strand
guuuaaaguugccuaagaa

SEQ ID NO: 1990755 - RNA, 19 nt, Homo sapiens
  misc_RNA (1)...(19): siRNA sense strand
agagaagacugaaagugaa

SEQ ID NO: 1990756 - RNA, 19 nt, Homo sapiens
  misc_RNA (1)...(19): siRNA sense strand
uacauuggaucuucucauu

SEQ ID NO: 1990757 - RNA, 19 nt, Homo sapiens
  misc_RNA (1)...(19): siRNA sense strand
ggcuauggcuaguguuaaa

SEQ ID NO: 1990758 - RNA, 19 nt, Homo sapiens
  misc_RNA (1)...(19): siRNA sense strand
gaagagaagacugaaagug

SEQ ID NO: 1990759 - RNA, 19 nt, Homo sapiens
  misc_RNA (1)...(19): siRNA sense strand
cuaagaagagaaugucuaa

SEQ ID NO: 1990760 - RNA, 19 nt, Homo sapiens
  misc_RNA (1)...(19): siRNA sense strand
ggagaaacaaaguggaaga

SEQ ID NO: 1990761 - RNA, 19 nt, Homo sapiens
  misc_RNA (1)...(19): siRNA sense strand
aagagaagacugaaaguga

SEQ ID NO: 1990762 - RNA, 19 nt, Homo sapiens
  misc_RNA (1)...(19): siRNA sense strand
ggauaaagaagcaggaaca

SEQ ID NO: 1990763 - RNA, 19 nt, Homo sapiens
  misc_RNA (1)...(19): siRNA sense strand
gagaagacugaaagugaaa

SEQ ID NO: 1990764 - RNA, 19 nt, Homo sapiens
  misc_RNA (1)...(19): siRNA sense strand
uuacgugcaccaaauuaua

SEQ ID NO: 1990765 - RNA, 19 nt, Homo sapiens
  misc_RNA (1)...(19): siRNA sense strand
uaaauugcuugccgguguu

SEQ ID NO: 1990766 - RNA, 19 nt, Homo sapiens
  misc_RNA (1)...(19): siRNA sense strand
uuuacuaucuccagaaugu

SEQ ID NO: 1990767 - RNA, 19 nt, Homo sapiens
  misc_RNA (1)...(19): siRNA sense strand
cauuggaucuucucauugg

SEQ ID NO: 1990768 - RNA, 19 nt, Homo sapiens
  misc_RNA (1)...(19): siRNA sense strand
uaaaguugccuaagaagag

SEQ ID NO: 1990769 - RNA, 19 nt, Homo sapiens
  misc_RNA (1)...(19): siRNA sense strand
ggacucugaugaagaaagc

SEQ ID NO: 1990770 - RNA, 19 nt, Homo sapiens
  misc_RNA (1)...(19): siRNA sense strand
ggaagaggagcuugaggau

SEQ ID NO: 1990771 - RNA, 19 nt, Homo sapiens
  misc_RNA (1)...(19): siRNA sense strand
ggcuagauauugggagaaa

SEQ ID NO: 1990772 - RNA, 19 nt, Homo sapiens
  misc_RNA (1)...(19): siRNA sense strand
gauauugggagaaacaaag

SEQ ID NO: 1990773 - RNA, 19 nt, Homo sapiens
  misc_RNA (1)...(19): siRNA sense strand
guggaaaaguuuaaaguug

SEQ ID NO: 1990774 - RNA, 19 nt, Homo sapiens
  misc_RNA (1)...(19): siRNA sense strand
aaaguugccuaagaagaga

SEQ ID NO: 1990775 - RNA, 19 nt, Homo sapiens
  misc_RNA (1)...(19): siRNA sense strand
ugagaugagugagcaggaa

SEQ ID NO: 1990776 - RNA, 19 nt, Homo sapiens
  misc_RNA (1)...(19): siRNA sense strand
uggaagaugcuuucuacaa

SEQ ID NO: 1990777 - RNA, 19 nt, Homo sapiens
  misc_RNA (1)...(19): siRNA sense strand
ugaagaaagccaucaugau

SEQ ID NO: 1990778 - RNA, 19 nt, Homo sapiens
  misc_RNA (1)...(19): siRNA sense strand
ggacaccuucaucauacaa

SEQ ID NO: 1990779 - RNA, 19 nt, Homo sapiens
  misc_RNA (1)...(19): siRNA sense strand
cauuggagaggauaaagaa

SEQ ID NO: 1990780 - RNA, 19 nt, Homo sapiens
  misc_RNA (1)...(19): siRNA sense strand
aguuuaaaguugccuaaga

SEQ ID NO: 1990781 - RNA, 19 nt, Homo sapiens
  misc_RNA (1)...(19): siRNA sense strand
uacgugcaccaaauuauaa

SEQ ID NO: 1990782 - RNA, 19 nt, Homo sapiens
  misc_RNA (1)...(19): siRNA sense strand
uauggcuaguguuaaauug

SEQ ID NO: 1990783 - RNA, 19 nt, Homo sapiens
  misc_RNA (1)...(19): siRNA sense strand
ccuaagaagagaaugucua

SEQ ID NO: 1990784 - RNA, 19 nt, Homo sapiens
  misc_RNA (1)...(19): siRNA sense strand
ccaaguuacgugcaccaaa

SEQ ID NO: 1990785 - RNA, 19 nt, Homo sapiens
  misc_RNA (1)...(19): siRNA sense strand
ugaaagugggagauacauu

SEQ ID NO: 1990786 - RNA, 19 nt, Homo sapiens
  misc_RNA (1)...(19): siRNA sense strand
aguggaagaugcuuucuac

SEQ ID NO: 1990787 - RNA, 19 nt, Homo sapiens
  misc_RNA (1)...(19): siRNA sense strand
gagaaacaaaguggaagau

SEQ ID NO: 1990788 - RNA, 19 nt, Homo sapiens
  misc_RNA (1)...(19): siRNA sense strand
ccguaagacucaaaaguaa

SEQ ID NO: 1990789 - RNA, 19 nt, Homo sapiens
  misc_RNA (1)...(19): siRNA sense strand
aaagaagcaggaacagaga

SEQ ID NO: 1990790 - RNA, 19 nt, Homo sapiens
  misc_RNA (1)...(19): siRNA sense strand
ggugaaagugggagauaca

SEQ ID NO: 1990791 - RNA, 19 nt, Homo sapiens
  misc_RNA (1)...(19): siRNA sense strand
guuaugcggauucucuuga

SEQ ID NO: 1990792 - RNA, 19 nt, Homo sapiens
  misc_RNA (1)...(19): siRNA sense strand
ccuggaaucgauacuugua

SEQ ID NO: 1990793 - RNA, 19 nt, Homo sapiens
  misc_RNA (1)...(19): siRNA sense strand
gaagacggggcuagauauu

SEQ ID NO: 1990794 - RNA, 19 nt, Homo sapiens
  misc_RNA (1)...(19): siRNA sense strand
agggacaccuucaucauac

SEQ ID NO: 1990795 - RNA, 19 nt, Homo sapiens
  misc_RNA (1)...(19): siRNA sense strand
gggacaccuucaucauaca

SEQ ID NO: 1990796 - RNA, 19 nt, Homo sapiens
  misc_RNA (1)...(19): siRNA sense strand
uuaaaguugccuaagaaga

SEQ ID NO: 1990797 - RNA, 19 nt, Homo sapiens
  misc_RNA (1)...(19): siRNA sense strand
uaugcggauucucuugaaa

SEQ ID NO: 1990798 - RNA, 19 nt, Homo sapiens
  misc_RNA (1)...(19): siRNA sense strand
uuaugcggauucucuugaa

SEQ ID NO: 1990799 - RNA, 19 nt, Homo sapiens
  misc_RNA (1)...(19): siRNA sense strand
uggagaggauaaagaagca

SEQ ID NO: 1990800 - RNA, 19 nt, Homo sapiens
  misc_RNA (1)...(19): siRNA sense strand
gaggauaaagaagcaggaa

SEQ ID NO: 1990801 - RNA, 19 nt, Homo sapiens
  misc_RNA (1)...(19): siRNA sense strand
guaugauguuguccugaag

SEQ ID NO: 1990802 - RNA, 19 nt, Homo sapiens
  misc_RNA (1)...(19): siRNA sense strand
uuacggcgguggaaaaguu

SEQ ID NO: 1990803 - RNA, 19 nt, Homo sapiens
  misc_RNA (1)...(19): siRNA sense strand
cuagauauugggagaaaca

SEQ ID NO: 1990804 - RNA, 19 nt, Homo sapiens
  misc_RNA (1)...(19): siRNA sense strand
aaacaaaguggaagaugcu

SEQ ID NO: 1990805 - RNA, 19 nt, Homo sapiens
  misc_RNA (1)...(19): siRNA sense strand
agagacaguuaugcggauu

SEQ ID NO: 1990806 - RNA, 19 nt, Homo sapiens
  misc_RNA (1)...(19): siRNA sense strand
aaacuauaaagaccuggaa

SEQ ID NO: 1990807 - RNA, 19 nt, Homo sapiens
  misc_RNA (1)...(19): siRNA sense strand
cuauggcuaguguuaaauu

SEQ ID NO: 1990808 - RNA, 19 nt, Homo sapiens
  misc_RNA (1)...(19): siRNA sense strand
aagcagaacggugaaagug

SEQ ID NO: 1990809 - RNA, 19 nt, Homo sapiens
  misc_RNA (1)...(19): siRNA sense strand
guuacgugcaccaaauuau

SEQ ID NO: 1990810 - RNA, 19 nt, Homo sapiens
  misc_RNA (1)...(19): siRNA sense strand
gaaugaaggugaaagguua

SEQ ID NO: 1990811 - RNA, 19 nt, Homo sapiens
  misc_RNA (1)...(19): siRNA sense strand
gaaagaagcagagaauaua

SEQ ID NO: 1990812 - RNA, 19 nt, Homo sapiens
  misc_RNA (1)...(19): siRNA sense strand
ugaaaugucucguguaauu

SEQ ID NO: 1990813 - RNA, 19 nt, Homo sapiens
  misc_RNA (1)...(19): siRNA sense strand
gaaauuucaucuccuauug

SEQ ID NO: 1990814 - RNA, 19 nt, Homo sapiens
  misc_RNA (1)...(19): siRNA sense strand
gauagaaacugcuacaaga

SEQ ID NO: 1990815 - RNA, 19 nt, Homo sapiens
  misc_RNA (1)...(19): siRNA sense strand
guaaagagguccaacaaau

SEQ ID NO: 1990816 - RNA, 19 nt, Homo sapiens
  misc_RNA (1)...(19): siRNA sense strand
gaagaaaucacacaguuaa

SEQ ID NO: 1990817 - RNA, 19 nt, Homo sapiens
  misc_RNA (1)...(19): siRNA sense strand
ggaagaauguaaagagauu

SEQ ID NO: 1990818 - RNA, 19 nt, Homo sapiens
  misc_RNA (1)...(19): siRNA sense strand
gaaagacuguauacaaaga

SEQ ID NO: 1990819 - RNA, 19 nt, Homo sapiens
  misc_RNA (1)...(19): siRNA sense strand
gcugauacaucuucuuuaa

SEQ ID NO: 1990820 - RNA, 19 nt, Homo sapiens
  misc_RNA (1)...(19): siRNA sense strand
gaaacugacugaugccaaa

SEQ ID NO: 1990821 - RNA, 19 nt, Homo sapiens
  misc_RNA (1)...(19): siRNA sense strand
gguugcagcuuuagaaaua

SEQ ID NO: 1990822 - RNA, 19 nt, Homo sapiens
  misc_RNA (1)...(19): siRNA sense strand
ccacauagauccagagaau

SEQ ID NO: 1990823 - RNA, 19 nt, Homo sapiens
  misc_RNA (1)...(19): siRNA sense strand
gaaagggucuauccauguu

SEQ ID NO: 1990824 - RNA, 19 nt, Homo sapiens
  misc_RNA (1)...(19): siRNA sense strand
gaaauuuggagacuucuua

SEQ ID NO: 1990825 - RNA, 19 nt, Homo sapiens
  misc_RNA (1)...(19): siRNA sense strand
ucaaguaucugauuccaaa

SEQ ID NO: 1990826 - RNA, 19 nt, Homo sapiens
  misc_RNA (1)...(19): siRNA sense strand
ucaaggagcaguuaaauaa

SEQ ID NO: 1990827 - RNA, 19 nt, Homo sapiens
  misc_RNA (1)...(19): siRNA sense strand
uaaaggaacucaagcugaa

SEQ ID NO: 1990828 - RNA, 19 nt, Homo sapiens
  misc_RNA (1)...(19): siRNA sense strand
gaaccucuaucgacaaguu

SEQ ID NO: 1990829 - RNA, 19 nt, Homo sapiens
  misc_RNA (1)...(19): siRNA sense strand
ggaacaaacucagguagaa

SEQ ID NO: 1990830 - RNA, 19 nt, Homo sapiens
  misc_RNA (1)...(19): siRNA sense strand
gaauaaugcuuccaguaga

SEQ ID NO: 1990831 - RNA, 19 nt, Homo sapiens
  misc_RNA (1)...(19): siRNA sense strand
ggaagaagcuauacaacag

SEQ ID NO: 1990832 - RNA, 19 nt, Homo sapiens
  misc_RNA (1)...(19): siRNA sense strand
aaaguaaacugacucacua

SEQ ID NO: 1990833 - RNA, 19 nt, Homo sapiens
  misc_RNA (1)...(19): siRNA sense strand
gauugaagauucugaaaug

SEQ ID NO: 1990834 - RNA, 19 nt, Homo sapiens
  misc_RNA (1)...(19): siRNA sense strand
ggugaaagguuaagagaga

SEQ ID NO: 1990835 - RNA, 19 nt, Homo sapiens
  misc_RNA (1)...(19): siRNA sense strand
gcagagaauauacgaaaua

SEQ ID NO: 1990836 - RNA, 19 nt, Homo sapiens
  misc_RNA (1)...(19): siRNA sense strand
gaaaguggaagaagcuaua

SEQ ID NO: 1990837 - RNA, 19 nt, Homo sapiens
  misc_RNA (1)...(19): siRNA sense strand
aaaccaagaugaccuacua

SEQ ID NO: 1990838 - RNA, 19 nt, Homo sapiens
  misc_RNA (1)...(19): siRNA sense strand
gaacauugcagaaauugaa

SEQ ID NO: 1990839 - RNA, 19 nt, Homo sapiens
  misc_RNA (1)...(19): siRNA sense strand
caaagaagccuauagacuu

SEQ ID NO: 1990840 - RNA, 19 nt, Homo sapiens
  misc_RNA (1)...(19): siRNA sense strand
ggagagugaucaccagauu

SEQ ID NO: 1990841 - RNA, 19 nt, Homo sapiens
  misc_RNA (1)...(19): siRNA sense strand
cuucaaagcucucaaaugu

SEQ ID NO: 1990842 - RNA, 19 nt, Homo sapiens
  misc_RNA (1)...(19): siRNA sense strand
gaaaguguauuaacgucuu

SEQ ID NO: 1990843 - RNA, 19 nt, Homo sapiens
  misc_RNA (1)...(19): siRNA sense strand
caagaaagacuguauacaa

SEQ ID NO: 1990844 - RNA, 19 nt, Homo sapiens
  misc_RNA (1)...(19): siRNA sense strand
gaucaaagcacucgauuuc

SEQ ID NO: 1990845 - RNA, 19 nt, Homo sapiens
  misc_RNA (1)...(19): siRNA sense strand
gacaguaauucaaacagua

SEQ ID NO: 1990846 - RNA, 19 nt, Homo sapiens
  misc_RNA (1)...(19): siRNA sense strand
ggagacuucuuacaacauu

SEQ ID NO: 1990847 - RNA, 19 nt, Homo sapiens
  misc_RNA (1)...(19): siRNA sense strand
gaaagaagaauugcaagaa

SEQ ID NO: 1990848 - RNA, 19 nt, Homo sapiens
  misc_RNA (1)...(19): siRNA sense strand
gaauaaagcaccagagugu

SEQ ID NO: 1990849 - RNA, 19 nt, Homo sapiens
  misc_RNA (1)...(19): siRNA sense strand
ucaaagcucucaaauguag

SEQ ID NO: 1990850 - RNA, 19 nt, Homo sapiens
  misc_RNA (1)...(19): siRNA sense strand
gcaaggccuucagaaauaa

SEQ ID NO: 1990851 - RNA, 19 nt, Homo sapiens
  misc_RNA (1)...(19): siRNA sense strand
gaaggaauuucaagaacau

SEQ ID NO: 1990852 - RNA, 19 nt, Homo sapiens
  misc_RNA (1)...(19): siRNA sense strand
gaaacuaaacuucuugaug

SEQ ID NO: 1990853 - RNA, 19 nt, Homo sapiens
  misc_RNA (1)...(19): siRNA sense strand
gaacuggaacaacaaauug

SEQ ID NO: 1990854 - RNA, 19 nt, Homo sapiens
  misc_RNA (1)...(19): siRNA sense strand
cgagagauauuagaagaaa

SEQ ID NO: 1990855 - RNA, 19 nt, Homo sapiens
  misc_RNA (1)...(19): siRNA sense strand
gcaacagaaugaaauggaa

SEQ ID NO: 1990856 - RNA, 19 nt, Homo sapiens
  misc_RNA (1)...(19): siRNA sense strand
uaaaggagaaggagcauaa

SEQ ID NO: 1990857 - RNA, 19 nt, Homo sapiens
  misc_RNA (1)...(19): siRNA sense strand
ugacaaggcugauacaucu

SEQ ID NO: 1990858 - RNA, 19 nt, Homo sapiens
  misc_RNA (1)...(19): siRNA sense strand
ggauggaucuguaguccuu

SEQ ID NO: 1990859 - RNA, 19 nt, Homo sapiens
  misc_RNA (1)...(19): siRNA sense strand
gagccaaacggaaauuaua

SEQ ID NO: 1990860 - RNA, 19 nt, Homo sapiens
  misc_RNA (1)...(19): siRNA sense strand
guguaaaccuggccacuaa

SEQ ID NO: 1990861 - RNA, 19 nt, Homo sapiens
  misc_RNA (1)...(19): siRNA sense strand
ugcaaggccuucagaaaua

SEQ ID NO: 1990862 - RNA, 19 nt, Homo sapiens
  misc_RNA (1)...(19): siRNA sense strand
gaaagauagugaccuucaa

SEQ ID NO: 1990863 - RNA, 19 nt, Homo sapiens
  misc_RNA (1)...(19): siRNA sense strand
ccaguguucucaggaauua

SEQ ID NO: 1990864 - RNA, 19 nt, Homo sapiens
  misc_RNA (1)...(19): siRNA sense strand
aagcagaucuucagaggaa

SEQ ID NO: 1990865 - RNA, 19 nt, Homo sapiens
  misc_RNA (1)...(19): siRNA sense strand
gaagugcgaccgaacauug

SEQ ID NO: 1990866 - RNA, 19 nt, Homo sapiens
  misc_RNA (1)...(19): siRNA sense strand
ggaaagcucacuaaucuuc

SEQ ID NO: 1990867 - RNA, 19 nt, Homo sapiens
  misc_RNA (1)...(19): siRNA sense strand
cagagaauacuuaagguua

SEQ ID NO: 1990868 - RNA, 19 nt, Homo sapiens
  misc_RNA (1)...(19): siRNA sense strand
gaaggaacacuacagaaau

SEQ ID NO: 1990869 - RNA, 19 nt, Homo sapiens
  misc_RNA (1)...(19): siRNA sense strand
ccuaaagucucauauggaa

SEQ ID NO: 1990870 - RNA, 19 nt, Homo sapiens
  misc_RNA (1)...(19): siRNA sense strand
ucaaggauuugguugguaa

SEQ ID NO: 1990871 - RNA, 19 nt, Homo sapiens
  misc_RNA (1)...(19): siRNA sense strand
gaugaaacacucaauguau

SEQ ID NO: 1990872 - RNA, 19 nt, Homo sapiens
  misc_RNA (1)...(19): siRNA sense strand
guaaacugacucacuauuu

SEQ ID NO: 1990873 - RNA, 19 nt, Homo sapiens
  misc_RNA (1)...(19): siRNA sense strand
ugacuuauuuguuccugua

SEQ ID NO: 1990874 - RNA, 19 nt, Homo sapiens
  misc_RNA (1)...(19): siRNA sense strand
gaggaagaguaaugaaaug

SEQ ID NO: 1990875 - RNA, 19 nt, Homo sapiens
  misc_RNA (1)...(19): siRNA sense strand
gagauucaauuuacaccuu

SEQ ID NO: 1990876 - RNA, 19 nt, Homo sapiens
  misc_RNA (1)...(19): siRNA sense strand
gaaagaaaugguuagaaga

SEQ ID NO: 1990877 - RNA, 19 nt, Homo sapiens
  misc_RNA (1)...(19): siRNA sense strand
gaaagagguaucuguaaug

SEQ ID NO: 1990878 - RNA, 19 nt, Homo sapiens
  misc_RNA (1)...(19): siRNA sense strand
gaacuacguacucuugauu

SEQ ID NO: 1990879 - RNA, 19 nt, Homo sapiens
  misc_RNA (1)...(19): siRNA sense strand
caagauguaucacuagaca

SEQ ID NO: 1990880 - RNA, 19 nt, Homo sapiens
  misc_RNA (1)...(19): siRNA sense strand
gaaaccaacaggcaagaaa

SEQ ID NO: 1990881 - RNA, 19 nt, Homo sapiens
  misc_RNA (1)...(19): siRNA sense strand
caaguuagaacaagacauu

SEQ ID NO: 1990882 - RNA, 19 nt, Homo sapiens
  misc_RNA (1)...(19): siRNA sense strand
gagcuugagacaucuaaua

SEQ ID NO: 1990883 - RNA, 19 nt, Homo sapiens
  misc_RNA (1)...(19): siRNA sense strand
ucugaaaugucucguguaa

SEQ ID NO: 1990884 - RNA, 19 nt, Homo sapiens
  misc_RNA (1)...(19): siRNA sense strand
ccucaauucuucaaucaaa

SEQ ID NO: 1990885 - RNA, 19 nt, Homo sapiens
  misc_RNA (1)...(19): siRNA sense strand
gaaacacaaaucauggaua

SEQ ID NO: 1990886 - RNA, 19 nt, Homo sapiens
  misc_RNA (1)...(19): siRNA sense strand
ccaguaauguacagaaaga

SEQ ID NO: 1990887 - RNA, 19 nt, Homo sapiens
  misc_RNA (1)...(19): siRNA sense strand
ugaauuacaugugcagaaa

SEQ ID NO: 1990888 - RNA, 19 nt, Homo sapiens
  misc_RNA (1)...(19): siRNA sense strand
caacgaauuucagaaccua

SEQ ID NO: 1990889 - RNA, 19 nt, Homo sapiens
  misc_RNA (1)...(19): siRNA sense strand
gaaguuacacaggaguuua

SEQ ID NO: 1990890 - RNA, 19 nt, Homo sapiens
  misc_RNA (1)...(19): siRNA sense strand
caguagaagucacagcaua

SEQ ID NO: 1990891 - RNA, 19 nt, Homo sapiens
  misc_RNA (1)...(19): siRNA sense strand
cgaaagaagcagagaauau

SEQ ID NO: 1990892 - RNA, 19 nt, Homo sapiens
  misc_RNA (1)...(19): siRNA sense strand
agaaagaaaugguuagaag

SEQ ID NO: 1990893 - RNA, 19 nt, Homo sapiens
  misc_RNA (1)...(19): siRNA sense strand
gaaugacacuagaagaaca

SEQ ID NO: 1990894 - RNA, 19 nt, Homo sapiens
  misc_RNA (1)...(19): siRNA sense strand
aagaagaaaucacacaguu

SEQ ID NO: 1990895 - RNA, 19 nt, Homo sapiens
  misc_RNA (1)...(19): siRNA sense strand
ggaacuggaacaacaaauu

SEQ ID NO: 1990896 - RNA, 19 nt, Homo sapiens
  misc_RNA (1)...(19): siRNA sense strand
ggaacuuucucuuucugaa

SEQ ID NO: 1990897 - RNA, 19 nt, Homo sapiens
  misc_RNA (1)...(19): siRNA sense strand
gaccgaacauugcagaaau

SEQ ID NO: 1990898 - RNA, 19 nt, Homo sapiens
  misc_RNA (1)...(19): siRNA sense strand
ugaucugucucaugaauuu

SEQ ID NO: 1990899 - RNA, 19 nt, Homo sapiens
  misc_RNA (1)...(19): siRNA sense strand
caacuacacagaaggaauu

SEQ ID NO: 1990900 - RNA, 19 nt, Homo sapiens
  misc_RNA (1)...(19): siRNA sense strand
acaaugagcucuucaaagc

SEQ ID NO: 1990901 - RNA, 19 nt, Homo sapiens
  misc_RNA (1)...(19): siRNA sense strand
gaaaucacacaguuaacaa

SEQ ID NO: 1990902 - RNA, 19 nt, Homo sapiens
  misc_RNA (1)...(19): siRNA sense strand
uaaagagguccaacaaauu

SEQ ID NO: 1990903 - RNA, 19 nt, Homo sapiens
  misc_RNA (1)...(19): siRNA sense strand
uaagagagacugggaauau

SEQ ID NO: 1990904 - RNA, 19 nt, Homo sapiens
  misc_RNA (1)...(19): siRNA sense strand
agaaagagguaucuguaau

SEQ ID NO: 1990905 - RNA, 19 nt, Homo sapiens
  misc_RNA (1)...(19): siRNA sense strand
gcaaguacagaaagaggua

SEQ ID NO: 1990906 - RNA, 19 nt, Homo sapiens
  misc_RNA (1)...(19): siRNA sense strand
guucugaggaggauaauuu

SEQ ID NO: 1990907 - RNA, 19 nt, Homo sapiens
  misc_RNA (1)...(19): siRNA sense strand
uagaagauuugauggaaga

SEQ ID NO: 1990908 - RNA, 19 nt, Homo sapiens
  misc_RNA (1)...(19): siRNA sense strand
gaaccuaaagucucauaug

SEQ ID NO: 1990909 - RNA, 19 nt, Homo sapiens
  misc_RNA (1)...(19): siRNA sense strand
gaaaaugugucucaaccaa

SEQ ID NO: 1990910 - RNA, 19 nt, Homo sapiens
  misc_RNA (1)...(19): siRNA sense strand
gaagagaaguugacuaaga

SEQ ID NO: 1990911 - RNA, 19 nt, Homo sapiens
  misc_RNA (1)...(19): siRNA sense strand
ggaauugccuggagauuuc

SEQ ID NO: 1990912 - RNA, 19 nt, Homo sapiens
  misc_RNA (1)...(19): siRNA sense strand
caacagcugugaagacuug

SEQ ID NO: 1990913 - RNA, 19 nt, Homo sapiens
  misc_RNA (1)...(19): siRNA sense strand
augaagagcugauagauaa

SEQ ID NO: 1990914 - RNA, 19 nt, Homo sapiens
  misc_RNA (1)...(19): siRNA sense strand
gaaagagcaugaagaguac

SEQ ID NO: 1990915 - RNA, 19 nt, Homo sapiens
  misc_RNA (1)...(19): siRNA sense strand
agaaagagcaugaagagua

SEQ ID NO: 1990916 - RNA, 19 nt, Homo sapiens
  misc_RNA (1)...(19): siRNA sense strand
aaacuggacuucuucauca

SEQ ID NO: 1990917 - RNA, 19 nt, Homo sapiens
  misc_RNA (1)...(19): siRNA sense strand
gaaagaagcacaguauauc

SEQ ID NO: 1990918 - RNA, 19 nt, Homo sapiens
  misc_RNA (1)...(19): siRNA sense strand
gaaguugacuaagauaaca

SEQ ID NO: 1990919 - RNA, 19 nt, Homo sapiens
  misc_RNA (1)...(19): siRNA sense strand
gagcaggcuuucagagcua

SEQ ID NO: 1990920 - RNA, 19 nt, Homo sapiens
  misc_RNA (1)...(19): siRNA sense strand
gaagagcugauagauaauu

SEQ ID NO: 1990921 - RNA, 19 nt, Homo sapiens
  misc_RNA (1)...(19): siRNA sense strand
ugaaagaagcacaguauau

SEQ ID NO: 1990922 - RNA, 19 nt, Homo sapiens
  misc_RNA (1)...(19): siRNA sense strand
gaaacuggacuucuucauc

SEQ ID NO: 1990923 - RNA, 19 nt, Homo sapiens
  misc_RNA (1)...(19): siRNA sense strand
ggguggaacuucacucaga

SEQ ID NO: 1990924 - RNA, 19 nt, Homo sapiens
  misc_RNA (1)...(19): siRNA sense strand
ggaaacggacuaaagaaca

SEQ ID NO: 1990925 - RNA, 19 nt, Homo sapiens
  misc_RNA (1)...(19): siRNA sense strand
gcagaaagagcaugaagag

SEQ ID NO: 1990926 - RNA, 19 nt, Homo sapiens
  misc_RNA (1)...(19): siRNA sense strand
ugugaaccuuccuuuguua

SEQ ID NO: 1990927 - RNA, 19 nt, Homo sapiens
  misc_RNA (1)...(19): siRNA sense strand
ucaggaaacugugagcaaa

SEQ ID NO: 1990928 - RNA, 19 nt, Homo sapiens
  misc_RNA (1)...(19): siRNA sense strand
gagaaguugacuaagauaa

SEQ ID NO: 1990929 - RNA, 19 nt, Homo sapiens
  misc_RNA (1)...(19): siRNA sense strand
gggcuggcgugcagaaaga

SEQ ID NO: 1990930 - RNA, 19 nt, Homo sapiens
  misc_RNA (1)...(19): siRNA sense strand
gagcugauagauaauuuga

SEQ ID NO: 1990931 - RNA, 19 nt, Homo sapiens
  misc_RNA (1)...(19): siRNA sense strand
uggaagagaaguugacuaa

SEQ ID NO: 1990932 - RNA, 19 nt, Homo sapiens
  misc_RNA (1)...(19): siRNA sense strand
gaaccuuccuuuguuacug

SEQ ID NO: 1990933 - RNA, 19 nt, Homo sapiens
  misc_RNA (1)...(19): siRNA sense strand
gggaauugccuggagauuu

SEQ ID NO: 1990934 - RNA, 19 nt, Homo sapiens
  misc_RNA (1)...(19): siRNA sense strand
gaaacggacuaaagaacac

SEQ ID NO: 1990935 - RNA, 19 nt, Homo sapiens
  misc_RNA (1)...(19): siRNA sense strand
gaagaguacaugaagaauc

SEQ ID NO: 1990936 - RNA, 19 nt, Homo sapiens
  misc_RNA (1)...(19): siRNA sense strand
auaaagacuuggcauggaa

SEQ ID NO: 1990937 - RNA, 19 nt, Homo sapiens
  misc_RNA (1)...(19): siRNA sense strand
aagagaaguugacuaagau

SEQ ID NO: 1990938 - RNA, 19 nt, Homo sapiens
  misc_RNA (1)...(19): siRNA sense strand
gauggaagcccuagaucug

SEQ ID NO: 1990939 - RNA, 19 nt, Homo sapiens
  misc_RNA (1)...(19): siRNA sense strand
ccuggacucucguuucuga

SEQ ID NO: 1990940 - RNA, 19 nt, Homo sapiens
  misc_RNA (1)...(19): siRNA sense strand
cuacuugcuuuauuacaga

SEQ ID NO: 1990941 - RNA, 19 nt, Homo sapiens
  misc_RNA (1)...(19): siRNA sense strand
gacaacagcugugaagacu

SEQ ID NO: 1990942 - RNA, 19 nt, Homo sapiens
  misc_RNA (1)...(19): siRNA sense strand
aagaguacaugaagaaucu

SEQ ID NO: 1990943 - RNA, 19 nt, Homo sapiens
  misc_RNA (1)...(19): siRNA sense strand
uauaaagacuuggcaugga

SEQ ID NO: 1990944 - RNA, 19 nt, Homo sapiens
  misc_RNA (1)...(19): siRNA sense strand
gaauggaaacgauugucuu

SEQ ID NO: 1990945 - RNA, 19 nt, Homo sapiens
  misc_RNA (1)...(19): siRNA sense strand
ucagaacaagugauaguuu

SEQ ID NO: 1990946 - RNA, 19 nt, Homo sapiens
  misc_RNA (1)...(19): siRNA sense strand
aaacggaaacggacuaaag

SEQ ID NO: 1990947 - RNA, 19 nt, Homo sapiens
  misc_RNA (1)...(19): siRNA sense strand
aaugaagagcugauagaua

SEQ ID NO: 1990948 - RNA, 19 nt, Homo sapiens
  misc_RNA (1)...(19): siRNA sense strand
cugaaauacuacuugcuuu

SEQ ID NO: 1990949 - RNA, 19 nt, Homo sapiens
  misc_RNA (1)...(19): siRNA sense strand
cagaacaagugauaguuuu

SEQ ID NO: 1990950 - RNA, 19 nt, Homo sapiens
  misc_RNA (1)...(19): siRNA sense strand
ggaacggagggaagaagaa

SEQ ID NO: 1990951 - RNA, 19 nt, Homo sapiens
  misc_RNA (1)...(19): siRNA sense strand
gguggaacuucacucagau

SEQ ID NO: 1990952 - RNA, 19 nt, Homo sapiens
  misc_RNA (1)...(19): siRNA sense strand
ggagggaagaagaagagaa

SEQ ID NO: 1990953 - RNA, 19 nt, Homo sapiens
  misc_RNA (1)...(19): siRNA sense strand
gcccugccauucagaguca

SEQ ID NO: 1990954 - RNA, 19 nt, Homo sapiens
  misc_RNA (1)...(19): siRNA sense strand
ggaagcauggaaacauuca

SEQ ID NO: 1990955 - RNA, 19 nt, Homo sapiens
  misc_RNA (1)...(19): siRNA sense strand
gauccagcccugccauuca

SEQ ID NO: 1990956 - RNA, 19 nt, Homo sapiens
  misc_RNA (1)...(19): siRNA sense strand
uauccggacugagcuggua

SEQ ID NO: 1990957 - RNA, 19 nt, Homo sapiens
  misc_RNA (1)...(19): siRNA sense strand
gagggaagaagaagagaag

SEQ ID NO: 1990958 - RNA, 19 nt, Homo sapiens
  misc_RNA (1)...(19): siRNA sense strand
gaacggagggaagaagaag

SEQ ID NO: 1990959 - RNA, 19 nt, Homo sapiens
  misc_RNA (1)...(19): siRNA sense strand
gaugacaacagcugugaag

SEQ ID NO: 1990960 - RNA, 19 nt, Homo sapiens
  misc_RNA (1)...(19): siRNA sense strand
ggauuguucucaguaugau

SEQ ID NO: 1990961 - RNA, 19 nt, Homo sapiens
  misc_RNA (1)...(19): siRNA sense strand
uaucgaucgugcagacuau

SEQ ID NO: 1990962 - RNA, 19 nt, Homo sapiens
  misc_RNA (1)...(19): siRNA sense strand
ucaugccacuggaagagaa

SEQ ID NO: 1990963 - RNA, 19 nt, Homo sapiens
  misc_RNA (1)...(19): siRNA sense strand
uggaaacauucaccucuca

SEQ ID NO: 1990964 - RNA, 19 nt, Homo sapiens
  misc_RNA (1)...(19): siRNA sense strand
cugugaaccuuccuuuguu

SEQ ID NO: 1990965 - RNA, 19 nt, Homo sapiens
  misc_RNA (1)...(19): siRNA sense strand
caaagcagaaacuggacuu

SEQ ID NO: 1990966 - RNA, 19 nt, Homo sapiens
  misc_RNA (1)...(19): siRNA sense strand
aauggaaacgauugucuuu

SEQ ID NO: 1990967 - RNA, 19 nt, Homo sapiens
  misc_RNA (1)...(19): siRNA sense strand
cgugcagacuauuaucuug

SEQ ID NO: 1990968 - RNA, 19 nt, Homo sapiens
  misc_RNA (1)...(19): siRNA sense strand
acaaugaagagcugauaga

SEQ ID NO: 1990969 - RNA, 19 nt, Homo sapiens
  misc_RNA (1)...(19): siRNA sense strand
gaacaagugauaguuuuga

SEQ ID NO: 1990970 - RNA, 19 nt, Homo sapiens
  misc_RNA (1)...(19): siRNA sense strand
ugcagacuauuaucuugaa

SEQ ID NO: 1990971 - RNA, 19 nt, Homo sapiens
  misc_RNA (1)...(19): siRNA sense strand
cagauccccugaaauacua

SEQ ID NO: 1990972 - RNA, 19 nt, Homo sapiens
  misc_RNA (1)...(19): siRNA sense strand
gugcagacuauuaucuuga

SEQ ID NO: 1990973 - RNA, 19 nt, Homo sapiens
  misc_RNA (1)...(19): siRNA sense strand
agacaaugaagagcugaua

SEQ ID NO: 1990974 - RNA, 19 nt, Homo sapiens
  misc_RNA (1)...(19): siRNA sense strand
cauggugggccucauucua

SEQ ID NO: 1990975 - RNA, 19 nt, Homo sapiens
  misc_RNA (1)...(19): siRNA sense strand
ccugaaauacuacuugcuu

SEQ ID NO: 1990976 - RNA, 19 nt, Homo sapiens
  misc_RNA (1)...(19): siRNA sense strand
gcugugaagacuuggaaga

SEQ ID NO: 1990977 - RNA, 19 nt, Homo sapiens
  misc_RNA (1)...(19): siRNA sense strand
ggugauggaagcccuagau

SEQ ID NO: 1990978 - RNA, 19 nt, Homo sapiens
  misc_RNA (1)...(19): siRNA sense strand
uuucagagcuaucgaucgu

SEQ ID NO: 1990979 - RNA, 19 nt, Homo sapiens
  misc_RNA (1)...(19): siRNA sense strand
cggauuguucucaguauga

SEQ ID NO: 1990980 - RNA, 19 nt, Homo sapiens
  misc_RNA (1)...(19): siRNA sense strand
uagaguaugcaaagcagaa

SEQ ID NO: 1990981 - RNA, 19 nt, Homo sapiens
  misc_RNA (1)...(19): siRNA sense strand
auggaagcauggaaacauu

SEQ ID NO: 1990982 - RNA, 19 nt, Homo sapiens
  misc_RNA (1)...(19): siRNA sense strand
gauucuugcuguuucuuuu

SEQ ID NO: 1990983 - RNA, 19 nt, Homo sapiens
  misc_RNA (1)...(19): siRNA sense strand
caaugaagagcugauagau

SEQ ID NO: 1990984 - RNA, 19 nt, Homo sapiens
  misc_RNA (1)...(19): siRNA sense strand
gcagacuauuaucuugaag

SEQ ID NO: 1990985 - RNA, 19 nt, Homo sapiens
  misc_RNA (1)...(19): siRNA sense strand
gagugcuggugaagacaau

SEQ ID NO: 1990986 - RNA, 19 nt, Homo sapiens
  misc_RNA (1)...(19): siRNA sense strand
gaugugauagaguaugcaa

SEQ ID NO: 1990987 - RNA, 19 nt, Homo sapiens
  misc_RNA (1)...(19): siRNA sense strand
cagaugugauagaguaugc

SEQ ID NO: 1990988 - RNA, 19 nt, Homo sapiens
  misc_RNA (1)...(19): siRNA sense strand
ucgaucgugcagacuauua

SEQ ID NO: 1990989 - RNA, 19 nt, Homo sapiens
  misc_RNA (1)...(19): siRNA sense strand
ucugugaaccuuccuuugu

SEQ ID NO: 1990990 - RNA, 19 nt, Homo sapiens
  misc_RNA (1)...(19): siRNA sense strand
ugccagauccccugaaaua

SEQ ID NO: 1990991 - RNA, 19 nt, Homo sapiens
  misc_RNA (1)...(19): siRNA sense strand
gguagagcaggcuuucaga

SEQ ID NO: 1990992 - RNA, 19 nt, Homo sapiens
  misc_RNA (1)...(19): siRNA sense strand
ggaacuucacucagaugug

SEQ ID NO: 1990993 - RNA, 19 nt, Homo sapiens
  misc_RNA (1)...(19): siRNA sense strand
agagaaguugacuaagaua

SEQ ID NO: 1990994 - RNA, 19 nt, Homo sapiens
  misc_RNA (1)...(19): siRNA sense strand
uuugaaagaagcacaguau

SEQ ID NO: 1990995 - RNA, 19 nt, Homo sapiens
  misc_RNA (1)...(19): siRNA sense strand
gacaaugaagagcugauag

SEQ ID NO: 1990996 - RNA, 19 nt, Homo sapiens
  misc_RNA (1)...(19): siRNA sense strand
cagaugacaacagcuguga

SEQ ID NO: 1990997 - RNA, 19 nt, Homo sapiens
  misc_RNA (1)...(19): siRNA sense strand
caaagugggagggauccuu

SEQ ID NO: 1990998 - RNA, 19 nt, Homo sapiens
  misc_RNA (1)...(19): siRNA sense strand
ugacaacagcugugaagac

SEQ ID NO: 1990999 - RNA, 19 nt, Homo sapiens
  misc_RNA (1)...(19): siRNA sense strand
gauuauucaucaggaaacu

SEQ ID NO: 1991000 - RNA, 19 nt, Homo sapiens
  misc_RNA (1)...(19): siRNA sense strand
agauuucuccggauuguuc

SEQ ID NO: 1991001 - RNA, 19 nt, Homo sapiens
  misc_RNA (1)...(19): siRNA sense strand
uugaaagaagcacaguaua

SEQ ID NO: 1991002 - RNA, 19 nt, Homo sapiens
  misc_RNA (1)...(19): siRNA sense strand
ccacuggaagagaaguuga

SEQ ID NO: 1991003 - RNA, 19 nt, Homo sapiens
  misc_RNA (1)...(19): siRNA sense strand
augaagaguacaugaagaa

SEQ ID NO: 1991004 - RNA, 19 nt, Homo sapiens
  misc_RNA (1)...(19): siRNA sense strand
ccacugaugacgacacuua

SEQ ID NO: 1991005 - RNA, 19 nt, Homo sapiens
  misc_RNA (1)...(19): siRNA sense strand
gaggagcacagacgagaua

SEQ ID NO: 1991006 - RNA, 19 nt, Homo sapiens
  misc_RNA (1)...(19): siRNA sense strand
ccaagacugugguugagaa

SEQ ID NO: 1991007 - RNA, 19 nt, Homo sapiens
  misc_RNA (1)...(19): siRNA sense strand
gauggacuuugaagacuug

SEQ ID NO: 1991008 - RNA, 19 nt, Homo sapiens
  misc_RNA (1)...(19): siRNA sense strand
ggaggagacugccauugag

SEQ ID NO: 1991009 - RNA, 19 nt, Homo sapiens
  misc_RNA (1)...(19): siRNA sense strand
ggauggacuuugaagacuu

SEQ ID NO: 1991010 - RNA, 19 nt, Homo sapiens
  misc_RNA (1)...(19): siRNA sense strand
caaggucacuuuucaauag

SEQ ID NO: 1991011 - RNA, 19 nt, Homo sapiens
  misc_RNA (1)...(19): siRNA sense strand
uggcuaagcaagacaaauu

SEQ ID NO: 1991012 - RNA, 19 nt, Homo sapiens
  misc_RNA (1)...(19): siRNA sense strand
gaaaacagcagcagcaaca

SEQ ID NO: 1991013 - RNA, 19 nt, Homo sapiens
  misc_RNA (1)...(19): siRNA sense strand
ggagacugccauugagaug

SEQ ID NO: 1991014 - RNA, 19 nt, Homo sapiens
  misc_RNA (1)...(19): siRNA sense strand
gagcucgcaaggucacuuu

SEQ ID NO: 1991015 - RNA, 19 nt, Homo sapiens
  misc_RNA (1)...(19): siRNA sense strand
gaggagacugccauugaga

SEQ ID NO: 1991016 - RNA, 19 nt, Homo sapiens
  misc_RNA (1)...(19): siRNA sense strand
gcaaggucacuuuucaaua

SEQ ID NO: 1991017 - RNA, 19 nt, Homo sapiens
  misc_RNA (1)...(19): siRNA sense strand
gagcacagacgagauaagg

SEQ ID NO: 1991018 - RNA, 19 nt, Homo sapiens
  misc_RNA (1)...(19): siRNA sense strand
ggaggaggagacugccauu

SEQ ID NO: 1991019 - RNA, 19 nt, Homo sapiens
  misc_RNA (1)...(19): siRNA sense strand
aggaggagacugccauuga

SEQ ID NO: 1991020 - RNA, 19 nt, Homo sapiens
  misc_RNA (1)...(19): siRNA sense strand
cugaugacgacacuuauga

SEQ ID NO: 1991021 - RNA, 19 nt, Homo sapiens
  misc_RNA (1)...(19): siRNA sense strand
ggcguccuauuucgaugaa

SEQ ID NO: 1991022 - RNA, 19 nt, Homo sapiens
  misc_RNA (1)...(19): siRNA sense strand
caauaggauggacuuugaa

SEQ ID NO: 1991023 - RNA, 19 nt, Homo sapiens
  misc_RNA (1)...(19): siRNA sense strand
gccaucaccuuuuccauuc

SEQ ID NO: 1991024 - RNA, 19 nt, Homo sapiens
  misc_RNA (1)...(19): siRNA sense strand
cguccuauuucgaugaaca

SEQ ID NO: 1991025 - RNA, 19 nt, Homo sapiens
  misc_RNA (1)...(19): siRNA sense strand
caggagacgcgaaccaaca

SEQ ID NO: 1991026 - RNA, 19 nt, Homo sapiens
  misc_RNA (1)...(19): siRNA sense strand
caaauuccugucccuugug

SEQ ID NO: 1991027 - RNA, 19 nt, Homo sapiens
  misc_RNA (1)...(19): siRNA sense strand
gaggaggagacugccauug

SEQ ID NO: 1991028 - RNA, 19 nt, Homo sapiens
  misc_RNA (1)...(19): siRNA sense strand
gcaagaacccuaccuuuaa

SEQ ID NO: 1991029 - RNA, 19 nt, Homo sapiens
  misc_RNA (1)...(19): siRNA sense strand
gaagggaacuauuaaagca

SEQ ID NO: 1991030 - RNA, 19 nt, Homo sapiens
  misc_RNA (1)...(19): siRNA sense strand
ccacaaaggcgacaucaaa

SEQ ID NO: 1991031 - RNA, 19 nt, Homo sapiens
  misc_RNA (1)...(19): siRNA sense strand
caaaggcuaugaagguaaa

SEQ ID NO: 1991032 - RNA, 19 nt, Homo sapiens
  misc_RNA (1)...(19): siRNA sense strand
gaacccuaccuuuaaguua

SEQ ID NO: 1991033 - RNA, 19 nt, Homo sapiens
  misc_RNA (1)...(19): siRNA sense strand
ggaaucagaagccuaagaa

SEQ ID NO: 1991034 - RNA, 19 nt, Homo sapiens
  misc_RNA (1)...(19): siRNA sense strand
gaacuccuggucaucuuua

SEQ ID NO: 1991035 - RNA, 19 nt, Homo sapiens
  misc_RNA (1)...(19): siRNA sense strand
ggacagcgccagugaggaa

SEQ ID NO: 1991036 - RNA, 19 nt, Homo sapiens
  misc_RNA (1)...(19): siRNA sense strand
caaggaaucagaagccuaa

SEQ ID NO: 1991037 - RNA, 19 nt, Homo sapiens
  misc_RNA (1)...(19): siRNA sense strand
ucacagauccgaagaggaa

SEQ ID NO: 1991038 - RNA, 19 nt, Homo sapiens
  misc_RNA (1)...(19): siRNA sense strand
ggaagaggagcaagaagaa

SEQ ID NO: 1991039 - RNA, 19 nt, Homo sapiens
  misc_RNA (1)...(19): siRNA sense strand
ggcaaaggcuaugaaggua

SEQ ID NO: 1991040 - RNA, 19 nt, Homo sapiens
  misc_RNA (1)...(19): siRNA sense strand
gcucaguacuacacaguga

SEQ ID NO: 1991041 - RNA, 19 nt, Homo sapiens
  misc_RNA (1)...(19): siRNA sense strand
uaagugaagaucagaagua

SEQ ID NO: 1991042 - RNA, 19 nt, Homo sapiens
  misc_RNA (1)...(19): siRNA sense strand
caagaacccuaccuuuaag

SEQ ID NO: 1991043 - RNA, 19 nt, Homo sapiens
  misc_RNA (1)...(19): siRNA sense strand
caaugcauguggugaauca

SEQ ID NO: 1991044 - RNA, 19 nt, Homo sapiens
  misc_RNA (1)...(19): siRNA sense strand
ucagaaguaugguggcaaa

SEQ ID NO: 1991045 - RNA, 19 nt, Homo sapiens
  misc_RNA (1)...(19): siRNA sense strand
gcaaggacagcgccaguga

SEQ ID NO: 1991046 - RNA, 19 nt, Homo sapiens
  misc_RNA (1)...(19): siRNA sense strand
gaccagguguggaauaucu

SEQ ID NO: 1991047 - RNA, 19 nt, Homo sapiens
  misc_RNA (1)...(19): siRNA sense strand
gcaaaggcuaugaagguaa

SEQ ID NO: 1991048 - RNA, 19 nt, Homo sapiens
  misc_RNA (1)...(19): siRNA sense strand
gcgaaccagucaauaagga

SEQ ID NO: 1991049 - RNA, 19 nt, Homo sapiens
  misc_RNA (1)...(19): siRNA sense strand
ggaagucccugaggccaau

SEQ ID NO: 1991050 - RNA, 19 nt, Homo sapiens
  misc_RNA (1)...(19): siRNA sense strand
ugacugcgguaaagauuuc

SEQ ID NO: 1991051 - RNA, 19 nt, Homo sapiens
  misc_RNA (1)...(19): siRNA sense strand
caaagucaagcuugugaaa

SEQ ID NO: 1991052 - RNA, 19 nt, Homo sapiens
  misc_RNA (1)...(19): siRNA sense strand
gggaagaggagcaagaaga

SEQ ID NO: 1991053 - RNA, 19 nt, Homo sapiens
  misc_RNA (1)...(19): siRNA sense strand
cagcaggcguggauucaga

SEQ ID NO: 1991054 - RNA, 19 nt, Homo sapiens
  misc_RNA (1)...(19): siRNA sense strand
caacagcgaaccagucaau

SEQ ID NO: 1991055 - RNA, 19 nt, Homo sapiens
  misc_RNA (1)...(19): siRNA sense strand
guuccagccuccaaaguga

SEQ ID NO: 1991056 - RNA, 19 nt, Homo sapiens
  misc_RNA (1)...(19): siRNA sense strand
ggaagaacggcagaagaaa

SEQ ID NO: 1991057 - RNA, 19 nt, Homo sapiens
  misc_RNA (1)...(19): siRNA sense strand
aagucaagcuugugaaaug

SEQ ID NO: 1991058 - RNA, 19 nt, Homo sapiens
  misc_RNA (1)...(19): siRNA sense strand
gcaaauccacaugcagaaa

SEQ ID NO: 1991059 - RNA, 19 nt, Homo sapiens
  misc_RNA (1)...(19): siRNA sense strand
gacaggaggcugaccuuga

SEQ ID NO: 1991060 - RNA, 19 nt, Homo sapiens
  misc_RNA (1)...(19): siRNA sense strand
auaaagagacccaauguca

SEQ ID NO: 1991061 - RNA, 19 nt, Homo sapiens
  misc_RNA (1)...(19): siRNA sense strand
agcaagaacccuaccuuua

SEQ ID NO: 1991062 - RNA, 19 nt, Homo sapiens
  misc_RNA (1)...(19): siRNA sense strand
gggaggugaagaagaauaa

SEQ ID NO: 1991063 - RNA, 19 nt, Homo sapiens
  misc_RNA (1)...(19): siRNA sense strand
ggaugaagaacaguuuaaa

SEQ ID NO: 1991064 - RNA, 19 nt, Homo sapiens
  misc_RNA (1)...(19): siRNA sense strand
ugaaaugcauaagugaaga

SEQ ID NO: 1991065 - RNA, 19 nt, Homo sapiens
  misc_RNA (1)...(19): siRNA sense strand
gaaagacgccguggaacag

SEQ ID NO: 1991066 - RNA, 19 nt, Homo sapiens
  misc_RNA (1)...(19): siRNA sense strand
gugaagaucagaaguaugg

SEQ ID NO: 1991067 - RNA, 19 nt, Homo sapiens
  misc_RNA (1)...(19): siRNA sense strand
cagcaagaacccuaccuuu

SEQ ID NO: 1991068 - RNA, 19 nt, Homo sapiens
  misc_RNA (1)...(19): siRNA sense strand
cacgugaaaugcauaagug

SEQ ID NO: 1991069 - RNA, 19 nt, Homo sapiens
  misc_RNA (1)...(19): siRNA sense strand
agaauuggaugaagaacag

SEQ ID NO: 1991070 - RNA, 19 nt, Homo sapiens
  misc_RNA (1)...(19): siRNA sense strand
uaauaaagagacccaaugu

SEQ ID NO: 1991071 - RNA, 19 nt, Homo sapiens
  misc_RNA (1)...(19): siRNA sense strand
acagcgaaccagucaauaa

SEQ ID NO: 1991072 - RNA, 19 nt, Homo sapiens
  misc_RNA (1)...(19): siRNA sense strand
gcagggaagaggagcaaga

SEQ ID NO: 1991073 - RNA, 19 nt, Homo sapiens
  misc_RNA (1)...(19): siRNA sense strand
gaaaagcaugugucuguuu

SEQ ID NO: 1991074 - RNA, 19 nt, Homo sapiens
  misc_RNA (1)...(19): siRNA sense strand
caaauccacaugcagaaau

SEQ ID NO: 1991075 - RNA, 19 nt, Homo sapiens
  misc_RNA (1)...(19): siRNA sense strand
aacccuaccuuuaaguuau

SEQ ID NO: 1991076 - RNA, 19 nt, Homo sapiens
  misc_RNA (1)...(19): siRNA sense strand
gacaaugaaauaaccauca

SEQ ID NO: 1991077 - RNA, 19 nt, Homo sapiens
  misc_RNA (1)...(19): siRNA sense strand
caacuggaagggaacuauu

SEQ ID NO: 1991078 - RNA, 19 nt, Homo sapiens
  misc_RNA (1)...(19): siRNA sense strand
gaagaacggcagaagaaaa

SEQ ID NO: 1991079 - RNA, 19 nt, Homo sapiens
  misc_RNA (1)...(19): siRNA sense strand
gaaaggaagaacggcagaa

SEQ ID NO: 1991080 - RNA, 19 nt, Homo sapiens
  misc_RNA (1)...(19): siRNA sense strand
ggaacuccuggucaucuuu

SEQ ID NO: 1991081 - RNA, 19 nt, Homo sapiens
  misc_RNA (1)...(19): siRNA sense strand
ggaagggaacuauuaaagc

SEQ ID NO: 1991082 - RNA, 19 nt, Homo sapiens
  misc_RNA (1)...(19): siRNA sense strand
gaaaugcauaagugaagau

SEQ ID NO: 1991083 - RNA, 19 nt, Homo sapiens
  misc_RNA (1)...(19): siRNA sense strand
ugaaagacgccguggaaca

SEQ ID NO: 1991084 - RNA, 19 nt, Homo sapiens
  misc_RNA (1)...(19): siRNA sense strand
ucaaacagcaggcguggau

SEQ ID NO: 1991085 - RNA, 19 nt, Homo sapiens
  misc_RNA (1)...(19): siRNA sense strand
aagguaaauucaacuggaa

SEQ ID NO: 1991086 - RNA, 19 nt, Homo sapiens
  misc_RNA (1)...(19): siRNA sense strand
ggagcaagaagaagaagca

SEQ ID NO: 1991087 - RNA, 19 nt, Homo sapiens
  misc_RNA (1)...(19): siRNA sense strand
agaaaucuccaccaagguu

SEQ ID NO: 1991088 - RNA, 19 nt, Homo sapiens
  misc_RNA (1)...(19): siRNA sense strand
ucaauaaggaacaggauca

SEQ ID NO: 1991089 - RNA, 19 nt, Homo sapiens
  misc_RNA (1)...(19): siRNA sense strand
gggaacuauuaaagcaauu

SEQ ID NO: 1991090 - RNA, 19 nt, Homo sapiens
  misc_RNA (1)...(19): siRNA sense strand
aaagagaaagaaaggaaga

SEQ ID NO: 1991091 - RNA, 19 nt, Homo sapiens
  misc_RNA (1)...(19): siRNA sense strand
aggaagaacggcagaagaa

SEQ ID NO: 1991092 - RNA, 19 nt, Homo sapiens
  misc_RNA (1)...(19): siRNA sense strand
caggaaaacucaaggaauc

SEQ ID NO: 1991093 - RNA, 19 nt, Homo sapiens
  misc_RNA (1)...(19): siRNA sense strand
gaaacaggccccagacaau

SEQ ID NO: 1991094 - RNA, 19 nt, Homo sapiens
  misc_RNA (1)...(19): siRNA sense strand
aagugaagaucagaaguau

SEQ ID NO: 1991095 - RNA, 19 nt, Homo sapiens
  misc_RNA (1)...(19): siRNA sense strand
cgaugaggcuccugcaaaa

SEQ ID NO: 1991096 - RNA, 19 nt, Homo sapiens
  misc_RNA (1)...(19): siRNA sense strand
gaagaaaauacaaguggaa

SEQ ID NO: 1991097 - RNA, 19 nt, Homo sapiens
  misc_RNA (1)...(19): siRNA sense strand
acaggaggcugaccuugag

SEQ ID NO: 1991098 - RNA, 19 nt, Homo sapiens
  misc_RNA (1)...(19): siRNA sense strand
gaagaaaaggaaaagagaa

SEQ ID NO: 1991099 - RNA, 19 nt, Homo sapiens
  misc_RNA (1)...(19): siRNA sense strand
gagagaacuuuuagagcaa

SEQ ID NO: 1991100 - RNA, 19 nt, Homo sapiens
  misc_RNA (1)...(19): siRNA sense strand
ggaaaagcaugugucuguu

SEQ ID NO: 1991101 - RNA, 19 nt, Homo sapiens
  misc_RNA (1)...(19): siRNA sense strand
gugaaucagugaagaaaau

SEQ ID NO: 1991102 - RNA, 19 nt, Homo sapiens
  misc_RNA (1)...(19): siRNA sense strand
guugaaacagauucuaaga

SEQ ID NO: 1991103 - RNA, 19 nt, Homo sapiens
  misc_RNA (1)...(19): siRNA sense strand
gaaaauacaaguggaaaag

SEQ ID NO: 1991104 - RNA, 19 nt, Homo sapiens
  misc_RNA (1)...(19): siRNA sense strand
agucaagcuugugaaauga

SEQ ID NO: 1991105 - RNA, 19 nt, Homo sapiens
  misc_RNA (1)...(19): siRNA sense strand
gcauaagugaagaucagaa

SEQ ID NO: 1991106 - RNA, 19 nt, Homo sapiens
  misc_RNA (1)...(19): siRNA sense strand
uggcaaaggcuaugaaggu

SEQ ID NO: 1991107 - RNA, 19 nt, Homo sapiens
  misc_RNA (1)...(19): siRNA sense strand
gagaaccagaagacgauga

SEQ ID NO: 1991108 - RNA, 19 nt, Homo sapiens
  misc_RNA (1)...(19): siRNA sense strand
agaagaagcagcgcaagga

SEQ ID NO: 1991109 - RNA, 19 nt, Homo sapiens
  misc_RNA (1)...(19): siRNA sense strand
aagaggagcaagaagaaga

SEQ ID NO: 1991110 - RNA, 19 nt, Homo sapiens
  misc_RNA (1)...(19): siRNA sense strand
augcagaaaucuccaccaa

SEQ ID NO: 1991111 - RNA, 19 nt, Homo sapiens
  misc_RNA (1)...(19): siRNA sense strand
uggaauaucuuuucugaag

SEQ ID NO: 1991112 - RNA, 19 nt, Homo sapiens
  misc_RNA (1)...(19): siRNA sense strand
uuaauaaagagacccaaug

SEQ ID NO: 1991113 - RNA, 19 nt, Homo sapiens
  misc_RNA (1)...(19): siRNA sense strand
aaacagcaggcguggauuc

SEQ ID NO: 1991114 - RNA, 19 nt, Homo sapiens
  misc_RNA (1)...(19): siRNA sense strand
cagcgaaccagucaauaag

SEQ ID NO: 1991115 - RNA, 19 nt, Homo sapiens
  misc_RNA (1)...(19): siRNA sense strand
aaauccacaugcagaaauc

SEQ ID NO: 1991116 - RNA, 19 nt, Homo sapiens
  misc_RNA (1)...(19): siRNA sense strand
caaaggcgacaucaaacag

SEQ ID NO: 1991117 - RNA, 19 nt, Homo sapiens
  misc_RNA (1)...(19): siRNA sense strand
aaaagcaugugucuguuug

SEQ ID NO: 1991118 - RNA, 19 nt, Homo sapiens
  misc_RNA (1)...(19): siRNA sense strand
guuauuaaaggacaaaguc

SEQ ID NO: 1991119 - RNA, 19 nt, Homo sapiens
  misc_RNA (1)...(19): siRNA sense strand
ggaaaagagaaaagaaaga

SEQ ID NO: 1991120 - RNA, 19 nt, Homo sapiens
  misc_RNA (1)...(19): siRNA sense strand
ccacgugaaaugcauaagu

SEQ ID NO: 1991121 - RNA, 19 nt, Homo sapiens
  misc_RNA (1)...(19): siRNA sense strand
ccagguguggaauaucuuu

SEQ ID NO: 1991122 - RNA, 19 nt, Homo sapiens
  misc_RNA (1)...(19): siRNA sense strand
gaagaggagcaagaagaag

SEQ ID NO: 1991123 - RNA, 19 nt, Homo sapiens
  misc_RNA (1)...(19): siRNA sense strand
acuacacagugacagauga

SEQ ID NO: 1991124 - RNA, 19 nt, Homo sapiens
  misc_RNA (1)...(19): siRNA sense strand
uaaagcaauucugaaacag

SEQ ID NO: 1991125 - RNA, 19 nt, Homo sapiens
  misc_RNA (1)...(19): siRNA sense strand
gugaaaugcauaagugaag

SEQ ID NO: 1991126 - RNA, 19 nt, Homo sapiens
  misc_RNA (1)...(19): siRNA sense strand
ggaacuauuaaagcaauuc

SEQ ID NO: 1991127 - RNA, 19 nt, Homo sapiens
  misc_RNA (1)...(19): siRNA sense strand
acaagaaaaucagcaagaa

SEQ ID NO: 1991128 - RNA, 19 nt, Homo sapiens
  misc_RNA (1)...(19): siRNA sense strand
gaacagugcagagaagaua

SEQ ID NO: 1991129 - RNA, 19 nt, Homo sapiens
  misc_RNA (1)...(19): siRNA sense strand
cagagaagauaacaaaguu

SEQ ID NO: 1991130 - RNA, 19 nt, Homo sapiens
  misc_RNA (1)...(19): siRNA sense strand
gcuggagucugggaaguua

SEQ ID NO: 1991131 - RNA, 19 nt, Homo sapiens
  misc_RNA (1)...(19): siRNA sense strand
aagauagugucgacuguua

SEQ ID NO: 1991132 - RNA, 19 nt, Homo sapiens
  misc_RNA (1)...(19): siRNA sense strand
ggagccagaugaugaagug

SEQ ID NO: 1991133 - RNA, 19 nt, Homo sapiens
  misc_RNA (1)...(19): siRNA sense strand
gugaguggauccuguaaga

SEQ ID NO: 1991134 - RNA, 19 nt, Homo sapiens
  misc_RNA (1)...(19): siRNA sense strand
aaagaugaccgucuggaua

SEQ ID NO: 1991135 - RNA, 19 nt, Homo sapiens
  misc_RNA (1)...(19): siRNA sense strand
uaugaucucugguucaaga

SEQ ID NO: 1991136 - RNA, 19 nt, Homo sapiens
  misc_RNA (1)...(19): siRNA sense strand
ugaaguguuucuugccaua

SEQ ID NO: 1991137 - RNA, 19 nt, Homo sapiens
  misc_RNA (1)...(19): siRNA sense strand
cugagaaacuuuguacuuu

SEQ ID NO: 1991138 - RNA, 19 nt, Homo sapiens
  misc_RNA (1)...(19): siRNA sense strand
ggaagauagugucgacugu

SEQ ID NO: 1991139 - RNA, 19 nt, Homo sapiens
  misc_RNA (1)...(19): siRNA sense strand
gccagaugaugaaguguuu

SEQ ID NO: 1991140 - RNA, 19 nt, Homo sapiens
  misc_RNA (1)...(19): siRNA sense strand
guaaggagcaguacuugga

SEQ ID NO: 1991141 - RNA, 19 nt, Homo sapiens
  misc_RNA (1)...(19): siRNA sense strand
ccaauuaaauaccaaguac

SEQ ID NO: 1991142 - RNA, 19 nt, Homo sapiens
  misc_RNA (1)...(19): siRNA sense strand
gcagagaagauaacaaagu

SEQ ID NO: 1991143 - RNA, 19 nt, Homo sapiens
  misc_RNA (1)...(19): siRNA sense strand
guacuuggauguccuucau

SEQ ID NO: 1991144 - RNA, 19 nt, Homo sapiens
  misc_RNA (1)...(19): siRNA sense strand
gugcagagaagauaacaaa

SEQ ID NO: 1991145 - RNA, 19 nt, Homo sapiens
  misc_RNA (1)...(19): siRNA sense strand
cgcccaaacuuccuuauga

SEQ ID NO: 1991146 - RNA, 19 nt, Homo sapiens
  misc_RNA (1)...(19): siRNA sense strand
cuaaagccauggaggaaau

SEQ ID NO: 1991147 - RNA, 19 nt, Homo sapiens
  misc_RNA (1)...(19): siRNA sense strand
uuacagaggguuugggaua

SEQ ID NO: 1991148 - RNA, 19 nt, Homo sapiens
  misc_RNA (1)...(19): siRNA sense strand
gaggaaaugguggaagaua

SEQ ID NO: 1991149 - RNA, 19 nt, Homo sapiens
  misc_RNA (1)...(19): siRNA sense strand
gaaauucuccuaaaagaug

SEQ ID NO: 1991150 - RNA, 19 nt, Homo sapiens
  misc_RNA (1)...(19): siRNA sense strand
gaugaugaaguguuucuug

SEQ ID NO: 1991151 - RNA, 19 nt, Homo sapiens
  misc_RNA (1)...(19): siRNA sense strand
ggaaaugguggaagauagu

SEQ ID NO: 1991152 - RNA, 19 nt, Homo sapiens
  misc_RNA (1)...(19): siRNA sense strand
gcccaaacuuccuuaugau

SEQ ID NO: 1991153 - RNA, 19 nt, Homo sapiens
  misc_RNA (1)...(19): siRNA sense strand
gaagauagugucgacuguu

SEQ ID NO: 1991154 - RNA, 19 nt, Homo sapiens
  misc_RNA (1)...(19): siRNA sense strand
uggaggaaaugguggaaga

SEQ ID NO: 1991155 - RNA, 19 nt, Homo sapiens
  misc_RNA (1)...(19): siRNA sense strand
ccaaggugaugauguaucg

SEQ ID NO: 1991156 - RNA, 19 nt, Homo sapiens
  misc_RNA (1)...(19): siRNA sense strand
uacagaggguuugggauaa

SEQ ID NO: 1991157 - RNA, 19 nt, Homo sapiens
  misc_RNA (1)...(19): siRNA sense strand
ccaaguaccgggauuccuu

SEQ ID NO: 1991158 - RNA, 19 nt, Homo sapiens
  misc_RNA (1)...(19): siRNA sense strand
caaacuuccuuaugaucuc

SEQ ID NO: 1991159 - RNA, 19 nt, Homo sapiens
  misc_RNA (1)...(19): siRNA sense strand
acagaggguuugggauaaa

SEQ ID NO: 1991160 - RNA, 19 nt, Homo sapiens
  misc_RNA (1)...(19): siRNA sense strand
augccaaggugaugaugua

SEQ ID NO: 1991161 - RNA, 19 nt, Homo sapiens
  misc_RNA (1)...(19): siRNA sense strand
gugaugauguaucguaagg

SEQ ID NO: 1991162 - RNA, 19 nt, Homo sapiens
  misc_RNA (1)...(19): siRNA sense strand
ucugggaaguuaccucgaa

SEQ ID NO: 1991163 - RNA, 19 nt, Homo sapiens
  misc_RNA (1)...(19): siRNA sense strand
gugaaccaauuaaauacca

SEQ ID NO: 1991164 - RNA, 19 nt, Homo sapiens
  misc_RNA (1)...(19): siRNA sense strand
cuuaugaucucugguucaa

SEQ ID NO: 1991165 - RNA, 19 nt, Homo sapiens
  misc_RNA (1)...(19): siRNA sense strand
cagacgcgaucgugagcaa

SEQ ID NO: 1991166 - RNA, 19 nt, Homo sapiens
  misc_RNA (1)...(19): siRNA sense strand
gauacugagaaacuuugua

SEQ ID NO: 1991167 - RNA, 19 nt, Homo sapiens
  misc_RNA (1)...(19): siRNA sense strand
gcuaaagccauggaggaaa

SEQ ID NO: 1991168 - RNA, 19 nt, Homo sapiens
  misc_RNA (1)...(19): siRNA sense strand
ccuguaagauccuaguuuu

SEQ ID NO: 1991169 - RNA, 19 nt, Homo sapiens
  misc_RNA (1)...(19): siRNA sense strand
gaaaugguggaagauagug

SEQ ID NO: 1991170 - RNA, 19 nt, Homo sapiens
  misc_RNA (1)...(19): siRNA sense strand
gucguucgcuuuguuagug

SEQ ID NO: 1991171 - RNA, 19 nt, Homo sapiens
  misc_RNA (1)...(19): siRNA sense strand
gguuugggauaaaguugug

SEQ ID NO: 1991172 - RNA, 19 nt, Homo sapiens
  misc_RNA (1)...(19): siRNA sense strand
gacgcuuugugaaccaauu

SEQ ID NO: 1991173 - RNA, 19 nt, Homo sapiens
  misc_RNA (1)...(19): siRNA sense strand
aggaaaugguggaagauag

SEQ ID NO: 1991174 - RNA, 19 nt, Homo sapiens
  misc_RNA (1)...(19): siRNA sense strand
gauaaaguugugaguggau

SEQ ID NO: 1991175 - RNA, 19 nt, Homo sapiens
  misc_RNA (1)...(19): siRNA sense strand
ccaaacuuccuuaugaucu

SEQ ID NO: 1991176 - RNA, 19 nt, Homo sapiens
  misc_RNA (1)...(19): siRNA sense strand
gcgggauguuugccugaau

SEQ ID NO: 1991177 - RNA, 19 nt, Homo sapiens
  misc_RNA (1)...(19): siRNA sense strand
uaaaaguuauggcacugaa

SEQ ID NO: 1991178 - RNA, 19 nt, Homo sapiens
  misc_RNA (1)...(19): siRNA sense strand
aagucuaucuccgcaugua

SEQ ID NO: 1991179 - RNA, 19 nt, Homo sapiens
  misc_RNA (1)...(19): siRNA sense strand
guccauguaccgugcauug

SEQ ID NO: 1991180 - RNA, 19 nt, Homo sapiens
  misc_RNA (1)...(19): siRNA sense strand
aaggugaugauguaucgua

SEQ ID NO: 1991181 - RNA, 19 nt, Homo sapiens
  misc_RNA (1)...(19): siRNA sense strand
ugagcaaggccauugacuu

SEQ ID NO: 1991182 - RNA, 19 nt, Homo sapiens
  misc_RNA (1)...(19): siRNA sense strand
aaaguuauggcacugaaca

SEQ ID NO: 1991183 - RNA, 19 nt, Homo sapiens
  misc_RNA (1)...(19): siRNA sense strand
acugagaaacuuuguacuu

SEQ ID NO: 1991184 - RNA, 19 nt, Homo sapiens
  misc_RNA (1)...(19): siRNA sense strand
agacugcugacucaucuga

SEQ ID NO: 1991185 - RNA, 19 nt, Homo sapiens
  misc_RNA (1)...(19): siRNA sense strand
uuuuguagcugucgaaauu

SEQ ID NO: 1991186 - RNA, 19 nt, Homo sapiens
  misc_RNA (1)...(19): siRNA sense strand
gaggguuugggauaaaguu

SEQ ID NO: 1991187 - RNA, 19 nt, Homo sapiens
  misc_RNA (1)...(19): siRNA sense strand
gaggugcuuugcgggaugu

SEQ ID NO: 1991188 - RNA, 19 nt, Homo sapiens
  misc_RNA (1)...(19): siRNA sense strand
guugugaguggauccugua

SEQ ID NO: 1991189 - RNA, 19 nt, Homo sapiens
  misc_RNA (1)...(19): siRNA sense strand
gcaguacuuggauguccuu

SEQ ID NO: 1991190 - RNA, 19 nt, Homo sapiens
  misc_RNA (1)...(19): siRNA sense strand
gugcuuugcgggauguuug

SEQ ID NO: 1991191 - RNA, 19 nt, Homo sapiens
  misc_RNA (1)...(19): siRNA sense strand
gcgcccaaacuuccuuaug

SEQ ID NO: 1991192 - RNA, 19 nt, Homo sapiens
  misc_RNA (1)...(19): siRNA sense strand
cuggaucacccgacgcuuu

SEQ ID NO: 1991193 - RNA, 19 nt, Homo sapiens
  misc_RNA (1)...(19): siRNA sense strand
gggaaguuaccucgaaguc

SEQ ID NO: 1991194 - RNA, 19 nt, Homo sapiens
  misc_RNA (1)...(19): siRNA sense strand
ggucaucaccgccgacuuu

SEQ ID NO: 1991195 - RNA, 19 nt, Homo sapiens
  misc_RNA (1)...(19): siRNA sense strand
aaucagggcuucaacaaca

SEQ ID NO: 1991196 - RNA, 19 nt, Homo sapiens
  misc_RNA (1)...(19): siRNA sense strand
gagacaagcccguaugugu

SEQ ID NO: 1991197 - RNA, 19 nt, Homo sapiens
  misc_RNA (1)...(19): siRNA sense strand
gaaugggccuaacuuccuu

SEQ ID NO: 1991198 - RNA, 19 nt, Homo sapiens
  misc_RNA (1)...(19): siRNA sense strand
gaggugacguggccagaug

SEQ ID NO: 1991199 - RNA, 19 nt, Homo sapiens
  misc_RNA (1)...(19): siRNA sense strand
gcaaucagggcuucaacaa

SEQ ID NO: 1991200 - RNA, 19 nt, Homo sapiens
  misc_RNA (1)...(19): siRNA sense strand
caaaguggacaucgucuau

SEQ ID NO: 1991201 - RNA, 19 nt, Homo sapiens
  misc_RNA (1)...(19): siRNA sense strand
caaccgugauggcaaagug

SEQ ID NO: 1991202 - RNA, 19 nt, Homo sapiens
  misc_RNA (1)...(19): siRNA sense strand
gagaucuucuucaacaaca

SEQ ID NO: 1991203 - RNA, 19 nt, Homo sapiens
  misc_RNA (1)...(19): siRNA sense strand
gcaaaguggacaucgucua

SEQ ID NO: 1991204 - RNA, 19 nt, Homo sapiens
  misc_RNA (1)...(19): siRNA sense strand
cuggagaucuucuucaaca

SEQ ID NO: 1991205 - RNA, 19 nt, Homo sapiens
  misc_RNA (1)...(19): siRNA sense strand
ccgccgacuuugacaauga

SEQ ID NO: 1991206 - RNA, 19 nt, Homo sapiens
  misc_RNA (1)...(19): siRNA sense strand
gauaucuucugcgacaaug

SEQ ID NO: 1991207 - RNA, 19 nt, Homo sapiens
  misc_RNA (1)...(19): siRNA sense strand
ccacuggagacaccaauga

SEQ ID NO: 1991208 - RNA, 19 nt, Homo sapiens
  misc_RNA (1)...(19): siRNA sense strand
gaucuucuucaacaacauu

SEQ ID NO: 1991209 - RNA, 19 nt, Homo sapiens
  misc_RNA (1)...(19): siRNA sense strand
cuucaaccgugauggcaaa

SEQ ID NO: 1991210 - RNA, 19 nt, Homo sapiens
  misc_RNA (1)...(19): siRNA sense strand
gacaucgccucacccaagu

SEQ ID NO: 1991211 - RNA, 19 nt, Homo sapiens
  misc_RNA (1)...(19): siRNA sense strand
gggaugaggacacacuuca

SEQ ID NO: 1991212 - RNA, 19 nt, Homo sapiens
  misc_RNA (1)...(19): siRNA sense strand
ccaaugaaugcauccaguu

SEQ ID NO: 1991213 - RNA, 19 nt, Homo sapiens
  misc_RNA (1)...(19): siRNA sense strand
ggauaucuucugcgacaau

SEQ ID NO: 1991214 - RNA, 19 nt, Homo sapiens
  misc_RNA (1)...(19): siRNA sense strand
gcagcagugccucggauau

SEQ ID NO: 1991215 - RNA, 19 nt, Homo sapiens
  misc_RNA (1)...(19): siRNA sense strand
acaaugagaaugggccuaa

SEQ ID NO: 1991216 - RNA, 19 nt, Homo sapiens
  misc_RNA (1)...(19): siRNA sense strand
caaugaaugcauccaguuc

SEQ ID NO: 1991217 - RNA, 19 nt, Homo sapiens
  misc_RNA (1)...(19): siRNA sense strand
ggagaucuucuucaacaac

SEQ ID NO: 1991218 - RNA, 19 nt, Homo sapiens
  misc_RNA (1)...(19): siRNA sense strand
ugaacucagugcuggagau

SEQ ID NO: 1991219 - RNA, 19 nt, Homo sapiens
  misc_RNA (1)...(19): siRNA sense strand
gaacucagugcuggagauc

SEQ ID NO: 1991220 - RNA, 19 nt, Homo sapiens
  misc_RNA (1)...(19): siRNA sense strand
gcuaaggucgugcucuaca

SEQ ID NO: 1991221 - RNA, 19 nt, Homo sapiens
  misc_RNA (1)...(19): siRNA sense strand
caccgccucuaucugcaaa

SEQ ID NO: 1991222 - RNA, 19 nt, Homo sapiens
  misc_RNA (1)...(19): siRNA sense strand
gagcuggagaucuucuuca

SEQ ID NO: 1991223 - RNA, 19 nt, Homo sapiens
  misc_RNA (1)...(19): siRNA sense strand
gcagugccucggauaucuu

SEQ ID NO: 1991224 - RNA, 19 nt, Homo sapiens
  misc_RNA (1)...(19): siRNA sense strand
gucgugcucuacaccaaga

SEQ ID NO: 1991225 - RNA, 19 nt, Homo sapiens
  misc_RNA (1)...(19): siRNA sense strand
aaguggacaucgucuaugg

SEQ ID NO: 1991226 - RNA, 19 nt, Homo sapiens
  misc_RNA (1)...(19): siRNA sense strand
cgugugcccucgagacaag

SEQ ID NO: 1991227 - RNA, 19 nt, Homo sapiens
  misc_RNA (1)...(19): siRNA sense strand
ggagcuggagaucuucuuc

SEQ ID NO: 1991228 - RNA, 19 nt, Homo sapiens
  misc_RNA (1)...(19): siRNA sense strand
ggagcccguggcacacuuu

SEQ ID NO: 1991229 - RNA, 19 nt, Homo sapiens
  misc_RNA (1)...(19): siRNA sense strand
gauccucuccuuagucuua

SEQ ID NO: 1991230 - RNA, 19 nt, Homo sapiens
  misc_RNA (1)...(19): siRNA sense strand
ggacaugauccucuccuua

SEQ ID NO: 1991231 - RNA, 19 nt, Homo sapiens
  misc_RNA (1)...(19): siRNA sense strand
gguguucagugguguauau

SEQ ID NO: 1991232 - RNA, 19 nt, Homo sapiens
  misc_RNA (1)...(19): siRNA sense strand
guucagugguguauauuuc

SEQ ID NO: 1991233 - RNA, 19 nt, Homo sapiens
  misc_RNA (1)...(19): siRNA sense strand
gacaugauccucuccuuag

SEQ ID NO: 1991234 - RNA, 19 nt, Homo sapiens
  misc_RNA (1)...(19): siRNA sense strand
gacaacuccucgcccucua

SEQ ID NO: 1991235 - RNA, 19 nt, Homo sapiens
  misc_RNA (1)...(19): siRNA sense strand
ucagugguguauauuucuu

SEQ ID NO: 1991236 - RNA, 19 nt, Homo sapiens
  misc_RNA (1)...(19): siRNA sense strand
gggacaugauccucuccuu

SEQ ID NO: 1991237 - RNA, 19 nt, Homo sapiens
  misc_RNA (1)...(19): siRNA sense strand
cccuuugguuguaugauuu

SEQ ID NO: 1991238 - RNA, 19 nt, Homo sapiens
  misc_RNA (1)...(19): siRNA sense strand
gcucauggggcucuuuaua

SEQ ID NO: 1991239 - RNA, 19 nt, Homo sapiens
  misc_RNA (1)...(19): siRNA sense strand
ucccuucccucucccaugu

SEQ ID NO: 1991240 - RNA, 19 nt, Homo sapiens
  misc_RNA (1)...(19): siRNA sense strand
gaagagugcagucccaaua

SEQ ID NO: 1991241 - RNA, 19 nt, Homo sapiens
  misc_RNA (1)...(19): siRNA sense strand
caauguggaccuccuguuu

SEQ ID NO: 1991242 - RNA, 19 nt, Homo sapiens
  misc_RNA (1)...(19): siRNA sense strand
aggaugcgguggcccuuua

SEQ ID NO: 1991243 - RNA, 19 nt, Homo sapiens
  misc_RNA (1)...(19): siRNA sense strand
aguacaagaugcuggauga

SEQ ID NO: 1991244 - RNA, 19 nt, Homo sapiens
  misc_RNA (1)...(19): siRNA sense strand
gccaagaccggcuacaaug

SEQ ID NO: 1991245 - RNA, 19 nt, Homo sapiens
  misc_RNA (1)...(19): siRNA sense strand
gagcugagaggccgucaca

SEQ ID NO: 1991246 - RNA, 19 nt, Homo sapiens
  misc_RNA (1)...(19): siRNA sense strand
gcugagaggccgucacaca

SEQ ID NO: 1991247 - RNA, 19 nt, Homo sapiens
  misc_RNA (1)...(19): siRNA sense strand
caguggcgcuccuacaaca

SEQ ID NO: 1991248 - RNA, 19 nt, Homo sapiens
  misc_RNA (1)...(19): siRNA sense strand
caagaccggcuacaaugug

SEQ ID NO: 1991249 - RNA, 19 nt, Homo sapiens
  misc_RNA (1)...(19): siRNA sense strand
agagugcagucccaauaug

SEQ ID NO: 1991250 - RNA, 19 nt, Homo sapiens
  misc_RNA (1)...(19): siRNA sense strand
gacagacacagccagcaaa

SEQ ID NO: 1991251 - RNA, 19 nt, Homo sapiens
  misc_RNA (1)...(19): siRNA sense strand
gaccugguggugccaauga

SEQ ID NO: 1991252 - RNA, 19 nt, Homo sapiens
  misc_RNA (1)...(19): siRNA sense strand
ucacacacaguggauauau

SEQ ID NO: 1991253 - RNA, 19 nt, Homo sapiens
  misc_RNA (1)...(19): siRNA sense strand
ugacagacacagccagcaa

SEQ ID NO: 1991254 - RNA, 19 nt, Homo sapiens
  misc_RNA (1)...(19): siRNA sense strand
ccaagaccggcuacaaugu

SEQ ID NO: 1991255 - RNA, 19 nt, Homo sapiens
  misc_RNA (1)...(19): siRNA sense strand
aaaagauccucaaguacaa

SEQ ID NO: 1991256 - RNA, 19 nt, Homo sapiens
  misc_RNA (1)...(19): siRNA sense strand
gaugcgguggcccuuuaua

SEQ ID NO: 1991257 - RNA, 19 nt, Homo sapiens
  misc_RNA (1)...(19): siRNA sense strand
ggaagagugcagucccaau

SEQ ID NO: 1991258 - RNA, 19 nt, Homo sapiens
  misc_RNA (1)...(19): siRNA sense strand
gguggugccaaugaucuua

SEQ ID NO: 1991259 - RNA, 19 nt, Homo sapiens
  misc_RNA (1)...(19): siRNA sense strand
gauccucaaguacaagaug

SEQ ID NO: 1991260 - RNA, 19 nt, Homo sapiens
  misc_RNA (1)...(19): siRNA sense strand
gccaucauccucaccuaug

SEQ ID NO: 1991261 - RNA, 19 nt, Homo sapiens
  misc_RNA (1)...(19): siRNA sense strand
agucauaagccacccaaga

SEQ ID NO: 1991262 - RNA, 19 nt, Homo sapiens
  misc_RNA (1)...(19): siRNA sense strand
auguggaccuccuguuuga

SEQ ID NO: 1991263 - RNA, 19 nt, Homo sapiens
  misc_RNA (1)...(19): siRNA sense strand
ccuacaacaucuccaucug

SEQ ID NO: 1991264 - RNA, 19 nt, Homo sapiens
  misc_RNA (1)...(19): siRNA sense strand
uguuugagacccucuuuga

SEQ ID NO: 1991265 - RNA, 19 nt, Homo sapiens
  misc_RNA (1)...(19): siRNA sense strand
agacacagccagcaaagac

SEQ ID NO: 1991266 - RNA, 19 nt, Homo sapiens
  misc_RNA (1)...(19): siRNA sense strand
guggaccuccuguuugaga

SEQ ID NO: 1991267 - RNA, 19 nt, Homo sapiens
  misc_RNA (1)...(19): siRNA sense strand
cacacacaguggauauauc

SEQ ID NO: 1991268 - RNA, 19 nt, Homo sapiens
  misc_RNA (1)...(19): siRNA sense strand
gauauauccagucauaagc

SEQ ID NO: 1991269 - RNA, 19 nt, Homo sapiens
  misc_RNA (1)...(19): siRNA sense strand
ugcgguggcccuuuauaaa

SEQ ID NO: 1991270 - RNA, 19 nt, Homo sapiens
  misc_RNA (1)...(19): siRNA sense strand
gucauaagccacccaagag

SEQ ID NO: 1991271 - RNA, 19 nt, Homo sapiens
  misc_RNA (1)...(19): siRNA sense strand
cgucacacacaguggauau

SEQ ID NO: 1991272 - RNA, 19 nt, Homo sapiens
  misc_RNA (1)...(19): siRNA sense strand
ggccugggauccauguacu

SEQ ID NO: 1991273 - RNA, 19 nt, Homo sapiens
  misc_RNA (1)...(19): siRNA sense strand
gcgccaagaccggcuacaa

SEQ ID NO: 1991274 - RNA, 19 nt, Homo sapiens
  misc_RNA (1)...(19): siRNA sense strand
gcgguggcccuuuauaaaa

SEQ ID NO: 1991275 - RNA, 19 nt, Homo sapiens
  misc_RNA (1)...(19): siRNA sense strand
gaaauggccuuguuuaaag

SEQ ID NO: 1991276 - RNA, 19 nt, Homo sapiens
  misc_RNA (1)...(19): siRNA sense strand
gaaguuaagucucuccaaa

SEQ ID NO: 1991277 - RNA, 19 nt, Homo sapiens
  misc_RNA (1)...(19): siRNA sense strand
guggagagaugucgaauaa

SEQ ID NO: 1991278 - RNA, 19 nt, Homo sapiens
  misc_RNA (1)...(19): siRNA sense strand
gaagaaagaggaacagaaa

SEQ ID NO: 1991279 - RNA, 19 nt, Homo sapiens
  misc_RNA (1)...(19): siRNA sense strand
guaccaagauccagaaguu

SEQ ID NO: 1991280 - RNA, 19 nt, Homo sapiens
  misc_RNA (1)...(19): siRNA sense strand
ggaaauggccuuguuuaaa

SEQ ID NO: 1991281 - RNA, 19 nt, Homo sapiens
  misc_RNA (1)...(19): siRNA sense strand
gcaggaacauucucuacaa

SEQ ID NO: 1991282 - RNA, 19 nt, Homo sapiens
  misc_RNA (1)...(19): siRNA sense strand
gcaaacagguggucgagau

SEQ ID NO: 1991283 - RNA, 19 nt, Homo sapiens
  misc_RNA (1)...(19): siRNA sense strand
gaaauuguccuucaaaugg

SEQ ID NO: 1991284 - RNA, 19 nt, Homo sapiens
  misc_RNA (1)...(19): siRNA sense strand
gcaguaggacaauuucuua

SEQ ID NO: 1991285 - RNA, 19 nt, Homo sapiens
  misc_RNA (1)...(19): siRNA sense strand
ggagagaugucgaauaagg

SEQ ID NO: 1991286 - RNA, 19 nt, Homo sapiens
  misc_RNA (1)...(19): siRNA sense strand
ggaaaagccuucaucauau

SEQ ID NO: 1991287 - RNA, 19 nt, Homo sapiens
  misc_RNA (1)...(19): siRNA sense strand
ccacagauccucauccaaa

SEQ ID NO: 1991288 - RNA, 19 nt, Homo sapiens
  misc_RNA (1)...(19): siRNA sense strand
gagaaggccuugagagaag

SEQ ID NO: 1991289 - RNA, 19 nt, Homo sapiens
  misc_RNA (1)...(19): siRNA sense strand
caggaaaucugacuauauc

SEQ ID NO: 1991290 - RNA, 19 nt, Homo sapiens
  misc_RNA (1)...(19): siRNA sense strand
gaaaagccuucaucauauu

SEQ ID NO: 1991291 - RNA, 19 nt, Homo sapiens
  misc_RNA (1)...(19): siRNA sense strand
gcauccgucuuucucguua

SEQ ID NO: 1991292 - RNA, 19 nt, Homo sapiens
  misc_RNA (1)...(19): siRNA sense strand
gugaaagcuugccugaaua

SEQ ID NO: 1991293 - RNA, 19 nt, Homo sapiens
  misc_RNA (1)...(19): siRNA sense strand
gcugaggccuauuguaaga

SEQ ID NO: 1991294 - RNA, 19 nt, Homo sapiens
  misc_RNA (1)...(19): siRNA sense strand
gcgaagaccuuuugauuug

SEQ ID NO: 1991295 - RNA, 19 nt, Homo sapiens
  misc_RNA (1)...(19): siRNA sense strand
gcucaccaguauaugauuu

SEQ ID NO: 1991296 - RNA, 19 nt, Homo sapiens
  misc_RNA (1)...(19): siRNA sense strand
cgaggacccugcucuagaa

SEQ ID NO: 1991297 - RNA, 19 nt, Homo sapiens
  misc_RNA (1)...(19): siRNA sense strand
gagaggaccauucccguuu

SEQ ID NO: 1991298 - RNA, 19 nt, Homo sapiens
  misc_RNA (1)...(19): siRNA sense strand
gaacuucagcccuggagaa

SEQ ID NO: 1991299 - RNA, 19 nt, Homo sapiens
  misc_RNA (1)...(19): siRNA sense strand
gcagagcgguuucgaagac

SEQ ID NO: 1991300 - RNA, 19 nt, Homo sapiens
  misc_RNA (1)...(19): siRNA sense strand
ggaagaaagaggaacagaa

SEQ ID NO: 1991301 - RNA, 19 nt, Homo sapiens
  misc_RNA (1)...(19): siRNA sense strand
ugacuuagcuuuugauaug

SEQ ID NO: 1991302 - RNA, 19 nt, Homo sapiens
  misc_RNA (1)...(19): siRNA sense strand
ggacaauuucuuaaacuga

SEQ ID NO: 1991303 - RNA, 19 nt, Homo sapiens
  misc_RNA (1)...(19): siRNA sense strand
gaaguugauugaccacuac

SEQ ID NO: 1991304 - RNA, 19 nt, Homo sapiens
  misc_RNA (1)...(19): siRNA sense strand
gagcugcccagacacauaa

SEQ ID NO: 1991305 - RNA, 19 nt, Homo sapiens
  misc_RNA (1)...(19): siRNA sense strand
cagcucaucuggacacgaa

SEQ ID NO: 1991306 - RNA, 19 nt, Homo sapiens
  misc_RNA (1)...(19): siRNA sense strand
gaagagccauaaaggacau

SEQ ID NO: 1991307 - RNA, 19 nt, Homo sapiens
  misc_RNA (1)...(19): siRNA sense strand
agugaaagcuugccugaau

SEQ ID NO: 1991308 - RNA, 19 nt, Homo sapiens
  misc_RNA (1)...(19): siRNA sense strand
caagaaauuguccuucaaa

SEQ ID NO: 1991309 - RNA, 19 nt, Homo sapiens
  misc_RNA (1)...(19): siRNA sense strand
ggacccugcucuagaagga

SEQ ID NO: 1991310 - RNA, 19 nt, Homo sapiens
  misc_RNA (1)...(19): siRNA sense strand
gaacguacgccaggaaauc

SEQ ID NO: 1991311 - RNA, 19 nt, Homo sapiens
  misc_RNA (1)...(19): siRNA sense strand
gccaggaaaucugacuaua

SEQ ID NO: 1991312 - RNA, 19 nt, Homo sapiens
  misc_RNA (1)...(19): siRNA sense strand
cgucacagcugcaaauuuu

SEQ ID NO: 1991313 - RNA, 19 nt, Homo sapiens
  misc_RNA (1)...(19): siRNA sense strand
gagacggcgguucgaauua

SEQ ID NO: 1991314 - RNA, 19 nt, Homo sapiens
  misc_RNA (1)...(19): siRNA sense strand
aaagcuugccugaauauuu

SEQ ID NO: 1991315 - RNA, 19 nt, Homo sapiens
  misc_RNA (1)...(19): siRNA sense strand
gucgagauauccagucuga

SEQ ID NO: 1991316 - RNA, 19 nt, Homo sapiens
  misc_RNA (1)...(19): siRNA sense strand
caggaacauucucuacaaa

SEQ ID NO: 1991317 - RNA, 19 nt, Homo sapiens
  misc_RNA (1)...(19): siRNA sense strand
gaaggaagacuacgaucuc

SEQ ID NO: 1991318 - RNA, 19 nt, Homo sapiens
  misc_RNA (1)...(19): siRNA sense strand
aacaagccauugcugauuu

SEQ ID NO: 1991319 - RNA, 19 nt, Homo sapiens
  misc_RNA (1)...(19): siRNA sense strand
gcacagaucauacgaaaau

SEQ ID NO: 1991320 - RNA, 19 nt, Homo sapiens
  misc_RNA (1)...(19): siRNA sense strand
agaaguugauugaccacua

SEQ ID NO: 1991321 - RNA, 19 nt, Homo sapiens
  misc_RNA (1)...(19): siRNA sense strand
guaggacaauuucuuaaac

SEQ ID NO: 1991322 - RNA, 19 nt, Homo sapiens
  misc_RNA (1)...(19): siRNA sense strand
caggaaauggccuuguuua

SEQ ID NO: 1991323 - RNA, 19 nt, Homo sapiens
  misc_RNA (1)...(19): siRNA sense strand
aggaagagcugcccagaca

SEQ ID NO: 1991324 - RNA, 19 nt, Homo sapiens
  misc_RNA (1)...(19): siRNA sense strand
uggcagcacugaaagaaau

SEQ ID NO: 1991325 - RNA, 19 nt, Homo sapiens
  misc_RNA (1)...(19): siRNA sense strand
guuaagucucuccaaauua

SEQ ID NO: 1991326 - RNA, 19 nt, Homo sapiens
  misc_RNA (1)...(19): siRNA sense strand
aaaaggaacgcuaugauua

SEQ ID NO: 1991327 - RNA, 19 nt, Homo sapiens
  misc_RNA (1)...(19): siRNA sense strand
gaaaagcggcuacagaaga

SEQ ID NO: 1991328 - RNA, 19 nt, Homo sapiens
  misc_RNA (1)...(19): siRNA sense strand
gagaugagggcacggagaa

SEQ ID NO: 1991329 - RNA, 19 nt, Homo sapiens
  misc_RNA (1)...(19): siRNA sense strand
cagcuauucguaagcauua

SEQ ID NO: 1991330 - RNA, 19 nt, Homo sapiens
  misc_RNA (1)...(19): siRNA sense strand
ggaugcaguaggacaauuu

SEQ ID NO: 1991331 - RNA, 19 nt, Homo sapiens
  misc_RNA (1)...(19): siRNA sense strand
aguuaagucucuccaaauu

SEQ ID NO: 1991332 - RNA, 19 nt, Homo sapiens
  misc_RNA (1)...(19): siRNA sense strand
gauuaugccaagaaacuaa

SEQ ID NO: 1991333 - RNA, 19 nt, Homo sapiens
  misc_RNA (1)...(19): siRNA sense strand
ccaaaaccaugucaacaaa

SEQ ID NO: 1991334 - RNA, 19 nt, Homo sapiens
  misc_RNA (1)...(19): siRNA sense strand
ggagguaugagguagagaa

SEQ ID NO: 1991335 - RNA, 19 nt, Homo sapiens
  misc_RNA (1)...(19): siRNA sense strand
gaagagcugcccagacaca

SEQ ID NO: 1991336 - RNA, 19 nt, Homo sapiens
  misc_RNA (1)...(19): siRNA sense strand
gccaaagaaucaggacauu

SEQ ID NO: 1991337 - RNA, 19 nt, Homo sapiens
  misc_RNA (1)...(19): siRNA sense strand
ccaggaaaucugacuauau

SEQ ID NO: 1991338 - RNA, 19 nt, Homo sapiens
  misc_RNA (1)...(19): siRNA sense strand
gcucgggcuucaccauuga

SEQ ID NO: 1991339 - RNA, 19 nt, Homo sapiens
  misc_RNA (1)...(19): siRNA sense strand
cugcuugccuugucuaaga

SEQ ID NO: 1991340 - RNA, 19 nt, Homo sapiens
  misc_RNA (1)...(19): siRNA sense strand
aaaggaacgcuaugauuau

SEQ ID NO: 1991341 - RNA, 19 nt, Homo sapiens
  misc_RNA (1)...(19): siRNA sense strand
gaaaucugacuauaucucu

SEQ ID NO: 1991342 - RNA, 19 nt, Homo sapiens
  misc_RNA (1)...(19): siRNA sense strand
auggaaagcucaccugaug

SEQ ID NO: 1991343 - RNA, 19 nt, Homo sapiens
  misc_RNA (1)...(19): siRNA sense strand
caaacagguggucgagaua

SEQ ID NO: 1991344 - RNA, 19 nt, Homo sapiens
  misc_RNA (1)...(19): siRNA sense strand
gugcagccauugaaagcaa

SEQ ID NO: 1991345 - RNA, 19 nt, Homo sapiens
  misc_RNA (1)...(19): siRNA sense strand
uugcacagaucauacgaaa

SEQ ID NO: 1991346 - RNA, 19 nt, Homo sapiens
  misc_RNA (1)...(19): siRNA sense strand
gguaugagguagagaaacg

SEQ ID NO: 1991347 - RNA, 19 nt, Homo sapiens
  misc_RNA (1)...(19): siRNA sense strand
gugaugcugugaagccaaa

SEQ ID NO: 1991348 - RNA, 19 nt, Homo sapiens
  misc_RNA (1)...(19): siRNA sense strand
gagaaaagcggcuacagaa

SEQ ID NO: 1991349 - RNA, 19 nt, Homo sapiens
  misc_RNA (1)...(19): siRNA sense strand
ugagugcccuggagcauag

SEQ ID NO: 1991350 - RNA, 19 nt, Homo sapiens
  misc_RNA (1)...(19): siRNA sense strand
gcucugccaucgauguguu

SEQ ID NO: 1991351 - RNA, 19 nt, Homo sapiens
  misc_RNA (1)...(19): siRNA sense strand
ggagaaggaagacuacgau

SEQ ID NO: 1991352 - RNA, 19 nt, Homo sapiens
  misc_RNA (1)...(19): siRNA sense strand
ggaaaguguuaccguugca

SEQ ID NO: 1991353 - RNA, 19 nt, Homo sapiens
  misc_RNA (1)...(19): siRNA sense strand
cauaaacugaguaaacuug

SEQ ID NO: 1991354 - RNA, 19 nt, Homo sapiens
  misc_RNA (1)...(19): siRNA sense strand
cagagucccugcccuacga

SEQ ID NO: 1991355 - RNA, 19 nt, Homo sapiens
  misc_RNA (1)...(19): siRNA sense strand
gagcugaugcgaagaccuu

SEQ ID NO: 1991356 - RNA, 19 nt, Homo sapiens
  misc_RNA (1)...(19): siRNA sense strand
uaccacaacuggaagaaag

SEQ ID NO: 1991357 - RNA, 19 nt, Homo sapiens
  misc_RNA (1)...(19): siRNA sense strand
agaaagugaugcugugaag

SEQ ID NO: 1991358 - RNA, 19 nt, Homo sapiens
  misc_RNA (1)...(19): siRNA sense strand
cgagaaggccuugagagaa

SEQ ID NO: 1991359 - RNA, 19 nt, Homo sapiens
  misc_RNA (1)...(19): siRNA sense strand
gcgaggacccugcucuaga

SEQ ID NO: 1991360 - RNA, 19 nt, Homo sapiens
  misc_RNA (1)...(19): siRNA sense strand
ggacauucaaggagggaaa

SEQ ID NO: 1991361 - RNA, 19 nt, Homo sapiens
  misc_RNA (1)...(19): siRNA sense strand
agacggcgguucgaauuau

SEQ ID NO: 1991362 - RNA, 19 nt, Homo sapiens
  misc_RNA (1)...(19): siRNA sense strand
aaauggccuuguuuaaaga

SEQ ID NO: 1991363 - RNA, 19 nt, Homo sapiens
  misc_RNA (1)...(19): siRNA sense strand
acugagagcauccgucuuu

SEQ ID NO: 1991364 - RNA, 19 nt, Homo sapiens
  misc_RNA (1)...(19): siRNA sense strand
aaacaagccauugcugauu

SEQ ID NO: 1991365 - RNA, 19 nt, Homo sapiens
  misc_RNA (1)...(19): siRNA sense strand
cuacgugucucucugugau

SEQ ID NO: 1991366 - RNA, 19 nt, Homo sapiens
  misc_RNA (1)...(19): siRNA sense strand
ucaaaggccggaagcaaga

SEQ ID NO: 1991367 - RNA, 19 nt, Homo sapiens
  misc_RNA (1)...(19): siRNA sense strand
cgagacggcgguucgaauu

SEQ ID NO: 1991368 - RNA, 19 nt, Homo sapiens
  misc_RNA (1)...(19): siRNA sense strand
agaagaagcagcagaugga

SEQ ID NO: 1991369 - RNA, 19 nt, Homo sapiens
  misc_RNA (1)...(19): siRNA sense strand
gcuaugauuaugccaagaa

SEQ ID NO: 1991370 - RNA, 19 nt, Homo sapiens
  misc_RNA (1)...(19): siRNA sense strand
uggagacccugcagauuuc

SEQ ID NO: 1991371 - RNA, 19 nt, Homo sapiens
  misc_RNA (1)...(19): siRNA sense strand
gacggcgguucgaauuauu

SEQ ID NO: 1991372 - RNA, 19 nt, Homo sapiens
  misc_RNA (1)...(19): siRNA sense strand
ugccuugucuaagaaguua

SEQ ID NO: 1991373 - RNA, 19 nt, Homo sapiens
  misc_RNA (1)...(19): siRNA sense strand
aggaaaagccuucaucaua

SEQ ID NO: 1991374 - RNA, 19 nt, Homo sapiens
  misc_RNA (1)...(19): siRNA sense strand
uugcugaggccuauuguaa

SEQ ID NO: 1991375 - RNA, 19 nt, Homo sapiens
  misc_RNA (1)...(19): siRNA sense strand
ggaagcaacugucgagauu

SEQ ID NO: 1991376 - RNA, 19 nt, Homo sapiens
  misc_RNA (1)...(19): siRNA sense strand
gaaaggauaccgcaaguuu

SEQ ID NO: 1991377 - RNA, 19 nt, Homo sapiens
  misc_RNA (1)...(19): siRNA sense strand
gaacaucgguacuggaguu

SEQ ID NO: 1991378 - RNA, 19 nt, Homo sapiens
  misc_RNA (1)...(19): siRNA sense strand
ggaagugggugucgaagaa

SEQ ID NO: 1991379 - RNA, 19 nt, Homo sapiens
  misc_RNA (1)...(19): siRNA sense strand
ccaguaagcucaccuuugu

SEQ ID NO: 1991380 - RNA, 19 nt, Homo sapiens
  misc_RNA (1)...(19): siRNA sense strand
ggacuccucuucuacauca

SEQ ID NO: 1991381 - RNA, 19 nt, Homo sapiens
  misc_RNA (1)...(19): siRNA sense strand
caacuuggcugaccauugg

SEQ ID NO: 1991382 - RNA, 19 nt, Homo sapiens
  misc_RNA (1)...(19): siRNA sense strand
gaacuuaccugagauuucg

SEQ ID NO: 1991383 - RNA, 19 nt, Homo sapiens
  misc_RNA (1)...(19): siRNA sense strand
gcuaaugccugccuucaga

SEQ ID NO: 1991384 - RNA, 19 nt, Homo sapiens
  misc_RNA (1)...(19): siRNA sense strand
gaagaugaggccagaaauu

SEQ ID NO: 1991385 - RNA, 19 nt, Homo sapiens
  misc_RNA (1)...(19): siRNA sense strand
gagcagaagugcccaccaa

SEQ ID NO: 1991386 - RNA, 19 nt, Homo sapiens
  misc_RNA (1)...(19): siRNA sense strand
gggagacgcucaaguaucu

SEQ ID NO: 1991387 - RNA, 19 nt, Homo sapiens
  misc_RNA (1)...(19): siRNA sense strand
gaggaaagcugaggauuuu

SEQ ID NO: 1991388 - RNA, 19 nt, Homo sapiens
  misc_RNA (1)...(19): siRNA sense strand
ccugagaacuuaccugaga

SEQ ID NO: 1991389 - RNA, 19 nt, Homo sapiens
  misc_RNA (1)...(19): siRNA sense strand
ccaccucaccugcagauua

SEQ ID NO: 1991390 - RNA, 19 nt, Homo sapiens
  misc_RNA (1)...(19): siRNA sense strand
gaggaaagaauuugaggaa

SEQ ID NO: 1991391 - RNA, 19 nt, Homo sapiens
  misc_RNA (1)...(19): siRNA sense strand
gaucuugggucugaggaaa

SEQ ID NO: 1991392 - RNA, 19 nt, Homo sapiens
  misc_RNA (1)...(19): siRNA sense strand
caccgacccugagaacuua

SEQ ID NO: 1991393 - RNA, 19 nt, Homo sapiens
  misc_RNA (1)...(19): siRNA sense strand
gagauuucgucacagaaga

SEQ ID NO: 1991394 - RNA, 19 nt, Homo sapiens
  misc_RNA (1)...(19): siRNA sense strand
gugcccauguucaucaaua

SEQ ID NO: 1991395 - RNA, 19 nt, Homo sapiens
  misc_RNA (1)...(19): siRNA sense strand
gggacaagauggagagcuu

SEQ ID NO: 1991396 - RNA, 19 nt, Homo sapiens
  misc_RNA (1)...(19): siRNA sense strand
ggagacuuguuaccagaug

SEQ ID NO: 1991397 - RNA, 19 nt, Homo sapiens
  misc_RNA (1)...(19): siRNA sense strand
ugaggaaagcugaggauuu

SEQ ID NO: 1991398 - RNA, 19 nt, Homo sapiens
  misc_RNA (1)...(19): siRNA sense strand
caucaacaauguccaggau

SEQ ID NO: 1991399 - RNA, 19 nt, Homo sapiens
  misc_RNA (1)...(19): siRNA sense strand
cagaacaccauccaagauu

SEQ ID NO: 1991400 - RNA, 19 nt, Homo sapiens
  misc_RNA (1)...(19): siRNA sense strand
cauccaagauuccuuacuc

SEQ ID NO: 1991401 - RNA, 19 nt, Homo sapiens
  misc_RNA (1)...(19): siRNA sense strand
cagaagaugaggccagaaa

SEQ ID NO: 1991402 - RNA, 19 nt, Homo sapiens
  misc_RNA (1)...(19): siRNA sense strand
gcuggaagacuacguggaa

SEQ ID NO: 1991403 - RNA, 19 nt, Homo sapiens
  misc_RNA (1)...(19): siRNA sense strand
uaccugagauuucgucaca

SEQ ID NO: 1991404 - RNA, 19 nt, Homo sapiens
  misc_RNA (1)...(19): siRNA sense strand
gggagauucugcagagcuu

SEQ ID NO: 1991405 - RNA, 19 nt, Homo sapiens
  misc_RNA (1)...(19): siRNA sense strand
gaggaagagcagaagauga

SEQ ID NO: 1991406 - RNA, 19 nt, Homo sapiens
  misc_RNA (1)...(19): siRNA sense strand
gagacuuguuaccagauga

SEQ ID NO: 1991407 - RNA, 19 nt, Homo sapiens
  misc_RNA (1)...(19): siRNA sense strand
gccgacagcuacuaugagu

SEQ ID NO: 1991408 - RNA, 19 nt, Homo sapiens
  misc_RNA (1)...(19): siRNA sense strand
caccucaccugcagauuag

SEQ ID NO: 1991409 - RNA, 19 nt, Homo sapiens
  misc_RNA (1)...(19): siRNA sense strand
ccugagauuucgucacaga

SEQ ID NO: 1991410 - RNA, 19 nt, Homo sapiens
  misc_RNA (1)...(19): siRNA sense strand
gcacauccacggccugucu

SEQ ID NO: 1991411 - RNA, 19 nt, Homo sapiens
  misc_RNA (1)...(19): siRNA sense strand
gggcgugauugacgucuuc

SEQ ID NO: 1991412 - RNA, 19 nt, Homo sapiens
  misc_RNA (1)...(19): siRNA sense strand
ggcgagagcuaugacaaca

SEQ ID NO: 1991413 - RNA, 19 nt, Homo sapiens
  misc_RNA (1)...(19): siRNA sense strand
ucuguggacuccucuucua

SEQ ID NO: 1991414 - RNA, 19 nt, Homo sapiens
  misc_RNA (1)...(19): siRNA sense strand
caccauccaagauuccuua

SEQ ID NO: 1991415 - RNA, 19 nt, Homo sapiens
  misc_RNA (1)...(19): siRNA sense strand
gaagacacaaagacacauc

SEQ ID NO: 1991416 - RNA, 19 nt, Homo sapiens
  misc_RNA (1)...(19): siRNA sense strand
agaaauugcuggguuaaaa

SEQ ID NO: 1991417 - RNA, 19 nt, Homo sapiens
  misc_RNA (1)...(19): siRNA sense strand
gcaagaagccccuguggau

SEQ ID NO: 1991418 - RNA, 19 nt, Homo sapiens
  misc_RNA (1)...(19): siRNA sense strand
agaacaccauccaagauuc

SEQ ID NO: 1991419 - RNA, 19 nt, Homo sapiens
  misc_RNA (1)...(19): siRNA sense strand
gccagaagggcgugauuga

SEQ ID NO: 1991420 - RNA, 19 nt, Homo sapiens
  misc_RNA (1)...(19): siRNA sense strand
cuccuugccuuucugcuuu

SEQ ID NO: 1991421 - RNA, 19 nt, Homo sapiens
  misc_RNA (1)...(19): siRNA sense strand
gaucgugcacuucaaccuu

SEQ ID NO: 1991422 - RNA, 19 nt, Homo sapiens
  misc_RNA (1)...(19): siRNA sense strand
aagaugaggccagaaauug

SEQ ID NO: 1991423 - RNA, 19 nt, Homo sapiens
  misc_RNA (1)...(19): siRNA sense strand
caccagugcaucugaacua

SEQ ID NO: 1991424 - RNA, 19 nt, Homo sapiens
  misc_RNA (1)...(19): siRNA sense strand
gggccgacagcuacuauga

SEQ ID NO: 1991425 - RNA, 19 nt, Homo sapiens
  misc_RNA (1)...(19): siRNA sense strand
ggaaaggauaccgcaaguu

SEQ ID NO: 1991426 - RNA, 19 nt, Homo sapiens
  misc_RNA (1)...(19): siRNA sense strand
ggacaccgacccugagaac

SEQ ID NO: 1991427 - RNA, 19 nt, Homo sapiens
  misc_RNA (1)...(19): siRNA sense strand
guucaucaauacccacagu

SEQ ID NO: 1991428 - RNA, 19 nt, Homo sapiens
  misc_RNA (1)...(19): siRNA sense strand
gagaacuuaccugagauuu

SEQ ID NO: 1991429 - RNA, 19 nt, Homo sapiens
  misc_RNA (1)...(19): siRNA sense strand
ccgcuucagugccaagaug

SEQ ID NO: 1991430 - RNA, 19 nt, Homo sapiens
  misc_RNA (1)...(19): siRNA sense strand
acaccgacccugagaacuu

SEQ ID NO: 1991431 - RNA, 19 nt, Homo sapiens
  misc_RNA (1)...(19): siRNA sense strand
gcuauucuuccaucaacaa

SEQ ID NO: 1991432 - RNA, 19 nt, Homo sapiens
  misc_RNA (1)...(19): siRNA sense strand
gagcuucagccgauucaca

SEQ ID NO: 1991433 - RNA, 19 nt, Homo sapiens
  misc_RNA (1)...(19): siRNA sense strand
cgagauugcagcggaauau

SEQ ID NO: 1991434 - RNA, 19 nt, Homo sapiens
  misc_RNA (1)...(19): siRNA sense strand
cagaagacacaaagacaca

SEQ ID NO: 1991435 - RNA, 19 nt, Homo sapiens
  misc_RNA (1)...(19): siRNA sense strand
gcgggaagcaggagacaca

SEQ ID NO: 1991436 - RNA, 19 nt, Homo sapiens
  misc_RNA (1)...(19): siRNA sense strand
gaaggugacacagcacauc

SEQ ID NO: 1991437 - RNA, 19 nt, Homo sapiens
  misc_RNA (1)...(19): siRNA sense strand
ucagaacaccauccaagau

SEQ ID NO: 1991438 - RNA, 19 nt, Homo sapiens
  misc_RNA (1)...(19): siRNA sense strand
cagcaaauccacccgucuu

SEQ ID NO: 1991439 - RNA, 19 nt, Homo sapiens
  misc_RNA (1)...(19): siRNA sense strand
ggucugaggaaagaauuug

SEQ ID NO: 1991440 - RNA, 19 nt, Homo sapiens
  misc_RNA (1)...(19): siRNA sense strand
gaagcaacugucgagauug

SEQ ID NO: 1991441 - RNA, 19 nt, Homo sapiens
  misc_RNA (1)...(19): siRNA sense strand
gucccgagaucgugcacuu

SEQ ID NO: 1991442 - RNA, 19 nt, Homo sapiens
  misc_RNA (1)...(19): siRNA sense strand
uaugacaacagcaagaguu

SEQ ID NO: 1991443 - RNA, 19 nt, Homo sapiens
  misc_RNA (1)...(19): siRNA sense strand
uggaaaggauaccgcaagu

SEQ ID NO: 1991444 - RNA, 19 nt, Homo sapiens
  misc_RNA (1)...(19): siRNA sense strand
gauugcagcggaauaugau

SEQ ID NO: 1991445 - RNA, 19 nt, Homo sapiens
  misc_RNA (1)...(19): siRNA sense strand
cagugcaucugaacuaucg

SEQ ID NO: 1991446 - RNA, 19 nt, Homo sapiens
  misc_RNA (1)...(19): siRNA sense strand
gcagagcuucagccgauuc

SEQ ID NO: 1991447 - RNA, 19 nt, Homo sapiens
  misc_RNA (1)...(19): siRNA sense strand
gcaaauccacccgucuuac

SEQ ID NO: 1991448 - RNA, 19 nt, Homo sapiens
  misc_RNA (1)...(19): siRNA sense strand
auucuuccaucaacaaugu

SEQ ID NO: 1991449 - RNA, 19 nt, Homo sapiens
  misc_RNA (1)...(19): siRNA sense strand
ccaggaagugggugucgaa

SEQ ID NO: 1991450 - RNA, 19 nt, Homo sapiens
  misc_RNA (1)...(19): siRNA sense strand
aaaggauaccgcaaguuug

SEQ ID NO: 1991451 - RNA, 19 nt, Homo sapiens
  misc_RNA (1)...(19): siRNA sense strand
ucacagaagacacaaagac

SEQ ID NO: 1991452 - RNA, 19 nt, Homo sapiens
  misc_RNA (1)...(19): siRNA sense strand
uaucuguucuugcucuucu

SEQ ID NO: 1991453 - RNA, 19 nt, Homo sapiens
  misc_RNA (1)...(19): siRNA sense strand
guccuucagugagugguuu

SEQ ID NO: 1991454 - RNA, 19 nt, Homo sapiens
  misc_RNA (1)...(19): siRNA sense strand
cugcaugcauggaaaggau

SEQ ID NO: 1991455 - RNA, 19 nt, Homo sapiens
  misc_RNA (1)...(19): siRNA sense strand
cuuaccagcuccucagaag

SEQ ID NO: 1991456 - RNA, 19 nt, Homo sapiens
  misc_RNA (1)...(19): siRNA sense strand
ucaacuuggcugaccauug

SEQ ID NO: 1991457 - RNA, 19 nt, Homo sapiens
  misc_RNA (1)...(19): siRNA sense strand
gagauucugcagagcuuca

SEQ ID NO: 1991458 - RNA, 19 nt, Homo sapiens
  misc_RNA (1)...(19): siRNA sense strand
ucgugcacuucaaccuuua

SEQ ID NO: 1991459 - RNA, 19 nt, Homo sapiens
  misc_RNA (1)...(19): siRNA sense strand
ugagaacuuaccugagauu

SEQ ID NO: 1991460 - RNA, 19 nt, Homo sapiens
  misc_RNA (1)...(19): siRNA sense strand
agauugcagcggaauauga

SEQ ID NO: 1991461 - RNA, 19 nt, Homo sapiens
  misc_RNA (1)...(19): siRNA sense strand
gagcucauggagacuuguu

SEQ ID NO: 1991462 - RNA, 19 nt, Homo sapiens
  misc_RNA (1)...(19): siRNA sense strand
gaacaccauccaagauucc

SEQ ID NO: 1991463 - RNA, 19 nt, Homo sapiens
  misc_RNA (1)...(19): siRNA sense strand
ggacaccauguggaucuug

SEQ ID NO: 1991464 - RNA, 19 nt, Homo sapiens
  misc_RNA (1)...(19): siRNA sense strand
cagaaauugcuggguuaaa

SEQ ID NO: 1991465 - RNA, 19 nt, Homo sapiens
  misc_RNA (1)...(19): siRNA sense strand
gagacgcucaaguaucugu

SEQ ID NO: 1991466 - RNA, 19 nt, Homo sapiens
  misc_RNA (1)...(19): siRNA sense strand
cacagaagacacaaagaca

SEQ ID NO: 1991467 - RNA, 19 nt, Homo sapiens
  misc_RNA (1)...(19): siRNA sense strand
uagaggaagagcagaagau

SEQ ID NO: 1991468 - RNA, 19 nt, Homo sapiens
  misc_RNA (1)...(19): siRNA sense strand
guggacuccucuucuacau

SEQ ID NO: 1991469 - RNA, 19 nt, Homo sapiens
  misc_RNA (1)...(19): siRNA sense strand
ggaagcaacugucgagauu

SEQ ID NO: 1991470 - RNA, 19 nt, Homo sapiens
  misc_RNA (1)...(19): siRNA sense strand
gaaaggauaccgcaaguuu

SEQ ID NO: 1991471 - RNA, 19 nt, Homo sapiens
  misc_RNA (1)...(19): siRNA sense strand
gaacaucgguacuggaguu

SEQ ID NO: 1991472 - RNA, 19 nt, Homo sapiens
  misc_RNA (1)...(19): siRNA sense strand
ggaagugggugucgaagaa

SEQ ID NO: 1991473 - RNA, 19 nt, Homo sapiens
  misc_RNA (1)...(19): siRNA sense strand
ccaguaagcucaccuuugu

SEQ ID NO: 1991474 - RNA, 19 nt, Homo sapiens
  misc_RNA (1)...(19): siRNA sense strand
ggacuccucuucuacauca

SEQ ID NO: 1991475 - RNA, 19 nt, Homo sapiens
  misc_RNA (1)...(19): siRNA sense strand
caacuuggcugaccauugg

SEQ ID NO: 1991476 - RNA, 19 nt, Homo sapiens
  misc_RNA (1)...(19): siRNA sense strand
gaacuuaccugagauuucg

SEQ ID NO: 1991477 - RNA, 19 nt, Homo sapiens
  misc_RNA (1)...(19): siRNA sense strand
gcuaaugccugccuucaga

SEQ ID NO: 1991478 - RNA, 19 nt, Homo sapiens
  misc_RNA (1)...(19): siRNA sense strand
gaagaugaggccagaaauu

SEQ ID NO: 1991479 - RNA, 19 nt, Homo sapiens
  misc_RNA (1)...(19): siRNA sense strand
gagcagaagugcccaccaa

SEQ ID NO: 1991480 - RNA, 19 nt, Homo sapiens
  misc_RNA (1)...(19): siRNA sense strand
gggagacgcucaaguaucu

SEQ ID NO: 1991481 - RNA, 19 nt, Homo sapiens
  misc_RNA (1)...(19): siRNA sense strand
gaggaaagcugaggauuuu

SEQ ID NO: 1991482 - RNA, 19 nt, Homo sapiens
  misc_RNA (1)...(19): siRNA sense strand
ccugagaacuuaccugaga

SEQ ID NO: 1991483 - RNA, 19 nt, Homo sapiens
  misc_RNA (1)...(19): siRNA sense strand
ccaccucaccugcagauua

SEQ ID NO: 1991484 - RNA, 19 nt, Homo sapiens
  misc_RNA (1)...(19): siRNA sense strand
gaggaaagaauuugaggaa

SEQ ID NO: 1991485 - RNA, 19 nt, Homo sapiens
  misc_RNA (1)...(19): siRNA sense strand
gaucuugggucugaggaaa

SEQ ID NO: 1991486 - RNA, 19 nt, Homo sapiens
  misc_RNA (1)...(19): siRNA sense strand
caccgacccugagaacuua

SEQ ID NO: 1991487 - RNA, 19 nt, Homo sapiens
  misc_RNA (1)...(19): siRNA sense strand
gagauuucgucacagaaga

SEQ ID NO: 1991488 - RNA, 19 nt, Homo sapiens
  misc_RNA (1)...(19): siRNA sense strand
gugcccauguucaucaaua

SEQ ID NO: 1991489 - RNA, 19 nt, Homo sapiens
  misc_RNA (1)...(19): siRNA sense strand
gggacaagauggagagcuu

SEQ ID NO: 1991490 - RNA, 19 nt, Homo sapiens
  misc_RNA (1)...(19): siRNA sense strand
ggagacuuguuaccagaug

SEQ ID NO: 1991491 - RNA, 19 nt, Homo sapiens
  misc_RNA (1)...(19): siRNA sense strand
ugaggaaagcugaggauuu

SEQ ID NO: 1991492 - RNA, 19 nt, Homo sapiens
  misc_RNA (1)...(19): siRNA sense strand
caucaacaauguccaggau

SEQ ID NO: 1991493 - RNA, 19 nt, Homo sapiens
  misc_RNA (1)...(19): siRNA sense strand
ccaccacuguagucaugua

SEQ ID NO: 1991494 - RNA, 19 nt, Homo sapiens
  misc_RNA (1)...(19): siRNA sense strand
cagaacaccauccaagauu

SEQ ID NO: 1991495 - RNA, 19 nt, Homo sapiens
  misc_RNA (1)...(19): siRNA sense strand
cauccaagauuccuuacuc

SEQ ID NO: 1991496 - RNA, 19 nt, Homo sapiens
  misc_RNA (1)...(19): siRNA sense strand
cagaagaugaggccagaaa

SEQ ID NO: 1991497 - RNA, 19 nt, Homo sapiens
  misc_RNA (1)...(19): siRNA sense strand
gcuggaagacuacguggaa

SEQ ID NO: 1991498 - RNA, 19 nt, Homo sapiens
  misc_RNA (1)...(19): siRNA sense strand
uaccugagauuucgucaca

SEQ ID NO: 1991499 - RNA, 19 nt, Homo sapiens
  misc_RNA (1)...(19): siRNA sense strand
gggagauucugcagagcuu

SEQ ID NO: 1991500 - RNA, 19 nt, Homo sapiens
  misc_RNA (1)...(19): siRNA sense strand
gaggaagagcagaagauga

SEQ ID NO: 1991501 - RNA, 19 nt, Homo sapiens
  misc_RNA (1)...(19): siRNA sense strand
gagacuuguuaccagauga

SEQ ID NO: 1991502 - RNA, 19 nt, Homo sapiens
  misc_RNA (1)...(19): siRNA sense strand
gccgacagcuacuaugagu

SEQ ID NO: 1991503 - RNA, 19 nt, Homo sapiens
  misc_RNA (1)...(19): siRNA sense strand
caccucaccugcagauuag

SEQ ID NO: 1991504 - RNA, 19 nt, Homo sapiens
  misc_RNA (1)...(19): siRNA sense strand
ccugagauuucgucacaga

SEQ ID NO: 1991505 - RNA, 19 nt, Homo sapiens
  misc_RNA (1)...(19): siRNA sense strand
gcacauccacggccugucu

SEQ ID NO: 1991506 - RNA, 19 nt, Homo sapiens
  misc_RNA (1)...(19): siRNA sense strand
ggcgagagcuaugacaaca

SEQ ID NO: 1991507 - RNA, 19 nt, Homo sapiens
  misc_RNA (1)...(19): siRNA sense strand
gggcgugauugacgucuuc

SEQ ID NO: 1991508 - RNA, 19 nt, Homo sapiens
  misc_RNA (1)...(19): siRNA sense strand
ucuguggacuccucuucua

SEQ ID NO: 1991509 - RNA, 19 nt, Homo sapiens
  misc_RNA (1)...(19): siRNA sense strand
caccauccaagauuccuua

SEQ ID NO: 1991510 - RNA, 19 nt, Homo sapiens
  misc_RNA (1)...(19): siRNA sense strand
gaagacacaaagacacauc

SEQ ID NO: 1991511 - RNA, 19 nt, Homo sapiens
  misc_RNA (1)...(19): siRNA sense strand
agaaauugcuggguuaaaa

SEQ ID NO: 1991512 - RNA, 19 nt, Homo sapiens
  misc_RNA (1)...(19): siRNA sense strand
gcaagaagccccuguggau

SEQ ID NO: 1991513 - RNA, 19 nt, Homo sapiens
  misc_RNA (1)...(19): siRNA sense strand
agaacaccauccaagauuc

SEQ ID NO: 1991514 - RNA, 19 nt, Homo sapiens
  misc_RNA (1)...(19): siRNA sense strand
gccagaagggcgugauuga

SEQ ID NO: 1991515 - RNA, 19 nt, Homo sapiens
  misc_RNA (1)...(19): siRNA sense strand
cuccuugccuuucugcuuu

SEQ ID NO: 1991516 - RNA, 19 nt, Homo sapiens
  misc_RNA (1)...(19): siRNA sense strand
gaucgugcacuucaaccuu

SEQ ID NO: 1991517 - RNA, 19 nt, Homo sapiens
  misc_RNA (1)...(19): siRNA sense strand
aagaugaggccagaaauug

SEQ ID NO: 1991518 - RNA, 19 nt, Homo sapiens
  misc_RNA (1)...(19): siRNA sense strand
caccagugcaucugaacua

SEQ ID NO: 1991519 - RNA, 19 nt, Homo sapiens
  misc_RNA (1)...(19): siRNA sense strand
gggccgacagcuacuauga

SEQ ID NO: 1991520 - RNA, 19 nt, Homo sapiens
  misc_RNA (1)...(19): siRNA sense strand
ggaaaggauaccgcaaguu

SEQ ID NO: 1991521 - RNA, 19 nt, Homo sapiens
  misc_RNA (1)...(19): siRNA sense strand
ggacaccgacccugagaac

SEQ ID NO: 1991522 - RNA, 19 nt, Homo sapiens
  misc_RNA (1)...(19): siRNA sense strand
guucaucaauacccacagu

SEQ ID NO: 1991523 - RNA, 19 nt, Homo sapiens
  misc_RNA (1)...(19): siRNA sense strand
gagaacuuaccugagauuu

SEQ ID NO: 1991524 - RNA, 19 nt, Homo sapiens
  misc_RNA (1)...(19): siRNA sense strand
ccgcuucagugccaagaug

SEQ ID NO: 1991525 - RNA, 19 nt, Homo sapiens
  misc_RNA (1)...(19): siRNA sense strand
cgagauugcagcggaauau

SEQ ID NO: 1991526 - RNA, 19 nt, Homo sapiens
  misc_RNA (1)...(19): siRNA sense strand
gcuauucuuccaucaacaa

SEQ ID NO: 1991527 - RNA, 19 nt, Homo sapiens
  misc_RNA (1)...(19): siRNA sense strand
gagcuucagccgauucaca

SEQ ID NO: 1991528 - RNA, 19 nt, Homo sapiens
  misc_RNA (1)...(19): siRNA sense strand
cgccaccacuguagucaug

SEQ ID NO: 1991529 - RNA, 19 nt, Homo sapiens
  misc_RNA (1)...(19): siRNA sense strand
acaccgacccugagaacuu

SEQ ID NO: 1991530 - RNA, 19 nt, Homo sapiens
  misc_RNA (1)...(19): siRNA sense strand
cagaagacacaaagacaca

SEQ ID NO: 1991531 - RNA, 19 nt, Homo sapiens
  misc_RNA (1)...(19): siRNA sense strand
gcgggaagcaggagacaca

SEQ ID NO: 1991532 - RNA, 19 nt, Homo sapiens
  misc_RNA (1)...(19): siRNA sense strand
gaaggugacacagcacauc

SEQ ID NO: 1991533 - RNA, 19 nt, Homo sapiens
  misc_RNA (1)...(19): siRNA sense strand
ucagaacaccauccaagau

SEQ ID NO: 1991534 - RNA, 19 nt, Homo sapiens
  misc_RNA (1)...(19): siRNA sense strand
cagcaaauccacccgucuu

SEQ ID NO: 1991535 - RNA, 19 nt, Homo sapiens
  misc_RNA (1)...(19): siRNA sense strand
ggucugaggaaagaauuug

SEQ ID NO: 1991536 - RNA, 19 nt, Homo sapiens
  misc_RNA (1)...(19): siRNA sense strand
gaagcaacugucgagauug

SEQ ID NO: 1991537 - RNA, 19 nt, Homo sapiens
  misc_RNA (1)...(19): siRNA sense strand
gucccgagaucgugcacuu

SEQ ID NO: 1991538 - RNA, 19 nt, Homo sapiens
  misc_RNA (1)...(19): siRNA sense strand
uaugacaacagcaagaguu

SEQ ID NO: 1991539 - RNA, 19 nt, Homo sapiens
  misc_RNA (1)...(19): siRNA sense strand
uggaaaggauaccgcaagu

SEQ ID NO: 1991540 - RNA, 19 nt, Homo sapiens
  misc_RNA (1)...(19): siRNA sense strand
gauugcagcggaauaugau

SEQ ID NO: 1991541 - RNA, 19 nt, Homo sapiens
  misc_RNA (1)...(19): siRNA sense strand
cagugcaucugaacuaucg

SEQ ID NO: 1991542 - RNA, 19 nt, Homo sapiens
  misc_RNA (1)...(19): siRNA sense strand
gcagagcuucagccgauuc

SEQ ID NO: 1991543 - RNA, 19 nt, Homo sapiens
  misc_RNA (1)...(19): siRNA sense strand
gcucucgguuccucucagu

SEQ ID NO: 1991544 - RNA, 19 nt, Homo sapiens
  misc_RNA (1)...(19): siRNA sense strand
gcaaauccacccgucuuac

SEQ ID NO: 1991545 - RNA, 19 nt, Homo sapiens
  misc_RNA (1)...(19): siRNA sense strand
auucuuccaucaacaaugu

SEQ ID NO: 1991546 - RNA, 19 nt, Homo sapiens
  misc_RNA (1)...(19): siRNA sense strand
ccaggaagugggugucgaa

SEQ ID NO: 1991547 - RNA, 19 nt, Homo sapiens
  misc_RNA (1)...(19): siRNA sense strand
aaaggauaccgcaaguuug

SEQ ID NO: 1991548 - RNA, 19 nt, Homo sapiens
  misc_RNA (1)...(19): siRNA sense strand
ucacagaagacacaaagac

SEQ ID NO: 1991549 - RNA, 19 nt, Homo sapiens
  misc_RNA (1)...(19): siRNA sense strand
uaucuguucuugcucuucu

SEQ ID NO: 1991550 - RNA, 19 nt, Homo sapiens
  misc_RNA (1)...(19): siRNA sense strand
guccuucagugagugguuu

SEQ ID NO: 1991551 - RNA, 19 nt, Homo sapiens
  misc_RNA (1)...(19): siRNA sense strand
cugcaugcauggaaaggau

SEQ ID NO: 1991552 - RNA, 19 nt, Homo sapiens
  misc_RNA (1)...(19): siRNA sense strand
cuuaccagcuccucagaag

SEQ ID NO: 1991553 - RNA, 19 nt, Homo sapiens
  misc_RNA (1)...(19): siRNA sense strand
gagauucugcagagcuuca

SEQ ID NO: 1991554 - RNA, 19 nt, Homo sapiens
  misc_RNA (1)...(19): siRNA sense strand
ucgugcacuucaaccuuua

SEQ ID NO: 1991555 - RNA, 19 nt, Homo sapiens
  misc_RNA (1)...(19): siRNA sense strand
ucaacuuggcugaccauug

SEQ ID NO: 1991556 - RNA, 19 nt, Homo sapiens
  misc_RNA (1)...(19): siRNA sense strand
ugagaacuuaccugagauu

SEQ ID NO: 1991557 - RNA, 19 nt, Homo sapiens
  misc_RNA (1)...(19): siRNA sense strand
agauugcagcggaauauga

SEQ ID NO: 1991558 - RNA, 19 nt, Homo sapiens
  misc_RNA (1)...(19): siRNA sense strand
gagcucauggagacuuguu

SEQ ID NO: 1991559 - RNA, 19 nt, Homo sapiens
  misc_RNA (1)...(19): siRNA sense strand
gaacaccauccaagauucc

SEQ ID NO: 1991560 - RNA, 19 nt, Homo sapiens
  misc_RNA (1)...(19): siRNA sense strand
ggacaccauguggaucuug

SEQ ID NO: 1991561 - RNA, 19 nt, Homo sapiens
  misc_RNA (1)...(19): siRNA sense strand
cagaaauugcuggguuaaa

SEQ ID NO: 1991562 - RNA, 19 nt, Homo sapiens
  misc_RNA (1)...(19): siRNA sense strand
gagacgcucaaguaucugu

SEQ ID NO: 1991563 - RNA, 19 nt, Homo sapiens
  misc_RNA (1)...(19): siRNA sense strand
cacagaagacacaaagaca

SEQ ID NO: 1991564 - RNA, 19 nt, Homo sapiens
  misc_RNA (1)...(19): siRNA sense strand
uagaggaagagcagaagau

SEQ ID NO: 1991565 - RNA, 19 nt, Homo sapiens
  misc_RNA (1)...(19): siRNA sense strand
guggacuccucuucuacau

SEQ ID NO: 1991566 - RNA, 19 nt, Homo sapiens
  misc_RNA (1)...(19): siRNA sense strand
ggaagaaagugaagcuuga

SEQ ID NO: 1991567 - RNA, 19 nt, Homo sapiens
  misc_RNA (1)...(19): siRNA sense strand
ccaaggagcucuuacagau

SEQ ID NO: 1991568 - RNA, 19 nt, Homo sapiens
  misc_RNA (1)...(19): siRNA sense strand
gaccagagguugagaggaa

SEQ ID NO: 1991569 - RNA, 19 nt, Homo sapiens
  misc_RNA (1)...(19): siRNA sense strand
gcagaaguauggugagguu

SEQ ID NO: 1991570 - RNA, 19 nt, Homo sapiens
  misc_RNA (1)...(19): siRNA sense strand
ccagaaacuugaugagaaa

SEQ ID NO: 1991571 - RNA, 19 nt, Homo sapiens
  misc_RNA (1)...(19): siRNA sense strand
ggauaacccucugaagauu

SEQ ID NO: 1991572 - RNA, 19 nt, Homo sapiens
  misc_RNA (1)...(19): siRNA sense strand
gaaguuggccugguggaua

SEQ ID NO: 1991573 - RNA, 19 nt, Homo sapiens
  misc_RNA (1)...(19): siRNA sense strand
gcacugcugugguggaguu

SEQ ID NO: 1991574 - RNA, 19 nt, Homo sapiens
  misc_RNA (1)...(19): siRNA sense strand
ggacaaagagguaaagaag

SEQ ID NO: 1991575 - RNA, 19 nt, Homo sapiens
  misc_RNA (1)...(19): siRNA sense strand
gagaggacccagaaacuug

SEQ ID NO: 1991576 - RNA, 19 nt, Homo sapiens
  misc_RNA (1)...(19): siRNA sense strand
cccagaaacuugaugagaa

SEQ ID NO: 1991577 - RNA, 19 nt, Homo sapiens
  misc_RNA (1)...(19): siRNA sense strand
ggagaaggcagcggacaaa

SEQ ID NO: 1991578 - RNA, 19 nt, Homo sapiens
  misc_RNA (1)...(19): siRNA sense strand
gauaacccucugaagauuu

SEQ ID NO: 1991579 - RNA, 19 nt, Homo sapiens
  misc_RNA (1)...(19): siRNA sense strand
gaaggcagcggacaaagag

SEQ ID NO: 1991580 - RNA, 19 nt, Homo sapiens
  misc_RNA (1)...(19): siRNA sense strand
ccaggacacuagagcaaga

SEQ ID NO: 1991581 - RNA, 19 nt, Homo sapiens
  misc_RNA (1)...(19): siRNA sense strand
gaacucuuccaccagcuuu

SEQ ID NO: 1991582 - RNA, 19 nt, Homo sapiens
  misc_RNA (1)...(19): siRNA sense strand
gaaggaggaugagucaaaa

SEQ ID NO: 1991583 - RNA, 19 nt, Homo sapiens
  misc_RNA (1)...(19): siRNA sense strand
caagaaggaggaugaguca

SEQ ID NO: 1991584 - RNA, 19 nt, Homo sapiens
  misc_RNA (1)...(19): siRNA sense strand
guggauaacccucugaaga

SEQ ID NO: 1991585 - RNA, 19 nt, Homo sapiens
  misc_RNA (1)...(19): siRNA sense strand
agaaggaggaugagucaaa

SEQ ID NO: 1991586 - RNA, 19 nt, Homo sapiens
  misc_RNA (1)...(19): siRNA sense strand
aaagguggcuacuccaaag

SEQ ID NO: 1991587 - RNA, 19 nt, Homo sapiens
  misc_RNA (1)...(19): siRNA sense strand
cagcagagaggacccagaa

SEQ ID NO: 1991588 - RNA, 19 nt, Homo sapiens
  misc_RNA (1)...(19): siRNA sense strand
ggacccagaaacuugauga

SEQ ID NO: 1991589 - RNA, 19 nt, Homo sapiens
  misc_RNA (1)...(19): siRNA sense strand
aaguuggccugguggauaa

SEQ ID NO: 1991590 - RNA, 19 nt, Homo sapiens
  misc_RNA (1)...(19): siRNA sense strand
gcagagaggacccagaaac

SEQ ID NO: 1991591 - RNA, 19 nt, Homo sapiens
  misc_RNA (1)...(19): siRNA sense strand
gagcgugaccagagguuga

SEQ ID NO: 1991592 - RNA, 19 nt, Homo sapiens
  misc_RNA (1)...(19): siRNA sense strand
gaucgaacgccugagagaa

SEQ ID NO: 1991593 - RNA, 19 nt, Homo sapiens
  misc_RNA (1)...(19): siRNA sense strand
gagaaaaggaagaaaguga

SEQ ID NO: 1991594 - RNA, 19 nt, Homo sapiens
  misc_RNA (1)...(19): siRNA sense strand
gaaguauggugagguucuc

SEQ ID NO: 1991595 - RNA, 19 nt, Homo sapiens
  misc_RNA (1)...(19): siRNA sense strand
uggauaacccucugaagau

SEQ ID NO: 1991596 - RNA, 19 nt, Homo sapiens
  misc_RNA (1)...(19): siRNA sense strand
ccaggagagugaggaggaa

SEQ ID NO: 1991597 - RNA, 19 nt, Homo sapiens
  misc_RNA (1)...(19): siRNA sense strand
agaaggcagcggacaaaga

SEQ ID NO: 1991598 - RNA, 19 nt, Homo sapiens
  misc_RNA (1)...(19): siRNA sense strand
auaacccucugaagauuuc

SEQ ID NO: 1991599 - RNA, 19 nt, Homo sapiens
  misc_RNA (1)...(19): siRNA sense strand
caaggagcucuuacagaug

SEQ ID NO: 1991600 - RNA, 19 nt, Homo sapiens
  misc_RNA (1)...(19): siRNA sense strand
caggaaagccaagaagcaa

SEQ ID NO: 1991601 - RNA, 19 nt, Homo sapiens
  misc_RNA (1)...(19): siRNA sense strand
guucucaaccuggugcuuu

SEQ ID NO: 1991602 - RNA, 19 nt, Homo sapiens
  misc_RNA (1)...(19): siRNA sense strand
gacacuagagcaagagauc

SEQ ID NO: 1991603 - RNA, 19 nt, Homo sapiens
  misc_RNA (1)...(19): siRNA sense strand
gacguccuccuacggcuuu

SEQ ID NO: 1991604 - RNA, 19 nt, Homo sapiens
  misc_RNA (1)...(19): siRNA sense strand
cuccaaagacguccuccua

SEQ ID NO: 1991605 - RNA, 19 nt, Homo sapiens
  misc_RNA (1)...(19): siRNA sense strand
gaaaggcagaaaauacuga

SEQ ID NO: 1991606 - RNA, 19 nt, Homo sapiens
  misc_RNA (1)...(19): siRNA sense strand
ucaggaaagccaagaagca

SEQ ID NO: 1991607 - RNA, 19 nt, Homo sapiens
  misc_RNA (1)...(19): siRNA sense strand
gagguaaagaaggcguaua

SEQ ID NO: 1991608 - RNA, 19 nt, Homo sapiens
  misc_RNA (1)...(19): siRNA sense strand
gaaggcguauaggcagaag

SEQ ID NO: 1991609 - RNA, 19 nt, Homo sapiens
  misc_RNA (1)...(19): siRNA sense strand
ucgaacgccugagagaaga

SEQ ID NO: 1991610 - RNA, 19 nt, Homo sapiens
  misc_RNA (1)...(19): siRNA sense strand
ggaccuguacgcgcugcua

SEQ ID NO: 1991611 - RNA, 19 nt, Homo sapiens
  misc_RNA (1)...(19): siRNA sense strand
agagaucgaacgccugaga

SEQ ID NO: 1991612 - RNA, 19 nt, Homo sapiens
  misc_RNA (1)...(19): siRNA sense strand
ugucagagagggacuacga

SEQ ID NO: 1991613 - RNA, 19 nt, Homo sapiens
  misc_RNA (1)...(19): siRNA sense strand
gaccaaggagcucuuacag

SEQ ID NO: 1991614 - RNA, 19 nt, Homo sapiens
  misc_RNA (1)...(19): siRNA sense strand
cucugaagauuuccugguu

SEQ ID NO: 1991615 - RNA, 19 nt, Homo sapiens
  misc_RNA (1)...(19): siRNA sense strand
ugaccaaggagcucuuaca

SEQ ID NO: 1991616 - RNA, 19 nt, Homo sapiens
  misc_RNA (1)...(19): siRNA sense strand
ggucaggaaagccaagaag

SEQ ID NO: 1991617 - RNA, 19 nt, Homo sapiens
  misc_RNA (1)...(19): siRNA sense strand
ggaguuugcaaccgucaag

SEQ ID NO: 1991618 - RNA, 19 nt, Homo sapiens
  misc_RNA (1)...(19): siRNA sense strand
gaggaaaggcagaaaauac

SEQ ID NO: 1991619 - RNA, 19 nt, Homo sapiens
  misc_RNA (1)...(19): siRNA sense strand
cggacaaagagguaaagaa

SEQ ID NO: 1991620 - RNA, 19 nt, Homo sapiens
  misc_RNA (1)...(19): siRNA sense strand
agagaggacccagaaacuu

SEQ ID NO: 1991621 - RNA, 19 nt, Homo sapiens
  misc_RNA (1)...(19): siRNA sense strand
cagagaggacccagaaacu

SEQ ID NO: 1991622 - RNA, 19 nt, Homo sapiens
  misc_RNA (1)...(19): siRNA sense strand
gcaaagcgcuucugucaau

SEQ ID NO: 1991623 - RNA, 19 nt, Homo sapiens
  misc_RNA (1)...(19): siRNA sense strand
ggauacaucaccuuaaaua

SEQ ID NO: 1991624 - RNA, 19 nt, Homo sapiens
  misc_RNA (1)...(19): siRNA sense strand
gacacaaacuggagauauu

SEQ ID NO: 1991625 - RNA, 19 nt, Homo sapiens
  misc_RNA (1)...(19): siRNA sense strand
guacugcacugacaugaau

SEQ ID NO: 1991626 - RNA, 19 nt, Homo sapiens
  misc_RNA (1)...(19): siRNA sense strand
caggaacucugcaacaauu

SEQ ID NO: 1991627 - RNA, 19 nt, Homo sapiens
  misc_RNA (1)...(19): siRNA sense strand
gggaagagaguaagcagua

SEQ ID NO: 1991628 - RNA, 19 nt, Homo sapiens
  misc_RNA (1)...(19): siRNA sense strand
cgaaugaggucuggaagug

SEQ ID NO: 1991629 - RNA, 19 nt, Homo sapiens
  misc_RNA (1)...(19): siRNA sense strand
gaggauggcucgguuaucu

SEQ ID NO: 1991630 - RNA, 19 nt, Homo sapiens
  misc_RNA (1)...(19): siRNA sense strand
uaacaugggaagagaguaa

SEQ ID NO: 1991631 - RNA, 19 nt, Homo sapiens
  misc_RNA (1)...(19): siRNA sense strand
gcagcgcaauuaccuacaa

SEQ ID NO: 1991632 - RNA, 19 nt, Homo sapiens
  misc_RNA (1)...(19): siRNA sense strand
ggaaauaugaauugugcuu

SEQ ID NO: 1991633 - RNA, 19 nt, Homo sapiens
  misc_RNA (1)...(19): siRNA sense strand
agccaggacucauuuaauu

SEQ ID NO: 1991634 - RNA, 19 nt, Homo sapiens
  misc_RNA (1)...(19): siRNA sense strand
caaagcgcuucugucaaua

SEQ ID NO: 1991635 - RNA, 19 nt, Homo sapiens
  misc_RNA (1)...(19): siRNA sense strand
acacaaacuggagauauua

SEQ ID NO: 1991636 - RNA, 19 nt, Homo sapiens
  misc_RNA (1)...(19): siRNA sense strand
gcacaggaacucugcaaca

SEQ ID NO: 1991637 - RNA, 19 nt, Homo sapiens
  misc_RNA (1)...(19): siRNA sense strand
uagcaaagcgcuucuguca

SEQ ID NO: 1991638 - RNA, 19 nt, Homo sapiens
  misc_RNA (1)...(19): siRNA sense strand
ucugugagaacaaacauua

SEQ ID NO: 1991639 - RNA, 19 nt, Homo sapiens
  misc_RNA (1)...(19): siRNA sense strand
gcgcuucugucaauaugug

SEQ ID NO: 1991640 - RNA, 19 nt, Homo sapiens
  misc_RNA (1)...(19): siRNA sense strand
cggauuaucucgccagaag

SEQ ID NO: 1991641 - RNA, 19 nt, Homo sapiens
  misc_RNA (1)...(19): siRNA sense strand
ucaaagccaggacucauuu

SEQ ID NO: 1991642 - RNA, 19 nt, Homo sapiens
  misc_RNA (1)...(19): siRNA sense strand
uuucaaaggucauaaaugc

SEQ ID NO: 1991643 - RNA, 19 nt, Homo sapiens
  misc_RNA (1)...(19): siRNA sense strand
cacccuaccuucugugaga

SEQ ID NO: 1991644 - RNA, 19 nt, Homo sapiens
  misc_RNA (1)...(19): siRNA sense strand
cuacucuccugaagauuga

SEQ ID NO: 1991645 - RNA, 19 nt, Homo sapiens
  misc_RNA (1)...(19): siRNA sense strand
cacaggaacucugcaacaa

SEQ ID NO: 1991646 - RNA, 19 nt, Homo sapiens
  misc_RNA (1)...(19): siRNA sense strand
caaagccaggacucauuua

SEQ ID NO: 1991647 - RNA, 19 nt, Homo sapiens
  misc_RNA (1)...(19): siRNA sense strand
guucuucaggcacaacuua

SEQ ID NO: 1991648 - RNA, 19 nt, Homo sapiens
  misc_RNA (1)...(19): siRNA sense strand
gcuacucuccugaagauug

SEQ ID NO: 1991649 - RNA, 19 nt, Homo sapiens
  misc_RNA (1)...(19): siRNA sense strand
ggaacauuguggaguacau

SEQ ID NO: 1991650 - RNA, 19 nt, Homo sapiens
  misc_RNA (1)...(19): siRNA sense strand
gaaugcuacucuccugaag

SEQ ID NO: 1991651 - RNA, 19 nt, Homo sapiens
  misc_RNA (1)...(19): siRNA sense strand
auggauacaucaccuuaaa

SEQ ID NO: 1991652 - RNA, 19 nt, Homo sapiens
  misc_RNA (1)...(19): siRNA sense strand
gaccaagguggaccaacua

SEQ ID NO: 1991653 - RNA, 19 nt, Homo sapiens
  misc_RNA (1)...(19): siRNA sense strand
gaagauggaaaaggaaaua

SEQ ID NO: 1991654 - RNA, 19 nt, Homo sapiens
  misc_RNA (1)...(19): siRNA sense strand
ggaagagaguaagcaguac

SEQ ID NO: 1991655 - RNA, 19 nt, Homo sapiens
  misc_RNA (1)...(19): siRNA sense strand
gguggcgugugauggcuuu

SEQ ID NO: 1991656 - RNA, 19 nt, Homo sapiens
  misc_RNA (1)...(19): siRNA sense strand
ugaccaagguggaccaacu

SEQ ID NO: 1991657 - RNA, 19 nt, Homo sapiens
  misc_RNA (1)...(19): siRNA sense strand
ugauucugcugauccugua

SEQ ID NO: 1991658 - RNA, 19 nt, Homo sapiens
  misc_RNA (1)...(19): siRNA sense strand
caacuuaacaugggaagag

SEQ ID NO: 1991659 - RNA, 19 nt, Homo sapiens
  misc_RNA (1)...(19): siRNA sense strand
ugacacaaacuggagauau

SEQ ID NO: 1991660 - RNA, 19 nt, Homo sapiens
  misc_RNA (1)...(19): siRNA sense strand
ggauggcucgguuaucuca

SEQ ID NO: 1991661 - RNA, 19 nt, Homo sapiens
  misc_RNA (1)...(19): siRNA sense strand
aaagccaggacucauuuaa

SEQ ID NO: 1991662 - RNA, 19 nt, Homo sapiens
  misc_RNA (1)...(19): siRNA sense strand
ggagauauuauggagauag

SEQ ID NO: 1991663 - RNA, 19 nt, Homo sapiens
  misc_RNA (1)...(19): siRNA sense strand
cuggagauauuauggagau

SEQ ID NO: 1991664 - RNA, 19 nt, Homo sapiens
  misc_RNA (1)...(19): siRNA sense strand
gguaaaacaaucagaacua

SEQ ID NO: 1991665 - RNA, 19 nt, Homo sapiens
  misc_RNA (1)...(19): siRNA sense strand
ggaaggcuggcaugaccaa

SEQ ID NO: 1991666 - RNA, 19 nt, Homo sapiens
  misc_RNA (1)...(19): siRNA sense strand
gagaggaaggcuggcauga

SEQ ID NO: 1991667 - RNA, 19 nt, Homo sapiens
  misc_RNA (1)...(19): siRNA sense strand
ucgguuaucucagaaaaua

SEQ ID NO: 1991668 - RNA, 19 nt, Homo sapiens
  misc_RNA (1)...(19): siRNA sense strand
ggaacucugcaacaauuag

SEQ ID NO: 1991669 - RNA, 19 nt, Homo sapiens
  misc_RNA (1)...(19): siRNA sense strand
gagauauuauggagauagc

SEQ ID NO: 1991670 - RNA, 19 nt, Homo sapiens
  misc_RNA (1)...(19): siRNA sense strand
gaacauuguggaguacauc

SEQ ID NO: 1991671 - RNA, 19 nt, Homo sapiens
  misc_RNA (1)...(19): siRNA sense strand
caaacuggagauauuaugg

SEQ ID NO: 1991672 - RNA, 19 nt, Homo sapiens
  misc_RNA (1)...(19): siRNA sense strand
gauggaaaaggaaauauga

SEQ ID NO: 1991673 - RNA, 19 nt, Homo sapiens
  misc_RNA (1)...(19): siRNA sense strand
accggaacauuguggagua

SEQ ID NO: 1991674 - RNA, 19 nt, Homo sapiens
  misc_RNA (1)...(19): siRNA sense strand
gauuaucucgccagaaguc

SEQ ID NO: 1991675 - RNA, 19 nt, Homo sapiens
  misc_RNA (1)...(19): siRNA sense strand
gucaauaugugguaaaaca

SEQ ID NO: 1991676 - RNA, 19 nt, Homo sapiens
  misc_RNA (1)...(19): siRNA sense strand
ugaaugcuacucuccugaa

SEQ ID NO: 1991677 - RNA, 19 nt, Homo sapiens
  misc_RNA (1)...(19): siRNA sense strand
ugugauggcuuugauucug

SEQ ID NO: 1991678 - RNA, 19 nt, Homo sapiens
  misc_RNA (1)...(19): siRNA sense strand
gggaggauggcucgguuau

SEQ ID NO: 1991679 - RNA, 19 nt, Homo sapiens
  misc_RNA (1)...(19): siRNA sense strand
aaacuggagauauuaugga

SEQ ID NO: 1991680 - RNA, 19 nt, Homo sapiens
  misc_RNA (1)...(19): siRNA sense strand
aagcgcuucugucaauaug

SEQ ID NO: 1991681 - RNA, 19 nt, Homo sapiens
  misc_RNA (1)...(19): siRNA sense strand
gguggaccaacuaccuuaa

SEQ ID NO: 1991682 - RNA, 19 nt, Homo sapiens
  misc_RNA (1)...(19): siRNA sense strand
gccaggacucauuuaauuc

SEQ ID NO: 1991683 - RNA, 19 nt, Homo sapiens
  misc_RNA (1)...(19): siRNA sense strand
augcuacucuccugaagau

SEQ ID NO: 1991684 - RNA, 19 nt, Homo sapiens
  misc_RNA (1)...(19): siRNA sense strand
cauuguggaguacaucaaa

SEQ ID NO: 1991685 - RNA, 19 nt, Homo sapiens
  misc_RNA (1)...(19): siRNA sense strand
gcaggaugaagauggauac

SEQ ID NO: 1991686 - RNA, 19 nt, Homo sapiens
  misc_RNA (1)...(19): siRNA sense strand
ggaaaaugcacccuaccuu

SEQ ID NO: 1991687 - RNA, 19 nt, Homo sapiens
  misc_RNA (1)...(19): siRNA sense strand
gaaaaucgcacaggaacuc

SEQ ID NO: 1991688 - RNA, 19 nt, Homo sapiens
  misc_RNA (1)...(19): siRNA sense strand
gcucgguuaucucagaaaa

SEQ ID NO: 1991689 - RNA, 19 nt, Homo sapiens
  misc_RNA (1)...(19): siRNA sense strand
aaagcgcuucugucaauau

SEQ ID NO: 1991690 - RNA, 19 nt, Homo sapiens
  misc_RNA (1)...(19): siRNA sense strand
ccaagaaggucaagaagua

SEQ ID NO: 1991691 - RNA, 19 nt, Homo sapiens
  misc_RNA (1)...(19): siRNA sense strand
gaaguuaacucgaaagcaa

SEQ ID NO: 1991692 - RNA, 19 nt, Homo sapiens
  misc_RNA (1)...(19): siRNA sense strand
ggacagggaucgagaaaga

SEQ ID NO: 1991693 - RNA, 19 nt, Homo sapiens
  misc_RNA (1)...(19): siRNA sense strand
gaaggaaggugcugaggaa

SEQ ID NO: 1991694 - RNA, 19 nt, Homo sapiens
  misc_RNA (1)...(19): siRNA sense strand
ggaaggugcugaggaaaua

SEQ ID NO: 1991695 - RNA, 19 nt, Homo sapiens
  misc_RNA (1)...(19): siRNA sense strand
caaagaacguucccacaaa

SEQ ID NO: 1991696 - RNA, 19 nt, Homo sapiens
  misc_RNA (1)...(19): siRNA sense strand
gaaaggaaacacagaagua

SEQ ID NO: 1991697 - RNA, 19 nt, Homo sapiens
  misc_RNA (1)...(19): siRNA sense strand
gcaaagagaaaucaaguaa

SEQ ID NO: 1991698 - RNA, 19 nt, Homo sapiens
  misc_RNA (1)...(19): siRNA sense strand
gcgcuuggauuuauguaua

SEQ ID NO: 1991699 - RNA, 19 nt, Homo sapiens
  misc_RNA (1)...(19): siRNA sense strand
gcacagagaugacaaaaga

SEQ ID NO: 1991700 - RNA, 19 nt, Homo sapiens
  misc_RNA (1)...(19): siRNA sense strand
caaaagagauuccaagaaa

SEQ ID NO: 1991701 - RNA, 19 nt, Homo sapiens
  misc_RNA (1)...(19): siRNA sense strand
gaaauagacagacauguug

SEQ ID NO: 1991702 - RNA, 19 nt, Homo sapiens
  misc_RNA (1)...(19): siRNA sense strand
ggaaauagacagacauguu

SEQ ID NO: 1991703 - RNA, 19 nt, Homo sapiens
  misc_RNA (1)...(19): siRNA sense strand
caagaaagaugggaaggaa

SEQ ID NO: 1991704 - RNA, 19 nt, Homo sapiens
  misc_RNA (1)...(19): siRNA sense strand
gagaaaugcuacgaucuuu

SEQ ID NO: 1991705 - RNA, 19 nt, Homo sapiens
  misc_RNA (1)...(19): siRNA sense strand
gaagaaacauaaagaagac

SEQ ID NO: 1991706 - RNA, 19 nt, Homo sapiens
  misc_RNA (1)...(19): siRNA sense strand
gaaacgaaguagaaguaga

SEQ ID NO: 1991707 - RNA, 19 nt, Homo sapiens
  misc_RNA (1)...(19): siRNA sense strand
gaacaagagagccaagaaa

SEQ ID NO: 1991708 - RNA, 19 nt, Homo sapiens
  misc_RNA (1)...(19): siRNA sense strand
cggcgaagaucccgaagua

SEQ ID NO: 1991709 - RNA, 19 nt, Homo sapiens
  misc_RNA (1)...(19): siRNA sense strand
gaacauagucccagcaaag

SEQ ID NO: 1991710 - RNA, 19 nt, Homo sapiens
  misc_RNA (1)...(19): siRNA sense strand
gcaaagaacguucccacaa

SEQ ID NO: 1991711 - RNA, 19 nt, Homo sapiens
  misc_RNA (1)...(19): siRNA sense strand
caagugaugggucuuauaa

SEQ ID NO: 1991712 - RNA, 19 nt, Homo sapiens
  misc_RNA (1)...(19): siRNA sense strand
gaagaggaccuagauguga

SEQ ID NO: 1991713 - RNA, 19 nt, Homo sapiens
  misc_RNA (1)...(19): siRNA sense strand
ugacagagaauuagaaaga

SEQ ID NO: 1991714 - RNA, 19 nt, Homo sapiens
  misc_RNA (1)...(19): siRNA sense strand
ggccaugggucuucuaguu

SEQ ID NO: 1991715 - RNA, 19 nt, Homo sapiens
  misc_RNA (1)...(19): siRNA sense strand
gguggaggcuguguaauga

SEQ ID NO: 1991716 - RNA, 19 nt, Homo sapiens
  misc_RNA (1)...(19): siRNA sense strand
gggaaacgaaguagaagua

SEQ ID NO: 1991717 - RNA, 19 nt, Homo sapiens
  misc_RNA (1)...(19): siRNA sense strand
agagagcgaucaagagaaa

SEQ ID NO: 1991718 - RNA, 19 nt, Homo sapiens
  misc_RNA (1)...(19): siRNA sense strand
gcgaagaucccgaaguauu

SEQ ID NO: 1991719 - RNA, 19 nt, Homo sapiens
  misc_RNA (1)...(19): siRNA sense strand
gcagggaaacgaaguagaa

SEQ ID NO: 1991720 - RNA, 19 nt, Homo sapiens
  misc_RNA (1)...(19): siRNA sense strand
cgaaggagccaaaguauag

SEQ ID NO: 1991721 - RNA, 19 nt, Homo sapiens
  misc_RNA (1)...(19): siRNA sense strand
uggacgagaucuacuuuaa

SEQ ID NO: 1991722 - RNA, 19 nt, Homo sapiens
  misc_RNA (1)...(19): siRNA sense strand
cacagacucuccauauauu

SEQ ID NO: 1991723 - RNA, 19 nt, Homo sapiens
  misc_RNA (1)...(19): siRNA sense strand
ucaaauaaacgaagucgaa

SEQ ID NO: 1991724 - RNA, 19 nt, Homo sapiens
  misc_RNA (1)...(19): siRNA sense strand
ggagaaaugcuacgaucuu

SEQ ID NO: 1991725 - RNA, 19 nt, Homo sapiens
  misc_RNA (1)...(19): siRNA sense strand
gagccaaaguauagaacaa

SEQ ID NO: 1991726 - RNA, 19 nt, Homo sapiens
  misc_RNA (1)...(19): siRNA sense strand
ggaaagaggaaaugaacga

SEQ ID NO: 1991727 - RNA, 19 nt, Homo sapiens
  misc_RNA (1)...(19): siRNA sense strand
ccaaagaaagggagaaaga

SEQ ID NO: 1991728 - RNA, 19 nt, Homo sapiens
  misc_RNA (1)...(19): siRNA sense strand
gaaagaacgccagcgacua

SEQ ID NO: 1991729 - RNA, 19 nt, Homo sapiens
  misc_RNA (1)...(19): siRNA sense strand
cacacagacucuccauaua

SEQ ID NO: 1991730 - RNA, 19 nt, Homo sapiens
  misc_RNA (1)...(19): siRNA sense strand
gaagagaagaaacauaaag

SEQ ID NO: 1991731 - RNA, 19 nt, Homo sapiens
  misc_RNA (1)...(19): siRNA sense strand
gacgagaucuacuuuaagg

SEQ ID NO: 1991732 - RNA, 19 nt, Homo sapiens
  misc_RNA (1)...(19): siRNA sense strand
ucuacgagcucaagaccua

SEQ ID NO: 1991733 - RNA, 19 nt, Homo sapiens
  misc_RNA (1)...(19): siRNA sense strand
gcaagugaugggucuuaua

SEQ ID NO: 1991734 - RNA, 19 nt, Homo sapiens
  misc_RNA (1)...(19): siRNA sense strand
agaaguaggagucgaagua

SEQ ID NO: 1991735 - RNA, 19 nt, Homo sapiens
  misc_RNA (1)...(19): siRNA sense strand
ggagaaaggaagcaggaaa

SEQ ID NO: 1991736 - RNA, 19 nt, Homo sapiens
  misc_RNA (1)...(19): siRNA sense strand
uuagagcgcuuggauuuau

SEQ ID NO: 1991737 - RNA, 19 nt, Homo sapiens
  misc_RNA (1)...(19): siRNA sense strand
ggaauuguuucuacagcau

SEQ ID NO: 1991738 - RNA, 19 nt, Homo sapiens
  misc_RNA (1)...(19): siRNA sense strand
gaaguagaagcaaagagaa

SEQ ID NO: 1991739 - RNA, 19 nt, Homo sapiens
  misc_RNA (1)...(19): siRNA sense strand
cgagaaagagagaaagaaa

SEQ ID NO: 1991740 - RNA, 19 nt, Homo sapiens
  misc_RNA (1)...(19): siRNA sense strand
ucacaaaacuggagugguu

SEQ ID NO: 1991741 - RNA, 19 nt, Homo sapiens
  misc_RNA (1)...(19): siRNA sense strand
uauuagagcgcuuggauuu

SEQ ID NO: 1991742 - RNA, 19 nt, Homo sapiens
  misc_RNA (1)...(19): siRNA sense strand
aagaggaaaugaacgagaa

SEQ ID NO: 1991743 - RNA, 19 nt, Homo sapiens
  misc_RNA (1)...(19): siRNA sense strand
ggaacauagucccagcaaa

SEQ ID NO: 1991744 - RNA, 19 nt, Homo sapiens
  misc_RNA (1)...(19): siRNA sense strand
cgaagaucccgaaguauug

SEQ ID NO: 1991745 - RNA, 19 nt, Homo sapiens
  misc_RNA (1)...(19): siRNA sense strand
aaacgaaguagaaguagaa

SEQ ID NO: 1991746 - RNA, 19 nt, Homo sapiens
  misc_RNA (1)...(19): siRNA sense strand
aaagagauuccaagaaaga

SEQ ID NO: 1991747 - RNA, 19 nt, Homo sapiens
  misc_RNA (1)...(19): siRNA sense strand
gagaagaaacauaaagaag

SEQ ID NO: 1991748 - RNA, 19 nt, Homo sapiens
  misc_RNA (1)...(19): siRNA sense strand
gaagaucccgaaguauuga

SEQ ID NO: 1991749 - RNA, 19 nt, Homo sapiens
  misc_RNA (1)...(19): siRNA sense strand
acacagacucuccauauau

SEQ ID NO: 1991750 - RNA, 19 nt, Homo sapiens
  misc_RNA (1)...(19): siRNA sense strand
gccaaaguauagaacaaga

SEQ ID NO: 1991751 - RNA, 19 nt, Homo sapiens
  misc_RNA (1)...(19): siRNA sense strand
guagaagagaagaaacaua

SEQ ID NO: 1991752 - RNA, 19 nt, Homo sapiens
  misc_RNA (1)...(19): siRNA sense strand
caagagaaagguccaagga

SEQ ID NO: 1991753 - RNA, 19 nt, Homo sapiens
  misc_RNA (1)...(19): siRNA sense strand
acacacagacucuccauau

SEQ ID NO: 1991754 - RNA, 19 nt, Homo sapiens
  misc_RNA (1)...(19): siRNA sense strand
caaaguauagaacaagaga

SEQ ID NO: 1991755 - RNA, 19 nt, Homo sapiens
  misc_RNA (1)...(19): siRNA sense strand
guaaggaccagucagacaa

SEQ ID NO: 1991756 - RNA, 19 nt, Homo sapiens
  misc_RNA (1)...(19): siRNA sense strand
gaauuccaguuccaguuca

SEQ ID NO: 1991757 - RNA, 19 nt, Homo sapiens
  misc_RNA (1)...(19): siRNA sense strand
cgaaguggcagucaaggaa

SEQ ID NO: 1991758 - RNA, 19 nt, Homo sapiens
  misc_RNA (1)...(19): siRNA sense strand
gagaaagaacggcgaagau

SEQ ID NO: 1991759 - RNA, 19 nt, Homo sapiens
  misc_RNA (1)...(19): siRNA sense strand
ggagaaagaacggcgaaga

SEQ ID NO: 1991760 - RNA, 19 nt, Homo sapiens
  misc_RNA (1)...(19): siRNA sense strand
caaagaaagggagaaagaa

SEQ ID NO: 1991761 - RNA, 19 nt, Homo sapiens
  misc_RNA (1)...(19): siRNA sense strand
acagagaauuagaaagaga

SEQ ID NO: 1991762 - RNA, 19 nt, Homo sapiens
  misc_RNA (1)...(19): siRNA sense strand
ccacggagguccccaagaa

SEQ ID NO: 1991763 - RNA, 19 nt, Homo sapiens
  misc_RNA (1)...(19): siRNA sense strand
cgucgaaggagccaaagua

SEQ ID NO: 1991764 - RNA, 19 nt, Homo sapiens
  misc_RNA (1)...(19): siRNA sense strand
gagaucgugacuaugauaa

SEQ ID NO: 1991765 - RNA, 19 nt, Homo sapiens
  misc_RNA (1)...(19): siRNA sense strand
gagaaagguccaaggaaca

SEQ ID NO: 1991766 - RNA, 19 nt, Homo sapiens
  misc_RNA (1)...(19): siRNA sense strand
cgaaguagaaguagaagca

SEQ ID NO: 1991767 - RNA, 19 nt, Homo sapiens
  misc_RNA (1)...(19): siRNA sense strand
aagaggaccuagaugugaa

SEQ ID NO: 1991768 - RNA, 19 nt, Homo sapiens
  misc_RNA (1)...(19): siRNA sense strand
agaaguagaagcaaagaga

SEQ ID NO: 1991769 - RNA, 19 nt, Homo sapiens
  misc_RNA (1)...(19): siRNA sense strand
gcagcgagaagaccaugaa

SEQ ID NO: 1991770 - RNA, 19 nt, Homo sapiens
  misc_RNA (1)...(19): siRNA sense strand
gaucgugacuaugauaagg

SEQ ID NO: 1991771 - RNA, 19 nt, Homo sapiens
  misc_RNA (1)...(19): siRNA sense strand
gagcgugaagccaaagaaa

SEQ ID NO: 1991772 - RNA, 19 nt, Homo sapiens
  misc_RNA (1)...(19): siRNA sense strand
ugaugggucuuauaacaca

SEQ ID NO: 1991773 - RNA, 19 nt, Homo sapiens
  misc_RNA (1)...(19): siRNA sense strand
gaucgucgaaggagccaaa

SEQ ID NO: 1991774 - RNA, 19 nt, Homo sapiens
  misc_RNA (1)...(19): siRNA sense strand
aaguagaaaugcagggaaa

SEQ ID NO: 1991775 - RNA, 19 nt, Homo sapiens
  misc_RNA (1)...(19): siRNA sense strand
gagauuccaagaaagagaa

SEQ ID NO: 1991776 - RNA, 19 nt, Homo sapiens
  misc_RNA (1)...(19): siRNA sense strand
uaaggaaagaggaaaugaa

SEQ ID NO: 1991777 - RNA, 19 nt, Homo sapiens
  misc_RNA (1)...(19): siRNA sense strand
agaaguagggaaaggcaua

SEQ ID NO: 1991778 - RNA, 19 nt, Homo sapiens
  misc_RNA (1)...(19): siRNA sense strand
cauagucccagcaaagaaa

SEQ ID NO: 1991779 - RNA, 19 nt, Homo sapiens
  misc_RNA (1)...(19): siRNA sense strand
gaagcaaagagaaaucaag

SEQ ID NO: 1991780 - RNA, 19 nt, Homo sapiens
  misc_RNA (1)...(19): siRNA sense strand
caggaggaauuguuucuac

SEQ ID NO: 1991781 - RNA, 19 nt, Homo sapiens
  misc_RNA (1)...(19): siRNA sense strand
gauaaggaaagaggaaaug

SEQ ID NO: 1991782 - RNA, 19 nt, Homo sapiens
  misc_RNA (1)...(19): siRNA sense strand
cgagaucgugacuaugaua

SEQ ID NO: 1991783 - RNA, 19 nt, Homo sapiens
  misc_RNA (1)...(19): siRNA sense strand
agugaugggucuuauaaca

SEQ ID NO: 1991784 - RNA, 19 nt, Homo sapiens
  misc_RNA (1)...(19): siRNA sense strand
aaacacaguagaagcagaa

SEQ ID NO: 1991785 - RNA, 19 nt, Homo sapiens
  misc_RNA (1)...(19): siRNA sense strand
ugacuaugauaaggaaaga

SEQ ID NO: 1991786 - RNA, 19 nt, Homo sapiens
  misc_RNA (1)...(19): siRNA sense strand
cauagaagucgcagucgaa

SEQ ID NO: 1991787 - RNA, 19 nt, Homo sapiens
  misc_RNA (1)...(19): siRNA sense strand
gccaugggucuucuaguuu

SEQ ID NO: 1991788 - RNA, 19 nt, Homo sapiens
  misc_RNA (1)...(19): siRNA sense strand
aaagaacguucccacaaac

SEQ ID NO: 1991789 - RNA, 19 nt, Homo sapiens
  misc_RNA (1)...(19): siRNA sense strand
agagagagcgaucaagaga

SEQ ID NO: 1991790 - RNA, 19 nt, Homo sapiens
  misc_RNA (1)...(19): siRNA sense strand
gaagcagccucucgauaua

SEQ ID NO: 1991791 - RNA, 19 nt, Homo sapiens
  misc_RNA (1)...(19): siRNA sense strand
ggaagcagccucucgauau

SEQ ID NO: 1991792 - RNA, 19 nt, Homo sapiens
  misc_RNA (1)...(19): siRNA sense strand
gaucuguggugguacaauu

SEQ ID NO: 1991793 - RNA, 19 nt, Homo sapiens
  misc_RNA (1)...(19): siRNA sense strand
gauauaaccugacgaucuc

SEQ ID NO: 1991794 - RNA, 19 nt, Homo sapiens
  misc_RNA (1)...(19): siRNA sense strand
ucacagugcuuacaguugu

SEQ ID NO: 1991795 - RNA, 19 nt, Homo sapiens
  misc_RNA (1)...(19): siRNA sense strand
gagaagguaccaucaaugu

SEQ ID NO: 1991796 - RNA, 19 nt, Homo sapiens
  misc_RNA (1)...(19): siRNA sense strand
gccaggaucugugguggua

SEQ ID NO: 1991797 - RNA, 19 nt, Homo sapiens
  misc_RNA (1)...(19): siRNA sense strand
gccauugucuaucucauug

SEQ ID NO: 1991798 - RNA, 19 nt, Homo sapiens
  misc_RNA (1)...(19): siRNA sense strand
accaagagcugcagagaga

SEQ ID NO: 1991799 - RNA, 19 nt, Homo sapiens
  misc_RNA (1)...(19): siRNA sense strand
cugggccucuccaauauua

SEQ ID NO: 1991800 - RNA, 19 nt, Homo sapiens
  misc_RNA (1)...(19): siRNA sense strand
gugcccagcucuacugaga

SEQ ID NO: 1991801 - RNA, 19 nt, Homo sapiens
  misc_RNA (1)...(19): siRNA sense strand
ccacuucugccaacuugua

SEQ ID NO: 1991802 - RNA, 19 nt, Homo sapiens
  misc_RNA (1)...(19): siRNA sense strand
ccgagaagguaccaucaau

SEQ ID NO: 1991803 - RNA, 19 nt, Homo sapiens
  misc_RNA (1)...(19): siRNA sense strand
gaugugccauuuccuuucu

SEQ ID NO: 1991804 - RNA, 19 nt, Homo sapiens
  misc_RNA (1)...(19): siRNA sense strand
gcuggucuguguucugguu

SEQ ID NO: 1991805 - RNA, 19 nt, Homo sapiens
  misc_RNA (1)...(19): siRNA sense strand
gaucguagccccuaugaga

SEQ ID NO: 1991806 - RNA, 19 nt, Homo sapiens
  misc_RNA (1)...(19): siRNA sense strand
cgauauaaccugacgaucu

SEQ ID NO: 1991807 - RNA, 19 nt, Homo sapiens
  misc_RNA (1)...(19): siRNA sense strand
uuucugggccucuccaaua

SEQ ID NO: 1991808 - RNA, 19 nt, Homo sapiens
  misc_RNA (1)...(19): siRNA sense strand
gcccagcucuacugagaag

SEQ ID NO: 1991809 - RNA, 19 nt, Homo sapiens
  misc_RNA (1)...(19): siRNA sense strand
cacccagucuccuuucuuc

SEQ ID NO: 1991810 - RNA, 19 nt, Homo sapiens
  misc_RNA (1)...(19): siRNA sense strand
gcagcagccucucuuacac

SEQ ID NO: 1991811 - RNA, 19 nt, Homo sapiens
  misc_RNA (1)...(19): siRNA sense strand
cgugagugaugugccauuu

SEQ ID NO: 1991812 - RNA, 19 nt, Homo sapiens
  misc_RNA (1)...(19): siRNA sense strand
gcaccgacuacuaccaaga

SEQ ID NO: 1991813 - RNA, 19 nt, Homo sapiens
  misc_RNA (1)...(19): siRNA sense strand
cggaagcagccucucgaua

SEQ ID NO: 1991814 - RNA, 19 nt, Homo sapiens
  misc_RNA (1)...(19): siRNA sense strand
gagcugcagagagacauuu

SEQ ID NO: 1991815 - RNA, 19 nt, Homo sapiens
  misc_RNA (1)...(19): siRNA sense strand
gcacccagucuccuuucuu

SEQ ID NO: 1991816 - RNA, 19 nt, Homo sapiens
  misc_RNA (1)...(19): siRNA sense strand
gugaugugccauuuccuuu

SEQ ID NO: 1991817 - RNA, 19 nt, Homo sapiens
  misc_RNA (1)...(19): siRNA sense strand
gacgucagcgugagugaug

SEQ ID NO: 1991818 - RNA, 19 nt, Homo sapiens
  misc_RNA (1)...(19): siRNA sense strand
cagccucucuuacacaaac

SEQ ID NO: 1991819 - RNA, 19 nt, Homo sapiens
  misc_RNA (1)...(19): siRNA sense strand
ggccauugucuaucucauu

SEQ ID NO: 1991820 - RNA, 19 nt, Homo sapiens
  misc_RNA (1)...(19): siRNA sense strand
ggcagcagccucucuuaca

SEQ ID NO: 1991821 - RNA, 19 nt, Homo sapiens
  misc_RNA (1)...(19): siRNA sense strand
gacuucggcuacccagaga

SEQ ID NO: 1991822 - RNA, 19 nt, Homo sapiens
  misc_RNA (1)...(19): siRNA sense strand
ccacacccaugggcgcuau

SEQ ID NO: 1991823 - RNA, 19 nt, Homo sapiens
  misc_RNA (1)...(19): siRNA sense strand
gauaccuaccauccuauga

SEQ ID NO: 1991824 - RNA, 19 nt, Homo sapiens
  misc_RNA (1)...(19): siRNA sense strand
cgagaagguaccaucaaug

SEQ ID NO: 1991825 - RNA, 19 nt, Homo sapiens
  misc_RNA (1)...(19): siRNA sense strand
caggaucuguggugguaca

SEQ ID NO: 1991826 - RNA, 19 nt, Homo sapiens
  misc_RNA (1)...(19): siRNA sense strand
ccagcucuacugagaagaa

SEQ ID NO: 1991827 - RNA, 19 nt, Homo sapiens
  misc_RNA (1)...(19): siRNA sense strand
cagcaccgacuacuaccaa

SEQ ID NO: 1991828 - RNA, 19 nt, Homo sapiens
  misc_RNA (1)...(19): siRNA sense strand
ugagugaugugccauuucc

SEQ ID NO: 1991829 - RNA, 19 nt, Homo sapiens
  misc_RNA (1)...(19): siRNA sense strand
caagagcugcagagagaca

SEQ ID NO: 1991830 - RNA, 19 nt, Homo sapiens
  misc_RNA (1)...(19): siRNA sense strand
ccucuccaauauuaaguuc

SEQ ID NO: 1991831 - RNA, 19 nt, Homo sapiens
  misc_RNA (1)...(19): siRNA sense strand
ugguugcgcuggccauugu

SEQ ID NO: 1991832 - RNA, 19 nt, Homo sapiens
  misc_RNA (1)...(19): siRNA sense strand
acgggcagcuggacaucuu

SEQ ID NO: 1991833 - RNA, 19 nt, Homo sapiens
  misc_RNA (1)...(19): siRNA sense strand
aagcagccucucgauauaa

SEQ ID NO: 1991834 - RNA, 19 nt, Homo sapiens
  misc_RNA (1)...(19): siRNA sense strand
cagcucuacugagaagaau

SEQ ID NO: 1991835 - RNA, 19 nt, Homo sapiens
  misc_RNA (1)...(19): siRNA sense strand
gaagcagccucucgauaua

SEQ ID NO: 1991836 - RNA, 19 nt, Homo sapiens
  misc_RNA (1)...(19): siRNA sense strand
ggaagcagccucucgauau

SEQ ID NO: 1991837 - RNA, 19 nt, Homo sapiens
  misc_RNA (1)...(19): siRNA sense strand
gaucuguggugguacaauu

SEQ ID NO: 1991838 - RNA, 19 nt, Homo sapiens
  misc_RNA (1)...(19): siRNA sense strand
gauauaaccugacgaucuc

SEQ ID NO: 1991839 - RNA, 19 nt, Homo sapiens
  misc_RNA (1)...(19): siRNA sense strand
ucacagugcuuacaguugu

SEQ ID NO: 1991840 - RNA, 19 nt, Homo sapiens
  misc_RNA (1)...(19): siRNA sense strand
gagaagguaccaucaaugu

SEQ ID NO: 1991841 - RNA, 19 nt, Homo sapiens
  misc_RNA (1)...(19): siRNA sense strand
gccaggaucugugguggua

SEQ ID NO: 1991842 - RNA, 19 nt, Homo sapiens
  misc_RNA (1)...(19): siRNA sense strand
gccauugucuaucucauug

SEQ ID NO: 1991843 - RNA, 19 nt, Homo sapiens
  misc_RNA (1)...(19): siRNA sense strand
accaagagcugcagagaga

SEQ ID NO: 1991844 - RNA, 19 nt, Homo sapiens
  misc_RNA (1)...(19): siRNA sense strand
cugggccucuccaauauua

SEQ ID NO: 1991845 - RNA, 19 nt, Homo sapiens
  misc_RNA (1)...(19): siRNA sense strand
gugcccagcucuacugaga

SEQ ID NO: 1991846 - RNA, 19 nt, Homo sapiens
  misc_RNA (1)...(19): siRNA sense strand
ccacuucugccaacuugua

SEQ ID NO: 1991847 - RNA, 19 nt, Homo sapiens
  misc_RNA (1)...(19): siRNA sense strand
ccgagaagguaccaucaau

SEQ ID NO: 1991848 - RNA, 19 nt, Homo sapiens
  misc_RNA (1)...(19): siRNA sense strand
gaugugccauuuccuuucu

SEQ ID NO: 1991849 - RNA, 19 nt, Homo sapiens
  misc_RNA (1)...(19): siRNA sense strand
gcuggucuguguucugguu

SEQ ID NO: 1991850 - RNA, 19 nt, Homo sapiens
  misc_RNA (1)...(19): siRNA sense strand
gaucguagccccuaugaga

SEQ ID NO: 1991851 - RNA, 19 nt, Homo sapiens
  misc_RNA (1)...(19): siRNA sense strand
cgauauaaccugacgaucu

SEQ ID NO: 1991852 - RNA, 19 nt, Homo sapiens
  misc_RNA (1)...(19): siRNA sense strand
uuucugggccucuccaaua

SEQ ID NO: 1991853 - RNA, 19 nt, Homo sapiens
  misc_RNA (1)...(19): siRNA sense strand
gcccagcucuacugagaag

SEQ ID NO: 1991854 - RNA, 19 nt, Homo sapiens
  misc_RNA (1)...(19): siRNA sense strand
cacccagucuccuuucuuc

SEQ ID NO: 1991855 - RNA, 19 nt, Homo sapiens
  misc_RNA (1)...(19): siRNA sense strand
gcagcagccucucuuacac

SEQ ID NO: 1991856 - RNA, 19 nt, Homo sapiens
  misc_RNA (1)...(19): siRNA sense strand
cgugagugaugugccauuu

SEQ ID NO: 1991857 - RNA, 19 nt, Homo sapiens
  misc_RNA (1)...(19): siRNA sense strand
gcaccgacuacuaccaaga

SEQ ID NO: 1991858 - RNA, 19 nt, Homo sapiens
  misc_RNA (1)...(19): siRNA sense strand
cggaagcagccucucgaua

SEQ ID NO: 1991859 - RNA, 19 nt, Homo sapiens
  misc_RNA (1)...(19): siRNA sense strand
gagcugcagagagacauuu

SEQ ID NO: 1991860 - RNA, 19 nt, Homo sapiens
  misc_RNA (1)...(19): siRNA sense strand
gcacccagucuccuuucuu

SEQ ID NO: 1991861 - RNA, 19 nt, Homo sapiens
  misc_RNA (1)...(19): siRNA sense strand
gugaugugccauuuccuuu

SEQ ID NO: 1991862 - RNA, 19 nt, Homo sapiens
  misc_RNA (1)...(19): siRNA sense strand
gacgucagcgugagugaug

SEQ ID NO: 1991863 - RNA, 19 nt, Homo sapiens
  misc_RNA (1)...(19): siRNA sense strand
cagccucucuuacacaaac

SEQ ID NO: 1991864 - RNA, 19 nt, Homo sapiens
  misc_RNA (1)...(19): siRNA sense strand
ggccauugucuaucucauu

SEQ ID NO: 1991865 - RNA, 19 nt, Homo sapiens
  misc_RNA (1)...(19): siRNA sense strand
ggcagcagccucucuuaca

SEQ ID NO: 1991866 - RNA, 19 nt, Homo sapiens
  misc_RNA (1)...(19): siRNA sense strand
gacuucggcuacccagaga

SEQ ID NO: 1991867 - RNA, 19 nt, Homo sapiens
  misc_RNA (1)...(19): siRNA sense strand
ccacacccaugggcgcuau

SEQ ID NO: 1991868 - RNA, 19 nt, Homo sapiens
  misc_RNA (1)...(19): siRNA sense strand
gauaccuaccauccuauga

SEQ ID NO: 1991869 - RNA, 19 nt, Homo sapiens
  misc_RNA (1)...(19): siRNA sense strand
cgagaagguaccaucaaug

SEQ ID NO: 1991870 - RNA, 19 nt, Homo sapiens
  misc_RNA (1)...(19): siRNA sense strand
caggaucuguggugguaca

SEQ ID NO: 1991871 - RNA, 19 nt, Homo sapiens
  misc_RNA (1)...(19): siRNA sense strand
ccagcucuacugagaagaa

SEQ ID NO: 1991872 - RNA, 19 nt, Homo sapiens
  misc_RNA (1)...(19): siRNA sense strand
cagcaccgacuacuaccaa

SEQ ID NO: 1991873 - RNA, 19 nt, Homo sapiens
  misc_RNA (1)...(19): siRNA sense strand
ugagugaugugccauuucc

SEQ ID NO: 1991874 - RNA, 19 nt, Homo sapiens
  misc_RNA (1)...(19): siRNA sense strand
caagagcugcagagagaca

SEQ ID NO: 1991875 - RNA, 19 nt, Homo sapiens
  misc_RNA (1)...(19): siRNA sense strand
ccucuccaauauuaaguuc

SEQ ID NO: 1991876 - RNA, 19 nt, Homo sapiens
  misc_RNA (1)...(19): siRNA sense strand
ugguugcgcuggccauugu

SEQ ID NO: 1991877 - RNA, 19 nt, Homo sapiens
  misc_RNA (1)...(19): siRNA sense strand
acgggcagcuggacaucuu

SEQ ID NO: 1991878 - RNA, 19 nt, Homo sapiens
  misc_RNA (1)...(19): siRNA sense strand
aagcagccucucgauauaa

SEQ ID NO: 1991879 - RNA, 19 nt, Homo sapiens
  misc_RNA (1)...(19): siRNA sense strand
cagcucuacugagaagaau

SEQ ID NO: 1991880 - RNA, 19 nt, Homo sapiens
  misc_RNA (1)...(19): siRNA sense strand
ggaguuaucuaugcauaua

SEQ ID NO: 1991881 - RNA, 19 nt, Homo sapiens
  misc_RNA (1)...(19): siRNA sense strand
ggaagauccuguaugaauu

SEQ ID NO: 1991882 - RNA, 19 nt, Homo sapiens
  misc_RNA (1)...(19): siRNA sense strand
gaagauccuguaugaauua

SEQ ID NO: 1991883 - RNA, 19 nt, Homo sapiens
  misc_RNA (1)...(19): siRNA sense strand
gcuaagagcuuggucauca

SEQ ID NO: 1991884 - RNA, 19 nt, Homo sapiens
  misc_RNA (1)...(19): siRNA sense strand
gaagcaacguuucccaaau

SEQ ID NO: 1991885 - RNA, 19 nt, Homo sapiens
  misc_RNA (1)...(19): siRNA sense strand
aagcaacguuucccaaaua

SEQ ID NO: 1991886 - RNA, 19 nt, Homo sapiens
  misc_RNA (1)...(19): siRNA sense strand
gagagaaggugguggagau

SEQ ID NO: 1991887 - RNA, 19 nt, Homo sapiens
  misc_RNA (1)...(19): siRNA sense strand
gaggaguuaucuaugcaua

SEQ ID NO: 1991888 - RNA, 19 nt, Homo sapiens
  misc_RNA (1)...(19): siRNA sense strand
gcacaggcagacuggauua

SEQ ID NO: 1991889 - RNA, 19 nt, Homo sapiens
  misc_RNA (1)...(19): siRNA sense strand
ucacuuaccugaucugaag

SEQ ID NO: 1991890 - RNA, 19 nt, Homo sapiens
  misc_RNA (1)...(19): siRNA sense strand
gggaagauccuguaugaau

SEQ ID NO: 1991891 - RNA, 19 nt, Homo sapiens
  misc_RNA (1)...(19): siRNA sense strand
ggccaaagcccaccuguga

SEQ ID NO: 1991892 - RNA, 19 nt, Homo sapiens
  misc_RNA (1)...(19): siRNA sense strand
caacguuucccaaauauuc

SEQ ID NO: 1991893 - RNA, 19 nt, Homo sapiens
  misc_RNA (1)...(19): siRNA sense strand
ggacaauuccggaggaguu

SEQ ID NO: 1991894 - RNA, 19 nt, Homo sapiens
  misc_RNA (1)...(19): siRNA sense strand
gaaugaaagagaaucaaga

SEQ ID NO: 1991895 - RNA, 19 nt, Homo sapiens
  misc_RNA (1)...(19): siRNA sense strand
gcccgagccugcugucauu

SEQ ID NO: 1991896 - RNA, 19 nt, Homo sapiens
  misc_RNA (1)...(19): siRNA sense strand
gagcagcuuugucagagau

SEQ ID NO: 1991897 - RNA, 19 nt, Homo sapiens
  misc_RNA (1)...(19): siRNA sense strand
gaaaggcguaccuggaaga

SEQ ID NO: 1991898 - RNA, 19 nt, Homo sapiens
  misc_RNA (1)...(19): siRNA sense strand
agaaggugguggagauaaa

SEQ ID NO: 1991899 - RNA, 19 nt, Homo sapiens
  misc_RNA (1)...(19): siRNA sense strand
ggaugcaauucgacagcua

SEQ ID NO: 1991900 - RNA, 19 nt, Homo sapiens
  misc_RNA (1)...(19): siRNA sense strand
cccaaaguaugacaacauu

SEQ ID NO: 1991901 - RNA, 19 nt, Homo sapiens
  misc_RNA (1)...(19): siRNA sense strand
gaugaugcaugagugcuau

SEQ ID NO: 1991902 - RNA, 19 nt, Homo sapiens
  misc_RNA (1)...(19): siRNA sense strand
cauaccaccucgccaaaca

SEQ ID NO: 1991903 - RNA, 19 nt, Homo sapiens
  misc_RNA (1)...(19): siRNA sense strand
gagaaggugguggagauaa

SEQ ID NO: 1991904 - RNA, 19 nt, Homo sapiens
  misc_RNA (1)...(19): siRNA sense strand
cuaccacacucccgaggaa

SEQ ID NO: 1991905 - RNA, 19 nt, Homo sapiens
  misc_RNA (1)...(19): siRNA sense strand
gacaauuccggaggaguua

SEQ ID NO: 1991906 - RNA, 19 nt, Homo sapiens
  misc_RNA (1)...(19): siRNA sense strand
ggaaugaaagagaaucaag

SEQ ID NO: 1991907 - RNA, 19 nt, Homo sapiens
  misc_RNA (1)...(19): siRNA sense strand
gauccuguaugaauuaagc

SEQ ID NO: 1991908 - RNA, 19 nt, Homo sapiens
  misc_RNA (1)...(19): siRNA sense strand
gauuacugcugcugggaau

SEQ ID NO: 1991909 - RNA, 19 nt, Homo sapiens
  misc_RNA (1)...(19): siRNA sense strand
cuuaugacuuggcaccuuu

SEQ ID NO: 1991910 - RNA, 19 nt, Homo sapiens
  misc_RNA (1)...(19): siRNA sense strand
acacccggaugaugcauga

SEQ ID NO: 1991911 - RNA, 19 nt, Homo sapiens
  misc_RNA (1)...(19): siRNA sense strand
aacaccaucuuaugacuug

SEQ ID NO: 1991912 - RNA, 19 nt, Homo sapiens
  misc_RNA (1)...(19): siRNA sense strand
ugaagcaacguuucccaaa

SEQ ID NO: 1991913 - RNA, 19 nt, Homo sapiens
  misc_RNA (1)...(19): siRNA sense strand
accagugucuuucaucuga

SEQ ID NO: 1991914 - RNA, 19 nt, Homo sapiens
  misc_RNA (1)...(19): siRNA sense strand
ggaugaugcaugagugcua

SEQ ID NO: 1991915 - RNA, 19 nt, Homo sapiens
  misc_RNA (1)...(19): siRNA sense strand
aggcguaccuggaagacuu

SEQ ID NO: 1991916 - RNA, 19 nt, Homo sapiens
  misc_RNA (1)...(19): siRNA sense strand
ugucauuggugcuggauuc

SEQ ID NO: 1991917 - RNA, 19 nt, Homo sapiens
  misc_RNA (1)...(19): siRNA sense strand
ugucagagaucacuuaccu

SEQ ID NO: 1991918 - RNA, 19 nt, Homo sapiens
  misc_RNA (1)...(19): siRNA sense strand
ccgaaaggcguaccuggaa

SEQ ID NO: 1991919 - RNA, 19 nt, Homo sapiens
  misc_RNA (1)...(19): siRNA sense strand
cuguaugaauuaagcauga

SEQ ID NO: 1991920 - RNA, 19 nt, Homo sapiens
  misc_RNA (1)...(19): siRNA sense strand
gaacugaagcaacguuucc

SEQ ID NO: 1991921 - RNA, 19 nt, Homo sapiens
  misc_RNA (1)...(19): siRNA sense strand
caucggagacguccagauc

SEQ ID NO: 1991922 - RNA, 19 nt, Homo sapiens
  misc_RNA (1)...(19): siRNA sense strand
gaucgccacccaaaguaug

SEQ ID NO: 1991923 - RNA, 19 nt, Homo sapiens
  misc_RNA (1)...(19): siRNA sense strand
gcaacguuucccaaauauu

SEQ ID NO: 1991924 - RNA, 19 nt, Homo sapiens
  misc_RNA (1)...(19): siRNA sense strand
auugagagcugcauguaca

SEQ ID NO: 1991925 - RNA, 19 nt, Homo sapiens
  misc_RNA (1)...(19): siRNA sense strand
gaugguuccugggagcuau

SEQ ID NO: 1991926 - RNA, 19 nt, Homo sapiens
  misc_RNA (1)...(19): siRNA sense strand
ggaucaacguguguuacug

SEQ ID NO: 1991927 - RNA, 19 nt, Homo sapiens
  misc_RNA (1)...(19): siRNA sense strand
caggcagacuggauuacug

SEQ ID NO: 1991928 - RNA, 19 nt, Homo sapiens
  misc_RNA (1)...(19): siRNA sense strand
uaacaccaucuuaugacuu

SEQ ID NO: 1991929 - RNA, 19 nt, Homo sapiens
  misc_RNA (1)...(19): siRNA sense strand
gauaaacccagggcuacug

SEQ ID NO: 1991930 - RNA, 19 nt, Homo sapiens
  misc_RNA (1)...(19): siRNA sense strand
ccaaacacaggaagaggau

SEQ ID NO: 1991931 - RNA, 19 nt, Homo sapiens
  misc_RNA (1)...(19): siRNA sense strand
gggacgccauugugauugg

SEQ ID NO: 1991932 - RNA, 19 nt, Homo sapiens
  misc_RNA (1)...(19): siRNA sense strand
acccagggcugaugaaggu

SEQ ID NO: 1991933 - RNA, 19 nt, Homo sapiens
  misc_RNA (1)...(19): siRNA sense strand
ccugggagcuauggugugu

SEQ ID NO: 1991934 - RNA, 19 nt, Homo sapiens
  misc_RNA (1)...(19): siRNA sense strand
ggaacugaagcaacguuuc

SEQ ID NO: 1991935 - RNA, 19 nt, Homo sapiens
  misc_RNA (1)...(19): siRNA sense strand
augcaugagugcuaucaga

SEQ ID NO: 1991936 - RNA, 19 nt, Homo sapiens
  misc_RNA (1)...(19): siRNA sense strand
uggggaagauccuguauga

SEQ ID NO: 1991937 - RNA, 19 nt, Homo sapiens
  misc_RNA (1)...(19): siRNA sense strand
agagcugcauguacacgaa

SEQ ID NO: 1991938 - RNA, 19 nt, Homo sapiens
  misc_RNA (1)...(19): siRNA sense strand
gcagcuuugucagagauca

SEQ ID NO: 1991939 - RNA, 19 nt, Homo sapiens
  misc_RNA (1)...(19): siRNA sense strand
ccggaggaguuaucuaugc

SEQ ID NO: 1991940 - RNA, 19 nt, Homo sapiens
  misc_RNA (1)...(19): siRNA sense strand
ccacagcacgcacagacau

SEQ ID NO: 1991941 - RNA, 19 nt, Homo sapiens
  misc_RNA (1)...(19): siRNA sense strand
ccucagagcccugcaggau

SEQ ID NO: 1991942 - RNA, 19 nt, Homo sapiens
  misc_RNA (1)...(19): siRNA sense strand
cauuggugcuggauucucu

SEQ ID NO: 1991943 - RNA, 19 nt, Homo sapiens
  misc_RNA (1)...(19): siRNA sense strand
cauggacaaagccggauaa

SEQ ID NO: 1991944 - RNA, 19 nt, Homo sapiens
  misc_RNA (1)...(19): siRNA sense strand
gaggaacugaagcaacguu

SEQ ID NO: 1991945 - RNA, 19 nt, Homo sapiens
  misc_RNA (1)...(19): siRNA sense strand
ugagcagcuuugucagaga

SEQ ID NO: 1991946 - RNA, 19 nt, Homo sapiens
  misc_RNA (1)...(19): siRNA sense strand
cggaggaguuaucuaugca

SEQ ID NO: 1991947 - RNA, 19 nt, Homo sapiens
  misc_RNA (1)...(19): siRNA sense strand
ucauugagagcugcaugua

SEQ ID NO: 1991948 - RNA, 19 nt, Homo sapiens
  misc_RNA (1)...(19): siRNA sense strand
ggaagcucccauggacaaa

SEQ ID NO: 1991949 - RNA, 19 nt, Homo sapiens
  misc_RNA (1)...(19): siRNA sense strand
ggacugcccacaggagagu

SEQ ID NO: 1991950 - RNA, 19 nt, Homo sapiens
  misc_RNA (1)...(19): siRNA sense strand
guguguuacuggcgagaga

SEQ ID NO: 1991951 - RNA, 19 nt, Homo sapiens
  misc_RNA (1)...(19): siRNA sense strand
gcuggagcaguucuuucua

SEQ ID NO: 1991952 - RNA, 19 nt, Homo sapiens
  misc_RNA (1)...(19): siRNA sense strand
gaacaucagagaauucaua

SEQ ID NO: 1991953 - RNA, 19 nt, Homo sapiens
  misc_RNA (1)...(19): siRNA sense strand
gaacaucagagaauucaua

SEQ ID NO: 1991954 - RNA, 19 nt, Homo sapiens
  misc_RNA (1)...(19): siRNA sense strand
gagaaacccuuugaaugua

SEQ ID NO: 1991955 - RNA, 19 nt, Homo sapiens
  misc_RNA (1)...(19): siRNA sense strand
auacaaggcuucauaauug

SEQ ID NO: 1991956 - RNA, 19 nt, Homo sapiens
  misc_RNA (1)...(19): siRNA sense strand
gggaaggccuuuauucuug

SEQ ID NO: 1991957 - RNA, 19 nt, Homo sapiens
  misc_RNA (1)...(19): siRNA sense strand
gagagaagcccuacaaaug

SEQ ID NO: 1991958 - RNA, 19 nt, Homo sapiens
  misc_RNA (1)...(19): siRNA sense strand
cuacacaacuuacauauca

SEQ ID NO: 1991959 - RNA, 19 nt, Homo sapiens
  misc_RNA (1)...(19): siRNA sense strand
caacauacaaggcuucaua

SEQ ID NO: 1991960 - RNA, 19 nt, Homo sapiens
  misc_RNA (1)...(19): siRNA sense strand
gacaaggccuuuauuuaug

SEQ ID NO: 1991961 - RNA, 19 nt, Homo sapiens
  misc_RNA (1)...(19): siRNA sense strand
gcaaacaacuuagugaaca

SEQ ID NO: 1991962 - RNA, 19 nt, Homo sapiens
  misc_RNA (1)...(19): siRNA sense strand
gaacuuacucugcaucaaa

SEQ ID NO: 1991963 - RNA, 19 nt, Homo sapiens
  misc_RNA (1)...(19): siRNA sense strand
ugagaaaccuuaugagugu

SEQ ID NO: 1991964 - RNA, 19 nt, Homo sapiens
  misc_RNA (1)...(19): siRNA sense strand
ugagaaaccuuaugagugu

SEQ ID NO: 1991965 - RNA, 19 nt, Homo sapiens
  misc_RNA (1)...(19): siRNA sense strand
gaaugaacaucagagaauu

SEQ ID NO: 1991966 - RNA, 19 nt, Homo sapiens
  misc_RNA (1)...(19): siRNA sense strand
gagaaacccuaugaaugua

SEQ ID NO: 1991967 - RNA, 19 nt, Homo sapiens
  misc_RNA (1)...(19): siRNA sense strand
gagaaacccuaugaaugua

SEQ ID NO: 1991968 - RNA, 19 nt, Homo sapiens
  misc_RNA (1)...(19): siRNA sense strand
ggaaacguaucaaccauca

SEQ ID NO: 1991969 - RNA, 19 nt, Homo sapiens
  misc_RNA (1)...(19): siRNA sense strand
guacagggaugugauguug

SEQ ID NO: 1991970 - RNA, 19 nt, Homo sapiens
  misc_RNA (1)...(19): siRNA sense strand
ggaaguuuaugaaauggaa

SEQ ID NO: 1991971 - RNA, 19 nt, Homo sapiens
  misc_RNA (1)...(19): siRNA sense strand
ugacaaggccuuuauuuau

SEQ ID NO: 1991972 - RNA, 19 nt, Homo sapiens
  misc_RNA (1)...(19): siRNA sense strand
gaaacccuaugaauguaaa

SEQ ID NO: 1991973 - RNA, 19 nt, Homo sapiens
  misc_RNA (1)...(19): siRNA sense strand
gcucugaaguuaagaaaca

SEQ ID NO: 1991974 - RNA, 19 nt, Homo sapiens
  misc_RNA (1)...(19): siRNA sense strand
uuucguggcucacaacuua

SEQ ID NO: 1991975 - RNA, 19 nt, Homo sapiens
  misc_RNA (1)...(19): siRNA sense strand
caacuuagagggucaagaa

SEQ ID NO: 1991976 - RNA, 19 nt, Homo sapiens
  misc_RNA (1)...(19): siRNA sense strand
gagaaacccuauacaugug

SEQ ID NO: 1991977 - RNA, 19 nt, Homo sapiens
  misc_RNA (1)...(19): siRNA sense strand
gagagaaacccuaugaaug

SEQ ID NO: 1991978 - RNA, 19 nt, Homo sapiens
  misc_RNA (1)...(19): siRNA sense strand
ugagagaccuuauaaaugc

SEQ ID NO: 1991979 - RNA, 19 nt, Homo sapiens
  misc_RNA (1)...(19): siRNA sense strand
gagagaaacccuaugaaug

SEQ ID NO: 1991980 - RNA, 19 nt, Homo sapiens
  misc_RNA (1)...(19): siRNA sense strand
caagcuauauucaacauca

SEQ ID NO: 1991981 - RNA, 19 nt, Homo sapiens
  misc_RNA (1)...(19): siRNA sense strand
gcucacaccuuacugaaca

SEQ ID NO: 1991982 - RNA, 19 nt, Homo sapiens
  misc_RNA (1)...(19): siRNA sense strand
auucuuggcucucaacuua

SEQ ID NO: 1991983 - RNA, 19 nt, Homo sapiens
  misc_RNA (1)...(19): siRNA sense strand
gagaaaccauaugaaugua

SEQ ID NO: 1991984 - RNA, 19 nt, Homo sapiens
  misc_RNA (1)...(19): siRNA sense strand
ggagagaaaccauaugaau

SEQ ID NO: 1991985 - RNA, 19 nt, Homo sapiens
  misc_RNA (1)...(19): siRNA sense strand
gaaagucauucaaccucuu

SEQ ID NO: 1991986 - RNA, 19 nt, Homo sapiens
  misc_RNA (1)...(19): siRNA sense strand
caacuuacuuaccaucaga

SEQ ID NO: 1991987 - RNA, 19 nt, Homo sapiens
  misc_RNA (1)...(19): siRNA sense strand
gaaaccauaugaauguaag

SEQ ID NO: 1991988 - RNA, 19 nt, Homo sapiens
  misc_RNA (1)...(19): siRNA sense strand
ggagagaaacccuaugaau

SEQ ID NO: 1991989 - RNA, 19 nt, Homo sapiens
  misc_RNA (1)...(19): siRNA sense strand
gugacaaggccuuuauuua

SEQ ID NO: 1991990 - RNA, 19 nt, Homo sapiens
  misc_RNA (1)...(19): siRNA sense strand
gaaaauucauggugagaaa

SEQ ID NO: 1991991 - RNA, 19 nt, Homo sapiens
  misc_RNA (1)...(19): siRNA sense strand
ggugagagaccuuauaaau

SEQ ID NO: 1991992 - RNA, 19 nt, Homo sapiens
  misc_RNA (1)...(19): siRNA sense strand
ggagagaaacccuaugaau

SEQ ID NO: 1991993 - RNA, 19 nt, Homo sapiens
  misc_RNA (1)...(19): siRNA sense strand
gcucacaacuuacuuacca

SEQ ID NO: 1991994 - RNA, 19 nt, Homo sapiens
  misc_RNA (1)...(19): siRNA sense strand
gauccauacuggugagaaa

SEQ ID NO: 1991995 - RNA, 19 nt, Homo sapiens
  misc_RNA (1)...(19): siRNA sense strand
ugagaaacccuuugaaugu

SEQ ID NO: 1991996 - RNA, 19 nt, Homo sapiens
  misc_RNA (1)...(19): siRNA sense strand
ggagugcaaaggcaacuua

SEQ ID NO: 1991997 - RNA, 19 nt, Homo sapiens
  misc_RNA (1)...(19): siRNA sense strand
gagagaaaccauaugaaug

SEQ ID NO: 1991998 - RNA, 19 nt, Homo sapiens
  misc_RNA (1)...(19): siRNA sense strand
ggaagggcuuuacaugugu

SEQ ID NO: 1991999 - RNA, 19 nt, Homo sapiens
  misc_RNA (1)...(19): siRNA sense strand
gagacaauauggagugcaa

SEQ ID NO: 1992000 - RNA, 19 nt, Homo sapiens
  misc_RNA (1)...(19): siRNA sense strand
ggagagaagcccuacaaau

SEQ ID NO: 1992001 - RNA, 19 nt, Homo sapiens
  misc_RNA (1)...(19): siRNA sense strand
guuaagaaacacaggaaua

SEQ ID NO: 1992002 - RNA, 19 nt, Homo sapiens
  misc_RNA (1)...(19): siRNA sense strand
cauacaaggcuucauaauu

SEQ ID NO: 1992003 - RNA, 19 nt, Homo sapiens
  misc_RNA (1)...(19): siRNA sense strand
gaacaucagagaauucaca

SEQ ID NO: 1992004 - RNA, 19 nt, Homo sapiens
  misc_RNA (1)...(19): siRNA sense strand
auuuauggcucacaacuua

SEQ ID NO: 1992005 - RNA, 19 nt, Homo sapiens
  misc_RNA (1)...(19): siRNA sense strand
aaacacaggaauaccuuua

SEQ ID NO: 1992006 - RNA, 19 nt, Homo sapiens
  misc_RNA (1)...(19): siRNA sense strand
acagcaaccugaucucauu

SEQ ID NO: 1992007 - RNA, 19 nt, Homo sapiens
  misc_RNA (1)...(19): siRNA sense strand
agucguggcucagaacuua

SEQ ID NO: 1992008 - RNA, 19 nt, Homo sapiens
  misc_RNA (1)...(19): siRNA sense strand
agaaacccuuugaauguaa

SEQ ID NO: 1992009 - RNA, 19 nt, Homo sapiens
  misc_RNA (1)...(19): siRNA sense strand
ucagggauguggccauuga

SEQ ID NO: 1992010 - RNA, 19 nt, Homo sapiens
  misc_RNA (1)...(19): siRNA sense strand
agagaaacccuaugaaugu

SEQ ID NO: 1992011 - RNA, 19 nt, Homo sapiens
  misc_RNA (1)...(19): siRNA sense strand
ugagaaacccuauacaugu

SEQ ID NO: 1992012 - RNA, 19 nt, Homo sapiens
  misc_RNA (1)...(19): siRNA sense strand
agagaaacccuaugaaugu

SEQ ID NO: 1992013 - RNA, 19 nt, Homo sapiens
  misc_RNA (1)...(19): siRNA sense strand
gcucucaacuuacuuacca

SEQ ID NO: 1992014 - RNA, 19 nt, Homo sapiens
  misc_RNA (1)...(19): siRNA sense strand
auucguggcucacaccuua

SEQ ID NO: 1992015 - RNA, 19 nt, Homo sapiens
  misc_RNA (1)...(19): siRNA sense strand
caucagagaauucauagug

SEQ ID NO: 1992016 - RNA, 19 nt, Homo sapiens
  misc_RNA (1)...(19): siRNA sense strand
gggaugugauguuggagaa

SEQ ID NO: 1992017 - RNA, 19 nt, Homo sapiens
  misc_RNA (1)...(19): siRNA sense strand
caucagagaauucauagug

SEQ ID NO: 1992018 - RNA, 19 nt, Homo sapiens
  misc_RNA (1)...(19): siRNA sense strand
ugaaaagccuuacauaugu

SEQ ID NO: 1992019 - RNA, 19 nt, Homo sapiens
  misc_RNA (1)...(19): siRNA sense strand
gaacucauacuggagagaa

SEQ ID NO: 1992020 - RNA, 19 nt, Homo sapiens
  misc_RNA (1)...(19): siRNA sense strand
guacgugcuacacaacuua

SEQ ID NO: 1992021 - RNA, 19 nt, Homo sapiens
  misc_RNA (1)...(19): siRNA sense strand
uugcauaucuuacucaaca

SEQ ID NO: 1992022 - RNA, 19 nt, Homo sapiens
  misc_RNA (1)...(19): siRNA sense strand
ucaauacaauggucuugga

SEQ ID NO: 1992023 - RNA, 19 nt, Homo sapiens
  misc_RNA (1)...(19): siRNA sense strand
guucacaccuuacauacca

SEQ ID NO: 1992024 - RNA, 19 nt, Homo sapiens
  misc_RNA (1)...(19): siRNA sense strand
gcagacaagguuucagcua

SEQ ID NO: 1992025 - RNA, 19 nt, Homo sapiens
  misc_RNA (1)...(19): siRNA sense strand
gaaacccuaugaauguaag

SEQ ID NO: 1992026 - RNA, 19 nt, Homo sapiens
  misc_RNA (1)...(19): siRNA sense strand
agagaaaccauaugaaugu

SEQ ID NO: 1992027 - RNA, 19 nt, Homo sapiens
  misc_RNA (1)...(19): siRNA sense strand
ugucaugccuuauucaaca

SEQ ID NO: 1992028 - RNA, 19 nt, Homo sapiens
  misc_RNA (1)...(19): siRNA sense strand
ugacuucucucaggaggaa

SEQ ID NO: 1992029 - RNA, 19 nt, Homo sapiens
  misc_RNA (1)...(19): siRNA sense strand
gugagaaacccuauacaug

SEQ ID NO: 1992030 - RNA, 19 nt, Homo sapiens
  misc_RNA (1)...(19): siRNA sense strand
gugagaaacccuuugaaug

SEQ ID NO: 1992031 - RNA, 19 nt, Homo sapiens
  misc_RNA (1)...(19): siRNA sense strand
ugaaugaacaucagagaau

SEQ ID NO: 1992032 - RNA, 19 nt, Homo sapiens
  misc_RNA (1)...(19): siRNA sense strand
uaucaaccaucaccuucaa

SEQ ID NO: 1992033 - RNA, 19 nt, Homo sapiens
  misc_RNA (1)...(19): siRNA sense strand
ucacaacuuacucaacaua

SEQ ID NO: 1992034 - RNA, 19 nt, Homo sapiens
  misc_RNA (1)...(19): siRNA sense strand
agauguccuucacaacuua

SEQ ID NO: 1992035 - RNA, 19 nt, Homo sapiens
  misc_RNA (1)...(19): siRNA sense strand
gugagagaccuuauaaaug

SEQ ID NO: 1992036 - RNA, 19 nt, Homo sapiens
  misc_RNA (1)...(19): siRNA sense strand
gagaaaccuuaugagugua

SEQ ID NO: 1992037 - RNA, 19 nt, Homo sapiens
  misc_RNA (1)...(19): siRNA sense strand
caauauacucuucaucaga

SEQ ID NO: 1992038 - RNA, 19 nt, Homo sapiens
  misc_RNA (1)...(19): siRNA sense strand
cuucugaucucauucaaca

SEQ ID NO: 1992039 - RNA, 19 nt, Homo sapiens
  misc_RNA (1)...(19): siRNA sense strand
gagaaaccuuaugagugua

SEQ ID NO: 1992040 - RNA, 19 nt, Homo sapiens
  misc_RNA (1)...(19): siRNA sense strand
aggaagggcuuuacaugug

SEQ ID NO: 1992041 - RNA, 19 nt, Homo sapiens
  misc_RNA (1)...(19): siRNA sense strand
ucaaccaucaccuucaaua

SEQ ID NO: 1992042 - RNA, 19 nt, Homo sapiens
  misc_RNA (1)...(19): siRNA sense strand
caacuuacucaacauacaa

SEQ ID NO: 1992043 - RNA, 19 nt, Homo sapiens
  misc_RNA (1)...(19): siRNA sense strand
gaaacacaggaauaccuuu

SEQ ID NO: 1992044 - RNA, 19 nt, Homo sapiens
  misc_RNA (1)...(19): siRNA sense strand
ucaagaagcaagucaggaa

SEQ ID NO: 1992045 - RNA, 19 nt, Homo sapiens
  misc_RNA (1)...(19): siRNA sense strand
cauucaaccucuucuacuu

SEQ ID NO: 1992046 - RNA, 19 nt, Homo sapiens
  misc_RNA (1)...(19): siRNA sense strand
uacaaggcuucauaauuga

SEQ ID NO: 1992047 - RNA, 19 nt, Homo sapiens
  misc_RNA (1)...(19): siRNA sense strand
cuucacaacuuacucaaca

SEQ ID NO: 1992048 - RNA, 19 nt, Homo sapiens
  misc_RNA (1)...(19): siRNA sense strand
caacuuagugaacaucaga

SEQ ID NO: 1992049 - RNA, 19 nt, Homo sapiens
  misc_RNA (1)...(19): siRNA sense strand
caacuuagugaacaucaga

SEQ ID NO: 1992050 - RNA, 19 nt, Homo sapiens
  misc_RNA (1)...(19): siRNA sense strand
caggagagaaaccauauga

SEQ ID NO: 1992051 - RNA, 19 nt, Homo sapiens
  misc_RNA (1)...(19): siRNA sense strand
uagauguccuucacaacuu

SEQ ID NO: 1992052 - RNA, 19 nt, Homo sapiens
  misc_RNA (1)...(19): siRNA sense strand
gaagagagcagucaagaga

SEQ ID NO: 1992053 - RNA, 19 nt, Homo sapiens
  misc_RNA (1)...(19): siRNA sense strand
gacaguauuugcucaauuu

SEQ ID NO: 1992054 - RNA, 19 nt, Homo sapiens
  misc_RNA (1)...(19): siRNA sense strand
gaaauuacccucugaugug

SEQ ID NO: 1992055 - RNA, 19 nt, Homo sapiens
  misc_RNA (1)...(19): siRNA sense strand
caacaacaauccagaaauc

SEQ ID NO: 1992056 - RNA, 19 nt, Homo sapiens
  misc_RNA (1)...(19): siRNA sense strand
ggaagagaauauagaauca

SEQ ID NO: 1992057 - RNA, 19 nt, Homo sapiens
  misc_RNA (1)...(19): siRNA sense strand
gauaagaaagccagauuaa

SEQ ID NO: 1992058 - RNA, 19 nt, Homo sapiens
  misc_RNA (1)...(19): siRNA sense strand
ggaaagcgauaguauugau

SEQ ID NO: 1992059 - RNA, 19 nt, Homo sapiens
  misc_RNA (1)...(19): siRNA sense strand
gcacgagcaugcccugaaa

SEQ ID NO: 1992060 - RNA, 19 nt, Homo sapiens
  misc_RNA (1)...(19): siRNA sense strand
gaggaaagcgauaguauug

SEQ ID NO: 1992061 - RNA, 19 nt, Homo sapiens
  misc_RNA (1)...(19): siRNA sense strand
ggauaaagcugugcaaguc

SEQ ID NO: 1992062 - RNA, 19 nt, Homo sapiens
  misc_RNA (1)...(19): siRNA sense strand
caaaguggcagauaagaaa

SEQ ID NO: 1992063 - RNA, 19 nt, Homo sapiens
  misc_RNA (1)...(19): siRNA sense strand
gaccaagccugugcaaauu

SEQ ID NO: 1992064 - RNA, 19 nt, Homo sapiens
  misc_RNA (1)...(19): siRNA sense strand
caacaauccagaaaucuuu

SEQ ID NO: 1992065 - RNA, 19 nt, Homo sapiens
  misc_RNA (1)...(19): siRNA sense strand
gaaaccagaugggaagaug

SEQ ID NO: 1992066 - RNA, 19 nt, Homo sapiens
  misc_RNA (1)...(19): siRNA sense strand
gaagaucgaagaaaacuua

SEQ ID NO: 1992067 - RNA, 19 nt, Homo sapiens
  misc_RNA (1)...(19): siRNA sense strand
ucaagaagcagcucagaaa

SEQ ID NO: 1992068 - RNA, 19 nt, Homo sapiens
  misc_RNA (1)...(19): siRNA sense strand
gagcuguccuggaaguaaa

SEQ ID NO: 1992069 - RNA, 19 nt, Homo sapiens
  misc_RNA (1)...(19): siRNA sense strand
aaagagccaugaaucuaaa

SEQ ID NO: 1992070 - RNA, 19 nt, Homo sapiens
  misc_RNA (1)...(19): siRNA sense strand
guaaauaucccuaggaaac

SEQ ID NO: 1992071 - RNA, 19 nt, Homo sapiens
  misc_RNA (1)...(19): siRNA sense strand
ggacaaaggcaaagugaag

SEQ ID NO: 1992072 - RNA, 19 nt, Homo sapiens
  misc_RNA (1)...(19): siRNA sense strand
ggaaauuacccucugaugu

SEQ ID NO: 1992073 - RNA, 19 nt, Homo sapiens
  misc_RNA (1)...(19): siRNA sense strand
gaacuggcucagagugaua

SEQ ID NO: 1992074 - RNA, 19 nt, Homo sapiens
  misc_RNA (1)...(19): siRNA sense strand
ugaugaagaugaagaggaa

SEQ ID NO: 1992075 - RNA, 19 nt, Homo sapiens
  misc_RNA (1)...(19): siRNA sense strand
guucaugacucaagaagca

SEQ ID NO: 1992076 - RNA, 19 nt, Homo sapiens
  misc_RNA (1)...(19): siRNA sense strand
uaaggcaugucgaggcuuu

SEQ ID NO: 1992077 - RNA, 19 nt, Homo sapiens
  misc_RNA (1)...(19): siRNA sense strand
aaacaucaggaaucaguua

SEQ ID NO: 1992078 - RNA, 19 nt, Homo sapiens
  misc_RNA (1)...(19): siRNA sense strand
ucaaauauguccgcauugu

SEQ ID NO: 1992079 - RNA, 19 nt, Homo sapiens
  misc_RNA (1)...(19): siRNA sense strand
ggacagugaccuagaggaa

SEQ ID NO: 1992080 - RNA, 19 nt, Homo sapiens
  misc_RNA (1)...(19): siRNA sense strand
gcagagaggaagaggauau

SEQ ID NO: 1992081 - RNA, 19 nt, Homo sapiens
  misc_RNA (1)...(19): siRNA sense strand
ggaaagaagagaagaaagg

SEQ ID NO: 1992082 - RNA, 19 nt, Homo sapiens
  misc_RNA (1)...(19): siRNA sense strand
gaaaagagccaugaaucua

SEQ ID NO: 1992083 - RNA, 19 nt, Homo sapiens
  misc_RNA (1)...(19): siRNA sense strand
gcaaagaggagcaaauggu

SEQ ID NO: 1992084 - RNA, 19 nt, Homo sapiens
  misc_RNA (1)...(19): siRNA sense strand
uuggagaacucaaauaugu

SEQ ID NO: 1992085 - RNA, 19 nt, Homo sapiens
  misc_RNA (1)...(19): siRNA sense strand
aaccugagcuuuaaguguu

SEQ ID NO: 1992086 - RNA, 19 nt, Homo sapiens
  misc_RNA (1)...(19): siRNA sense strand
gcaggagaagcagcaauua

SEQ ID NO: 1992087 - RNA, 19 nt, Homo sapiens
  misc_RNA (1)...(19): siRNA sense strand
ugacgaugaugaugaugaa

SEQ ID NO: 1992088 - RNA, 19 nt, Homo sapiens
  misc_RNA (1)...(19): siRNA sense strand
gaaguaaauaucccuagga

SEQ ID NO: 1992089 - RNA, 19 nt, Homo sapiens
  misc_RNA (1)...(19): siRNA sense strand
caaaggcuguagaugacaa

SEQ ID NO: 1992090 - RNA, 19 nt, Homo sapiens
  misc_RNA (1)...(19): siRNA sense strand
gaagaggaagagaauauag

SEQ ID NO: 1992091 - RNA, 19 nt, Homo sapiens
  misc_RNA (1)...(19): siRNA sense strand
gaaccugagcuuuaagugu

SEQ ID NO: 1992092 - RNA, 19 nt, Homo sapiens
  misc_RNA (1)...(19): siRNA sense strand
acucaaauauguccgcauu

SEQ ID NO: 1992093 - RNA, 19 nt, Homo sapiens
  misc_RNA (1)...(19): siRNA sense strand
caaagaggagcaaaugguu

SEQ ID NO: 1992094 - RNA, 19 nt, Homo sapiens
  misc_RNA (1)...(19): siRNA sense strand
gagcagguaucuaggaaaa

SEQ ID NO: 1992095 - RNA, 19 nt, Homo sapiens
  misc_RNA (1)...(19): siRNA sense strand
cgaugaugaugaugaagaa

SEQ ID NO: 1992096 - RNA, 19 nt, Homo sapiens
  misc_RNA (1)...(19): siRNA sense strand
ggagcugccugauggaaag

SEQ ID NO: 1992097 - RNA, 19 nt, Homo sapiens
  misc_RNA (1)...(19): siRNA sense strand
gagauuaccaccuuugaag

SEQ ID NO: 1992098 - RNA, 19 nt, Homo sapiens
  misc_RNA (1)...(19): siRNA sense strand
ggaacuggcucagagugau

SEQ ID NO: 1992099 - RNA, 19 nt, Homo sapiens
  misc_RNA (1)...(19): siRNA sense strand
ggaggacagugaccuagag

SEQ ID NO: 1992100 - RNA, 19 nt, Homo sapiens
  misc_RNA (1)...(19): siRNA sense strand
ggaagaggauauggaagag

SEQ ID NO: 1992101 - RNA, 19 nt, Homo sapiens
  misc_RNA (1)...(19): siRNA sense strand
ggaccggguuccagaccaa

SEQ ID NO: 1992102 - RNA, 19 nt, Homo sapiens
  misc_RNA (1)...(19): siRNA sense strand
caaggaguguagagugaug

SEQ ID NO: 1992103 - RNA, 19 nt, Homo sapiens
  misc_RNA (1)...(19): siRNA sense strand
acacagagcauucuaaagg

SEQ ID NO: 1992104 - RNA, 19 nt, Homo sapiens
  misc_RNA (1)...(19): siRNA sense strand
ugaccaagccugugcaaau

SEQ ID NO: 1992105 - RNA, 19 nt, Homo sapiens
  misc_RNA (1)...(19): siRNA sense strand
agacaguauuugcucaauu

SEQ ID NO: 1992106 - RNA, 19 nt, Homo sapiens
  misc_RNA (1)...(19): siRNA sense strand
gaagacaguauuugcucaa

SEQ ID NO: 1992107 - RNA, 19 nt, Homo sapiens
  misc_RNA (1)...(19): siRNA sense strand
uaaaggagcaccucuugca

SEQ ID NO: 1992108 - RNA, 19 nt, Homo sapiens
  misc_RNA (1)...(19): siRNA sense strand
ugaugaggcugcaaagcuu

SEQ ID NO: 1992109 - RNA, 19 nt, Homo sapiens
  misc_RNA (1)...(19): siRNA sense strand
aaauuacccucugauguga

SEQ ID NO: 1992110 - RNA, 19 nt, Homo sapiens
  misc_RNA (1)...(19): siRNA sense strand
gugcaagucucaaacaaaa

SEQ ID NO: 1992111 - RNA, 19 nt, Homo sapiens
  misc_RNA (1)...(19): siRNA sense strand
ccaagccugugcaaauuca

SEQ ID NO: 1992112 - RNA, 19 nt, Homo sapiens
  misc_RNA (1)...(19): siRNA sense strand
aaacgaugaugaugacgau

SEQ ID NO: 1992113 - RNA, 19 nt, Homo sapiens
  misc_RNA (1)...(19): siRNA sense strand
ggagauuaccaccuuugaa

SEQ ID NO: 1992114 - RNA, 19 nt, Homo sapiens
  misc_RNA (1)...(19): siRNA sense strand
aaguaaauaucccuaggaa

SEQ ID NO: 1992115 - RNA, 19 nt, Homo sapiens
  misc_RNA (1)...(19): siRNA sense strand
gaaagaagagaagaaaggu

SEQ ID NO: 1992116 - RNA, 19 nt, Homo sapiens
  misc_RNA (1)...(19): siRNA sense strand
gcauuugcccaguucauga

SEQ ID NO: 1992117 - RNA, 19 nt, Homo sapiens
  misc_RNA (1)...(19): siRNA sense strand
gagcuucuccaacaguuug

SEQ ID NO: 1992118 - RNA, 19 nt, Homo sapiens
  misc_RNA (1)...(19): siRNA sense strand
ugacucagaagaagaagaa

SEQ ID NO: 1992119 - RNA, 19 nt, Homo sapiens
  misc_RNA (1)...(19): siRNA sense strand
ggagcuguccuggaaguaa

SEQ ID NO: 1992120 - RNA, 19 nt, Homo sapiens
  misc_RNA (1)...(19): siRNA sense strand
caauaguggaguucucuuu

SEQ ID NO: 1992121 - RNA, 19 nt, Homo sapiens
  misc_RNA (1)...(19): siRNA sense strand
ccaaaguggcagauaagaa

SEQ ID NO: 1992122 - RNA, 19 nt, Homo sapiens
  misc_RNA (1)...(19): siRNA sense strand
ugaagaggaagagaauaua

SEQ ID NO: 1992123 - RNA, 19 nt, Homo sapiens
  misc_RNA (1)...(19): siRNA sense strand
aauaguggaguucucuuua

SEQ ID NO: 1992124 - RNA, 19 nt, Homo sapiens
  misc_RNA (1)...(19): siRNA sense strand
gaugcgagaccucaaagga

SEQ ID NO: 1992125 - RNA, 19 nt, Homo sapiens
  misc_RNA (1)...(19): siRNA sense strand
gaaacucaaggaccagaau

SEQ ID NO: 1992126 - RNA, 19 nt, Homo sapiens
  misc_RNA (1)...(19): siRNA sense strand
uucuaaagguugugcauuu

SEQ ID NO: 1992127 - RNA, 19 nt, Homo sapiens
  misc_RNA (1)...(19): siRNA sense strand
gagaauauagaaucaaagg

SEQ ID NO: 1992128 - RNA, 19 nt, Homo sapiens
  misc_RNA (1)...(19): siRNA sense strand
ugacuugaagacaguauuu

SEQ ID NO: 1992129 - RNA, 19 nt, Homo sapiens
  misc_RNA (1)...(19): siRNA sense strand
gaaauuauugggaccuucu

SEQ ID NO: 1992130 - RNA, 19 nt, Homo sapiens
  misc_RNA (1)...(19): siRNA sense strand
ggaccagaauaucuuuguc

SEQ ID NO: 1992131 - RNA, 19 nt, Homo sapiens
  misc_RNA (1)...(19): siRNA sense strand
ucaaggaccagaauaucuu

SEQ ID NO: 1992132 - RNA, 19 nt, Homo sapiens
  misc_RNA (1)...(19): siRNA sense strand
acagagcauucuaaagguu

SEQ ID NO: 1992133 - RNA, 19 nt, Homo sapiens
  misc_RNA (1)...(19): siRNA sense strand
cagauaagaaagccagauu

SEQ ID NO: 1992134 - RNA, 19 nt, Homo sapiens
  misc_RNA (1)...(19): siRNA sense strand
cgaacaauauaagcggaaa

SEQ ID NO: 1992135 - RNA, 19 nt, Homo sapiens
  misc_RNA (1)...(19): siRNA sense strand
cagcuggucgaacaauaua

SEQ ID NO: 1992136 - RNA, 19 nt, Homo sapiens
  misc_RNA (1)...(19): siRNA sense strand
caaaagaccagcaacagaa

SEQ ID NO: 1992137 - RNA, 19 nt, Homo sapiens
  misc_RNA (1)...(19): siRNA sense strand
agaagcagcucagaaaugc

SEQ ID NO: 1992138 - RNA, 19 nt, Homo sapiens
  misc_RNA (1)...(19): siRNA sense strand
agacacagagcauucuaaa

SEQ ID NO: 1992139 - RNA, 19 nt, Homo sapiens
  misc_RNA (1)...(19): siRNA sense strand
uuucaaugcuggaagaugu

SEQ ID NO: 1992140 - RNA, 19 nt, Homo sapiens
  misc_RNA (1)...(19): siRNA sense strand
ggauauggaagaggaagaa

SEQ ID NO: 1992141 - RNA, 19 nt, Homo sapiens
  misc_RNA (1)...(19): siRNA sense strand
gauggaaagaagagaagaa

SEQ ID NO: 1992142 - RNA, 19 nt, Homo sapiens
  misc_RNA (1)...(19): siRNA sense strand
agauaagaaagccagauua

SEQ ID NO: 1992143 - RNA, 19 nt, Homo sapiens
  misc_RNA (1)...(19): siRNA sense strand
caaggaccagaauaucuuu

SEQ ID NO: 1992144 - RNA, 19 nt, Homo sapiens
  misc_RNA (1)...(19): siRNA sense strand
ugugagugcugcugauaug

SEQ ID NO: 1992145 - RNA, 19 nt, Homo sapiens
  misc_RNA (1)...(19): siRNA sense strand
agaaaucuguccuuugacu

SEQ ID NO: 1992146 - RNA, 19 nt, Homo sapiens
  misc_RNA (1)...(19): siRNA sense strand
ugaugugaaugaagggaaa

SEQ ID NO: 1992147 - RNA, 19 nt, Homo sapiens
  misc_RNA (1)...(19): siRNA sense strand
gaaagcgauaguauugaug

SEQ ID NO: 1992148 - RNA, 19 nt, Homo sapiens
  misc_RNA (1)...(19): siRNA sense strand
ucuaaagguugugcauuug

SEQ ID NO: 1992149 - RNA, 19 nt, Homo sapiens
  misc_RNA (1)...(19): siRNA sense strand
uaguggaguucucuuuaga

SEQ ID NO: 1992150 - RNA, 19 nt, Homo sapiens
  misc_RNA (1)...(19): siRNA sense strand
ucccaaaggcuguagauga

SEQ ID NO: 1992151 - RNA, 19 nt, Homo sapiens
  misc_RNA (1)...(19): siRNA sense strand
aaacucaaggaccagaaua

SEQ ID NO: 1992152 - RNA, 19 nt, Homo sapiens
  misc_RNA (1)...(19): siRNA sense strand
gaacaagacugcccaccuu

SEQ ID NO: 1992153 - RNA, 19 nt, Homo sapiens
  misc_RNA (1)...(19): siRNA sense strand
gagaugggcuggcuaacua

SEQ ID NO: 1992154 - RNA, 19 nt, Homo sapiens
  misc_RNA (1)...(19): siRNA sense strand
gacaauauguucuguguug

SEQ ID NO: 1992155 - RNA, 19 nt, Homo sapiens
  misc_RNA (1)...(19): siRNA sense strand
gagaagcccucacuccaaa

SEQ ID NO: 1992156 - RNA, 19 nt, Homo sapiens
  misc_RNA (1)...(19): siRNA sense strand
gaaugagucccauaacuuu

SEQ ID NO: 1992157 - RNA, 19 nt, Homo sapiens
  misc_RNA (1)...(19): siRNA sense strand
ccagagggcuuugcuguga

SEQ ID NO: 1992158 - RNA, 19 nt, Homo sapiens
  misc_RNA (1)...(19): siRNA sense strand
gagccaagcugggcaacuu

SEQ ID NO: 1992159 - RNA, 19 nt, Homo sapiens
  misc_RNA (1)...(19): siRNA sense strand
uggcaagccuucaccagua

SEQ ID NO: 1992160 - RNA, 19 nt, Homo sapiens
  misc_RNA (1)...(19): siRNA sense strand
ggaggagguucuucagugu

SEQ ID NO: 1992161 - RNA, 19 nt, Homo sapiens
  misc_RNA (1)...(19): siRNA sense strand
gccaggagcccuauuauca

SEQ ID NO: 1992162 - RNA, 19 nt, Homo sapiens
  misc_RNA (1)...(19): siRNA sense strand
caacgcaccuggagacaac

SEQ ID NO: 1992163 - RNA, 19 nt, Homo sapiens
  misc_RNA (1)...(19): siRNA sense strand
uagaugagaugcugaaacu

SEQ ID NO: 1992164 - RNA, 19 nt, Homo sapiens
  misc_RNA (1)...(19): siRNA sense strand
gguaugacuucuacaccaa

SEQ ID NO: 1992165 - RNA, 19 nt, Homo sapiens
  misc_RNA (1)...(19): siRNA sense strand
ccaaggugcucagcuaugu

SEQ ID NO: 1992166 - RNA, 19 nt, Homo sapiens
  misc_RNA (1)...(19): siRNA sense strand
gaaccagagugugaaugug

SEQ ID NO: 1992167 - RNA, 19 nt, Homo sapiens
  misc_RNA (1)...(19): siRNA sense strand
ggucagagggaguuuguau

SEQ ID NO: 1992168 - RNA, 19 nt, Homo sapiens
  misc_RNA (1)...(19): siRNA sense strand
ucaagggagugaugaaugg

SEQ ID NO: 1992169 - RNA, 19 nt, Homo sapiens
  misc_RNA (1)...(19): siRNA sense strand
ggaagaaccagagugugaa

SEQ ID NO: 1992170 - RNA, 19 nt, Homo sapiens
  misc_RNA (1)...(19): siRNA sense strand
ggacaguggcagcgucuau

SEQ ID NO: 1992171 - RNA, 19 nt, Homo sapiens
  misc_RNA (1)...(19): siRNA sense strand
cagaaugagucccauaacu

SEQ ID NO: 1992172 - RNA, 19 nt, Homo sapiens
  misc_RNA (1)...(19): siRNA sense strand
ggcaagccuucaccaguau

SEQ ID NO: 1992173 - RNA, 19 nt, Homo sapiens
  misc_RNA (1)...(19): siRNA sense strand
gaagaaccagagugugaau

SEQ ID NO: 1992174 - RNA, 19 nt, Homo sapiens
  misc_RNA (1)...(19): siRNA sense strand
acagagacccgagguguuu

SEQ ID NO: 1992175 - RNA, 19 nt, Homo sapiens
  misc_RNA (1)...(19): siRNA sense strand
ccaguucuguggucagcaa

SEQ ID NO: 1992176 - RNA, 19 nt, Homo sapiens
  misc_RNA (1)...(19): siRNA sense strand
agaaugagucccauaacuu

SEQ ID NO: 1992177 - RNA, 19 nt, Homo sapiens
  misc_RNA (1)...(19): siRNA sense strand
gagugugaauguguucuug

SEQ ID NO: 1992178 - RNA, 19 nt, Homo sapiens
  misc_RNA (1)...(19): siRNA sense strand
gagacaacccugccaaggu

SEQ ID NO: 1992179 - RNA, 19 nt, Homo sapiens
  misc_RNA (1)...(19): siRNA sense strand
gagcagcacggacaucaag

SEQ ID NO: 1992180 - RNA, 19 nt, Homo sapiens
  misc_RNA (1)...(19): siRNA sense strand
gaggagguucuucagugua

SEQ ID NO: 1992181 - RNA, 19 nt, Homo sapiens
  misc_RNA (1)...(19): siRNA sense strand
ccacacagccauagaugag

SEQ ID NO: 1992182 - RNA, 19 nt, Homo sapiens
  misc_RNA (1)...(19): siRNA sense strand
gacccgagguguuuucuga

SEQ ID NO: 1992183 - RNA, 19 nt, Homo sapiens
  misc_RNA (1)...(19): siRNA sense strand
agacgacccucgguucuuc

SEQ ID NO: 1992184 - RNA, 19 nt, Homo sapiens
  misc_RNA (1)...(19): siRNA sense strand
acacagccauagaugagau

SEQ ID NO: 1992185 - RNA, 19 nt, Homo sapiens
  misc_RNA (1)...(19): siRNA sense strand
aggaagaaccagaguguga

SEQ ID NO: 1992186 - RNA, 19 nt, Homo sapiens
  misc_RNA (1)...(19): siRNA sense strand
ugaugaauggcaagaauug

SEQ ID NO: 1992187 - RNA, 19 nt, Homo sapiens
  misc_RNA (1)...(19): siRNA sense strand
ggacaaucaugcccaucac

SEQ ID NO: 1992188 - RNA, 19 nt, Homo sapiens
  misc_RNA (1)...(19): siRNA sense strand
ccgacuaccgucagaauga

SEQ ID NO: 1992189 - RNA, 19 nt, Homo sapiens
  misc_RNA (1)...(19): siRNA sense strand
aaccguggcugugaacuau

SEQ ID NO: 1992190 - RNA, 19 nt, Homo sapiens
  misc_RNA (1)...(19): siRNA sense strand
gggacaaucaugcccauca

SEQ ID NO: 1992191 - RNA, 19 nt, Homo sapiens
  misc_RNA (1)...(19): siRNA sense strand
gagagcagcacggacauca

SEQ ID NO: 1992192 - RNA, 19 nt, Homo sapiens
  misc_RNA (1)...(19): siRNA sense strand
ggaguuugcggcugaccuu

SEQ ID NO: 1992193 - RNA, 19 nt, Homo sapiens
  misc_RNA (1)...(19): siRNA sense strand
ucagcuauguggacuggau

SEQ ID NO: 1992194 - RNA, 19 nt, Homo sapiens
  misc_RNA (1)...(19): siRNA sense strand
gucagaaugagucccauaa

SEQ ID NO: 1992195 - RNA, 19 nt, Homo sapiens
  misc_RNA (1)...(19): siRNA sense strand
aggagguucuucaguguau

SEQ ID NO: 1992196 - RNA, 19 nt, Homo sapiens
  misc_RNA (1)...(19): siRNA sense strand
cugacaauauguucugugu

SEQ ID NO: 1992197 - RNA, 19 nt, Homo sapiens
  misc_RNA (1)...(19): siRNA sense strand
gacagagacccgagguguu

SEQ ID NO: 1992198 - RNA, 19 nt, Homo sapiens
  misc_RNA (1)...(19): siRNA sense strand
ggacagauggauccucacu

SEQ ID NO: 1992199 - RNA, 19 nt, Homo sapiens
  misc_RNA (1)...(19): siRNA sense strand
aaaccguggcugugaacua

SEQ ID NO: 1992200 - RNA, 19 nt, Homo sapiens
  misc_RNA (1)...(19): siRNA sense strand
cggucugucugcccgauaa

SEQ ID NO: 1992201 - RNA, 19 nt, Homo sapiens
  misc_RNA (1)...(19): siRNA sense strand
aaugagucccauaacuuua

SEQ ID NO: 1992202 - RNA, 19 nt, Homo sapiens
  misc_RNA (1)...(19): siRNA sense strand
ucaggaagaaccagagugu

SEQ ID NO: 1992203 - RNA, 19 nt, Homo sapiens
  misc_RNA (1)...(19): siRNA sense strand
ggagaugggcuggcuaacu

SEQ ID NO: 1992204 - RNA, 19 nt, Homo sapiens
  misc_RNA (1)...(19): siRNA sense strand
gaugaauggcaagaauuga

SEQ ID NO: 1992205 - RNA, 19 nt, Homo sapiens
  misc_RNA (1)...(19): siRNA sense strand
gugaugaauggcaagaauu

SEQ ID NO: 1992206 - RNA, 19 nt, Homo sapiens
  misc_RNA (1)...(19): siRNA sense strand
uggcagcgucuauguggua

SEQ ID NO: 1992207 - RNA, 19 nt, Homo sapiens
  misc_RNA (1)...(19): siRNA sense strand
ugggcuggcuaacuacuga

SEQ ID NO: 1992208 - RNA, 19 nt, Homo sapiens
  misc_RNA (1)...(19): siRNA sense strand
ccaaggacaguguuucucu

SEQ ID NO: 1992209 - RNA, 19 nt, Homo sapiens
  misc_RNA (1)...(19): siRNA sense strand
agugaugaauggcaagaau

SEQ ID NO: 1992210 - RNA, 19 nt, Homo sapiens
  misc_RNA (1)...(19): siRNA sense strand
gcuaacuacugagcugaag

SEQ ID NO: 1992211 - RNA, 19 nt, Homo sapiens
  misc_RNA (1)...(19): siRNA sense strand
cagcgucuaugugguaugg

SEQ ID NO: 1992212 - RNA, 19 nt, Homo sapiens
  misc_RNA (1)...(19): siRNA sense strand
ccauagaugagaugcugaa

SEQ ID NO: 1992213 - RNA, 19 nt, Homo sapiens
  misc_RNA (1)...(19): siRNA sense strand
ugcaacgccuggcuccaaa

SEQ ID NO: 1992214 - RNA, 19 nt, Homo sapiens
  misc_RNA (1)...(19): siRNA sense strand
gggcuacgucaguggguuu

SEQ ID NO: 1992215 - RNA, 19 nt, Homo sapiens
  misc_RNA (1)...(19): siRNA sense strand
uaccaaaccguggcuguga

SEQ ID NO: 1992216 - RNA, 19 nt, Homo sapiens
  misc_RNA (1)...(19): siRNA sense strand
ggagugaugaauggcaaga

SEQ ID NO: 1992217 - RNA, 19 nt, Homo sapiens
  misc_RNA (1)...(19): siRNA sense strand
cgacuaccgucagaaugag

SEQ ID NO: 1992218 - RNA, 19 nt, Homo sapiens
  misc_RNA (1)...(19): siRNA sense strand
ggaccuggaaagacagaca

SEQ ID NO: 1992219 - RNA, 19 nt, Homo sapiens
  misc_RNA (1)...(19): siRNA sense strand
cgucagaaugagucccaua

SEQ ID NO: 1992220 - RNA, 19 nt, Homo sapiens
  misc_RNA (1)...(19): siRNA sense strand
agaaccagagugugaaugu

SEQ ID NO: 1992221 - RNA, 19 nt, Homo sapiens
  misc_RNA (1)...(19): siRNA sense strand
ggagguucuucaguguaug

SEQ ID NO: 1992222 - RNA, 19 nt, Homo sapiens
  misc_RNA (1)...(19): siRNA sense strand
ccguggcugugaacuauag

SEQ ID NO: 1992223 - RNA, 19 nt, Homo sapiens
  misc_RNA (1)...(19): siRNA sense strand
gaacaggaaugacaucuuu

SEQ ID NO: 1992224 - RNA, 19 nt, Homo sapiens
  misc_RNA (1)...(19): siRNA sense strand
ggaagaaccuccaaauuca

SEQ ID NO: 1992225 - RNA, 19 nt, Homo sapiens
  misc_RNA (1)...(19): siRNA sense strand
ucacugagcugccaucuuu

SEQ ID NO: 1992226 - RNA, 19 nt, Homo sapiens
  misc_RNA (1)...(19): siRNA sense strand
gacagaagcugcuauauca

SEQ ID NO: 1992227 - RNA, 19 nt, Homo sapiens
  misc_RNA (1)...(19): siRNA sense strand
gaaagguuaucaacugaaa

SEQ ID NO: 1992228 - RNA, 19 nt, Homo sapiens
  misc_RNA (1)...(19): siRNA sense strand
cagaagaacuguaaggaaa

SEQ ID NO: 1992229 - RNA, 19 nt, Homo sapiens
  misc_RNA (1)...(19): siRNA sense strand
ggaaugacaucuuuguguu

SEQ ID NO: 1992230 - RNA, 19 nt, Homo sapiens
  misc_RNA (1)...(19): siRNA sense strand
caaagcagguuacugugua

SEQ ID NO: 1992231 - RNA, 19 nt, Homo sapiens
  misc_RNA (1)...(19): siRNA sense strand
ccaaggagaugcuucugua

SEQ ID NO: 1992232 - RNA, 19 nt, Homo sapiens
  misc_RNA (1)...(19): siRNA sense strand
gaaucaacuuucucgcuua

SEQ ID NO: 1992233 - RNA, 19 nt, Homo sapiens
  misc_RNA (1)...(19): siRNA sense strand
gaaaguggcuaaagagcau

SEQ ID NO: 1992234 - RNA, 19 nt, Homo sapiens
  misc_RNA (1)...(19): siRNA sense strand
gcagaaauggcaaaccuua

SEQ ID NO: 1992235 - RNA, 19 nt, Homo sapiens
  misc_RNA (1)...(19): siRNA sense strand
gaaguuggaugaggaaaug

SEQ ID NO: 1992236 - RNA, 19 nt, Homo sapiens
  misc_RNA (1)...(19): siRNA sense strand
gaauggaguucuacaguca

SEQ ID NO: 1992237 - RNA, 19 nt, Homo sapiens
  misc_RNA (1)...(19): siRNA sense strand
cagaauggcuggucuuuca

SEQ ID NO: 1992238 - RNA, 19 nt, Homo sapiens
  misc_RNA (1)...(19): siRNA sense strand
ugaagacgaugaugaagaa

SEQ ID NO: 1992239 - RNA, 19 nt, Homo sapiens
  misc_RNA (1)...(19): siRNA sense strand
ccaaagaggugguuagucu

SEQ ID NO: 1992240 - RNA, 19 nt, Homo sapiens
  misc_RNA (1)...(19): siRNA sense strand
gcugcagacuggcuaaaua

SEQ ID NO: 1992241 - RNA, 19 nt, Homo sapiens
  misc_RNA (1)...(19): siRNA sense strand
cgucuacacuuaacaauug

SEQ ID NO: 1992242 - RNA, 19 nt, Homo sapiens
  misc_RNA (1)...(19): siRNA sense strand
gaaauccucaugauagaaa

SEQ ID NO: 1992243 - RNA, 19 nt, Homo sapiens
  misc_RNA (1)...(19): siRNA sense strand
gagcagagaaggaagcuuu

SEQ ID NO: 1992244 - RNA, 19 nt, Homo sapiens
  misc_RNA (1)...(19): siRNA sense strand
ugauauaucuccagcagaa

SEQ ID NO: 1992245 - RNA, 19 nt, Homo sapiens
  misc_RNA (1)...(19): siRNA sense strand
gaacuuuccucugaagaau

SEQ ID NO: 1992246 - RNA, 19 nt, Homo sapiens
  misc_RNA (1)...(19): siRNA sense strand
caaaccagauaccuugaaa

SEQ ID NO: 1992247 - RNA, 19 nt, Homo sapiens
  misc_RNA (1)...(19): siRNA sense strand
gaagaagaacucaaucuca

SEQ ID NO: 1992248 - RNA, 19 nt, Homo sapiens
  misc_RNA (1)...(19): siRNA sense strand
gaaaacaaaucugcuauug

SEQ ID NO: 1992249 - RNA, 19 nt, Homo sapiens
  misc_RNA (1)...(19): siRNA sense strand
gaaaguauggcucagcauu

SEQ ID NO: 1992250 - RNA, 19 nt, Homo sapiens
  misc_RNA (1)...(19): siRNA sense strand
gagacaugguugcugauuu

SEQ ID NO: 1992251 - RNA, 19 nt, Homo sapiens
  misc_RNA (1)...(19): siRNA sense strand
gaagaacuuuccucugaag

SEQ ID NO: 1992252 - RNA, 19 nt, Homo sapiens
  misc_RNA (1)...(19): siRNA sense strand
gggaaauccucaugauaga

SEQ ID NO: 1992253 - RNA, 19 nt, Homo sapiens
  misc_RNA (1)...(19): siRNA sense strand
ucaccugcgucuacacuua

SEQ ID NO: 1992254 - RNA, 19 nt, Homo sapiens
  misc_RNA (1)...(19): siRNA sense strand
ugaaaggcaugaauugguu

SEQ ID NO: 1992255 - RNA, 19 nt, Homo sapiens
  misc_RNA (1)...(19): siRNA sense strand
cuaaagccauaccacauuu

SEQ ID NO: 1992256 - RNA, 19 nt, Homo sapiens
  misc_RNA (1)...(19): siRNA sense strand
ugaccgaagugcagaauau

SEQ ID NO: 1992257 - RNA, 19 nt, Homo sapiens
  misc_RNA (1)...(19): siRNA sense strand
caacgugucuaaaggaauc

SEQ ID NO: 1992258 - RNA, 19 nt, Homo sapiens
  misc_RNA (1)...(19): siRNA sense strand
ggaguuuacuagauuuguu

SEQ ID NO: 1992259 - RNA, 19 nt, Homo sapiens
  misc_RNA (1)...(19): siRNA sense strand
guaaucacccggaguuauu

SEQ ID NO: 1992260 - RNA, 19 nt, Homo sapiens
  misc_RNA (1)...(19): siRNA sense strand
aggcaguucuggaauguua

SEQ ID NO: 1992261 - RNA, 19 nt, Homo sapiens
  misc_RNA (1)...(19): siRNA sense strand
caacugaaaggcaugaauu

SEQ ID NO: 1992262 - RNA, 19 nt, Homo sapiens
  misc_RNA (1)...(19): siRNA sense strand
acgaagagaugaagaacuu

SEQ ID NO: 1992263 - RNA, 19 nt, Homo sapiens
  misc_RNA (1)...(19): siRNA sense strand
ggaaaccaaccgagugaaa

SEQ ID NO: 1992264 - RNA, 19 nt, Homo sapiens
  misc_RNA (1)...(19): siRNA sense strand
augaagaacuuuccucuga

SEQ ID NO: 1992265 - RNA, 19 nt, Homo sapiens
  misc_RNA (1)...(19): siRNA sense strand
caacaacggcaccuacuug

SEQ ID NO: 1992266 - RNA, 19 nt, Homo sapiens
  misc_RNA (1)...(19): siRNA sense strand
ggaggucuguggagcauca

SEQ ID NO: 1992267 - RNA, 19 nt, Homo sapiens
  misc_RNA (1)...(19): siRNA sense strand
uuccuucgcuuuauugaua

SEQ ID NO: 1992268 - RNA, 19 nt, Homo sapiens
  misc_RNA (1)...(19): siRNA sense strand
gaacuaccaaaggcaaaua

SEQ ID NO: 1992269 - RNA, 19 nt, Homo sapiens
  misc_RNA (1)...(19): siRNA sense strand
ucacacaggaggauuauga

SEQ ID NO: 1992270 - RNA, 19 nt, Homo sapiens
  misc_RNA (1)...(19): siRNA sense strand
ggcauaggguccuuaucua

SEQ ID NO: 1992271 - RNA, 19 nt, Homo sapiens
  misc_RNA (1)...(19): siRNA sense strand
uggcaaaccuuaugcuuca

SEQ ID NO: 1992272 - RNA, 19 nt, Homo sapiens
  misc_RNA (1)...(19): siRNA sense strand
uuaaggugcuaccauauug

SEQ ID NO: 1992273 - RNA, 19 nt, Homo sapiens
  misc_RNA (1)...(19): siRNA sense strand
gaugaaaugggccuuggua

SEQ ID NO: 1992274 - RNA, 19 nt, Homo sapiens
  misc_RNA (1)...(19): siRNA sense strand
gcucguaaccuguuucuca

SEQ ID NO: 1992275 - RNA, 19 nt, Homo sapiens
  misc_RNA (1)...(19): siRNA sense strand
uaaggguucuuucuccauu

SEQ ID NO: 1992276 - RNA, 19 nt, Homo sapiens
  misc_RNA (1)...(19): siRNA sense strand
agaaagauguggaaaauga

SEQ ID NO: 1992277 - RNA, 19 nt, Homo sapiens
  misc_RNA (1)...(19): siRNA sense strand
ugaggagaaucaagaaaga

SEQ ID NO: 1992278 - RNA, 19 nt, Homo sapiens
  misc_RNA (1)...(19): siRNA sense strand
aauuuaaggugcuaccaua

SEQ ID NO: 1992279 - RNA, 19 nt, Homo sapiens
  misc_RNA (1)...(19): siRNA sense strand
cgacaaacgucagcuaucu

SEQ ID NO: 1992280 - RNA, 19 nt, Homo sapiens
  misc_RNA (1)...(19): siRNA sense strand
agacgaugaugaagaagaa

SEQ ID NO: 1992281 - RNA, 19 nt, Homo sapiens
  misc_RNA (1)...(19): siRNA sense strand
acgaagaguuggagaagaa

SEQ ID NO: 1992282 - RNA, 19 nt, Homo sapiens
  misc_RNA (1)...(19): siRNA sense strand
gcaaagagccaaggagaag

SEQ ID NO: 1992283 - RNA, 19 nt, Homo sapiens
  misc_RNA (1)...(19): siRNA sense strand
guaaaggcaccauugaaga

SEQ ID NO: 1992284 - RNA, 19 nt, Homo sapiens
  misc_RNA (1)...(19): siRNA sense strand
agacaaagcagguuacugu

SEQ ID NO: 1992285 - RNA, 19 nt, Homo sapiens
  misc_RNA (1)...(19): siRNA sense strand
agagauaccugaggaacaa

SEQ ID NO: 1992286 - RNA, 19 nt, Homo sapiens
  misc_RNA (1)...(19): siRNA sense strand
agaagacccucuacacuca

SEQ ID NO: 1992287 - RNA, 19 nt, Homo sapiens
  misc_RNA (1)...(19): siRNA sense strand
gaaaaugcuuaccauauuc

SEQ ID NO: 1992288 - RNA, 19 nt, Homo sapiens
  misc_RNA (1)...(19): siRNA sense strand
caagagagcagagaaggaa

SEQ ID NO: 1992289 - RNA, 19 nt, Homo sapiens
  misc_RNA (1)...(19): siRNA sense strand
ccacauaugacccuuucua

SEQ ID NO: 1992290 - RNA, 19 nt, Homo sapiens
  misc_RNA (1)...(19): siRNA sense strand
uaaaggcaccauugaagaa

SEQ ID NO: 1992291 - RNA, 19 nt, Homo sapiens
  misc_RNA (1)...(19): siRNA sense strand
gccaagcaguguuuguuga

SEQ ID NO: 1992292 - RNA, 19 nt, Homo sapiens
  misc_RNA (1)...(19): siRNA sense strand
caacugaccagccgacaga

SEQ ID NO: 1992293 - RNA, 19 nt, Homo sapiens
  misc_RNA (1)...(19): siRNA sense strand
gaaaugggccuugguaaaa

SEQ ID NO: 1992294 - RNA, 19 nt, Homo sapiens
  misc_RNA (1)...(19): siRNA sense strand
gcugagagagagaacauuu

SEQ ID NO: 1992295 - RNA, 19 nt, Homo sapiens
  misc_RNA (1)...(19): siRNA sense strand
gcagcugcccuuuguuaaa

SEQ ID NO: 1992296 - RNA, 19 nt, Homo sapiens
  misc_RNA (1)...(19): siRNA sense strand
cauaccacauuucaaaguu

SEQ ID NO: 1992297 - RNA, 19 nt, Homo sapiens
  misc_RNA (1)...(19): siRNA sense strand
gcucugcugcauuucauua

SEQ ID NO: 1992298 - RNA, 19 nt, Homo sapiens
  misc_RNA (1)...(19): siRNA sense strand
gaagagaugaagaacuuuc

SEQ ID NO: 1992299 - RNA, 19 nt, Homo sapiens
  misc_RNA (1)...(19): siRNA sense strand
ccaagaaccuccacaugac

SEQ ID NO: 1992300 - RNA, 19 nt, Homo sapiens
  misc_RNA (1)...(19): siRNA sense strand
gaacaaaauuuccauugag

SEQ ID NO: 1992301 - RNA, 19 nt, Homo sapiens
  misc_RNA (1)...(19): siRNA sense strand
caagaaagauguggaaaau

SEQ ID NO: 1992302 - RNA, 19 nt, Homo sapiens
  misc_RNA (1)...(19): siRNA sense strand
ggugcaggauguaaaguau

SEQ ID NO: 1992303 - RNA, 19 nt, Homo sapiens
  misc_RNA (1)...(19): siRNA sense strand
ugaaaugggccuugguaaa

SEQ ID NO: 1992304 - RNA, 19 nt, Homo sapiens
  misc_RNA (1)...(19): siRNA sense strand
ccagagacaaaucgauaua

SEQ ID NO: 1992305 - RNA, 19 nt, Homo sapiens
  misc_RNA (1)...(19): siRNA sense strand
ugaagaacuuuccucugaa

SEQ ID NO: 1992306 - RNA, 19 nt, Homo sapiens
  misc_RNA (1)...(19): siRNA sense strand
gcaggcaguucuggaaugu

SEQ ID NO: 1992307 - RNA, 19 nt, Homo sapiens
  misc_RNA (1)...(19): siRNA sense strand
gaggaaaccaaccgaguga

SEQ ID NO: 1992308 - RNA, 19 nt, Homo sapiens
  misc_RNA (1)...(19): siRNA sense strand
cuaaauagacgaucacagu

SEQ ID NO: 1992309 - RNA, 19 nt, Homo sapiens
  misc_RNA (1)...(19): siRNA sense strand
acaaaucugcuauugauga

SEQ ID NO: 1992310 - RNA, 19 nt, Homo sapiens
  misc_RNA (1)...(19): siRNA sense strand
ugcaggauguaaaguauuu

SEQ ID NO: 1992311 - RNA, 19 nt, Homo sapiens
  misc_RNA (1)...(19): siRNA sense strand
guggaggagugguaguuaa

SEQ ID NO: 1992312 - RNA, 19 nt, Homo sapiens
  misc_RNA (1)...(19): siRNA sense strand
ggaagaaauaugagaaagu

SEQ ID NO: 1992313 - RNA, 19 nt, Homo sapiens
  misc_RNA (1)...(19): siRNA sense strand
ccaggaguuuacuagauuu

SEQ ID NO: 1992314 - RNA, 19 nt, Homo sapiens
  misc_RNA (1)...(19): siRNA sense strand
gggcagacaaagcagguua

SEQ ID NO: 1992315 - RNA, 19 nt, Homo sapiens
  misc_RNA (1)...(19): siRNA sense strand
caagaguaguuccaguguu

SEQ ID NO: 1992316 - RNA, 19 nt, Homo sapiens
  misc_RNA (1)...(19): siRNA sense strand
gcucaggcgcucaagagua

SEQ ID NO: 1992317 - RNA, 19 nt, Homo sapiens
  misc_RNA (1)...(19): siRNA sense strand
ucagauaccgugaauggaa

SEQ ID NO: 1992318 - RNA, 19 nt, Homo sapiens
  misc_RNA (1)...(19): siRNA sense strand
gaagauggacuggaugaca

SEQ ID NO: 1992319 - RNA, 19 nt, Homo sapiens
  misc_RNA (1)...(19): siRNA sense strand
gagccaaggagaagaguga

SEQ ID NO: 1992320 - RNA, 19 nt, Homo sapiens
  misc_RNA (1)...(19): siRNA sense strand
gggagagccaccagagaua

SEQ ID NO: 1992321 - RNA, 19 nt, Homo sapiens
  misc_RNA (1)...(19): siRNA sense strand
ggacagaucagggucuuca

SEQ ID NO: 1992322 - RNA, 19 nt, Homo sapiens
  misc_RNA (1)...(19): siRNA sense strand
cgacagaagcugcuauauc

SEQ ID NO: 1992323 - RNA, 19 nt, Homo sapiens
  misc_RNA (1)...(19): siRNA sense strand
gaacaggaaugacaucuuu

SEQ ID NO: 1992324 - RNA, 19 nt, Homo sapiens
  misc_RNA (1)...(19): siRNA sense strand
ggaagaaccuccaaauuca

SEQ ID NO: 1992325 - RNA, 19 nt, Homo sapiens
  misc_RNA (1)...(19): siRNA sense strand
ucacugagcugccaucuuu

SEQ ID NO: 1992326 - RNA, 19 nt, Homo sapiens
  misc_RNA (1)...(19): siRNA sense strand
gacagaagcugcuauauca

SEQ ID NO: 1992327 - RNA, 19 nt, Homo sapiens
  misc_RNA (1)...(19): siRNA sense strand
gaaagguuaucaacugaaa

SEQ ID NO: 1992328 - RNA, 19 nt, Homo sapiens
  misc_RNA (1)...(19): siRNA sense strand
cagaagaacuguaaggaaa

SEQ ID NO: 1992329 - RNA, 19 nt, Homo sapiens
  misc_RNA (1)...(19): siRNA sense strand
ggaaugacaucuuuguguu

SEQ ID NO: 1992330 - RNA, 19 nt, Homo sapiens
  misc_RNA (1)...(19): siRNA sense strand
caaagcagguuacugugua

SEQ ID NO: 1992331 - RNA, 19 nt, Homo sapiens
  misc_RNA (1)...(19): siRNA sense strand
ccaaggagaugcuucugua

SEQ ID NO: 1992332 - RNA, 19 nt, Homo sapiens
  misc_RNA (1)...(19): siRNA sense strand
gaaucaacuuucucgcuua

SEQ ID NO: 1992333 - RNA, 19 nt, Homo sapiens
  misc_RNA (1)...(19): siRNA sense strand
gaaaguggcuaaagagcau

SEQ ID NO: 1992334 - RNA, 19 nt, Homo sapiens
  misc_RNA (1)...(19): siRNA sense strand
gcagaaauggcaaaccuua

SEQ ID NO: 1992335 - RNA, 19 nt, Homo sapiens
  misc_RNA (1)...(19): siRNA sense strand
gaaguuggaugaggaaaug

SEQ ID NO: 1992336 - RNA, 19 nt, Homo sapiens
  misc_RNA (1)...(19): siRNA sense strand
gaauggaguucuacaguca

SEQ ID NO: 1992337 - RNA, 19 nt, Homo sapiens
  misc_RNA (1)...(19): siRNA sense strand
cagaauggcuggucuuuca

SEQ ID NO: 1992338 - RNA, 19 nt, Homo sapiens
  misc_RNA (1)...(19): siRNA sense strand
ugaagacgaugaugaagaa

SEQ ID NO: 1992339 - RNA, 19 nt, Homo sapiens
  misc_RNA (1)...(19): siRNA sense strand
ccaaagaggugguuagucu

SEQ ID NO: 1992340 - RNA, 19 nt, Homo sapiens
  misc_RNA (1)...(19): siRNA sense strand
gcugcagacuggcuaaaua

SEQ ID NO: 1992341 - RNA, 19 nt, Homo sapiens
  misc_RNA (1)...(19): siRNA sense strand
cgucuacacuuaacaauug

SEQ ID NO: 1992342 - RNA, 19 nt, Homo sapiens
  misc_RNA (1)...(19): siRNA sense strand
gaaauccucaugauagaaa

SEQ ID NO: 1992343 - RNA, 19 nt, Homo sapiens
  misc_RNA (1)...(19): siRNA sense strand
gagcagagaaggaagcuuu

SEQ ID NO: 1992344 - RNA, 19 nt, Homo sapiens
  misc_RNA (1)...(19): siRNA sense strand
ugauauaucuccagcagaa

SEQ ID NO: 1992345 - RNA, 19 nt, Homo sapiens
  misc_RNA (1)...(19): siRNA sense strand
gaacuuuccucugaagaau

SEQ ID NO: 1992346 - RNA, 19 nt, Homo sapiens
  misc_RNA (1)...(19): siRNA sense strand
caaaccagauaccuugaaa

SEQ ID NO: 1992347 - RNA, 19 nt, Homo sapiens
  misc_RNA (1)...(19): siRNA sense strand
gaagaagaacucaaucuca

SEQ ID NO: 1992348 - RNA, 19 nt, Homo sapiens
  misc_RNA (1)...(19): siRNA sense strand
gaaaacaaaucugcuauug

SEQ ID NO: 1992349 - RNA, 19 nt, Homo sapiens
  misc_RNA (1)...(19): siRNA sense strand
gaaaguauggcucagcauu

SEQ ID NO: 1992350 - RNA, 19 nt, Homo sapiens
  misc_RNA (1)...(19): siRNA sense strand
gagacaugguugcugauuu

SEQ ID NO: 1992351 - RNA, 19 nt, Homo sapiens
  misc_RNA (1)...(19): siRNA sense strand
gaagaacuuuccucugaag

SEQ ID NO: 1992352 - RNA, 19 nt, Homo sapiens
  misc_RNA (1)...(19): siRNA sense strand
gggaaauccucaugauaga

SEQ ID NO: 1992353 - RNA, 19 nt, Homo sapiens
  misc_RNA (1)...(19): siRNA sense strand
ucaccugcgucuacacuua

SEQ ID NO: 1992354 - RNA, 19 nt, Homo sapiens
  misc_RNA (1)...(19): siRNA sense strand
ugaaaggcaugaauugguu

SEQ ID NO: 1992355 - RNA, 19 nt, Homo sapiens
  misc_RNA (1)...(19): siRNA sense strand
cuaaagccauaccacauuu

SEQ ID NO: 1992356 - RNA, 19 nt, Homo sapiens
  misc_RNA (1)...(19): siRNA sense strand
ugaccgaagugcagaauau

SEQ ID NO: 1992357 - RNA, 19 nt, Homo sapiens
  misc_RNA (1)...(19): siRNA sense strand
caacgugucuaaaggaauc

SEQ ID NO: 1992358 - RNA, 19 nt, Homo sapiens
  misc_RNA (1)...(19): siRNA sense strand
ggaguuuacuagauuuguu

SEQ ID NO: 1992359 - RNA, 19 nt, Homo sapiens
  misc_RNA (1)...(19): siRNA sense strand
guaaucacccggaguuauu

SEQ ID NO: 1992360 - RNA, 19 nt, Homo sapiens
  misc_RNA (1)...(19): siRNA sense strand
aggcaguucuggaauguua

SEQ ID NO: 1992361 - RNA, 19 nt, Homo sapiens
  misc_RNA (1)...(19): siRNA sense strand
caacugaaaggcaugaauu

SEQ ID NO: 1992362 - RNA, 19 nt, Homo sapiens
  misc_RNA (1)...(19): siRNA sense strand
acgaagagaugaagaacuu

SEQ ID NO: 1992363 - RNA, 19 nt, Homo sapiens
  misc_RNA (1)...(19): siRNA sense strand
ggaaaccaaccgagugaaa

SEQ ID NO: 1992364 - RNA, 19 nt, Homo sapiens
  misc_RNA (1)...(19): siRNA sense strand
augaagaacuuuccucuga

SEQ ID NO: 1992365 - RNA, 19 nt, Homo sapiens
  misc_RNA (1)...(19): siRNA sense strand
caacaacggcaccuacuug

SEQ ID NO: 1992366 - RNA, 19 nt, Homo sapiens
  misc_RNA (1)...(19): siRNA sense strand
ggaggucuguggagcauca

SEQ ID NO: 1992367 - RNA, 19 nt, Homo sapiens
  misc_RNA (1)...(19): siRNA sense strand
uuccuucgcuuuauugaua

SEQ ID NO: 1992368 - RNA, 19 nt, Homo sapiens
  misc_RNA (1)...(19): siRNA sense strand
gaacuaccaaaggcaaaua

SEQ ID NO: 1992369 - RNA, 19 nt, Homo sapiens
  misc_RNA (1)...(19): siRNA sense strand
ucacacaggaggauuauga

SEQ ID NO: 1992370 - RNA, 19 nt, Homo sapiens
  misc_RNA (1)...(19): siRNA sense strand
ggcauaggguccuuaucua

SEQ ID NO: 1992371 - RNA, 19 nt, Homo sapiens
  misc_RNA (1)...(19): siRNA sense strand
uggcaaaccuuaugcuuca

SEQ ID NO: 1992372 - RNA, 19 nt, Homo sapiens
  misc_RNA (1)...(19): siRNA sense strand
uuaaggugcuaccauauug

SEQ ID NO: 1992373 - RNA, 19 nt, Homo sapiens
  misc_RNA (1)...(19): siRNA sense strand
gaugaaaugggccuuggua

SEQ ID NO: 1992374 - RNA, 19 nt, Homo sapiens
  misc_RNA (1)...(19): siRNA sense strand
gcucguaaccuguuucuca

SEQ ID NO: 1992375 - RNA, 19 nt, Homo sapiens
  misc_RNA (1)...(19): siRNA sense strand
uaaggguucuuucuccauu

SEQ ID NO: 1992376 - RNA, 19 nt, Homo sapiens
  misc_RNA (1)...(19): siRNA sense strand
agaaagauguggaaaauga

SEQ ID NO: 1992377 - RNA, 19 nt, Homo sapiens
  misc_RNA (1)...(19): siRNA sense strand
ugaggagaaucaagaaaga

SEQ ID NO: 1992378 - RNA, 19 nt, Homo sapiens
  misc_RNA (1)...(19): siRNA sense strand
aauuuaaggugcuaccaua

SEQ ID NO: 1992379 - RNA, 19 nt, Homo sapiens
  misc_RNA (1)...(19): siRNA sense strand
cgacaaacgucagcuaucu

SEQ ID NO: 1992380 - RNA, 19 nt, Homo sapiens
  misc_RNA (1)...(19): siRNA sense strand
agacgaugaugaagaagaa

SEQ ID NO: 1992381 - RNA, 19 nt, Homo sapiens
  misc_RNA (1)...(19): siRNA sense strand
acgaagaguuggagaagaa

SEQ ID NO: 1992382 - RNA, 19 nt, Homo sapiens
  misc_RNA (1)...(19): siRNA sense strand
gcaaagagccaaggagaag

SEQ ID NO: 1992383 - RNA, 19 nt, Homo sapiens
  misc_RNA (1)...(19): siRNA sense strand
guaaaggcaccauugaaga

SEQ ID NO: 1992384 - RNA, 19 nt, Homo sapiens
  misc_RNA (1)...(19): siRNA sense strand
agacaaagcagguuacugu

SEQ ID NO: 1992385 - RNA, 19 nt, Homo sapiens
  misc_RNA (1)...(19): siRNA sense strand
agagauaccugaggaacaa

SEQ ID NO: 1992386 - RNA, 19 nt, Homo sapiens
  misc_RNA (1)...(19): siRNA sense strand
agaagacccucuacacuca

SEQ ID NO: 1992387 - RNA, 19 nt, Homo sapiens
  misc_RNA (1)...(19): siRNA sense strand
gaaaaugcuuaccauauuc

SEQ ID NO: 1992388 - RNA, 19 nt, Homo sapiens
  misc_RNA (1)...(19): siRNA sense strand
caagagagcagagaaggaa

SEQ ID NO: 1992389 - RNA, 19 nt, Homo sapiens
  misc_RNA (1)...(19): siRNA sense strand
ccacauaugacccuuucua

SEQ ID NO: 1992390 - RNA, 19 nt, Homo sapiens
  misc_RNA (1)...(19): siRNA sense strand
uaaaggcaccauugaagaa

SEQ ID NO: 1992391 - RNA, 19 nt, Homo sapiens
  misc_RNA (1)...(19): siRNA sense strand
gccaagcaguguuuguuga

SEQ ID NO: 1992392 - RNA, 19 nt, Homo sapiens
  misc_RNA (1)...(19): siRNA sense strand
caacugaccagccgacaga

SEQ ID NO: 1992393 - RNA, 19 nt, Homo sapiens
  misc_RNA (1)...(19): siRNA sense strand
gaaaugggccuugguaaaa

SEQ ID NO: 1992394 - RNA, 19 nt, Homo sapiens
  misc_RNA (1)...(19): siRNA sense strand
gcugagagagagaacauuu

SEQ ID NO: 1992395 - RNA, 19 nt, Homo sapiens
  misc_RNA (1)...(19): siRNA sense strand
gcagcugcccuuuguuaaa

SEQ ID NO: 1992396 - RNA, 19 nt, Homo sapiens
  misc_RNA (1)...(19): siRNA sense strand
cauaccacauuucaaaguu

SEQ ID NO: 1992397 - RNA, 19 nt, Homo sapiens
  misc_RNA (1)...(19): siRNA sense strand
gcucugcugcauuucauua

SEQ ID NO: 1992398 - RNA, 19 nt, Homo sapiens
  misc_RNA (1)...(19): siRNA sense strand
gaagagaugaagaacuuuc

SEQ ID NO: 1992399 - RNA, 19 nt, Homo sapiens
  misc_RNA (1)...(19): siRNA sense strand
ccaagaaccuccacaugac

SEQ ID NO: 1992400 - RNA, 19 nt, Homo sapiens
  misc_RNA (1)...(19): siRNA sense strand
gaacaaaauuuccauugag

SEQ ID NO: 1992401 - RNA, 19 nt, Homo sapiens
  misc_RNA (1)...(19): siRNA sense strand
caagaaagauguggaaaau

SEQ ID NO: 1992402 - RNA, 19 nt, Homo sapiens
  misc_RNA (1)...(19): siRNA sense strand
ggugcaggauguaaaguau

SEQ ID NO: 1992403 - RNA, 19 nt, Homo sapiens
  misc_RNA (1)...(19): siRNA sense strand
ugaaaugggccuugguaaa

SEQ ID NO: 1992404 - RNA, 19 nt, Homo sapiens
  misc_RNA (1)...(19): siRNA sense strand
ccagagacaaaucgauaua

SEQ ID NO: 1992405 - RNA, 19 nt, Homo sapiens
  misc_RNA (1)...(19): siRNA sense strand
ugaagaacuuuccucugaa

SEQ ID NO: 1992406 - RNA, 19 nt, Homo sapiens
  misc_RNA (1)...(19): siRNA sense strand
gcaggcaguucuggaaugu

SEQ ID NO: 1992407 - RNA, 19 nt, Homo sapiens
  misc_RNA (1)...(19): siRNA sense strand
gaggaaaccaaccgaguga

SEQ ID NO: 1992408 - RNA, 19 nt, Homo sapiens
  misc_RNA (1)...(19): siRNA sense strand
cuaaauagacgaucacagu

SEQ ID NO: 1992409 - RNA, 19 nt, Homo sapiens
  misc_RNA (1)...(19): siRNA sense strand
acaaaucugcuauugauga

SEQ ID NO: 1992410 - RNA, 19 nt, Homo sapiens
  misc_RNA (1)...(19): siRNA sense strand
ugcaggauguaaaguauuu

SEQ ID NO: 1992411 - RNA, 19 nt, Homo sapiens
  misc_RNA (1)...(19): siRNA sense strand
guggaggagugguaguuaa

SEQ ID NO: 1992412 - RNA, 19 nt, Homo sapiens
  misc_RNA (1)...(19): siRNA sense strand
ggaagaaauaugagaaagu

SEQ ID NO: 1992413 - RNA, 19 nt, Homo sapiens
  misc_RNA (1)...(19): siRNA sense strand
ccaggaguuuacuagauuu

SEQ ID NO: 1992414 - RNA, 19 nt, Homo sapiens
  misc_RNA (1)...(19): siRNA sense strand
gggcagacaaagcagguua

SEQ ID NO: 1992415 - RNA, 19 nt, Homo sapiens
  misc_RNA (1)...(19): siRNA sense strand
caagaguaguuccaguguu

SEQ ID NO: 1992416 - RNA, 19 nt, Homo sapiens
  misc_RNA (1)...(19): siRNA sense strand
gcucaggcgcucaagagua

SEQ ID NO: 1992417 - RNA, 19 nt, Homo sapiens
  misc_RNA (1)...(19): siRNA sense strand
ucagauaccgugaauggaa

SEQ ID NO: 1992418 - RNA, 19 nt, Homo sapiens
  misc_RNA (1)...(19): siRNA sense strand
gaagauggacuggaugaca

SEQ ID NO: 1992419 - RNA, 19 nt, Homo sapiens
  misc_RNA (1)...(19): siRNA sense strand
gagccaaggagaagaguga

SEQ ID NO: 1992420 - RNA, 19 nt, Homo sapiens
  misc_RNA (1)...(19): siRNA sense strand
gggagagccaccagagaua

SEQ ID NO: 1992421 - RNA, 19 nt, Homo sapiens
  misc_RNA (1)...(19): siRNA sense strand
ggacagaucagggucuuca

SEQ ID NO: 1992422 - RNA, 19 nt, Homo sapiens
  misc_RNA (1)...(19): siRNA sense strand
cgacagaagcugcuauauc

SEQ ID NO: 1992423 - RNA, 19 nt, Homo sapiens
  misc_RNA (1)...(19): siRNA sense strand
ggaccgaguuccacaagaa

SEQ ID NO: 1992424 - RNA, 19 nt, Homo sapiens
  misc_RNA (1)...(19): siRNA sense strand
ccagauggcuccaguuuca

SEQ ID NO: 1992425 - RNA, 19 nt, Homo sapiens
  misc_RNA (1)...(19): siRNA sense strand
caaauucccuucuucaagu

SEQ ID NO: 1992426 - RNA, 19 nt, Homo sapiens
  misc_RNA (1)...(19): siRNA sense strand
gaacaugaagcuuggauau

SEQ ID NO: 1992427 - RNA, 19 nt, Homo sapiens
  misc_RNA (1)...(19): siRNA sense strand
gcacagccguggacuaugg

SEQ ID NO: 1992428 - RNA, 19 nt, Homo sapiens
  misc_RNA (1)...(19): siRNA sense strand
gaguuuggguugaacauga

SEQ ID NO: 1992429 - RNA, 19 nt, Homo sapiens
  misc_RNA (1)...(19): siRNA sense strand
gagagaagaauuccaguga

SEQ ID NO: 1992430 - RNA, 19 nt, Homo sapiens
  misc_RNA (1)...(19): siRNA sense strand
acacaaaccuggagucucu

SEQ ID NO: 1992431 - RNA, 19 nt, Homo sapiens
  misc_RNA (1)...(19): siRNA sense strand
uggagucucuguacuauga

SEQ ID NO: 1992432 - RNA, 19 nt, Homo sapiens
  misc_RNA (1)...(19): siRNA sense strand
caucauuuauggacacaaa

SEQ ID NO: 1992433 - RNA, 19 nt, Homo sapiens
  misc_RNA (1)...(19): siRNA sense strand
ugacacaacuggagcaagu

SEQ ID NO: 1992434 - RNA, 19 nt, Homo sapiens
  misc_RNA (1)...(19): siRNA sense strand
gcuuggauauggcaaauuc

SEQ ID NO: 1992435 - RNA, 19 nt, Homo sapiens
  misc_RNA (1)...(19): siRNA sense strand
gugcugagacgaaauuuga

SEQ ID NO: 1992436 - RNA, 19 nt, Homo sapiens
  misc_RNA (1)...(19): siRNA sense strand
gcaaauucccuucuucaag

SEQ ID NO: 1992437 - RNA, 19 nt, Homo sapiens
  misc_RNA (1)...(19): siRNA sense strand
gugaacaagugcucagaug

SEQ ID NO: 1992438 - RNA, 19 nt, Homo sapiens
  misc_RNA (1)...(19): siRNA sense strand
ggacuauggcuacuucaga

SEQ ID NO: 1992439 - RNA, 19 nt, Homo sapiens
  misc_RNA (1)...(19): siRNA sense strand
gccacaggaugaagaagaa

SEQ ID NO: 1992440 - RNA, 19 nt, Homo sapiens
  misc_RNA (1)...(19): siRNA sense strand
cagcagagcgcgagacguu

SEQ ID NO: 1992441 - RNA, 19 nt, Homo sapiens
  misc_RNA (1)...(19): siRNA sense strand
gcagugcugagacgaaauu

SEQ ID NO: 1992442 - RNA, 19 nt, Homo sapiens
  misc_RNA (1)...(19): siRNA sense strand
ccaggaaccuccaaaauuc

SEQ ID NO: 1992443 - RNA, 19 nt, Homo sapiens
  misc_RNA (1)...(19): siRNA sense strand
guacaugggcuugcagcua

SEQ ID NO: 1992444 - RNA, 19 nt, Homo sapiens
  misc_RNA (1)...(19): siRNA sense strand
gggccgacgugaacaagug

SEQ ID NO: 1992445 - RNA, 19 nt, Homo sapiens
  misc_RNA (1)...(19): siRNA sense strand
gacuauggcuacuucagau

SEQ ID NO: 1992446 - RNA, 19 nt, Homo sapiens
  misc_RNA (1)...(19): siRNA sense strand
agacgaaauuugaguccaa

SEQ ID NO: 1992447 - RNA, 19 nt, Homo sapiens
  misc_RNA (1)...(19): siRNA sense strand
gugcagugcugagacgaaa

SEQ ID NO: 1992448 - RNA, 19 nt, Homo sapiens
  misc_RNA (1)...(19): siRNA sense strand
gggcacagccguggacuau

SEQ ID NO: 1992449 - RNA, 19 nt, Homo sapiens
  misc_RNA (1)...(19): siRNA sense strand
acaugaagcuuggauaugg

SEQ ID NO: 1992450 - RNA, 19 nt, Homo sapiens
  misc_RNA (1)...(19): siRNA sense strand
gcaagcuggcccugauuga

SEQ ID NO: 1992451 - RNA, 19 nt, Homo sapiens
  misc_RNA (1)...(19): siRNA sense strand
caagagagcggagcugauc

SEQ ID NO: 1992452 - RNA, 19 nt, Homo sapiens
  misc_RNA (1)...(19): siRNA sense strand
ccugugaccugaccuacga

SEQ ID NO: 1992453 - RNA, 19 nt, Homo sapiens
  misc_RNA (1)...(19): siRNA sense strand
gcaaguacugcaagaccaa

SEQ ID NO: 1992454 - RNA, 19 nt, Homo sapiens
  misc_RNA (1)...(19): siRNA sense strand
agaggaacauggacagcaa

SEQ ID NO: 1992455 - RNA, 19 nt, Homo sapiens
  misc_RNA (1)...(19): siRNA sense strand
ccgacgaggacgacacuua

SEQ ID NO: 1992456 - RNA, 19 nt, Homo sapiens
  misc_RNA (1)...(19): siRNA sense strand
gauauggcaaauucucuug

SEQ ID NO: 1992457 - RNA, 19 nt, Homo sapiens
  misc_RNA (1)...(19): siRNA sense strand
gccauggccuggguaccua

SEQ ID NO: 1992458 - RNA, 19 nt, Homo sapiens
  misc_RNA (1)...(19): siRNA sense strand
gggcaaauucccuucuuca

SEQ ID NO: 1992459 - RNA, 19 nt, Homo sapiens
  misc_RNA (1)...(19): siRNA sense strand
ggauauggcaaauucucuu

SEQ ID NO: 1992460 - RNA, 19 nt, Homo sapiens
  misc_RNA (1)...(19): siRNA sense strand
gaggaccgacaucugcuuu

SEQ ID NO: 1992461 - RNA, 19 nt, Homo sapiens
  misc_RNA (1)...(19): siRNA sense strand
gcacucagcauguguuucc

SEQ ID NO: 1992462 - RNA, 19 nt, Homo sapiens
  misc_RNA (1)...(19): siRNA sense strand
caaguucugcuaccagugu

SEQ ID NO: 1992463 - RNA, 19 nt, Homo sapiens
  misc_RNA (1)...(19): siRNA sense strand
gaagcuuggauauggcaaa

SEQ ID NO: 1992464 - RNA, 19 nt, Homo sapiens
  misc_RNA (1)...(19): siRNA sense strand
ugaacaagugcucagauga

SEQ ID NO: 1992465 - RNA, 19 nt, Homo sapiens
  misc_RNA (1)...(19): siRNA sense strand
ucacggcacucagcaugug

SEQ ID NO: 1992466 - RNA, 19 nt, Homo sapiens
  misc_RNA (1)...(19): siRNA sense strand
ggacacaaaccuggagucu

SEQ ID NO: 1992467 - RNA, 19 nt, Homo sapiens
  misc_RNA (1)...(19): siRNA sense strand
gucauaccaugggcaguuu

SEQ ID NO: 1992468 - RNA, 19 nt, Homo sapiens
  misc_RNA (1)...(19): siRNA sense strand
uugaggacguguugggaaa

SEQ ID NO: 1992469 - RNA, 19 nt, Homo sapiens
  misc_RNA (1)...(19): siRNA sense strand
caagcccaauguugcugaa

SEQ ID NO: 1992470 - RNA, 19 nt, Homo sapiens
  misc_RNA (1)...(19): siRNA sense strand
ccuggagucucuguacuau

SEQ ID NO: 1992471 - RNA, 19 nt, Homo sapiens
  misc_RNA (1)...(19): siRNA sense strand
ccaguuguuccaauccuuu

SEQ ID NO: 1992472 - RNA, 19 nt, Homo sapiens
  misc_RNA (1)...(19): siRNA sense strand
caccagcagcuucgacaaa

SEQ ID NO: 1992473 - RNA, 19 nt, Homo sapiens
  misc_RNA (1)...(19): siRNA sense strand
aaauucccuucuucaaguu

SEQ ID NO: 1992474 - RNA, 19 nt, Homo sapiens
  misc_RNA (1)...(19): siRNA sense strand
gcaagagagcggagcugau

SEQ ID NO: 1992475 - RNA, 19 nt, Homo sapiens
  misc_RNA (1)...(19): siRNA sense strand
cguggacuauggcuacuuc

SEQ ID NO: 1992476 - RNA, 19 nt, Homo sapiens
  misc_RNA (1)...(19): siRNA sense strand
ggcaaauucccuucuucaa

SEQ ID NO: 1992477 - RNA, 19 nt, Homo sapiens
  misc_RNA (1)...(19): siRNA sense strand
ucacugccacaacgacauu

SEQ ID NO: 1992478 - RNA, 19 nt, Homo sapiens
  misc_RNA (1)...(19): siRNA sense strand
ccaggaggagagaagaauu

SEQ ID NO: 1992479 - RNA, 19 nt, Homo sapiens
  misc_RNA (1)...(19): siRNA sense strand
uguguuuccuccuccacua

SEQ ID NO: 1992480 - RNA, 19 nt, Homo sapiens
  misc_RNA (1)...(19): siRNA sense strand
uccaauccuuucaucauca

SEQ ID NO: 1992481 - RNA, 19 nt, Homo sapiens
  misc_RNA (1)...(19): siRNA sense strand
caguuucacgggcacauuu

SEQ ID NO: 1992482 - RNA, 19 nt, Homo sapiens
  misc_RNA (1)...(19): siRNA sense strand
ccuacgagcaccagaggaa

SEQ ID NO: 1992483 - RNA, 19 nt, Homo sapiens
  misc_RNA (1)...(19): siRNA sense strand
ggaccgacaucugcuuucc

SEQ ID NO: 1992484 - RNA, 19 nt, Homo sapiens
  misc_RNA (1)...(19): siRNA sense strand
ugaacaugaagcuuggaua

SEQ ID NO: 1992485 - RNA, 19 nt, Homo sapiens
  misc_RNA (1)...(19): siRNA sense strand
ccaauccuuucaucaucau

SEQ ID NO: 1992486 - RNA, 19 nt, Homo sapiens
  misc_RNA (1)...(19): siRNA sense strand
gaaggcuacggcaccaugu

SEQ ID NO: 1992487 - RNA, 19 nt, Homo sapiens
  misc_RNA (1)...(19): siRNA sense strand
caggaggagagaagaauuc

SEQ ID NO: 1992488 - RNA, 19 nt, Homo sapiens
  misc_RNA (1)...(19): siRNA sense strand
cgacgaggacgacacuuac

SEQ ID NO: 1992489 - RNA, 19 nt, Homo sapiens
  misc_RNA (1)...(19): siRNA sense strand
gcuacggcaggcugucuuu

SEQ ID NO: 1992490 - RNA, 19 nt, Homo sapiens
  misc_RNA (1)...(19): siRNA sense strand
guuccaauccuuucaucau

SEQ ID NO: 1992491 - RNA, 19 nt, Homo sapiens
  misc_RNA (1)...(19): siRNA sense strand
gcaccagcagcuucgacaa

SEQ ID NO: 1992492 - RNA, 19 nt, Homo sapiens
  misc_RNA (1)...(19): siRNA sense strand
uacaugaagacacggcuuu

SEQ ID NO: 1992493 - RNA, 19 nt, Homo sapiens
  misc_RNA (1)...(19): siRNA sense strand
aagcuuggauauggcaaau

SEQ ID NO: 1992494 - RNA, 19 nt, Homo sapiens
  misc_RNA (1)...(19): siRNA sense strand
ggaccgaguuccacaagaa

SEQ ID NO: 1992495 - RNA, 19 nt, Homo sapiens
  misc_RNA (1)...(19): siRNA sense strand
ccagauggcuccaguuuca

SEQ ID NO: 1992496 - RNA, 19 nt, Homo sapiens
  misc_RNA (1)...(19): siRNA sense strand
caaauucccuucuucaagu

SEQ ID NO: 1992497 - RNA, 19 nt, Homo sapiens
  misc_RNA (1)...(19): siRNA sense strand
gaacaugaagcuuggauau

SEQ ID NO: 1992498 - RNA, 19 nt, Homo sapiens
  misc_RNA (1)...(19): siRNA sense strand
gcacagccguggacuaugg

SEQ ID NO: 1992499 - RNA, 19 nt, Homo sapiens
  misc_RNA (1)...(19): siRNA sense strand
gaguuuggguugaacauga

SEQ ID NO: 1992500 - RNA, 19 nt, Homo sapiens
  misc_RNA (1)...(19): siRNA sense strand
gagagaagaauuccaguga

SEQ ID NO: 1992501 - RNA, 19 nt, Homo sapiens
  misc_RNA (1)...(19): siRNA sense strand
acacaaaccuggagucucu

SEQ ID NO: 1992502 - RNA, 19 nt, Homo sapiens
  misc_RNA (1)...(19): siRNA sense strand
uggagucucuguacuauga

SEQ ID NO: 1992503 - RNA, 19 nt, Homo sapiens
  misc_RNA (1)...(19): siRNA sense strand
caucauuuauggacacaaa

SEQ ID NO: 1992504 - RNA, 19 nt, Homo sapiens
  misc_RNA (1)...(19): siRNA sense strand
ugacacaacuggagcaagu

SEQ ID NO: 1992505 - RNA, 19 nt, Homo sapiens
  misc_RNA (1)...(19): siRNA sense strand
gcuuggauauggcaaauuc

SEQ ID NO: 1992506 - RNA, 19 nt, Homo sapiens
  misc_RNA (1)...(19): siRNA sense strand
gugcugagacgaaauuuga

SEQ ID NO: 1992507 - RNA, 19 nt, Homo sapiens
  misc_RNA (1)...(19): siRNA sense strand
gcaaauucccuucuucaag

SEQ ID NO: 1992508 - RNA, 19 nt, Homo sapiens
  misc_RNA (1)...(19): siRNA sense strand
gugaacaagugcucagaug

SEQ ID NO: 1992509 - RNA, 19 nt, Homo sapiens
  misc_RNA (1)...(19): siRNA sense strand
ggacuauggcuacuucaga

SEQ ID NO: 1992510 - RNA, 19 nt, Homo sapiens
  misc_RNA (1)...(19): siRNA sense strand
gccacaggaugaagaagaa

SEQ ID NO: 1992511 - RNA, 19 nt, Homo sapiens
  misc_RNA (1)...(19): siRNA sense strand
cagcagagcgcgagacguu

SEQ ID NO: 1992512 - RNA, 19 nt, Homo sapiens
  misc_RNA (1)...(19): siRNA sense strand
gcagugcugagacgaaauu

SEQ ID NO: 1992513 - RNA, 19 nt, Homo sapiens
  misc_RNA (1)...(19): siRNA sense strand
gcaggaugguugcauguac

SEQ ID NO: 1992514 - RNA, 19 nt, Homo sapiens
  misc_RNA (1)...(19): siRNA sense strand
ccaggaaccuccaaaauuc

SEQ ID NO: 1992515 - RNA, 19 nt, Homo sapiens
  misc_RNA (1)...(19): siRNA sense strand
guacaugggcuugcagcua

SEQ ID NO: 1992516 - RNA, 19 nt, Homo sapiens
  misc_RNA (1)...(19): siRNA sense strand
gggccgacgugaacaagug

SEQ ID NO: 1992517 - RNA, 19 nt, Homo sapiens
  misc_RNA (1)...(19): siRNA sense strand
gacuauggcuacuucagau

SEQ ID NO: 1992518 - RNA, 19 nt, Homo sapiens
  misc_RNA (1)...(19): siRNA sense strand
agacgaaauuugaguccaa

SEQ ID NO: 1992519 - RNA, 19 nt, Homo sapiens
  misc_RNA (1)...(19): siRNA sense strand
gugcagugcugagacgaaa

SEQ ID NO: 1992520 - RNA, 19 nt, Homo sapiens
  misc_RNA (1)...(19): siRNA sense strand
gggcacagccguggacuau

SEQ ID NO: 1992521 - RNA, 19 nt, Homo sapiens
  misc_RNA (1)...(19): siRNA sense strand
acaugaagcuuggauaugg

SEQ ID NO: 1992522 - RNA, 19 nt, Homo sapiens
  misc_RNA (1)...(19): siRNA sense strand
gcaagcuggcccugauuga

SEQ ID NO: 1992523 - RNA, 19 nt, Homo sapiens
  misc_RNA (1)...(19): siRNA sense strand
caagagagcggagcugauc

SEQ ID NO: 1992524 - RNA, 19 nt, Homo sapiens
  misc_RNA (1)...(19): siRNA sense strand
ccugugaccugaccuacga

SEQ ID NO: 1992525 - RNA, 19 nt, Homo sapiens
  misc_RNA (1)...(19): siRNA sense strand
gcaaguacugcaagaccaa

SEQ ID NO: 1992526 - RNA, 19 nt, Homo sapiens
  misc_RNA (1)...(19): siRNA sense strand
agaggaacauggacagcaa

SEQ ID NO: 1992527 - RNA, 19 nt, Homo sapiens
  misc_RNA (1)...(19): siRNA sense strand
ccgacgaggacgacacuua

SEQ ID NO: 1992528 - RNA, 19 nt, Homo sapiens
  misc_RNA (1)...(19): siRNA sense strand
gauauggcaaauucucuug

SEQ ID NO: 1992529 - RNA, 19 nt, Homo sapiens
  misc_RNA (1)...(19): siRNA sense strand
ggauauggcaaauucucuu

SEQ ID NO: 1992530 - RNA, 19 nt, Homo sapiens
  misc_RNA (1)...(19): siRNA sense strand
gggcaaauucccuucuuca

SEQ ID NO: 1992531 - RNA, 19 nt, Homo sapiens
  misc_RNA (1)...(19): siRNA sense strand
gaggaccgacaucugcuuu

SEQ ID NO: 1992532 - RNA, 19 nt, Homo sapiens
  misc_RNA (1)...(19): siRNA sense strand
gccauggccuggguaccua

SEQ ID NO: 1992533 - RNA, 19 nt, Homo sapiens
  misc_RNA (1)...(19): siRNA sense strand
gcacucagcauguguuucc

SEQ ID NO: 1992534 - RNA, 19 nt, Homo sapiens
  misc_RNA (1)...(19): siRNA sense strand
caaguucugcuaccagugu

SEQ ID NO: 1992535 - RNA, 19 nt, Homo sapiens
  misc_RNA (1)...(19): siRNA sense strand
gaagcuuggauauggcaaa

SEQ ID NO: 1992536 - RNA, 19 nt, Homo sapiens
  misc_RNA (1)...(19): siRNA sense strand
ugaacaagugcucagauga

SEQ ID NO: 1992537 - RNA, 19 nt, Homo sapiens
  misc_RNA (1)...(19): siRNA sense strand
ucacggcacucagcaugug

SEQ ID NO: 1992538 - RNA, 19 nt, Homo sapiens
  misc_RNA (1)...(19): siRNA sense strand
gucauaccaugggcaguuu

SEQ ID NO: 1992539 - RNA, 19 nt, Homo sapiens
  misc_RNA (1)...(19): siRNA sense strand
uugaggacguguugggaaa

SEQ ID NO: 1992540 - RNA, 19 nt, Homo sapiens
  misc_RNA (1)...(19): siRNA sense strand
ggacacaaaccuggagucu

SEQ ID NO: 1992541 - RNA, 19 nt, Homo sapiens
  misc_RNA (1)...(19): siRNA sense strand
caagcccaauguugcugaa

SEQ ID NO: 1992542 - RNA, 19 nt, Homo sapiens
  misc_RNA (1)...(19): siRNA sense strand
ccuggagucucuguacuau

SEQ ID NO: 1992543 - RNA, 19 nt, Homo sapiens
  misc_RNA (1)...(19): siRNA sense strand
ccaguuguuccaauccuuu

SEQ ID NO: 1992544 - RNA, 19 nt, Homo sapiens
  misc_RNA (1)...(19): siRNA sense strand
caccagcagcuucgacaaa

SEQ ID NO: 1992545 - RNA, 19 nt, Homo sapiens
  misc_RNA (1)...(19): siRNA sense strand
aaauucccuucuucaaguu

SEQ ID NO: 1992546 - RNA, 19 nt, Homo sapiens
  misc_RNA (1)...(19): siRNA sense strand
gcaagagagcggagcugau

SEQ ID NO: 1992547 - RNA, 19 nt, Homo sapiens
  misc_RNA (1)...(19): siRNA sense strand
cguggacuauggcuacuuc

SEQ ID NO: 1992548 - RNA, 19 nt, Homo sapiens
  misc_RNA (1)...(19): siRNA sense strand
gaaggaagaggaggaagcu

SEQ ID NO: 1992549 - RNA, 19 nt, Homo sapiens
  misc_RNA (1)...(19): siRNA sense strand
ggcaaauucccuucuucaa

SEQ ID NO: 1992550 - RNA, 19 nt, Homo sapiens
  misc_RNA (1)...(19): siRNA sense strand
ucacugccacaacgacauu

SEQ ID NO: 1992551 - RNA, 19 nt, Homo sapiens
  misc_RNA (1)...(19): siRNA sense strand
ccaggaggagagaagaauu

SEQ ID NO: 1992552 - RNA, 19 nt, Homo sapiens
  misc_RNA (1)...(19): siRNA sense strand
uguguuuccuccuccacua

SEQ ID NO: 1992553 - RNA, 19 nt, Homo sapiens
  misc_RNA (1)...(19): siRNA sense strand
caguuucacgggcacauuu

SEQ ID NO: 1992554 - RNA, 19 nt, Homo sapiens
  misc_RNA (1)...(19): siRNA sense strand
ugaacaugaagcuuggaua

SEQ ID NO: 1992555 - RNA, 19 nt, Homo sapiens
  misc_RNA (1)...(19): siRNA sense strand
ccuacgagcaccagaggaa

SEQ ID NO: 1992556 - RNA, 19 nt, Homo sapiens
  misc_RNA (1)...(19): siRNA sense strand
ggaccgacaucugcuuucc

SEQ ID NO: 1992557 - RNA, 19 nt, Homo sapiens
  misc_RNA (1)...(19): siRNA sense strand
ccaauccuuucaucaucau

SEQ ID NO: 1992558 - RNA, 19 nt, Homo sapiens
  misc_RNA (1)...(19): siRNA sense strand
uccaauccuuucaucauca

SEQ ID NO: 1992559 - RNA, 19 nt, Homo sapiens
  misc_RNA (1)...(19): siRNA sense strand
gaaggcuacggcaccaugu

SEQ ID NO: 1992560 - RNA, 19 nt, Homo sapiens
  misc_RNA (1)...(19): siRNA sense strand
caggaggagagaagaauuc

SEQ ID NO: 1992561 - RNA, 19 nt, Homo sapiens
  misc_RNA (1)...(19): siRNA sense strand
cgacgaggacgacacuuac

SEQ ID NO: 1992562 - RNA, 19 nt, Homo sapiens
  misc_RNA (1)...(19): siRNA sense strand
gcuacggcaggcugucuuu

SEQ ID NO: 1992563 - RNA, 19 nt, Homo sapiens
  misc_RNA (1)...(19): siRNA sense strand
guuccaauccuuucaucau

SEQ ID NO: 1992564 - RNA, 19 nt, Homo sapiens
  misc_RNA (1)...(19): siRNA sense strand
gcaccagcagcuucgacaa

SEQ ID NO: 1992565 - RNA, 19 nt, Homo sapiens
  misc_RNA (1)...(19): siRNA sense strand
uacaugaagacacggcuuu

SEQ ID NO: 1992566 - RNA, 19 nt, Homo sapiens
  misc_RNA (1)...(19): siRNA sense strand
aagcuuggauauggcaaau

SEQ ID NO: 1992567 - RNA, 19 nt, Homo sapiens
  misc_RNA (1)...(19): siRNA sense strand
gauaacaucuugcgaauuu

SEQ ID NO: 1992568 - RNA, 19 nt, Homo sapiens
  misc_RNA (1)...(19): siRNA sense strand
gugauaccaucuaugauua

SEQ ID NO: 1992569 - RNA, 19 nt, Homo sapiens
  misc_RNA (1)...(19): siRNA sense strand
gguggaauaugcagaaaug

SEQ ID NO: 1992570 - RNA, 19 nt, Homo sapiens
  misc_RNA (1)...(19): siRNA sense strand
ggaaggugauaccaucuau

SEQ ID NO: 1992571 - RNA, 19 nt, Homo sapiens
  misc_RNA (1)...(19): siRNA sense strand
cagaaggacugcaccaaug

SEQ ID NO: 1992572 - RNA, 19 nt, Homo sapiens
  misc_RNA (1)...(19): siRNA sense strand
caauagugcugauaacauc

SEQ ID NO: 1992573 - RNA, 19 nt, Homo sapiens
  misc_RNA (1)...(19): siRNA sense strand
gaagcaaacgggagccuuu

SEQ ID NO: 1992574 - RNA, 19 nt, Homo sapiens
  misc_RNA (1)...(19): siRNA sense strand
ggugauaccaucuaugauu

SEQ ID NO: 1992575 - RNA, 19 nt, Homo sapiens
  misc_RNA (1)...(19): siRNA sense strand
gggagaacccgauucauau

SEQ ID NO: 1992576 - RNA, 19 nt, Homo sapiens
  misc_RNA (1)...(19): siRNA sense strand
gaaaagccauggaagauac

SEQ ID NO: 1992577 - RNA, 19 nt, Homo sapiens
  misc_RNA (1)...(19): siRNA sense strand
gcacccaaccugagaacuu

SEQ ID NO: 1992578 - RNA, 19 nt, Homo sapiens
  misc_RNA (1)...(19): siRNA sense strand
ggcaucaucuccugcauag

SEQ ID NO: 1992579 - RNA, 19 nt, Homo sapiens
  misc_RNA (1)...(19): siRNA sense strand
ccaaucagcgcaucuacuu

SEQ ID NO: 1992580 - RNA, 19 nt, Homo sapiens
  misc_RNA (1)...(19): siRNA sense strand
gggagcagguggaauaugc

SEQ ID NO: 1992581 - RNA, 19 nt, Homo sapiens
  misc_RNA (1)...(19): siRNA sense strand
uaugauuacugcugguauu

SEQ ID NO: 1992582 - RNA, 19 nt, Homo sapiens
  misc_RNA (1)...(19): siRNA sense strand
gcagguggaauaugcagaa

SEQ ID NO: 1992583 - RNA, 19 nt, Homo sapiens
  misc_RNA (1)...(19): siRNA sense strand
uuuggagacucaaccguua

SEQ ID NO: 1992584 - RNA, 19 nt, Homo sapiens
  misc_RNA (1)...(19): siRNA sense strand
ugaccaauagugcugauaa

SEQ ID NO: 1992585 - RNA, 19 nt, Homo sapiens
  misc_RNA (1)...(19): siRNA sense strand
caaacgggagccuuucuga

SEQ ID NO: 1992586 - RNA, 19 nt, Homo sapiens
  misc_RNA (1)...(19): siRNA sense strand
gacgguuccugcaucuuga

SEQ ID NO: 1992587 - RNA, 19 nt, Homo sapiens
  misc_RNA (1)...(19): siRNA sense strand
ggaaaagccauggaagaua

SEQ ID NO: 1992588 - RNA, 19 nt, Homo sapiens
  misc_RNA (1)...(19): siRNA sense strand
caaccggacugugcguguu

SEQ ID NO: 1992589 - RNA, 19 nt, Homo sapiens
  misc_RNA (1)...(19): siRNA sense strand
ccccagagcuguaccauga

SEQ ID NO: 1992590 - RNA, 19 nt, Homo sapiens
  misc_RNA (1)...(19): siRNA sense strand
ggagaacccgauucauauc

SEQ ID NO: 1992591 - RNA, 19 nt, Homo sapiens
  misc_RNA (1)...(19): siRNA sense strand
ccacguccaccuugaaugu

SEQ ID NO: 1992592 - RNA, 19 nt, Homo sapiens
  misc_RNA (1)...(19): siRNA sense strand
gaagcgaacgggccagagu

SEQ ID NO: 1992593 - RNA, 19 nt, Homo sapiens
  misc_RNA (1)...(19): siRNA sense strand
aaggugauaccaucuauga

SEQ ID NO: 1992594 - RNA, 19 nt, Homo sapiens
  misc_RNA (1)...(19): siRNA sense strand
ucucccagcugccucgauu

SEQ ID NO: 1992595 - RNA, 19 nt, Homo sapiens
  misc_RNA (1)...(19): siRNA sense strand
cggagcccguguugaguuu

SEQ ID NO: 1992596 - RNA, 19 nt, Homo sapiens
  misc_RNA (1)...(19): siRNA sense strand
ugaguugaguccucgaauc

SEQ ID NO: 1992597 - RNA, 19 nt, Homo sapiens
  misc_RNA (1)...(19): siRNA sense strand
uccugcaucuugaccaaua

SEQ ID NO: 1992598 - RNA, 19 nt, Homo sapiens
  misc_RNA (1)...(19): siRNA sense strand
agacaccgcuuggaacuac

SEQ ID NO: 1992599 - RNA, 19 nt, Homo sapiens
  misc_RNA (1)...(19): siRNA sense strand
ugacgguuccugcaucuug

SEQ ID NO: 1992600 - RNA, 19 nt, Homo sapiens
  misc_RNA (1)...(19): siRNA sense strand
ccagaaggacugcaccaau

SEQ ID NO: 1992601 - RNA, 19 nt, Homo sapiens
  misc_RNA (1)...(19): siRNA sense strand
ggccagagcggcaucaucu

SEQ ID NO: 1992602 - RNA, 19 nt, Homo sapiens
  misc_RNA (1)...(19): siRNA sense strand
gcucuucuguggcuucaac

SEQ ID NO: 1992603 - RNA, 19 nt, Homo sapiens
  misc_RNA (1)...(19): siRNA sense strand
cugauaacaucuugcgaau

SEQ ID NO: 1992604 - RNA, 19 nt, Homo sapiens
  misc_RNA (1)...(19): siRNA sense strand
gaccaauagugcugauaac

SEQ ID NO: 1992605 - RNA, 19 nt, Homo sapiens
  misc_RNA (1)...(19): siRNA sense strand
ccaauagugcugauaacau

SEQ ID NO: 1992606 - RNA, 19 nt, Homo sapiens
  misc_RNA (1)...(19): siRNA sense strand
gauuacugcugguauucuc

SEQ ID NO: 1992607 - RNA, 19 nt, Homo sapiens
  misc_RNA (1)...(19): siRNA sense strand
ucacccaccucugcuuuca

SEQ ID NO: 1992608 - RNA, 19 nt, Homo sapiens
  misc_RNA (1)...(19): siRNA sense strand
gcaaacgggagccuuucug

SEQ ID NO: 1992609 - RNA, 19 nt, Homo sapiens
  misc_RNA (1)...(19): siRNA sense strand
gagaaagggcagggaggaa

SEQ ID NO: 1992610 - RNA, 19 nt, Homo sapiens
  misc_RNA (1)...(19): siRNA sense strand
gaaggugauaccaucuaug

SEQ ID NO: 1992611 - RNA, 19 nt, Homo sapiens
  misc_RNA (1)...(19): siRNA sense strand
cacccaaccugagaacuuc

SEQ ID NO: 1992612 - RNA, 19 nt, Homo sapiens
  misc_RNA (1)...(19): siRNA sense strand
ggagacaccgcuuggaacu

SEQ ID NO: 1992613 - RNA, 19 nt, Homo sapiens
  misc_RNA (1)...(19): siRNA sense strand
uacaagccuuccugcagaa

SEQ ID NO: 1992614 - RNA, 19 nt, Homo sapiens
  misc_RNA (1)...(19): siRNA sense strand
caucacccaccucugcuuu

SEQ ID NO: 1992615 - RNA, 19 nt, Homo sapiens
  misc_RNA (1)...(19): siRNA sense strand
gagaacccgauucauaucu

SEQ ID NO: 1992616 - RNA, 19 nt, Homo sapiens
  misc_RNA (1)...(19): siRNA sense strand
gcuuggaacuacagcuucu

SEQ ID NO: 1992617 - RNA, 19 nt, Homo sapiens
  misc_RNA (1)...(19): siRNA sense strand
cgagguccgagccacauuu

SEQ ID NO: 1992618 - RNA, 19 nt, Homo sapiens
  misc_RNA (1)...(19): siRNA sense strand
cugcugguauucucugaug

SEQ ID NO: 1992619 - RNA, 19 nt, Homo sapiens
  misc_RNA (1)...(19): siRNA sense strand
gauaccaucuaugauuacu

SEQ ID NO: 1992620 - RNA, 19 nt, Homo sapiens
  misc_RNA (1)...(19): siRNA sense strand
aaacgggagccuuucugaa

SEQ ID NO: 1992621 - RNA, 19 nt, Homo sapiens
  misc_RNA (1)...(19): siRNA sense strand
cggcaucaucuccugcaua

SEQ ID NO: 1992622 - RNA, 19 nt, Homo sapiens
  misc_RNA (1)...(19): siRNA sense strand
ccuacaaccaccuggauga

SEQ ID NO: 1992623 - RNA, 19 nt, Homo sapiens
  misc_RNA (1)...(19): siRNA sense strand
guuccugcaucuugaccaa

SEQ ID NO: 1992624 - RNA, 19 nt, Homo sapiens
  misc_RNA (1)...(19): siRNA sense strand
acgggagccuuucugaaga

SEQ ID NO: 1992625 - RNA, 19 nt, Homo sapiens
  misc_RNA (1)...(19): siRNA sense strand
gagacaccgcuuggaacua

SEQ ID NO: 1992626 - RNA, 19 nt, Homo sapiens
  misc_RNA (1)...(19): siRNA sense strand
gcgcaucuacuucgaucug

SEQ ID NO: 1992627 - RNA, 19 nt, Homo sapiens
  misc_RNA (1)...(19): siRNA sense strand
ccaccaaucagcgcaucua

SEQ ID NO: 1992628 - RNA, 19 nt, Homo sapiens
  misc_RNA (1)...(19): siRNA sense strand
gaucuccggcagucugguu

SEQ ID NO: 1992629 - RNA, 19 nt, Homo sapiens
  misc_RNA (1)...(19): siRNA sense strand
gagguccgagccacauuug

SEQ ID NO: 1992630 - RNA, 19 nt, Homo sapiens
  misc_RNA (1)...(19): siRNA sense strand
agaaauggucccuguccuu

SEQ ID NO: 1992631 - RNA, 19 nt, Homo sapiens
  misc_RNA (1)...(19): siRNA sense strand
cagguggaauaugcagaaa

SEQ ID NO: 1992632 - RNA, 19 nt, Homo sapiens
  misc_RNA (1)...(19): siRNA sense strand
gaaucgaggagcaagaacu

SEQ ID NO: 1992633 - RNA, 19 nt, Homo sapiens
  misc_RNA (1)...(19): siRNA sense strand
gauggcaaccgcuucuucu

SEQ ID NO: 1992634 - RNA, 19 nt, Homo sapiens
  misc_RNA (1)...(19): siRNA sense strand
gguccgagccacauuugca

SEQ ID NO: 1992635 - RNA, 19 nt, Homo sapiens
  misc_RNA (1)...(19): siRNA sense strand
ccagcugccucgauuucuc

SEQ ID NO: 1992636 - RNA, 19 nt, Homo sapiens
  misc_RNA (1)...(19): siRNA sense strand
ccacuccccuggaaacaga

SEQ ID NO: 1992637 - RNA, 19 nt, Homo sapiens
  misc_RNA (1)...(19): siRNA sense strand
ggauggcucccagcucuuc

SEQ ID NO: 1992638 - RNA, 19 nt, Homo sapiens
  misc_RNA (1)...(19): siRNA sense strand
cgaaugguggaaggugaua

SEQ ID NO: 1992639 - RNA, 19 nt, Homo sapiens
  misc_RNA (1)...(19): siRNA sense strand
agaacccgauucauaucug

SEQ ID NO: 1992640 - RNA, 19 nt, Homo sapiens
  misc_RNA (1)...(19): siRNA sense strand
ugcggacucugaacugaug

SEQ ID NO: 1992641 - RNA, 19 nt, Homo sapiens
  misc_RNA (1)...(19): siRNA sense strand
aaugcggacucugaacuga

SEQ ID NO: 1992642 - RNA, 19 nt, Homo sapiens
  misc_RNA (1)...(19): siRNA sense strand
aauggucccuguccuucga

SEQ ID NO: 1992643 - RNA, 19 nt, Homo sapiens
  misc_RNA (1)...(19): siRNA sense strand
caucaucaaugcuauguua

SEQ ID NO: 1992644 - RNA, 19 nt, Homo sapiens
  misc_RNA (1)...(19): siRNA sense strand
gagaguuccuggucaaaua

SEQ ID NO: 1992645 - RNA, 19 nt, Homo sapiens
  misc_RNA (1)...(19): siRNA sense strand
gaagguugcuuuuaacuuu

SEQ ID NO: 1992646 - RNA, 19 nt, Homo sapiens
  misc_RNA (1)...(19): siRNA sense strand
caauggaccuugagagaga

SEQ ID NO: 1992647 - RNA, 19 nt, Homo sapiens
  misc_RNA (1)...(19): siRNA sense strand
ggagagaguuccuggucaa

SEQ ID NO: 1992648 - RNA, 19 nt, Homo sapiens
  misc_RNA (1)...(19): siRNA sense strand
guaaauggaagguugcuuu

SEQ ID NO: 1992649 - RNA, 19 nt, Homo sapiens
  misc_RNA (1)...(19): siRNA sense strand
gcuacgacauccugguuaa

SEQ ID NO: 1992650 - RNA, 19 nt, Homo sapiens
  misc_RNA (1)...(19): siRNA sense strand
gcagaauaaugacauaguc

SEQ ID NO: 1992651 - RNA, 19 nt, Homo sapiens
  misc_RNA (1)...(19): siRNA sense strand
caagacgcccuauaccaua

SEQ ID NO: 1992652 - RNA, 19 nt, Homo sapiens
  misc_RNA (1)...(19): siRNA sense strand
ucaccaagcuucuggaucu

SEQ ID NO: 1992653 - RNA, 19 nt, Homo sapiens
  misc_RNA (1)...(19): siRNA sense strand
gcuagaacgugucaaagca

SEQ ID NO: 1992654 - RNA, 19 nt, Homo sapiens
  misc_RNA (1)...(19): siRNA sense strand
ccaagcuucuggaucuuaa

SEQ ID NO: 1992655 - RNA, 19 nt, Homo sapiens
  misc_RNA (1)...(19): siRNA sense strand
uggagaaucuggucgagaa

SEQ ID NO: 1992656 - RNA, 19 nt, Homo sapiens
  misc_RNA (1)...(19): siRNA sense strand
cagaggauguggagccauu

SEQ ID NO: 1992657 - RNA, 19 nt, Homo sapiens
  misc_RNA (1)...(19): siRNA sense strand
ccucagggaugccauugaa

SEQ ID NO: 1992658 - RNA, 19 nt, Homo sapiens
  misc_RNA (1)...(19): siRNA sense strand
ucucaguucuggaauuauu

SEQ ID NO: 1992659 - RNA, 19 nt, Homo sapiens
  misc_RNA (1)...(19): siRNA sense strand
gccauuagacugagauuug

SEQ ID NO: 1992660 - RNA, 19 nt, Homo sapiens
  misc_RNA (1)...(19): siRNA sense strand
ggagcuagaacgugucaaa

SEQ ID NO: 1992661 - RNA, 19 nt, Homo sapiens
  misc_RNA (1)...(19): siRNA sense strand
gggaggacaucgucaccaa

SEQ ID NO: 1992662 - RNA, 19 nt, Homo sapiens
  misc_RNA (1)...(19): siRNA sense strand
uuaaggagccuacguggaa

SEQ ID NO: 1992663 - RNA, 19 nt, Homo sapiens
  misc_RNA (1)...(19): siRNA sense strand
ccaaauggacggcggaaga

SEQ ID NO: 1992664 - RNA, 19 nt, Homo sapiens
  misc_RNA (1)...(19): siRNA sense strand
ccauuagacugagauuuga

SEQ ID NO: 1992665 - RNA, 19 nt, Homo sapiens
  misc_RNA (1)...(19): siRNA sense strand
ggucaaauacuccuuccuu

SEQ ID NO: 1992666 - RNA, 19 nt, Homo sapiens
  misc_RNA (1)...(19): siRNA sense strand
guuauuuccugaugccauu

SEQ ID NO: 1992667 - RNA, 19 nt, Homo sapiens
  misc_RNA (1)...(19): siRNA sense strand
acucucaguucuggaauua

SEQ ID NO: 1992668 - RNA, 19 nt, Homo sapiens
  misc_RNA (1)...(19): siRNA sense strand
caucugcccucugcaagaa

SEQ ID NO: 1992669 - RNA, 19 nt, Homo sapiens
  misc_RNA (1)...(19): siRNA sense strand
ucagcagaauaaugacaua

SEQ ID NO: 1992670 - RNA, 19 nt, Homo sapiens
  misc_RNA (1)...(19): siRNA sense strand
agacugagauuugaagaca

SEQ ID NO: 1992671 - RNA, 19 nt, Homo sapiens
  misc_RNA (1)...(19): siRNA sense strand
acaaggcuguggccaaaug

SEQ ID NO: 1992672 - RNA, 19 nt, Homo sapiens
  misc_RNA (1)...(19): siRNA sense strand
gaaaacagaauguccagaa

SEQ ID NO: 1992673 - RNA, 19 nt, Homo sapiens
  misc_RNA (1)...(19): siRNA sense strand
gacauaguccaaagucuug

SEQ ID NO: 1992674 - RNA, 19 nt, Homo sapiens
  misc_RNA (1)...(19): siRNA sense strand
ugaacacaauggaccuuga

SEQ ID NO: 1992675 - RNA, 19 nt, Homo sapiens
  misc_RNA (1)...(19): siRNA sense strand
ugagucugcucuaccugua

SEQ ID NO: 1992676 - RNA, 19 nt, Homo sapiens
  misc_RNA (1)...(19): siRNA sense strand
uagaacgugucaaagcauu

SEQ ID NO: 1992677 - RNA, 19 nt, Homo sapiens
  misc_RNA (1)...(19): siRNA sense strand
ucagaaauaugggaaugau

SEQ ID NO: 1992678 - RNA, 19 nt, Homo sapiens
  misc_RNA (1)...(19): siRNA sense strand
agaaauaugggaaugauca

SEQ ID NO: 1992679 - RNA, 19 nt, Homo sapiens
  misc_RNA (1)...(19): siRNA sense strand
ccucaucccucaguuuguu

SEQ ID NO: 1992680 - RNA, 19 nt, Homo sapiens
  misc_RNA (1)...(19): siRNA sense strand
uaacacaggccgagcgaau

SEQ ID NO: 1992681 - RNA, 19 nt, Homo sapiens
  misc_RNA (1)...(19): siRNA sense strand
acugagauuugaagacauu

SEQ ID NO: 1992682 - RNA, 19 nt, Homo sapiens
  misc_RNA (1)...(19): siRNA sense strand
acugggcccuguacuuuaa

SEQ ID NO: 1992683 - RNA, 19 nt, Homo sapiens
  misc_RNA (1)...(19): siRNA sense strand
gaauaaugacauaguccaa

SEQ ID NO: 1992684 - RNA, 19 nt, Homo sapiens
  misc_RNA (1)...(19): siRNA sense strand
ggacaucgucaccaagcuu

SEQ ID NO: 1992685 - RNA, 19 nt, Homo sapiens
  misc_RNA (1)...(19): siRNA sense strand
gggaauauaaggcugugaa

SEQ ID NO: 1992686 - RNA, 19 nt, Homo sapiens
  misc_RNA (1)...(19): siRNA sense strand
ugacauaguccaaagucuu

SEQ ID NO: 1992687 - RNA, 19 nt, Homo sapiens
  misc_RNA (1)...(19): siRNA sense strand
aaacagaauguccagaaug

SEQ ID NO: 1992688 - RNA, 19 nt, Homo sapiens
  misc_RNA (1)...(19): siRNA sense strand
ggacaucacgguuucucau

SEQ ID NO: 1992689 - RNA, 19 nt, Homo sapiens
  misc_RNA (1)...(19): siRNA sense strand
caaauggacggcggaagaa

SEQ ID NO: 1992690 - RNA, 19 nt, Homo sapiens
  misc_RNA (1)...(19): siRNA sense strand
uuacugggcccuguacuuu

SEQ ID NO: 1992691 - RNA, 19 nt, Homo sapiens
  misc_RNA (1)...(19): siRNA sense strand
ucacugccuugcuuuaugg

SEQ ID NO: 1992692 - RNA, 19 nt, Homo sapiens
  misc_RNA (1)...(19): siRNA sense strand
caaauacuccuuccuucca

SEQ ID NO: 1992693 - RNA, 19 nt, Homo sapiens
  misc_RNA (1)...(19): siRNA sense strand
gaacgugucaaagcauuag

SEQ ID NO: 1992694 - RNA, 19 nt, Homo sapiens
  misc_RNA (1)...(19): siRNA sense strand
ccaagacgcccuauaccau

SEQ ID NO: 1992695 - RNA, 19 nt, Homo sapiens
  misc_RNA (1)...(19): siRNA sense strand
aauggaagguugcuuuuaa

SEQ ID NO: 1992696 - RNA, 19 nt, Homo sapiens
  misc_RNA (1)...(19): siRNA sense strand
cacaauggaccuugagaga

SEQ ID NO: 1992697 - RNA, 19 nt, Homo sapiens
  misc_RNA (1)...(19): siRNA sense strand
ggaugccauugaaaaguua

SEQ ID NO: 1992698 - RNA, 19 nt, Homo sapiens
  misc_RNA (1)...(19): siRNA sense strand
gaacacaauggaccuugag

SEQ ID NO: 1992699 - RNA, 19 nt, Homo sapiens
  misc_RNA (1)...(19): siRNA sense strand
gagcagcagggaaucugaa

SEQ ID NO: 1992700 - RNA, 19 nt, Homo sapiens
  misc_RNA (1)...(19): siRNA sense strand
ggaaacccagguguuguga

SEQ ID NO: 1992701 - RNA, 19 nt, Homo sapiens
  misc_RNA (1)...(19): siRNA sense strand
gggaugccauugaaaaguu

SEQ ID NO: 1992702 - RNA, 19 nt, Homo sapiens
  misc_RNA (1)...(19): siRNA sense strand
gucacugccuugcuuuaug

SEQ ID NO: 1992703 - RNA, 19 nt, Homo sapiens
  misc_RNA (1)...(19): siRNA sense strand
gucgagaagugaacugaag

SEQ ID NO: 1992704 - RNA, 19 nt, Homo sapiens
  misc_RNA (1)...(19): siRNA sense strand
uaacuuugacagaggaaga

SEQ ID NO: 1992705 - RNA, 19 nt, Homo sapiens
  misc_RNA (1)...(19): siRNA sense strand
uguccagaaugcagagaaa

SEQ ID NO: 1992706 - RNA, 19 nt, Homo sapiens
  misc_RNA (1)...(19): siRNA sense strand
uuacuggacaucacgguuu

SEQ ID NO: 1992707 - RNA, 19 nt, Homo sapiens
  misc_RNA (1)...(19): siRNA sense strand
aauacuccuuccuuccaua

SEQ ID NO: 1992708 - RNA, 19 nt, Homo sapiens
  misc_RNA (1)...(19): siRNA sense strand
auaaugacauaguccaaag

SEQ ID NO: 1992709 - RNA, 19 nt, Homo sapiens
  misc_RNA (1)...(19): siRNA sense strand
cagauuccuuuagcuccua

SEQ ID NO: 1992710 - RNA, 19 nt, Homo sapiens
  misc_RNA (1)...(19): siRNA sense strand
agaaucuggucgagaagug

SEQ ID NO: 1992711 - RNA, 19 nt, Homo sapiens
  misc_RNA (1)...(19): siRNA sense strand
caucaaugcuauguuacuc

SEQ ID NO: 1992712 - RNA, 19 nt, Homo sapiens
  misc_RNA (1)...(19): siRNA sense strand
gcucuaccuguaccuguuu

SEQ ID NO: 1992713 - RNA, 19 nt, Homo sapiens
  misc_RNA (1)...(19): siRNA sense strand
uuugacagaggaagaauuu

SEQ ID NO: 1992714 - RNA, 19 nt, Homo sapiens
  misc_RNA (1)...(19): siRNA sense strand
ccugaugccauuagacuga

SEQ ID NO: 1992715 - RNA, 19 nt, Homo sapiens
  misc_RNA (1)...(19): siRNA sense strand
caucacgguuucucaucau

SEQ ID NO: 1992716 - RNA, 19 nt, Homo sapiens
  misc_RNA (1)...(19): siRNA sense strand
auaugggaaugaucagauu

SEQ ID NO: 1992717 - RNA, 19 nt, Homo sapiens
  misc_RNA (1)...(19): siRNA sense strand
ggagcagcagggaaucuga

SEQ ID NO: 1992718 - RNA, 19 nt, Homo sapiens
  misc_RNA (1)...(19): siRNA sense strand
cagaaaagcuaugugaaca

SEQ ID NO: 1992719 - RNA, 19 nt, Homo sapiens
  misc_RNA (1)...(19): siRNA sense strand
ggucccuguuccugcuaua

SEQ ID NO: 1992720 - RNA, 19 nt, Homo sapiens
  misc_RNA (1)...(19): siRNA sense strand
gcaucucuuuacagggaaa

SEQ ID NO: 1992721 - RNA, 19 nt, Homo sapiens
  misc_RNA (1)...(19): siRNA sense strand
ggaagcaguggagagaguu

SEQ ID NO: 1992722 - RNA, 19 nt, Homo sapiens
  misc_RNA (1)...(19): siRNA sense strand
ggacggcggaagaaguugu

SEQ ID NO: 1992723 - RNA, 19 nt, Homo sapiens
  misc_RNA (1)...(19): siRNA sense strand
gaaucuggucgagaaguga

SEQ ID NO: 1992724 - RNA, 19 nt, Homo sapiens
  misc_RNA (1)...(19): siRNA sense strand
acaucacgguuucucauca

SEQ ID NO: 1992725 - RNA, 19 nt, Homo sapiens
  misc_RNA (1)...(19): siRNA sense strand
gagagaguuccuggucaaa

SEQ ID NO: 1992726 - RNA, 19 nt, Homo sapiens
  misc_RNA (1)...(19): siRNA sense strand
uggaagcaguggagagagu

SEQ ID NO: 1992727 - RNA, 19 nt, Homo sapiens
  misc_RNA (1)...(19): siRNA sense strand
uaucugaacgaguaaaugg

SEQ ID NO: 1992728 - RNA, 19 nt, Homo sapiens
  misc_RNA (1)...(19): siRNA sense strand
aacagaauguccagaaugc

SEQ ID NO: 1992729 - RNA, 19 nt, Homo sapiens
  misc_RNA (1)...(19): siRNA sense strand
accuguaccuguuugacua

SEQ ID NO: 1992730 - RNA, 19 nt, Homo sapiens
  misc_RNA (1)...(19): siRNA sense strand
gcuauguuacucucaguuc

SEQ ID NO: 1992731 - RNA, 19 nt, Homo sapiens
  misc_RNA (1)...(19): siRNA sense strand
acacaggccgagcgaauca

SEQ ID NO: 1992732 - RNA, 19 nt, Homo sapiens
  misc_RNA (1)...(19): siRNA sense strand
cuacaccgacaccuuccua

SEQ ID NO: 1992733 - RNA, 19 nt, Homo sapiens
  misc_RNA (1)...(19): siRNA sense strand
ccacugcugcuacgacauc

SEQ ID NO: 1992734 - RNA, 19 nt, Homo sapiens
  misc_RNA (1)...(19): siRNA sense strand
ccgacaccuuccuaccuuu

SEQ ID NO: 1992735 - RNA, 19 nt, Homo sapiens
  misc_RNA (1)...(19): siRNA sense strand
ccuguacuuuaacccaauu

SEQ ID NO: 1992736 - RNA, 19 nt, Homo sapiens
  misc_RNA (1)...(19): siRNA sense strand
cacgguuucucaucaucaa

SEQ ID NO: 1992737 - RNA, 19 nt, Homo sapiens
  misc_RNA (1)...(19): siRNA sense strand
agaacgugucaaagcauua

SEQ ID NO: 1992738 - RNA, 19 nt, Homo sapiens
  misc_RNA (1)...(19): siRNA sense strand
uauggugggcaucuucaaa

SEQ ID NO: 1992739 - RNA, 19 nt, Homo sapiens
  misc_RNA (1)...(19): siRNA sense strand
gcaacuguuuguuuuacug

SEQ ID NO: 1992740 - RNA, 19 nt, Homo sapiens
  misc_RNA (1)...(19): siRNA sense strand
gcugauugcugaguuugcu

SEQ ID NO: 1992741 - RNA, 19 nt, Homo sapiens
  misc_RNA (1)...(19): siRNA sense strand
gaagcaguggagagaguuc

SEQ ID NO: 1992742 - RNA, 19 nt, Homo sapiens
  misc_RNA (1)...(19): siRNA sense strand
ucaaagcauuaggcgugaa

SEQ ID NO: 1992743 - RNA, 19 nt, Homo sapiens
  misc_RNA (1)...(19): siRNA sense strand
ggaaagggcagcauuauga

SEQ ID NO: 1992744 - RNA, 19 nt, Homo sapiens
  misc_RNA (1)...(19): siRNA sense strand
cuagagagcuguauuccua

SEQ ID NO: 1992745 - RNA, 19 nt, Homo sapiens
  misc_RNA (1)...(19): siRNA sense strand
ggacagagcccaccagaca

SEQ ID NO: 1992746 - RNA, 19 nt, Homo sapiens
  misc_RNA (1)...(19): siRNA sense strand
gaacagagggacugagauc

SEQ ID NO: 1992747 - RNA, 19 nt, Homo sapiens
  misc_RNA (1)...(19): siRNA sense strand
gcccaggccuguuucaaga

SEQ ID NO: 1992748 - RNA, 19 nt, Homo sapiens
  misc_RNA (1)...(19): siRNA sense strand
gaauaagcccgcagauaca

SEQ ID NO: 1992749 - RNA, 19 nt, Homo sapiens
  misc_RNA (1)...(19): siRNA sense strand
gaagagaagcgaggcauca

SEQ ID NO: 1992750 - RNA, 19 nt, Homo sapiens
  misc_RNA (1)...(19): siRNA sense strand
aggaggacaugcucagaua

SEQ ID NO: 1992751 - RNA, 19 nt, Homo sapiens
  misc_RNA (1)...(19): siRNA sense strand
ggucuuaguguuuaaaguu

SEQ ID NO: 1992752 - RNA, 19 nt, Homo sapiens
  misc_RNA (1)...(19): siRNA sense strand
agacagagcagacccagaa

SEQ ID NO: 1992753 - RNA, 19 nt, Homo sapiens
  misc_RNA (1)...(19): siRNA sense strand
gagcaggacagaagccaaa

SEQ ID NO: 1992754 - RNA, 19 nt, Homo sapiens
  misc_RNA (1)...(19): siRNA sense strand
caacuugcauaccaguguu

SEQ ID NO: 1992755 - RNA, 19 nt, Homo sapiens
  misc_RNA (1)...(19): siRNA sense strand
acacaggaguccaccaaug

SEQ ID NO: 1992756 - RNA, 19 nt, Homo sapiens
  misc_RNA (1)...(19): siRNA sense strand
ccagagccaggaaagaaua

SEQ ID NO: 1992757 - RNA, 19 nt, Homo sapiens
  misc_RNA (1)...(19): siRNA sense strand
caagaggaaucagacaaca

SEQ ID NO: 1992758 - RNA, 19 nt, Homo sapiens
  misc_RNA (1)...(19): siRNA sense strand
agaauaagcccgcagauac

SEQ ID NO: 1992759 - RNA, 19 nt, Homo sapiens
  misc_RNA (1)...(19): siRNA sense strand
gagcuguauuccuacuuga

SEQ ID NO: 1992760 - RNA, 19 nt, Homo sapiens
  misc_RNA (1)...(19): siRNA sense strand
caaagauggaugcaaguga

SEQ ID NO: 1992761 - RNA, 19 nt, Homo sapiens
  misc_RNA (1)...(19): siRNA sense strand
gccaggcaguggucaaaga

SEQ ID NO: 1992762 - RNA, 19 nt, Homo sapiens
  misc_RNA (1)...(19): siRNA sense strand
cacaggaggccaccaauga

SEQ ID NO: 1992763 - RNA, 19 nt, Homo sapiens
  misc_RNA (1)...(19): siRNA sense strand
ggaaucagacaacagagau

SEQ ID NO: 1992764 - RNA, 19 nt, Homo sapiens
  misc_RNA (1)...(19): siRNA sense strand
gaaggcaagaggaaucaga

SEQ ID NO: 1992765 - RNA, 19 nt, Homo sapiens
  misc_RNA (1)...(19): siRNA sense strand
ggagaaggcaagaggaauc

SEQ ID NO: 1992766 - RNA, 19 nt, Homo sapiens
  misc_RNA (1)...(19): siRNA sense strand
ggacagcagccaccagaca

SEQ ID NO: 1992767 - RNA, 19 nt, Homo sapiens
  misc_RNA (1)...(19): siRNA sense strand
ggacagcagccaccagaca

SEQ ID NO: 1992768 - RNA, 19 nt, Homo sapiens
  misc_RNA (1)...(19): siRNA sense strand
gagaagcaccaagccauga

SEQ ID NO: 1992769 - RNA, 19 nt, Homo sapiens
  misc_RNA (1)...(19): siRNA sense strand
ccagagagacagccacaga

SEQ ID NO: 1992770 - RNA, 19 nt, Homo sapiens
  misc_RNA (1)...(19): siRNA sense strand
aagaauaagcccgcagaua

SEQ ID NO: 1992771 - RNA, 19 nt, Homo sapiens
  misc_RNA (1)...(19): siRNA sense strand
gggaaagggcagcauuaug

SEQ ID NO: 1992772 - RNA, 19 nt, Homo sapiens
  misc_RNA (1)...(19): siRNA sense strand
gggagcagccacagacaga

SEQ ID NO: 1992773 - RNA, 19 nt, Homo sapiens
  misc_RNA (1)...(19): siRNA sense strand
ggugaggaauggguugaug

SEQ ID NO: 1992774 - RNA, 19 nt, Homo sapiens
  misc_RNA (1)...(19): siRNA sense strand
ggaauuccuggucuuagug

SEQ ID NO: 1992775 - RNA, 19 nt, Homo sapiens
  misc_RNA (1)...(19): siRNA sense strand
agagcuguauuccuacuug

SEQ ID NO: 1992776 - RNA, 19 nt, Homo sapiens
  misc_RNA (1)...(19): siRNA sense strand
ggaugcagcccagucagaa

SEQ ID NO: 1992777 - RNA, 19 nt, Homo sapiens
  misc_RNA (1)...(19): siRNA sense strand
aaacauuaaugggaucauc

SEQ ID NO: 1992778 - RNA, 19 nt, Homo sapiens
  misc_RNA (1)...(19): siRNA sense strand
gcaagaggaaucagacaac

SEQ ID NO: 1992779 - RNA, 19 nt, Homo sapiens
  misc_RNA (1)...(19): siRNA sense strand
gaaagggcagcauuaugag

SEQ ID NO: 1992780 - RNA, 19 nt, Homo sapiens
  misc_RNA (1)...(19): siRNA sense strand
cagaacagagggacugaga

SEQ ID NO: 1992781 - RNA, 19 nt, Homo sapiens
  misc_RNA (1)...(19): siRNA sense strand
cacagugguuggugaggaa

SEQ ID NO: 1992782 - RNA, 19 nt, Homo sapiens
  misc_RNA (1)...(19): siRNA sense strand
cagaacagagggacugaga

SEQ ID NO: 1992783 - RNA, 19 nt, Homo sapiens
  misc_RNA (1)...(19): siRNA sense strand
agaguuugccgaugugauu

SEQ ID NO: 1992784 - RNA, 19 nt, Homo sapiens
  misc_RNA (1)...(19): siRNA sense strand
ggucacacaccgagacugu

SEQ ID NO: 1992785 - RNA, 19 nt, Homo sapiens
  misc_RNA (1)...(19): siRNA sense strand
gaggacacacucagauaca

SEQ ID NO: 1992786 - RNA, 19 nt, Homo sapiens
  misc_RNA (1)...(19): siRNA sense strand
ggaggacacacucagauac

SEQ ID NO: 1992787 - RNA, 19 nt, Homo sapiens
  misc_RNA (1)...(19): siRNA sense strand
gaggacaugcucagauaca

SEQ ID NO: 1992788 - RNA, 19 nt, Homo sapiens
  misc_RNA (1)...(19): siRNA sense strand
gagaaggcaagaggaauca

SEQ ID NO: 1992789 - RNA, 19 nt, Homo sapiens
  misc_RNA (1)...(19): siRNA sense strand
agaggaaucagacaacaga

SEQ ID NO: 1992790 - RNA, 19 nt, Homo sapiens
  misc_RNA (1)...(19): siRNA sense strand
ggacuguggaauucaagga

SEQ ID NO: 1992791 - RNA, 19 nt, Homo sapiens
  misc_RNA (1)...(19): siRNA sense strand
gaggggagcugaaaagacu

SEQ ID NO: 1992792 - RNA, 19 nt, Homo sapiens
  misc_RNA (1)...(19): siRNA sense strand
cagggacuguggaauucaa

SEQ ID NO: 1992793 - RNA, 19 nt, Homo sapiens
  misc_RNA (1)...(19): siRNA sense strand
gucuuaguguuuaaaguug

SEQ ID NO: 1992794 - RNA, 19 nt, Homo sapiens
  misc_RNA (1)...(19): siRNA sense strand
uuccuggucuuaguguuua

SEQ ID NO: 1992795 - RNA, 19 nt, Homo sapiens
  misc_RNA (1)...(19): siRNA sense strand
gaaccagcaagcagacaca

SEQ ID NO: 1992796 - RNA, 19 nt, Homo sapiens
  misc_RNA (1)...(19): siRNA sense strand
gcuguauuccuacuugaga

SEQ ID NO: 1992797 - RNA, 19 nt, Homo sapiens
  misc_RNA (1)...(19): siRNA sense strand
ccaggccuguuucaagaca

SEQ ID NO: 1992798 - RNA, 19 nt, Homo sapiens
  misc_RNA (1)...(19): siRNA sense strand
gaaucagacaacagagaug

SEQ ID NO: 1992799 - RNA, 19 nt, Homo sapiens
  misc_RNA (1)...(19): siRNA sense strand
ggcaagaggaaucagacaa

SEQ ID NO: 1992800 - RNA, 19 nt, Homo sapiens
  misc_RNA (1)...(19): siRNA sense strand
aagcgaggcaucacagcua

SEQ ID NO: 1992801 - RNA, 19 nt, Homo sapiens
  misc_RNA (1)...(19): siRNA sense strand
gcaccagcacccagacaca

SEQ ID NO: 1992802 - RNA, 19 nt, Homo sapiens
  misc_RNA (1)...(19): siRNA sense strand
cacccaaggcgcuguguga

SEQ ID NO: 1992803 - RNA, 19 nt, Homo sapiens
  misc_RNA (1)...(19): siRNA sense strand
gaauuccuggucuuagugu

SEQ ID NO: 1992804 - RNA, 19 nt, Homo sapiens
  misc_RNA (1)...(19): siRNA sense strand
gcagcccagucagaagaga

SEQ ID NO: 1992805 - RNA, 19 nt, Homo sapiens
  misc_RNA (1)...(19): siRNA sense strand
gugaggaauggguugauga

SEQ ID NO: 1992806 - RNA, 19 nt, Homo sapiens
  misc_RNA (1)...(19): siRNA sense strand
aaucagacaacagagauga

SEQ ID NO: 1992807 - RNA, 19 nt, Homo sapiens
  misc_RNA (1)...(19): siRNA sense strand
aggaggacacacucagaua

SEQ ID NO: 1992808 - RNA, 19 nt, Homo sapiens
  misc_RNA (1)...(19): siRNA sense strand
agacacaggaguccaccaa

SEQ ID NO: 1992809 - RNA, 19 nt, Homo sapiens
  misc_RNA (1)...(19): siRNA sense strand
acagagaugaggccagaga

SEQ ID NO: 1992810 - RNA, 19 nt, Homo sapiens
  misc_RNA (1)...(19): siRNA sense strand
gagcugggcgaaggacaga

SEQ ID NO: 1992811 - RNA, 19 nt, Homo sapiens
  misc_RNA (1)...(19): siRNA sense strand
cagagccaggaaagaauaa

SEQ ID NO: 1992812 - RNA, 19 nt, Homo sapiens
  misc_RNA (1)...(19): siRNA sense strand
gaccagggaacaggacaga

SEQ ID NO: 1992813 - RNA, 19 nt, Homo sapiens
  misc_RNA (1)...(19): siRNA sense strand
ucccagagccaggaaagaa

SEQ ID NO: 1992814 - RNA, 19 nt, Homo sapiens
  misc_RNA (1)...(19): siRNA sense strand
agacacaggaggccaccaa

SEQ ID NO: 1992815 - RNA, 19 nt, Homo sapiens
  misc_RNA (1)...(19): siRNA sense strand
ccaagagguuuaucaguga

SEQ ID NO: 1992816 - RNA, 19 nt, Homo sapiens
  misc_RNA (1)...(19): siRNA sense strand
ugaaggagaugcccacugu

SEQ ID NO: 1992817 - RNA, 19 nt, Homo sapiens
  misc_RNA (1)...(19): siRNA sense strand
caagagguuuaucagugaa

SEQ ID NO: 1992818 - RNA, 19 nt, Homo sapiens
  misc_RNA (1)...(19): siRNA sense strand
ugaaguuucugaccaagag

SEQ ID NO: 1992819 - RNA, 19 nt, Homo sapiens
  misc_RNA (1)...(19): siRNA sense strand
cgccagagcuuugauagca

SEQ ID NO: 1992820 - RNA, 19 nt, Homo sapiens
  misc_RNA (1)...(19): siRNA sense strand
ucaacacgcucuccaccau

SEQ ID NO: 1992821 - RNA, 19 nt, Homo sapiens
  misc_RNA (1)...(19): siRNA sense strand
ccaucaaccugaaggagau

SEQ ID NO: 1992822 - RNA, 19 nt, Homo sapiens
  misc_RNA (1)...(19): siRNA sense strand
gcacgugcagcaugucuuc

SEQ ID NO: 1992823 - RNA, 19 nt, Homo sapiens
  misc_RNA (1)...(19): siRNA sense strand
agagguuuaucagugaaua

SEQ ID NO: 1992824 - RNA, 19 nt, Homo sapiens
  misc_RNA (1)...(19): siRNA sense strand
cugccugucuggacuuuga

SEQ ID NO: 1992825 - RNA, 19 nt, Homo sapiens
  misc_RNA (1)...(19): siRNA sense strand
cgacagccgccagagcuuu

SEQ ID NO: 1992826 - RNA, 19 nt, Homo sapiens
  misc_RNA (1)...(19): siRNA sense strand
ggcagaggguguggcuuug

SEQ ID NO: 1992827 - RNA, 19 nt, Homo sapiens
  misc_RNA (1)...(19): siRNA sense strand
gcucaguacaggcaaguca

SEQ ID NO: 1992828 - RNA, 19 nt, Homo sapiens
  misc_RNA (1)...(19): siRNA sense strand
uuucugaccaagagguuua

SEQ ID NO: 1992829 - RNA, 19 nt, Homo sapiens
  misc_RNA (1)...(19): siRNA sense strand
aggcagaggguguggcuuu

SEQ ID NO: 1992830 - RNA, 19 nt, Homo sapiens
  misc_RNA (1)...(19): siRNA sense strand
gaccaagagguuuaucagu

SEQ ID NO: 1992831 - RNA, 19 nt, Homo sapiens
  misc_RNA (1)...(19): siRNA sense strand
ccgugaaguuucugaccaa

SEQ ID NO: 1992832 - RNA, 19 nt, Homo sapiens
  misc_RNA (1)...(19): siRNA sense strand
gggcuucaagaucuucuga

SEQ ID NO: 1992833 - RNA, 19 nt, Homo sapiens
  misc_RNA (1)...(19): siRNA sense strand
agucugcccugaccgugaa

SEQ ID NO: 1992834 - RNA, 19 nt, Homo sapiens
  misc_RNA (1)...(19): siRNA sense strand
gcccugaccgugaaguuuc

SEQ ID NO: 1992835 - RNA, 19 nt, Homo sapiens
  misc_RNA (1)...(19): siRNA sense strand
gacagccgccagagcuuug

SEQ ID NO: 1992836 - RNA, 19 nt, Homo sapiens
  misc_RNA (1)...(19): siRNA sense strand
gagguuuaucagugaauau

SEQ ID NO: 1992837 - RNA, 19 nt, Homo sapiens
  misc_RNA (1)...(19): siRNA sense strand
aacacgcucuccaccauca

SEQ ID NO: 1992838 - RNA, 19 nt, Homo sapiens
  misc_RNA (1)...(19): siRNA sense strand
guucaaggauugcaugagu

SEQ ID NO: 1992839 - RNA, 19 nt, Homo sapiens
  misc_RNA (1)...(19): siRNA sense strand
gugcaggcguucaaggauu

SEQ ID NO: 1992840 - RNA, 19 nt, Homo sapiens
  misc_RNA (1)...(19): siRNA sense strand
gcagaggaggcaagaacaa

SEQ ID NO: 1992841 - RNA, 19 nt, Homo sapiens
  misc_RNA (1)...(19): siRNA sense strand
cccaacgggugaagaaaga

SEQ ID NO: 1992842 - RNA, 19 nt, Homo sapiens
  misc_RNA (1)...(19): siRNA sense strand
ucaaggauugcaugaguga

SEQ ID NO: 1992843 - RNA, 19 nt, Homo sapiens
  misc_RNA (1)...(19): siRNA sense strand
ugcaggcguucaaggauug

SEQ ID NO: 1992844 - RNA, 19 nt, Homo sapiens
  misc_RNA (1)...(19): siRNA sense strand
gggugaagaaagacgauga

SEQ ID NO: 1992845 - RNA, 19 nt, Homo sapiens
  misc_RNA (1)...(19): siRNA sense strand
gcucugcgcugcucaaaca

SEQ ID NO: 1992846 - RNA, 19 nt, Homo sapiens
  misc_RNA (1)...(19): siRNA sense strand
gcuccacgcugcugaaaca

SEQ ID NO: 1992847 - RNA, 19 nt, Homo sapiens
  misc_RNA (1)...(19): siRNA sense strand
ggaaucuucugacccaaag

SEQ ID NO: 1992848 - RNA, 19 nt, Homo sapiens
  misc_RNA (1)...(19): siRNA sense strand
gcagagcuccaacuugcaa

SEQ ID NO: 1992849 - RNA, 19 nt, Homo sapiens
  misc_RNA (1)...(19): siRNA sense strand
cgaccucgauccagaugug

SEQ ID NO: 1992850 - RNA, 19 nt, Homo sapiens
  misc_RNA (1)...(19): siRNA sense strand
cuacuccuguggaaucuuc

SEQ ID NO: 1992851 - RNA, 19 nt, Homo sapiens
  misc_RNA (1)...(19): siRNA sense strand
caucuccucuggccucacu

SEQ ID NO: 1992852 - RNA, 19 nt, Homo sapiens
  misc_RNA (1)...(19): siRNA sense strand
gcccuacuccuguggaauc

SEQ ID NO: 1992853 - RNA, 19 nt, Homo sapiens
  misc_RNA (1)...(19): siRNA sense strand
ccuccagccucaccaagca

SEQ ID NO: 1992854 - RNA, 19 nt, Homo sapiens
  misc_RNA (1)...(19): siRNA sense strand
guccugaugcuguuucugu

SEQ ID NO: 1992855 - RNA, 19 nt, Homo sapiens
  misc_RNA (1)...(19): siRNA sense strand
cagcccuacuccuguggaa

SEQ ID NO: 1992856 - RNA, 19 nt, Homo sapiens
  misc_RNA (1)...(19): siRNA sense strand
ggagaacgcucuugacuuc

SEQ ID NO: 1992857 - RNA, 19 nt, Homo sapiens
  misc_RNA (1)...(19): siRNA sense strand
uagcagaacucuucagucu

SEQ ID NO: 1992858 - RNA, 19 nt, Homo sapiens
  misc_RNA (1)...(19): siRNA sense strand
ggagcauccucaucaaguu

SEQ ID NO: 1992859 - RNA, 19 nt, Homo sapiens
  misc_RNA (1)...(19): siRNA sense strand
gcaaggccauguguaagau

SEQ ID NO: 1992860 - RNA, 19 nt, Homo sapiens
  misc_RNA (1)...(19): siRNA sense strand
cgauagccaccaugaauaa

SEQ ID NO: 1992861 - RNA, 19 nt, Homo sapiens
  misc_RNA (1)...(19): siRNA sense strand
ugacggacuuucaguuugu

SEQ ID NO: 1992862 - RNA, 19 nt, Homo sapiens
  misc_RNA (1)...(19): siRNA sense strand
ugucgaaggucaccaaauc

SEQ ID NO: 1992863 - RNA, 19 nt, Homo sapiens
  misc_RNA (1)...(19): siRNA sense strand
caagcuagcagaacucuuc

SEQ ID NO: 1992864 - RNA, 19 nt, Homo sapiens
  misc_RNA (1)...(19): siRNA sense strand
guauacgcguucccuguga

SEQ ID NO: 1992865 - RNA, 19 nt, Homo sapiens
  misc_RNA (1)...(19): siRNA sense strand
gggacaagcuagcagaacu

SEQ ID NO: 1992866 - RNA, 19 nt, Homo sapiens
  misc_RNA (1)...(19): siRNA sense strand
gcaucauuaucuugugcua

SEQ ID NO: 1992867 - RNA, 19 nt, Homo sapiens
  misc_RNA (1)...(19): siRNA sense strand
ccaaaucagugaccaucgu

SEQ ID NO: 1992868 - RNA, 19 nt, Homo sapiens
  misc_RNA (1)...(19): siRNA sense strand
agccggaccugcucuacua

SEQ ID NO: 1992869 - RNA, 19 nt, Homo sapiens
  misc_RNA (1)...(19): siRNA sense strand
ggcaaggccauguguaaga

SEQ ID NO: 1992870 - RNA, 19 nt, Homo sapiens
  misc_RNA (1)...(19): siRNA sense strand
uggcgcaaguccucuauca

SEQ ID NO: 1992871 - RNA, 19 nt, Homo sapiens
  misc_RNA (1)...(19): siRNA sense strand
cacgauagccaccaugaau

SEQ ID NO: 1992872 - RNA, 19 nt, Homo sapiens
  misc_RNA (1)...(19): siRNA sense strand
gcgcaaguccucuaucaac

SEQ ID NO: 1992873 - RNA, 19 nt, Homo sapiens
  misc_RNA (1)...(19): siRNA sense strand
guaagaucguguccauggu

SEQ ID NO: 1992874 - RNA, 19 nt, Homo sapiens
  misc_RNA (1)...(19): siRNA sense strand
gagcauccucaucaaguuc

SEQ ID NO: 1992875 - RNA, 19 nt, Homo sapiens
  misc_RNA (1)...(19): siRNA sense strand
caaaucagugaccaucguu

SEQ ID NO: 1992876 - RNA, 19 nt, Homo sapiens
  misc_RNA (1)...(19): siRNA sense strand
cugguucucuaccugauga

SEQ ID NO: 1992877 - RNA, 19 nt, Homo sapiens
  misc_RNA (1)...(19): siRNA sense strand
acgauagccaccaugaaua

SEQ ID NO: 1992878 - RNA, 19 nt, Homo sapiens
  misc_RNA (1)...(19): siRNA sense strand
uguguaagaucguguccau

SEQ ID NO: 1992879 - RNA, 19 nt, Homo sapiens
  misc_RNA (1)...(19): siRNA sense strand
ggacaagcuagcagaacuc

SEQ ID NO: 1992880 - RNA, 19 nt, Homo sapiens
  misc_RNA (1)...(19): siRNA sense strand
ggccgaugcagccacgaua

SEQ ID NO: 1992881 - RNA, 19 nt, Homo sapiens
  misc_RNA (1)...(19): siRNA sense strand
ucggcaaggccauguguaa

SEQ ID NO: 1992882 - RNA, 19 nt, Homo sapiens
  misc_RNA (1)...(19): siRNA sense strand
caccuggcgucguggucua

SEQ ID NO: 1992883 - RNA, 19 nt, Homo sapiens
  misc_RNA (1)...(19): siRNA sense strand
gcuagcagaacucuucagu

SEQ ID NO: 1992884 - RNA, 19 nt, Homo sapiens
  misc_RNA (1)...(19): siRNA sense strand
augcagggcuggcgcaagu

SEQ ID NO: 1992885 - RNA, 19 nt, Homo sapiens
  misc_RNA (1)...(19): siRNA sense strand
guguguggaucugggcuuu

SEQ ID NO: 1992886 - RNA, 19 nt, Homo sapiens
  misc_RNA (1)...(19): siRNA sense strand
ccacgauagccaccaugaa

SEQ ID NO: 1992887 - RNA, 19 nt, Homo sapiens
  misc_RNA (1)...(19): siRNA sense strand
ccgcugggcaucauuaucu

SEQ ID NO: 1992888 - RNA, 19 nt, Homo sapiens
  misc_RNA (1)...(19): siRNA sense strand
gcggccaacacgaguggua

SEQ ID NO: 1992889 - RNA, 19 nt, Homo sapiens
  misc_RNA (1)...(19): siRNA sense strand
ccuggagcauccucaucaa

SEQ ID NO: 1992890 - RNA, 19 nt, Homo sapiens
  misc_RNA (1)...(19): siRNA sense strand
gcguuucccggacaaguug

SEQ ID NO: 1992891 - RNA, 19 nt, Homo sapiens
  misc_RNA (1)...(19): siRNA sense strand
gccaaggcgcugugugugu

SEQ ID NO: 1992892 - RNA, 19 nt, Homo sapiens
  misc_RNA (1)...(19): siRNA sense strand
ggaaggcucuccuccacau

SEQ ID NO: 1992893 - RNA, 19 nt, Homo sapiens
  misc_RNA (1)...(19): siRNA sense strand
cgucuuagcuucacugucu

SEQ ID NO: 1992894 - RNA, 19 nt, Homo sapiens
  misc_RNA (1)...(19): siRNA sense strand
ggccuaggcuccaaucuca

SEQ ID NO: 1992895 - RNA, 19 nt, Homo sapiens
  misc_RNA (1)...(19): siRNA sense strand
agaagccgcugccaaauca

SEQ ID NO: 1992896 - RNA, 19 nt, Homo sapiens
  misc_RNA (1)...(19): siRNA sense strand
caccaagcguccucuauga

SEQ ID NO: 1992897 - RNA, 19 nt, Homo sapiens
  misc_RNA (1)...(19): siRNA sense strand
cagagaagccgcugccaaa

SEQ ID NO: 1992898 - RNA, 19 nt, Homo sapiens
  misc_RNA (1)...(19): siRNA sense strand
gaagaucccaggcucaagu

SEQ ID NO: 1992899 - RNA, 19 nt, Homo sapiens
  misc_RNA (1)...(19): siRNA sense strand
ucgcucagcuaccgaaaug

SEQ ID NO: 1992900 - RNA, 19 nt, Homo sapiens
  misc_RNA (1)...(19): siRNA sense strand
cgggaaaccuccagagaag

SEQ ID NO: 1992901 - RNA, 19 nt, Homo sapiens
  misc_RNA (1)...(19): siRNA sense strand
gagaagccgcugccaaauc

SEQ ID NO: 1992902 - RNA, 19 nt, Homo sapiens
  misc_RNA (1)...(19): siRNA sense strand
cacaagacccgcagaggaa

SEQ ID NO: 1992903 - RNA, 19 nt, Homo sapiens
  misc_RNA (1)...(19): siRNA sense strand
ccaccaagcguccucuaug

SEQ ID NO: 1992904 - RNA, 19 nt, Homo sapiens
  misc_RNA (1)...(19): siRNA sense strand
gaaggcucuccuccacaua

SEQ ID NO: 1992905 - RNA, 19 nt, Homo sapiens
  misc_RNA (1)...(19): siRNA sense strand
ggguggcugucgagaaguu

SEQ ID NO: 1992906 - RNA, 19 nt, Homo sapiens
  misc_RNA (1)...(19): siRNA sense strand
ggaccaaaggaaagacaga

SEQ ID NO: 1992907 - RNA, 19 nt, Homo sapiens
  misc_RNA (1)...(19): siRNA sense strand
ugacaggggcuccgucuua

SEQ ID NO: 1992908 - RNA, 19 nt, Homo sapiens
  misc_RNA (1)...(19): siRNA sense strand
gaaaaggaagggaaggaaa

SEQ ID NO: 1992909 - RNA, 19 nt, Homo sapiens
  misc_RNA (1)...(19): siRNA sense strand
gagcccagacccuccagaa

SEQ ID NO: 1992910 - RNA, 19 nt, Homo sapiens
  misc_RNA (1)...(19): siRNA sense strand
gauccacggaaucuucuga

SEQ ID NO: 1992911 - RNA, 19 nt, Homo sapiens
  misc_RNA (1)...(19): siRNA sense strand
ggauaagggagagaaggaa

SEQ ID NO: 1992912 - RNA, 19 nt, Homo sapiens
  misc_RNA (1)...(19): siRNA sense strand
gaaggcagcccugguucca

SEQ ID NO: 1992913 - RNA, 19 nt, Homo sapiens
  misc_RNA (1)...(19): siRNA sense strand
ccgggaaaccuccagagaa

SEQ ID NO: 1992914 - RNA, 19 nt, Homo sapiens
  misc_RNA (1)...(19): siRNA sense strand
gagaaggaagagagaccaa

SEQ ID NO: 1992915 - RNA, 19 nt, Homo sapiens
  misc_RNA (1)...(19): siRNA sense strand
gagcuccuccucaagucuu

SEQ ID NO: 1992916 - RNA, 19 nt, Homo sapiens
  misc_RNA (1)...(19): siRNA sense strand
gcucagcuaccgaaauguc

SEQ ID NO: 1992917 - RNA, 19 nt, Homo sapiens
  misc_RNA (1)...(19): siRNA sense strand
gggagagaaggaagagaga

SEQ ID NO: 1992918 - RNA, 19 nt, Homo sapiens
  misc_RNA (1)...(19): siRNA sense strand
caaugccgguccacacaac

SEQ ID NO: 1992919 - RNA, 19 nt, Homo sapiens
  misc_RNA (1)...(19): siRNA sense strand
cccagacccuccagaagca

SEQ ID NO: 1992920 - RNA, 19 nt, Homo sapiens
  misc_RNA (1)...(19): siRNA sense strand
ccaccgaacuuuggggaaa

SEQ ID NO: 1992921 - RNA, 19 nt, Homo sapiens
  misc_RNA (1)...(19): siRNA sense strand
gacccuguccucucugauc

SEQ ID NO: 1992922 - RNA, 19 nt, Homo sapiens
  misc_RNA (1)...(19): siRNA sense strand
gaaagggaacguaucauua

SEQ ID NO: 1992923 - RNA, 19 nt, Homo sapiens
  misc_RNA (1)...(19): siRNA sense strand
gagcggauguauuggauuu

SEQ ID NO: 1992924 - RNA, 19 nt, Homo sapiens
  misc_RNA (1)...(19): siRNA sense strand
gacaaccacuuaccucuuu

SEQ ID NO: 1992925 - RNA, 19 nt, Homo sapiens
  misc_RNA (1)...(19): siRNA sense strand
ccaaaugcaugcagaauuc

SEQ ID NO: 1992926 - RNA, 19 nt, Homo sapiens
  misc_RNA (1)...(19): siRNA sense strand
guaagacucugugguauug

SEQ ID NO: 1992927 - RNA, 19 nt, Homo sapiens
  misc_RNA (1)...(19): siRNA sense strand
caagauacauggaugaagu

SEQ ID NO: 1992928 - RNA, 19 nt, Homo sapiens
  misc_RNA (1)...(19): siRNA sense strand
ugucaaccauggaaucuua

SEQ ID NO: 1992929 - RNA, 19 nt, Homo sapiens
  misc_RNA (1)...(19): siRNA sense strand
ccacacagacaaccacuua

SEQ ID NO: 1992930 - RNA, 19 nt, Homo sapiens
  misc_RNA (1)...(19): siRNA sense strand
gaaauaugaucucaguucu

SEQ ID NO: 1992931 - RNA, 19 nt, Homo sapiens
  misc_RNA (1)...(19): siRNA sense strand
acaaccagauguuccaaua

SEQ ID NO: 1992932 - RNA, 19 nt, Homo sapiens
  misc_RNA (1)...(19): siRNA sense strand
ggagguacaguuucucuaa

SEQ ID NO: 1992933 - RNA, 19 nt, Homo sapiens
  misc_RNA (1)...(19): siRNA sense strand
gcagaugguuuaguuuaug

SEQ ID NO: 1992934 - RNA, 19 nt, Homo sapiens
  misc_RNA (1)...(19): siRNA sense strand
ggauuuagcagaaacaaug

SEQ ID NO: 1992935 - RNA, 19 nt, Homo sapiens
  misc_RNA (1)...(19): siRNA sense strand
gaucucaguucucuuaugg

SEQ ID NO: 1992936 - RNA, 19 nt, Homo sapiens
  misc_RNA (1)...(19): siRNA sense strand
ggaggaaucuuuucaacaa

SEQ ID NO: 1992937 - RNA, 19 nt, Homo sapiens
  misc_RNA (1)...(19): siRNA sense strand
ccacuuaccucuuuuagaa

SEQ ID NO: 1992938 - RNA, 19 nt, Homo sapiens
  misc_RNA (1)...(19): siRNA sense strand
aaagggaacguaucauuaa

SEQ ID NO: 1992939 - RNA, 19 nt, Homo sapiens
  misc_RNA (1)...(19): siRNA sense strand
ggaauucucaguauaucaa

SEQ ID NO: 1992940 - RNA, 19 nt, Homo sapiens
  misc_RNA (1)...(19): siRNA sense strand
cauaauggaauucucagua

SEQ ID NO: 1992941 - RNA, 19 nt, Homo sapiens
  misc_RNA (1)...(19): siRNA sense strand
uaugaucucaguucucuua

SEQ ID NO: 1992942 - RNA, 19 nt, Homo sapiens
  misc_RNA (1)...(19): siRNA sense strand
aaccagauguuccaauauu

SEQ ID NO: 1992943 - RNA, 19 nt, Homo sapiens
  misc_RNA (1)...(19): siRNA sense strand
gccaugaagugucaauaug

SEQ ID NO: 1992944 - RNA, 19 nt, Homo sapiens
  misc_RNA (1)...(19): siRNA sense strand
caugaagugucaauauguu

SEQ ID NO: 1992945 - RNA, 19 nt, Homo sapiens
  misc_RNA (1)...(19): siRNA sense strand
gcagggaauuuucacauaa

SEQ ID NO: 1992946 - RNA, 19 nt, Homo sapiens
  misc_RNA (1)...(19): siRNA sense strand
ccaacaguauuugaucuuu

SEQ ID NO: 1992947 - RNA, 19 nt, Homo sapiens
  misc_RNA (1)...(19): siRNA sense strand
caacaguauuugaucuuuc

SEQ ID NO: 1992948 - RNA, 19 nt, Homo sapiens
  misc_RNA (1)...(19): siRNA sense strand
gaagguuccugagagcuau

SEQ ID NO: 1992949 - RNA, 19 nt, Homo sapiens
  misc_RNA (1)...(19): siRNA sense strand
gagcuuguuccagcaauua

SEQ ID NO: 1992950 - RNA, 19 nt, Homo sapiens
  misc_RNA (1)...(19): siRNA sense strand
cuauaaaccugucaauucu

SEQ ID NO: 1992951 - RNA, 19 nt, Homo sapiens
  misc_RNA (1)...(19): siRNA sense strand
ccuauaaaccugucaauuc

SEQ ID NO: 1992952 - RNA, 19 nt, Homo sapiens
  misc_RNA (1)...(19): siRNA sense strand
gaaccaacaguauuugauc

SEQ ID NO: 1992953 - RNA, 19 nt, Homo sapiens
  misc_RNA (1)...(19): siRNA sense strand
gggcagcacuugucaacca

SEQ ID NO: 1992954 - RNA, 19 nt, Homo sapiens
  misc_RNA (1)...(19): siRNA sense strand
uguauuggauuuagcagaa

SEQ ID NO: 1992955 - RNA, 19 nt, Homo sapiens
  misc_RNA (1)...(19): siRNA sense strand
uggagucucugggauauuu

SEQ ID NO: 1992956 - RNA, 19 nt, Homo sapiens
  misc_RNA (1)...(19): siRNA sense strand
ggccaucuauaugucaaua

SEQ ID NO: 1992957 - RNA, 19 nt, Homo sapiens
  misc_RNA (1)...(19): siRNA sense strand
gaauucauggccaucuaua

SEQ ID NO: 1992958 - RNA, 19 nt, Homo sapiens
  misc_RNA (1)...(19): siRNA sense strand
cagaugguuuaguuuauga

SEQ ID NO: 1992959 - RNA, 19 nt, Homo sapiens
  misc_RNA (1)...(19): siRNA sense strand
cagaauucauggccaucua

SEQ ID NO: 1992960 - RNA, 19 nt, Homo sapiens
  misc_RNA (1)...(19): siRNA sense strand
ugaaauaugaucucaguuc

SEQ ID NO: 1992961 - RNA, 19 nt, Homo sapiens
  misc_RNA (1)...(19): siRNA sense strand
ccauggaaucuuacaauuu

SEQ ID NO: 1992962 - RNA, 19 nt, Homo sapiens
  misc_RNA (1)...(19): siRNA sense strand
gagguacaguuucucuaau

SEQ ID NO: 1992963 - RNA, 19 nt, Homo sapiens
  misc_RNA (1)...(19): siRNA sense strand
agguacaguuucucuaaua

SEQ ID NO: 1992964 - RNA, 19 nt, Homo sapiens
  misc_RNA (1)...(19): siRNA sense strand
agacuuggauccuauaaac

SEQ ID NO: 1992965 - RNA, 19 nt, Homo sapiens
  misc_RNA (1)...(19): siRNA sense strand
auaauuugcugucguuuca

SEQ ID NO: 1992966 - RNA, 19 nt, Homo sapiens
  misc_RNA (1)...(19): siRNA sense strand
gcacuugucaaccauggaa

SEQ ID NO: 1992967 - RNA, 19 nt, Homo sapiens
  misc_RNA (1)...(19): siRNA sense strand
ccugagagcuauguagaga

SEQ ID NO: 1992968 - RNA, 19 nt, Homo sapiens
  misc_RNA (1)...(19): siRNA sense strand
agaaagggaacguaucauu

SEQ ID NO: 1992969 - RNA, 19 nt, Homo sapiens
  misc_RNA (1)...(19): siRNA sense strand
ucucuuauggugacaguua

SEQ ID NO: 1992970 - RNA, 19 nt, Homo sapiens
  misc_RNA (1)...(19): siRNA sense strand
gguacaguuucucuaauag

SEQ ID NO: 1992971 - RNA, 19 nt, Homo sapiens
  misc_RNA (1)...(19): siRNA sense strand
cagcagacacccaucaguu

SEQ ID NO: 1992972 - RNA, 19 nt, Homo sapiens
  misc_RNA (1)...(19): siRNA sense strand
cugcagaugguuuaguuua

SEQ ID NO: 1992973 - RNA, 19 nt, Homo sapiens
  misc_RNA (1)...(19): siRNA sense strand
gagcauucacuucaagaug

SEQ ID NO: 1992974 - RNA, 19 nt, Homo sapiens
  misc_RNA (1)...(19): siRNA sense strand
gcauucacuucaagaugug

SEQ ID NO: 1992975 - RNA, 19 nt, Homo sapiens
  misc_RNA (1)...(19): siRNA sense strand
ugacagaaagggaacguau

SEQ ID NO: 1992976 - RNA, 19 nt, Homo sapiens
  misc_RNA (1)...(19): siRNA sense strand
gggaacguaucauuaacca

SEQ ID NO: 1992977 - RNA, 19 nt, Homo sapiens
  misc_RNA (1)...(19): siRNA sense strand
ucucugggauauuuaugaa

SEQ ID NO: 1992978 - RNA, 19 nt, Homo sapiens
  misc_RNA (1)...(19): siRNA sense strand
gcggauguauuggauuuag

SEQ ID NO: 1992979 - RNA, 19 nt, Homo sapiens
  misc_RNA (1)...(19): siRNA sense strand
gaggauggccacacagaca

SEQ ID NO: 1992980 - RNA, 19 nt, Homo sapiens
  misc_RNA (1)...(19): siRNA sense strand
cauggagucucugggauau

SEQ ID NO: 1992981 - RNA, 19 nt, Homo sapiens
  misc_RNA (1)...(19): siRNA sense strand
caguuucucuaauagcauu

SEQ ID NO: 1992982 - RNA, 19 nt, Homo sapiens
  misc_RNA (1)...(19): siRNA sense strand
ccauggagucucugggaua

SEQ ID NO: 1992983 - RNA, 19 nt, Homo sapiens
  misc_RNA (1)...(19): siRNA sense strand
cgaagguuccugagagcua

SEQ ID NO: 1992984 - RNA, 19 nt, Homo sapiens
  misc_RNA (1)...(19): siRNA sense strand
aauaugaucucaguucucu

SEQ ID NO: 1992985 - RNA, 19 nt, Homo sapiens
  misc_RNA (1)...(19): siRNA sense strand
uaaaguagcagggaauuuu

SEQ ID NO: 1992986 - RNA, 19 nt, Homo sapiens
  misc_RNA (1)...(19): siRNA sense strand
auaaaccugucaauucugu

SEQ ID NO: 1992987 - RNA, 19 nt, Homo sapiens
  misc_RNA (1)...(19): siRNA sense strand
guauuggauuuagcagaaa

SEQ ID NO: 1992988 - RNA, 19 nt, Homo sapiens
  misc_RNA (1)...(19): siRNA sense strand
gccaguggagguacaguuu

SEQ ID NO: 1992989 - RNA, 19 nt, Homo sapiens
  misc_RNA (1)...(19): siRNA sense strand
gauauuacuguugccauga

SEQ ID NO: 1992990 - RNA, 19 nt, Homo sapiens
  misc_RNA (1)...(19): siRNA sense strand
acaagaagagcauucacuu

SEQ ID NO: 1992991 - RNA, 19 nt, Homo sapiens
  misc_RNA (1)...(19): siRNA sense strand
caaccagauguuccaauau

SEQ ID NO: 1992992 - RNA, 19 nt, Homo sapiens
  misc_RNA (1)...(19): siRNA sense strand
cauggaugaaguaugaaua

SEQ ID NO: 1992993 - RNA, 19 nt, Homo sapiens
  misc_RNA (1)...(19): siRNA sense strand
caacuauggcuuuauuaac

SEQ ID NO: 1992994 - RNA, 19 nt, Homo sapiens
  misc_RNA (1)...(19): siRNA sense strand
ugagagcuauguagagacu

SEQ ID NO: 1992995 - RNA, 19 nt, Homo sapiens
  misc_RNA (1)...(19): siRNA sense strand
acagaaagggaacguauca

SEQ ID NO: 1992996 - RNA, 19 nt, Homo sapiens
  misc_RNA (1)...(19): siRNA sense strand
caauaaaguagcagggaau

SEQ ID NO: 1992997 - RNA, 19 nt, Homo sapiens
  misc_RNA (1)...(19): siRNA sense strand
uuucagacuuggauccuau

SEQ ID NO: 1992998 - RNA, 19 nt, Homo sapiens
  misc_RNA (1)...(19): siRNA sense strand
gaagugucaauauguugga

SEQ ID NO: 1992999 - RNA, 19 nt, Homo sapiens
  misc_RNA (1)...(19): siRNA sense strand
ggagucucugggauauuua

SEQ ID NO: 1993000 - RNA, 19 nt, Homo sapiens
  misc_RNA (1)...(19): siRNA sense strand
accagauguuccaauauuu

SEQ ID NO: 1993001 - RNA, 19 nt, Homo sapiens
  misc_RNA (1)...(19): siRNA sense strand
cuuguuccagcaauuauua

SEQ ID NO: 1993002 - RNA, 19 nt, Homo sapiens
  misc_RNA (1)...(19): siRNA sense strand
ucaucacagucuccaaaug

SEQ ID NO: 1993003 - RNA, 19 nt, Homo sapiens
  misc_RNA (1)...(19): siRNA sense strand
aauacgaaguagacaagga

SEQ ID NO: 1993004 - RNA, 19 nt, Homo sapiens
  misc_RNA (1)...(19): siRNA sense strand
ccaugaagugucaauaugu

SEQ ID NO: 1993005 - RNA, 19 nt, Homo sapiens
  misc_RNA (1)...(19): siRNA sense strand
accauggaaucuuacaauu

SEQ ID NO: 1993006 - RNA, 19 nt, Homo sapiens
  misc_RNA (1)...(19): siRNA sense strand
gcacauuugggcagcacuu

SEQ ID NO: 1993007 - RNA, 19 nt, Homo sapiens
  misc_RNA (1)...(19): siRNA sense strand
ugcagaugguuuaguuuau

SEQ ID NO: 1993008 - RNA, 19 nt, Homo sapiens
  misc_RNA (1)...(19): siRNA sense strand
uuuguaagacucuguggua

SEQ ID NO: 1993009 - RNA, 19 nt, Homo sapiens
  misc_RNA (1)...(19): siRNA sense strand
uguuggagcggauguauug

SEQ ID NO: 1993010 - RNA, 19 nt, Homo sapiens
  misc_RNA (1)...(19): siRNA sense strand
uacaguuucucuaauagca

SEQ ID NO: 1993011 - RNA, 19 nt, Homo sapiens
  misc_RNA (1)...(19): siRNA sense strand
gcagacacccaucaguuuu

SEQ ID NO: 1993012 - RNA, 19 nt, Homo sapiens
  misc_RNA (1)...(19): siRNA sense strand
gagagcuuguuccagcaau

SEQ ID NO: 1993013 - RNA, 19 nt, Homo sapiens
  misc_RNA (1)...(19): siRNA sense strand
agcauucacuucaagaugu

SEQ ID NO: 1993014 - RNA, 19 nt, Homo sapiens
  misc_RNA (1)...(19): siRNA sense strand
agagcuauguagagacuuc

SEQ ID NO: 1993015 - RNA, 19 nt, Homo sapiens
  misc_RNA (1)...(19): siRNA sense strand
aagacucugugguauuguu

SEQ ID NO: 1993016 - RNA, 19 nt, Homo sapiens
  misc_RNA (1)...(19): siRNA sense strand
gaggagcacaugccauucu

SEQ ID NO: 1993017 - RNA, 19 nt, Homo sapiens
  misc_RNA (1)...(19): siRNA sense strand
gaaacaaugguugcaucug

SEQ ID NO: 1993018 - RNA, 19 nt, Homo sapiens
  misc_RNA (1)...(19): siRNA sense strand
ugaucucaguucucuuaug

SEQ ID NO: 1993019 - RNA, 19 nt, Homo sapiens
  misc_RNA (1)...(19): siRNA sense strand
ugaauacgaaguagacaag

SEQ ID NO: 1993020 - RNA, 19 nt, Homo sapiens
  misc_RNA (1)...(19): siRNA sense strand
uguaagacucugugguauu

SEQ ID NO: 1993021 - RNA, 19 nt, Homo sapiens
  misc_RNA (1)...(19): siRNA sense strand
cugaggagcacaugccauu

SEQ ID NO: 1993022 - RNA, 19 nt, Homo sapiens
  misc_RNA (1)...(19): siRNA sense strand
ggaggaggcugguacaaua

SEQ ID NO: 1993023 - RNA, 19 nt, Homo sapiens
  misc_RNA (1)...(19): siRNA sense strand
gaacagagggaacauuaua

SEQ ID NO: 1993024 - RNA, 19 nt, Homo sapiens
  misc_RNA (1)...(19): siRNA sense strand
gaagagaaguggugacaca

SEQ ID NO: 1993025 - RNA, 19 nt, Homo sapiens
  misc_RNA (1)...(19): siRNA sense strand
cuacagaaccugcaaagua

SEQ ID NO: 1993026 - RNA, 19 nt, Homo sapiens
  misc_RNA (1)...(19): siRNA sense strand
gagggaacauuauaagcuu

SEQ ID NO: 1993027 - RNA, 19 nt, Homo sapiens
  misc_RNA (1)...(19): siRNA sense strand
caaugaagccacacuauau

SEQ ID NO: 1993028 - RNA, 19 nt, Homo sapiens
  misc_RNA (1)...(19): siRNA sense strand
gagaaagcccagaaagaaa

SEQ ID NO: 1993029 - RNA, 19 nt, Homo sapiens
  misc_RNA (1)...(19): siRNA sense strand
ggagagggcuacauuugag

SEQ ID NO: 1993030 - RNA, 19 nt, Homo sapiens
  misc_RNA (1)...(19): siRNA sense strand
gagaaguggugacacacaa

SEQ ID NO: 1993031 - RNA, 19 nt, Homo sapiens
  misc_RNA (1)...(19): siRNA sense strand
gagagaaagcccagaaaga

SEQ ID NO: 1993032 - RNA, 19 nt, Homo sapiens
  misc_RNA (1)...(19): siRNA sense strand
aagaacagagggaacauua

SEQ ID NO: 1993033 - RNA, 19 nt, Homo sapiens
  misc_RNA (1)...(19): siRNA sense strand
cagaacugcugcuacagaa

SEQ ID NO: 1993034 - RNA, 19 nt, Homo sapiens
  misc_RNA (1)...(19): siRNA sense strand
gggcuacauuugagaaguu

SEQ ID NO: 1993035 - RNA, 19 nt, Homo sapiens
  misc_RNA (1)...(19): siRNA sense strand
ggugcuauauuucaaggaa

SEQ ID NO: 1993036 - RNA, 19 nt, Homo sapiens
  misc_RNA (1)...(19): siRNA sense strand
ggauauuucagagaaguua

SEQ ID NO: 1993037 - RNA, 19 nt, Homo sapiens
  misc_RNA (1)...(19): siRNA sense strand
agagaaagcccagaaagaa

SEQ ID NO: 1993038 - RNA, 19 nt, Homo sapiens
  misc_RNA (1)...(19): siRNA sense strand
acaaugaagccacacuaua

SEQ ID NO: 1993039 - RNA, 19 nt, Homo sapiens
  misc_RNA (1)...(19): siRNA sense strand
uacagaaccugcaaaguag

SEQ ID NO: 1993040 - RNA, 19 nt, Homo sapiens
  misc_RNA (1)...(19): siRNA sense strand
caggagaucuuuccagcau

SEQ ID NO: 1993041 - RNA, 19 nt, Homo sapiens
  misc_RNA (1)...(19): siRNA sense strand
ggagagagaaagcccagaa

SEQ ID NO: 1993042 - RNA, 19 nt, Homo sapiens
  misc_RNA (1)...(19): siRNA sense strand
cuauggauauuucagagaa

SEQ ID NO: 1993043 - RNA, 19 nt, Homo sapiens
  misc_RNA (1)...(19): siRNA sense strand
gggagagggcuacauuuga

SEQ ID NO: 1993044 - RNA, 19 nt, Homo sapiens
  misc_RNA (1)...(19): siRNA sense strand
ugucugcccuggacuuuga

SEQ ID NO: 1993045 - RNA, 19 nt, Homo sapiens
  misc_RNA (1)...(19): siRNA sense strand
uaaagcaacgucucaagga

SEQ ID NO: 1993046 - RNA, 19 nt, Homo sapiens
  misc_RNA (1)...(19): siRNA sense strand
aaugaagccacacuauaua

SEQ ID NO: 1993047 - RNA, 19 nt, Homo sapiens
  misc_RNA (1)...(19): siRNA sense strand
gagagagaaagcccagaaa

SEQ ID NO: 1993048 - RNA, 19 nt, Homo sapiens
  misc_RNA (1)...(19): siRNA sense strand
gcgucgaucucccuguuug

SEQ ID NO: 1993049 - RNA, 19 nt, Homo sapiens
  misc_RNA (1)...(19): siRNA sense strand
gcagacccaccuuccaaga

SEQ ID NO: 1993050 - RNA, 19 nt, Homo sapiens
  misc_RNA (1)...(19): siRNA sense strand
cagcaucucgggaucagaa

SEQ ID NO: 1993051 - RNA, 19 nt, Homo sapiens
  misc_RNA (1)...(19): siRNA sense strand
ggcugcagcugggcacuuu

SEQ ID NO: 1993052 - RNA, 19 nt, Homo sapiens
  misc_RNA (1)...(19): siRNA sense strand
gaagccacacuauauaagg

SEQ ID NO: 1993053 - RNA, 19 nt, Homo sapiens
  misc_RNA (1)...(19): siRNA sense strand
cuacagcgugugcuccaua

SEQ ID NO: 1993054 - RNA, 19 nt, Homo sapiens
  misc_RNA (1)...(19): siRNA sense strand
ccuaggcccucaucaggau

SEQ ID NO: 1993055 - RNA, 19 nt, Homo sapiens
  misc_RNA (1)...(19): siRNA sense strand
uacagcgugugcuccauaa

SEQ ID NO: 1993056 - RNA, 19 nt, Homo sapiens
  misc_RNA (1)...(19): siRNA sense strand
caagaacagagggaacauu

SEQ ID NO: 1993057 - RNA, 19 nt, Homo sapiens
  misc_RNA (1)...(19): siRNA sense strand
uggccggucuuuguucuuu

SEQ ID NO: 1993058 - RNA, 19 nt, Homo sapiens
  misc_RNA (1)...(19): siRNA sense strand
aagccacacuauauaagga

SEQ ID NO: 1993059 - RNA, 19 nt, Homo sapiens
  misc_RNA (1)...(19): siRNA sense strand
gggaacauuauaagcuuga

SEQ ID NO: 1993060 - RNA, 19 nt, Homo sapiens
  misc_RNA (1)...(19): siRNA sense strand
cgggagagggcuacauuug

SEQ ID NO: 1993061 - RNA, 19 nt, Homo sapiens
  misc_RNA (1)...(19): siRNA sense strand
gcucuggccggucuuuguu

SEQ ID NO: 1993062 - RNA, 19 nt, Homo sapiens
  misc_RNA (1)...(19): siRNA sense strand
ggaggcugguacaauacug

SEQ ID NO: 1993063 - RNA, 19 nt, Homo sapiens
  misc_RNA (1)...(19): siRNA sense strand
caacuugugaccagaccuu

SEQ ID NO: 1993064 - RNA, 19 nt, Homo sapiens
  misc_RNA (1)...(19): siRNA sense strand
cuacaaugaagccacacua

SEQ ID NO: 1993065 - RNA, 19 nt, Homo sapiens
  misc_RNA (1)...(19): siRNA sense strand
ccaggguccuauggauauu

SEQ ID NO: 1993066 - RNA, 19 nt, Homo sapiens
  misc_RNA (1)...(19): siRNA sense strand
agaaagcccagaaagaaag

SEQ ID NO: 1993067 - RNA, 19 nt, Homo sapiens
  misc_RNA (1)...(19): siRNA sense strand
cagggccaguuucuuuaug

SEQ ID NO: 1993068 - RNA, 19 nt, Homo sapiens
  misc_RNA (1)...(19): siRNA sense strand
cagagaaguuauuuuguuc

SEQ ID NO: 1993069 - RNA, 19 nt, Homo sapiens
  misc_RNA (1)...(19): siRNA sense strand
cccagggccaguuucuuua

SEQ ID NO: 1993070 - RNA, 19 nt, Homo sapiens
  misc_RNA (1)...(19): siRNA sense strand
gagagggcuacauuugaga

SEQ ID NO: 1993071 - RNA, 19 nt, Homo sapiens
  misc_RNA (1)...(19): siRNA sense strand
cugaggcgcuacaaugaag

SEQ ID NO: 1993072 - RNA, 19 nt, Homo sapiens
  misc_RNA (1)...(19): siRNA sense strand
aacagagggaacauuauaa

SEQ ID NO: 1993073 - RNA, 19 nt, Homo sapiens
  misc_RNA (1)...(19): siRNA sense strand
ccgcagacccaccuuccaa

SEQ ID NO: 1993074 - RNA, 19 nt, Homo sapiens
  misc_RNA (1)...(19): siRNA sense strand
cugcgucgaucucccuguu

SEQ ID NO: 1993075 - RNA, 19 nt, Homo sapiens
  misc_RNA (1)...(19): siRNA sense strand
gaaguggugacacacaaaa

SEQ ID NO: 1993076 - RNA, 19 nt, Homo sapiens
  misc_RNA (1)...(19): siRNA sense strand
ccagggccaguuucuuuau

SEQ ID NO: 1993077 - RNA, 19 nt, Homo sapiens
  misc_RNA (1)...(19): siRNA sense strand
ugcuauauuucaaggaaga

SEQ ID NO: 1993078 - RNA, 19 nt, Homo sapiens
  misc_RNA (1)...(19): siRNA sense strand
augaagccacacuauauaa

SEQ ID NO: 1993079 - RNA, 19 nt, Homo sapiens
  misc_RNA (1)...(19): siRNA sense strand
ggacuugcagacacuggau

SEQ ID NO: 1993080 - RNA, 19 nt, Homo sapiens
  misc_RNA (1)...(19): siRNA sense strand
cuuugcuggugcuauauuu

SEQ ID NO: 1993081 - RNA, 19 nt, Homo sapiens
  misc_RNA (1)...(19): siRNA sense strand
gagacugcguggugcucau

SEQ ID NO: 1993082 - RNA, 19 nt, Homo sapiens
  misc_RNA (1)...(19): siRNA sense strand
gugaccagaccuuccagaa

SEQ ID NO: 1993083 - RNA, 19 nt, Homo sapiens
  misc_RNA (1)...(19): siRNA sense strand
cacacuauauaaggauguu

SEQ ID NO: 1993084 - RNA, 19 nt, Homo sapiens
  misc_RNA (1)...(19): siRNA sense strand
aaccugaggcgcuacaaug

SEQ ID NO: 1993085 - RNA, 19 nt, Homo sapiens
  misc_RNA (1)...(19): siRNA sense strand
caaccugaggcgcuacaau

SEQ ID NO: 1993086 - RNA, 19 nt, Homo sapiens
  misc_RNA (1)...(19): siRNA sense strand
ggcuacauuugagaaguug

SEQ ID NO: 1993087 - RNA, 19 nt, Homo sapiens
  misc_RNA (1)...(19): siRNA sense strand
ggagagaggaggacaauuu

SEQ ID NO: 1993088 - RNA, 19 nt, Homo sapiens
  misc_RNA (1)...(19): siRNA sense strand
ggaagaagcugcagcaaac

SEQ ID NO: 1993089 - RNA, 19 nt, Homo sapiens
  misc_RNA (1)...(19): siRNA sense strand
gcaaacaaguuccggauca

SEQ ID NO: 1993090 - RNA, 19 nt, Homo sapiens
  misc_RNA (1)...(19): siRNA sense strand
ccaaguaccuccugaccaa

SEQ ID NO: 1993091 - RNA, 19 nt, Homo sapiens
  misc_RNA (1)...(19): siRNA sense strand
gaagaggaccauucacuug

SEQ ID NO: 1993092 - RNA, 19 nt, Homo sapiens
  misc_RNA (1)...(19): siRNA sense strand
ggacagcgaguuuccauga

SEQ ID NO: 1993093 - RNA, 19 nt, Homo sapiens
  misc_RNA (1)...(19): siRNA sense strand
uggagaagcuggugaucua

SEQ ID NO: 1993094 - RNA, 19 nt, Homo sapiens
  misc_RNA (1)...(19): siRNA sense strand
caaggaggcuggugacuac

SEQ ID NO: 1993095 - RNA, 19 nt, Homo sapiens
  misc_RNA (1)...(19): siRNA sense strand
uggagaagcugaauaucuu

SEQ ID NO: 1993096 - RNA, 19 nt, Homo sapiens
  misc_RNA (1)...(19): siRNA sense strand
ggaaauaagaaccagcaaa

SEQ ID NO: 1993097 - RNA, 19 nt, Homo sapiens
  misc_RNA (1)...(19): siRNA sense strand
gauacaaacuggugauggu

SEQ ID NO: 1993098 - RNA, 19 nt, Homo sapiens
  misc_RNA (1)...(19): siRNA sense strand
ccagggaacacuaaaguuu

SEQ ID NO: 1993099 - RNA, 19 nt, Homo sapiens
  misc_RNA (1)...(19): siRNA sense strand
gaaauaagaaccagcaaaa

SEQ ID NO: 1993100 - RNA, 19 nt, Homo sapiens
  misc_RNA (1)...(19): siRNA sense strand
gaagaauaaguacugcuuu

SEQ ID NO: 1993101 - RNA, 19 nt, Homo sapiens
  misc_RNA (1)...(19): siRNA sense strand
caacaccaaucagacugua

SEQ ID NO: 1993102 - RNA, 19 nt, Homo sapiens
  misc_RNA (1)...(19): siRNA sense strand
gcaggcagaggacagauuu

SEQ ID NO: 1993103 - RNA, 19 nt, Homo sapiens
  misc_RNA (1)...(19): siRNA sense strand
ugacagacacugccauuga

SEQ ID NO: 1993104 - RNA, 19 nt, Homo sapiens
  misc_RNA (1)...(19): siRNA sense strand
caaaguguaucacgugucu

SEQ ID NO: 1993105 - RNA, 19 nt, Homo sapiens
  misc_RNA (1)...(19): siRNA sense strand
ggaagaggaccauucacuu

SEQ ID NO: 1993106 - RNA, 19 nt, Homo sapiens
  misc_RNA (1)...(19): siRNA sense strand
gacggaaacuaccaaagug

SEQ ID NO: 1993107 - RNA, 19 nt, Homo sapiens
  misc_RNA (1)...(19): siRNA sense strand
ccaacaacaucgugacugu

SEQ ID NO: 1993108 - RNA, 19 nt, Homo sapiens
  misc_RNA (1)...(19): siRNA sense strand
gaggaugaaaccacaagua

SEQ ID NO: 1993109 - RNA, 19 nt, Homo sapiens
  misc_RNA (1)...(19): siRNA sense strand
ggaagaauaaguacugcuu

SEQ ID NO: 1993110 - RNA, 19 nt, Homo sapiens
  misc_RNA (1)...(19): siRNA sense strand
gauaaucccaccucuguuc

SEQ ID NO: 1993111 - RNA, 19 nt, Homo sapiens
  misc_RNA (1)...(19): siRNA sense strand
gacagacacugccauugau

SEQ ID NO: 1993112 - RNA, 19 nt, Homo sapiens
  misc_RNA (1)...(19): siRNA sense strand
aagaauaaguacugcuuug

SEQ ID NO: 1993113 - RNA, 19 nt, Homo sapiens
  misc_RNA (1)...(19): siRNA sense strand
uaaacccucucccuaaauc

SEQ ID NO: 1993114 - RNA, 19 nt, Homo sapiens
  misc_RNA (1)...(19): siRNA sense strand
ccagugaaguccaacaaca

SEQ ID NO: 1993115 - RNA, 19 nt, Homo sapiens
  misc_RNA (1)...(19): siRNA sense strand
ggaggagugugcugcuuuc

SEQ ID NO: 1993116 - RNA, 19 nt, Homo sapiens
  misc_RNA (1)...(19): siRNA sense strand
cauuaaacccucucccuaa

SEQ ID NO: 1993117 - RNA, 19 nt, Homo sapiens
  misc_RNA (1)...(19): siRNA sense strand
gaguuugccuucuaugaca

SEQ ID NO: 1993118 - RNA, 19 nt, Homo sapiens
  misc_RNA (1)...(19): siRNA sense strand
ggaauggccugucuuucac

SEQ ID NO: 1993119 - RNA, 19 nt, Homo sapiens
  misc_RNA (1)...(19): siRNA sense strand
gagagagccaggccaugua

SEQ ID NO: 1993120 - RNA, 19 nt, Homo sapiens
  misc_RNA (1)...(19): siRNA sense strand
ggaaacuaccaaaguguau

SEQ ID NO: 1993121 - RNA, 19 nt, Homo sapiens
  misc_RNA (1)...(19): siRNA sense strand
cacaaugacuccagaagca

SEQ ID NO: 1993122 - RNA, 19 nt, Homo sapiens
  misc_RNA (1)...(19): siRNA sense strand
acaagagugucucaaggaa

SEQ ID NO: 1993123 - RNA, 19 nt, Homo sapiens
  misc_RNA (1)...(19): siRNA sense strand
gaggagugcaugcuaauuc

SEQ ID NO: 1993124 - RNA, 19 nt, Homo sapiens
  misc_RNA (1)...(19): siRNA sense strand
caaacaaguuccggaucaa

SEQ ID NO: 1993125 - RNA, 19 nt, Homo sapiens
  misc_RNA (1)...(19): siRNA sense strand
gacuacugguucacaauga

SEQ ID NO: 1993126 - RNA, 19 nt, Homo sapiens
  misc_RNA (1)...(19): siRNA sense strand
gguacucugugacuauguu

SEQ ID NO: 1993127 - RNA, 19 nt, Homo sapiens
  misc_RNA (1)...(19): siRNA sense strand
agaaaggucugacggaaac

SEQ ID NO: 1993128 - RNA, 19 nt, Homo sapiens
  misc_RNA (1)...(19): siRNA sense strand
gcaguuaaaggagaugaaa

SEQ ID NO: 1993129 - RNA, 19 nt, Homo sapiens
  misc_RNA (1)...(19): siRNA sense strand
gguauauccuugugcuugu

SEQ ID NO: 1993130 - RNA, 19 nt, Homo sapiens
  misc_RNA (1)...(19): siRNA sense strand
cugaauaucuucucuugag

SEQ ID NO: 1993131 - RNA, 19 nt, Homo sapiens
  misc_RNA (1)...(19): siRNA sense strand
ucagagaaauacagaaacu

SEQ ID NO: 1993132 - RNA, 19 nt, Homo sapiens
  misc_RNA (1)...(19): siRNA sense strand
gcaugcuaauucagagaaa

SEQ ID NO: 1993133 - RNA, 19 nt, Homo sapiens
  misc_RNA (1)...(19): siRNA sense strand
ggucaaaugaagaggauga

SEQ ID NO: 1993134 - RNA, 19 nt, Homo sapiens
  misc_RNA (1)...(19): siRNA sense strand
cacguugacuugaauagga

SEQ ID NO: 1993135 - RNA, 19 nt, Homo sapiens
  misc_RNA (1)...(19): siRNA sense strand
caagugggccuauuuacca

SEQ ID NO: 1993136 - RNA, 19 nt, Homo sapiens
  misc_RNA (1)...(19): siRNA sense strand
caaccacugugcccguuuc

SEQ ID NO: 1993137 - RNA, 19 nt, Homo sapiens
  misc_RNA (1)...(19): siRNA sense strand
gacagcgaguuuccaugaa

SEQ ID NO: 1993138 - RNA, 19 nt, Homo sapiens
  misc_RNA (1)...(19): siRNA sense strand
gccaggccauguagcacua

SEQ ID NO: 1993139 - RNA, 19 nt, Homo sapiens
  misc_RNA (1)...(19): siRNA sense strand
guccaacgcccagaagaua

SEQ ID NO: 1993140 - RNA, 19 nt, Homo sapiens
  misc_RNA (1)...(19): siRNA sense strand
aaggaggagugcaugcuaa

SEQ ID NO: 1993141 - RNA, 19 nt, Homo sapiens
  misc_RNA (1)...(19): siRNA sense strand
aaaccaauguugaaagacu

SEQ ID NO: 1993142 - RNA, 19 nt, Homo sapiens
  misc_RNA (1)...(19): siRNA sense strand
gcccagaaauuuggauaca

SEQ ID NO: 1993143 - RNA, 19 nt, Homo sapiens
  misc_RNA (1)...(19): siRNA sense strand
gcaagaagaaauucaagac

SEQ ID NO: 1993144 - RNA, 19 nt, Homo sapiens
  misc_RNA (1)...(19): siRNA sense strand
agagaaauacagaaacuug

SEQ ID NO: 1993145 - RNA, 19 nt, Homo sapiens
  misc_RNA (1)...(19): siRNA sense strand
ccagcgcucccuuagauuu

SEQ ID NO: 1993146 - RNA, 19 nt, Homo sapiens
  misc_RNA (1)...(19): siRNA sense strand
ccaaucagacuguaacuac

SEQ ID NO: 1993147 - RNA, 19 nt, Homo sapiens
  misc_RNA (1)...(19): siRNA sense strand
auuaaacccucucccuaaa

SEQ ID NO: 1993148 - RNA, 19 nt, Homo sapiens
  misc_RNA (1)...(19): siRNA sense strand
ucaggccaguugugccaua

SEQ ID NO: 1993149 - RNA, 19 nt, Homo sapiens
  misc_RNA (1)...(19): siRNA sense strand
ugacggaaacuaccaaagu

SEQ ID NO: 1993150 - RNA, 19 nt, Homo sapiens
  misc_RNA (1)...(19): siRNA sense strand
agggaacacuaaaguuuga

SEQ ID NO: 1993151 - RNA, 19 nt, Homo sapiens
  misc_RNA (1)...(19): siRNA sense strand
gguggaauggccugucuuu

SEQ ID NO: 1993152 - RNA, 19 nt, Homo sapiens
  misc_RNA (1)...(19): siRNA sense strand
gaacccgugguccauuaaa

SEQ ID NO: 1993153 - RNA, 19 nt, Homo sapiens
  misc_RNA (1)...(19): siRNA sense strand
ggaaagcccggaagaagcu

SEQ ID NO: 1993154 - RNA, 19 nt, Homo sapiens
  misc_RNA (1)...(19): siRNA sense strand
uggaauggccugucuuuca

SEQ ID NO: 1993155 - RNA, 19 nt, Homo sapiens
  misc_RNA (1)...(19): siRNA sense strand
gacuguaacuaccaaguac

SEQ ID NO: 1993156 - RNA, 19 nt, Homo sapiens
  misc_RNA (1)...(19): siRNA sense strand
ggaucaccaggcaggauua

SEQ ID NO: 1993157 - RNA, 19 nt, Homo sapiens
  misc_RNA (1)...(19): siRNA sense strand
caagaagaaauucaagaca

SEQ ID NO: 1993158 - RNA, 19 nt, Homo sapiens
  misc_RNA (1)...(19): siRNA sense strand
ucaaggaggcuggugacua

SEQ ID NO: 1993159 - RNA, 19 nt, Homo sapiens
  misc_RNA (1)...(19): siRNA sense strand
agacuguaacuaccaagua

SEQ ID NO: 1993160 - RNA, 19 nt, Homo sapiens
  misc_RNA (1)...(19): siRNA sense strand
caaaugaagaggaugaaac

SEQ ID NO: 1993161 - RNA, 19 nt, Homo sapiens
  misc_RNA (1)...(19): siRNA sense strand
cggaagaagcugcagcaaa

SEQ ID NO: 1993162 - RNA, 19 nt, Homo sapiens
  misc_RNA (1)...(19): siRNA sense strand
aagauaaucccaccucugu

SEQ ID NO: 1993163 - RNA, 19 nt, Homo sapiens
  misc_RNA (1)...(19): siRNA sense strand
gacacaggcaucccucuga

SEQ ID NO: 1993164 - RNA, 19 nt, Homo sapiens
  misc_RNA (1)...(19): siRNA sense strand
ucacugguauauccuugug

SEQ ID NO: 1993165 - RNA, 19 nt, Homo sapiens
  misc_RNA (1)...(19): siRNA sense strand
gcuggugacuacugguuca

SEQ ID NO: 1993166 - RNA, 19 nt, Homo sapiens
  misc_RNA (1)...(19): siRNA sense strand
uuugagugcuucuauuuca

SEQ ID NO: 1993167 - RNA, 19 nt, Homo sapiens
  misc_RNA (1)...(19): siRNA sense strand
cggaaacuaccaaagugua

SEQ ID NO: 1993168 - RNA, 19 nt, Homo sapiens
  misc_RNA (1)...(19): siRNA sense strand
ggaacccgugguccauuaa

SEQ ID NO: 1993169 - RNA, 19 nt, Homo sapiens
  misc_RNA (1)...(19): siRNA sense strand
gaggcaagaagaaauucaa

SEQ ID NO: 1993170 - RNA, 19 nt, Homo sapiens
  misc_RNA (1)...(19): siRNA sense strand
gaugaaaccacaaguacac

SEQ ID NO: 1993171 - RNA, 19 nt, Homo sapiens
  misc_RNA (1)...(19): siRNA sense strand
ggaugaaaccacaaguaca

SEQ ID NO: 1993172 - RNA, 19 nt, Homo sapiens
  misc_RNA (1)...(19): siRNA sense strand
ccauggagccaguguagug

SEQ ID NO: 1993173 - RNA, 19 nt, Homo sapiens
  misc_RNA (1)...(19): siRNA sense strand
gaauaaguacugcuuugac

SEQ ID NO: 1993174 - RNA, 19 nt, Homo sapiens
  misc_RNA (1)...(19): siRNA sense strand
uaucuguccugcuguugga

SEQ ID NO: 1993175 - RNA, 19 nt, Homo sapiens
  misc_RNA (1)...(19): siRNA sense strand
cagggaacacuaaaguuug

SEQ ID NO: 1993176 - RNA, 19 nt, Homo sapiens
  misc_RNA (1)...(19): siRNA sense strand
gcgagagcuuccaguccaa

SEQ ID NO: 1993177 - RNA, 19 nt, Homo sapiens
  misc_RNA (1)...(19): siRNA sense strand
guauauccuugugcuuguu

SEQ ID NO: 1993178 - RNA, 19 nt, Homo sapiens
  misc_RNA (1)...(19): siRNA sense strand
ggaggagugcaugcuaauu

SEQ ID NO: 1993179 - RNA, 19 nt, Homo sapiens
  misc_RNA (1)...(19): siRNA sense strand
gcccuggaauguccuugga

SEQ ID NO: 1993180 - RNA, 19 nt, Homo sapiens
  misc_RNA (1)...(19): siRNA sense strand
ucaggaggacagcgaguuu

SEQ ID NO: 1993181 - RNA, 19 nt, Homo sapiens
  misc_RNA (1)...(19): siRNA sense strand
ucccaccucuguucagcua

SEQ ID NO: 1993182 - RNA, 19 nt, Homo sapiens
  misc_RNA (1)...(19): siRNA sense strand
aaacaaguuccggaucaaa

SEQ ID NO: 1993183 - RNA, 19 nt, Homo sapiens
  misc_RNA (1)...(19): siRNA sense strand
gaagaggaugaaaccacaa

SEQ ID NO: 1993184 - RNA, 19 nt, Homo sapiens
  misc_RNA (1)...(19): siRNA sense strand
gggaucaccaggcaggauu

SEQ ID NO: 1993185 - RNA, 19 nt, Homo sapiens
  misc_RNA (1)...(19): siRNA sense strand
aggagcauguccacucuga

SEQ ID NO: 1993186 - RNA, 19 nt, Homo sapiens
  misc_RNA (1)...(19): siRNA sense strand
caggcuggaucuaaaugug

SEQ ID NO: 1993187 - RNA, 19 nt, Homo sapiens
  misc_RNA (1)...(19): siRNA sense strand
gaauaaccuugaauccuuu

SEQ ID NO: 1993188 - RNA, 19 nt, Homo sapiens
  misc_RNA (1)...(19): siRNA sense strand
auacauggcuucaguagaa

SEQ ID NO: 1993189 - RNA, 19 nt, Homo sapiens
  misc_RNA (1)...(19): siRNA sense strand
ugaauaaccuugaauccuu

SEQ ID NO: 1993190 - RNA, 19 nt, Homo sapiens
  misc_RNA (1)...(19): siRNA sense strand
gaaagaaaucgauaaguuc

SEQ ID NO: 1993191 - RNA, 19 nt, Homo sapiens
  misc_RNA (1)...(19): siRNA sense strand
gguagcaauugugguauua

SEQ ID NO: 1993192 - RNA, 19 nt, Homo sapiens
  misc_RNA (1)...(19): siRNA sense strand
gcaaaucaagcuuuccuuu

SEQ ID NO: 1993193 - RNA, 19 nt, Homo sapiens
  misc_RNA (1)...(19): siRNA sense strand
gcugauggcuucguucuug

SEQ ID NO: 1993194 - RNA, 19 nt, Homo sapiens
  misc_RNA (1)...(19): siRNA sense strand
gcgaaacaauggaagaugu

SEQ ID NO: 1993195 - RNA, 19 nt, Homo sapiens
  misc_RNA (1)...(19): siRNA sense strand
caccagaggucuacaggaa

SEQ ID NO: 1993196 - RNA, 19 nt, Homo sapiens
  misc_RNA (1)...(19): siRNA sense strand
gaaacagaccgaggaguaa

SEQ ID NO: 1993197 - RNA, 19 nt, Homo sapiens
  misc_RNA (1)...(19): siRNA sense strand
gaagaaagaaaucgauaag

SEQ ID NO: 1993198 - RNA, 19 nt, Homo sapiens
  misc_RNA (1)...(19): siRNA sense strand
aaagggaacucuaauucug

SEQ ID NO: 1993199 - RNA, 19 nt, Homo sapiens
  misc_RNA (1)...(19): siRNA sense strand
gaacaguuacaucuuuaug

SEQ ID NO: 1993200 - RNA, 19 nt, Homo sapiens
  misc_RNA (1)...(19): siRNA sense strand
ggaaaucauacuauuggaa

SEQ ID NO: 1993201 - RNA, 19 nt, Homo sapiens
  misc_RNA (1)...(19): siRNA sense strand
agaaacagaccgaggagua

SEQ ID NO: 1993202 - RNA, 19 nt, Homo sapiens
  misc_RNA (1)...(19): siRNA sense strand
gcaauugugguauuaggaa

SEQ ID NO: 1993203 - RNA, 19 nt, Homo sapiens
  misc_RNA (1)...(19): siRNA sense strand
gcugcaagguugugguuug

SEQ ID NO: 1993204 - RNA, 19 nt, Homo sapiens
  misc_RNA (1)...(19): siRNA sense strand
aauggaagauugcgaaaca

SEQ ID NO: 1993205 - RNA, 19 nt, Homo sapiens
  misc_RNA (1)...(19): siRNA sense strand
gcguggagcugccaaagca

SEQ ID NO: 1993206 - RNA, 19 nt, Homo sapiens
  misc_RNA (1)...(19): siRNA sense strand
aaacucugauugaaccauu

SEQ ID NO: 1993207 - RNA, 19 nt, Homo sapiens
  misc_RNA (1)...(19): siRNA sense strand
gggaaagggcugcaagguu

SEQ ID NO: 1993208 - RNA, 19 nt, Homo sapiens
  misc_RNA (1)...(19): siRNA sense strand
gaaccauucacuuuauuag

SEQ ID NO: 1993209 - RNA, 19 nt, Homo sapiens
  misc_RNA (1)...(19): siRNA sense strand
cgaaacaauggaagaugua

SEQ ID NO: 1993210 - RNA, 19 nt, Homo sapiens
  misc_RNA (1)...(19): siRNA sense strand
acaaagggaacucuaauuc

SEQ ID NO: 1993211 - RNA, 19 nt, Homo sapiens
  misc_RNA (1)...(19): siRNA sense strand
ucgauaaguucaaagacaa

SEQ ID NO: 1993212 - RNA, 19 nt, Homo sapiens
  misc_RNA (1)...(19): siRNA sense strand
gcagcuccuuuauggaaau

SEQ ID NO: 1993213 - RNA, 19 nt, Homo sapiens
  misc_RNA (1)...(19): siRNA sense strand
caauugugguauuaggaaa

SEQ ID NO: 1993214 - RNA, 19 nt, Homo sapiens
  misc_RNA (1)...(19): siRNA sense strand
guucuuguguacaguguga

SEQ ID NO: 1993215 - RNA, 19 nt, Homo sapiens
  misc_RNA (1)...(19): siRNA sense strand
gguugugguuuguggauug

SEQ ID NO: 1993216 - RNA, 19 nt, Homo sapiens
  misc_RNA (1)...(19): siRNA sense strand
aaaucaagcuuuccuuugc

SEQ ID NO: 1993217 - RNA, 19 nt, Homo sapiens
  misc_RNA (1)...(19): siRNA sense strand
cagagcaaaucaagcuuuc

SEQ ID NO: 1993218 - RNA, 19 nt, Homo sapiens
  misc_RNA (1)...(19): siRNA sense strand
ugugguuuguggauuguua

SEQ ID NO: 1993219 - RNA, 19 nt, Homo sapiens
  misc_RNA (1)...(19): siRNA sense strand
ucacuuuauuagccaguaa

SEQ ID NO: 1993220 - RNA, 19 nt, Homo sapiens
  misc_RNA (1)...(19): siRNA sense strand
agagguagcaauuguggua

SEQ ID NO: 1993221 - RNA, 19 nt, Homo sapiens
  misc_RNA (1)...(19): siRNA sense strand
cuauuggaauggaagauug

SEQ ID NO: 1993222 - RNA, 19 nt, Homo sapiens
  misc_RNA (1)...(19): siRNA sense strand
gaaacaauggaagauguau

SEQ ID NO: 1993223 - RNA, 19 nt, Homo sapiens
  misc_RNA (1)...(19): siRNA sense strand
aaacaaagggaacucuaau

SEQ ID NO: 1993224 - RNA, 19 nt, Homo sapiens
  misc_RNA (1)...(19): siRNA sense strand
ggaauggaagauugcgaaa

SEQ ID NO: 1993225 - RNA, 19 nt, Homo sapiens
  misc_RNA (1)...(19): siRNA sense strand
caaagggaacucuaauucu

SEQ ID NO: 1993226 - RNA, 19 nt, Homo sapiens
  misc_RNA (1)...(19): siRNA sense strand
ccagagcaaaucaagcuuu

SEQ ID NO: 1993227 - RNA, 19 nt, Homo sapiens
  misc_RNA (1)...(19): siRNA sense strand
caaagaguggagcuucuga

SEQ ID NO: 1993228 - RNA, 19 nt, Homo sapiens
  misc_RNA (1)...(19): siRNA sense strand
aaacagaccgaggaguaaa

SEQ ID NO: 1993229 - RNA, 19 nt, Homo sapiens
  misc_RNA (1)...(19): siRNA sense strand
gagcugccaaagcauuauu

SEQ ID NO: 1993230 - RNA, 19 nt, Homo sapiens
  misc_RNA (1)...(19): siRNA sense strand
gaaagggcugcaagguugu

SEQ ID NO: 1993231 - RNA, 19 nt, Homo sapiens
  misc_RNA (1)...(19): siRNA sense strand
acaaguggacgcugaagug

SEQ ID NO: 1993232 - RNA, 19 nt, Homo sapiens
  misc_RNA (1)...(19): siRNA sense strand
acaguuacaucuuuaugac

SEQ ID NO: 1993233 - RNA, 19 nt, Homo sapiens
  misc_RNA (1)...(19): siRNA sense strand
cugaagaaagaaaucgaua

SEQ ID NO: 1993234 - RNA, 19 nt, Homo sapiens
  misc_RNA (1)...(19): siRNA sense strand
uggcuucaguagaaacaga

SEQ ID NO: 1993235 - RNA, 19 nt, Homo sapiens
  misc_RNA (1)...(19): siRNA sense strand
gagacaaguggacgcugaa

SEQ ID NO: 1993236 - RNA, 19 nt, Homo sapiens
  misc_RNA (1)...(19): siRNA sense strand
guuuguggauuguuaucug

SEQ ID NO: 1993237 - RNA, 19 nt, Homo sapiens
  misc_RNA (1)...(19): siRNA sense strand
uggagcugccaaagcauua

SEQ ID NO: 1993238 - RNA, 19 nt, Homo sapiens
  misc_RNA (1)...(19): siRNA sense strand
uagcaauugugguauuagg

SEQ ID NO: 1993239 - RNA, 19 nt, Homo sapiens
  misc_RNA (1)...(19): siRNA sense strand
cgauaaguucaaagacaaa

SEQ ID NO: 1993240 - RNA, 19 nt, Homo sapiens
  misc_RNA (1)...(19): siRNA sense strand
cagugugaauaaccuugaa

SEQ ID NO: 1993241 - RNA, 19 nt, Homo sapiens
  misc_RNA (1)...(19): siRNA sense strand
guauacauggcuucaguag

SEQ ID NO: 1993242 - RNA, 19 nt, Homo sapiens
  misc_RNA (1)...(19): siRNA sense strand
aacaaagggaacucuaauu

SEQ ID NO: 1993243 - RNA, 19 nt, Homo sapiens
  misc_RNA (1)...(19): siRNA sense strand
gaucggaaaacucugauug

SEQ ID NO: 1993244 - RNA, 19 nt, Homo sapiens
  misc_RNA (1)...(19): siRNA sense strand
ugugggaggugacuguuac

SEQ ID NO: 1993245 - RNA, 19 nt, Homo sapiens
  misc_RNA (1)...(19): siRNA sense strand
gagcaaaucaagcuuuccu

SEQ ID NO: 1993246 - RNA, 19 nt, Homo sapiens
  misc_RNA (1)...(19): siRNA sense strand
uggcuucguucuuguguac

SEQ ID NO: 1993247 - RNA, 19 nt, Homo sapiens
  misc_RNA (1)...(19): siRNA sense strand
aagggaacucuaauucuga

SEQ ID NO: 1993248 - RNA, 19 nt, Homo sapiens
  misc_RNA (1)...(19): siRNA sense strand
gaaaucgauaaguucaaag

SEQ ID NO: 1993249 - RNA, 19 nt, Homo sapiens
  misc_RNA (1)...(19): siRNA sense strand
guggagcugccaaagcauu

SEQ ID NO: 1993250 - RNA, 19 nt, Homo sapiens
  misc_RNA (1)...(19): siRNA sense strand
gccaguaaacuuucucaac

SEQ ID NO: 1993251 - RNA, 19 nt, Homo sapiens
  misc_RNA (1)...(19): siRNA sense strand
ggaaacaaaaucgaccuuu

SEQ ID NO: 1993252 - RNA, 19 nt, Homo sapiens
  misc_RNA (1)...(19): siRNA sense strand
agguagcaauugugguauu

SEQ ID NO: 1993253 - RNA, 19 nt, Homo sapiens
  misc_RNA (1)...(19): siRNA sense strand
gggcugcaagguugugguu

SEQ ID NO: 1993254 - RNA, 19 nt, Homo sapiens
  misc_RNA (1)...(19): siRNA sense strand
uggaaaucauacuauugga

SEQ ID NO: 1993255 - RNA, 19 nt, Homo sapiens
  misc_RNA (1)...(19): siRNA sense strand
gaaagaagaugaagccauu

SEQ ID NO: 1993256 - RNA, 19 nt, Homo sapiens
  misc_RNA (1)...(19): siRNA sense strand
gaacagcugucuggaauaa

SEQ ID NO: 1993257 - RNA, 19 nt, Homo sapiens
  misc_RNA (1)...(19): siRNA sense strand
caagaagccucuccuaauu

SEQ ID NO: 1993258 - RNA, 19 nt, Homo sapiens
  misc_RNA (1)...(19): siRNA sense strand
ccacaaaguugagaaauuu

SEQ ID NO: 1993259 - RNA, 19 nt, Homo sapiens
  misc_RNA (1)...(19): siRNA sense strand
gcugaaagauugucuaaga

SEQ ID NO: 1993260 - RNA, 19 nt, Homo sapiens
  misc_RNA (1)...(19): siRNA sense strand
gacauuagcugaugaagau

SEQ ID NO: 1993261 - RNA, 19 nt, Homo sapiens
  misc_RNA (1)...(19): siRNA sense strand
gagaugaggucacugcaaa

SEQ ID NO: 1993262 - RNA, 19 nt, Homo sapiens
  misc_RNA (1)...(19): siRNA sense strand
gaaauucgagagcaucuua

SEQ ID NO: 1993263 - RNA, 19 nt, Homo sapiens
  misc_RNA (1)...(19): siRNA sense strand
ggugucagaugcagauuua

SEQ ID NO: 1993264 - RNA, 19 nt, Homo sapiens
  misc_RNA (1)...(19): siRNA sense strand
gaaagaagucuauguugaa

SEQ ID NO: 1993265 - RNA, 19 nt, Homo sapiens
  misc_RNA (1)...(19): siRNA sense strand
gaauaaggaugauuagaca

SEQ ID NO: 1993266 - RNA, 19 nt, Homo sapiens
  misc_RNA (1)...(19): siRNA sense strand
aagaauaaguccaagguua

SEQ ID NO: 1993267 - RNA, 19 nt, Homo sapiens
  misc_RNA (1)...(19): siRNA sense strand
gagaacaaguugauauaga

SEQ ID NO: 1993268 - RNA, 19 nt, Homo sapiens
  misc_RNA (1)...(19): siRNA sense strand
gaggaugaguccauaauug

SEQ ID NO: 1993269 - RNA, 19 nt, Homo sapiens
  misc_RNA (1)...(19): siRNA sense strand
gggcugagauagagaauga

SEQ ID NO: 1993270 - RNA, 19 nt, Homo sapiens
  misc_RNA (1)...(19): siRNA sense strand
gaagcagugucagaauuua

SEQ ID NO: 1993271 - RNA, 19 nt, Homo sapiens
  misc_RNA (1)...(19): siRNA sense strand
guacagagccugagaguuc

SEQ ID NO: 1993272 - RNA, 19 nt, Homo sapiens
  misc_RNA (1)...(19): siRNA sense strand
gaacaggucauuauugguu

SEQ ID NO: 1993273 - RNA, 19 nt, Homo sapiens
  misc_RNA (1)...(19): siRNA sense strand
uaacaggacugacaaugga

SEQ ID NO: 1993274 - RNA, 19 nt, Homo sapiens
  misc_RNA (1)...(19): siRNA sense strand
gcgagaagcuugcauugau

SEQ ID NO: 1993275 - RNA, 19 nt, Homo sapiens
  misc_RNA (1)...(19): siRNA sense strand
gguguugucucacuuauug

SEQ ID NO: 1993276 - RNA, 19 nt, Homo sapiens
  misc_RNA (1)...(19): siRNA sense strand
agaaagaagucuauguuga

SEQ ID NO: 1993277 - RNA, 19 nt, Homo sapiens
  misc_RNA (1)...(19): siRNA sense strand
acacacugguugccaauua

SEQ ID NO: 1993278 - RNA, 19 nt, Homo sapiens
  misc_RNA (1)...(19): siRNA sense strand
gugaagaggucaaccaaga

SEQ ID NO: 1993279 - RNA, 19 nt, Homo sapiens
  misc_RNA (1)...(19): siRNA sense strand
gaauuuauaggccucuuua

SEQ ID NO: 1993280 - RNA, 19 nt, Homo sapiens
  misc_RNA (1)...(19): siRNA sense strand
ggaggaaguuggaagucua

SEQ ID NO: 1993281 - RNA, 19 nt, Homo sapiens
  misc_RNA (1)...(19): siRNA sense strand
gaggaaacccuugcuuaua

SEQ ID NO: 1993282 - RNA, 19 nt, Homo sapiens
  misc_RNA (1)...(19): siRNA sense strand
caaaggaggagaccaauau

SEQ ID NO: 1993283 - RNA, 19 nt, Homo sapiens
  misc_RNA (1)...(19): siRNA sense strand
gaaaagaccaguaugaaaa

SEQ ID NO: 1993284 - RNA, 19 nt, Homo sapiens
  misc_RNA (1)...(19): siRNA sense strand
gcuagcagcugagaaagaa

SEQ ID NO: 1993285 - RNA, 19 nt, Homo sapiens
  misc_RNA (1)...(19): siRNA sense strand
gaggagaccauaaucaauu

SEQ ID NO: 1993286 - RNA, 19 nt, Homo sapiens
  misc_RNA (1)...(19): siRNA sense strand
acugagagcuuuccuagaa

SEQ ID NO: 1993287 - RNA, 19 nt, Homo sapiens
  misc_RNA (1)...(19): siRNA sense strand
gaagagaccauuagaagag

SEQ ID NO: 1993288 - RNA, 19 nt, Homo sapiens
  misc_RNA (1)...(19): siRNA sense strand
caaggaagaggccaugaua

SEQ ID NO: 1993289 - RNA, 19 nt, Homo sapiens
  misc_RNA (1)...(19): siRNA sense strand
gaaacucccagaccaauau

SEQ ID NO: 1993290 - RNA, 19 nt, Homo sapiens
  misc_RNA (1)...(19): siRNA sense strand
gaggauagagaacugguua

SEQ ID NO: 1993291 - RNA, 19 nt, Homo sapiens
  misc_RNA (1)...(19): siRNA sense strand
gagaacugguuaauacaga

SEQ ID NO: 1993292 - RNA, 19 nt, Homo sapiens
  misc_RNA (1)...(19): siRNA sense strand
gaagagacaaaugacaaua

SEQ ID NO: 1993293 - RNA, 19 nt, Homo sapiens
  misc_RNA (1)...(19): siRNA sense strand
gcaggaccaugcuguguau

SEQ ID NO: 1993294 - RNA, 19 nt, Homo sapiens
  misc_RNA (1)...(19): siRNA sense strand
gacaaggucugaggaagaa

SEQ ID NO: 1993295 - RNA, 19 nt, Homo sapiens
  misc_RNA (1)...(19): siRNA sense strand
aauagcagguccagguuua

SEQ ID NO: 1993296 - RNA, 19 nt, Homo sapiens
  misc_RNA (1)...(19): siRNA sense strand
gaaauuugcuaaggaacug

SEQ ID NO: 1993297 - RNA, 19 nt, Homo sapiens
  misc_RNA (1)...(19): siRNA sense strand
cuacugaauuugucugaaa

SEQ ID NO: 1993298 - RNA, 19 nt, Homo sapiens
  misc_RNA (1)...(19): siRNA sense strand
gagaagagaccauuagaag

SEQ ID NO: 1993299 - RNA, 19 nt, Homo sapiens
  misc_RNA (1)...(19): siRNA sense strand
ggucauuggucccugguuu

SEQ ID NO: 1993300 - RNA, 19 nt, Homo sapiens
  misc_RNA (1)...(19): siRNA sense strand
ggccaccucugaaucuaua

SEQ ID NO: 1993301 - RNA, 19 nt, Homo sapiens
  misc_RNA (1)...(19): siRNA sense strand
gcaccaaaguugagacaag

SEQ ID NO: 1993302 - RNA, 19 nt, Homo sapiens
  misc_RNA (1)...(19): siRNA sense strand
gggcugaggagaccaauaa

SEQ ID NO: 1993303 - RNA, 19 nt, Homo sapiens
  misc_RNA (1)...(19): siRNA sense strand
gcguauuggugauuccuua

SEQ ID NO: 1993304 - RNA, 19 nt, Homo sapiens
  misc_RNA (1)...(19): siRNA sense strand
ucaaauggguagacaaauc

SEQ ID NO: 1993305 - RNA, 19 nt, Homo sapiens
  misc_RNA (1)...(19): siRNA sense strand
gauagagaacugguuaaua

SEQ ID NO: 1993306 - RNA, 19 nt, Homo sapiens
  misc_RNA (1)...(19): siRNA sense strand
ugagaaauuugcuaaggaa

SEQ ID NO: 1993307 - RNA, 19 nt, Homo sapiens
  misc_RNA (1)...(19): siRNA sense strand
gaaaagaagucagugaaga

SEQ ID NO: 1993308 - RNA, 19 nt, Homo sapiens
  misc_RNA (1)...(19): siRNA sense strand
gaagagaguaauauagaug

SEQ ID NO: 1993309 - RNA, 19 nt, Homo sapiens
  misc_RNA (1)...(19): siRNA sense strand
ggagcaagcaccaaaguug

SEQ ID NO: 1993310 - RNA, 19 nt, Homo sapiens
  misc_RNA (1)...(19): siRNA sense strand
gaacuguggccaccuguga

SEQ ID NO: 1993311 - RNA, 19 nt, Homo sapiens
  misc_RNA (1)...(19): siRNA sense strand
agacaaagccauuaaggaa

SEQ ID NO: 1993312 - RNA, 19 nt, Homo sapiens
  misc_RNA (1)...(19): siRNA sense strand
gaagaggagaccauaauca

SEQ ID NO: 1993313 - RNA, 19 nt, Homo sapiens
  misc_RNA (1)...(19): siRNA sense strand
ccaaguuacugacugaaga

SEQ ID NO: 1993314 - RNA, 19 nt, Homo sapiens
  misc_RNA (1)...(19): siRNA sense strand
gcaugggacuggugucaga

SEQ ID NO: 1993315 - RNA, 19 nt, Homo sapiens
  misc_RNA (1)...(19): siRNA sense strand
auagagaacugguuaauac

SEQ ID NO: 1993316 - RNA, 19 nt, Homo sapiens
  misc_RNA (1)...(19): siRNA sense strand
gggaggaggucacuguuca

SEQ ID NO: 1993317 - RNA, 19 nt, Homo sapiens
  misc_RNA (1)...(19): siRNA sense strand
ggacugaggaggaagaaau

SEQ ID NO: 1993318 - RNA, 19 nt, Homo sapiens
  misc_RNA (1)...(19): siRNA sense strand
gaagaggaagaagucauua

SEQ ID NO: 1993319 - RNA, 19 nt, Homo sapiens
  misc_RNA (1)...(19): siRNA sense strand
ggacaaggucugaggaaga

SEQ ID NO: 1993320 - RNA, 19 nt, Homo sapiens
  misc_RNA (1)...(19): siRNA sense strand
gcacauggccaaucaagag

SEQ ID NO: 1993321 - RNA, 19 nt, Homo sapiens
  misc_RNA (1)...(19): siRNA sense strand
gccaggagcugaagaagag

SEQ ID NO: 1993322 - RNA, 19 nt, Homo sapiens
  misc_RNA (1)...(19): siRNA sense strand
ccagagcaaugacaaagga

SEQ ID NO: 1993323 - RNA, 19 nt, Homo sapiens
  misc_RNA (1)...(19): siRNA sense strand
agaagucuauguugaauca

SEQ ID NO: 1993324 - RNA, 19 nt, Homo sapiens
  misc_RNA (1)...(19): siRNA sense strand
gaggaugagucuguuaaga

SEQ ID NO: 1993325 - RNA, 19 nt, Homo sapiens
  misc_RNA (1)...(19): siRNA sense strand
cgagaagcuugcauugauu

SEQ ID NO: 1993326 - RNA, 19 nt, Homo sapiens
  misc_RNA (1)...(19): siRNA sense strand
ugaagaagaagccaguaua

SEQ ID NO: 1993327 - RNA, 19 nt, Homo sapiens
  misc_RNA (1)...(19): siRNA sense strand
aaacaaaguaccugucuga

SEQ ID NO: 1993328 - RNA, 19 nt, Homo sapiens
  misc_RNA (1)...(19): siRNA sense strand
gagaaagaagguauuguug

SEQ ID NO: 1993329 - RNA, 19 nt, Homo sapiens
  misc_RNA (1)...(19): siRNA sense strand
cagaagagaguaauauaga

SEQ ID NO: 1993330 - RNA, 19 nt, Homo sapiens
  misc_RNA (1)...(19): siRNA sense strand
uaucauagccucuccacuu

SEQ ID NO: 1993331 - RNA, 19 nt, Homo sapiens
  misc_RNA (1)...(19): siRNA sense strand
guaacugcauacaauguga

SEQ ID NO: 1993332 - RNA, 19 nt, Homo sapiens
  misc_RNA (1)...(19): siRNA sense strand
ggcagcaucuuuauucugu

SEQ ID NO: 1993333 - RNA, 19 nt, Homo sapiens
  misc_RNA (1)...(19): siRNA sense strand
aaagaacccuguauguauc

SEQ ID NO: 1993334 - RNA, 19 nt, Homo sapiens
  misc_RNA (1)...(19): siRNA sense strand
ggaguugguucuggacuga

SEQ ID NO: 1993335 - RNA, 19 nt, Homo sapiens
  misc_RNA (1)...(19): siRNA sense strand
gaaggaaggcccauuacca

SEQ ID NO: 1993336 - RNA, 19 nt, Homo sapiens
  misc_RNA (1)...(19): siRNA sense strand
cggaacagcugucuggaau

SEQ ID NO: 1993337 - RNA, 19 nt, Homo sapiens
  misc_RNA (1)...(19): siRNA sense strand
uagaggaaauggagucaga

SEQ ID NO: 1993338 - RNA, 19 nt, Homo sapiens
  misc_RNA (1)...(19): siRNA sense strand
gaggaagaagucauuauug

SEQ ID NO: 1993339 - RNA, 19 nt, Homo sapiens
  misc_RNA (1)...(19): siRNA sense strand
cugaggagaccaauaauaa

SEQ ID NO: 1993340 - RNA, 19 nt, Homo sapiens
  misc_RNA (1)...(19): siRNA sense strand
caaggcccaugaucaagaa

SEQ ID NO: 1993341 - RNA, 19 nt, Homo sapiens
  misc_RNA (1)...(19): siRNA sense strand
guagacaaaucugugaguu

SEQ ID NO: 1993342 - RNA, 19 nt, Homo sapiens
  misc_RNA (1)...(19): siRNA sense strand
ccugagaguucauccugua

SEQ ID NO: 1993343 - RNA, 19 nt, Homo sapiens
  misc_RNA (1)...(19): siRNA sense strand
ggacauuagcugaugaaga

SEQ ID NO: 1993344 - RNA, 19 nt, Homo sapiens
  misc_RNA (1)...(19): siRNA sense strand
aagaagaggucaguaugaa

SEQ ID NO: 1993345 - RNA, 19 nt, Homo sapiens
  misc_RNA (1)...(19): siRNA sense strand
caaagaagaggucaguaug

SEQ ID NO: 1993346 - RNA, 19 nt, Homo sapiens
  misc_RNA (1)...(19): siRNA sense strand
ccaaagaagaggucaguau

SEQ ID NO: 1993347 - RNA, 19 nt, Homo sapiens
  misc_RNA (1)...(19): siRNA sense strand
gaggaggagcccauuauug

SEQ ID NO: 1993348 - RNA, 19 nt, Homo sapiens
  misc_RNA (1)...(19): siRNA sense strand
gagaagcuugcauugauuu

SEQ ID NO: 1993349 - RNA, 19 nt, Homo sapiens
  misc_RNA (1)...(19): siRNA sense strand
gcugaggagaccaauaaua

SEQ ID NO: 1993350 - RNA, 19 nt, Homo sapiens
  misc_RNA (1)...(19): siRNA sense strand
ggaauaaggaugauuagac

SEQ ID NO: 1993351 - RNA, 19 nt, Homo sapiens
  misc_RNA (1)...(19): siRNA sense strand
gugaggaaacccuugcuua

SEQ ID NO: 1993352 - RNA, 19 nt, Homo sapiens
  misc_RNA (1)...(19): siRNA sense strand
gagcaagcaccaaaguuga

SEQ ID NO: 1993353 - RNA, 19 nt, Homo sapiens
  misc_RNA (1)...(19): siRNA sense strand
augaagagaugauuguuga

SEQ ID NO: 1993354 - RNA, 19 nt, Homo sapiens
  misc_RNA (1)...(19): siRNA sense strand
gaagaagaagccaguauac

SEQ ID NO: 1993355 - RNA, 19 nt, Homo sapiens
  misc_RNA (1)...(19): siRNA sense strand
gaaaugcccacuuugauua

SEQ ID NO: 1993356 - RNA, 19 nt, Homo sapiens
  misc_RNA (1)...(19): siRNA sense strand
ggcauaagcugaacacuuu

SEQ ID NO: 1993357 - RNA, 19 nt, Homo sapiens
  misc_RNA (1)...(19): siRNA sense strand
ucaaaguucucgaagcuua

SEQ ID NO: 1993358 - RNA, 19 nt, Homo sapiens
  misc_RNA (1)...(19): siRNA sense strand
guucagaaaugcccacuuu

SEQ ID NO: 1993359 - RNA, 19 nt, Homo sapiens
  misc_RNA (1)...(19): siRNA sense strand
ggaagacgaugcccaagug

SEQ ID NO: 1993360 - RNA, 19 nt, Homo sapiens
  misc_RNA (1)...(19): siRNA sense strand
cagaacauguggacaaaga

SEQ ID NO: 1993361 - RNA, 19 nt, Homo sapiens
  misc_RNA (1)...(19): siRNA sense strand
ggccauguguucagaaaug

SEQ ID NO: 1993362 - RNA, 19 nt, Homo sapiens
  misc_RNA (1)...(19): siRNA sense strand
gacaugaugagaucgaaua

SEQ ID NO: 1993363 - RNA, 19 nt, Homo sapiens
  misc_RNA (1)...(19): siRNA sense strand
gaaccuggacuaccacuuc

SEQ ID NO: 1993364 - RNA, 19 nt, Homo sapiens
  misc_RNA (1)...(19): siRNA sense strand
augaugagaucgaauauga

SEQ ID NO: 1993365 - RNA, 19 nt, Homo sapiens
  misc_RNA (1)...(19): siRNA sense strand
ggagacucaugcaucugua

SEQ ID NO: 1993366 - RNA, 19 nt, Homo sapiens
  misc_RNA (1)...(19): siRNA sense strand
gaaggacacagacugguau

SEQ ID NO: 1993367 - RNA, 19 nt, Homo sapiens
  misc_RNA (1)...(19): siRNA sense strand
aauaugauguuccuuguca

SEQ ID NO: 1993368 - RNA, 19 nt, Homo sapiens
  misc_RNA (1)...(19): siRNA sense strand
gaugagaucgaauaugaug

SEQ ID NO: 1993369 - RNA, 19 nt, Homo sapiens
  misc_RNA (1)...(19): siRNA sense strand
ucagaaaugcccacuuuga

SEQ ID NO: 1993370 - RNA, 19 nt, Homo sapiens
  misc_RNA (1)...(19): siRNA sense strand
acagaaacgugguaaacug

SEQ ID NO: 1993371 - RNA, 19 nt, Homo sapiens
  misc_RNA (1)...(19): siRNA sense strand
cgaauaugauguuccuugu

SEQ ID NO: 1993372 - RNA, 19 nt, Homo sapiens
  misc_RNA (1)...(19): siRNA sense strand
gaaggacgacuaccagaag

SEQ ID NO: 1993373 - RNA, 19 nt, Homo sapiens
  misc_RNA (1)...(19): siRNA sense strand
ggaucgggaugcaguacuu

SEQ ID NO: 1993374 - RNA, 19 nt, Homo sapiens
  misc_RNA (1)...(19): siRNA sense strand
ggacaaagaagggcuacga

SEQ ID NO: 1993375 - RNA, 19 nt, Homo sapiens
  misc_RNA (1)...(19): siRNA sense strand
gcaguacuucuccgaauau

SEQ ID NO: 1993376 - RNA, 19 nt, Homo sapiens
  misc_RNA (1)...(19): siRNA sense strand
gcagcauccucguccaguu

SEQ ID NO: 1993377 - RNA, 19 nt, Homo sapiens
  misc_RNA (1)...(19): siRNA sense strand
gccagaacauguggacaaa

SEQ ID NO: 1993378 - RNA, 19 nt, Homo sapiens
  misc_RNA (1)...(19): siRNA sense strand
agaaaugcccacuuugauu

SEQ ID NO: 1993379 - RNA, 19 nt, Homo sapiens
  misc_RNA (1)...(19): siRNA sense strand
gaucgaauaugauguuccu

SEQ ID NO: 1993380 - RNA, 19 nt, Homo sapiens
  misc_RNA (1)...(19): siRNA sense strand
gaacauguggacaaagaag

SEQ ID NO: 1993381 - RNA, 19 nt, Homo sapiens
  misc_RNA (1)...(19): siRNA sense strand
ugcaguacuucuccgaaua

SEQ ID NO: 1993382 - RNA, 19 nt, Homo sapiens
  misc_RNA (1)...(19): siRNA sense strand
ucaucugcaucaaguguaa

SEQ ID NO: 1993383 - RNA, 19 nt, Homo sapiens
  misc_RNA (1)...(19): siRNA sense strand
gaucaucugcaucaagugu

SEQ ID NO: 1993384 - RNA, 19 nt, Homo sapiens
  misc_RNA (1)...(19): siRNA sense strand
uaaagaacgccauccaucu

SEQ ID NO: 1993385 - RNA, 19 nt, Homo sapiens
  misc_RNA (1)...(19): siRNA sense strand
ucuccgaacuccucacuca

SEQ ID NO: 1993386 - RNA, 19 nt, Homo sapiens
  misc_RNA (1)...(19): siRNA sense strand
ugagaucgaauaugauguu

SEQ ID NO: 1993387 - RNA, 19 nt, Homo sapiens
  misc_RNA (1)...(19): siRNA sense strand
gagacaugaugagaucgaa

SEQ ID NO: 1993388 - RNA, 19 nt, Homo sapiens
  misc_RNA (1)...(19): siRNA sense strand
agaaggacacagacuggua

SEQ ID NO: 1993389 - RNA, 19 nt, Homo sapiens
  misc_RNA (1)...(19): siRNA sense strand
gucgagacaugaugagauc

SEQ ID NO: 1993390 - RNA, 19 nt, Homo sapiens
  misc_RNA (1)...(19): siRNA sense strand
cagaaaugcccacuuugau

SEQ ID NO: 1993391 - RNA, 19 nt, Homo sapiens
  misc_RNA (1)...(19): siRNA sense strand
gaccuggccuuccgcuucu

SEQ ID NO: 1993392 - RNA, 19 nt, Homo sapiens
  misc_RNA (1)...(19): siRNA sense strand
gugggaaccuggacuacca

SEQ ID NO: 1993393 - RNA, 19 nt, Homo sapiens
  misc_RNA (1)...(19): siRNA sense strand
gagaucgaauaugauguuc

SEQ ID NO: 1993394 - RNA, 19 nt, Homo sapiens
  misc_RNA (1)...(19): siRNA sense strand
caguacuucuccgaauaua

SEQ ID NO: 1993395 - RNA, 19 nt, Homo sapiens
  misc_RNA (1)...(19): siRNA sense strand
ggcaccagcugggcacuau

SEQ ID NO: 1993396 - RNA, 19 nt, Homo sapiens
  misc_RNA (1)...(19): siRNA sense strand
cgguggaccuggagaagga

SEQ ID NO: 1993397 - RNA, 19 nt, Homo sapiens
  misc_RNA (1)...(19): siRNA sense strand
gcucagugccagccacaga

SEQ ID NO: 1993398 - RNA, 19 nt, Homo sapiens
  misc_RNA (1)...(19): siRNA sense strand
gcaaugccgccagaacaug

SEQ ID NO: 1993399 - RNA, 19 nt, Homo sapiens
  misc_RNA (1)...(19): siRNA sense strand
ggaagggguucacaagauc

SEQ ID NO: 1993400 - RNA, 19 nt, Homo sapiens
  misc_RNA (1)...(19): siRNA sense strand
guacuucuccgaauauagc

SEQ ID NO: 1993401 - RNA, 19 nt, Homo sapiens
  misc_RNA (1)...(19): siRNA sense strand
gggagacucaugcaucugu

SEQ ID NO: 1993402 - RNA, 19 nt, Homo sapiens
  misc_RNA (1)...(19): siRNA sense strand
cuaagcccgucgagacaug

SEQ ID NO: 1993403 - RNA, 19 nt, Homo sapiens
  misc_RNA (1)...(19): siRNA sense strand
gaagcaaugccgccagaac

SEQ ID NO: 1993404 - RNA, 19 nt, Homo sapiens
  misc_RNA (1)...(19): siRNA sense strand
ggacacagacugguaucag

SEQ ID NO: 1993405 - RNA, 19 nt, Homo sapiens
  misc_RNA (1)...(19): siRNA sense strand
aaagaacgccauccaucug

SEQ ID NO: 1993406 - RNA, 19 nt, Homo sapiens
  misc_RNA (1)...(19): siRNA sense strand
gccagggccacuugaagaa

SEQ ID NO: 1993407 - RNA, 19 nt, Homo sapiens
  misc_RNA (1)...(19): siRNA sense strand
cagaaacgugguaaacugu

SEQ ID NO: 1993408 - RNA, 19 nt, Homo sapiens
  misc_RNA (1)...(19): siRNA sense strand
ccagauaccucggggaguu

SEQ ID NO: 1993409 - RNA, 19 nt, Homo sapiens
  misc_RNA (1)...(19): siRNA sense strand
gcggaugcaggacgagaaa

SEQ ID NO: 1993410 - RNA, 19 nt, Homo sapiens
  misc_RNA (1)...(19): siRNA sense strand
acugguggauggaacuuug

SEQ ID NO: 1993411 - RNA, 19 nt, Homo sapiens
  misc_RNA (1)...(19): siRNA sense strand
caaaguucucgaagcuuau

SEQ ID NO: 1993412 - RNA, 19 nt, Homo sapiens
  misc_RNA (1)...(19): siRNA sense strand
agaagguggugugcaacaa

SEQ ID NO: 1993413 - RNA, 19 nt, Homo sapiens
  misc_RNA (1)...(19): siRNA sense strand
ugauguuccuugucaccuu

SEQ ID NO: 1993414 - RNA, 19 nt, Homo sapiens
  misc_RNA (1)...(19): siRNA sense strand
agaaggacgacuaccagaa

SEQ ID NO: 1993415 - RNA, 19 nt, Homo sapiens
  misc_RNA (1)...(19): siRNA sense strand
caucuggagccucacaaga

SEQ ID NO: 1993416 - RNA, 19 nt, Homo sapiens
  misc_RNA (1)...(19): siRNA sense strand
gcacuauguacaccuacga

SEQ ID NO: 1993417 - RNA, 19 nt, Homo sapiens
  misc_RNA (1)...(19): siRNA sense strand
gaauaugauguuccuuguc

SEQ ID NO: 1993418 - RNA, 19 nt, Homo sapiens
  misc_RNA (1)...(19): siRNA sense strand
gaagguggugugcaacaac

SEQ ID NO: 1993419 - RNA, 19 nt, Homo sapiens
  misc_RNA (1)...(19): siRNA sense strand
gugcguggacugccuggaa

SEQ ID NO: 1993420 - RNA, 19 nt, Homo sapiens
  misc_RNA (1)...(19): siRNA sense strand
aagggagacucaugcaucu

SEQ ID NO: 1993421 - RNA, 19 nt, Homo sapiens
  misc_RNA (1)...(19): siRNA sense strand
gcuggaacgagaagcaaug

SEQ ID NO: 1993422 - RNA, 19 nt, Homo sapiens
  misc_RNA (1)...(19): siRNA sense strand
gaagucuggcuccgagaag

SEQ ID NO: 1993423 - RNA, 19 nt, Homo sapiens
  misc_RNA (1)...(19): siRNA sense strand
gugggaagccggugaucga

SEQ ID NO: 1993424 - RNA, 19 nt, Homo sapiens
  misc_RNA (1)...(19): siRNA sense strand
ucuggagccucacaagaag

SEQ ID NO: 1993425 - RNA, 19 nt, Homo sapiens
  misc_RNA (1)...(19): siRNA sense strand
gagacucaugcaucuguau

SEQ ID NO: 1993426 - RNA, 19 nt, Homo sapiens
  misc_RNA (1)...(19): siRNA sense strand
caaugccgccagaacaugu

SEQ ID NO: 1993427 - RNA, 19 nt, Homo sapiens
  misc_RNA (1)...(19): siRNA sense strand
gcagcuggaacgagaagca

SEQ ID NO: 1993428 - RNA, 19 nt, Homo sapiens
  misc_RNA (1)...(19): siRNA sense strand
cgccagaacauguggacaa

SEQ ID NO: 1993429 - RNA, 19 nt, Homo sapiens
  misc_RNA (1)...(19): siRNA sense strand
cagcauccucguccaguuc

SEQ ID NO: 1993430 - RNA, 19 nt, Homo sapiens
  misc_RNA (1)...(19): siRNA sense strand
cagcugggcacuauguaca

SEQ ID NO: 1993431 - RNA, 19 nt, Homo sapiens
  misc_RNA (1)...(19): siRNA sense strand
aggcauaagcugaacacuu

SEQ ID NO: 1993432 - RNA, 19 nt, Homo sapiens
  misc_RNA (1)...(19): siRNA sense strand
ggccagagcucacaccuua

SEQ ID NO: 1993433 - RNA, 19 nt, Homo sapiens
  misc_RNA (1)...(19): siRNA sense strand
ggaaagacuucauucacua

SEQ ID NO: 1993434 - RNA, 19 nt, Homo sapiens
  misc_RNA (1)...(19): siRNA sense strand
agucagagcuccuuacuua

SEQ ID NO: 1993435 - RNA, 19 nt, Homo sapiens
  misc_RNA (1)...(19): siRNA sense strand
gggaaaggcuucagucaga

SEQ ID NO: 1993436 - RNA, 19 nt, Homo sapiens
  misc_RNA (1)...(19): siRNA sense strand
acacacagguaacuuauaa

SEQ ID NO: 1993437 - RNA, 19 nt, Homo sapiens
  misc_RNA (1)...(19): siRNA sense strand
gaaacaguaugaaugcaaa

SEQ ID NO: 1993438 - RNA, 19 nt, Homo sapiens
  misc_RNA (1)...(19): siRNA sense strand
acacagaagugaaacagua

SEQ ID NO: 1993439 - RNA, 19 nt, Homo sapiens
  misc_RNA (1)...(19): siRNA sense strand
gcucagaccuuauugaaca

SEQ ID NO: 1993440 - RNA, 19 nt, Homo sapiens
  misc_RNA (1)...(19): siRNA sense strand
gagaaacucuaugaaugua

SEQ ID NO: 1993441 - RNA, 19 nt, Homo sapiens
  misc_RNA (1)...(19): siRNA sense strand
ggugagaggucuguagaua

SEQ ID NO: 1993442 - RNA, 19 nt, Homo sapiens
  misc_RNA (1)...(19): siRNA sense strand
gagaagcucuaugaaugua

SEQ ID NO: 1993443 - RNA, 19 nt, Homo sapiens
  misc_RNA (1)...(19): siRNA sense strand
ggaacacacagguaacuua

SEQ ID NO: 1993444 - RNA, 19 nt, Homo sapiens
  misc_RNA (1)...(19): siRNA sense strand
ggacaggcccuucgaaugu

SEQ ID NO: 1993445 - RNA, 19 nt, Homo sapiens
  misc_RNA (1)...(19): siRNA sense strand
cgucaucgcucagaccuua

SEQ ID NO: 1993446 - RNA, 19 nt, Homo sapiens
  misc_RNA (1)...(19): siRNA sense strand
uaacucaacuacaaacguu

SEQ ID NO: 1993447 - RNA, 19 nt, Homo sapiens
  misc_RNA (1)...(19): siRNA sense strand
ggagagagacccuuugaau

SEQ ID NO: 1993448 - RNA, 19 nt, Homo sapiens
  misc_RNA (1)...(19): siRNA sense strand
ggagaggccuuacguaugc

SEQ ID NO: 1993449 - RNA, 19 nt, Homo sapiens
  misc_RNA (1)...(19): siRNA sense strand
gaaaagcccuucaaaugug

SEQ ID NO: 1993450 - RNA, 19 nt, Homo sapiens
  misc_RNA (1)...(19): siRNA sense strand
gagagagaguguaugaaug

SEQ ID NO: 1993451 - RNA, 19 nt, Homo sapiens
  misc_RNA (1)...(19): siRNA sense strand
ggagagagaguguaugaau

SEQ ID NO: 1993452 - RNA, 19 nt, Homo sapiens
  misc_RNA (1)...(19): siRNA sense strand
gaacacacagguaacuuau

SEQ ID NO: 1993453 - RNA, 19 nt, Homo sapiens
  misc_RNA (1)...(19): siRNA sense strand
gaugaaaacucacauagga

SEQ ID NO: 1993454 - RNA, 19 nt, Homo sapiens
  misc_RNA (1)...(19): siRNA sense strand
gagaaaagcccuucaaaug

SEQ ID NO: 1993455 - RNA, 19 nt, Homo sapiens
  misc_RNA (1)...(19): siRNA sense strand
ggagaaaggcccuaugagu

SEQ ID NO: 1993456 - RNA, 19 nt, Homo sapiens
  misc_RNA (1)...(19): siRNA sense strand
gaagugaaacaguaugaau

SEQ ID NO: 1993457 - RNA, 19 nt, Homo sapiens
  misc_RNA (1)...(19): siRNA sense strand
ggucaaacuuccuucaaca

SEQ ID NO: 1993458 - RNA, 19 nt, Homo sapiens
  misc_RNA (1)...(19): siRNA sense strand
uuucugaguucauaccuua

SEQ ID NO: 1993459 - RNA, 19 nt, Homo sapiens
  misc_RNA (1)...(19): siRNA sense strand
gggaaagacuucauucacu

SEQ ID NO: 1993460 - RNA, 19 nt, Homo sapiens
  misc_RNA (1)...(19): siRNA sense strand
gacaggcccuucgaaugua

SEQ ID NO: 1993461 - RNA, 19 nt, Homo sapiens
  misc_RNA (1)...(19): siRNA sense strand
gaaacucuaugaauguaac

SEQ ID NO: 1993462 - RNA, 19 nt, Homo sapiens
  misc_RNA (1)...(19): siRNA sense strand
gaaagacuucauucacuau

SEQ ID NO: 1993463 - RNA, 19 nt, Homo sapiens
  misc_RNA (1)...(19): siRNA sense strand
gagagaguguaugaaugua

SEQ ID NO: 1993464 - RNA, 19 nt, Homo sapiens
  misc_RNA (1)...(19): siRNA sense strand
gagagagacccuuugaaug

SEQ ID NO: 1993465 - RNA, 19 nt, Homo sapiens
  misc_RNA (1)...(19): siRNA sense strand
ugugggaaauccuucauaa

SEQ ID NO: 1993466 - RNA, 19 nt, Homo sapiens
  misc_RNA (1)...(19): siRNA sense strand
ucagagcuccuuacuuauu

SEQ ID NO: 1993467 - RNA, 19 nt, Homo sapiens
  misc_RNA (1)...(19): siRNA sense strand
ugagaggucuguagauaag

SEQ ID NO: 1993468 - RNA, 19 nt, Homo sapiens
  misc_RNA (1)...(19): siRNA sense strand
gagaguguaugaauguaag

SEQ ID NO: 1993469 - RNA, 19 nt, Homo sapiens
  misc_RNA (1)...(19): siRNA sense strand
gaagcucuaugaauguagu

SEQ ID NO: 1993470 - RNA, 19 nt, Homo sapiens
  misc_RNA (1)...(19): siRNA sense strand
ggagagacagcucaagugu

SEQ ID NO: 1993471 - RNA, 19 nt, Homo sapiens
  misc_RNA (1)...(19): siRNA sense strand
gcucaagugugcaccaagu

SEQ ID NO: 1993472 - RNA, 19 nt, Homo sapiens
  misc_RNA (1)...(19): siRNA sense strand
ucacugagcaccagaagau

SEQ ID NO: 1993473 - RNA, 19 nt, Homo sapiens
  misc_RNA (1)...(19): siRNA sense strand
ucaaaggguucaccaagag

SEQ ID NO: 1993474 - RNA, 19 nt, Homo sapiens
  misc_RNA (1)...(19): siRNA sense strand
ccagaaagcccaucucacu

SEQ ID NO: 1993475 - RNA, 19 nt, Homo sapiens
  misc_RNA (1)...(19): siRNA sense strand
cagagcuccuuacuuauuc

SEQ ID NO: 1993476 - RNA, 19 nt, Homo sapiens
  misc_RNA (1)...(19): siRNA sense strand
caaagcucauucagcauca

SEQ ID NO: 1993477 - RNA, 19 nt, Homo sapiens
  misc_RNA (1)...(19): siRNA sense strand
gaacaccagagaauucaca

SEQ ID NO: 1993478 - RNA, 19 nt, Homo sapiens
  misc_RNA (1)...(19): siRNA sense strand
gauccacacagaagugaaa

SEQ ID NO: 1993479 - RNA, 19 nt, Homo sapiens
  misc_RNA (1)...(19): siRNA sense strand
gagccucauucgccauuau

SEQ ID NO: 1993480 - RNA, 19 nt, Homo sapiens
  misc_RNA (1)...(19): siRNA sense strand
cuaguuaggcaucggauuu

SEQ ID NO: 1993481 - RNA, 19 nt, Homo sapiens
  misc_RNA (1)...(19): siRNA sense strand
ggccuuacguaugcaauga

SEQ ID NO: 1993482 - RNA, 19 nt, Homo sapiens
  misc_RNA (1)...(19): siRNA sense strand
gagagacccuuugaaugca

SEQ ID NO: 1993483 - RNA, 19 nt, Homo sapiens
  misc_RNA (1)...(19): siRNA sense strand
gagaagaaggugacugaag

SEQ ID NO: 1993484 - RNA, 19 nt, Homo sapiens
  misc_RNA (1)...(19): siRNA sense strand
gugcaguuauugugggaaa

SEQ ID NO: 1993485 - RNA, 19 nt, Homo sapiens
  misc_RNA (1)...(19): siRNA sense strand
uguaggaacuggugagaag

SEQ ID NO: 1993486 - RNA, 19 nt, Homo sapiens
  misc_RNA (1)...(19): siRNA sense strand
agaaagcccaucucacuga

SEQ ID NO: 1993487 - RNA, 19 nt, Homo sapiens
  misc_RNA (1)...(19): siRNA sense strand
agacuucauucacuauuca

SEQ ID NO: 1993488 - RNA, 19 nt, Homo sapiens
  misc_RNA (1)...(19): siRNA sense strand
gaacuggugagaagaaggu

SEQ ID NO: 1993489 - RNA, 19 nt, Homo sapiens
  misc_RNA (1)...(19): siRNA sense strand
gggagaggccuuacguaug

SEQ ID NO: 1993490 - RNA, 19 nt, Homo sapiens
  misc_RNA (1)...(19): siRNA sense strand
caguaugaaugcaaagaau

SEQ ID NO: 1993491 - RNA, 19 nt, Homo sapiens
  misc_RNA (1)...(19): siRNA sense strand
gugagaagaaggugacuga

SEQ ID NO: 1993492 - RNA, 19 nt, Homo sapiens
  misc_RNA (1)...(19): siRNA sense strand
guaugaauguaaggaaugu

SEQ ID NO: 1993493 - RNA, 19 nt, Homo sapiens
  misc_RNA (1)...(19): siRNA sense strand
gugagaggucuguagauaa

SEQ ID NO: 1993494 - RNA, 19 nt, Homo sapiens
  misc_RNA (1)...(19): siRNA sense strand
gagcaucagcgcguucauu

SEQ ID NO: 1993495 - RNA, 19 nt, Homo sapiens
  misc_RNA (1)...(19): siRNA sense strand
cuaugaauguagucaguau

SEQ ID NO: 1993496 - RNA, 19 nt, Homo sapiens
  misc_RNA (1)...(19): siRNA sense strand
gcgcguucauucaggagaa

SEQ ID NO: 1993497 - RNA, 19 nt, Homo sapiens
  misc_RNA (1)...(19): siRNA sense strand
caucagaggauccauacug

SEQ ID NO: 1993498 - RNA, 19 nt, Homo sapiens
  misc_RNA (1)...(19): siRNA sense strand
ggaaugugggaaagcguuu

SEQ ID NO: 1993499 - RNA, 19 nt, Homo sapiens
  misc_RNA (1)...(19): siRNA sense strand
cagcaucagaggauccaua

SEQ ID NO: 1993500 - RNA, 19 nt, Homo sapiens
  misc_RNA (1)...(19): siRNA sense strand
gagcaucagagaauucaca

SEQ ID NO: 1993501 - RNA, 19 nt, Homo sapiens
  misc_RNA (1)...(19): siRNA sense strand
ugacagugacccauuggaa

SEQ ID NO: 1993502 - RNA, 19 nt, Homo sapiens
  misc_RNA (1)...(19): siRNA sense strand
ggaguucaaagcucauuca

SEQ ID NO: 1993503 - RNA, 19 nt, Homo sapiens
  misc_RNA (1)...(19): siRNA sense strand
gcaccaagucaggaagaaa

SEQ ID NO: 1993504 - RNA, 19 nt, Homo sapiens
  misc_RNA (1)...(19): siRNA sense strand
gggacaggcccuucgaaug

SEQ ID NO: 1993505 - RNA, 19 nt, Homo sapiens
  misc_RNA (1)...(19): siRNA sense strand
agagagaguguaugaaugu

SEQ ID NO: 1993506 - RNA, 19 nt, Homo sapiens
  misc_RNA (1)...(19): siRNA sense strand
agagagacccuuugaaugc

SEQ ID NO: 1993507 - RNA, 19 nt, Homo sapiens
  misc_RNA (1)...(19): siRNA sense strand
guaugaaugcaaagaaugu

SEQ ID NO: 1993508 - RNA, 19 nt, Homo sapiens
  misc_RNA (1)...(19): siRNA sense strand
gcaaagagugugggaaagg

SEQ ID NO: 1993509 - RNA, 19 nt, Homo sapiens
  misc_RNA (1)...(19): siRNA sense strand
cuacgucuguaaugugugu

SEQ ID NO: 1993510 - RNA, 19 nt, Homo sapiens
  misc_RNA (1)...(19): siRNA sense strand
ccagagcucacaccuuaug

SEQ ID NO: 1993511 - RNA, 19 nt, Homo sapiens
  misc_RNA (1)...(19): siRNA sense strand
ucaggaagaaaccauauuc

SEQ ID NO: 1993512 - RNA, 19 nt, Homo sapiens
  misc_RNA (1)...(19): siRNA sense strand
gcaaugaaugugggaaauc

SEQ ID NO: 1993513 - RNA, 19 nt, Homo sapiens
  misc_RNA (1)...(19): siRNA sense strand
cagaagugaaacaguauga

SEQ ID NO: 1993514 - RNA, 19 nt, Homo sapiens
  misc_RNA (1)...(19): siRNA sense strand
ucacuauucaggucucauu

SEQ ID NO: 1993515 - RNA, 19 nt, Homo sapiens
  misc_RNA (1)...(19): siRNA sense strand
gaauucacacuggagagaa

SEQ ID NO: 1993516 - RNA, 19 nt, Homo sapiens
  misc_RNA (1)...(19): siRNA sense strand
ugaaacaguaugaaugcaa

SEQ ID NO: 1993517 - RNA, 19 nt, Homo sapiens
  misc_RNA (1)...(19): siRNA sense strand
uaucagauccacacagaag

SEQ ID NO: 1993518 - RNA, 19 nt, Homo sapiens
  misc_RNA (1)...(19): siRNA sense strand
ucagagagagcucauagag

SEQ ID NO: 1993519 - RNA, 19 nt, Homo sapiens
  misc_RNA (1)...(19): siRNA sense strand
ggagagauuuuaacucaac

SEQ ID NO: 1993520 - RNA, 19 nt, Homo sapiens
  misc_RNA (1)...(19): siRNA sense strand
guguaugaauguaaggaau

SEQ ID NO: 1993521 - RNA, 19 nt, Homo sapiens
  misc_RNA (1)...(19): siRNA sense strand
ggagaaaagcccuucaaau

SEQ ID NO: 1993522 - RNA, 19 nt, Homo sapiens
  misc_RNA (1)...(19): siRNA sense strand
auuaucagauccacacaga

SEQ ID NO: 1993523 - RNA, 19 nt, Homo sapiens
  misc_RNA (1)...(19): siRNA sense strand
gaggucaaacuuccuucaa

SEQ ID NO: 1993524 - RNA, 19 nt, Homo sapiens
  misc_RNA (1)...(19): siRNA sense strand
cuucgaauguaaagacugu

SEQ ID NO: 1993525 - RNA, 19 nt, Homo sapiens
  misc_RNA (1)...(19): siRNA sense strand
acaggcccuucgaauguaa

SEQ ID NO: 1993526 - RNA, 19 nt, Homo sapiens
  misc_RNA (1)...(19): siRNA sense strand
cuaugaauguaacgagugu

SEQ ID NO: 1993527 - RNA, 19 nt, Homo sapiens
  misc_RNA (1)...(19): siRNA sense strand
cgggagaaaggcccuauga

SEQ ID NO: 1993528 - RNA, 19 nt, Homo sapiens
  misc_RNA (1)...(19): siRNA sense strand
ggagaaaagcccuaugugu

SEQ ID NO: 1993529 - RNA, 19 nt, Homo sapiens
  misc_RNA (1)...(19): siRNA sense strand
uguaaagacugugggaaag

SEQ ID NO: 1993530 - RNA, 19 nt, Homo sapiens
  misc_RNA (1)...(19): siRNA sense strand
aauucacacuggagagaaa

SEQ ID NO: 1993531 - RNA, 19 nt, Homo sapiens
  misc_RNA (1)...(19): siRNA sense strand
ggaaauccagaaggucaga

SEQ ID NO: 1993532 - RNA, 19 nt, Homo sapiens
  misc_RNA (1)...(19): siRNA sense strand
gcucaagggucuucgagua

SEQ ID NO: 1993533 - RNA, 19 nt, Homo sapiens
  misc_RNA (1)...(19): siRNA sense strand
acacugcccucgccgcuuu

SEQ ID NO: 1993534 - RNA, 19 nt, Homo sapiens
  misc_RNA (1)...(19): siRNA sense strand
gguaaagcccuucgagugu

SEQ ID NO: 1993535 - RNA, 19 nt, Homo sapiens
  misc_RNA (1)...(19): siRNA sense strand
gcacggcaccauuccauuc

SEQ ID NO: 1993536 - RNA, 19 nt, Homo sapiens
  misc_RNA (1)...(19): siRNA sense strand
uaaagcccuucgaguguga

SEQ ID NO: 1993537 - RNA, 19 nt, Homo sapiens
  misc_RNA (1)...(19): siRNA sense strand
agaacacacugcagaaaca

SEQ ID NO: 1993538 - RNA, 19 nt, Homo sapiens
  misc_RNA (1)...(19): siRNA sense strand
cccaaccacuaccugcuua

SEQ ID NO: 1993539 - RNA, 19 nt, Homo sapiens
  misc_RNA (1)...(19): siRNA sense strand
accacuaccugcuuauuga

SEQ ID NO: 1993540 - RNA, 19 nt, Homo sapiens
  misc_RNA (1)...(19): siRNA sense strand
guacauguccuaccuucag

SEQ ID NO: 1993541 - RNA, 19 nt, Homo sapiens
  misc_RNA (1)...(19): siRNA sense strand
gcccucagccucuggcauu

SEQ ID NO: 1993542 - RNA, 19 nt, Homo sapiens
  misc_RNA (1)...(19): siRNA sense strand
ucaagggucuucgaguaca

SEQ ID NO: 1993543 - RNA, 19 nt, Homo sapiens
  misc_RNA (1)...(19): siRNA sense strand
caaccacuaccugcuuauu

SEQ ID NO: 1993544 - RNA, 19 nt, Homo sapiens
  misc_RNA (1)...(19): siRNA sense strand
cuccaaggcccaaccacua

SEQ ID NO: 1993545 - RNA, 19 nt, Homo sapiens
  misc_RNA (1)...(19): siRNA sense strand
cuucgagugugacaucugu

SEQ ID NO: 1993546 - RNA, 19 nt, Homo sapiens
  misc_RNA (1)...(19): siRNA sense strand
caagggucuucgaguacau

SEQ ID NO: 1993547 - RNA, 19 nt, Homo sapiens
  misc_RNA (1)...(19): siRNA sense strand
ggaguucagugcccucuuu

SEQ ID NO: 1993548 - RNA, 19 nt, Homo sapiens
  misc_RNA (1)...(19): siRNA sense strand
gaacaucuacuccaucuac

SEQ ID NO: 1993549 - RNA, 19 nt, Homo sapiens
  misc_RNA (1)...(19): siRNA sense strand
cagcuacucucaccucugu

SEQ ID NO: 1993550 - RNA, 19 nt, Homo sapiens
  misc_RNA (1)...(19): siRNA sense strand
gcaggaggcugaggagaag

SEQ ID NO: 1993551 - RNA, 19 nt, Homo sapiens
  misc_RNA (1)...(19): siRNA sense strand
ggaagcgagcccucuauga

SEQ ID NO: 1993552 - RNA, 19 nt, Homo sapiens
  misc_RNA (1)...(19): siRNA sense strand
gaacacacugguacccuau

SEQ ID NO: 1993553 - RNA, 19 nt, Homo sapiens
  misc_RNA (1)...(19): siRNA sense strand
ccaagagcuuucccuccua

SEQ ID NO: 1993554 - RNA, 19 nt, Homo sapiens
  misc_RNA (1)...(19): siRNA sense strand
ccagaggccuguccaaacu

SEQ ID NO: 1993555 - RNA, 19 nt, Homo sapiens
  misc_RNA (1)...(19): siRNA sense strand
gcaucucacgguccacuua

SEQ ID NO: 1993556 - RNA, 19 nt, Homo sapiens
  misc_RNA (1)...(19): siRNA sense strand
gagccuguauccagaagau

SEQ ID NO: 1993557 - RNA, 19 nt, Homo sapiens
  misc_RNA (1)...(19): siRNA sense strand
ccugucaccuucugccuuu

SEQ ID NO: 1993558 - RNA, 19 nt, Homo sapiens
  misc_RNA (1)...(19): siRNA sense strand
ucacugcccgcuccacaua

SEQ ID NO: 1993559 - RNA, 19 nt, Homo sapiens
  misc_RNA (1)...(19): siRNA sense strand
gaucgacuccaaagugaug

SEQ ID NO: 1993560 - RNA, 19 nt, Homo sapiens
  misc_RNA (1)...(19): siRNA sense strand
ucucacgguccacuuauua

SEQ ID NO: 1993561 - RNA, 19 nt, Homo sapiens
  misc_RNA (1)...(19): siRNA sense strand
gcauggaggagcuagagaa

SEQ ID NO: 1993562 - RNA, 19 nt, Homo sapiens
  misc_RNA (1)...(19): siRNA sense strand
gaagcgagcccucuaugac

SEQ ID NO: 1993563 - RNA, 19 nt, Homo sapiens
  misc_RNA (1)...(19): siRNA sense strand
ucacgguccacuuauuaua

SEQ ID NO: 1993564 - RNA, 19 nt, Homo sapiens
  misc_RNA (1)...(19): siRNA sense strand
gaagaugcuccacggaaca

SEQ ID NO: 1993565 - RNA, 19 nt, Homo sapiens
  misc_RNA (1)...(19): siRNA sense strand
gaaccuggccucagcuacu

SEQ ID NO: 1993566 - RNA, 19 nt, Homo sapiens
  misc_RNA (1)...(19): siRNA sense strand
ggaagagugaggcggaaga

SEQ ID NO: 1993567 - RNA, 19 nt, Homo sapiens
  misc_RNA (1)...(19): siRNA sense strand
gcccuggaauggucuuaau

SEQ ID NO: 1993568 - RNA, 19 nt, Homo sapiens
  misc_RNA (1)...(19): siRNA sense strand
ugagugggcaucucccuuu

SEQ ID NO: 1993569 - RNA, 19 nt, Homo sapiens
  misc_RNA (1)...(19): siRNA sense strand
caugaucgacuccaaagug

SEQ ID NO: 1993570 - RNA, 19 nt, Homo sapiens
  misc_RNA (1)...(19): siRNA sense strand
uguaugcucucgccucugu

SEQ ID NO: 1993571 - RNA, 19 nt, Homo sapiens
  misc_RNA (1)...(19): siRNA sense strand
gcuacucccuaugcucuga

SEQ ID NO: 1993572 - RNA, 19 nt, Homo sapiens
  misc_RNA (1)...(19): siRNA sense strand
ggcaggaggcugaggagaa

SEQ ID NO: 1993573 - RNA, 19 nt, Homo sapiens
  misc_RNA (1)...(19): siRNA sense strand
aguuguaccuggagcauug

SEQ ID NO: 1993574 - RNA, 19 nt, Homo sapiens
  misc_RNA (1)...(19): siRNA sense strand
cggaacaucuacuccaucu

SEQ ID NO: 1993575 - RNA, 19 nt, Homo sapiens
  misc_RNA (1)...(19): siRNA sense strand
cgucaaggccuccuguuuc

SEQ ID NO: 1993576 - RNA, 19 nt, Homo sapiens
  misc_RNA (1)...(19): siRNA sense strand
gccgugcgcuacucccuau

SEQ ID NO: 1993577 - RNA, 19 nt, Homo sapiens
  misc_RNA (1)...(19): siRNA sense strand
ggaugugacagcugugaug

SEQ ID NO: 1993578 - RNA, 19 nt, Homo sapiens
  misc_RNA (1)...(19): siRNA sense strand
gguccugucuuccuucacu

SEQ ID NO: 1993579 - RNA, 19 nt, Homo sapiens
  misc_RNA (1)...(19): siRNA sense strand
gggcaugaucgacuccaaa

SEQ ID NO: 1993580 - RNA, 19 nt, Homo sapiens
  misc_RNA (1)...(19): siRNA sense strand
caaccuacuaugucuggaa

SEQ ID NO: 1993581 - RNA, 19 nt, Homo sapiens
  misc_RNA (1)...(19): siRNA sense strand
gagugggcaucucccuuuc

SEQ ID NO: 1993582 - RNA, 19 nt, Homo sapiens
  misc_RNA (1)...(19): siRNA sense strand
gcccagaggccuguccaaa

SEQ ID NO: 1993583 - RNA, 19 nt, Homo sapiens
  misc_RNA (1)...(19): siRNA sense strand
gccggaugcuggugaugga

SEQ ID NO: 1993584 - RNA, 19 nt, Homo sapiens
  misc_RNA (1)...(19): siRNA sense strand
gagcuuucccuccuacaag

SEQ ID NO: 1993585 - RNA, 19 nt, Homo sapiens
  misc_RNA (1)...(19): siRNA sense strand
augaucgacuccaaaguga

SEQ ID NO: 1993586 - RNA, 19 nt, Homo sapiens
  misc_RNA (1)...(19): siRNA sense strand
gugggcaucucccuuucug

SEQ ID NO: 1993587 - RNA, 19 nt, Homo sapiens
  misc_RNA (1)...(19): siRNA sense strand
aggagaagcaggagaagga

SEQ ID NO: 1993588 - RNA, 19 nt, Homo sapiens
  misc_RNA (1)...(19): siRNA sense strand
ccuccacgcugcacaucau

SEQ ID NO: 1993589 - RNA, 19 nt, Homo sapiens
  misc_RNA (1)...(19): siRNA sense strand
ccuggagggucucauaggu

SEQ ID NO: 1993590 - RNA, 19 nt, Homo sapiens
  misc_RNA (1)...(19): siRNA sense strand
agaggccuguccaaacuuc

SEQ ID NO: 1993591 - RNA, 19 nt, Homo sapiens
  misc_RNA (1)...(19): siRNA sense strand
ggccugacccugguagaug

SEQ ID NO: 1993592 - RNA, 19 nt, Homo sapiens
  misc_RNA (1)...(19): siRNA sense strand
gcuggaggccaucuucgau

SEQ ID NO: 1993593 - RNA, 19 nt, Homo sapiens
  misc_RNA (1)...(19): siRNA sense strand
ggaugcuggugauggacau

SEQ ID NO: 1993594 - RNA, 19 nt, Homo sapiens
  misc_RNA (1)...(19): siRNA sense strand
gaggcuggcagggauguga

SEQ ID NO: 1993595 - RNA, 19 nt, Homo sapiens
  misc_RNA (1)...(19): siRNA sense strand
ggggagcuccugccacuaa

SEQ ID NO: 1993596 - RNA, 19 nt, Homo sapiens
  misc_RNA (1)...(19): siRNA sense strand
ggugucaagcccuggaaug

SEQ ID NO: 1993597 - RNA, 19 nt, Homo sapiens
  misc_RNA (1)...(19): siRNA sense strand
ggacugagauugagaagug

SEQ ID NO: 1993598 - RNA, 19 nt, Homo sapiens
  misc_RNA (1)...(19): siRNA sense strand
gaagugcacggcugagaua

SEQ ID NO: 1993599 - RNA, 19 nt, Homo sapiens
  misc_RNA (1)...(19): siRNA sense strand
gaacgugacccuugagaug

SEQ ID NO: 1993600 - RNA, 19 nt, Homo sapiens
  misc_RNA (1)...(19): siRNA sense strand
gagaggacguggcugaaga

SEQ ID NO: 1993601 - RNA, 19 nt, Homo sapiens
  misc_RNA (1)...(19): siRNA sense strand
caggguggcugcacgauuu

SEQ ID NO: 1993602 - RNA, 19 nt, Homo sapiens
  misc_RNA (1)...(19): siRNA sense strand
gcuaagagcaccaugaaga

SEQ ID NO: 1993603 - RNA, 19 nt, Homo sapiens
  misc_RNA (1)...(19): siRNA sense strand
gcuaugagcuggaguuugc

SEQ ID NO: 1993604 - RNA, 19 nt, Homo sapiens
  misc_RNA (1)...(19): siRNA sense strand
ggacgcagcccuggaauau

SEQ ID NO: 1993605 - RNA, 19 nt, Homo sapiens
  misc_RNA (1)...(19): siRNA sense strand
gcaggaagagguacaguga

SEQ ID NO: 1993606 - RNA, 19 nt, Homo sapiens
  misc_RNA (1)...(19): siRNA sense strand
gagacgggcuggagaaugg

SEQ ID NO: 1993607 - RNA, 19 nt, Homo sapiens
  misc_RNA (1)...(19): siRNA sense strand
caagaugucugccaacaac

SEQ ID NO: 1993608 - RNA, 19 nt, Homo sapiens
  misc_RNA (1)...(19): siRNA sense strand
gagcagaagcggaugaaug

SEQ ID NO: 1993609 - RNA, 19 nt, Homo sapiens
  misc_RNA (1)...(19): siRNA sense strand
gcgcccagcugcaguaugu

SEQ ID NO: 1993610 - RNA, 19 nt, Homo sapiens
  misc_RNA (1)...(19): siRNA sense strand
guacaucuacacccuguuu

SEQ ID NO: 1993611 - RNA, 19 nt, Homo sapiens
  misc_RNA (1)...(19): siRNA sense strand
gagcuggaguuugcuaaga

SEQ ID NO: 1993612 - RNA, 19 nt, Homo sapiens
  misc_RNA (1)...(19): siRNA sense strand
gagguacagugacaucuuc

SEQ ID NO: 1993613 - RNA, 19 nt, Homo sapiens
  misc_RNA (1)...(19): siRNA sense strand
gcacuacgagcagaucuuu

SEQ ID NO: 1993614 - RNA, 19 nt, Homo sapiens
  misc_RNA (1)...(19): siRNA sense strand
ggccacaccuaccgagauu

SEQ ID NO: 1993615 - RNA, 19 nt, Homo sapiens
  misc_RNA (1)...(19): siRNA sense strand
ccaaacggacugagauuga

SEQ ID NO: 1993616 - RNA, 19 nt, Homo sapiens
  misc_RNA (1)...(19): siRNA sense strand
ggacaaccucgaaaucuca

SEQ ID NO: 1993617 - RNA, 19 nt, Homo sapiens
  misc_RNA (1)...(19): siRNA sense strand
guuauccgcucgcugaaga

SEQ ID NO: 1993618 - RNA, 19 nt, Homo sapiens
  misc_RNA (1)...(19): siRNA sense strand
gugcacggcugagauagaa

SEQ ID NO: 1993619 - RNA, 19 nt, Homo sapiens
  misc_RNA (1)...(19): siRNA sense strand
gcacgaggcagcuggugaa

SEQ ID NO: 1993620 - RNA, 19 nt, Homo sapiens
  misc_RNA (1)...(19): siRNA sense strand
gcugcacgauuuauggaaa

SEQ ID NO: 1993621 - RNA, 19 nt, Homo sapiens
  misc_RNA (1)...(19): siRNA sense strand
caaccugggcauuguguuu

SEQ ID NO: 1993622 - RNA, 19 nt, Homo sapiens
  misc_RNA (1)...(19): siRNA sense strand
gagccgcuaugccaaggaa

SEQ ID NO: 1993623 - RNA, 19 nt, Homo sapiens
  misc_RNA (1)...(19): siRNA sense strand
ccacaugccucugcaguac

SEQ ID NO: 1993624 - RNA, 19 nt, Homo sapiens
  misc_RNA (1)...(19): siRNA sense strand
gugccaggcuuucgagaau

SEQ ID NO: 1993625 - RNA, 19 nt, Homo sapiens
  misc_RNA (1)...(19): siRNA sense strand
cgaguguccucaagcgauu

SEQ ID NO: 1993626 - RNA, 19 nt, Homo sapiens
  misc_RNA (1)...(19): siRNA sense strand
gaagagguacagugacauc

SEQ ID NO: 1993627 - RNA, 19 nt, Homo sapiens
  misc_RNA (1)...(19): siRNA sense strand
ggacuucccggaggaggua

SEQ ID NO: 1993628 - RNA, 19 nt, Homo sapiens
  misc_RNA (1)...(19): siRNA sense strand
cugcuugccuggacugaaa

SEQ ID NO: 1993629 - RNA, 19 nt, Homo sapiens
  misc_RNA (1)...(19): siRNA sense strand
gaaaagagagccagcuaug

SEQ ID NO: 1993630 - RNA, 19 nt, Homo sapiens
  misc_RNA (1)...(19): siRNA sense strand
gacaguggcccagcagaaa

SEQ ID NO: 1993631 - RNA, 19 nt, Homo sapiens
  misc_RNA (1)...(19): siRNA sense strand
ugugaggagugcuuucuga

SEQ ID NO: 1993632 - RNA, 19 nt, Homo sapiens
  misc_RNA (1)...(19): siRNA sense strand
gaagcucucugggccucuu

SEQ ID NO: 1993633 - RNA, 19 nt, Homo sapiens
  misc_RNA (1)...(19): siRNA sense strand
gcagaucuuugggauggau

SEQ ID NO: 1993634 - RNA, 19 nt, Homo sapiens
  misc_RNA (1)...(19): siRNA sense strand
ucaaggagcaguggaugaa

SEQ ID NO: 1993635 - RNA, 19 nt, Homo sapiens
  misc_RNA (1)...(19): siRNA sense strand
cggaggagguacccuuugu

SEQ ID NO: 1993636 - RNA, 19 nt, Homo sapiens
  misc_RNA (1)...(19): siRNA sense strand
gcugaagacaccaaagaug

SEQ ID NO: 1993637 - RNA, 19 nt, Homo sapiens
  misc_RNA (1)...(19): siRNA sense strand
ggacguccagccugaggaa

SEQ ID NO: 1993638 - RNA, 19 nt, Homo sapiens
  misc_RNA (1)...(19): siRNA sense strand
cggcuacucucgaaauugg

SEQ ID NO: 1993639 - RNA, 19 nt, Homo sapiens
  misc_RNA (1)...(19): siRNA sense strand
aaagagagccagcuaugag

SEQ ID NO: 1993640 - RNA, 19 nt, Homo sapiens
  misc_RNA (1)...(19): siRNA sense strand
aggaagagguacagugaca

SEQ ID NO: 1993641 - RNA, 19 nt, Homo sapiens
  misc_RNA (1)...(19): siRNA sense strand
gagauuccaacuccacaga

SEQ ID NO: 1993642 - RNA, 19 nt, Homo sapiens
  misc_RNA (1)...(19): siRNA sense strand
caaacggacugagauugag

SEQ ID NO: 1993643 - RNA, 19 nt, Homo sapiens
  misc_RNA (1)...(19): siRNA sense strand
agaaguggcggaaggaguu

SEQ ID NO: 1993644 - RNA, 19 nt, Homo sapiens
  misc_RNA (1)...(19): siRNA sense strand
gcaagguguccauucaaca

SEQ ID NO: 1993645 - RNA, 19 nt, Homo sapiens
  misc_RNA (1)...(19): siRNA sense strand
gcacggcugagauagaaca

SEQ ID NO: 1993646 - RNA, 19 nt, Homo sapiens
  misc_RNA (1)...(19): siRNA sense strand
cgagugcugugcgcccuuu

SEQ ID NO: 1993647 - RNA, 19 nt, Homo sapiens
  misc_RNA (1)...(19): siRNA sense strand
agcagaagcggaugaauga

SEQ ID NO: 1993648 - RNA, 19 nt, Homo sapiens
  misc_RNA (1)...(19): siRNA sense strand
ggcaagguguccauucaac

SEQ ID NO: 1993649 - RNA, 19 nt, Homo sapiens
  misc_RNA (1)...(19): siRNA sense strand
cuacgacgccuucaucucu

SEQ ID NO: 1993650 - RNA, 19 nt, Homo sapiens
  misc_RNA (1)...(19): siRNA sense strand
gccaacaaccugggcauug

SEQ ID NO: 1993651 - RNA, 19 nt, Homo sapiens
  misc_RNA (1)...(19): siRNA sense strand
gcccaagcauuuugagauu

SEQ ID NO: 1993652 - RNA, 19 nt, Homo sapiens
  misc_RNA (1)...(19): siRNA sense strand
guacagcugccugacucua

SEQ ID NO: 1993653 - RNA, 19 nt, Homo sapiens
  misc_RNA (1)...(19): siRNA sense strand
aggcccagcuuguggaguu

SEQ ID NO: 1993654 - RNA, 19 nt, Homo sapiens
  misc_RNA (1)...(19): siRNA sense strand
acgcagcccuggaauaugc

SEQ ID NO: 1993655 - RNA, 19 nt, Homo sapiens
  misc_RNA (1)...(19): siRNA sense strand
ggagacgggcuggagaaug

SEQ ID NO: 1993656 - RNA, 19 nt, Homo sapiens
  misc_RNA (1)...(19): siRNA sense strand
ugcgcaagcugguguuuca

SEQ ID NO: 1993657 - RNA, 19 nt, Homo sapiens
  misc_RNA (1)...(19): siRNA sense strand
gccacaugccucugcagua

SEQ ID NO: 1993658 - RNA, 19 nt, Homo sapiens
  misc_RNA (1)...(19): siRNA sense strand
cagccacuguuaccaacga

SEQ ID NO: 1993659 - RNA, 19 nt, Homo sapiens
  misc_RNA (1)...(19): siRNA sense strand
ugggaacccuggccaugga

SEQ ID NO: 1993660 - RNA, 19 nt, Homo sapiens
  misc_RNA (1)...(19): siRNA sense strand
gagccuggacaaccucgaa

SEQ ID NO: 1993661 - RNA, 19 nt, Homo sapiens
  misc_RNA (1)...(19): siRNA sense strand
ggaacgugacccuugagau

SEQ ID NO: 1993662 - RNA, 19 nt, Homo sapiens
  misc_RNA (1)...(19): siRNA sense strand
cuaagagcaccaugaagau

SEQ ID NO: 1993663 - RNA, 19 nt, Homo sapiens
  misc_RNA (1)...(19): siRNA sense strand
gagagaggacguggcugaa

SEQ ID NO: 1993664 - RNA, 19 nt, Homo sapiens
  misc_RNA (1)...(19): siRNA sense strand
gccaggcuuucgagaaugg

SEQ ID NO: 1993665 - RNA, 19 nt, Homo sapiens
  misc_RNA (1)...(19): siRNA sense strand
agacaguggcccagcagaa

SEQ ID NO: 1993666 - RNA, 19 nt, Homo sapiens
  misc_RNA (1)...(19): siRNA sense strand
cuggcaagguguccauuca

SEQ ID NO: 1993667 - RNA, 19 nt, Homo sapiens
  misc_RNA (1)...(19): siRNA sense strand
ggagugugaggagugcuuu

SEQ ID NO: 1993668 - RNA, 19 nt, Homo sapiens
  misc_RNA (1)...(19): siRNA sense strand
gccaaacggacugagauug

SEQ ID NO: 1993669 - RNA, 19 nt, Homo sapiens
  misc_RNA (1)...(19): siRNA sense strand
aacaagaugucugccaaca

SEQ ID NO: 1993670 - RNA, 19 nt, Homo sapiens
  misc_RNA (1)...(19): siRNA sense strand
ccugguggcccaucuguuc

SEQ ID NO: 1993671 - RNA, 19 nt, Homo sapiens
  misc_RNA (1)...(19): siRNA sense strand
uacagcugccugacucuaa

SEQ ID NO: 1993672 - RNA, 19 nt, Homo sapiens
  misc_RNA (1)...(19): siRNA sense strand
ggaggagguacccuuugug

SEQ ID NO: 1993673 - RNA, 19 nt, Homo sapiens
  misc_RNA (1)...(19): siRNA sense strand
gcagcuacccagggacuuc

SEQ ID NO: 1993674 - RNA, 19 nt, Homo sapiens
  misc_RNA (1)...(19): siRNA sense strand
uaagagcaccaugaagauc

SEQ ID NO: 1993675 - RNA, 19 nt, Homo sapiens
  misc_RNA (1)...(19): siRNA sense strand
gaagacccagaaccugaca

SEQ ID NO: 1993676 - RNA, 19 nt, Homo sapiens
  misc_RNA (1)...(19): siRNA sense strand
uggacaaccucgaaaucuc

SEQ ID NO: 1993677 - RNA, 19 nt, Homo sapiens
  misc_RNA (1)...(19): siRNA sense strand
cucaugacgucucgagugu

SEQ ID NO: 1993678 - RNA, 19 nt, Homo sapiens
  misc_RNA (1)...(19): siRNA sense strand
cgaagugcacggcugagau

SEQ ID NO: 1993679 - RNA, 19 nt, Homo sapiens
  misc_RNA (1)...(19): siRNA sense strand
caaggcuggaugagaauuc

SEQ ID NO: 1993680 - RNA, 19 nt, Homo sapiens
  misc_RNA (1)...(19): siRNA sense strand
gggugacgcugagucucuu

SEQ ID NO: 1993681 - RNA, 19 nt, Homo sapiens
  misc_RNA (1)...(19): siRNA sense strand
ggcggaaggaguucaagga

SEQ ID NO: 1993682 - RNA, 19 nt, Homo sapiens
  misc_RNA (1)...(19): siRNA sense strand
caagguguccauucaacag

SEQ ID NO: 1993683 - RNA, 19 nt, Homo sapiens
  misc_RNA (1)...(19): siRNA sense strand
ucagcgggacggaguguga

SEQ ID NO: 1993684 - RNA, 19 nt, Homo sapiens
  misc_RNA (1)...(19): siRNA sense strand
uggcugaagacaccaaaga

SEQ ID NO: 1993685 - RNA, 19 nt, Homo sapiens
  misc_RNA (1)...(19): siRNA sense strand
uggaugugcagggcauuua

SEQ ID NO: 1993686 - RNA, 19 nt, Homo sapiens
  misc_RNA (1)...(19): siRNA sense strand
cagaagaacuggcagagaa

SEQ ID NO: 1993687 - RNA, 19 nt, Homo sapiens
  misc_RNA (1)...(19): siRNA sense strand
guucauguccaaacuauua

SEQ ID NO: 1993688 - RNA, 19 nt, Homo sapiens
  misc_RNA (1)...(19): siRNA sense strand
ggaaauugaacuccugaaa

SEQ ID NO: 1993689 - RNA, 19 nt, Homo sapiens
  misc_RNA (1)...(19): siRNA sense strand
cagcagaucacaaauauuc

SEQ ID NO: 1993690 - RNA, 19 nt, Homo sapiens
  misc_RNA (1)...(19): siRNA sense strand
ggaguuggcugugacuuuc

SEQ ID NO: 1993691 - RNA, 19 nt, Homo sapiens
  misc_RNA (1)...(19): siRNA sense strand
gaagaacuggcagagaaua

SEQ ID NO: 1993692 - RNA, 19 nt, Homo sapiens
  misc_RNA (1)...(19): siRNA sense strand
gcucagaagugucauacuc

SEQ ID NO: 1993693 - RNA, 19 nt, Homo sapiens
  misc_RNA (1)...(19): siRNA sense strand
aaagagaagagaucccuua

SEQ ID NO: 1993694 - RNA, 19 nt, Homo sapiens
  misc_RNA (1)...(19): siRNA sense strand
uacagcagaucacaaauau

SEQ ID NO: 1993695 - RNA, 19 nt, Homo sapiens
  misc_RNA (1)...(19): siRNA sense strand
caggaaaacuuaccuauug

SEQ ID NO: 1993696 - RNA, 19 nt, Homo sapiens
  misc_RNA (1)...(19): siRNA sense strand
cuacagcagaucacaaaua

SEQ ID NO: 1993697 - RNA, 19 nt, Homo sapiens
  misc_RNA (1)...(19): siRNA sense strand
uaacggcgcugggcuagug

SEQ ID NO: 1993698 - RNA, 19 nt, Homo sapiens
  misc_RNA (1)...(19): siRNA sense strand
aaacccaccuugaaacaau

SEQ ID NO: 1993699 - RNA, 19 nt, Homo sapiens
  misc_RNA (1)...(19): siRNA sense strand
aaacuuaccuauugaagcu

SEQ ID NO: 1993700 - RNA, 19 nt, Homo sapiens
  misc_RNA (1)...(19): siRNA sense strand
cagagaauauacucaagug

SEQ ID NO: 1993701 - RNA, 19 nt, Homo sapiens
  misc_RNA (1)...(19): siRNA sense strand
ugacuuucauugagagauu

SEQ ID NO: 1993702 - RNA, 19 nt, Homo sapiens
  misc_RNA (1)...(19): siRNA sense strand
aagcugaaaucuaccagaa

SEQ ID NO: 1993703 - RNA, 19 nt, Homo sapiens
  misc_RNA (1)...(19): siRNA sense strand
gcugugacuuucauugaga

SEQ ID NO: 1993704 - RNA, 19 nt, Homo sapiens
  misc_RNA (1)...(19): siRNA sense strand
aaauugaacuccugaaacu

SEQ ID NO: 1993705 - RNA, 19 nt, Homo sapiens
  misc_RNA (1)...(19): siRNA sense strand
gaucacaaauauucaagcu

SEQ ID NO: 1993706 - RNA, 19 nt, Homo sapiens
  misc_RNA (1)...(19): siRNA sense strand
caaguggcguaaacaacaa

SEQ ID NO: 1993707 - RNA, 19 nt, Homo sapiens
  misc_RNA (1)...(19): siRNA sense strand
gaaauugaacuccugaaac

SEQ ID NO: 1993708 - RNA, 19 nt, Homo sapiens
  misc_RNA (1)...(19): siRNA sense strand
gcaaagauggauauauugg

SEQ ID NO: 1993709 - RNA, 19 nt, Homo sapiens
  misc_RNA (1)...(19): siRNA sense strand
gcugaaaucuaccagaaaa

SEQ ID NO: 1993710 - RNA, 19 nt, Homo sapiens
  misc_RNA (1)...(19): siRNA sense strand
gaaaaugaaccaggcuuua

SEQ ID NO: 1993711 - RNA, 19 nt, Homo sapiens
  misc_RNA (1)...(19): siRNA sense strand
gcagaucacaaauauucaa

SEQ ID NO: 1993712 - RNA, 19 nt, Homo sapiens
  misc_RNA (1)...(19): siRNA sense strand
gauuagaaacccaccuuga

SEQ ID NO: 1993713 - RNA, 19 nt, Homo sapiens
  misc_RNA (1)...(19): siRNA sense strand
gaagugucauacucugcaa

SEQ ID NO: 1993714 - RNA, 19 nt, Homo sapiens
  misc_RNA (1)...(19): siRNA sense strand
ucaaucaggagauguuaaa

SEQ ID NO: 1993715 - RNA, 19 nt, Homo sapiens
  misc_RNA (1)...(19): siRNA sense strand
gauauuauaaugccuccuu

SEQ ID NO: 1993716 - RNA, 19 nt, Homo sapiens
  misc_RNA (1)...(19): siRNA sense strand
gaacuccugaaacuagaaa

SEQ ID NO: 1993717 - RNA, 19 nt, Homo sapiens
  misc_RNA (1)...(19): siRNA sense strand
gaauaaucauuuggaagca

SEQ ID NO: 1993718 - RNA, 19 nt, Homo sapiens
  misc_RNA (1)...(19): siRNA sense strand
gaacuucaccagacuacag

SEQ ID NO: 1993719 - RNA, 19 nt, Homo sapiens
  misc_RNA (1)...(19): siRNA sense strand
ugcaaagcaugaauaauca

SEQ ID NO: 1993720 - RNA, 19 nt, Homo sapiens
  misc_RNA (1)...(19): siRNA sense strand
gaaguuucgucuuguaucc

SEQ ID NO: 1993721 - RNA, 19 nt, Homo sapiens
  misc_RNA (1)...(19): siRNA sense strand
gacuacagcagaucacaaa

SEQ ID NO: 1993722 - RNA, 19 nt, Homo sapiens
  misc_RNA (1)...(19): siRNA sense strand
uuagaaacccaccuugaaa

SEQ ID NO: 1993723 - RNA, 19 nt, Homo sapiens
  misc_RNA (1)...(19): siRNA sense strand
gacuuucauugagagauua

SEQ ID NO: 1993724 - RNA, 19 nt, Homo sapiens
  misc_RNA (1)...(19): siRNA sense strand
cugcaaagcaugaauaauc

SEQ ID NO: 1993725 - RNA, 19 nt, Homo sapiens
  misc_RNA (1)...(19): siRNA sense strand
aaacccaugugccaggaaa

SEQ ID NO: 1993726 - RNA, 19 nt, Homo sapiens
  misc_RNA (1)...(19): siRNA sense strand
ucacagauauaugguacau

SEQ ID NO: 1993727 - RNA, 19 nt, Homo sapiens
  misc_RNA (1)...(19): siRNA sense strand
gaacuggcagagaauauac

SEQ ID NO: 1993728 - RNA, 19 nt, Homo sapiens
  misc_RNA (1)...(19): siRNA sense strand
gaaacccaccuugaaacaa

SEQ ID NO: 1993729 - RNA, 19 nt, Homo sapiens
  misc_RNA (1)...(19): siRNA sense strand
gcagagaauauacucaagu

SEQ ID NO: 1993730 - RNA, 19 nt, Homo sapiens
  misc_RNA (1)...(19): siRNA sense strand
gauggucaaucaggagaug

SEQ ID NO: 1993731 - RNA, 19 nt, Homo sapiens
  misc_RNA (1)...(19): siRNA sense strand
gagauuagaaacccaccuu

SEQ ID NO: 1993732 - RNA, 19 nt, Homo sapiens
  misc_RNA (1)...(19): siRNA sense strand
uauaaugccuccuuuaccu

SEQ ID NO: 1993733 - RNA, 19 nt, Homo sapiens
  misc_RNA (1)...(19): siRNA sense strand
ucaaguggcguaaacaaca

SEQ ID NO: 1993734 - RNA, 19 nt, Homo sapiens
  misc_RNA (1)...(19): siRNA sense strand
ggcaaagacuguugaaacc

SEQ ID NO: 1993735 - RNA, 19 nt, Homo sapiens
  misc_RNA (1)...(19): siRNA sense strand
ggucaaucaggagauguua

SEQ ID NO: 1993736 - RNA, 19 nt, Homo sapiens
  misc_RNA (1)...(19): siRNA sense strand
uaaugccuccuuuaccuuu

SEQ ID NO: 1993737 - RNA, 19 nt, Homo sapiens
  misc_RNA (1)...(19): siRNA sense strand
aaagauacagcagauguug

SEQ ID NO: 1993738 - RNA, 19 nt, Homo sapiens
  misc_RNA (1)...(19): siRNA sense strand
agaacuggcagagaauaua

SEQ ID NO: 1993739 - RNA, 19 nt, Homo sapiens
  misc_RNA (1)...(19): siRNA sense strand
ugaaccaggcuuuagcaaa

SEQ ID NO: 1993740 - RNA, 19 nt, Homo sapiens
  misc_RNA (1)...(19): siRNA sense strand
cuauugaagcuguuuauca

SEQ ID NO: 1993741 - RNA, 19 nt, Homo sapiens
  misc_RNA (1)...(19): siRNA sense strand
gauauaugguacauuugcu

SEQ ID NO: 1993742 - RNA, 19 nt, Homo sapiens
  misc_RNA (1)...(19): siRNA sense strand
cuaggccacuucauagcuu

SEQ ID NO: 1993743 - RNA, 19 nt, Homo sapiens
  misc_RNA (1)...(19): siRNA sense strand
agauacagcagauguuguu

SEQ ID NO: 1993744 - RNA, 19 nt, Homo sapiens
  misc_RNA (1)...(19): siRNA sense strand
ucaccagacuacagcagau

SEQ ID NO: 1993745 - RNA, 19 nt, Homo sapiens
  misc_RNA (1)...(19): siRNA sense strand
agagaucccuuaggcaaag

SEQ ID NO: 1993746 - RNA, 19 nt, Homo sapiens
  misc_RNA (1)...(19): siRNA sense strand
gucauacucugcaaagcau

SEQ ID NO: 1993747 - RNA, 19 nt, Homo sapiens
  misc_RNA (1)...(19): siRNA sense strand
gauauauuggugacugaga

SEQ ID NO: 1993748 - RNA, 19 nt, Homo sapiens
  misc_RNA (1)...(19): siRNA sense strand
uauugaagcuguuuaucac

SEQ ID NO: 1993749 - RNA, 19 nt, Homo sapiens
  misc_RNA (1)...(19): siRNA sense strand
gugcuaggccacuucauag

SEQ ID NO: 1993750 - RNA, 19 nt, Homo sapiens
  misc_RNA (1)...(19): siRNA sense strand
uagcugcaaaucuaaagaa

SEQ ID NO: 1993751 - RNA, 19 nt, Homo sapiens
  misc_RNA (1)...(19): siRNA sense strand
uacagcagauguuguucau

SEQ ID NO: 1993752 - RNA, 19 nt, Homo sapiens
  misc_RNA (1)...(19): siRNA sense strand
ggcagagaauauacucaag

SEQ ID NO: 1993753 - RNA, 19 nt, Homo sapiens
  misc_RNA (1)...(19): siRNA sense strand
gagaucccuuaggcaaaga

SEQ ID NO: 1993754 - RNA, 19 nt, Homo sapiens
  misc_RNA (1)...(19): siRNA sense strand
caaagauggauauauuggu

SEQ ID NO: 1993755 - RNA, 19 nt, Homo sapiens
  misc_RNA (1)...(19): siRNA sense strand
caccuugaaacaauuagaa

SEQ ID NO: 1993756 - RNA, 19 nt, Homo sapiens
  misc_RNA (1)...(19): siRNA sense strand
auacucaaguggcguaaac

SEQ ID NO: 1993757 - RNA, 19 nt, Homo sapiens
  misc_RNA (1)...(19): siRNA sense strand
uggauauauuggugacuga

SEQ ID NO: 1993758 - RNA, 19 nt, Homo sapiens
  misc_RNA (1)...(19): siRNA sense strand
uguuguucauccuuucuuu

SEQ ID NO: 1993759 - RNA, 19 nt, Homo sapiens
  misc_RNA (1)...(19): siRNA sense strand
uggcagagaauauacucaa

SEQ ID NO: 1993760 - RNA, 19 nt, Homo sapiens
  misc_RNA (1)...(19): siRNA sense strand
ugacugagacagaagaacu

SEQ ID NO: 1993761 - RNA, 19 nt, Homo sapiens
  misc_RNA (1)...(19): siRNA sense strand
agaaacccaccuugaaaca

SEQ ID NO: 1993762 - RNA, 19 nt, Homo sapiens
  misc_RNA (1)...(19): siRNA sense strand
uggaguuggcugugacuuu

SEQ ID NO: 1993763 - RNA, 19 nt, Homo sapiens
  misc_RNA (1)...(19): siRNA sense strand
auuagaaacccaccuugaa

SEQ ID NO: 1993764 - RNA, 19 nt, Homo sapiens
  misc_RNA (1)...(19): siRNA sense strand
gaaacccaugugccaggaa

SEQ ID NO: 1993765 - RNA, 19 nt, Homo sapiens
  misc_RNA (1)...(19): siRNA sense strand
ggaaaacuuaccuauugaa

SEQ ID NO: 1993766 - RNA, 19 nt, Homo sapiens
  misc_RNA (1)...(19): siRNA sense strand
acucugcaaagcaugaaua

SEQ ID NO: 1993767 - RNA, 19 nt, Homo sapiens
  misc_RNA (1)...(19): siRNA sense strand
gaggaggagugcaggauug

SEQ ID NO: 1993768 - RNA, 19 nt, Homo sapiens
  misc_RNA (1)...(19): siRNA sense strand
gcugagcgaugacugcauu

SEQ ID NO: 1993769 - RNA, 19 nt, Homo sapiens
  misc_RNA (1)...(19): siRNA sense strand
acaagaaacugcgcaacug

SEQ ID NO: 1993770 - RNA, 19 nt, Homo sapiens
  misc_RNA (1)...(19): siRNA sense strand
gcucggcuguggaaccaau

SEQ ID NO: 1993771 - RNA, 19 nt, Homo sapiens
  misc_RNA (1)...(19): siRNA sense strand
gagcucggcuguggaacca

SEQ ID NO: 1993772 - RNA, 19 nt, Homo sapiens
  misc_RNA (1)...(19): siRNA sense strand
gacaagaaacugcgcaacu

SEQ ID NO: 1993773 - RNA, 19 nt, Homo sapiens
  misc_RNA (1)...(19): siRNA sense strand
gaugacugcauuccacuca

SEQ ID NO: 1993774 - RNA, 19 nt, Homo sapiens
  misc_RNA (1)...(19): siRNA sense strand
ugucaccucucucaggaau

SEQ ID NO: 1993775 - RNA, 19 nt, Homo sapiens
  misc_RNA (1)...(19): siRNA sense strand
ugagccauguacccagaaa

SEQ ID NO: 1993776 - RNA, 19 nt, Homo sapiens
  misc_RNA (1)...(19): siRNA sense strand
gacgagcucggcuguggaa

SEQ ID NO: 1993777 - RNA, 19 nt, Homo sapiens
  misc_RNA (1)...(19): siRNA sense strand
gguuacugguggccaugaa

SEQ ID NO: 1993778 - RNA, 19 nt, Homo sapiens
  misc_RNA (1)...(19): siRNA sense strand
ucaccucucucaggaaugc

SEQ ID NO: 1993779 - RNA, 19 nt, Homo sapiens
  misc_RNA (1)...(19): siRNA sense strand
gaagcccaacugccuaugg

SEQ ID NO: 1993780 - RNA, 19 nt, Homo sapiens
  misc_RNA (1)...(19): siRNA sense strand
gugcaggauugagccaugu

SEQ ID NO: 1993781 - RNA, 19 nt, Homo sapiens
  misc_RNA (1)...(19): siRNA sense strand
gcagcgauggcagcgauga

SEQ ID NO: 1993782 - RNA, 19 nt, Homo sapiens
  misc_RNA (1)...(19): siRNA sense strand
ugaggaggagugcaggauu

SEQ ID NO: 1993783 - RNA, 19 nt, Homo sapiens
  misc_RNA (1)...(19): siRNA sense strand
gaagagaacucaguccaua

SEQ ID NO: 1993784 - RNA, 19 nt, Homo sapiens
  misc_RNA (1)...(19): siRNA sense strand
ggagagagccugcgauuau

SEQ ID NO: 1993785 - RNA, 19 nt, Homo sapiens
  misc_RNA (1)...(19): siRNA sense strand
acagguagaugaaaugaua

SEQ ID NO: 1993786 - RNA, 19 nt, Homo sapiens
  misc_RNA (1)...(19): siRNA sense strand
gaaauacgaaucaagcaaa

SEQ ID NO: 1993787 - RNA, 19 nt, Homo sapiens
  misc_RNA (1)...(19): siRNA sense strand
gaacuggcuugacuacuuc

SEQ ID NO: 1993788 - RNA, 19 nt, Homo sapiens
  misc_RNA (1)...(19): siRNA sense strand
gagaugaacuggcuugacu

SEQ ID NO: 1993789 - RNA, 19 nt, Homo sapiens
  misc_RNA (1)...(19): siRNA sense strand
gagagagccugcgauuauu

SEQ ID NO: 1993790 - RNA, 19 nt, Homo sapiens
  misc_RNA (1)...(19): siRNA sense strand
ggaagaggaagaagaagaa

SEQ ID NO: 1993791 - RNA, 19 nt, Homo sapiens
  misc_RNA (1)...(19): siRNA sense strand
ugaacuggcuugacuacuu

SEQ ID NO: 1993792 - RNA, 19 nt, Homo sapiens
  misc_RNA (1)...(19): siRNA sense strand
gaaagguaauacagguaga

SEQ ID NO: 1993793 - RNA, 19 nt, Homo sapiens
  misc_RNA (1)...(19): siRNA sense strand
ggcaacagcugaccuggau

SEQ ID NO: 1993794 - RNA, 19 nt, Homo sapiens
  misc_RNA (1)...(19): siRNA sense strand
gaaguggaaauacgaauca

SEQ ID NO: 1993795 - RNA, 19 nt, Homo sapiens
  misc_RNA (1)...(19): siRNA sense strand
gagagcggauuuacaacau

SEQ ID NO: 1993796 - RNA, 19 nt, Homo sapiens
  misc_RNA (1)...(19): siRNA sense strand
ggaaauacgaaucaagcaa

SEQ ID NO: 1993797 - RNA, 19 nt, Homo sapiens
  misc_RNA (1)...(19): siRNA sense strand
gguaauacagguagaugaa

SEQ ID NO: 1993798 - RNA, 19 nt, Homo sapiens
  misc_RNA (1)...(19): siRNA sense strand
caggagagcggauuuacaa

SEQ ID NO: 1993799 - RNA, 19 nt, Homo sapiens
  misc_RNA (1)...(19): siRNA sense strand
ggccaagaccaacuccuua

SEQ ID NO: 1993800 - RNA, 19 nt, Homo sapiens
  misc_RNA (1)...(19): siRNA sense strand
ggauaucaccgaaauaaac

SEQ ID NO: 1993801 - RNA, 19 nt, Homo sapiens
  misc_RNA (1)...(19): siRNA sense strand
uggauaaccucuacaacau

SEQ ID NO: 1993802 - RNA, 19 nt, Homo sapiens
  misc_RNA (1)...(19): siRNA sense strand
caacagcugaccuggauau

SEQ ID NO: 1993803 - RNA, 19 nt, Homo sapiens
  misc_RNA (1)...(19): siRNA sense strand
gaaagacuucgaccgugaa

SEQ ID NO: 1993804 - RNA, 19 nt, Homo sapiens
  misc_RNA (1)...(19): siRNA sense strand
ccagaggccuugggaaaca

SEQ ID NO: 1993805 - RNA, 19 nt, Homo sapiens
  misc_RNA (1)...(19): siRNA sense strand
ggagagcggauuuacaaca

SEQ ID NO: 1993806 - RNA, 19 nt, Homo sapiens
  misc_RNA (1)...(19): siRNA sense strand
gcauacggacccacaaaug

SEQ ID NO: 1993807 - RNA, 19 nt, Homo sapiens
  misc_RNA (1)...(19): siRNA sense strand
ggaagaagaagaagaaaau

SEQ ID NO: 1993808 - RNA, 19 nt, Homo sapiens
  misc_RNA (1)...(19): siRNA sense strand
gagcggauuuacaacaucu

SEQ ID NO: 1993809 - RNA, 19 nt, Homo sapiens
  misc_RNA (1)...(19): siRNA sense strand
gaagcucgccuccuuucug

SEQ ID NO: 1993810 - RNA, 19 nt, Homo sapiens
  misc_RNA (1)...(19): siRNA sense strand
cauacggacccacaaauga

SEQ ID NO: 1993811 - RNA, 19 nt, Homo sapiens
  misc_RNA (1)...(19): siRNA sense strand
gauaucaccgaaauaaaca

SEQ ID NO: 1993812 - RNA, 19 nt, Homo sapiens
  misc_RNA (1)...(19): siRNA sense strand
gaaaaugaacguaagaauc

SEQ ID NO: 1993813 - RNA, 19 nt, Homo sapiens
  misc_RNA (1)...(19): siRNA sense strand
guggauaaccucuacaaca

SEQ ID NO: 1993814 - RNA, 19 nt, Homo sapiens
  misc_RNA (1)...(19): siRNA sense strand
agaggaagaagaagaagaa

SEQ ID NO: 1993815 - RNA, 19 nt, Homo sapiens
  misc_RNA (1)...(19): siRNA sense strand
aagcucgccuccuuucuga

SEQ ID NO: 1993816 - RNA, 19 nt, Homo sapiens
  misc_RNA (1)...(19): siRNA sense strand
gauaguggaagaggaagaa

SEQ ID NO: 1993817 - RNA, 19 nt, Homo sapiens
  misc_RNA (1)...(19): siRNA sense strand
auacgaaucaagcaaauug

SEQ ID NO: 1993818 - RNA, 19 nt, Homo sapiens
  misc_RNA (1)...(19): siRNA sense strand
ccaaccgucucgcccaaau

SEQ ID NO: 1993819 - RNA, 19 nt, Homo sapiens
  misc_RNA (1)...(19): siRNA sense strand
gcggagagagccugcgauu

SEQ ID NO: 1993820 - RNA, 19 nt, Homo sapiens
  misc_RNA (1)...(19): siRNA sense strand
ucaccgaaauaaacaaacu

SEQ ID NO: 1993821 - RNA, 19 nt, Homo sapiens
  misc_RNA (1)...(19): siRNA sense strand
ggagguguccauggucaaa

SEQ ID NO: 1993822 - RNA, 19 nt, Homo sapiens
  misc_RNA (1)...(19): siRNA sense strand
guaauacagguagaugaaa

SEQ ID NO: 1993823 - RNA, 19 nt, Homo sapiens
  misc_RNA (1)...(19): siRNA sense strand
ccaaggcucugcgcgagau

SEQ ID NO: 1993824 - RNA, 19 nt, Homo sapiens
  misc_RNA (1)...(19): siRNA sense strand
cagcugaccuggauaucac

SEQ ID NO: 1993825 - RNA, 19 nt, Homo sapiens
  misc_RNA (1)...(19): siRNA sense strand
cuggauaucaccgaaauaa

SEQ ID NO: 1993826 - RNA, 19 nt, Homo sapiens
  misc_RNA (1)...(19): siRNA sense strand
gcaggagagcggauuuaca

SEQ ID NO: 1993827 - RNA, 19 nt, Homo sapiens
  misc_RNA (1)...(19): siRNA sense strand
cagcaggagagcggauuua

SEQ ID NO: 1993828 - RNA, 19 nt, Homo sapiens
  misc_RNA (1)...(19): siRNA sense strand
gcagcaggagagcggauuu

SEQ ID NO: 1993829 - RNA, 19 nt, Homo sapiens
  misc_RNA (1)...(19): siRNA sense strand
aaacaaacuaacagcagaa

SEQ ID NO: 1993830 - RNA, 19 nt, Homo sapiens
  misc_RNA (1)...(19): siRNA sense strand
caaacuaacagcagaagcu

SEQ ID NO: 1993831 - RNA, 19 nt, Homo sapiens
  misc_RNA (1)...(19): siRNA sense strand
cagcauacggacccacaaa

SEQ ID NO: 1993832 - RNA, 19 nt, Homo sapiens
  misc_RNA (1)...(19): siRNA sense strand
uugcagaggcacaguauug

SEQ ID NO: 1993833 - RNA, 19 nt, Homo sapiens
  misc_RNA (1)...(19): siRNA sense strand
uaacagcagaagcuauuca

SEQ ID NO: 1993834 - RNA, 19 nt, Homo sapiens
  misc_RNA (1)...(19): siRNA sense strand
aaacuaacagcagaagcua

SEQ ID NO: 1993835 - RNA, 19 nt, Homo sapiens
  misc_RNA (1)...(19): siRNA sense strand
ucaaacugcaagagucaaa

SEQ ID NO: 1993836 - RNA, 19 nt, Homo sapiens
  misc_RNA (1)...(19): siRNA sense strand
ccugaaaucugccaaaaca

SEQ ID NO: 1993837 - RNA, 19 nt, Homo sapiens
  misc_RNA (1)...(19): siRNA sense strand
agcagaagcuauucagaca

SEQ ID NO: 1993838 - RNA, 19 nt, Homo sapiens
  misc_RNA (1)...(19): siRNA sense strand
acuaacagcagaagcuauu

SEQ ID NO: 1993839 - RNA, 19 nt, Homo sapiens
  misc_RNA (1)...(19): siRNA sense strand
gaagaaaaugaacguaaga

SEQ ID NO: 1993840 - RNA, 19 nt, Homo sapiens
  misc_RNA (1)...(19): siRNA sense strand
ggauaaccucuacaacauc

SEQ ID NO: 1993841 - RNA, 19 nt, Homo sapiens
  misc_RNA (1)...(19): siRNA sense strand
aaagguguccuccauccaa

SEQ ID NO: 1993842 - RNA, 19 nt, Homo sapiens
  misc_RNA (1)...(19): siRNA sense strand
ugggaaacauuaagaagcu

SEQ ID NO: 1993843 - RNA, 19 nt, Homo sapiens
  misc_RNA (1)...(19): siRNA sense strand
agaacucaguccauacaag

SEQ ID NO: 1993844 - RNA, 19 nt, Homo sapiens
  misc_RNA (1)...(19): siRNA sense strand
guagucggguggccaagac

SEQ ID NO: 1993845 - RNA, 19 nt, Homo sapiens
  misc_RNA (1)...(19): siRNA sense strand
gaugaacuggcuugacuac

SEQ ID NO: 1993846 - RNA, 19 nt, Homo sapiens
  misc_RNA (1)...(19): siRNA sense strand
cgaccgugaaguggaaaua

SEQ ID NO: 1993847 - RNA, 19 nt, Homo sapiens
  misc_RNA (1)...(19): siRNA sense strand
uggaagaggaagaagaaga

SEQ ID NO: 1993848 - RNA, 19 nt, Homo sapiens
  misc_RNA (1)...(19): siRNA sense strand
gcaacagcugaccuggaua

SEQ ID NO: 1993849 - RNA, 19 nt, Homo sapiens
  misc_RNA (1)...(19): siRNA sense strand
cggagagagccugcgauua

SEQ ID NO: 1993850 - RNA, 19 nt, Homo sapiens
  misc_RNA (1)...(19): siRNA sense strand
gagaacucaguccauacaa

SEQ ID NO: 1993851 - RNA, 19 nt, Homo sapiens
  misc_RNA (1)...(19): siRNA sense strand
gaggaagaagaagaagaaa

SEQ ID NO: 1993852 - RNA, 19 nt, Homo sapiens
  misc_RNA (1)...(19): siRNA sense strand
aaugauaguggaagaggaa

SEQ ID NO: 1993853 - RNA, 19 nt, Homo sapiens
  misc_RNA (1)...(19): siRNA sense strand
gcggaagcucgccuccuuu

SEQ ID NO: 1993854 - RNA, 19 nt, Homo sapiens
  misc_RNA (1)...(19): siRNA sense strand
gccaaaacacgaaagguaa

SEQ ID NO: 1993855 - RNA, 19 nt, Homo sapiens
  misc_RNA (1)...(19): siRNA sense strand
caaaacacgaaagguaaua

SEQ ID NO: 1993856 - RNA, 19 nt, Homo sapiens
  misc_RNA (1)...(19): siRNA sense strand
uguccuccauccaagaaga

SEQ ID NO: 1993857 - RNA, 19 nt, Homo sapiens
  misc_RNA (1)...(19): siRNA sense strand
aaacacgaaagguaauaca

SEQ ID NO: 1993858 - RNA, 19 nt, Homo sapiens
  misc_RNA (1)...(19): siRNA sense strand
gguguccuccauccaagaa

SEQ ID NO: 1993859 - RNA, 19 nt, Homo sapiens
  misc_RNA (1)...(19): siRNA sense strand
gaagaggaagaagaagaag

SEQ ID NO: 1993860 - RNA, 19 nt, Homo sapiens
  misc_RNA (1)...(19): siRNA sense strand
agagaacucaguccauaca

SEQ ID NO: 1993861 - RNA, 19 nt, Homo sapiens
  misc_RNA (1)...(19): siRNA sense strand
agagagccugcgauuauug

SEQ ID NO: 1993862 - RNA, 19 nt, Homo sapiens
  misc_RNA (1)...(19): siRNA sense strand
caaguguccucuaugcuua

SEQ ID NO: 1993863 - RNA, 19 nt, Homo sapiens
  misc_RNA (1)...(19): siRNA sense strand
cgucacggcucuccuauuu

SEQ ID NO: 1993864 - RNA, 19 nt, Homo sapiens
  misc_RNA (1)...(19): siRNA sense strand
ggauggaccucuacuucuu

SEQ ID NO: 1993865 - RNA, 19 nt, Homo sapiens
  misc_RNA (1)...(19): siRNA sense strand
gguggcagaucccucagua

SEQ ID NO: 1993866 - RNA, 19 nt, Homo sapiens
  misc_RNA (1)...(19): siRNA sense strand
ucacggcucuccuauuugu

SEQ ID NO: 1993867 - RNA, 19 nt, Homo sapiens
  misc_RNA (1)...(19): siRNA sense strand
gcagccaaguguccucuau

SEQ ID NO: 1993868 - RNA, 19 nt, Homo sapiens
  misc_RNA (1)...(19): siRNA sense strand
ggccagagaccgucaaugu

SEQ ID NO: 1993869 - RNA, 19 nt, Homo sapiens
  misc_RNA (1)...(19): siRNA sense strand
ccgccaaccucgugcugua

SEQ ID NO: 1993870 - RNA, 19 nt, Homo sapiens
  misc_RNA (1)...(19): siRNA sense strand
aagaggacaucgccaacuu

SEQ ID NO: 1993871 - RNA, 19 nt, Homo sapiens
  misc_RNA (1)...(19): siRNA sense strand
ccaaguguccucuaugcuu

SEQ ID NO: 1993872 - RNA, 19 nt, Homo sapiens
  misc_RNA (1)...(19): siRNA sense strand
uugggaacaucaacaauug

SEQ ID NO: 1993873 - RNA, 19 nt, Homo sapiens
  misc_RNA (1)...(19): siRNA sense strand
gaagaucuugcccgucaug

SEQ ID NO: 1993874 - RNA, 19 nt, Homo sapiens
  misc_RNA (1)...(19): siRNA sense strand
cuggaucgcuggacgcuau

SEQ ID NO: 1993875 - RNA, 19 nt, Homo sapiens
  misc_RNA (1)...(19): siRNA sense strand
caacagcaccaacuucaac

SEQ ID NO: 1993876 - RNA, 19 nt, Homo sapiens
  misc_RNA (1)...(19): siRNA sense strand
gggauguucuuugguuuua

SEQ ID NO: 1993877 - RNA, 19 nt, Homo sapiens
  misc_RNA (1)...(19): siRNA sense strand
ccuacuggauggucuacuu

SEQ ID NO: 1993878 - RNA, 19 nt, Homo sapiens
  misc_RNA (1)...(19): siRNA sense strand
cagaugcaguccaccuaug

SEQ ID NO: 1993879 - RNA, 19 nt, Homo sapiens
  misc_RNA (1)...(19): siRNA sense strand
gauggucuacuuccagaug

SEQ ID NO: 1993880 - RNA, 19 nt, Homo sapiens
  misc_RNA (1)...(19): siRNA sense strand
caucaugggcaucuucuuc

SEQ ID NO: 1993881 - RNA, 19 nt, Homo sapiens
  misc_RNA (1)...(19): siRNA sense strand
cuccacaucccaaacauuu

SEQ ID NO: 1993882 - RNA, 19 nt, Homo sapiens
  misc_RNA (1)...(19): siRNA sense strand
agauggagcgcuuacacua

SEQ ID NO: 1993883 - RNA, 19 nt, Homo sapiens
  misc_RNA (1)...(19): siRNA sense strand
ccucaguaccugcucauug

SEQ ID NO: 1993884 - RNA, 19 nt, Homo sapiens
  misc_RNA (1)...(19): siRNA sense strand
gaccgugucccagcagauu

SEQ ID NO: 1993885 - RNA, 19 nt, Homo sapiens
  misc_RNA (1)...(19): siRNA sense strand
ugaaggaccgcuugaucga

SEQ ID NO: 1993886 - RNA, 19 nt, Homo sapiens
  misc_RNA (1)...(19): siRNA sense strand
uacacuacauccaccacaa

SEQ ID NO: 1993887 - RNA, 19 nt, Homo sapiens
  misc_RNA (1)...(19): siRNA sense strand
caaggacuuugggaacauc

SEQ ID NO: 1993888 - RNA, 19 nt, Homo sapiens
  misc_RNA (1)...(19): siRNA sense strand
cucaguaccugcucauugg

SEQ ID NO: 1993889 - RNA, 19 nt, Homo sapiens
  misc_RNA (1)...(19): siRNA sense strand
gauggaccucuacuucuuc

SEQ ID NO: 1993890 - RNA, 19 nt, Homo sapiens
  misc_RNA (1)...(19): siRNA sense strand
ccgcuugaucgacccuuua

SEQ ID NO: 1993891 - RNA, 19 nt, Homo sapiens
  misc_RNA (1)...(19): siRNA sense strand
cggcaccacuguccaucug

SEQ ID NO: 1993892 - RNA, 19 nt, Homo sapiens
  misc_RNA (1)...(19): siRNA sense strand
uggcguuuauucagcagaa

SEQ ID NO: 1993893 - RNA, 19 nt, Homo sapiens
  misc_RNA (1)...(19): siRNA sense strand
ggagauggagcgcuuacac

SEQ ID NO: 1993894 - RNA, 19 nt, Homo sapiens
  misc_RNA (1)...(19): siRNA sense strand
ccagaugcaguccaccuau

SEQ ID NO: 1993895 - RNA, 19 nt, Homo sapiens
  misc_RNA (1)...(19): siRNA sense strand
gccagagaccgucaaugug

SEQ ID NO: 1993896 - RNA, 19 nt, Homo sapiens
  misc_RNA (1)...(19): siRNA sense strand
ccggauggaccucuacuuc

SEQ ID NO: 1993897 - RNA, 19 nt, Homo sapiens
  misc_RNA (1)...(19): siRNA sense strand
gauggagcgcuuacacuac

SEQ ID NO: 1993898 - RNA, 19 nt, Homo sapiens
  misc_RNA (1)...(19): siRNA sense strand
cuuaagcucgcucuccaaa

SEQ ID NO: 1993899 - RNA, 19 nt, Homo sapiens
  misc_RNA (1)...(19): siRNA sense strand
uuugggaacaucaacaauu

SEQ ID NO: 1993900 - RNA, 19 nt, Homo sapiens
  misc_RNA (1)...(19): siRNA sense strand
gagauggagcgcuuacacu

SEQ ID NO: 1993901 - RNA, 19 nt, Homo sapiens
  misc_RNA (1)...(19): siRNA sense strand
gaagcaacauuccaauaaa

SEQ ID NO: 1993902 - RNA, 19 nt, Homo sapiens
  misc_RNA (1)...(19): siRNA sense strand
caaagaagauggaagacaa

SEQ ID NO: 1993903 - RNA, 19 nt, Homo sapiens
  misc_RNA (1)...(19): siRNA sense strand
gaagagguauccacaagug

SEQ ID NO: 1993904 - RNA, 19 nt, Homo sapiens
  misc_RNA (1)...(19): siRNA sense strand
aaccaaagaugaacgauuu

SEQ ID NO: 1993905 - RNA, 19 nt, Homo sapiens
  misc_RNA (1)...(19): siRNA sense strand
ggaaacucguggacuauga

SEQ ID NO: 1993906 - RNA, 19 nt, Homo sapiens
  misc_RNA (1)...(19): siRNA sense strand
ccaagcaggugcagaagaa

SEQ ID NO: 1993907 - RNA, 19 nt, Homo sapiens
  misc_RNA (1)...(19): siRNA sense strand
ccucuuaccucaccuacua

SEQ ID NO: 1993908 - RNA, 19 nt, Homo sapiens
  misc_RNA (1)...(19): siRNA sense strand
ggaagacaauucugagauc

SEQ ID NO: 1993909 - RNA, 19 nt, Homo sapiens
  misc_RNA (1)...(19): siRNA sense strand
agaaggugcugcagaaauu

SEQ ID NO: 1993910 - RNA, 19 nt, Homo sapiens
  misc_RNA (1)...(19): siRNA sense strand
cguauuggcugcuauguga

SEQ ID NO: 1993911 - RNA, 19 nt, Homo sapiens
  misc_RNA (1)...(19): siRNA sense strand
acaaggaccugaagaacuu

SEQ ID NO: 1993912 - RNA, 19 nt, Homo sapiens
  misc_RNA (1)...(19): siRNA sense strand
ggaaagcuguagaaaccaa

SEQ ID NO: 1993913 - RNA, 19 nt, Homo sapiens
  misc_RNA (1)...(19): siRNA sense strand
gaagauggaagacaaggaa

SEQ ID NO: 1993914 - RNA, 19 nt, Homo sapiens
  misc_RNA (1)...(19): siRNA sense strand
gagaagcaacauuccaaua

SEQ ID NO: 1993915 - RNA, 19 nt, Homo sapiens
  misc_RNA (1)...(19): siRNA sense strand
gaauaaugaucuccuuugg

SEQ ID NO: 1993916 - RNA, 19 nt, Homo sapiens
  misc_RNA (1)...(19): siRNA sense strand
gccacaagcuguacaagga

SEQ ID NO: 1993917 - RNA, 19 nt, Homo sapiens
  misc_RNA (1)...(19): siRNA sense strand
gaucaaggagcucuuagaa

SEQ ID NO: 1993918 - RNA, 19 nt, Homo sapiens
  misc_RNA (1)...(19): siRNA sense strand
gaagacaauucugagauca

SEQ ID NO: 1993919 - RNA, 19 nt, Homo sapiens
  misc_RNA (1)...(19): siRNA sense strand
ggaauaaugaucuccuuug

SEQ ID NO: 1993920 - RNA, 19 nt, Homo sapiens
  misc_RNA (1)...(19): siRNA sense strand
ggagcugccuauucuuuau

SEQ ID NO: 1993921 - RNA, 19 nt, Homo sapiens
  misc_RNA (1)...(19): siRNA sense strand
uaaggaccauggaaaucua

SEQ ID NO: 1993922 - RNA, 19 nt, Homo sapiens
  misc_RNA (1)...(19): siRNA sense strand
ugaaggaucugaacaacca

SEQ ID NO: 1993923 - RNA, 19 nt, Homo sapiens
  misc_RNA (1)...(19): siRNA sense strand
gaucugaacaaccaaagaa

SEQ ID NO: 1993924 - RNA, 19 nt, Homo sapiens
  misc_RNA (1)...(19): siRNA sense strand
uugaagaucugaaccaaga

SEQ ID NO: 1993925 - RNA, 19 nt, Homo sapiens
  misc_RNA (1)...(19): siRNA sense strand
caucucagguugcuucaga

SEQ ID NO: 1993926 - RNA, 19 nt, Homo sapiens
  misc_RNA (1)...(19): siRNA sense strand
uagaggagcugccuauucu

SEQ ID NO: 1993927 - RNA, 19 nt, Homo sapiens
  misc_RNA (1)...(19): siRNA sense strand
gaggagcugccuauucuuu

SEQ ID NO: 1993928 - RNA, 19 nt, Homo sapiens
  misc_RNA (1)...(19): siRNA sense strand
agaagcaacauuccaauaa

SEQ ID NO: 1993929 - RNA, 19 nt, Homo sapiens
  misc_RNA (1)...(19): siRNA sense strand
ugagcaagcugaaccacaa

SEQ ID NO: 1993930 - RNA, 19 nt, Homo sapiens
  misc_RNA (1)...(19): siRNA sense strand
gaggaagaguucaacaaag

SEQ ID NO: 1993931 - RNA, 19 nt, Homo sapiens
  misc_RNA (1)...(19): siRNA sense strand
gaaggaaggaucugaagca

SEQ ID NO: 1993932 - RNA, 19 nt, Homo sapiens
  misc_RNA (1)...(19): siRNA sense strand
gaaccaagaacuacuagag

SEQ ID NO: 1993933 - RNA, 19 nt, Homo sapiens
  misc_RNA (1)...(19): siRNA sense strand
cagaaacccugcaggagau

SEQ ID NO: 1993934 - RNA, 19 nt, Homo sapiens
  misc_RNA (1)...(19): siRNA sense strand
ccucuacacuuuccuugaa

SEQ ID NO: 1993935 - RNA, 19 nt, Homo sapiens
  misc_RNA (1)...(19): siRNA sense strand
acuagucccucuacacuuu

SEQ ID NO: 1993936 - RNA, 19 nt, Homo sapiens
  misc_RNA (1)...(19): siRNA sense strand
ggaaauagagaaggaagga

SEQ ID NO: 1993937 - RNA, 19 nt, Homo sapiens
  misc_RNA (1)...(19): siRNA sense strand
ucaaagugaugcaugaaag

SEQ ID NO: 1993938 - RNA, 19 nt, Homo sapiens
  misc_RNA (1)...(19): siRNA sense strand
ggaaaaggauaauaagcuu

SEQ ID NO: 1993939 - RNA, 19 nt, Homo sapiens
  misc_RNA (1)...(19): siRNA sense strand
gaagaucuggcaccugaug

SEQ ID NO: 1993940 - RNA, 19 nt, Homo sapiens
  misc_RNA (1)...(19): siRNA sense strand
gucggaaacucguggacua

SEQ ID NO: 1993941 - RNA, 19 nt, Homo sapiens
  misc_RNA (1)...(19): siRNA sense strand
gaaaacauccacaaucaga

SEQ ID NO: 1993942 - RNA, 19 nt, Homo sapiens
  misc_RNA (1)...(19): siRNA sense strand
gaagaggaggaaauagaga

SEQ ID NO: 1993943 - RNA, 19 nt, Homo sapiens
  misc_RNA (1)...(19): siRNA sense strand
gagaaggugcugcagaaau

SEQ ID NO: 1993944 - RNA, 19 nt, Homo sapiens
  misc_RNA (1)...(19): siRNA sense strand
gagcugccuauucuuuaua

SEQ ID NO: 1993945 - RNA, 19 nt, Homo sapiens
  misc_RNA (1)...(19): siRNA sense strand
ggaagacuacgaggagaaa

SEQ ID NO: 1993946 - RNA, 19 nt, Homo sapiens
  misc_RNA (1)...(19): siRNA sense strand
caggcgcucuuuagucauu

SEQ ID NO: 1993947 - RNA, 19 nt, Homo sapiens
  misc_RNA (1)...(19): siRNA sense strand
ugagcaaacuggagaagca

SEQ ID NO: 1993948 - RNA, 19 nt, Homo sapiens
  misc_RNA (1)...(19): siRNA sense strand
uagaagaggaggaaauaga

SEQ ID NO: 1993949 - RNA, 19 nt, Homo sapiens
  misc_RNA (1)...(19): siRNA sense strand
caaaacauuuccaacuuga

SEQ ID NO: 1993950 - RNA, 19 nt, Homo sapiens
  misc_RNA (1)...(19): siRNA sense strand
aagaagagguauccacaag

SEQ ID NO: 1993951 - RNA, 19 nt, Homo sapiens
  misc_RNA (1)...(19): siRNA sense strand
aggagaaggugcugcagaa

SEQ ID NO: 1993952 - RNA, 19 nt, Homo sapiens
  misc_RNA (1)...(19): siRNA sense strand
gcaaagaagauggaagaca

SEQ ID NO: 1993953 - RNA, 19 nt, Homo sapiens
  misc_RNA (1)...(19): siRNA sense strand
gaaucugucucagcaacug

SEQ ID NO: 1993954 - RNA, 19 nt, Homo sapiens
  misc_RNA (1)...(19): siRNA sense strand
agaggaagaguucaacaaa

SEQ ID NO: 1993955 - RNA, 19 nt, Homo sapiens
  misc_RNA (1)...(19): siRNA sense strand
ccagagaagccaguaagaa

SEQ ID NO: 1993956 - RNA, 19 nt, Homo sapiens
  misc_RNA (1)...(19): siRNA sense strand
cagucaaagugaugcauga

SEQ ID NO: 1993957 - RNA, 19 nt, Homo sapiens
  misc_RNA (1)...(19): siRNA sense strand
caccugaaccucaagaaga

SEQ ID NO: 1993958 - RNA, 19 nt, Homo sapiens
  misc_RNA (1)...(19): siRNA sense strand
gaacccgcaccgcaaguga

SEQ ID NO: 1993959 - RNA, 19 nt, Homo sapiens
  misc_RNA (1)...(19): siRNA sense strand
aaaucuauguugcccaguu

SEQ ID NO: 1993960 - RNA, 19 nt, Homo sapiens
  misc_RNA (1)...(19): siRNA sense strand
gagcugaaggccaucguau

SEQ ID NO: 1993961 - RNA, 19 nt, Homo sapiens
  misc_RNA (1)...(19): siRNA sense strand
cagcagcaggcgcucuuua

SEQ ID NO: 1993962 - RNA, 19 nt, Homo sapiens
  misc_RNA (1)...(19): siRNA sense strand
ccaaaacauuuccaacuug

SEQ ID NO: 1993963 - RNA, 19 nt, Homo sapiens
  misc_RNA (1)...(19): siRNA sense strand
cagaaggccacaagcugua

SEQ ID NO: 1993964 - RNA, 19 nt, Homo sapiens
  misc_RNA (1)...(19): siRNA sense strand
gcuguaaggaccauggaaa

SEQ ID NO: 1993965 - RNA, 19 nt, Homo sapiens
  misc_RNA (1)...(19): siRNA sense strand
aagcaacauuccaauaaag

SEQ ID NO: 1993966 - RNA, 19 nt, Homo sapiens
  misc_RNA (1)...(19): siRNA sense strand
caacuugagggaugucuuc

SEQ ID NO: 1993967 - RNA, 19 nt, Homo sapiens
  misc_RNA (1)...(19): siRNA sense strand
gcugcuaugugaccaucuu

SEQ ID NO: 1993968 - RNA, 19 nt, Homo sapiens
  misc_RNA (1)...(19): siRNA sense strand
guaaggaccauggaaaucu

SEQ ID NO: 1993969 - RNA, 19 nt, Homo sapiens
  misc_RNA (1)...(19): siRNA sense strand
ccaccuuaaugacaucuca

SEQ ID NO: 1993970 - RNA, 19 nt, Homo sapiens
  misc_RNA (1)...(19): siRNA sense strand
gggaagacaauucugagau

SEQ ID NO: 1993971 - RNA, 19 nt, Homo sapiens
  misc_RNA (1)...(19): siRNA sense strand
gaagagugagagugaaucu

SEQ ID NO: 1993972 - RNA, 19 nt, Homo sapiens
  misc_RNA (1)...(19): siRNA sense strand
gaaagcuguagaaaccaaa

SEQ ID NO: 1993973 - RNA, 19 nt, Homo sapiens
  misc_RNA (1)...(19): siRNA sense strand
ggagaagcaacauuccaau

SEQ ID NO: 1993974 - RNA, 19 nt, Homo sapiens
  misc_RNA (1)...(19): siRNA sense strand
gaugucuucuacagggaaa

SEQ ID NO: 1993975 - RNA, 19 nt, Homo sapiens
  misc_RNA (1)...(19): siRNA sense strand
gaccauggaaaucuauguu

SEQ ID NO: 1993976 - RNA, 19 nt, Homo sapiens
  misc_RNA (1)...(19): siRNA sense strand
ugagaucaaggagcucuua

SEQ ID NO: 1993977 - RNA, 19 nt, Homo sapiens
  misc_RNA (1)...(19): siRNA sense strand
caaggcagaggaagaguuc

SEQ ID NO: 1993978 - RNA, 19 nt, Homo sapiens
  misc_RNA (1)...(19): siRNA sense strand
gaaggugcugcagaaauug

SEQ ID NO: 1993979 - RNA, 19 nt, Homo sapiens
  misc_RNA (1)...(19): siRNA sense strand
gagguauccacaagugaaa

SEQ ID NO: 1993980 - RNA, 19 nt, Homo sapiens
  misc_RNA (1)...(19): siRNA sense strand
caagaagagguauccacaa

SEQ ID NO: 1993981 - RNA, 19 nt, Homo sapiens
  misc_RNA (1)...(19): siRNA sense strand
cuuagaagaggaggaaaua

SEQ ID NO: 1993982 - RNA, 19 nt, Homo sapiens
  misc_RNA (1)...(19): siRNA sense strand
ggagaaggugcugcagaaa

SEQ ID NO: 1993983 - RNA, 19 nt, Homo sapiens
  misc_RNA (1)...(19): siRNA sense strand
ucuacgaggugaugagcaa

SEQ ID NO: 1993984 - RNA, 19 nt, Homo sapiens
  misc_RNA (1)...(19): siRNA sense strand
ugagggaugucuucuacag

SEQ ID NO: 1993985 - RNA, 19 nt, Homo sapiens
  misc_RNA (1)...(19): siRNA sense strand
ggucucuccuaauccagaa

SEQ ID NO: 1993986 - RNA, 19 nt, Homo sapiens
  misc_RNA (1)...(19): siRNA sense strand
gggaagacuacgaggagaa

SEQ ID NO: 1993987 - RNA, 19 nt, Homo sapiens
  misc_RNA (1)...(19): siRNA sense strand
uguagaaaccaaagaugaa

SEQ ID NO: 1993988 - RNA, 19 nt, Homo sapiens
  misc_RNA (1)...(19): siRNA sense strand
gggcagccuucaucaucug

SEQ ID NO: 1993989 - RNA, 19 nt, Homo sapiens
  misc_RNA (1)...(19): siRNA sense strand
gagaaggaaggaucugaag

SEQ ID NO: 1993990 - RNA, 19 nt, Homo sapiens
  misc_RNA (1)...(19): siRNA sense strand
agacaauucugagaucaag

SEQ ID NO: 1993991 - RNA, 19 nt, Homo sapiens
  misc_RNA (1)...(19): siRNA sense strand
gaucugaaccaagaacuac

SEQ ID NO: 1993992 - RNA, 19 nt, Homo sapiens
  misc_RNA (1)...(19): siRNA sense strand
aaaccaaagaugaacgauu

SEQ ID NO: 1993993 - RNA, 19 nt, Homo sapiens
  misc_RNA (1)...(19): siRNA sense strand
ggagcugaaggccaucgua

SEQ ID NO: 1993994 - RNA, 19 nt, Homo sapiens
  misc_RNA (1)...(19): siRNA sense strand
caacuucuaccaacaacag

SEQ ID NO: 1993995 - RNA, 19 nt, Homo sapiens
  misc_RNA (1)...(19): siRNA sense strand
cacagcaccugaaccucaa

SEQ ID NO: 1993996 - RNA, 19 nt, Homo sapiens
  misc_RNA (1)...(19): siRNA sense strand
gccaagaccagcuucaagu

SEQ ID NO: 1993997 - RNA, 19 nt, Homo sapiens
  misc_RNA (1)...(19): siRNA sense strand
agcaggcgcucuuuaguca

SEQ ID NO: 1993998 - RNA, 19 nt, Homo sapiens
  misc_RNA (1)...(19): siRNA sense strand
uaugugaccaucuuccaaa

SEQ ID NO: 1993999 - RNA, 19 nt, Homo sapiens
  misc_RNA (1)...(19): siRNA sense strand
cagaggaagaguucaacaa

SEQ ID NO: 1994000 - RNA, 19 nt, Homo sapiens
  misc_RNA (1)...(19): siRNA sense strand
cagagaagccaguaagaac

SEQ ID NO: 1994001 - RNA, 19 nt, Homo sapiens
  misc_RNA (1)...(19): siRNA sense strand
gaagcaacauuccaauaaa

SEQ ID NO: 1994002 - RNA, 19 nt, Homo sapiens
  misc_RNA (1)...(19): siRNA sense strand
caaagaagauggaagacaa

SEQ ID NO: 1994003 - RNA, 19 nt, Homo sapiens
  misc_RNA (1)...(19): siRNA sense strand
gaagagguauccacaagug

SEQ ID NO: 1994004 - RNA, 19 nt, Homo sapiens
  misc_RNA (1)...(19): siRNA sense strand
aaccaaagaugaacgauuu

SEQ ID NO: 1994005 - RNA, 19 nt, Homo sapiens
  misc_RNA (1)...(19): siRNA sense strand
ggaaacucguggacuauga

SEQ ID NO: 1994006 - RNA, 19 nt, Homo sapiens
  misc_RNA (1)...(19): siRNA sense strand
ccaagcaggugcagaagaa

SEQ ID NO: 1994007 - RNA, 19 nt, Homo sapiens
  misc_RNA (1)...(19): siRNA sense strand
ccucuuaccucaccuacua

SEQ ID NO: 1994008 - RNA, 19 nt, Homo sapiens
  misc_RNA (1)...(19): siRNA sense strand
ggaagacaauucugagauc

SEQ ID NO: 1994009 - RNA, 19 nt, Homo sapiens
  misc_RNA (1)...(19): siRNA sense strand
agaaggugcugcagaaauu

SEQ ID NO: 1994010 - RNA, 19 nt, Homo sapiens
  misc_RNA (1)...(19): siRNA sense strand
cguauuggcugcuauguga

SEQ ID NO: 1994011 - RNA, 19 nt, Homo sapiens
  misc_RNA (1)...(19): siRNA sense strand
acaaggaccugaagaacuu

SEQ ID NO: 1994012 - RNA, 19 nt, Homo sapiens
  misc_RNA (1)...(19): siRNA sense strand
ggaaagcuguagaaaccaa

SEQ ID NO: 1994013 - RNA, 19 nt, Homo sapiens
  misc_RNA (1)...(19): siRNA sense strand
gaagauggaagacaaggaa

SEQ ID NO: 1994014 - RNA, 19 nt, Homo sapiens
  misc_RNA (1)...(19): siRNA sense strand
gagaagcaacauuccaaua

SEQ ID NO: 1994015 - RNA, 19 nt, Homo sapiens
  misc_RNA (1)...(19): siRNA sense strand
gaauaaugaucuccuuugg

SEQ ID NO: 1994016 - RNA, 19 nt, Homo sapiens
  misc_RNA (1)...(19): siRNA sense strand
gccacaagcuguacaagga

SEQ ID NO: 1994017 - RNA, 19 nt, Homo sapiens
  misc_RNA (1)...(19): siRNA sense strand
gaucaaggagcucuuagaa

SEQ ID NO: 1994018 - RNA, 19 nt, Homo sapiens
  misc_RNA (1)...(19): siRNA sense strand
gaagacaauucugagauca

SEQ ID NO: 1994019 - RNA, 19 nt, Homo sapiens
  misc_RNA (1)...(19): siRNA sense strand
ggaauaaugaucuccuuug

SEQ ID NO: 1994020 - RNA, 19 nt, Homo sapiens
  misc_RNA (1)...(19): siRNA sense strand
ggagcugccuauucuuuau

SEQ ID NO: 1994021 - RNA, 19 nt, Homo sapiens
  misc_RNA (1)...(19): siRNA sense strand
uaaggaccauggaaaucua

SEQ ID NO: 1994022 - RNA, 19 nt, Homo sapiens
  misc_RNA (1)...(19): siRNA sense strand
ugaaggaucugaacaacca

SEQ ID NO: 1994023 - RNA, 19 nt, Homo sapiens
  misc_RNA (1)...(19): siRNA sense strand
gaucugaacaaccaaagaa

SEQ ID NO: 1994024 - RNA, 19 nt, Homo sapiens
  misc_RNA (1)...(19): siRNA sense strand
uugaagaucugaaccaaga

SEQ ID NO: 1994025 - RNA, 19 nt, Homo sapiens
  misc_RNA (1)...(19): siRNA sense strand
caucucagguugcuucaga

SEQ ID NO: 1994026 - RNA, 19 nt, Homo sapiens
  misc_RNA (1)...(19): siRNA sense strand
uagaggagcugccuauucu

SEQ ID NO: 1994027 - RNA, 19 nt, Homo sapiens
  misc_RNA (1)...(19): siRNA sense strand
gaggagcugccuauucuuu

SEQ ID NO: 1994028 - RNA, 19 nt, Homo sapiens
  misc_RNA (1)...(19): siRNA sense strand
agaagcaacauuccaauaa

SEQ ID NO: 1994029 - RNA, 19 nt, Homo sapiens
  misc_RNA (1)...(19): siRNA sense strand
ugagcaagcugaaccacaa

SEQ ID NO: 1994030 - RNA, 19 nt, Homo sapiens
  misc_RNA (1)...(19): siRNA sense strand
gaggaagaguucaacaaag

SEQ ID NO: 1994031 - RNA, 19 nt, Homo sapiens
  misc_RNA (1)...(19): siRNA sense strand
gaaggaaggaucugaagca

SEQ ID NO: 1994032 - RNA, 19 nt, Homo sapiens
  misc_RNA (1)...(19): siRNA sense strand
gaaccaagaacuacuagag

SEQ ID NO: 1994033 - RNA, 19 nt, Homo sapiens
  misc_RNA (1)...(19): siRNA sense strand
cagaaacccugcaggagau

SEQ ID NO: 1994034 - RNA, 19 nt, Homo sapiens
  misc_RNA (1)...(19): siRNA sense strand
ccucuacacuuuccuugaa

SEQ ID NO: 1994035 - RNA, 19 nt, Homo sapiens
  misc_RNA (1)...(19): siRNA sense strand
acuagucccucuacacuuu

SEQ ID NO: 1994036 - RNA, 19 nt, Homo sapiens
  misc_RNA (1)...(19): siRNA sense strand
ggaaauagagaaggaagga

SEQ ID NO: 1994037 - RNA, 19 nt, Homo sapiens
  misc_RNA (1)...(19): siRNA sense strand
ucaaagugaugcaugaaag

SEQ ID NO: 1994038 - RNA, 19 nt, Homo sapiens
  misc_RNA (1)...(19): siRNA sense strand
ggaaaaggauaauaagcuu

SEQ ID NO: 1994039 - RNA, 19 nt, Homo sapiens
  misc_RNA (1)...(19): siRNA sense strand
gaagaucuggcaccugaug

SEQ ID NO: 1994040 - RNA, 19 nt, Homo sapiens
  misc_RNA (1)...(19): siRNA sense strand
gucggaaacucguggacua

SEQ ID NO: 1994041 - RNA, 19 nt, Homo sapiens
  misc_RNA (1)...(19): siRNA sense strand
gaaaacauccacaaucaga

SEQ ID NO: 1994042 - RNA, 19 nt, Homo sapiens
  misc_RNA (1)...(19): siRNA sense strand
gaagaggaggaaauagaga

SEQ ID NO: 1994043 - RNA, 19 nt, Homo sapiens
  misc_RNA (1)...(19): siRNA sense strand
gagaaggugcugcagaaau

SEQ ID NO: 1994044 - RNA, 19 nt, Homo sapiens
  misc_RNA (1)...(19): siRNA sense strand
gagcugccuauucuuuaua

SEQ ID NO: 1994045 - RNA, 19 nt, Homo sapiens
  misc_RNA (1)...(19): siRNA sense strand
ggaagacuacgaggagaaa

SEQ ID NO: 1994046 - RNA, 19 nt, Homo sapiens
  misc_RNA (1)...(19): siRNA sense strand
caggcgcucuuuagucauu

SEQ ID NO: 1994047 - RNA, 19 nt, Homo sapiens
  misc_RNA (1)...(19): siRNA sense strand
ugagcaaacuggagaagca

SEQ ID NO: 1994048 - RNA, 19 nt, Homo sapiens
  misc_RNA (1)...(19): siRNA sense strand
uagaagaggaggaaauaga

SEQ ID NO: 1994049 - RNA, 19 nt, Homo sapiens
  misc_RNA (1)...(19): siRNA sense strand
caaaacauuuccaacuuga

SEQ ID NO: 1994050 - RNA, 19 nt, Homo sapiens
  misc_RNA (1)...(19): siRNA sense strand
aagaagagguauccacaag

SEQ ID NO: 1994051 - RNA, 19 nt, Homo sapiens
  misc_RNA (1)...(19): siRNA sense strand
aggagaaggugcugcagaa

SEQ ID NO: 1994052 - RNA, 19 nt, Homo sapiens
  misc_RNA (1)...(19): siRNA sense strand
gcaaagaagauggaagaca

SEQ ID NO: 1994053 - RNA, 19 nt, Homo sapiens
  misc_RNA (1)...(19): siRNA sense strand
gaaucugucucagcaacug

SEQ ID NO: 1994054 - RNA, 19 nt, Homo sapiens
  misc_RNA (1)...(19): siRNA sense strand
agaggaagaguucaacaaa

SEQ ID NO: 1994055 - RNA, 19 nt, Homo sapiens
  misc_RNA (1)...(19): siRNA sense strand
ccagagaagccaguaagaa

SEQ ID NO: 1994056 - RNA, 19 nt, Homo sapiens
  misc_RNA (1)...(19): siRNA sense strand
cagucaaagugaugcauga

SEQ ID NO: 1994057 - RNA, 19 nt, Homo sapiens
  misc_RNA (1)...(19): siRNA sense strand
caccugaaccucaagaaga

SEQ ID NO: 1994058 - RNA, 19 nt, Homo sapiens
  misc_RNA (1)...(19): siRNA sense strand
gaacccgcaccgcaaguga

SEQ ID NO: 1994059 - RNA, 19 nt, Homo sapiens
  misc_RNA (1)...(19): siRNA sense strand
aaaucuauguugcccaguu

SEQ ID NO: 1994060 - RNA, 19 nt, Homo sapiens
  misc_RNA (1)...(19): siRNA sense strand
gagcugaaggccaucguau

SEQ ID NO: 1994061 - RNA, 19 nt, Homo sapiens
  misc_RNA (1)...(19): siRNA sense strand
cagcagcaggcgcucuuua

SEQ ID NO: 1994062 - RNA, 19 nt, Homo sapiens
  misc_RNA (1)...(19): siRNA sense strand
ccaaaacauuuccaacuug

SEQ ID NO: 1994063 - RNA, 19 nt, Homo sapiens
  misc_RNA (1)...(19): siRNA sense strand
cagaaggccacaagcugua

SEQ ID NO: 1994064 - RNA, 19 nt, Homo sapiens
  misc_RNA (1)...(19): siRNA sense strand
gcuguaaggaccauggaaa

SEQ ID NO: 1994065 - RNA, 19 nt, Homo sapiens
  misc_RNA (1)...(19): siRNA sense strand
aagcaacauuccaauaaag

SEQ ID NO: 1994066 - RNA, 19 nt, Homo sapiens
  misc_RNA (1)...(19): siRNA sense strand
caacuugagggaugucuuc

SEQ ID NO: 1994067 - RNA, 19 nt, Homo sapiens
  misc_RNA (1)...(19): siRNA sense strand
gcugcuaugugaccaucuu

SEQ ID NO: 1994068 - RNA, 19 nt, Homo sapiens
  misc_RNA (1)...(19): siRNA sense strand
guaaggaccauggaaaucu

SEQ ID NO: 1994069 - RNA, 19 nt, Homo sapiens
  misc_RNA (1)...(19): siRNA sense strand
ccaccuuaaugacaucuca

SEQ ID NO: 1994070 - RNA, 19 nt, Homo sapiens
  misc_RNA (1)...(19): siRNA sense strand
gggaagacaauucugagau

SEQ ID NO: 1994071 - RNA, 19 nt, Homo sapiens
  misc_RNA (1)...(19): siRNA sense strand
gaagagugagagugaaucu

SEQ ID NO: 1994072 - RNA, 19 nt, Homo sapiens
  misc_RNA (1)...(19): siRNA sense strand
gaaagcuguagaaaccaaa

SEQ ID NO: 1994073 - RNA, 19 nt, Homo sapiens
  misc_RNA (1)...(19): siRNA sense strand
ggagaagcaacauuccaau

SEQ ID NO: 1994074 - RNA, 19 nt, Homo sapiens
  misc_RNA (1)...(19): siRNA sense strand
gaugucuucuacagggaaa

SEQ ID NO: 1994075 - RNA, 19 nt, Homo sapiens
  misc_RNA (1)...(19): siRNA sense strand
gaccauggaaaucuauguu

SEQ ID NO: 1994076 - RNA, 19 nt, Homo sapiens
  misc_RNA (1)...(19): siRNA sense strand
ugagaucaaggagcucuua

SEQ ID NO: 1994077 - RNA, 19 nt, Homo sapiens
  misc_RNA (1)...(19): siRNA sense strand
caaggcagaggaagaguuc

SEQ ID NO: 1994078 - RNA, 19 nt, Homo sapiens
  misc_RNA (1)...(19): siRNA sense strand
gaaggugcugcagaaauug

SEQ ID NO: 1994079 - RNA, 19 nt, Homo sapiens
  misc_RNA (1)...(19): siRNA sense strand
gagguauccacaagugaaa

SEQ ID NO: 1994080 - RNA, 19 nt, Homo sapiens
  misc_RNA (1)...(19): siRNA sense strand
caagaagagguauccacaa

SEQ ID NO: 1994081 - RNA, 19 nt, Homo sapiens
  misc_RNA (1)...(19): siRNA sense strand
cuuagaagaggaggaaaua

SEQ ID NO: 1994082 - RNA, 19 nt, Homo sapiens
  misc_RNA (1)...(19): siRNA sense strand
ggagaaggugcugcagaaa

SEQ ID NO: 1994083 - RNA, 19 nt, Homo sapiens
  misc_RNA (1)...(19): siRNA sense strand
ucuacgaggugaugagcaa

SEQ ID NO: 1994084 - RNA, 19 nt, Homo sapiens
  misc_RNA (1)...(19): siRNA sense strand
ugagggaugucuucuacag

SEQ ID NO: 1994085 - RNA, 19 nt, Homo sapiens
  misc_RNA (1)...(19): siRNA sense strand
ggucucuccuaauccagaa

SEQ ID NO: 1994086 - RNA, 19 nt, Homo sapiens
  misc_RNA (1)...(19): siRNA sense strand
gggaagacuacgaggagaa

SEQ ID NO: 1994087 - RNA, 19 nt, Homo sapiens
  misc_RNA (1)...(19): siRNA sense strand
uguagaaaccaaagaugaa

SEQ ID NO: 1994088 - RNA, 19 nt, Homo sapiens
  misc_RNA (1)...(19): siRNA sense strand
gggcagccuucaucaucug

SEQ ID NO: 1994089 - RNA, 19 nt, Homo sapiens
  misc_RNA (1)...(19): siRNA sense strand
gagaaggaaggaucugaag

SEQ ID NO: 1994090 - RNA, 19 nt, Homo sapiens
  misc_RNA (1)...(19): siRNA sense strand
agacaauucugagaucaag

SEQ ID NO: 1994091 - RNA, 19 nt, Homo sapiens
  misc_RNA (1)...(19): siRNA sense strand
gaucugaaccaagaacuac

SEQ ID NO: 1994092 - RNA, 19 nt, Homo sapiens
  misc_RNA (1)...(19): siRNA sense strand
aaaccaaagaugaacgauu

SEQ ID NO: 1994093 - RNA, 19 nt, Homo sapiens
  misc_RNA (1)...(19): siRNA sense strand
ggagcugaaggccaucgua

SEQ ID NO: 1994094 - RNA, 19 nt, Homo sapiens
  misc_RNA (1)...(19): siRNA sense strand
caacuucuaccaacaacag

SEQ ID NO: 1994095 - RNA, 19 nt, Homo sapiens
  misc_RNA (1)...(19): siRNA sense strand
cacagcaccugaaccucaa

SEQ ID NO: 1994096 - RNA, 19 nt, Homo sapiens
  misc_RNA (1)...(19): siRNA sense strand
gccaagaccagcuucaagu

SEQ ID NO: 1994097 - RNA, 19 nt, Homo sapiens
  misc_RNA (1)...(19): siRNA sense strand
agcaggcgcucuuuaguca

SEQ ID NO: 1994098 - RNA, 19 nt, Homo sapiens
  misc_RNA (1)...(19): siRNA sense strand
uaugugaccaucuuccaaa

SEQ ID NO: 1994099 - RNA, 19 nt, Homo sapiens
  misc_RNA (1)...(19): siRNA sense strand
cagaggaagaguucaacaa

SEQ ID NO: 1994100 - RNA, 19 nt, Homo sapiens
  misc_RNA (1)...(19): siRNA sense strand
cagagaagccaguaagaac

SEQ ID NO: 1994101 - RNA, 19 nt, Homo sapiens
  misc_RNA (1)...(19): siRNA sense strand
uagaaacccuucaguaaua

SEQ ID NO: 1994102 - RNA, 19 nt, Homo sapiens
  misc_RNA (1)...(19): siRNA sense strand
acacuagucugaauguaua

SEQ ID NO: 1994103 - RNA, 19 nt, Homo sapiens
  misc_RNA (1)...(19): siRNA sense strand
aaagaugccuuaagccauu

SEQ ID NO: 1994104 - RNA, 19 nt, Homo sapiens
  misc_RNA (1)...(19): siRNA sense strand
gaacacuagucugaaugua

SEQ ID NO: 1994105 - RNA, 19 nt, Homo sapiens
  misc_RNA (1)...(19): siRNA sense strand
gaaguacucuggugagacu

SEQ ID NO: 1994106 - RNA, 19 nt, Homo sapiens
  misc_RNA (1)...(19): siRNA sense strand
aaaggcagacuacaaguua

SEQ ID NO: 1994107 - RNA, 19 nt, Homo sapiens
  misc_RNA (1)...(19): siRNA sense strand
ugagaaugaugcuaagaaa

SEQ ID NO: 1994108 - RNA, 19 nt, Homo sapiens
  misc_RNA (1)...(19): siRNA sense strand
gaaaggcagacuacaaguu

SEQ ID NO: 1994109 - RNA, 19 nt, Homo sapiens
  misc_RNA (1)...(19): siRNA sense strand
ggaccuugcuaauaucugu

SEQ ID NO: 1994110 - RNA, 19 nt, Homo sapiens
  misc_RNA (1)...(19): siRNA sense strand
gaaauaaagaugccuuaag

SEQ ID NO: 1994111 - RNA, 19 nt, Homo sapiens
  misc_RNA (1)...(19): siRNA sense strand
gaacagcagagaauuucaa

SEQ ID NO: 1994112 - RNA, 19 nt, Homo sapiens
  misc_RNA (1)...(19): siRNA sense strand
gaugaacagcagagaauuu

SEQ ID NO: 1994113 - RNA, 19 nt, Homo sapiens
  misc_RNA (1)...(19): siRNA sense strand
ccuagaaacccuucaguaa

SEQ ID NO: 1994114 - RNA, 19 nt, Homo sapiens
  misc_RNA (1)...(19): siRNA sense strand
cugaauguauaccgaaaua

SEQ ID NO: 1994115 - RNA, 19 nt, Homo sapiens
  misc_RNA (1)...(19): siRNA sense strand
uuggagaacugcaguguuu

SEQ ID NO: 1994116 - RNA, 19 nt, Homo sapiens
  misc_RNA (1)...(19): siRNA sense strand
gagcagagccaggcagaaa

SEQ ID NO: 1994117 - RNA, 19 nt, Homo sapiens
  misc_RNA (1)...(19): siRNA sense strand
ugaaaguaguuuacaggaa

SEQ ID NO: 1994118 - RNA, 19 nt, Homo sapiens
  misc_RNA (1)...(19): siRNA sense strand
aagaugaaccugagaauga

SEQ ID NO: 1994119 - RNA, 19 nt, Homo sapiens
  misc_RNA (1)...(19): siRNA sense strand
gcagagccaggcagaaauu

SEQ ID NO: 1994120 - RNA, 19 nt, Homo sapiens
  misc_RNA (1)...(19): siRNA sense strand
aaauaaagaugccuuaagc

SEQ ID NO: 1994121 - RNA, 19 nt, Homo sapiens
  misc_RNA (1)...(19): siRNA sense strand
ccugguggcugguggcaua

SEQ ID NO: 1994122 - RNA, 19 nt, Homo sapiens
  misc_RNA (1)...(19): siRNA sense strand
gaagaugaaccugagaaug

SEQ ID NO: 1994123 - RNA, 19 nt, Homo sapiens
  misc_RNA (1)...(19): siRNA sense strand
gagccaggcagaaauuuau

SEQ ID NO: 1994124 - RNA, 19 nt, Homo sapiens
  misc_RNA (1)...(19): siRNA sense strand
ugauggcauuucagaagua

SEQ ID NO: 1994125 - RNA, 19 nt, Homo sapiens
  misc_RNA (1)...(19): siRNA sense strand
ugcuaaaccuuccuagaaa

SEQ ID NO: 1994126 - RNA, 19 nt, Homo sapiens
  misc_RNA (1)...(19): siRNA sense strand
gaaaacagaaggaucgaaa

SEQ ID NO: 1994127 - RNA, 19 nt, Homo sapiens
  misc_RNA (1)...(19): siRNA sense strand
cuagaaacccuucaguaau

SEQ ID NO: 1994128 - RNA, 19 nt, Homo sapiens
  misc_RNA (1)...(19): siRNA sense strand
gguggcugguggcauaauu

SEQ ID NO: 1994129 - RNA, 19 nt, Homo sapiens
  misc_RNA (1)...(19): siRNA sense strand
gcaccucccugagaaaauu

SEQ ID NO: 1994130 - RNA, 19 nt, Homo sapiens
  misc_RNA (1)...(19): siRNA sense strand
guagagcauugugccuauu

SEQ ID NO: 1994131 - RNA, 19 nt, Homo sapiens
  misc_RNA (1)...(19): siRNA sense strand
cugcuaaaccuuccuagaa

SEQ ID NO: 1994132 - RNA, 19 nt, Homo sapiens
  misc_RNA (1)...(19): siRNA sense strand
ggaagaugaaccugagaau

SEQ ID NO: 1994133 - RNA, 19 nt, Homo sapiens
  misc_RNA (1)...(19): siRNA sense strand
cgaaauaaagaugccuuaa

SEQ ID NO: 1994134 - RNA, 19 nt, Homo sapiens
  misc_RNA (1)...(19): siRNA sense strand
cagcagagaauuucaaagg

SEQ ID NO: 1994135 - RNA, 19 nt, Homo sapiens
  misc_RNA (1)...(19): siRNA sense strand
gcuaaaccuuccuagaaac

SEQ ID NO: 1994136 - RNA, 19 nt, Homo sapiens
  misc_RNA (1)...(19): siRNA sense strand
ggagaacugcaguguuugu

SEQ ID NO: 1994137 - RNA, 19 nt, Homo sapiens
  misc_RNA (1)...(19): siRNA sense strand
guaguuuacaggaagauga

SEQ ID NO: 1994138 - RNA, 19 nt, Homo sapiens
  misc_RNA (1)...(19): siRNA sense strand
uaaacaagacaaggacuga

SEQ ID NO: 1994139 - RNA, 19 nt, Homo sapiens
  misc_RNA (1)...(19): siRNA sense strand
gcacugcuaaaccuuccua

SEQ ID NO: 1994140 - RNA, 19 nt, Homo sapiens
  misc_RNA (1)...(19): siRNA sense strand
gaggccugcugauggcauu

SEQ ID NO: 1994141 - RNA, 19 nt, Homo sapiens
  misc_RNA (1)...(19): siRNA sense strand
aaaguaguuuacaggaaga

SEQ ID NO: 1994142 - RNA, 19 nt, Homo sapiens
  misc_RNA (1)...(19): siRNA sense strand
gcagacuacaaguuacuga

SEQ ID NO: 1994143 - RNA, 19 nt, Homo sapiens
  misc_RNA (1)...(19): siRNA sense strand
cugagcaccucccugagaa

SEQ ID NO: 1994144 - RNA, 19 nt, Homo sapiens
  misc_RNA (1)...(19): siRNA sense strand
gugagacuguucaggaaag

SEQ ID NO: 1994145 - RNA, 19 nt, Homo sapiens
  misc_RNA (1)...(19): siRNA sense strand
uagauaaacaagacaagga

SEQ ID NO: 1994146 - RNA, 19 nt, Homo sapiens
  misc_RNA (1)...(19): siRNA sense strand
ggaaaggcagacuacaagu

SEQ ID NO: 1994147 - RNA, 19 nt, Homo sapiens
  misc_RNA (1)...(19): siRNA sense strand
guggaaaggcagacuacaa

SEQ ID NO: 1994148 - RNA, 19 nt, Homo sapiens
  misc_RNA (1)...(19): siRNA sense strand
agagccaggcagaaauuua

SEQ ID NO: 1994149 - RNA, 19 nt, Homo sapiens
  misc_RNA (1)...(19): siRNA sense strand
uguagagcauugugccuau

SEQ ID NO: 1994150 - RNA, 19 nt, Homo sapiens
  misc_RNA (1)...(19): siRNA sense strand
gcaguguuugugacuauau

SEQ ID NO: 1994151 - RNA, 19 nt, Homo sapiens
  misc_RNA (1)...(19): siRNA sense strand
ccgaaauaaagaugccuua

SEQ ID NO: 1994152 - RNA, 19 nt, Homo sapiens
  misc_RNA (1)...(19): siRNA sense strand
caguguuugugacuauauu

SEQ ID NO: 1994153 - RNA, 19 nt, Homo sapiens
  misc_RNA (1)...(19): siRNA sense strand
cugcaguguuugugacuau

SEQ ID NO: 1994154 - RNA, 19 nt, Homo sapiens
  misc_RNA (1)...(19): siRNA sense strand
aaagaugaacagcagagaa

SEQ ID NO: 1994155 - RNA, 19 nt, Homo sapiens
  misc_RNA (1)...(19): siRNA sense strand
aagaugaacagcagagaau

SEQ ID NO: 1994156 - RNA, 19 nt, Homo sapiens
  misc_RNA (1)...(19): siRNA sense strand
acccuucaguaauagauaa

SEQ ID NO: 1994157 - RNA, 19 nt, Homo sapiens
  misc_RNA (1)...(19): siRNA sense strand
aaccugagaaugaugcuaa

SEQ ID NO: 1994158 - RNA, 19 nt, Homo sapiens
  misc_RNA (1)...(19): siRNA sense strand
ggugagacuguucaggaaa

SEQ ID NO: 1994159 - RNA, 19 nt, Homo sapiens
  misc_RNA (1)...(19): siRNA sense strand
gcugucacgggaagucuuu

SEQ ID NO: 1994160 - RNA, 19 nt, Homo sapiens
  misc_RNA (1)...(19): siRNA sense strand
uagagcauugugccuauuu

SEQ ID NO: 1994161 - RNA, 19 nt, Homo sapiens
  misc_RNA (1)...(19): siRNA sense strand
ugacuauauucaacacagu

SEQ ID NO: 1994162 - RNA, 19 nt, Homo sapiens
  misc_RNA (1)...(19): siRNA sense strand
gaaacccuucaguaauaga

SEQ ID NO: 1994163 - RNA, 19 nt, Homo sapiens
  misc_RNA (1)...(19): siRNA sense strand
agaaacccuucaguaauag

SEQ ID NO: 1994164 - RNA, 19 nt, Homo sapiens
  misc_RNA (1)...(19): siRNA sense strand
agaugaaccugagaaugau

SEQ ID NO: 1994165 - RNA, 19 nt, Homo sapiens
  misc_RNA (1)...(19): siRNA sense strand
agacuguucaggaaagaaa

SEQ ID NO: 1994166 - RNA, 19 nt, Homo sapiens
  misc_RNA (1)...(19): siRNA sense strand
caggcagaaauuuaucaua

SEQ ID NO: 1994167 - RNA, 19 nt, Homo sapiens
  misc_RNA (1)...(19): siRNA sense strand
guacucuggugagacuguu

SEQ ID NO: 1994168 - RNA, 19 nt, Homo sapiens
  misc_RNA (1)...(19): siRNA sense strand
uggugagacuguucaggaa

SEQ ID NO: 1994169 - RNA, 19 nt, Homo sapiens
  misc_RNA (1)...(19): siRNA sense strand
aaacagaaggaucgaaagg

SEQ ID NO: 1994170 - RNA, 19 nt, Homo sapiens
  misc_RNA (1)...(19): siRNA sense strand
gaaccugagaaugaugcua

SEQ ID NO: 1994171 - RNA, 19 nt, Homo sapiens
  misc_RNA (1)...(19): siRNA sense strand
gauggcauuucagaaguac

SEQ ID NO: 1994172 - RNA, 19 nt, Homo sapiens
  misc_RNA (1)...(19): siRNA sense strand
caaagaugaacagcagaga

SEQ ID NO: 1994173 - RNA, 19 nt, Homo sapiens
  misc_RNA (1)...(19): siRNA sense strand
ugagacuguucaggaaaga

SEQ ID NO: 1994174 - RNA, 19 nt, Homo sapiens
  misc_RNA (1)...(19): siRNA sense strand
agcagagaauuucaaagga

SEQ ID NO: 1994175 - RNA, 19 nt, Homo sapiens
  misc_RNA (1)...(19): siRNA sense strand
cugagaaugaugcuaagaa

SEQ ID NO: 1994176 - RNA, 19 nt, Homo sapiens
  misc_RNA (1)...(19): siRNA sense strand
ugaacacuagucugaaugu

SEQ ID NO: 1994177 - RNA, 19 nt, Homo sapiens
  misc_RNA (1)...(19): siRNA sense strand
caucauuggcuggguguau

SEQ ID NO: 1994178 - RNA, 19 nt, Homo sapiens
  misc_RNA (1)...(19): siRNA sense strand
cagcuuuuauucaugcuaa

SEQ ID NO: 1994179 - RNA, 19 nt, Homo sapiens
  misc_RNA (1)...(19): siRNA sense strand
uggaaaggcagacuacaag

SEQ ID NO: 1994180 - RNA, 19 nt, Homo sapiens
  misc_RNA (1)...(19): siRNA sense strand
gucugaauguauaccgaaa

SEQ ID NO: 1994181 - RNA, 19 nt, Homo sapiens
  misc_RNA (1)...(19): siRNA sense strand
gcuacagcaggcaucauug

SEQ ID NO: 1994182 - RNA, 19 nt, Homo sapiens
  misc_RNA (1)...(19): siRNA sense strand
guauaccgaaauaaagaug

SEQ ID NO: 1994183 - RNA, 19 nt, Homo sapiens
  misc_RNA (1)...(19): siRNA sense strand
ggaaagacgcgcuguguuu

SEQ ID NO: 1994184 - RNA, 19 nt, Homo sapiens
  misc_RNA (1)...(19): siRNA sense strand
gcuaaagguuggauuucaa

SEQ ID NO: 1994185 - RNA, 19 nt, Homo sapiens
  misc_RNA (1)...(19): siRNA sense strand
gaaagacgcgcuguguuug

SEQ ID NO: 1994186 - RNA, 19 nt, Homo sapiens
  misc_RNA (1)...(19): siRNA sense strand
gaggcuaaagguuggauuu

SEQ ID NO: 1994187 - RNA, 19 nt, Homo sapiens
  misc_RNA (1)...(19): siRNA sense strand
ggcuaaagguuggauuuca

SEQ ID NO: 1994188 - RNA, 19 nt, Homo sapiens
  misc_RNA (1)...(19): siRNA sense strand
uuucaggacucuggaggaa

SEQ ID NO: 1994189 - RNA, 19 nt, Homo sapiens
  misc_RNA (1)...(19): siRNA sense strand
aagacgcgcuguguuugga

SEQ ID NO: 1994190 - RNA, 19 nt, Homo sapiens
  misc_RNA (1)...(19): siRNA sense strand
gaacaagacucucggcuau

SEQ ID NO: 1994191 - RNA, 19 nt, Homo sapiens
  misc_RNA (1)...(19): siRNA sense strand
cagaaagccuuaagacuaa

SEQ ID NO: 1994192 - RNA, 19 nt, Homo sapiens
  misc_RNA (1)...(19): siRNA sense strand
ccagaaagccuuaagacua

SEQ ID NO: 1994193 - RNA, 19 nt, Homo sapiens
  misc_RNA (1)...(19): siRNA sense strand
aaucaaagacuccaaguuu

SEQ ID NO: 1994194 - RNA, 19 nt, Homo sapiens
  misc_RNA (1)...(19): siRNA sense strand
uuugaugacuggaagaaua

SEQ ID NO: 1994195 - RNA, 19 nt, Homo sapiens
  misc_RNA (1)...(19): siRNA sense strand
caaggaagaaauccagaaa

SEQ ID NO: 1994196 - RNA, 19 nt, Homo sapiens
  misc_RNA (1)...(19): siRNA sense strand
ucucaaauccgauaugaug

SEQ ID NO: 1994197 - RNA, 19 nt, Homo sapiens
  misc_RNA (1)...(19): siRNA sense strand
gauaugaugcugugaagag

SEQ ID NO: 1994198 - RNA, 19 nt, Homo sapiens
  misc_RNA (1)...(19): siRNA sense strand
uaaaauggauccugagcuu

SEQ ID NO: 1994199 - RNA, 19 nt, Homo sapiens
  misc_RNA (1)...(19): siRNA sense strand
aaauggauccugagcuuga

SEQ ID NO: 1994200 - RNA, 19 nt, Homo sapiens
  misc_RNA (1)...(19): siRNA sense strand
agaaauccagaaagccuua

SEQ ID NO: 1994201 - RNA, 19 nt, Homo sapiens
  misc_RNA (1)...(19): siRNA sense strand
acaagacucucggcuaugg

SEQ ID NO: 1994202 - RNA, 19 nt, Homo sapiens
  misc_RNA (1)...(19): siRNA sense strand
augaugcugugaagaguaa

SEQ ID NO: 1994203 - RNA, 19 nt, Homo sapiens
  misc_RNA (1)...(19): siRNA sense strand
ccaaggaagaaauccagaa

SEQ ID NO: 1994204 - RNA, 19 nt, Homo sapiens
  misc_RNA (1)...(19): siRNA sense strand
gaaauccagaaagccuuaa

SEQ ID NO: 1994205 - RNA, 19 nt, Homo sapiens
  misc_RNA (1)...(19): siRNA sense strand
uuucucaaauccgauauga

SEQ ID NO: 1994206 - RNA, 19 nt, Homo sapiens
  misc_RNA (1)...(19): siRNA sense strand
aggaagaaauccagaaagc

SEQ ID NO: 1994207 - RNA, 19 nt, Homo sapiens
  misc_RNA (1)...(19): siRNA sense strand
cuuuagagucggaauauga

SEQ ID NO: 1994208 - RNA, 19 nt, Homo sapiens
  misc_RNA (1)...(19): siRNA sense strand
uuaagacuaagacaacuug

SEQ ID NO: 1994209 - RNA, 19 nt, Homo sapiens
  misc_RNA (1)...(19): siRNA sense strand
ccauguuguugcugauugu

SEQ ID NO: 1994210 - RNA, 19 nt, Homo sapiens
  misc_RNA (1)...(19): siRNA sense strand
uaucuuuagagucggaaua

SEQ ID NO: 1994211 - RNA, 19 nt, Homo sapiens
  misc_RNA (1)...(19): siRNA sense strand
ccgauaugaugcugugaag

SEQ ID NO: 1994212 - RNA, 19 nt, Homo sapiens
  misc_RNA (1)...(19): siRNA sense strand
cccauguuguugcugauug

SEQ ID NO: 1994213 - RNA, 19 nt, Homo sapiens
  misc_RNA (1)...(19): siRNA sense strand
gcugauuguuggagguucu

SEQ ID NO: 1994214 - RNA, 19 nt, Homo sapiens
  misc_RNA (1)...(19): siRNA sense strand
gaugacuggaagaauauuc

SEQ ID NO: 1994215 - RNA, 19 nt, Homo sapiens
  misc_RNA (1)...(19): siRNA sense strand
uaugaugcugugaagagua

SEQ ID NO: 1994216 - RNA, 19 nt, Homo sapiens
  misc_RNA (1)...(19): siRNA sense strand
ccaaguuugaugacuggaa

SEQ ID NO: 1994217 - RNA, 19 nt, Homo sapiens
  misc_RNA (1)...(19): siRNA sense strand
aaaucaaagacuccaaguu

SEQ ID NO: 1994218 - RNA, 19 nt, Homo sapiens
  misc_RNA (1)...(19): siRNA sense strand
ggacauugguuugcuaaua

SEQ ID NO: 1994219 - RNA, 19 nt, Homo sapiens
  misc_RNA (1)...(19): siRNA sense strand
ggacaaacaucuccaagga

SEQ ID NO: 1994220 - RNA, 19 nt, Homo sapiens
  misc_RNA (1)...(19): siRNA sense strand
gcuaagugcuucuccaaua

SEQ ID NO: 1994221 - RNA, 19 nt, Homo sapiens
  misc_RNA (1)...(19): siRNA sense strand
ccacaaagaugcaauuaug

SEQ ID NO: 1994222 - RNA, 19 nt, Homo sapiens
  misc_RNA (1)...(19): siRNA sense strand
gaagucagguaugaaguua

SEQ ID NO: 1994223 - RNA, 19 nt, Homo sapiens
  misc_RNA (1)...(19): siRNA sense strand
uuauggagcugcagaauua

SEQ ID NO: 1994224 - RNA, 19 nt, Homo sapiens
  misc_RNA (1)...(19): siRNA sense strand
gaaagagucuggaaauaag

SEQ ID NO: 1994225 - RNA, 19 nt, Homo sapiens
  misc_RNA (1)...(19): siRNA sense strand
ggaaagagucuggaaauaa

SEQ ID NO: 1994226 - RNA, 19 nt, Homo sapiens
  misc_RNA (1)...(19): siRNA sense strand
gacauugguuugcuaauaa

SEQ ID NO: 1994227 - RNA, 19 nt, Homo sapiens
  misc_RNA (1)...(19): siRNA sense strand
gaagggacaucauugacuu

SEQ ID NO: 1994228 - RNA, 19 nt, Homo sapiens
  misc_RNA (1)...(19): siRNA sense strand
gaauuacuaugaaggcuuu

SEQ ID NO: 1994229 - RNA, 19 nt, Homo sapiens
  misc_RNA (1)...(19): siRNA sense strand
gagaaaagcuucccaauag

SEQ ID NO: 1994230 - RNA, 19 nt, Homo sapiens
  misc_RNA (1)...(19): siRNA sense strand
gacccuaucuugauuaaau

SEQ ID NO: 1994231 - RNA, 19 nt, Homo sapiens
  misc_RNA (1)...(19): siRNA sense strand
gaagaagggacaucauuga

SEQ ID NO: 1994232 - RNA, 19 nt, Homo sapiens
  misc_RNA (1)...(19): siRNA sense strand
gguaugaaguuaacuguuc

SEQ ID NO: 1994233 - RNA, 19 nt, Homo sapiens
  misc_RNA (1)...(19): siRNA sense strand
ccugauaccuucaaaguug

SEQ ID NO: 1994234 - RNA, 19 nt, Homo sapiens
  misc_RNA (1)...(19): siRNA sense strand
gaacaggagccuuuggaaa

SEQ ID NO: 1994235 - RNA, 19 nt, Homo sapiens
  misc_RNA (1)...(19): siRNA sense strand
gaccagugauugugacauu

SEQ ID NO: 1994236 - RNA, 19 nt, Homo sapiens
  misc_RNA (1)...(19): siRNA sense strand
caaguggaauuacuaugaa

SEQ ID NO: 1994237 - RNA, 19 nt, Homo sapiens
  misc_RNA (1)...(19): siRNA sense strand
uaucaaagauggacauugg

SEQ ID NO: 1994238 - RNA, 19 nt, Homo sapiens
  misc_RNA (1)...(19): siRNA sense strand
gaucguaaggcaccugaua

SEQ ID NO: 1994239 - RNA, 19 nt, Homo sapiens
  misc_RNA (1)...(19): siRNA sense strand
caaauuagaggcuguggaa

SEQ ID NO: 1994240 - RNA, 19 nt, Homo sapiens
  misc_RNA (1)...(19): siRNA sense strand
acaaccagcacaauauuua

SEQ ID NO: 1994241 - RNA, 19 nt, Homo sapiens
  misc_RNA (1)...(19): siRNA sense strand
agaaacagauacacucaug

SEQ ID NO: 1994242 - RNA, 19 nt, Homo sapiens
  misc_RNA (1)...(19): siRNA sense strand
agacgacucuuuccgcaaa

SEQ ID NO: 1994243 - RNA, 19 nt, Homo sapiens
  misc_RNA (1)...(19): siRNA sense strand
uggaaagagucuggaaaua

SEQ ID NO: 1994244 - RNA, 19 nt, Homo sapiens
  misc_RNA (1)...(19): siRNA sense strand
ggaggaugaugauguugug

SEQ ID NO: 1994245 - RNA, 19 nt, Homo sapiens
  misc_RNA (1)...(19): siRNA sense strand
ucaaguggaauuacuauga

SEQ ID NO: 1994246 - RNA, 19 nt, Homo sapiens
  misc_RNA (1)...(19): siRNA sense strand
cagauacacucauguuaag

SEQ ID NO: 1994247 - RNA, 19 nt, Homo sapiens
  misc_RNA (1)...(19): siRNA sense strand
cagaaaagcuugaagaaca

SEQ ID NO: 1994248 - RNA, 19 nt, Homo sapiens
  misc_RNA (1)...(19): siRNA sense strand
gguggacccuaucuugauu

SEQ ID NO: 1994249 - RNA, 19 nt, Homo sapiens
  misc_RNA (1)...(19): siRNA sense strand
cuucgaagcguguguauuu

SEQ ID NO: 1994250 - RNA, 19 nt, Homo sapiens
  misc_RNA (1)...(19): siRNA sense strand
cccauaacauucagauauu

SEQ ID NO: 1994251 - RNA, 19 nt, Homo sapiens
  misc_RNA (1)...(19): siRNA sense strand
ggagaaaagcuucccaaua

SEQ ID NO: 1994252 - RNA, 19 nt, Homo sapiens
  misc_RNA (1)...(19): siRNA sense strand
uggcugcucucuuuguuaa

SEQ ID NO: 1994253 - RNA, 19 nt, Homo sapiens
  misc_RNA (1)...(19): siRNA sense strand
ccagugauugugacauuua

SEQ ID NO: 1994254 - RNA, 19 nt, Homo sapiens
  misc_RNA (1)...(19): siRNA sense strand
gauggacauugguuugcua

SEQ ID NO: 1994255 - RNA, 19 nt, Homo sapiens
  misc_RNA (1)...(19): siRNA sense strand
uaugugaagcuaccaauaa

SEQ ID NO: 1994256 - RNA, 19 nt, Homo sapiens
  misc_RNA (1)...(19): siRNA sense strand
uuagacgggugccuuauga

SEQ ID NO: 1994257 - RNA, 19 nt, Homo sapiens
  misc_RNA (1)...(19): siRNA sense strand
caauggagcaaauauguug

SEQ ID NO: 1994258 - RNA, 19 nt, Homo sapiens
  misc_RNA (1)...(19): siRNA sense strand
gaauuggugucagaguuga

SEQ ID NO: 1994259 - RNA, 19 nt, Homo sapiens
  misc_RNA (1)...(19): siRNA sense strand
cuaagugcuucuccaauau

SEQ ID NO: 1994260 - RNA, 19 nt, Homo sapiens
  misc_RNA (1)...(19): siRNA sense strand
ucuaagagguuaugcucaa

SEQ ID NO: 1994261 - RNA, 19 nt, Homo sapiens
  misc_RNA (1)...(19): siRNA sense strand
acagauacacucauguuaa

SEQ ID NO: 1994262 - RNA, 19 nt, Homo sapiens
  misc_RNA (1)...(19): siRNA sense strand
cagagagacuggaucacuu

SEQ ID NO: 1994263 - RNA, 19 nt, Homo sapiens
  misc_RNA (1)...(19): siRNA sense strand
caacaacuccaucguucaa

SEQ ID NO: 1994264 - RNA, 19 nt, Homo sapiens
  misc_RNA (1)...(19): siRNA sense strand
gaaaggcuuauccaugcua

SEQ ID NO: 1994265 - RNA, 19 nt, Homo sapiens
  misc_RNA (1)...(19): siRNA sense strand
gacgggugccuuaugaaua

SEQ ID NO: 1994266 - RNA, 19 nt, Homo sapiens
  misc_RNA (1)...(19): siRNA sense strand
cccuauggcugcucucuuu

SEQ ID NO: 1994267 - RNA, 19 nt, Homo sapiens
  misc_RNA (1)...(19): siRNA sense strand
cgaagcguguguauuuaug

SEQ ID NO: 1994268 - RNA, 19 nt, Homo sapiens
  misc_RNA (1)...(19): siRNA sense strand
acaggagccuuuggaaauu

SEQ ID NO: 1994269 - RNA, 19 nt, Homo sapiens
  misc_RNA (1)...(19): siRNA sense strand
aauuagaggcuguggaaua

SEQ ID NO: 1994270 - RNA, 19 nt, Homo sapiens
  misc_RNA (1)...(19): siRNA sense strand
uaagguggacccuaucuug

SEQ ID NO: 1994271 - RNA, 19 nt, Homo sapiens
  misc_RNA (1)...(19): siRNA sense strand
caaagauggacauugguuu

SEQ ID NO: 1994272 - RNA, 19 nt, Homo sapiens
  misc_RNA (1)...(19): siRNA sense strand
gcuuauccaugcuauauac

SEQ ID NO: 1994273 - RNA, 19 nt, Homo sapiens
  misc_RNA (1)...(19): siRNA sense strand
guggaaauauguuaucaac

SEQ ID NO: 1994274 - RNA, 19 nt, Homo sapiens
  misc_RNA (1)...(19): siRNA sense strand
acacauacucuccugauga

SEQ ID NO: 1994275 - RNA, 19 nt, Homo sapiens
  misc_RNA (1)...(19): siRNA sense strand
caaagaugcaauuaugguu

SEQ ID NO: 1994276 - RNA, 19 nt, Homo sapiens
  misc_RNA (1)...(19): siRNA sense strand
guuaaagcuucuaaaugug

SEQ ID NO: 1994277 - RNA, 19 nt, Homo sapiens
  misc_RNA (1)...(19): siRNA sense strand
acuccaggcugauuuaaau

SEQ ID NO: 1994278 - RNA, 19 nt, Homo sapiens
  misc_RNA (1)...(19): siRNA sense strand
aaguugccaugaacaauuu

SEQ ID NO: 1994279 - RNA, 19 nt, Homo sapiens
  misc_RNA (1)...(19): siRNA sense strand
aagaugcaauuaugguuga

SEQ ID NO: 1994280 - RNA, 19 nt, Homo sapiens
  misc_RNA (1)...(19): siRNA sense strand
cuaaguaccucgccuuuug

SEQ ID NO: 1994281 - RNA, 19 nt, Homo sapiens
  misc_RNA (1)...(19): siRNA sense strand
gauacacucauguuaagga

SEQ ID NO: 1994282 - RNA, 19 nt, Homo sapiens
  misc_RNA (1)...(19): siRNA sense strand
cuccaucguucaagacuuu

SEQ ID NO: 1994283 - RNA, 19 nt, Homo sapiens
  misc_RNA (1)...(19): siRNA sense strand
ccaauaaggacaaacaucu

SEQ ID NO: 1994284 - RNA, 19 nt, Homo sapiens
  misc_RNA (1)...(19): siRNA sense strand
aaaguugccaugaacaauu

SEQ ID NO: 1994285 - RNA, 19 nt, Homo sapiens
  misc_RNA (1)...(19): siRNA sense strand
uauacaaccagcacaauau

SEQ ID NO: 1994286 - RNA, 19 nt, Homo sapiens
  misc_RNA (1)...(19): siRNA sense strand
gacacauacucuccugaug

SEQ ID NO: 1994287 - RNA, 19 nt, Homo sapiens
  misc_RNA (1)...(19): siRNA sense strand
acgggugccuuaugaauau

SEQ ID NO: 1994288 - RNA, 19 nt, Homo sapiens
  misc_RNA (1)...(19): siRNA sense strand
ggaaagauucacuuaccau

SEQ ID NO: 1994289 - RNA, 19 nt, Homo sapiens
  misc_RNA (1)...(19): siRNA sense strand
ugaacaauuuagcuaagug

SEQ ID NO: 1994290 - RNA, 19 nt, Homo sapiens
  misc_RNA (1)...(19): siRNA sense strand
uaacuguucggguaucuau

SEQ ID NO: 1994291 - RNA, 19 nt, Homo sapiens
  misc_RNA (1)...(19): siRNA sense strand
caugaacaauuuagcuaag

SEQ ID NO: 1994292 - RNA, 19 nt, Homo sapiens
  misc_RNA (1)...(19): siRNA sense strand
uaagaaacagauacacuca

SEQ ID NO: 1994293 - RNA, 19 nt, Homo sapiens
  misc_RNA (1)...(19): siRNA sense strand
aggaugaagucagguauga

SEQ ID NO: 1994294 - RNA, 19 nt, Homo sapiens
  misc_RNA (1)...(19): siRNA sense strand
cucaaaagcuugucucaaa

SEQ ID NO: 1994295 - RNA, 19 nt, Homo sapiens
  misc_RNA (1)...(19): siRNA sense strand
ugacauuuaucagacucua

SEQ ID NO: 1994296 - RNA, 19 nt, Homo sapiens
  misc_RNA (1)...(19): siRNA sense strand
aaagauggacauugguuug

SEQ ID NO: 1994297 - RNA, 19 nt, Homo sapiens
  misc_RNA (1)...(19): siRNA sense strand
gaugaagucagguaugaag

SEQ ID NO: 1994298 - RNA, 19 nt, Homo sapiens
  misc_RNA (1)...(19): siRNA sense strand
acaacuccaucguucaaga

SEQ ID NO: 1994299 - RNA, 19 nt, Homo sapiens
  misc_RNA (1)...(19): siRNA sense strand
ccaugaacaauuuagcuaa

SEQ ID NO: 1994300 - RNA, 19 nt, Homo sapiens
  misc_RNA (1)...(19): siRNA sense strand
caggagccuuuggaaauug

SEQ ID NO: 1994301 - RNA, 19 nt, Homo sapiens
  misc_RNA (1)...(19): siRNA sense strand
ucaaagauggacauugguu

SEQ ID NO: 1994302 - RNA, 19 nt, Homo sapiens
  misc_RNA (1)...(19): siRNA sense strand
gccaugaacaauuuagcua

SEQ ID NO: 1994303 - RNA, 19 nt, Homo sapiens
  misc_RNA (1)...(19): siRNA sense strand
gauugugacauuuaucaga

SEQ ID NO: 1994304 - RNA, 19 nt, Homo sapiens
  misc_RNA (1)...(19): siRNA sense strand
aagaagaagggacaucauu

SEQ ID NO: 1994305 - RNA, 19 nt, Homo sapiens
  misc_RNA (1)...(19): siRNA sense strand
agaagaagggacaucauug

SEQ ID NO: 1994306 - RNA, 19 nt, Homo sapiens
  misc_RNA (1)...(19): siRNA sense strand
gcagagagacuggaucacu

SEQ ID NO: 1994307 - RNA, 19 nt, Homo sapiens
  misc_RNA (1)...(19): siRNA sense strand
gauuaaaugcuuggcagaa

SEQ ID NO: 1994308 - RNA, 19 nt, Homo sapiens
  misc_RNA (1)...(19): siRNA sense strand
gacaaacaucuccaaggaa

SEQ ID NO: 1994309 - RNA, 19 nt, Homo sapiens
  misc_RNA (1)...(19): siRNA sense strand
gaaacagauacacucaugu

SEQ ID NO: 1994310 - RNA, 19 nt, Homo sapiens
  misc_RNA (1)...(19): siRNA sense strand
gugaagcuaccaauaagga

SEQ ID NO: 1994311 - RNA, 19 nt, Homo sapiens
  misc_RNA (1)...(19): siRNA sense strand
aagauucacuuaccaucau

SEQ ID NO: 1994312 - RNA, 19 nt, Homo sapiens
  misc_RNA (1)...(19): siRNA sense strand
auuagaggcuguggaauau

SEQ ID NO: 1994313 - RNA, 19 nt, Homo sapiens
  misc_RNA (1)...(19): siRNA sense strand
uaagugcuucuccaauauu

SEQ ID NO: 1994314 - RNA, 19 nt, Homo sapiens
  misc_RNA (1)...(19): siRNA sense strand
ugaagucagguaugaaguu

SEQ ID NO: 1994315 - RNA, 19 nt, Homo sapiens
  misc_RNA (1)...(19): siRNA sense strand
gaaaucucacuaccacauc

SEQ ID NO: 1994316 - RNA, 19 nt, Homo sapiens
  misc_RNA (1)...(19): siRNA sense strand
gauagaaaucucacuacca

SEQ ID NO: 1994317 - RNA, 19 nt, Homo sapiens
  misc_RNA (1)...(19): siRNA sense strand
ucuaugaacaggagccuuu

SEQ ID NO: 1994318 - RNA, 19 nt, Homo sapiens
  misc_RNA (1)...(19): siRNA sense strand
acacagacuucuacuauga

SEQ ID NO: 1994319 - RNA, 19 nt, Homo sapiens
  misc_RNA (1)...(19): siRNA sense strand
ggaagaauccuauuucaag

SEQ ID NO: 1994320 - RNA, 19 nt, Homo sapiens
  misc_RNA (1)...(19): siRNA sense strand
ccacaaagauaaccaugau

SEQ ID NO: 1994321 - RNA, 19 nt, Homo sapiens
  misc_RNA (1)...(19): siRNA sense strand
gaggauacauugaguugga

SEQ ID NO: 1994322 - RNA, 19 nt, Homo sapiens
  misc_RNA (1)...(19): siRNA sense strand
gaccagaacuuggaaaaua

SEQ ID NO: 1994323 - RNA, 19 nt, Homo sapiens
  misc_RNA (1)...(19): siRNA sense strand
gcaaaccacacuaacauau

SEQ ID NO: 1994324 - RNA, 19 nt, Homo sapiens
  misc_RNA (1)...(19): siRNA sense strand
ggucaguuaucuucacauu

SEQ ID NO: 1994325 - RNA, 19 nt, Homo sapiens
  misc_RNA (1)...(19): siRNA sense strand
gauguugccucagauaaug

SEQ ID NO: 1994326 - RNA, 19 nt, Homo sapiens
  misc_RNA (1)...(19): siRNA sense strand
gcaggugguaccauuauaa

SEQ ID NO: 1994327 - RNA, 19 nt, Homo sapiens
  misc_RNA (1)...(19): siRNA sense strand
gaagaaaagugaagcaaag

SEQ ID NO: 1994328 - RNA, 19 nt, Homo sapiens
  misc_RNA (1)...(19): siRNA sense strand
ccagggcuauucauaucua

SEQ ID NO: 1994329 - RNA, 19 nt, Homo sapiens
  misc_RNA (1)...(19): siRNA sense strand
ggugaugaauggcugaaga

SEQ ID NO: 1994330 - RNA, 19 nt, Homo sapiens
  misc_RNA (1)...(19): siRNA sense strand
ugacaucgcgcacuaucua

SEQ ID NO: 1994331 - RNA, 19 nt, Homo sapiens
  misc_RNA (1)...(19): siRNA sense strand
caaagucaccuuccaaugg

SEQ ID NO: 1994332 - RNA, 19 nt, Homo sapiens
  misc_RNA (1)...(19): siRNA sense strand
gaaaccagaaggugaugaa

SEQ ID NO: 1994333 - RNA, 19 nt, Homo sapiens
  misc_RNA (1)...(19): siRNA sense strand
cuacacagacuucuacuau

SEQ ID NO: 1994334 - RNA, 19 nt, Homo sapiens
  misc_RNA (1)...(19): siRNA sense strand
ccucaaagccgguagaugu

SEQ ID NO: 1994335 - RNA, 19 nt, Homo sapiens
  misc_RNA (1)...(19): siRNA sense strand
gcauggaagaauccuauuu

SEQ ID NO: 1994336 - RNA, 19 nt, Homo sapiens
  misc_RNA (1)...(19): siRNA sense strand
acaaagauaaccaugauga

SEQ ID NO: 1994337 - RNA, 19 nt, Homo sapiens
  misc_RNA (1)...(19): siRNA sense strand
caucuucaaucugguauau

SEQ ID NO: 1994338 - RNA, 19 nt, Homo sapiens
  misc_RNA (1)...(19): siRNA sense strand
caaaccacacuaacauauu

SEQ ID NO: 1994339 - RNA, 19 nt, Homo sapiens
  misc_RNA (1)...(19): siRNA sense strand
cugcuaugcuccacuguuu

SEQ ID NO: 1994340 - RNA, 19 nt, Homo sapiens
  misc_RNA (1)...(19): siRNA sense strand
gcaaagucaccuuccaaug

SEQ ID NO: 1994341 - RNA, 19 nt, Homo sapiens
  misc_RNA (1)...(19): siRNA sense strand
cauugaaguuucuugcaaa

SEQ ID NO: 1994342 - RNA, 19 nt, Homo sapiens
  misc_RNA (1)...(19): siRNA sense strand
ccauugaaguuucuugcaa

SEQ ID NO: 1994343 - RNA, 19 nt, Homo sapiens
  misc_RNA (1)...(19): siRNA sense strand
aauaguagguggagucaca

SEQ ID NO: 1994344 - RNA, 19 nt, Homo sapiens
  misc_RNA (1)...(19): siRNA sense strand
gcauuggcauggaagaauc

SEQ ID NO: 1994345 - RNA, 19 nt, Homo sapiens
  misc_RNA (1)...(19): siRNA sense strand
ggagucacacaugcuaaua

SEQ ID NO: 1994346 - RNA, 19 nt, Homo sapiens
  misc_RNA (1)...(19): siRNA sense strand
caagcugguuuacugcuau

SEQ ID NO: 1994347 - RNA, 19 nt, Homo sapiens
  misc_RNA (1)...(19): siRNA sense strand
gagccuccauugaaguuuc

SEQ ID NO: 1994348 - RNA, 19 nt, Homo sapiens
  misc_RNA (1)...(19): siRNA sense strand
guagauguugccucagaua

SEQ ID NO: 1994349 - RNA, 19 nt, Homo sapiens
  misc_RNA (1)...(19): siRNA sense strand
auaucuaccuguucaacua

SEQ ID NO: 1994350 - RNA, 19 nt, Homo sapiens
  misc_RNA (1)...(19): siRNA sense strand
ucaagcugguuuacugcua

SEQ ID NO: 1994351 - RNA, 19 nt, Homo sapiens
  misc_RNA (1)...(19): siRNA sense strand
ugaguuggaugcuauuugg

SEQ ID NO: 1994352 - RNA, 19 nt, Homo sapiens
  misc_RNA (1)...(19): siRNA sense strand
ugaaggaagugaccagaac

SEQ ID NO: 1994353 - RNA, 19 nt, Homo sapiens
  misc_RNA (1)...(19): siRNA sense strand
uaaccaugaugacuacaca

SEQ ID NO: 1994354 - RNA, 19 nt, Homo sapiens
  misc_RNA (1)...(19): siRNA sense strand
ucaguuaucuucacauucc

SEQ ID NO: 1994355 - RNA, 19 nt, Homo sapiens
  misc_RNA (1)...(19): siRNA sense strand
gugguaccauuauaacgaa

SEQ ID NO: 1994356 - RNA, 19 nt, Homo sapiens
  misc_RNA (1)...(19): siRNA sense strand
uugcagagccuccauugaa

SEQ ID NO: 1994357 - RNA, 19 nt, Homo sapiens
  misc_RNA (1)...(19): siRNA sense strand
agacuucuacuaugacauu

SEQ ID NO: 1994358 - RNA, 19 nt, Homo sapiens
  misc_RNA (1)...(19): siRNA sense strand
aagauaaccaugaugacua

SEQ ID NO: 1994359 - RNA, 19 nt, Homo sapiens
  misc_RNA (1)...(19): siRNA sense strand
gaugaauggcugaagaugu

SEQ ID NO: 1994360 - RNA, 19 nt, Homo sapiens
  misc_RNA (1)...(19): siRNA sense strand
acauauuacuggcaucuuc

SEQ ID NO: 1994361 - RNA, 19 nt, Homo sapiens
  misc_RNA (1)...(19): siRNA sense strand
acauugaguuggaugcuau

SEQ ID NO: 1994362 - RNA, 19 nt, Homo sapiens
  misc_RNA (1)...(19): siRNA sense strand
uuacuggcaucuucaaucu

SEQ ID NO: 1994363 - RNA, 19 nt, Homo sapiens
  misc_RNA (1)...(19): siRNA sense strand
uaacgaauuuugagagguu

SEQ ID NO: 1994364 - RNA, 19 nt, Homo sapiens
  misc_RNA (1)...(19): siRNA sense strand
cuggcaauaucaaagcaua

SEQ ID NO: 1994365 - RNA, 19 nt, Homo sapiens
  misc_RNA (1)...(19): siRNA sense strand
cgguagauguugccucaga

SEQ ID NO: 1994366 - RNA, 19 nt, Homo sapiens
  misc_RNA (1)...(19): siRNA sense strand
cagcugcauuggcauggaa

SEQ ID NO: 1994367 - RNA, 19 nt, Homo sapiens
  misc_RNA (1)...(19): siRNA sense strand
ugccucagauaauguuaaa

SEQ ID NO: 1994368 - RNA, 19 nt, Homo sapiens
  misc_RNA (1)...(19): siRNA sense strand
ggugguaccauuauaacga

SEQ ID NO: 1994369 - RNA, 19 nt, Homo sapiens
  misc_RNA (1)...(19): siRNA sense strand
auucauaucuaccuguuca

SEQ ID NO: 1994370 - RNA, 19 nt, Homo sapiens
  misc_RNA (1)...(19): siRNA sense strand
cauggaagaauccuauuuc

SEQ ID NO: 1994371 - RNA, 19 nt, Homo sapiens
  misc_RNA (1)...(19): siRNA sense strand
cuacuggcuucgggaauga

SEQ ID NO: 1994372 - RNA, 19 nt, Homo sapiens
  misc_RNA (1)...(19): siRNA sense strand
guuccuuuauaccaucuuu

SEQ ID NO: 1994373 - RNA, 19 nt, Homo sapiens
  misc_RNA (1)...(19): siRNA sense strand
ucccagggcuauucauauc

SEQ ID NO: 1994374 - RNA, 19 nt, Homo sapiens
  misc_RNA (1)...(19): siRNA sense strand
gguagauguugccucagau

SEQ ID NO: 1994375 - RNA, 19 nt, Homo sapiens
  misc_RNA (1)...(19): siRNA sense strand
gaaaagugaagcaaaguca

SEQ ID NO: 1994376 - RNA, 19 nt, Homo sapiens
  misc_RNA (1)...(19): siRNA sense strand
cuaugacauuugcuccuuu

SEQ ID NO: 1994377 - RNA, 19 nt, Homo sapiens
  misc_RNA (1)...(19): siRNA sense strand
caugaugacuacacagacu

SEQ ID NO: 1994378 - RNA, 19 nt, Homo sapiens
  misc_RNA (1)...(19): siRNA sense strand
augaauggcugaagauguc

SEQ ID NO: 1994379 - RNA, 19 nt, Homo sapiens
  misc_RNA (1)...(19): siRNA sense strand
accagaaggugaugaaugg

SEQ ID NO: 1994380 - RNA, 19 nt, Homo sapiens
  misc_RNA (1)...(19): siRNA sense strand
guagguggagucacacaug

SEQ ID NO: 1994381 - RNA, 19 nt, Homo sapiens
  misc_RNA (1)...(19): siRNA sense strand
gcagagccuccauugaagu

SEQ ID NO: 1994382 - RNA, 19 nt, Homo sapiens
  misc_RNA (1)...(19): siRNA sense strand
cuauucauaucuaccuguu

SEQ ID NO: 1994383 - RNA, 19 nt, Homo sapiens
  misc_RNA (1)...(19): siRNA sense strand
uacacagacuucuacuaug

SEQ ID NO: 1994384 - RNA, 19 nt, Homo sapiens
  misc_RNA (1)...(19): siRNA sense strand
agauaaccaugaugacuac

SEQ ID NO: 1994385 - RNA, 19 nt, Homo sapiens
  misc_RNA (1)...(19): siRNA sense strand
gcaauaucaaagcauaauc

SEQ ID NO: 1994386 - RNA, 19 nt, Homo sapiens
  misc_RNA (1)...(19): siRNA sense strand
gguaaaaggagauuggaaa

SEQ ID NO: 1994387 - RNA, 19 nt, Homo sapiens
  misc_RNA (1)...(19): siRNA sense strand
ggugcaggugguaccauua

SEQ ID NO: 1994388 - RNA, 19 nt, Homo sapiens
  misc_RNA (1)...(19): siRNA sense strand
gguggagucacacaugcua

SEQ ID NO: 1994389 - RNA, 19 nt, Homo sapiens
  misc_RNA (1)...(19): siRNA sense strand
ugucauacccugccaaggu

SEQ ID NO: 1994390 - RNA, 19 nt, Homo sapiens
  misc_RNA (1)...(19): siRNA sense strand
uagauguugccucagauaa

SEQ ID NO: 1994391 - RNA, 19 nt, Homo sapiens
  misc_RNA (1)...(19): siRNA sense strand
ugucagugauggcggugaa

SEQ ID NO: 1994392 - RNA, 19 nt, Homo sapiens
  misc_RNA (1)...(19): siRNA sense strand
gcagcugcauuggcaugga

SEQ ID NO: 1994393 - RNA, 19 nt, Homo sapiens
  misc_RNA (1)...(19): siRNA sense strand
ugcaggugguaccauuaua

SEQ ID NO: 1994394 - RNA, 19 nt, Homo sapiens
  misc_RNA (1)...(19): siRNA sense strand
gccacaaagauaaccauga

SEQ ID NO: 1994395 - RNA, 19 nt, Homo sapiens
  misc_RNA (1)...(19): siRNA sense strand
gaaggaagugaccagaacu

SEQ ID NO: 1994396 - RNA, 19 nt, Homo sapiens
  misc_RNA (1)...(19): siRNA sense strand
uacauugaguuggaugcua

SEQ ID NO: 1994397 - RNA, 19 nt, Homo sapiens
  misc_RNA (1)...(19): siRNA sense strand
ugacuacacagacuucuac

SEQ ID NO: 1994398 - RNA, 19 nt, Homo sapiens
  misc_RNA (1)...(19): siRNA sense strand
ggaaaccagaaggugauga

SEQ ID NO: 1994399 - RNA, 19 nt, Homo sapiens
  misc_RNA (1)...(19): siRNA sense strand
gugcaggugguaccauuau

SEQ ID NO: 1994400 - RNA, 19 nt, Homo sapiens
  misc_RNA (1)...(19): siRNA sense strand
ggaauuuuauccugucuac

SEQ ID NO: 1994401 - RNA, 19 nt, Homo sapiens
  misc_RNA (1)...(19): siRNA sense strand
uggauagucaugauagcua

SEQ ID NO: 1994402 - RNA, 19 nt, Homo sapiens
  misc_RNA (1)...(19): siRNA sense strand
ggcaauaucaaagcauaau

SEQ ID NO: 1994403 - RNA, 19 nt, Homo sapiens
  misc_RNA (1)...(19): siRNA sense strand
cagagccuccauugaaguu

SEQ ID NO: 1994404 - RNA, 19 nt, Homo sapiens
  misc_RNA (1)...(19): siRNA sense strand
ugcaaaccacacuaacaua

SEQ ID NO: 1994405 - RNA, 19 nt, Homo sapiens
  misc_RNA (1)...(19): siRNA sense strand
ucaaagccgguagauguug

SEQ ID NO: 1994406 - RNA, 19 nt, Homo sapiens
  misc_RNA (1)...(19): siRNA sense strand
uggaagaauccuauuucaa

SEQ ID NO: 1994407 - RNA, 19 nt, Homo sapiens
  misc_RNA (1)...(19): siRNA sense strand
cagcaucuggcaauaucaa

SEQ ID NO: 1994408 - RNA, 19 nt, Homo sapiens
  misc_RNA (1)...(19): siRNA sense strand
gagucacacaugcuaauag

SEQ ID NO: 1994409 - RNA, 19 nt, Homo sapiens
  misc_RNA (1)...(19): siRNA sense strand
uaacauauuacuggcaucu

SEQ ID NO: 1994410 - RNA, 19 nt, Homo sapiens
  misc_RNA (1)...(19): siRNA sense strand
gguaccauuauaacgaauu

SEQ ID NO: 1994411 - RNA, 19 nt, Homo sapiens
  misc_RNA (1)...(19): siRNA sense strand
auggaagaauccuauuuca

SEQ ID NO: 1994412 - RNA, 19 nt, Homo sapiens
  misc_RNA (1)...(19): siRNA sense strand
ccuauuucaagcugguuua

SEQ ID NO: 1994413 - RNA, 19 nt, Homo sapiens
  misc_RNA (1)...(19): siRNA sense strand
ggagauuggaaaccagaag

SEQ ID NO: 1994414 - RNA, 19 nt, Homo sapiens
  misc_RNA (1)...(19): siRNA sense strand
acuaugacauuugcuccuu

SEQ ID NO: 1994415 - RNA, 19 nt, Homo sapiens
  misc_RNA (1)...(19): siRNA sense strand
gacuucuacuaugacauuu

SEQ ID NO: 1994416 - RNA, 19 nt, Homo sapiens
  misc_RNA (1)...(19): siRNA sense strand
acagacuucuacuaugaca

SEQ ID NO: 1994417 - RNA, 19 nt, Homo sapiens
  misc_RNA (1)...(19): siRNA sense strand
uggcauggaagaauccuau

SEQ ID NO: 1994418 - RNA, 19 nt, Homo sapiens
  misc_RNA (1)...(19): siRNA sense strand
gaagagaaacgaaacaaga

SEQ ID NO: 1994419 - RNA, 19 nt, Homo sapiens
  misc_RNA (1)...(19): siRNA sense strand
guagauggacguauuauug

SEQ ID NO: 1994420 - RNA, 19 nt, Homo sapiens
  misc_RNA (1)...(19): siRNA sense strand
gagacacgcuucacauaca

SEQ ID NO: 1994421 - RNA, 19 nt, Homo sapiens
  misc_RNA (1)...(19): siRNA sense strand
aaaagaagcucaaggaaga

SEQ ID NO: 1994422 - RNA, 19 nt, Homo sapiens
  misc_RNA (1)...(19): siRNA sense strand
aaucauuccuucucacuug

SEQ ID NO: 1994423 - RNA, 19 nt, Homo sapiens
  misc_RNA (1)...(19): siRNA sense strand
gagacccucugguuauaga

SEQ ID NO: 1994424 - RNA, 19 nt, Homo sapiens
  misc_RNA (1)...(19): siRNA sense strand
gaagcgaagggcaaucauu

SEQ ID NO: 1994425 - RNA, 19 nt, Homo sapiens
  misc_RNA (1)...(19): siRNA sense strand
gggcaaucauuccuucuca

SEQ ID NO: 1994426 - RNA, 19 nt, Homo sapiens
  misc_RNA (1)...(19): siRNA sense strand
gcagagucuucucgacaug

SEQ ID NO: 1994427 - RNA, 19 nt, Homo sapiens
  misc_RNA (1)...(19): siRNA sense strand
gaagcucaaggaagagaaa

SEQ ID NO: 1994428 - RNA, 19 nt, Homo sapiens
  misc_RNA (1)...(19): siRNA sense strand
gaaacgaaacaagagcaaa

SEQ ID NO: 1994429 - RNA, 19 nt, Homo sapiens
  misc_RNA (1)...(19): siRNA sense strand
cuugguagauggacguauu

SEQ ID NO: 1994430 - RNA, 19 nt, Homo sapiens
  misc_RNA (1)...(19): siRNA sense strand
ggagacacgcuucacauac

SEQ ID NO: 1994431 - RNA, 19 nt, Homo sapiens
  misc_RNA (1)...(19): siRNA sense strand
acaccucccugaccagaga

SEQ ID NO: 1994432 - RNA, 19 nt, Homo sapiens
  misc_RNA (1)...(19): siRNA sense strand
uagauggacguauuauuga

SEQ ID NO: 1994433 - RNA, 19 nt, Homo sapiens
  misc_RNA (1)...(19): siRNA sense strand
gagaagcgaagggcaauca

SEQ ID NO: 1994434 - RNA, 19 nt, Homo sapiens
  misc_RNA (1)...(19): siRNA sense strand
ucaaggaagagaaacgaaa

SEQ ID NO: 1994435 - RNA, 19 nt, Homo sapiens
  misc_RNA (1)...(19): siRNA sense strand
gcacuaauccgagccaacu

SEQ ID NO: 1994436 - RNA, 19 nt, Homo sapiens
  misc_RNA (1)...(19): siRNA sense strand
ggaagagaaacgaaacaag

SEQ ID NO: 1994437 - RNA, 19 nt, Homo sapiens
  misc_RNA (1)...(19): siRNA sense strand
gguagauggacguauuauu

SEQ ID NO: 1994438 - RNA, 19 nt, Homo sapiens
  misc_RNA (1)...(19): siRNA sense strand
uggagacacgcuucacaua

SEQ ID NO: 1994439 - RNA, 19 nt, Homo sapiens
  misc_RNA (1)...(19): siRNA sense strand
acgggaagcuugguagaug

SEQ ID NO: 1994440 - RNA, 19 nt, Homo sapiens
  misc_RNA (1)...(19): siRNA sense strand
ucacuuggccuauggaaaa

SEQ ID NO: 1994441 - RNA, 19 nt, Homo sapiens
  misc_RNA (1)...(19): siRNA sense strand
auacagaaaggccaauaga

SEQ ID NO: 1994442 - RNA, 19 nt, Homo sapiens
  misc_RNA (1)...(19): siRNA sense strand
gagagaagcgaagggcaau

SEQ ID NO: 1994443 - RNA, 19 nt, Homo sapiens
  misc_RNA (1)...(19): siRNA sense strand
aaaggccaauagacccaaa

SEQ ID NO: 1994444 - RNA, 19 nt, Homo sapiens
  misc_RNA (1)...(19): siRNA sense strand
gcaaucauuccuucucacu

SEQ ID NO: 1994445 - RNA, 19 nt, Homo sapiens
  misc_RNA (1)...(19): siRNA sense strand
aagcgaagggcaaucauuc

SEQ ID NO: 1994446 - RNA, 19 nt, Homo sapiens
  misc_RNA (1)...(19): siRNA sense strand
caaggaagagaaacgaaac

SEQ ID NO: 1994447 - RNA, 19 nt, Homo sapiens
  misc_RNA (1)...(19): siRNA sense strand
gauggacguauuauugaca

SEQ ID NO: 1994448 - RNA, 19 nt, Homo sapiens
  misc_RNA (1)...(19): siRNA sense strand
uaucaccuauacagaaagg

SEQ ID NO: 1994449 - RNA, 19 nt, Homo sapiens
  misc_RNA (1)...(19): siRNA sense strand
cuacacgggaagcuuggua

SEQ ID NO: 1994450 - RNA, 19 nt, Homo sapiens
  misc_RNA (1)...(19): siRNA sense strand
gcucaaggaagagaaacga

SEQ ID NO: 1994451 - RNA, 19 nt, Homo sapiens
  misc_RNA (1)...(19): siRNA sense strand
uuauagaacuuggccaaaa

SEQ ID NO: 1994452 - RNA, 19 nt, Homo sapiens
  misc_RNA (1)...(19): siRNA sense strand
ccucauuggguaucaccua

SEQ ID NO: 1994453 - RNA, 19 nt, Homo sapiens
  misc_RNA (1)...(19): siRNA sense strand
aaacgaaacaagagcaaaa

SEQ ID NO: 1994454 - RNA, 19 nt, Homo sapiens
  misc_RNA (1)...(19): siRNA sense strand
gaagauggaugggaaagua

SEQ ID NO: 1994455 - RNA, 19 nt, Homo sapiens
  misc_RNA (1)...(19): siRNA sense strand
cagaagaacuuuaugauga

SEQ ID NO: 1994456 - RNA, 19 nt, Homo sapiens
  misc_RNA (1)...(19): siRNA sense strand
gaaggaacaucuggaauga

SEQ ID NO: 1994457 - RNA, 19 nt, Homo sapiens
  misc_RNA (1)...(19): siRNA sense strand
gaacucuucuuugaacuuu

SEQ ID NO: 1994458 - RNA, 19 nt, Homo sapiens
  misc_RNA (1)...(19): siRNA sense strand
gcaacacucuuccgaugaa

SEQ ID NO: 1994459 - RNA, 19 nt, Homo sapiens
  misc_RNA (1)...(19): siRNA sense strand
cagaguaccuaaguaauuu

SEQ ID NO: 1994460 - RNA, 19 nt, Homo sapiens
  misc_RNA (1)...(19): siRNA sense strand
caagagaccugcuaguaca

SEQ ID NO: 1994461 - RNA, 19 nt, Homo sapiens
  misc_RNA (1)...(19): siRNA sense strand
ggauaagaauguaaugaug

SEQ ID NO: 1994462 - RNA, 19 nt, Homo sapiens
  misc_RNA (1)...(19): siRNA sense strand
caaugaaagugcucaagaa

SEQ ID NO: 1994463 - RNA, 19 nt, Homo sapiens
  misc_RNA (1)...(19): siRNA sense strand
guaaugaugucugcuagaa

SEQ ID NO: 1994464 - RNA, 19 nt, Homo sapiens
  misc_RNA (1)...(19): siRNA sense strand
ugaaagugcucaagaaaca

SEQ ID NO: 1994465 - RNA, 19 nt, Homo sapiens
  misc_RNA (1)...(19): siRNA sense strand
caagaacucuggagaaguc

SEQ ID NO: 1994466 - RNA, 19 nt, Homo sapiens
  misc_RNA (1)...(19): siRNA sense strand
gaaaagaauuugugaggaa

SEQ ID NO: 1994467 - RNA, 19 nt, Homo sapiens
  misc_RNA (1)...(19): siRNA sense strand
gaacuuugauucaccucuu

SEQ ID NO: 1994468 - RNA, 19 nt, Homo sapiens
  misc_RNA (1)...(19): siRNA sense strand
gaucuucucuccugcaauc

SEQ ID NO: 1994469 - RNA, 19 nt, Homo sapiens
  misc_RNA (1)...(19): siRNA sense strand
caacugcaauggcuggaaa

SEQ ID NO: 1994470 - RNA, 19 nt, Homo sapiens
  misc_RNA (1)...(19): siRNA sense strand
uaaccaagauccuucuguu

SEQ ID NO: 1994471 - RNA, 19 nt, Homo sapiens
  misc_RNA (1)...(19): siRNA sense strand
ggaaaugccagaagaggaa

SEQ ID NO: 1994472 - RNA, 19 nt, Homo sapiens
  misc_RNA (1)...(19): siRNA sense strand
ggaggaugcugauggugaa

SEQ ID NO: 1994473 - RNA, 19 nt, Homo sapiens
  misc_RNA (1)...(19): siRNA sense strand
acaagcaucucaucaccua

SEQ ID NO: 1994474 - RNA, 19 nt, Homo sapiens
  misc_RNA (1)...(19): siRNA sense strand
gaaagaagagaaugcugaa

SEQ ID NO: 1994475 - RNA, 19 nt, Homo sapiens
  misc_RNA (1)...(19): siRNA sense strand
ggccaugacugaagaacuu

SEQ ID NO: 1994476 - RNA, 19 nt, Homo sapiens
  misc_RNA (1)...(19): siRNA sense strand
ggagauaacagcucgaugu

SEQ ID NO: 1994477 - RNA, 19 nt, Homo sapiens
  misc_RNA (1)...(19): siRNA sense strand
gcuuugaucuugcugagaa

SEQ ID NO: 1994478 - RNA, 19 nt, Homo sapiens
  misc_RNA (1)...(19): siRNA sense strand
gaagaggaaauacauugaa

SEQ ID NO: 1994479 - RNA, 19 nt, Homo sapiens
  misc_RNA (1)...(19): siRNA sense strand
gagaccugcuaguacaaua

SEQ ID NO: 1994480 - RNA, 19 nt, Homo sapiens
  misc_RNA (1)...(19): siRNA sense strand
gcuuugacauucuuucuug

SEQ ID NO: 1994481 - RNA, 19 nt, Homo sapiens
  misc_RNA (1)...(19): siRNA sense strand
uccaagaccuggcucagua

SEQ ID NO: 1994482 - RNA, 19 nt, Homo sapiens
  misc_RNA (1)...(19): siRNA sense strand
gcaaugaaagugcucaaga

SEQ ID NO: 1994483 - RNA, 19 nt, Homo sapiens
  misc_RNA (1)...(19): siRNA sense strand
uaucacaacugcauguuuc

SEQ ID NO: 1994484 - RNA, 19 nt, Homo sapiens
  misc_RNA (1)...(19): siRNA sense strand
aagcaagaguacaagaaua

SEQ ID NO: 1994485 - RNA, 19 nt, Homo sapiens
  misc_RNA (1)...(19): siRNA sense strand
gccauucucuugauucaug

SEQ ID NO: 1994486 - RNA, 19 nt, Homo sapiens
  misc_RNA (1)...(19): siRNA sense strand
aaagagaaguaaccaagau

SEQ ID NO: 1994487 - RNA, 19 nt, Homo sapiens
  misc_RNA (1)...(19): siRNA sense strand
gauggugaauggauugaug

SEQ ID NO: 1994488 - RNA, 19 nt, Homo sapiens
  misc_RNA (1)...(19): siRNA sense strand
gacaagaacucuggagaag

SEQ ID NO: 1994489 - RNA, 19 nt, Homo sapiens
  misc_RNA (1)...(19): siRNA sense strand
aaccagagguguuuaacuu

SEQ ID NO: 1994490 - RNA, 19 nt, Homo sapiens
  misc_RNA (1)...(19): siRNA sense strand
gaagaacuuuaugaugaug

SEQ ID NO: 1994491 - RNA, 19 nt, Homo sapiens
  misc_RNA (1)...(19): siRNA sense strand
gaagcaagaguacaagaau

SEQ ID NO: 1994492 - RNA, 19 nt, Homo sapiens
  misc_RNA (1)...(19): siRNA sense strand
acacaaggauaagaaugua

SEQ ID NO: 1994493 - RNA, 19 nt, Homo sapiens
  misc_RNA (1)...(19): siRNA sense strand
gauaaacuucugcgaaaga

SEQ ID NO: 1994494 - RNA, 19 nt, Homo sapiens
  misc_RNA (1)...(19): siRNA sense strand
ccagaguaccuaaguaauu

SEQ ID NO: 1994495 - RNA, 19 nt, Homo sapiens
  misc_RNA (1)...(19): siRNA sense strand
ggagagguuugaagugaag

SEQ ID NO: 1994496 - RNA, 19 nt, Homo sapiens
  misc_RNA (1)...(19): siRNA sense strand
caucagcacuagccgaguu

SEQ ID NO: 1994497 - RNA, 19 nt, Homo sapiens
  misc_RNA (1)...(19): siRNA sense strand
gaaucaaugcuauaaagga

SEQ ID NO: 1994498 - RNA, 19 nt, Homo sapiens
  misc_RNA (1)...(19): siRNA sense strand
ggagaagucaugacaguag

SEQ ID NO: 1994499 - RNA, 19 nt, Homo sapiens
  misc_RNA (1)...(19): siRNA sense strand
gcaagagaccugcuaguac

SEQ ID NO: 1994500 - RNA, 19 nt, Homo sapiens
  misc_RNA (1)...(19): siRNA sense strand
gaauauggagaauuagaug

SEQ ID NO: 1994501 - RNA, 19 nt, Homo sapiens
  misc_RNA (1)...(19): siRNA sense strand
cuacagaggccuccauaga

SEQ ID NO: 1994502 - RNA, 19 nt, Homo sapiens
  misc_RNA (1)...(19): siRNA sense strand
guaggaaucaaugcuauaa

SEQ ID NO: 1994503 - RNA, 19 nt, Homo sapiens
  misc_RNA (1)...(19): siRNA sense strand
aaggagagguuugaaguga

SEQ ID NO: 1994504 - RNA, 19 nt, Homo sapiens
  misc_RNA (1)...(19): siRNA sense strand
ugacaaagagacaagacua

SEQ ID NO: 1994505 - RNA, 19 nt, Homo sapiens
  misc_RNA (1)...(19): siRNA sense strand
ggaggaggaugcugauggu

SEQ ID NO: 1994506 - RNA, 19 nt, Homo sapiens
  misc_RNA (1)...(19): siRNA sense strand
guacaagaauauggagaau

SEQ ID NO: 1994507 - RNA, 19 nt, Homo sapiens
  misc_RNA (1)...(19): siRNA sense strand
gcaaaacacaagaacaaua

SEQ ID NO: 1994508 - RNA, 19 nt, Homo sapiens
  misc_RNA (1)...(19): siRNA sense strand
cagaagaggaaauacauug

SEQ ID NO: 1994509 - RNA, 19 nt, Homo sapiens
  misc_RNA (1)...(19): siRNA sense strand
agaccuggcucaguauaaa

SEQ ID NO: 1994510 - RNA, 19 nt, Homo sapiens
  misc_RNA (1)...(19): siRNA sense strand
ugauugaacucuacagaag

SEQ ID NO: 1994511 - RNA, 19 nt, Homo sapiens
  misc_RNA (1)...(19): siRNA sense strand
aaacacacaaggauaagaa

SEQ ID NO: 1994512 - RNA, 19 nt, Homo sapiens
  misc_RNA (1)...(19): siRNA sense strand
caucaagccugcuagaacu

SEQ ID NO: 1994513 - RNA, 19 nt, Homo sapiens
  misc_RNA (1)...(19): siRNA sense strand
gcaagaaaucuccaagaag

SEQ ID NO: 1994514 - RNA, 19 nt, Homo sapiens
  misc_RNA (1)...(19): siRNA sense strand
agcaagaaaucuccaagaa

SEQ ID NO: 1994515 - RNA, 19 nt, Homo sapiens
  misc_RNA (1)...(19): siRNA sense strand
cgacaagaacucuggagaa

SEQ ID NO: 1994516 - RNA, 19 nt, Homo sapiens
  misc_RNA (1)...(19): siRNA sense strand
augauaaacuucugcgaaa

SEQ ID NO: 1994517 - RNA, 19 nt, Homo sapiens
  misc_RNA (1)...(19): siRNA sense strand
gaugaagaacagcaagaaa

SEQ ID NO: 1994518 - RNA, 19 nt, Homo sapiens
  misc_RNA (1)...(19): siRNA sense strand
guaaggagagguuugaagu

SEQ ID NO: 1994519 - RNA, 19 nt, Homo sapiens
  misc_RNA (1)...(19): siRNA sense strand
caaagagaaguaaccaaga

SEQ ID NO: 1994520 - RNA, 19 nt, Homo sapiens
  misc_RNA (1)...(19): siRNA sense strand
cauagaagcaagaguacaa

SEQ ID NO: 1994521 - RNA, 19 nt, Homo sapiens
  misc_RNA (1)...(19): siRNA sense strand
ugaucuugcugagaaauaa

SEQ ID NO: 1994522 - RNA, 19 nt, Homo sapiens
  misc_RNA (1)...(19): siRNA sense strand
gaugucugcuagaacuuug

SEQ ID NO: 1994523 - RNA, 19 nt, Homo sapiens
  misc_RNA (1)...(19): siRNA sense strand
auaagaaucucaucaaucc

SEQ ID NO: 1994524 - RNA, 19 nt, Homo sapiens
  misc_RNA (1)...(19): siRNA sense strand
ugacuguggcaaacaauuu

SEQ ID NO: 1994525 - RNA, 19 nt, Homo sapiens
  misc_RNA (1)...(19): siRNA sense strand
gcacuacgagaugcacuuu

SEQ ID NO: 1994526 - RNA, 19 nt, Homo sapiens
  misc_RNA (1)...(19): siRNA sense strand
ccgcauggcccaaaugaga

SEQ ID NO: 1994527 - RNA, 19 nt, Homo sapiens
  misc_RNA (1)...(19): siRNA sense strand
acagaggccuccauagaag

SEQ ID NO: 1994528 - RNA, 19 nt, Homo sapiens
  misc_RNA (1)...(19): siRNA sense strand
ugcaauggcuggaaagaca

SEQ ID NO: 1994529 - RNA, 19 nt, Homo sapiens
  misc_RNA (1)...(19): siRNA sense strand
gguuugaagugaagaugau

SEQ ID NO: 1994530 - RNA, 19 nt, Homo sapiens
  misc_RNA (1)...(19): siRNA sense strand
ugaauggauugaugugcaa

SEQ ID NO: 1994531 - RNA, 19 nt, Homo sapiens
  misc_RNA (1)...(19): siRNA sense strand
agaaggaacaucuggaaug

SEQ ID NO: 1994532 - RNA, 19 nt, Homo sapiens
  misc_RNA (1)...(19): siRNA sense strand
aagcguuccuuccgagaaa

SEQ ID NO: 1994533 - RNA, 19 nt, Homo sapiens
  misc_RNA (1)...(19): siRNA sense strand
ggaaaguaccagucucagu

SEQ ID NO: 1994534 - RNA, 19 nt, Homo sapiens
  misc_RNA (1)...(19): siRNA sense strand
caguaggaaucaaugcuau

SEQ ID NO: 1994535 - RNA, 19 nt, Homo sapiens
  misc_RNA (1)...(19): siRNA sense strand
ggugggaauucaugagcuu

SEQ ID NO: 1994536 - RNA, 19 nt, Homo sapiens
  misc_RNA (1)...(19): siRNA sense strand
ccagagguguuuaacuuuu

SEQ ID NO: 1994537 - RNA, 19 nt, Homo sapiens
  misc_RNA (1)...(19): siRNA sense strand
ucaaugcuauaaaggagau

SEQ ID NO: 1994538 - RNA, 19 nt, Homo sapiens
  misc_RNA (1)...(19): siRNA sense strand
aggaaucaaugcuauaaag

SEQ ID NO: 1994539 - RNA, 19 nt, Homo sapiens
  misc_RNA (1)...(19): siRNA sense strand
gaacucuggagaagucaug

SEQ ID NO: 1994540 - RNA, 19 nt, Homo sapiens
  misc_RNA (1)...(19): siRNA sense strand
ccaagauccuucuguuugc

SEQ ID NO: 1994541 - RNA, 19 nt, Homo sapiens
  misc_RNA (1)...(19): siRNA sense strand
ccagauuggugggaauuca

SEQ ID NO: 1994542 - RNA, 19 nt, Homo sapiens
  misc_RNA (1)...(19): siRNA sense strand
ugaagaacagcaagaaauc

SEQ ID NO: 1994543 - RNA, 19 nt, Homo sapiens
  misc_RNA (1)...(19): siRNA sense strand
uacagaggccuccauagaa

SEQ ID NO: 1994544 - RNA, 19 nt, Homo sapiens
  misc_RNA (1)...(19): siRNA sense strand
caagaccuggcucaguaua

SEQ ID NO: 1994545 - RNA, 19 nt, Homo sapiens
  misc_RNA (1)...(19): siRNA sense strand
cagccauucucuugauuca

SEQ ID NO: 1994546 - RNA, 19 nt, Homo sapiens
  misc_RNA (1)...(19): siRNA sense strand
gaagaacagcaagaaaucu

SEQ ID NO: 1994547 - RNA, 19 nt, Homo sapiens
  misc_RNA (1)...(19): siRNA sense strand
cuucucuccugcaaucaua

SEQ ID NO: 1994548 - RNA, 19 nt, Homo sapiens
  misc_RNA (1)...(19): siRNA sense strand
gaacucuacagaaggaaca

SEQ ID NO: 1994549 - RNA, 19 nt, Homo sapiens
  misc_RNA (1)...(19): siRNA sense strand
ccucagaugcugcagaaga

SEQ ID NO: 1994550 - RNA, 19 nt, Homo sapiens
  misc_RNA (1)...(19): siRNA sense strand
cucaagaggugaaagaucu

SEQ ID NO: 1994551 - RNA, 19 nt, Homo sapiens
  misc_RNA (1)...(19): siRNA sense strand
ggaugcugauggugaaugg

SEQ ID NO: 1994552 - RNA, 19 nt, Homo sapiens
  misc_RNA (1)...(19): siRNA sense strand
aaagagacaagacuagcaa

SEQ ID NO: 1994553 - RNA, 19 nt, Homo sapiens
  misc_RNA (1)...(19): siRNA sense strand
acagaagaacuuuaugaug

SEQ ID NO: 1994554 - RNA, 19 nt, Homo sapiens
  misc_RNA (1)...(19): siRNA sense strand
ggaaaggccuucauucaua

SEQ ID NO: 1994555 - RNA, 19 nt, Homo sapiens
  misc_RNA (1)...(19): siRNA sense strand
ggaauucacacaaauauga

SEQ ID NO: 1994556 - RNA, 19 nt, Homo sapiens
  misc_RNA (1)...(19): siRNA sense strand
gagaauaaaugguggaaag

SEQ ID NO: 1994557 - RNA, 19 nt, Homo sapiens
  misc_RNA (1)...(19): siRNA sense strand
gagagaagccuuaugaaug

SEQ ID NO: 1994558 - RNA, 19 nt, Homo sapiens
  misc_RNA (1)...(19): siRNA sense strand
gagagaaaccuuacaaaug

SEQ ID NO: 1994559 - RNA, 19 nt, Homo sapiens
  misc_RNA (1)...(19): siRNA sense strand
gaagggaauucacacaaau

SEQ ID NO: 1994560 - RNA, 19 nt, Homo sapiens
  misc_RNA (1)...(19): siRNA sense strand
gagagaagcccuaugaaug

SEQ ID NO: 1994561 - RNA, 19 nt, Homo sapiens
  misc_RNA (1)...(19): siRNA sense strand
gaaaggccuucauucauag

SEQ ID NO: 1994562 - RNA, 19 nt, Homo sapiens
  misc_RNA (1)...(19): siRNA sense strand
caacaucagaguauucaua

SEQ ID NO: 1994563 - RNA, 19 nt, Homo sapiens
  misc_RNA (1)...(19): siRNA sense strand
gcuauagacuucucucaug

SEQ ID NO: 1994564 - RNA, 19 nt, Homo sapiens
  misc_RNA (1)...(19): siRNA sense strand
gagagaaaccguaugaaug

SEQ ID NO: 1994565 - RNA, 19 nt, Homo sapiens
  misc_RNA (1)...(19): siRNA sense strand
gaagcaccuuucauucaaa

SEQ ID NO: 1994566 - RNA, 19 nt, Homo sapiens
  misc_RNA (1)...(19): siRNA sense strand
caucaaagaauucacagua

SEQ ID NO: 1994567 - RNA, 19 nt, Homo sapiens
  misc_RNA (1)...(19): siRNA sense strand
ggagagaaaccuuacaaau

SEQ ID NO: 1994568 - RNA, 19 nt, Homo sapiens
  misc_RNA (1)...(19): siRNA sense strand
gcucacaccuuacucaaca

SEQ ID NO: 1994569 - RNA, 19 nt, Homo sapiens
  misc_RNA (1)...(19): siRNA sense strand
agagaagccuuaugaaugu

SEQ ID NO: 1994570 - RNA, 19 nt, Homo sapiens
  misc_RNA (1)...(19): siRNA sense strand
ggagagaaaccguaugaau

SEQ ID NO: 1994571 - RNA, 19 nt, Homo sapiens
  misc_RNA (1)...(19): siRNA sense strand
ggagagaagccuuaugaau

SEQ ID NO: 1994572 - RNA, 19 nt, Homo sapiens
  misc_RNA (1)...(19): siRNA sense strand
gagaaaccguaugaaugua

SEQ ID NO: 1994573 - RNA, 19 nt, Homo sapiens
  misc_RNA (1)...(19): siRNA sense strand
agagaaaccuuacaaaugc

SEQ ID NO: 1994574 - RNA, 19 nt, Homo sapiens
  misc_RNA (1)...(19): siRNA sense strand
ucaaagaauucacaguaug

SEQ ID NO: 1994575 - RNA, 19 nt, Homo sapiens
  misc_RNA (1)...(19): siRNA sense strand
gcucaucacuuacuaacca

SEQ ID NO: 1994576 - RNA, 19 nt, Homo sapiens
  misc_RNA (1)...(19): siRNA sense strand
caaagaauucacaguauga

SEQ ID NO: 1994577 - RNA, 19 nt, Homo sapiens
  misc_RNA (1)...(19): siRNA sense strand
ggagagaagcccuaugaau

SEQ ID NO: 1994578 - RNA, 19 nt, Homo sapiens
  misc_RNA (1)...(19): siRNA sense strand
uuuaguagcuucucauuuc

SEQ ID NO: 1994579 - RNA, 19 nt, Homo sapiens
  misc_RNA (1)...(19): siRNA sense strand
gaaaccguaugaauguaug

SEQ ID NO: 1994580 - RNA, 19 nt, Homo sapiens
  misc_RNA (1)...(19): siRNA sense strand
guaacuaagccauauguga

SEQ ID NO: 1994581 - RNA, 19 nt, Homo sapiens
  misc_RNA (1)...(19): siRNA sense strand
gaauaaaugguggaaagaa

SEQ ID NO: 1994582 - RNA, 19 nt, Homo sapiens
  misc_RNA (1)...(19): siRNA sense strand
ggaauuaucaacaaagaag

SEQ ID NO: 1994583 - RNA, 19 nt, Homo sapiens
  misc_RNA (1)...(19): siRNA sense strand
agaagcaccuuucauucaa

SEQ ID NO: 1994584 - RNA, 19 nt, Homo sapiens
  misc_RNA (1)...(19): siRNA sense strand
cagcaucuaagaauucaua

SEQ ID NO: 1994585 - RNA, 19 nt, Homo sapiens
  misc_RNA (1)...(19): siRNA sense strand
gagaaugugggaaagcuuu

SEQ ID NO: 1994586 - RNA, 19 nt, Homo sapiens
  misc_RNA (1)...(19): siRNA sense strand
gagaagccuuaugaaugua

SEQ ID NO: 1994587 - RNA, 19 nt, Homo sapiens
  misc_RNA (1)...(19): siRNA sense strand
caggugacauuuagugaug

SEQ ID NO: 1994588 - RNA, 19 nt, Homo sapiens
  misc_RNA (1)...(19): siRNA sense strand
ugcuguagcucacaccuua

SEQ ID NO: 1994589 - RNA, 19 nt, Homo sapiens
  misc_RNA (1)...(19): siRNA sense strand
uaacuaagccauaugugau

SEQ ID NO: 1994590 - RNA, 19 nt, Homo sapiens
  misc_RNA (1)...(19): siRNA sense strand
cuauagacuucucucauga

SEQ ID NO: 1994591 - RNA, 19 nt, Homo sapiens
  misc_RNA (1)...(19): siRNA sense strand
cgacaucagauaagccaua

SEQ ID NO: 1994592 - RNA, 19 nt, Homo sapiens
  misc_RNA (1)...(19): siRNA sense strand
gagagaaaaucuauacaug

SEQ ID NO: 1994593 - RNA, 19 nt, Homo sapiens
  misc_RNA (1)...(19): siRNA sense strand
caggagagaagcccuauga

SEQ ID NO: 1994594 - RNA, 19 nt, Homo sapiens
  misc_RNA (1)...(19): siRNA sense strand
guuuagaaaugcaggaaau

SEQ ID NO: 1994595 - RNA, 19 nt, Homo sapiens
  misc_RNA (1)...(19): siRNA sense strand
cuaugaaugucgugaaugu

SEQ ID NO: 1994596 - RNA, 19 nt, Homo sapiens
  misc_RNA (1)...(19): siRNA sense strand
gagugggcaugccuagauu

SEQ ID NO: 1994597 - RNA, 19 nt, Homo sapiens
  misc_RNA (1)...(19): siRNA sense strand
uuagugauguggcuauaga

SEQ ID NO: 1994598 - RNA, 19 nt, Homo sapiens
  misc_RNA (1)...(19): siRNA sense strand
agagaaaccguaugaaugu

SEQ ID NO: 1994599 - RNA, 19 nt, Homo sapiens
  misc_RNA (1)...(19): siRNA sense strand
gaugugaugguccagaauu

SEQ ID NO: 1994600 - RNA, 19 nt, Homo sapiens
  misc_RNA (1)...(19): siRNA sense strand
caacaucaaagaauucaca

SEQ ID NO: 1994601 - RNA, 19 nt, Homo sapiens
  misc_RNA (1)...(19): siRNA sense strand
ugauguggcuauagacuuc

SEQ ID NO: 1994602 - RNA, 19 nt, Homo sapiens
  misc_RNA (1)...(19): siRNA sense strand
gagaaaaucuauacaugca

SEQ ID NO: 1994603 - RNA, 19 nt, Homo sapiens
  misc_RNA (1)...(19): siRNA sense strand
gaaaagagcccuggaugau

SEQ ID NO: 1994604 - RNA, 19 nt, Homo sapiens
  misc_RNA (1)...(19): siRNA sense strand
uagaagcaccuuucauuca

SEQ ID NO: 1994605 - RNA, 19 nt, Homo sapiens
  misc_RNA (1)...(19): siRNA sense strand
guaggucuuuccguaacua

SEQ ID NO: 1994606 - RNA, 19 nt, Homo sapiens
  misc_RNA (1)...(19): siRNA sense strand
gagaagcccuaugaauguc

SEQ ID NO: 1994607 - RNA, 19 nt, Homo sapiens
  misc_RNA (1)...(19): siRNA sense strand
agagaagcccuaugaaugu

SEQ ID NO: 1994608 - RNA, 19 nt, Homo sapiens
  misc_RNA (1)...(19): siRNA sense strand
gagaaaccuuacaaaugca

SEQ ID NO: 1994609 - RNA, 19 nt, Homo sapiens
  misc_RNA (1)...(19): siRNA sense strand
agccaugguucaucccuua

SEQ ID NO: 1994610 - RNA, 19 nt, Homo sapiens
  misc_RNA (1)...(19): siRNA sense strand
gaauguaugaacuguggaa

SEQ ID NO: 1994611 - RNA, 19 nt, Homo sapiens
  misc_RNA (1)...(19): siRNA sense strand
guggaaaggccuucauuca

SEQ ID NO: 1994612 - RNA, 19 nt, Homo sapiens
  misc_RNA (1)...(19): siRNA sense strand
uguaugaacuguggaaagu

SEQ ID NO: 1994613 - RNA, 19 nt, Homo sapiens
  misc_RNA (1)...(19): siRNA sense strand
gugaaugugggaagacuuu

SEQ ID NO: 1994614 - RNA, 19 nt, Homo sapiens
  misc_RNA (1)...(19): siRNA sense strand
gaagccuuaugaauguaga

SEQ ID NO: 1994615 - RNA, 19 nt, Homo sapiens
  misc_RNA (1)...(19): siRNA sense strand
caucagauaagccauagug

SEQ ID NO: 1994616 - RNA, 19 nt, Homo sapiens
  misc_RNA (1)...(19): siRNA sense strand
agccauaugugaucauguu

SEQ ID NO: 1994617 - RNA, 19 nt, Homo sapiens
  misc_RNA (1)...(19): siRNA sense strand
uaagaauucauacgcaaga

SEQ ID NO: 1994618 - RNA, 19 nt, Homo sapiens
  misc_RNA (1)...(19): siRNA sense strand
uuuagaagcaccuuucauu

SEQ ID NO: 1994619 - RNA, 19 nt, Homo sapiens
  misc_RNA (1)...(19): siRNA sense strand
cauaguucgucucucauuc

SEQ ID NO: 1994620 - RNA, 19 nt, Homo sapiens
  misc_RNA (1)...(19): siRNA sense strand
auucauaguucgucucuca

SEQ ID NO: 1994621 - RNA, 19 nt, Homo sapiens
  misc_RNA (1)...(19): siRNA sense strand
ggaaaacaaggaauuauca

SEQ ID NO: 1994622 - RNA, 19 nt, Homo sapiens
  misc_RNA (1)...(19): siRNA sense strand
cuaugagugucguauaugu

SEQ ID NO: 1994623 - RNA, 19 nt, Homo sapiens
  misc_RNA (1)...(19): siRNA sense strand
gacaucagauaagccauag

SEQ ID NO: 1994624 - RNA, 19 nt, Homo sapiens
  misc_RNA (1)...(19): siRNA sense strand
ggaaaagagcccuggauga

SEQ ID NO: 1994625 - RNA, 19 nt, Homo sapiens
  misc_RNA (1)...(19): siRNA sense strand
gaaugugggaaggccuuua

SEQ ID NO: 1994626 - RNA, 19 nt, Homo sapiens
  misc_RNA (1)...(19): siRNA sense strand
gcucagagggacuuauaca

SEQ ID NO: 1994627 - RNA, 19 nt, Homo sapiens
  misc_RNA (1)...(19): siRNA sense strand
ggacuuauacaaggaugug

SEQ ID NO: 1994628 - RNA, 19 nt, Homo sapiens
  misc_RNA (1)...(19): siRNA sense strand
guaugaauguaugaacugu

SEQ ID NO: 1994629 - RNA, 19 nt, Homo sapiens
  misc_RNA (1)...(19): siRNA sense strand
ccuuacaaaugcauugaau

SEQ ID NO: 1994630 - RNA, 19 nt, Homo sapiens
  misc_RNA (1)...(19): siRNA sense strand
ccuuaugaauguagagaau

SEQ ID NO: 1994631 - RNA, 19 nt, Homo sapiens
  misc_RNA (1)...(19): siRNA sense strand
gugugucccuucucauuca

SEQ ID NO: 1994632 - RNA, 19 nt, Homo sapiens
  misc_RNA (1)...(19): siRNA sense strand
uaugaacuguggaaagucu

SEQ ID NO: 1994633 - RNA, 19 nt, Homo sapiens
  misc_RNA (1)...(19): siRNA sense strand
gcacucacacgggagagaa

SEQ ID NO: 1994634 - RNA, 19 nt, Homo sapiens
  misc_RNA (1)...(19): siRNA sense strand
cuggagagaagccuuauga

SEQ ID NO: 1994635 - RNA, 19 nt, Homo sapiens
  misc_RNA (1)...(19): siRNA sense strand
ucagagggacuuauacaag

SEQ ID NO: 1994636 - RNA, 19 nt, Homo sapiens
  misc_RNA (1)...(19): siRNA sense strand
aaagugagagaauaaaugg

SEQ ID NO: 1994637 - RNA, 19 nt, Homo sapiens
  misc_RNA (1)...(19): siRNA sense strand
acaccuuacucaacaucaa

SEQ ID NO: 1994638 - RNA, 19 nt, Homo sapiens
  misc_RNA (1)...(19): siRNA sense strand
uaagccauaugugaucaug

SEQ ID NO: 1994639 - RNA, 19 nt, Homo sapiens
  misc_RNA (1)...(19): siRNA sense strand
gaaugugggaagacuuuua

SEQ ID NO: 1994640 - RNA, 19 nt, Homo sapiens
  misc_RNA (1)...(19): siRNA sense strand
gaaucaagaugggaaaaca

SEQ ID NO: 1994641 - RNA, 19 nt, Homo sapiens
  misc_RNA (1)...(19): siRNA sense strand
cgcuaugagugucguauau

SEQ ID NO: 1994642 - RNA, 19 nt, Homo sapiens
  misc_RNA (1)...(19): siRNA sense strand
agagggacuuauacaagga

SEQ ID NO: 1994643 - RNA, 19 nt, Homo sapiens
  misc_RNA (1)...(19): siRNA sense strand
cgggagagaaaccguauga

SEQ ID NO: 1994644 - RNA, 19 nt, Homo sapiens
  misc_RNA (1)...(19): siRNA sense strand
aagggaauucacacaaaua

SEQ ID NO: 1994645 - RNA, 19 nt, Homo sapiens
  misc_RNA (1)...(19): siRNA sense strand
augugaugguccagaauua

SEQ ID NO: 1994646 - RNA, 19 nt, Homo sapiens
  misc_RNA (1)...(19): siRNA sense strand
gguccagaauuaugagaac

SEQ ID NO: 1994647 - RNA, 19 nt, Homo sapiens
  misc_RNA (1)...(19): siRNA sense strand
cauggcucaucacuuacua

SEQ ID NO: 1994648 - RNA, 19 nt, Homo sapiens
  misc_RNA (1)...(19): siRNA sense strand
agucgccacuggagaauuc

SEQ ID NO: 1994649 - RNA, 19 nt, Homo sapiens
  misc_RNA (1)...(19): siRNA sense strand
caaggaauuaucaacaaag

SEQ ID NO: 1994650 - RNA, 19 nt, Homo sapiens
  misc_RNA (1)...(19): siRNA sense strand
gaauucauacgcaagaaaa

SEQ ID NO: 1994651 - RNA, 19 nt, Homo sapiens
  misc_RNA (1)...(19): siRNA sense strand
gaaaccuuacaaaugcauu

SEQ ID NO: 1994652 - RNA, 19 nt, Homo sapiens
  misc_RNA (1)...(19): siRNA sense strand
gaaauccuucaaccagcuu

SEQ ID NO: 1994653 - RNA, 19 nt, Homo sapiens
  misc_RNA (1)...(19): siRNA sense strand
aguagcuucucauuucuug

SEQ ID NO: 1994654 - RNA, 19 nt, Homo sapiens
  misc_RNA (1)...(19): siRNA sense strand
ggaaaggccuucauucaua

SEQ ID NO: 1994655 - RNA, 19 nt, Homo sapiens
  misc_RNA (1)...(19): siRNA sense strand
ggaauucacacaaauauga

SEQ ID NO: 1994656 - RNA, 19 nt, Homo sapiens
  misc_RNA (1)...(19): siRNA sense strand
gagaauaaaugguggaaag

SEQ ID NO: 1994657 - RNA, 19 nt, Homo sapiens
  misc_RNA (1)...(19): siRNA sense strand
gagagaagccuuaugaaug

SEQ ID NO: 1994658 - RNA, 19 nt, Homo sapiens
  misc_RNA (1)...(19): siRNA sense strand
gagagaaaccuuacaaaug

SEQ ID NO: 1994659 - RNA, 19 nt, Homo sapiens
  misc_RNA (1)...(19): siRNA sense strand
gaagggaauucacacaaau

SEQ ID NO: 1994660 - RNA, 19 nt, Homo sapiens
  misc_RNA (1)...(19): siRNA sense strand
gagagaagcccuaugaaug

SEQ ID NO: 1994661 - RNA, 19 nt, Homo sapiens
  misc_RNA (1)...(19): siRNA sense strand
gaaaggccuucauucauag

SEQ ID NO: 1994662 - RNA, 19 nt, Homo sapiens
  misc_RNA (1)...(19): siRNA sense strand
caacaucagaguauucaua

SEQ ID NO: 1994663 - RNA, 19 nt, Homo sapiens
  misc_RNA (1)...(19): siRNA sense strand
gcuauagacuucucucaug

SEQ ID NO: 1994664 - RNA, 19 nt, Homo sapiens
  misc_RNA (1)...(19): siRNA sense strand
gagagaaaccguaugaaug

SEQ ID NO: 1994665 - RNA, 19 nt, Homo sapiens
  misc_RNA (1)...(19): siRNA sense strand
gaagcaccuuucauucaaa

SEQ ID NO: 1994666 - RNA, 19 nt, Homo sapiens
  misc_RNA (1)...(19): siRNA sense strand
caucaaagaauucacagua

SEQ ID NO: 1994667 - RNA, 19 nt, Homo sapiens
  misc_RNA (1)...(19): siRNA sense strand
ggagagaaaccuuacaaau

SEQ ID NO: 1994668 - RNA, 19 nt, Homo sapiens
  misc_RNA (1)...(19): siRNA sense strand
gcucacaccuuacucaaca

SEQ ID NO: 1994669 - RNA, 19 nt, Homo sapiens
  misc_RNA (1)...(19): siRNA sense strand
agagaagccuuaugaaugu

SEQ ID NO: 1994670 - RNA, 19 nt, Homo sapiens
  misc_RNA (1)...(19): siRNA sense strand
ggagagaaaccguaugaau

SEQ ID NO: 1994671 - RNA, 19 nt, Homo sapiens
  misc_RNA (1)...(19): siRNA sense strand
ggagagaagccuuaugaau

SEQ ID NO: 1994672 - RNA, 19 nt, Homo sapiens
  misc_RNA (1)...(19): siRNA sense strand
gagaaaccguaugaaugua

SEQ ID NO: 1994673 - RNA, 19 nt, Homo sapiens
  misc_RNA (1)...(19): siRNA sense strand
agagaaaccuuacaaaugc

SEQ ID NO: 1994674 - RNA, 19 nt, Homo sapiens
  misc_RNA (1)...(19): siRNA sense strand
ucaaagaauucacaguaug

SEQ ID NO: 1994675 - RNA, 19 nt, Homo sapiens
  misc_RNA (1)...(19): siRNA sense strand
gcucaucacuuacuaacca

SEQ ID NO: 1994676 - RNA, 19 nt, Homo sapiens
  misc_RNA (1)...(19): siRNA sense strand
caaagaauucacaguauga

SEQ ID NO: 1994677 - RNA, 19 nt, Homo sapiens
  misc_RNA (1)...(19): siRNA sense strand
ggagagaagcccuaugaau

SEQ ID NO: 1994678 - RNA, 19 nt, Homo sapiens
  misc_RNA (1)...(19): siRNA sense strand
uuuaguagcuucucauuuc

SEQ ID NO: 1994679 - RNA, 19 nt, Homo sapiens
  misc_RNA (1)...(19): siRNA sense strand
gaaaccguaugaauguaug

SEQ ID NO: 1994680 - RNA, 19 nt, Homo sapiens
  misc_RNA (1)...(19): siRNA sense strand
guaacuaagccauauguga

SEQ ID NO: 1994681 - RNA, 19 nt, Homo sapiens
  misc_RNA (1)...(19): siRNA sense strand
gaauaaaugguggaaagaa

SEQ ID NO: 1994682 - RNA, 19 nt, Homo sapiens
  misc_RNA (1)...(19): siRNA sense strand
ggaauuaucaacaaagaag

SEQ ID NO: 1994683 - RNA, 19 nt, Homo sapiens
  misc_RNA (1)...(19): siRNA sense strand
agaagcaccuuucauucaa

SEQ ID NO: 1994684 - RNA, 19 nt, Homo sapiens
  misc_RNA (1)...(19): siRNA sense strand
cagcaucuaagaauucaua

SEQ ID NO: 1994685 - RNA, 19 nt, Homo sapiens
  misc_RNA (1)...(19): siRNA sense strand
gagaaugugggaaagcuuu

SEQ ID NO: 1994686 - RNA, 19 nt, Homo sapiens
  misc_RNA (1)...(19): siRNA sense strand
gagaagccuuaugaaugua

SEQ ID NO: 1994687 - RNA, 19 nt, Homo sapiens
  misc_RNA (1)...(19): siRNA sense strand
caggugacauuuagugaug

SEQ ID NO: 1994688 - RNA, 19 nt, Homo sapiens
  misc_RNA (1)...(19): siRNA sense strand
ugcuguagcucacaccuua

SEQ ID NO: 1994689 - RNA, 19 nt, Homo sapiens
  misc_RNA (1)...(19): siRNA sense strand
uaacuaagccauaugugau

SEQ ID NO: 1994690 - RNA, 19 nt, Homo sapiens
  misc_RNA (1)...(19): siRNA sense strand
cuauagacuucucucauga

SEQ ID NO: 1994691 - RNA, 19 nt, Homo sapiens
  misc_RNA (1)...(19): siRNA sense strand
cgacaucagauaagccaua

SEQ ID NO: 1994692 - RNA, 19 nt, Homo sapiens
  misc_RNA (1)...(19): siRNA sense strand
gagagaaaaucuauacaug

SEQ ID NO: 1994693 - RNA, 19 nt, Homo sapiens
  misc_RNA (1)...(19): siRNA sense strand
caggagagaagcccuauga

SEQ ID NO: 1994694 - RNA, 19 nt, Homo sapiens
  misc_RNA (1)...(19): siRNA sense strand
cuaugaaugucgugaaugu

SEQ ID NO: 1994695 - RNA, 19 nt, Homo sapiens
  misc_RNA (1)...(19): siRNA sense strand
gagugggcaugccuagauu

SEQ ID NO: 1994696 - RNA, 19 nt, Homo sapiens
  misc_RNA (1)...(19): siRNA sense strand
uuagugauguggcuauaga

SEQ ID NO: 1994697 - RNA, 19 nt, Homo sapiens
  misc_RNA (1)...(19): siRNA sense strand
agagaaaccguaugaaugu

SEQ ID NO: 1994698 - RNA, 19 nt, Homo sapiens
  misc_RNA (1)...(19): siRNA sense strand
gaugugaugguccagaauu

SEQ ID NO: 1994699 - RNA, 19 nt, Homo sapiens
  misc_RNA (1)...(19): siRNA sense strand
caacaucaaagaauucaca

SEQ ID NO: 1994700 - RNA, 19 nt, Homo sapiens
  misc_RNA (1)...(19): siRNA sense strand
ugauguggcuauagacuuc

SEQ ID NO: 1994701 - RNA, 19 nt, Homo sapiens
  misc_RNA (1)...(19): siRNA sense strand
gagaaaaucuauacaugca

SEQ ID NO: 1994702 - RNA, 19 nt, Homo sapiens
  misc_RNA (1)...(19): siRNA sense strand
gaaaagagcccuggaugau

SEQ ID NO: 1994703 - RNA, 19 nt, Homo sapiens
  misc_RNA (1)...(19): siRNA sense strand
uagaagcaccuuucauuca

SEQ ID NO: 1994704 - RNA, 19 nt, Homo sapiens
  misc_RNA (1)...(19): siRNA sense strand
guaggucuuuccguaacua

SEQ ID NO: 1994705 - RNA, 19 nt, Homo sapiens
  misc_RNA (1)...(19): siRNA sense strand
gagaagcccuaugaauguc

SEQ ID NO: 1994706 - RNA, 19 nt, Homo sapiens
  misc_RNA (1)...(19): siRNA sense strand
agagaagcccuaugaaugu

SEQ ID NO: 1994707 - RNA, 19 nt, Homo sapiens
  misc_RNA (1)...(19): siRNA sense strand
gagaaaccuuacaaaugca

SEQ ID NO: 1994708 - RNA, 19 nt, Homo sapiens
  misc_RNA (1)...(19): siRNA sense strand
agccaugguucaucccuua

SEQ ID NO: 1994709 - RNA, 19 nt, Homo sapiens
  misc_RNA (1)...(19): siRNA sense strand
gaauguaugaacuguggaa

SEQ ID NO: 1994710 - RNA, 19 nt, Homo sapiens
  misc_RNA (1)...(19): siRNA sense strand
guggaaaggccuucauuca

SEQ ID NO: 1994711 - RNA, 19 nt, Homo sapiens
  misc_RNA (1)...(19): siRNA sense strand
uguaugaacuguggaaagu

SEQ ID NO: 1994712 - RNA, 19 nt, Homo sapiens
  misc_RNA (1)...(19): siRNA sense strand
gugaaugugggaagacuuu

SEQ ID NO: 1994713 - RNA, 19 nt, Homo sapiens
  misc_RNA (1)...(19): siRNA sense strand
gaagccuuaugaauguaga

SEQ ID NO: 1994714 - RNA, 19 nt, Homo sapiens
  misc_RNA (1)...(19): siRNA sense strand
caucagauaagccauagug

SEQ ID NO: 1994715 - RNA, 19 nt, Homo sapiens
  misc_RNA (1)...(19): siRNA sense strand
agccauaugugaucauguu

SEQ ID NO: 1994716 - RNA, 19 nt, Homo sapiens
  misc_RNA (1)...(19): siRNA sense strand
uaagaauucauacgcaaga

SEQ ID NO: 1994717 - RNA, 19 nt, Homo sapiens
  misc_RNA (1)...(19): siRNA sense strand
uuuagaagcaccuuucauu

SEQ ID NO: 1994718 - RNA, 19 nt, Homo sapiens
  misc_RNA (1)...(19): siRNA sense strand
cauaguucgucucucauuc

SEQ ID NO: 1994719 - RNA, 19 nt, Homo sapiens
  misc_RNA (1)...(19): siRNA sense strand
auucauaguucgucucuca

SEQ ID NO: 1994720 - RNA, 19 nt, Homo sapiens
  misc_RNA (1)...(19): siRNA sense strand
ggaaaacaaggaauuauca

SEQ ID NO: 1994721 - RNA, 19 nt, Homo sapiens
  misc_RNA (1)...(19): siRNA sense strand
cuaugagugucguauaugu

SEQ ID NO: 1994722 - RNA, 19 nt, Homo sapiens
  misc_RNA (1)...(19): siRNA sense strand
gacaucagauaagccauag

SEQ ID NO: 1994723 - RNA, 19 nt, Homo sapiens
  misc_RNA (1)...(19): siRNA sense strand
ggaaaagagcccuggauga

SEQ ID NO: 1994724 - RNA, 19 nt, Homo sapiens
  misc_RNA (1)...(19): siRNA sense strand
gaaugugggaaggccuuua

SEQ ID NO: 1994725 - RNA, 19 nt, Homo sapiens
  misc_RNA (1)...(19): siRNA sense strand
gcucagagggacuuauaca

SEQ ID NO: 1994726 - RNA, 19 nt, Homo sapiens
  misc_RNA (1)...(19): siRNA sense strand
ggacuuauacaaggaugug

SEQ ID NO: 1994727 - RNA, 19 nt, Homo sapiens
  misc_RNA (1)...(19): siRNA sense strand
guaugaauguaugaacugu

SEQ ID NO: 1994728 - RNA, 19 nt, Homo sapiens
  misc_RNA (1)...(19): siRNA sense strand
ccuuacaaaugcauugaau

SEQ ID NO: 1994729 - RNA, 19 nt, Homo sapiens
  misc_RNA (1)...(19): siRNA sense strand
ccuuaugaauguagagaau

SEQ ID NO: 1994730 - RNA, 19 nt, Homo sapiens
  misc_RNA (1)...(19): siRNA sense strand
gugugucccuucucauuca

SEQ ID NO: 1994731 - RNA, 19 nt, Homo sapiens
  misc_RNA (1)...(19): siRNA sense strand
uaugaacuguggaaagucu

SEQ ID NO: 1994732 - RNA, 19 nt, Homo sapiens
  misc_RNA (1)...(19): siRNA sense strand
gcacucacacgggagagaa

SEQ ID NO: 1994733 - RNA, 19 nt, Homo sapiens
  misc_RNA (1)...(19): siRNA sense strand
cuggagagaagccuuauga

SEQ ID NO: 1994734 - RNA, 19 nt, Homo sapiens
  misc_RNA (1)...(19): siRNA sense strand
ucagagggacuuauacaag

SEQ ID NO: 1994735 - RNA, 19 nt, Homo sapiens
  misc_RNA (1)...(19): siRNA sense strand
uaagccauaugugaucaug

SEQ ID NO: 1994736 - RNA, 19 nt, Homo sapiens
  misc_RNA (1)...(19): siRNA sense strand
acaccuuacucaacaucaa

SEQ ID NO: 1994737 - RNA, 19 nt, Homo sapiens
  misc_RNA (1)...(19): siRNA sense strand
gaaugugggaagacuuuua

SEQ ID NO: 1994738 - RNA, 19 nt, Homo sapiens
  misc_RNA (1)...(19): siRNA sense strand
aaagugagagaauaaaugg

SEQ ID NO: 1994739 - RNA, 19 nt, Homo sapiens
  misc_RNA (1)...(19): siRNA sense strand
gaaucaagaugggaaaaca

SEQ ID NO: 1994740 - RNA, 19 nt, Homo sapiens
  misc_RNA (1)...(19): siRNA sense strand
cgcuaugagugucguauau

SEQ ID NO: 1994741 - RNA, 19 nt, Homo sapiens
  misc_RNA (1)...(19): siRNA sense strand
agagggacuuauacaagga

SEQ ID NO: 1994742 - RNA, 19 nt, Homo sapiens
  misc_RNA (1)...(19): siRNA sense strand
cgggagagaaaccguauga

SEQ ID NO: 1994743 - RNA, 19 nt, Homo sapiens
  misc_RNA (1)...(19): siRNA sense strand
aagggaauucacacaaaua

SEQ ID NO: 1994744 - RNA, 19 nt, Homo sapiens
  misc_RNA (1)...(19): siRNA sense strand
cauggcucaucacuuacua

SEQ ID NO: 1994745 - RNA, 19 nt, Homo sapiens
  misc_RNA (1)...(19): siRNA sense strand
augugaugguccagaauua

SEQ ID NO: 1994746 - RNA, 19 nt, Homo sapiens
  misc_RNA (1)...(19): siRNA sense strand
gguccagaauuaugagaac

SEQ ID NO: 1994747 - RNA, 19 nt, Homo sapiens
  misc_RNA (1)...(19): siRNA sense strand
agucgccacuggagaauuc

SEQ ID NO: 1994748 - RNA, 19 nt, Homo sapiens
  misc_RNA (1)...(19): siRNA sense strand
caaggaauuaucaacaaag

SEQ ID NO: 1994749 - RNA, 19 nt, Homo sapiens
  misc_RNA (1)...(19): siRNA sense strand
gaauucauacgcaagaaaa

SEQ ID NO: 1994750 - RNA, 19 nt, Homo sapiens
  misc_RNA (1)...(19): siRNA sense strand
gacuuguaauagagagaaa

SEQ ID NO: 1994751 - RNA, 19 nt, Homo sapiens
  misc_RNA (1)...(19): siRNA sense strand
aguagcuucucauuucuug

SEQ ID NO: 1994752 - RNA, 19 nt, Homo sapiens
  misc_RNA (1)...(19): siRNA sense strand
gaaaccuuacaaaugcauu

SEQ ID NO: 1994753 - RNA, 19 nt, Homo sapiens
  misc_RNA (1)...(19): siRNA sense strand
gugaugguccagaauuaug

SEQ ID NO: 1994754 - RNA, 19 nt, Homo sapiens
  misc_RNA (1)...(19): siRNA sense strand
ugagaaagaucaugaauug

SEQ ID NO: 1994755 - RNA, 19 nt, Homo sapiens
  misc_RNA (1)...(19): siRNA sense strand
gcaaagcauccuacuauua

SEQ ID NO: 1994756 - RNA, 19 nt, Homo sapiens
  misc_RNA (1)...(19): siRNA sense strand
gaacguagguacauagaag

SEQ ID NO: 1994757 - RNA, 19 nt, Homo sapiens
  misc_RNA (1)...(19): siRNA sense strand
ggaauggucugguacaugu

SEQ ID NO: 1994758 - RNA, 19 nt, Homo sapiens
  misc_RNA (1)...(19): siRNA sense strand
gaaauuagcaagguuggua

SEQ ID NO: 1994759 - RNA, 19 nt, Homo sapiens
  misc_RNA (1)...(19): siRNA sense strand
gauccacgguuccuucuuu

SEQ ID NO: 1994760 - RNA, 19 nt, Homo sapiens
  misc_RNA (1)...(19): siRNA sense strand
ggaccgaguugauuauuca

SEQ ID NO: 1994761 - RNA, 19 nt, Homo sapiens
  misc_RNA (1)...(19): siRNA sense strand
gaagaaagcauuggagaga

SEQ ID NO: 1994762 - RNA, 19 nt, Homo sapiens
  misc_RNA (1)...(19): siRNA sense strand
ggagagagugcaaaucuuu

SEQ ID NO: 1994763 - RNA, 19 nt, Homo sapiens
  misc_RNA (1)...(19): siRNA sense strand
ggaaugguuuguccuauca

SEQ ID NO: 1994764 - RNA, 19 nt, Homo sapiens
  misc_RNA (1)...(19): siRNA sense strand
gaaagaggaauuuguacaa

SEQ ID NO: 1994765 - RNA, 19 nt, Homo sapiens
  misc_RNA (1)...(19): siRNA sense strand
guacauagaagaaagcauu

SEQ ID NO: 1994766 - RNA, 19 nt, Homo sapiens
  misc_RNA (1)...(19): siRNA sense strand
ggaagucuuuggauuugaa

SEQ ID NO: 1994767 - RNA, 19 nt, Homo sapiens
  misc_RNA (1)...(19): siRNA sense strand
gaggaagucuuuggauuug

SEQ ID NO: 1994768 - RNA, 19 nt, Homo sapiens
  misc_RNA (1)...(19): siRNA sense strand
gcaagcagauucuuucaac

SEQ ID NO: 1994769 - RNA, 19 nt, Homo sapiens
  misc_RNA (1)...(19): siRNA sense strand
guacaagacucacauagcu

SEQ ID NO: 1994770 - RNA, 19 nt, Homo sapiens
  misc_RNA (1)...(19): siRNA sense strand
gccagucuaugcaauaauu

SEQ ID NO: 1994771 - RNA, 19 nt, Homo sapiens
  misc_RNA (1)...(19): siRNA sense strand
aagaugaacucgaugaaga

SEQ ID NO: 1994772 - RNA, 19 nt, Homo sapiens
  misc_RNA (1)...(19): siRNA sense strand
gcaaggucaucaaggagaa

SEQ ID NO: 1994773 - RNA, 19 nt, Homo sapiens
  misc_RNA (1)...(19): siRNA sense strand
ggagcugccauacuucuua

SEQ ID NO: 1994774 - RNA, 19 nt, Homo sapiens
  misc_RNA (1)...(19): siRNA sense strand
cuucuuaccucuacccuaa

SEQ ID NO: 1994775 - RNA, 19 nt, Homo sapiens
  misc_RNA (1)...(19): siRNA sense strand
gaaaagaggggcuaaagaa

SEQ ID NO: 1994776 - RNA, 19 nt, Homo sapiens
  misc_RNA (1)...(19): siRNA sense strand
gcagugggauucaguggau

SEQ ID NO: 1994777 - RNA, 19 nt, Homo sapiens
  misc_RNA (1)...(19): siRNA sense strand
gaagcaagcagauucuuuc

SEQ ID NO: 1994778 - RNA, 19 nt, Homo sapiens
  misc_RNA (1)...(19): siRNA sense strand
ggagaaagccaaauucaac

SEQ ID NO: 1994779 - RNA, 19 nt, Homo sapiens
  misc_RNA (1)...(19): siRNA sense strand
ugaagaacguagguacaua

SEQ ID NO: 1994780 - RNA, 19 nt, Homo sapiens
  misc_RNA (1)...(19): siRNA sense strand
gaaguacaagacucacaua

SEQ ID NO: 1994781 - RNA, 19 nt, Homo sapiens
  misc_RNA (1)...(19): siRNA sense strand
ugucaucuuugucagaaua

SEQ ID NO: 1994782 - RNA, 19 nt, Homo sapiens
  misc_RNA (1)...(19): siRNA sense strand
ggaggaaacaagugaagaa

SEQ ID NO: 1994783 - RNA, 19 nt, Homo sapiens
  misc_RNA (1)...(19): siRNA sense strand
uggcuggucuucaguguuu

SEQ ID NO: 1994784 - RNA, 19 nt, Homo sapiens
  misc_RNA (1)...(19): siRNA sense strand
caacuacgacagugagaaa

SEQ ID NO: 1994785 - RNA, 19 nt, Homo sapiens
  misc_RNA (1)...(19): siRNA sense strand
gucguuggcuauucucaua

SEQ ID NO: 1994786 - RNA, 19 nt, Homo sapiens
  misc_RNA (1)...(19): siRNA sense strand
ugaacucgaugaagaaaca

SEQ ID NO: 1994787 - RNA, 19 nt, Homo sapiens
  misc_RNA (1)...(19): siRNA sense strand
caaagcauccuacuauuac

SEQ ID NO: 1994788 - RNA, 19 nt, Homo sapiens
  misc_RNA (1)...(19): siRNA sense strand
ugaggaagucuuuggauuu

SEQ ID NO: 1994789 - RNA, 19 nt, Homo sapiens
  misc_RNA (1)...(19): siRNA sense strand
gaagaacguagguacauag

SEQ ID NO: 1994790 - RNA, 19 nt, Homo sapiens
  misc_RNA (1)...(19): siRNA sense strand
uuucggagcugccauacuu

SEQ ID NO: 1994791 - RNA, 19 nt, Homo sapiens
  misc_RNA (1)...(19): siRNA sense strand
gcuccaagauaugccagua

SEQ ID NO: 1994792 - RNA, 19 nt, Homo sapiens
  misc_RNA (1)...(19): siRNA sense strand
gauuugcuauaucugguuu

SEQ ID NO: 1994793 - RNA, 19 nt, Homo sapiens
  misc_RNA (1)...(19): siRNA sense strand
ucaaggagaaagccaaauu

SEQ ID NO: 1994794 - RNA, 19 nt, Homo sapiens
  misc_RNA (1)...(19): siRNA sense strand
gcaaugacaaagaauaagu

SEQ ID NO: 1994795 - RNA, 19 nt, Homo sapiens
  misc_RNA (1)...(19): siRNA sense strand
guagguacauagaagaaag

SEQ ID NO: 1994796 - RNA, 19 nt, Homo sapiens
  misc_RNA (1)...(19): siRNA sense strand
caugggauauggagcaaau

SEQ ID NO: 1994797 - RNA, 19 nt, Homo sapiens
  misc_RNA (1)...(19): siRNA sense strand
aagaauaagucacgugaag

SEQ ID NO: 1994798 - RNA, 19 nt, Homo sapiens
  misc_RNA (1)...(19): siRNA sense strand
gugcaaugacaaagaauaa

SEQ ID NO: 1994799 - RNA, 19 nt, Homo sapiens
  misc_RNA (1)...(19): siRNA sense strand
acagggugcuggagaagaa

SEQ ID NO: 1994800 - RNA, 19 nt, Homo sapiens
  misc_RNA (1)...(19): siRNA sense strand
gccuuuagcuggcauucuu

SEQ ID NO: 1994801 - RNA, 19 nt, Homo sapiens
  misc_RNA (1)...(19): siRNA sense strand
cagagugcauuauggaugu

SEQ ID NO: 1994802 - RNA, 19 nt, Homo sapiens
  misc_RNA (1)...(19): siRNA sense strand
auaaggaccgaguugauua

SEQ ID NO: 1994803 - RNA, 19 nt, Homo sapiens
  misc_RNA (1)...(19): siRNA sense strand
agaaagaucaugaauugug

SEQ ID NO: 1994804 - RNA, 19 nt, Homo sapiens
  misc_RNA (1)...(19): siRNA sense strand
gugccacacuuaguaauga

SEQ ID NO: 1994805 - RNA, 19 nt, Homo sapiens
  misc_RNA (1)...(19): siRNA sense strand
uuagucagccagcauauuu

SEQ ID NO: 1994806 - RNA, 19 nt, Homo sapiens
  misc_RNA (1)...(19): siRNA sense strand
uuacauccaugccagucua

SEQ ID NO: 1994807 - RNA, 19 nt, Homo sapiens
  misc_RNA (1)...(19): siRNA sense strand
gcuuuggaauggucuggua

SEQ ID NO: 1994808 - RNA, 19 nt, Homo sapiens
  misc_RNA (1)...(19): siRNA sense strand
gaauaagucacgugaagag

SEQ ID NO: 1994809 - RNA, 19 nt, Homo sapiens
  misc_RNA (1)...(19): siRNA sense strand
gaagaaacaggggacauua

SEQ ID NO: 1994810 - RNA, 19 nt, Homo sapiens
  misc_RNA (1)...(19): siRNA sense strand
gaaaaucacucggccagau

SEQ ID NO: 1994811 - RNA, 19 nt, Homo sapiens
  misc_RNA (1)...(19): siRNA sense strand
cugcaaagcauccuacuau

SEQ ID NO: 1994812 - RNA, 19 nt, Homo sapiens
  misc_RNA (1)...(19): siRNA sense strand
agaggaauuuguacaagga

SEQ ID NO: 1994813 - RNA, 19 nt, Homo sapiens
  misc_RNA (1)...(19): siRNA sense strand
ugaaaguccugcaaagcau

SEQ ID NO: 1994814 - RNA, 19 nt, Homo sapiens
  misc_RNA (1)...(19): siRNA sense strand
gaggaaacaagugaagaaa

SEQ ID NO: 1994815 - RNA, 19 nt, Homo sapiens
  misc_RNA (1)...(19): siRNA sense strand
ccugaucgcugcccuaguc

SEQ ID NO: 1994816 - RNA, 19 nt, Homo sapiens
  misc_RNA (1)...(19): siRNA sense strand
aagcagauucuuucaacua

SEQ ID NO: 1994817 - RNA, 19 nt, Homo sapiens
  misc_RNA (1)...(19): siRNA sense strand
ggccugggcuucugcaucu

SEQ ID NO: 1994818 - RNA, 19 nt, Homo sapiens
  misc_RNA (1)...(19): siRNA sense strand
cuaagaagcaagcagauuc

SEQ ID NO: 1994819 - RNA, 19 nt, Homo sapiens
  misc_RNA (1)...(19): siRNA sense strand
guggauuuauucaugaaga

SEQ ID NO: 1994820 - RNA, 19 nt, Homo sapiens
  misc_RNA (1)...(19): siRNA sense strand
ggugcaaugacaaagaaua

SEQ ID NO: 1994821 - RNA, 19 nt, Homo sapiens
  misc_RNA (1)...(19): siRNA sense strand
gugagaaagaucaugaauu

SEQ ID NO: 1994822 - RNA, 19 nt, Homo sapiens
  misc_RNA (1)...(19): siRNA sense strand
gaagaugaacucgaugaag

SEQ ID NO: 1994823 - RNA, 19 nt, Homo sapiens
  misc_RNA (1)...(19): siRNA sense strand
cagcagccagagugcauua

SEQ ID NO: 1994824 - RNA, 19 nt, Homo sapiens
  misc_RNA (1)...(19): siRNA sense strand
ggaauuuguacaaggagaa

SEQ ID NO: 1994825 - RNA, 19 nt, Homo sapiens
  misc_RNA (1)...(19): siRNA sense strand
ggguagcaaucucauucuu

SEQ ID NO: 1994826 - RNA, 19 nt, Homo sapiens
  misc_RNA (1)...(19): siRNA sense strand
aagaggggcuaaagaauuu

SEQ ID NO: 1994827 - RNA, 19 nt, Homo sapiens
  misc_RNA (1)...(19): siRNA sense strand
uacauuaucgccaucauga

SEQ ID NO: 1994828 - RNA, 19 nt, Homo sapiens
  misc_RNA (1)...(19): siRNA sense strand
uauaaggaccgaguugauu

SEQ ID NO: 1994829 - RNA, 19 nt, Homo sapiens
  misc_RNA (1)...(19): siRNA sense strand
aauguuaaccacuuggaua

SEQ ID NO: 1994830 - RNA, 19 nt, Homo sapiens
  misc_RNA (1)...(19): siRNA sense strand
ugcuauaucugguuucaau

SEQ ID NO: 1994831 - RNA, 19 nt, Homo sapiens
  misc_RNA (1)...(19): siRNA sense strand
cagauucuuucaacuacga

SEQ ID NO: 1994832 - RNA, 19 nt, Homo sapiens
  misc_RNA (1)...(19): siRNA sense strand
caaggagaaagccaaauuc

SEQ ID NO: 1994833 - RNA, 19 nt, Homo sapiens
  misc_RNA (1)...(19): siRNA sense strand
cuacggaagcuuuggaaug

SEQ ID NO: 1994834 - RNA, 19 nt, Homo sapiens
  misc_RNA (1)...(19): siRNA sense strand
aaagaggaauuuguacaag

SEQ ID NO: 1994835 - RNA, 19 nt, Homo sapiens
  misc_RNA (1)...(19): siRNA sense strand
ggcaguaugucuuccugau

SEQ ID NO: 1994836 - RNA, 19 nt, Homo sapiens
  misc_RNA (1)...(19): siRNA sense strand
gugaagaguggcaguaugu

SEQ ID NO: 1994837 - RNA, 19 nt, Homo sapiens
  misc_RNA (1)...(19): siRNA sense strand
uugaggaagucuuuggauu

SEQ ID NO: 1994838 - RNA, 19 nt, Homo sapiens
  misc_RNA (1)...(19): siRNA sense strand
agaaagcauuggagagagu

SEQ ID NO: 1994839 - RNA, 19 nt, Homo sapiens
  misc_RNA (1)...(19): siRNA sense strand
ggaaaagaaagaggaauuu

SEQ ID NO: 1994840 - RNA, 19 nt, Homo sapiens
  misc_RNA (1)...(19): siRNA sense strand
ggagguuggccuagugguu

SEQ ID NO: 1994841 - RNA, 19 nt, Homo sapiens
  misc_RNA (1)...(19): siRNA sense strand
gaagaguggcaguaugucu

SEQ ID NO: 1994842 - RNA, 19 nt, Homo sapiens
  misc_RNA (1)...(19): siRNA sense strand
guuggcacauugucaggaa

SEQ ID NO: 1994843 - RNA, 19 nt, Homo sapiens
  misc_RNA (1)...(19): siRNA sense strand
gguagcaaucucauucuug

SEQ ID NO: 1994844 - RNA, 19 nt, Homo sapiens
  misc_RNA (1)...(19): siRNA sense strand
gagcugccauacuucuuac

SEQ ID NO: 1994845 - RNA, 19 nt, Homo sapiens
  misc_RNA (1)...(19): siRNA sense strand
gaugaacucgaugaagaaa

SEQ ID NO: 1994846 - RNA, 19 nt, Homo sapiens
  misc_RNA (1)...(19): siRNA sense strand
ugcaaagcauccuacuauu

SEQ ID NO: 1994847 - RNA, 19 nt, Homo sapiens
  misc_RNA (1)...(19): siRNA sense strand
uacggaagcuuuggaaugg

SEQ ID NO: 1994848 - RNA, 19 nt, Homo sapiens
  misc_RNA (1)...(19): siRNA sense strand
ggugugaccuacccagcau

SEQ ID NO: 1994849 - RNA, 19 nt, Homo sapiens
  misc_RNA (1)...(19): siRNA sense strand
ggauucaguggauuugcua

SEQ ID NO: 1994850 - RNA, 19 nt, Homo sapiens
  misc_RNA (1)...(19): siRNA sense strand
gcaaccaccuccuuuugug

SEQ ID NO: 1994851 - RNA, 19 nt, Homo sapiens
  misc_RNA (1)...(19): siRNA sense strand
ggucuucaguguuuuaugu

SEQ ID NO: 1994852 - RNA, 19 nt, Homo sapiens
  misc_RNA (1)...(19): siRNA sense strand
gaaaagaaagaggaauuug

SEQ ID NO: 1994853 - RNA, 19 nt, Homo sapiens
  misc_RNA (1)...(19): siRNA sense strand
gcuauaaggaccgaguuga

SEQ ID NO: 1994854 - RNA, 19 nt, Homo sapiens
  misc_RNA (1)...(19): siRNA sense strand
caaaggaaaugccacuaaa

SEQ ID NO: 1994855 - RNA, 19 nt, Homo sapiens
  misc_RNA (1)...(19): siRNA sense strand
caaaguggaugaacaugaa

SEQ ID NO: 1994856 - RNA, 19 nt, Homo sapiens
  misc_RNA (1)...(19): siRNA sense strand
gaaaugccacuaaagaauu

SEQ ID NO: 1994857 - RNA, 19 nt, Homo sapiens
  misc_RNA (1)...(19): siRNA sense strand
guacauagcucucauuucc

SEQ ID NO: 1994858 - RNA, 19 nt, Homo sapiens
  misc_RNA (1)...(19): siRNA sense strand
gggaauagaacaauugaaa

SEQ ID NO: 1994859 - RNA, 19 nt, Homo sapiens
  misc_RNA (1)...(19): siRNA sense strand
ggaaaugccacuaaagaau

SEQ ID NO: 1994860 - RNA, 19 nt, Homo sapiens
  misc_RNA (1)...(19): siRNA sense strand
ggccugcucuuccucauuu

SEQ ID NO: 1994861 - RNA, 19 nt, Homo sapiens
  misc_RNA (1)...(19): siRNA sense strand
gaagauggaccaccacugu

SEQ ID NO: 1994862 - RNA, 19 nt, Homo sapiens
  misc_RNA (1)...(19): siRNA sense strand
ccacagugauucuccuuau

SEQ ID NO: 1994863 - RNA, 19 nt, Homo sapiens
  misc_RNA (1)...(19): siRNA sense strand
ggacugaacagggaagaaa

SEQ ID NO: 1994864 - RNA, 19 nt, Homo sapiens
  misc_RNA (1)...(19): siRNA sense strand
caucgagaguuuacaguug

SEQ ID NO: 1994865 - RNA, 19 nt, Homo sapiens
  misc_RNA (1)...(19): siRNA sense strand
ggauuccacuuccugcauu

SEQ ID NO: 1994866 - RNA, 19 nt, Homo sapiens
  misc_RNA (1)...(19): siRNA sense strand
ccaaaggaaaugccacuaa

SEQ ID NO: 1994867 - RNA, 19 nt, Homo sapiens
  misc_RNA (1)...(19): siRNA sense strand
gcgagaacaaccagaagua

SEQ ID NO: 1994868 - RNA, 19 nt, Homo sapiens
  misc_RNA (1)...(19): siRNA sense strand
gagagaagaugggcuaaaa

SEQ ID NO: 1994869 - RNA, 19 nt, Homo sapiens
  misc_RNA (1)...(19): siRNA sense strand
aagaauucaucgagaguuu

SEQ ID NO: 1994870 - RNA, 19 nt, Homo sapiens
  misc_RNA (1)...(19): siRNA sense strand
gcacagaugagacgggaau

SEQ ID NO: 1994871 - RNA, 19 nt, Homo sapiens
  misc_RNA (1)...(19): siRNA sense strand
gagacuacguguauagcau

SEQ ID NO: 1994872 - RNA, 19 nt, Homo sapiens
  misc_RNA (1)...(19): siRNA sense strand
gaagaagauuggacaaccu

SEQ ID NO: 1994873 - RNA, 19 nt, Homo sapiens
  misc_RNA (1)...(19): siRNA sense strand
ggaguucgugguccucuuu

SEQ ID NO: 1994874 - RNA, 19 nt, Homo sapiens
  misc_RNA (1)...(19): siRNA sense strand
gcauugcuuugaagaagau

SEQ ID NO: 1994875 - RNA, 19 nt, Homo sapiens
  misc_RNA (1)...(19): siRNA sense strand
agacgggaauagaacaauu

SEQ ID NO: 1994876 - RNA, 19 nt, Homo sapiens
  misc_RNA (1)...(19): siRNA sense strand
gaagauuggacaaccuaug

SEQ ID NO: 1994877 - RNA, 19 nt, Homo sapiens
  misc_RNA (1)...(19): siRNA sense strand
ggacccaggugcacuccau

SEQ ID NO: 1994878 - RNA, 19 nt, Homo sapiens
  misc_RNA (1)...(19): siRNA sense strand
acauagcucucauuuccuu

SEQ ID NO: 1994879 - RNA, 19 nt, Homo sapiens
  misc_RNA (1)...(19): siRNA sense strand
gaaauggcagagacuggaa

SEQ ID NO: 1994880 - RNA, 19 nt, Homo sapiens
  misc_RNA (1)...(19): siRNA sense strand
aaacaaaguggaugaacau

SEQ ID NO: 1994881 - RNA, 19 nt, Homo sapiens
  misc_RNA (1)...(19): siRNA sense strand
aggcagacccguaccagua

SEQ ID NO: 1994882 - RNA, 19 nt, Homo sapiens
  misc_RNA (1)...(19): siRNA sense strand
gaauaccuccagccagaga

SEQ ID NO: 1994883 - RNA, 19 nt, Homo sapiens
  misc_RNA (1)...(19): siRNA sense strand
aaaugccacuaaagaauuc

SEQ ID NO: 1994884 - RNA, 19 nt, Homo sapiens
  misc_RNA (1)...(19): siRNA sense strand
ucaacggaauuguguucaa

SEQ ID NO: 1994885 - RNA, 19 nt, Homo sapiens
  misc_RNA (1)...(19): siRNA sense strand
gcagacccguaccaguaug

SEQ ID NO: 1994886 - RNA, 19 nt, Homo sapiens
  misc_RNA (1)...(19): siRNA sense strand
agacuggaaucucucuuca

SEQ ID NO: 1994887 - RNA, 19 nt, Homo sapiens
  misc_RNA (1)...(19): siRNA sense strand
caacggaauuguguucaac

SEQ ID NO: 1994888 - RNA, 19 nt, Homo sapiens
  misc_RNA (1)...(19): siRNA sense strand
aaggaaaugccacuaaaga

SEQ ID NO: 1994889 - RNA, 19 nt, Homo sapiens
  misc_RNA (1)...(19): siRNA sense strand
gauuccaucucgagacuac

SEQ ID NO: 1994890 - RNA, 19 nt, Homo sapiens
  misc_RNA (1)...(19): siRNA sense strand
acaaaguggaugaacauga

SEQ ID NO: 1994891 - RNA, 19 nt, Homo sapiens
  misc_RNA (1)...(19): siRNA sense strand
ggcaggugguguacaagug

SEQ ID NO: 1994892 - RNA, 19 nt, Homo sapiens
  misc_RNA (1)...(19): siRNA sense strand
gacaaccuauggacugaac

SEQ ID NO: 1994893 - RNA, 19 nt, Homo sapiens
  misc_RNA (1)...(19): siRNA sense strand
gacgggaauagaacaauug

SEQ ID NO: 1994894 - RNA, 19 nt, Homo sapiens
  misc_RNA (1)...(19): siRNA sense strand
cagaugagacgggaauaga

SEQ ID NO: 1994895 - RNA, 19 nt, Homo sapiens
  misc_RNA (1)...(19): siRNA sense strand
ucucgagacuacguguaua

SEQ ID NO: 1994896 - RNA, 19 nt, Homo sapiens
  misc_RNA (1)...(19): siRNA sense strand
gauuccacuuccugcauug

SEQ ID NO: 1994897 - RNA, 19 nt, Homo sapiens
  misc_RNA (1)...(19): siRNA sense strand
agaacaaccagaaguacuu

SEQ ID NO: 1994898 - RNA, 19 nt, Homo sapiens
  misc_RNA (1)...(19): siRNA sense strand
caucaucaacggaauugug

SEQ ID NO: 1994899 - RNA, 19 nt, Homo sapiens
  misc_RNA (1)...(19): siRNA sense strand
cuacguguauagcaucauc

SEQ ID NO: 1994900 - RNA, 19 nt, Homo sapiens
  misc_RNA (1)...(19): siRNA sense strand
gaauucaucgagaguuuac

SEQ ID NO: 1994901 - RNA, 19 nt, Homo sapiens
  misc_RNA (1)...(19): siRNA sense strand
caucgccugugccaucguu

SEQ ID NO: 1994902 - RNA, 19 nt, Homo sapiens
  misc_RNA (1)...(19): siRNA sense strand
caucaacggaauuguguuc

SEQ ID NO: 1994903 - RNA, 19 nt, Homo sapiens
  misc_RNA (1)...(19): siRNA sense strand
caauguacauagcucucau

SEQ ID NO: 1994904 - RNA, 19 nt, Homo sapiens
  misc_RNA (1)...(19): siRNA sense strand
gagaacaaccagaaguacu

SEQ ID NO: 1994905 - RNA, 19 nt, Homo sapiens
  misc_RNA (1)...(19): siRNA sense strand
uaaagaauucaucgagagu

SEQ ID NO: 1994906 - RNA, 19 nt, Homo sapiens
  misc_RNA (1)...(19): siRNA sense strand
agaauucaucgagaguuua

SEQ ID NO: 1994907 - RNA, 19 nt, Homo sapiens
  misc_RNA (1)...(19): siRNA sense strand
gaugagacgggaauagaac

SEQ ID NO: 1994908 - RNA, 19 nt, Homo sapiens
  misc_RNA (1)...(19): siRNA sense strand
ccacuuccugcauugcuuu

SEQ ID NO: 1994909 - RNA, 19 nt, Homo sapiens
  misc_RNA (1)...(19): siRNA sense strand
ucaaccugcuggccuucuu

SEQ ID NO: 1994910 - RNA, 19 nt, Homo sapiens
  misc_RNA (1)...(19): siRNA sense strand
ggaagaaauggcagagacu

SEQ ID NO: 1994911 - RNA, 19 nt, Homo sapiens
  misc_RNA (1)...(19): siRNA sense strand
uggacaaccuauggacuga

SEQ ID NO: 1994912 - RNA, 19 nt, Homo sapiens
  misc_RNA (1)...(19): siRNA sense strand
ugccaucguuaccugguuu

SEQ ID NO: 1994913 - RNA, 19 nt, Homo sapiens
  misc_RNA (1)...(19): siRNA sense strand
gcagugcccaaaggaaaug

SEQ ID NO: 1994914 - RNA, 19 nt, Homo sapiens
  misc_RNA (1)...(19): siRNA sense strand
aagaagauuggacaaccua

SEQ ID NO: 1994915 - RNA, 19 nt, Homo sapiens
  misc_RNA (1)...(19): siRNA sense strand
aggaaaugccacuaaagaa

SEQ ID NO: 1994916 - RNA, 19 nt, Homo sapiens
  misc_RNA (1)...(19): siRNA sense strand
ccaccacuuccgaaacauu

SEQ ID NO: 1994917 - RNA, 19 nt, Homo sapiens
  misc_RNA (1)...(19): siRNA sense strand
ggcagacccguaccaguau

SEQ ID NO: 1994918 - RNA, 19 nt, Homo sapiens
  misc_RNA (1)...(19): siRNA sense strand
ccacccaccacuuccgaaa

SEQ ID NO: 1994919 - RNA, 19 nt, Homo sapiens
  misc_RNA (1)...(19): siRNA sense strand
ccgaaacauugagcggaaa

SEQ ID NO: 1994920 - RNA, 19 nt, Homo sapiens
  misc_RNA (1)...(19): siRNA sense strand
gguccucuaugcggaguuc

SEQ ID NO: 1994921 - RNA, 19 nt, Homo sapiens
  misc_RNA (1)...(19): siRNA sense strand
ccugguuucugguccucua

SEQ ID NO: 1994922 - RNA, 19 nt, Homo sapiens
  misc_RNA (1)...(19): siRNA sense strand
gacuacguguauagcauca

SEQ ID NO: 1994923 - RNA, 19 nt, Homo sapiens
  misc_RNA (1)...(19): siRNA sense strand
cugggcaggugguguacaa

SEQ ID NO: 1994924 - RNA, 19 nt, Homo sapiens
  misc_RNA (1)...(19): siRNA sense strand
aaaacaaaguggaugaaca

SEQ ID NO: 1994925 - RNA, 19 nt, Homo sapiens
  misc_RNA (1)...(19): siRNA sense strand
cacagugauucuccuuauc

SEQ ID NO: 1994926 - RNA, 19 nt, Homo sapiens
  misc_RNA (1)...(19): siRNA sense strand
ggacaaccuauggacugaa

SEQ ID NO: 1994927 - RNA, 19 nt, Homo sapiens
  misc_RNA (1)...(19): siRNA sense strand
cugcauugcuuugaagaag

SEQ ID NO: 1994928 - RNA, 19 nt, Homo sapiens
  misc_RNA (1)...(19): siRNA sense strand
uagcaucaucaacggaauu

SEQ ID NO: 1994929 - RNA, 19 nt, Homo sapiens
  misc_RNA (1)...(19): siRNA sense strand
guacuucguccuguuuaca

SEQ ID NO: 1994930 - RNA, 19 nt, Homo sapiens
  misc_RNA (1)...(19): siRNA sense strand
caccacuuccgaaacauug

SEQ ID NO: 1994931 - RNA, 19 nt, Homo sapiens
  misc_RNA (1)...(19): siRNA sense strand
aucgagaguuuacaguuga

SEQ ID NO: 1994932 - RNA, 19 nt, Homo sapiens
  misc_RNA (1)...(19): siRNA sense strand
ccacuaaagaauucaucga

SEQ ID NO: 1994933 - RNA, 19 nt, Homo sapiens
  misc_RNA (1)...(19): siRNA sense strand
cuuccugcauugcuuugaa

SEQ ID NO: 1994934 - RNA, 19 nt, Homo sapiens
  misc_RNA (1)...(19): siRNA sense strand
cgacagagugcagcuccuu

SEQ ID NO: 1994935 - RNA, 19 nt, Homo sapiens
  misc_RNA (1)...(19): siRNA sense strand
ggaggaaugugacuacuug

SEQ ID NO: 1994936 - RNA, 19 nt, Homo sapiens
  misc_RNA (1)...(19): siRNA sense strand
caagaacccuuaucuccaa

SEQ ID NO: 1994937 - RNA, 19 nt, Homo sapiens
  misc_RNA (1)...(19): siRNA sense strand
aaucuuggcucaguauuua

SEQ ID NO: 1994938 - RNA, 19 nt, Homo sapiens
  misc_RNA (1)...(19): siRNA sense strand
gcucacagcucucuugucu

SEQ ID NO: 1994939 - RNA, 19 nt, Homo sapiens
  misc_RNA (1)...(19): siRNA sense strand
acaguuggaugcugcaaua

SEQ ID NO: 1994940 - RNA, 19 nt, Homo sapiens
  misc_RNA (1)...(19): siRNA sense strand
agaaacaucuaucgucuau

SEQ ID NO: 1994941 - RNA, 19 nt, Homo sapiens
  misc_RNA (1)...(19): siRNA sense strand
gaggaacucuaucccaaga

SEQ ID NO: 1994942 - RNA, 19 nt, Homo sapiens
  misc_RNA (1)...(19): siRNA sense strand
ccagagaccucaccaaacu

SEQ ID NO: 1994943 - RNA, 19 nt, Homo sapiens
  misc_RNA (1)...(19): siRNA sense strand
ucccuuaccugcauuauga

SEQ ID NO: 1994944 - RNA, 19 nt, Homo sapiens
  misc_RNA (1)...(19): siRNA sense strand
gcagagggagugcugagua

SEQ ID NO: 1994945 - RNA, 19 nt, Homo sapiens
  misc_RNA (1)...(19): siRNA sense strand
gcagcagccuggagucaug

SEQ ID NO: 1994946 - RNA, 19 nt, Homo sapiens
  misc_RNA (1)...(19): siRNA sense strand
gaucugaaggguaguuuga

SEQ ID NO: 1994947 - RNA, 19 nt, Homo sapiens
  misc_RNA (1)...(19): siRNA sense strand
caggagcaaucaucccuuu

SEQ ID NO: 1994948 - RNA, 19 nt, Homo sapiens
  misc_RNA (1)...(19): siRNA sense strand
ggagagcaucccaguguuu

SEQ ID NO: 1994949 - RNA, 19 nt, Homo sapiens
  misc_RNA (1)...(19): siRNA sense strand
gaagcucaccacacacaaa

SEQ ID NO: 1994950 - RNA, 19 nt, Homo sapiens
  misc_RNA (1)...(19): siRNA sense strand
gcaggguggcuccuccuua

SEQ ID NO: 1994951 - RNA, 19 nt, Homo sapiens
  misc_RNA (1)...(19): siRNA sense strand
ggucagacuuccucagagu

SEQ ID NO: 1994952 - RNA, 19 nt, Homo sapiens
  misc_RNA (1)...(19): siRNA sense strand
cggagcaucuguaugauuc

SEQ ID NO: 1994953 - RNA, 19 nt, Homo sapiens
  misc_RNA (1)...(19): siRNA sense strand
cuacagcccuggacacagu

SEQ ID NO: 1994954 - RNA, 19 nt, Homo sapiens
  misc_RNA (1)...(19): siRNA sense strand
ggagcacgaugacguagca

SEQ ID NO: 1994955 - RNA, 19 nt, Homo sapiens
  misc_RNA (1)...(19): siRNA sense strand
gccagucccuuccugauuc

SEQ ID NO: 1994956 - RNA, 19 nt, Homo sapiens
  misc_RNA (1)...(19): siRNA sense strand
uaaaggaacccaaguacca

SEQ ID NO: 1994957 - RNA, 19 nt, Homo sapiens
  misc_RNA (1)...(19): siRNA sense strand
ggucaaauccauucccaau

SEQ ID NO: 1994958 - RNA, 19 nt, Homo sapiens
  misc_RNA (1)...(19): siRNA sense strand
ggccagagaccucaccaaa

SEQ ID NO: 1994959 - RNA, 19 nt, Homo sapiens
  misc_RNA (1)...(19): siRNA sense strand
gagcagcaguggagagcau

SEQ ID NO: 1994960 - RNA, 19 nt, Homo sapiens
  misc_RNA (1)...(19): siRNA sense strand
caggucggcuggaggcuuu

SEQ ID NO: 1994961 - RNA, 19 nt, Homo sapiens
  misc_RNA (1)...(19): siRNA sense strand
ggaacucuaucccaagaac

SEQ ID NO: 1994962 - RNA, 19 nt, Homo sapiens
  misc_RNA (1)...(19): siRNA sense strand
gagaaacaucuaucgucua

SEQ ID NO: 1994963 - RNA, 19 nt, Homo sapiens
  misc_RNA (1)...(19): siRNA sense strand
cagagcugcuacaagauga

SEQ ID NO: 1994964 - RNA, 19 nt, Homo sapiens
  misc_RNA (1)...(19): siRNA sense strand
gacagagcaugccacacaa

SEQ ID NO: 1994965 - RNA, 19 nt, Homo sapiens
  misc_RNA (1)...(19): siRNA sense strand
agacagagcaugccacaca

SEQ ID NO: 1994966 - RNA, 19 nt, Homo sapiens
  misc_RNA (1)...(19): siRNA sense strand
gugacagccucguggacua

SEQ ID NO: 1994967 - RNA, 19 nt, Homo sapiens
  misc_RNA (1)...(19): siRNA sense strand
cuacagggacaaacaguug

SEQ ID NO: 1994968 - RNA, 19 nt, Homo sapiens
  misc_RNA (1)...(19): siRNA sense strand
gcuuccagauccuguguga

SEQ ID NO: 1994969 - RNA, 19 nt, Homo sapiens
  misc_RNA (1)...(19): siRNA sense strand
aggacaggcugcauuucua

SEQ ID NO: 1994970 - RNA, 19 nt, Homo sapiens
  misc_RNA (1)...(19): siRNA sense strand
cugauucccugaugcaguu

SEQ ID NO: 1994971 - RNA, 19 nt, Homo sapiens
  misc_RNA (1)...(19): siRNA sense strand
cagagggagugcugaguag

SEQ ID NO: 1994972 - RNA, 19 nt, Homo sapiens
  misc_RNA (1)...(19): siRNA sense strand
cagcuucccuuaccugcau

SEQ ID NO: 1994973 - RNA, 19 nt, Homo sapiens
  misc_RNA (1)...(19): siRNA sense strand
gagagcaucccaguguuug

SEQ ID NO: 1994974 - RNA, 19 nt, Homo sapiens
  misc_RNA (1)...(19): siRNA sense strand
gaggacaggcugcauuucu

SEQ ID NO: 1994975 - RNA, 19 nt, Homo sapiens
  misc_RNA (1)...(19): siRNA sense strand
guggagagcaucccagugu

SEQ ID NO: 1994976 - RNA, 19 nt, Homo sapiens
  misc_RNA (1)...(19): siRNA sense strand
gaaaucuuggcucaguauu

SEQ ID NO: 1994977 - RNA, 19 nt, Homo sapiens
  misc_RNA (1)...(19): siRNA sense strand
acacugcaguugggacauu

SEQ ID NO: 1994978 - RNA, 19 nt, Homo sapiens
  misc_RNA (1)...(19): siRNA sense strand
acccuuaucuccaagacuu

SEQ ID NO: 1994979 - RNA, 19 nt, Homo sapiens
  misc_RNA (1)...(19): siRNA sense strand
gcacuguguuccucuucgu

SEQ ID NO: 1994980 - RNA, 19 nt, Homo sapiens
  misc_RNA (1)...(19): siRNA sense strand
caggguggcuccuccuuac

SEQ ID NO: 1994981 - RNA, 19 nt, Homo sapiens
  misc_RNA (1)...(19): siRNA sense strand
ggugacagcaggagcaauc

SEQ ID NO: 1994982 - RNA, 19 nt, Homo sapiens
  misc_RNA (1)...(19): siRNA sense strand
caucuaucgucuauuaaac

SEQ ID NO: 1994983 - RNA, 19 nt, Homo sapiens
  misc_RNA (1)...(19): siRNA sense strand
gcugcuacaagaugaauau

SEQ ID NO: 1994984 - RNA, 19 nt, Homo sapiens
  misc_RNA (1)...(19): siRNA sense strand
ggagugcugaguagugaug

SEQ ID NO: 1994985 - RNA, 19 nt, Homo sapiens
  misc_RNA (1)...(19): siRNA sense strand
uggcugacaugcugagcuu

SEQ ID NO: 1994986 - RNA, 19 nt, Homo sapiens
  misc_RNA (1)...(19): siRNA sense strand
caugaguucuucccaucug

SEQ ID NO: 1994987 - RNA, 19 nt, Homo sapiens
  misc_RNA (1)...(19): siRNA sense strand
ggccagucccuuccugauu

SEQ ID NO: 1994988 - RNA, 19 nt, Homo sapiens
  misc_RNA (1)...(19): siRNA sense strand
gggaagcucaccacacaca

SEQ ID NO: 1994989 - RNA, 19 nt, Homo sapiens
  misc_RNA (1)...(19): siRNA sense strand
ggacaggcugcauuucuac

SEQ ID NO: 1994990 - RNA, 19 nt, Homo sapiens
  misc_RNA (1)...(19): siRNA sense strand
gaacccuuaucuccaagac

SEQ ID NO: 1994991 - RNA, 19 nt, Homo sapiens
  misc_RNA (1)...(19): siRNA sense strand
gagggagugcugaguagug

SEQ ID NO: 1994992 - RNA, 19 nt, Homo sapiens
  misc_RNA (1)...(19): siRNA sense strand
gagcgaccgauuccaagga

SEQ ID NO: 1994993 - RNA, 19 nt, Homo sapiens
  misc_RNA (1)...(19): siRNA sense strand
ugacagccucguggacuaa

SEQ ID NO: 1994994 - RNA, 19 nt, Homo sapiens
  misc_RNA (1)...(19): siRNA sense strand
uggaagccuuggccagaga

SEQ ID NO: 1994995 - RNA, 19 nt, Homo sapiens
  misc_RNA (1)...(19): siRNA sense strand
guaguuugagcucccuaaa

SEQ ID NO: 1994996 - RNA, 19 nt, Homo sapiens
  misc_RNA (1)...(19): siRNA sense strand
agggagugcugaguaguga

SEQ ID NO: 1994997 - RNA, 19 nt, Homo sapiens
  misc_RNA (1)...(19): siRNA sense strand
agaaaucuuggcucaguau

SEQ ID NO: 1994998 - RNA, 19 nt, Homo sapiens
  misc_RNA (1)...(19): siRNA sense strand
uggaggacaggcugcauuu

SEQ ID NO: 1994999 - RNA, 19 nt, Homo sapiens
  misc_RNA (1)...(19): siRNA sense strand
gagcaucuguaugauucag

SEQ ID NO: 1995000 - RNA, 19 nt, Homo sapiens
  misc_RNA (1)...(19): siRNA sense strand
gcugagcuucugugggaaa

SEQ ID NO: 1995001 - RNA, 19 nt, Homo sapiens
  misc_RNA (1)...(19): siRNA sense strand
guaugauucagaaguacaa

SEQ ID NO: 1995002 - RNA, 19 nt, Homo sapiens
  misc_RNA (1)...(19): siRNA sense strand
ggacaaacaguuggaugcu

SEQ ID NO: 1995003 - RNA, 19 nt, Homo sapiens
  misc_RNA (1)...(19): siRNA sense strand
gacagcaggagcaaucauc

SEQ ID NO: 1995004 - RNA, 19 nt, Homo sapiens
  misc_RNA (1)...(19): siRNA sense strand
ggaacccaaguaccaggaa

SEQ ID NO: 1995005 - RNA, 19 nt, Homo sapiens
  misc_RNA (1)...(19): siRNA sense strand
gcucaccacacacaaagag

SEQ ID NO: 1995006 - RNA, 19 nt, Homo sapiens
  misc_RNA (1)...(19): siRNA sense strand
ggaagcucaccacacacaa

SEQ ID NO: 1995007 - RNA, 19 nt, Homo sapiens
  misc_RNA (1)...(19): siRNA sense strand
uggagagcaucccaguguu

SEQ ID NO: 1995008 - RNA, 19 nt, Homo sapiens
  misc_RNA (1)...(19): siRNA sense strand
cuguguuccucuccaguuu

SEQ ID NO: 1995009 - RNA, 19 nt, Homo sapiens
  misc_RNA (1)...(19): siRNA sense strand
gguaguuugagcucccuaa

SEQ ID NO: 1995010 - RNA, 19 nt, Homo sapiens
  misc_RNA (1)...(19): siRNA sense strand
gcauuucuacguggaggaa

SEQ ID NO: 1995011 - RNA, 19 nt, Homo sapiens
  misc_RNA (1)...(19): siRNA sense strand
gcugagggguauagacaga

SEQ ID NO: 1995012 - RNA, 19 nt, Homo sapiens
  misc_RNA (1)...(19): siRNA sense strand
gcaccggccuuccucaugu

SEQ ID NO: 1995013 - RNA, 19 nt, Homo sapiens
  misc_RNA (1)...(19): siRNA sense strand
uggcagcucuguucuggua

SEQ ID NO: 1995014 - RNA, 19 nt, Homo sapiens
  misc_RNA (1)...(19): siRNA sense strand
ccacuacaguucaucaaca

SEQ ID NO: 1995015 - RNA, 19 nt, Homo sapiens
  misc_RNA (1)...(19): siRNA sense strand
aaagaaaacucuagaaguc

SEQ ID NO: 1995016 - RNA, 19 nt, Homo sapiens
  misc_RNA (1)...(19): siRNA sense strand
ucaacuacgucccucugaa

SEQ ID NO: 1995017 - RNA, 19 nt, Homo sapiens
  misc_RNA (1)...(19): siRNA sense strand
gcagcucuguucugguaug

SEQ ID NO: 1995018 - RNA, 19 nt, Homo sapiens
  misc_RNA (1)...(19): siRNA sense strand
ggacgccacuacaguucau

SEQ ID NO: 1995019 - RNA, 19 nt, Homo sapiens
  misc_RNA (1)...(19): siRNA sense strand
ccucugagauaugccguuu

SEQ ID NO: 1995020 - RNA, 19 nt, Homo sapiens
  misc_RNA (1)...(19): siRNA sense strand
caaccuggcagcucuguuc

SEQ ID NO: 1995021 - RNA, 19 nt, Homo sapiens
  misc_RNA (1)...(19): siRNA sense strand
cuacgucccucugaaguuc

SEQ ID NO: 1995022 - RNA, 19 nt, Homo sapiens
  misc_RNA (1)...(19): siRNA sense strand
ugagucacuucuucuacuu

SEQ ID NO: 1995023 - RNA, 19 nt, Homo sapiens
  misc_RNA (1)...(19): siRNA sense strand
cccagaugauugagaagaa

SEQ ID NO: 1995024 - RNA, 19 nt, Homo sapiens
  misc_RNA (1)...(19): siRNA sense strand
ugucagcacuugggaacuu

SEQ ID NO: 1995025 - RNA, 19 nt, Homo sapiens
  misc_RNA (1)...(19): siRNA sense strand
ucggugggccucugagaua

SEQ ID NO: 1995026 - RNA, 19 nt, Homo sapiens
  misc_RNA (1)...(19): siRNA sense strand
ucugagauaugccguuuac

SEQ ID NO: 1995027 - RNA, 19 nt, Homo sapiens
  misc_RNA (1)...(19): siRNA sense strand
caacuacgucccucugaag

SEQ ID NO: 1995028 - RNA, 19 nt, Homo sapiens
  misc_RNA (1)...(19): siRNA sense strand
uggcccagaugauugagaa

SEQ ID NO: 1995029 - RNA, 19 nt, Homo sapiens
  misc_RNA (1)...(19): siRNA sense strand
cuacaguucaucaacauca

SEQ ID NO: 1995030 - RNA, 19 nt, Homo sapiens
  misc_RNA (1)...(19): siRNA sense strand
ucacuucuucuacuucuuc

SEQ ID NO: 1995031 - RNA, 19 nt, Homo sapiens
  misc_RNA (1)...(19): siRNA sense strand
ccagaugauugagaagaag

SEQ ID NO: 1995032 - RNA, 19 nt, Homo sapiens
  misc_RNA (1)...(19): siRNA sense strand
guuuacggguucuucuuca

SEQ ID NO: 1995033 - RNA, 19 nt, Homo sapiens
  misc_RNA (1)...(19): siRNA sense strand
cggccuuccucauguuguu

SEQ ID NO: 1995034 - RNA, 19 nt, Homo sapiens
  misc_RNA (1)...(19): siRNA sense strand
cacuacaguucaucaacau

SEQ ID NO: 1995035 - RNA, 19 nt, Homo sapiens
  misc_RNA (1)...(19): siRNA sense strand
gcccagaugauugagaaga

SEQ ID NO: 1995036 - RNA, 19 nt, Homo sapiens
  misc_RNA (1)...(19): siRNA sense strand
ucaucaacaucaacuacgu

SEQ ID NO: 1995037 - RNA, 19 nt, Homo sapiens
  misc_RNA (1)...(19): siRNA sense strand
caccggccuuccucauguu

SEQ ID NO: 1995038 - RNA, 19 nt, Homo sapiens
  misc_RNA (1)...(19): siRNA sense strand
gaaguggaaugguuuguua

SEQ ID NO: 1995039 - RNA, 19 nt, Homo sapiens
  misc_RNA (1)...(19): siRNA sense strand
gcaaauauccuaugccaaa

SEQ ID NO: 1995040 - RNA, 19 nt, Homo sapiens
  misc_RNA (1)...(19): siRNA sense strand
ugaaagaucuccaccacaa

SEQ ID NO: 1995041 - RNA, 19 nt, Homo sapiens
  misc_RNA (1)...(19): siRNA sense strand
ggagcuugcuuccucauug

SEQ ID NO: 1995042 - RNA, 19 nt, Homo sapiens
  misc_RNA (1)...(19): siRNA sense strand
gguaucagccuggcaaaua

SEQ ID NO: 1995043 - RNA, 19 nt, Homo sapiens
  misc_RNA (1)...(19): siRNA sense strand
gaagaugaaagccaugauu

SEQ ID NO: 1995044 - RNA, 19 nt, Homo sapiens
  misc_RNA (1)...(19): siRNA sense strand
aaaucagucuguuccaaua

SEQ ID NO: 1995045 - RNA, 19 nt, Homo sapiens
  misc_RNA (1)...(19): siRNA sense strand
caaaucccuugauggcaua

SEQ ID NO: 1995046 - RNA, 19 nt, Homo sapiens
  misc_RNA (1)...(19): siRNA sense strand
gagcuugcuuccucauuga

SEQ ID NO: 1995047 - RNA, 19 nt, Homo sapiens
  misc_RNA (1)...(19): siRNA sense strand
gacauucacuucccacuag

SEQ ID NO: 1995048 - RNA, 19 nt, Homo sapiens
  misc_RNA (1)...(19): siRNA sense strand
uggaaaugaugacauguuu

SEQ ID NO: 1995049 - RNA, 19 nt, Homo sapiens
  misc_RNA (1)...(19): siRNA sense strand
guaucagccuggcaaauau

SEQ ID NO: 1995050 - RNA, 19 nt, Homo sapiens
  misc_RNA (1)...(19): siRNA sense strand
gaaagaaaaugugaugaga

SEQ ID NO: 1995051 - RNA, 19 nt, Homo sapiens
  misc_RNA (1)...(19): siRNA sense strand
cgaagacacagaugacuuu

SEQ ID NO: 1995052 - RNA, 19 nt, Homo sapiens
  misc_RNA (1)...(19): siRNA sense strand
gccgagaaaucaugacaau

SEQ ID NO: 1995053 - RNA, 19 nt, Homo sapiens
  misc_RNA (1)...(19): siRNA sense strand
gaagacacagaugacuuua

SEQ ID NO: 1995054 - RNA, 19 nt, Homo sapiens
  misc_RNA (1)...(19): siRNA sense strand
cagaugacuuuaccaggaa

SEQ ID NO: 1995055 - RNA, 19 nt, Homo sapiens
  misc_RNA (1)...(19): siRNA sense strand
uacauguucuucagcauuu

SEQ ID NO: 1995056 - RNA, 19 nt, Homo sapiens
  misc_RNA (1)...(19): siRNA sense strand
ccaguaccuucccuuugua

SEQ ID NO: 1995057 - RNA, 19 nt, Homo sapiens
  misc_RNA (1)...(19): siRNA sense strand
gagaaaucaugacaaugca

SEQ ID NO: 1995058 - RNA, 19 nt, Homo sapiens
  misc_RNA (1)...(19): siRNA sense strand
caccacaacguucaagaua

SEQ ID NO: 1995059 - RNA, 19 nt, Homo sapiens
  misc_RNA (1)...(19): siRNA sense strand
ccaaaucagucuguuccaa

SEQ ID NO: 1995060 - RNA, 19 nt, Homo sapiens
  misc_RNA (1)...(19): siRNA sense strand
caacaucggcaguauuauc

SEQ ID NO: 1995061 - RNA, 19 nt, Homo sapiens
  misc_RNA (1)...(19): siRNA sense strand
ggaauacuuaguucaguug

SEQ ID NO: 1995062 - RNA, 19 nt, Homo sapiens
  misc_RNA (1)...(19): siRNA sense strand
caacuccuauggcaaacug

SEQ ID NO: 1995063 - RNA, 19 nt, Homo sapiens
  misc_RNA (1)...(19): siRNA sense strand
ggucuggaauacuuaguuc

SEQ ID NO: 1995064 - RNA, 19 nt, Homo sapiens
  misc_RNA (1)...(19): siRNA sense strand
uccaacaucggcaguauua

SEQ ID NO: 1995065 - RNA, 19 nt, Homo sapiens
  misc_RNA (1)...(19): siRNA sense strand
gcagggcgguguacagcau

SEQ ID NO: 1995066 - RNA, 19 nt, Homo sapiens
  misc_RNA (1)...(19): siRNA sense strand
gaaaugaugacauguuuug

SEQ ID NO: 1995067 - RNA, 19 nt, Homo sapiens
  misc_RNA (1)...(19): siRNA sense strand
aaacaacucagaccagaug

SEQ ID NO: 1995068 - RNA, 19 nt, Homo sapiens
  misc_RNA (1)...(19): siRNA sense strand
caaauauccuaugccaaau

SEQ ID NO: 1995069 - RNA, 19 nt, Homo sapiens
  misc_RNA (1)...(19): siRNA sense strand
uggcagaugcugaccauuu

SEQ ID NO: 1995070 - RNA, 19 nt, Homo sapiens
  misc_RNA (1)...(19): siRNA sense strand
cccaguaccuucccuuugu

SEQ ID NO: 1995071 - RNA, 19 nt, Homo sapiens
  misc_RNA (1)...(19): siRNA sense strand
cgagaaaucaugacaaugc

SEQ ID NO: 1995072 - RNA, 19 nt, Homo sapiens
  misc_RNA (1)...(19): siRNA sense strand
gaacagccugcaggugaaa

SEQ ID NO: 1995073 - RNA, 19 nt, Homo sapiens
  misc_RNA (1)...(19): siRNA sense strand
ugaacagccugcaggugaa

SEQ ID NO: 1995074 - RNA, 19 nt, Homo sapiens
  misc_RNA (1)...(19): siRNA sense strand
cacuagaccuggaugugaa

SEQ ID NO: 1995075 - RNA, 19 nt, Homo sapiens
  misc_RNA (1)...(19): siRNA sense strand
gaaugccuaucggacacua

SEQ ID NO: 1995076 - RNA, 19 nt, Homo sapiens
  misc_RNA (1)...(19): siRNA sense strand
caaaucagucuguuccaau

SEQ ID NO: 1995077 - RNA, 19 nt, Homo sapiens
  misc_RNA (1)...(19): siRNA sense strand
cugaauacaguucucauuu

SEQ ID NO: 1995078 - RNA, 19 nt, Homo sapiens
  misc_RNA (1)...(19): siRNA sense strand
ggaaguggaaugguuuguu

SEQ ID NO: 1995079 - RNA, 19 nt, Homo sapiens
  misc_RNA (1)...(19): siRNA sense strand
uaaccgaagacacagauga

SEQ ID NO: 1995080 - RNA, 19 nt, Homo sapiens
  misc_RNA (1)...(19): siRNA sense strand
uggaauacuuaguucaguu

SEQ ID NO: 1995081 - RNA, 19 nt, Homo sapiens
  misc_RNA (1)...(19): siRNA sense strand
ccacuagaccuggauguga

SEQ ID NO: 1995082 - RNA, 19 nt, Homo sapiens
  misc_RNA (1)...(19): siRNA sense strand
gaagaaagaaaaugugaug

SEQ ID NO: 1995083 - RNA, 19 nt, Homo sapiens
  misc_RNA (1)...(19): siRNA sense strand
cagagacccuucagaugca

SEQ ID NO: 1995084 - RNA, 19 nt, Homo sapiens
  misc_RNA (1)...(19): siRNA sense strand
gggccaugcucaaccuaug

SEQ ID NO: 1995085 - RNA, 19 nt, Homo sapiens
  misc_RNA (1)...(19): siRNA sense strand
aagaugaaagccaugauuu

SEQ ID NO: 1995086 - RNA, 19 nt, Homo sapiens
  misc_RNA (1)...(19): siRNA sense strand
aauauccuaugccaaauca

SEQ ID NO: 1995087 - RNA, 19 nt, Homo sapiens
  misc_RNA (1)...(19): siRNA sense strand
gcaguauuauccggaagug

SEQ ID NO: 1995088 - RNA, 19 nt, Homo sapiens
  misc_RNA (1)...(19): siRNA sense strand
cugaugcuccuccugaaua

SEQ ID NO: 1995089 - RNA, 19 nt, Homo sapiens
  misc_RNA (1)...(19): siRNA sense strand
cucauugacuucauguauu

SEQ ID NO: 1995090 - RNA, 19 nt, Homo sapiens
  misc_RNA (1)...(19): siRNA sense strand
guggaaugguuuguuauca

SEQ ID NO: 1995091 - RNA, 19 nt, Homo sapiens
  misc_RNA (1)...(19): siRNA sense strand
gaaaaugugaugagaguuc

SEQ ID NO: 1995092 - RNA, 19 nt, Homo sapiens
  misc_RNA (1)...(19): siRNA sense strand
gauuguaugggccgagaaa

SEQ ID NO: 1995093 - RNA, 19 nt, Homo sapiens
  misc_RNA (1)...(19): siRNA sense strand
ccucauugacuucauguau

SEQ ID NO: 1995094 - RNA, 19 nt, Homo sapiens
  misc_RNA (1)...(19): siRNA sense strand
ugacauucacuucccacua

SEQ ID NO: 1995095 - RNA, 19 nt, Homo sapiens
  misc_RNA (1)...(19): siRNA sense strand
ggcagaugcugaccauuuu

SEQ ID NO: 1995096 - RNA, 19 nt, Homo sapiens
  misc_RNA (1)...(19): siRNA sense strand
gccugcaggugaaauggaa

SEQ ID NO: 1995097 - RNA, 19 nt, Homo sapiens
  misc_RNA (1)...(19): siRNA sense strand
ccgggucacugauuguaug

SEQ ID NO: 1995098 - RNA, 19 nt, Homo sapiens
  misc_RNA (1)...(19): siRNA sense strand
uauccaacaucggcaguau

SEQ ID NO: 1995099 - RNA, 19 nt, Homo sapiens
  misc_RNA (1)...(19): siRNA sense strand
agacacagaugacuuuacc

SEQ ID NO: 1995100 - RNA, 19 nt, Homo sapiens
  misc_RNA (1)...(19): siRNA sense strand
caccugcuguugcuucugu

SEQ ID NO: 1995101 - RNA, 19 nt, Homo sapiens
  misc_RNA (1)...(19): siRNA sense strand
auacuacaguccacagcaa

SEQ ID NO: 1995102 - RNA, 19 nt, Homo sapiens
  misc_RNA (1)...(19): siRNA sense strand
gagaagaaagaaaauguga

SEQ ID NO: 1995103 - RNA, 19 nt, Homo sapiens
  misc_RNA (1)...(19): siRNA sense strand
caggugaaauggaaaauca

SEQ ID NO: 1995104 - RNA, 19 nt, Homo sapiens
  misc_RNA (1)...(19): siRNA sense strand
agaccuggaugugaagaug

SEQ ID NO: 1995105 - RNA, 19 nt, Homo sapiens
  misc_RNA (1)...(19): siRNA sense strand
cuccuggucuggaauacuu

SEQ ID NO: 1995106 - RNA, 19 nt, Homo sapiens
  misc_RNA (1)...(19): siRNA sense strand
uauccauccuguccgguau

SEQ ID NO: 1995107 - RNA, 19 nt, Homo sapiens
  misc_RNA (1)...(19): siRNA sense strand
uguaugggccgagaaauca

SEQ ID NO: 1995108 - RNA, 19 nt, Homo sapiens
  misc_RNA (1)...(19): siRNA sense strand
ccaccacaacguucaagau

SEQ ID NO: 1995109 - RNA, 19 nt, Homo sapiens
  misc_RNA (1)...(19): siRNA sense strand
gaccuggaugugaagauga

SEQ ID NO: 1995110 - RNA, 19 nt, Homo sapiens
  misc_RNA (1)...(19): siRNA sense strand
cagccuggcaaauauccua

SEQ ID NO: 1995111 - RNA, 19 nt, Homo sapiens
  misc_RNA (1)...(19): siRNA sense strand
gaaagaucuccaccacaac

SEQ ID NO: 1995112 - RNA, 19 nt, Homo sapiens
  misc_RNA (1)...(19): siRNA sense strand
ccagauccaaggccugaug

SEQ ID NO: 1995113 - RNA, 19 nt, Homo sapiens
  misc_RNA (1)...(19): siRNA sense strand
ugucaccauuggcuuuguu

SEQ ID NO: 1995114 - RNA, 19 nt, Homo sapiens
  misc_RNA (1)...(19): siRNA sense strand
gagccucuggaaaugauga

SEQ ID NO: 1995115 - RNA, 19 nt, Homo sapiens
  misc_RNA (1)...(19): siRNA sense strand
aaucagucuguuccaauaa

SEQ ID NO: 1995116 - RNA, 19 nt, Homo sapiens
  misc_RNA (1)...(19): siRNA sense strand
gccugaugcuccuccugaa

SEQ ID NO: 1995117 - RNA, 19 nt, Homo sapiens
  misc_RNA (1)...(19): siRNA sense strand
ccugaauacaguucucauu

SEQ ID NO: 1995118 - RNA, 19 nt, Homo sapiens
  misc_RNA (1)...(19): siRNA sense strand
uggaaugguuuguuaucag

SEQ ID NO: 1995119 - RNA, 19 nt, Homo sapiens
  misc_RNA (1)...(19): siRNA sense strand
gcuugccuaugggauacua

SEQ ID NO: 1995120 - RNA, 19 nt, Homo sapiens
  misc_RNA (1)...(19): siRNA sense strand
auacauguucuucagcauu

SEQ ID NO: 1995121 - RNA, 19 nt, Homo sapiens
  misc_RNA (1)...(19): siRNA sense strand
ccgaagacacagaugacuu

SEQ ID NO: 1995122 - RNA, 19 nt, Homo sapiens
  misc_RNA (1)...(19): siRNA sense strand
gccaguuggugguauccau

SEQ ID NO: 1995123 - RNA, 19 nt, Homo sapiens
  misc_RNA (1)...(19): siRNA sense strand
aagaaaaugugaugagagu

SEQ ID NO: 1995124 - RNA, 19 nt, Homo sapiens
  misc_RNA (1)...(19): siRNA sense strand
ucagaugcaccugcuguug

SEQ ID NO: 1995125 - RNA, 19 nt, Homo sapiens
  misc_RNA (1)...(19): siRNA sense strand
gaacaucccugaucucaua

SEQ ID NO: 1995126 - RNA, 19 nt, Homo sapiens
  misc_RNA (1)...(19): siRNA sense strand
gagaauagcugaauugaau

SEQ ID NO: 1995127 - RNA, 19 nt, Homo sapiens
  misc_RNA (1)...(19): siRNA sense strand
gaacuaagauuucgacaau

SEQ ID NO: 1995128 - RNA, 19 nt, Homo sapiens
  misc_RNA (1)...(19): siRNA sense strand
ggacagcgcucaccauuga

SEQ ID NO: 1995129 - RNA, 19 nt, Homo sapiens
  misc_RNA (1)...(19): siRNA sense strand
gaaagaagguguuaaggau

SEQ ID NO: 1995130 - RNA, 19 nt, Homo sapiens
  misc_RNA (1)...(19): siRNA sense strand
gcaagaaacuguuaucaag

SEQ ID NO: 1995131 - RNA, 19 nt, Homo sapiens
  misc_RNA (1)...(19): siRNA sense strand
ugaagaaucugaacuaaga

SEQ ID NO: 1995132 - RNA, 19 nt, Homo sapiens
  misc_RNA (1)...(19): siRNA sense strand
ugaacgaaaugaacuguua

SEQ ID NO: 1995133 - RNA, 19 nt, Homo sapiens
  misc_RNA (1)...(19): siRNA sense strand
gagaaacgaugaacugaug

SEQ ID NO: 1995134 - RNA, 19 nt, Homo sapiens
  misc_RNA (1)...(19): siRNA sense strand
ucagagaauucgugacuua

SEQ ID NO: 1995135 - RNA, 19 nt, Homo sapiens
  misc_RNA (1)...(19): siRNA sense strand
cgaccaagcuaaugaagaa

SEQ ID NO: 1995136 - RNA, 19 nt, Homo sapiens
  misc_RNA (1)...(19): siRNA sense strand
gaaggaggcuuuggacgaa

SEQ ID NO: 1995137 - RNA, 19 nt, Homo sapiens
  misc_RNA (1)...(19): siRNA sense strand
gaugaggacucuauggauu

SEQ ID NO: 1995138 - RNA, 19 nt, Homo sapiens
  misc_RNA (1)...(19): siRNA sense strand
caagagaaguccaagguau

SEQ ID NO: 1995139 - RNA, 19 nt, Homo sapiens
  misc_RNA (1)...(19): siRNA sense strand
caacagaacauuauugaug

SEQ ID NO: 1995140 - RNA, 19 nt, Homo sapiens
  misc_RNA (1)...(19): siRNA sense strand
ucacagacauucagauaga

SEQ ID NO: 1995141 - RNA, 19 nt, Homo sapiens
  misc_RNA (1)...(19): siRNA sense strand
agaaugagcugcuggaguu

SEQ ID NO: 1995142 - RNA, 19 nt, Homo sapiens
  misc_RNA (1)...(19): siRNA sense strand
ggaccaagcucacagacau

SEQ ID NO: 1995143 - RNA, 19 nt, Homo sapiens
  misc_RNA (1)...(19): siRNA sense strand
gaugaugacuuggaugaaa

SEQ ID NO: 1995144 - RNA, 19 nt, Homo sapiens
  misc_RNA (1)...(19): siRNA sense strand
gagaauucgugacuuagaa

SEQ ID NO: 1995145 - RNA, 19 nt, Homo sapiens
  misc_RNA (1)...(19): siRNA sense strand
gaacaaguggccauaauuc

SEQ ID NO: 1995146 - RNA, 19 nt, Homo sapiens
  misc_RNA (1)...(19): siRNA sense strand
ugaauugaaugccacuaua

SEQ ID NO: 1995147 - RNA, 19 nt, Homo sapiens
  misc_RNA (1)...(19): siRNA sense strand
gaagcuacuuuguacaaug

SEQ ID NO: 1995148 - RNA, 19 nt, Homo sapiens
  misc_RNA (1)...(19): siRNA sense strand
agauagagcugcaucaaga

SEQ ID NO: 1995149 - RNA, 19 nt, Homo sapiens
  misc_RNA (1)...(19): siRNA sense strand
ggaaauugcggaccugaaa

SEQ ID NO: 1995150 - RNA, 19 nt, Homo sapiens
  misc_RNA (1)...(19): siRNA sense strand
gggagaaccuuaucaagca

SEQ ID NO: 1995151 - RNA, 19 nt, Homo sapiens
  misc_RNA (1)...(19): siRNA sense strand
gcucaagucugcucucugu

SEQ ID NO: 1995152 - RNA, 19 nt, Homo sapiens
  misc_RNA (1)...(19): siRNA sense strand
gaauugaaugccacuauaa

SEQ ID NO: 1995153 - RNA, 19 nt, Homo sapiens
  misc_RNA (1)...(19): siRNA sense strand
caucgacgcugaacgagaa

SEQ ID NO: 1995154 - RNA, 19 nt, Homo sapiens
  misc_RNA (1)...(19): siRNA sense strand
gaagaaagcauagaagaag

SEQ ID NO: 1995155 - RNA, 19 nt, Homo sapiens
  misc_RNA (1)...(19): siRNA sense strand
guucuucucucuugccuuu

SEQ ID NO: 1995156 - RNA, 19 nt, Homo sapiens
  misc_RNA (1)...(19): siRNA sense strand
guacagaaacuccaacuuc

SEQ ID NO: 1995157 - RNA, 19 nt, Homo sapiens
  misc_RNA (1)...(19): siRNA sense strand
gcagaggugcuaagguaua

SEQ ID NO: 1995158 - RNA, 19 nt, Homo sapiens
  misc_RNA (1)...(19): siRNA sense strand
gaaguuccaagccaauuaa

SEQ ID NO: 1995159 - RNA, 19 nt, Homo sapiens
  misc_RNA (1)...(19): siRNA sense strand
gcucacagacauucagaua

SEQ ID NO: 1995160 - RNA, 19 nt, Homo sapiens
  misc_RNA (1)...(19): siRNA sense strand
gacaggcuauguacagaaa

SEQ ID NO: 1995161 - RNA, 19 nt, Homo sapiens
  misc_RNA (1)...(19): siRNA sense strand
cggcagcagugacaaagua

SEQ ID NO: 1995162 - RNA, 19 nt, Homo sapiens
  misc_RNA (1)...(19): siRNA sense strand
caucauccauggccucauu

SEQ ID NO: 1995163 - RNA, 19 nt, Homo sapiens
  misc_RNA (1)...(19): siRNA sense strand
gaaaugaacuguuaaaacg

SEQ ID NO: 1995164 - RNA, 19 nt, Homo sapiens
  misc_RNA (1)...(19): siRNA sense strand
gaacgaaaugaacuguuaa

SEQ ID NO: 1995165 - RNA, 19 nt, Homo sapiens
  misc_RNA (1)...(19): siRNA sense strand
aaagugacauggaacaguu

SEQ ID NO: 1995166 - RNA, 19 nt, Homo sapiens
  misc_RNA (1)...(19): siRNA sense strand
gcugaagaaucugaacuaa

SEQ ID NO: 1995167 - RNA, 19 nt, Homo sapiens
  misc_RNA (1)...(19): siRNA sense strand
guaaaccucuccuggaaag

SEQ ID NO: 1995168 - RNA, 19 nt, Homo sapiens
  misc_RNA (1)...(19): siRNA sense strand
gcuaagguauaaagccaaa

SEQ ID NO: 1995169 - RNA, 19 nt, Homo sapiens
  misc_RNA (1)...(19): siRNA sense strand
gagcagagaguaugacugu

SEQ ID NO: 1995170 - RNA, 19 nt, Homo sapiens
  misc_RNA (1)...(19): siRNA sense strand
gaccaagcauauaugagaa

SEQ ID NO: 1995171 - RNA, 19 nt, Homo sapiens
  misc_RNA (1)...(19): siRNA sense strand
gaagaacaaguggccauaa

SEQ ID NO: 1995172 - RNA, 19 nt, Homo sapiens
  misc_RNA (1)...(19): siRNA sense strand
ggaacuagaagcuacuuug

SEQ ID NO: 1995173 - RNA, 19 nt, Homo sapiens
  misc_RNA (1)...(19): siRNA sense strand
ccaauuaagaggccuguuu

SEQ ID NO: 1995174 - RNA, 19 nt, Homo sapiens
  misc_RNA (1)...(19): siRNA sense strand
ucucuugccuuuauucuau

SEQ ID NO: 1995175 - RNA, 19 nt, Homo sapiens
  misc_RNA (1)...(19): siRNA sense strand
gaacuagaagcuacuuugu

SEQ ID NO: 1995176 - RNA, 19 nt, Homo sapiens
  misc_RNA (1)...(19): siRNA sense strand
gcuuggagaugaacgaaau

SEQ ID NO: 1995177 - RNA, 19 nt, Homo sapiens
  misc_RNA (1)...(19): siRNA sense strand
gcaagcccaucagagaauu

SEQ ID NO: 1995178 - RNA, 19 nt, Homo sapiens
  misc_RNA (1)...(19): siRNA sense strand
gaucuacuguaugaaagaa

SEQ ID NO: 1995179 - RNA, 19 nt, Homo sapiens
  misc_RNA (1)...(19): siRNA sense strand
cagaggugcuaagguauaa

SEQ ID NO: 1995180 - RNA, 19 nt, Homo sapiens
  misc_RNA (1)...(19): siRNA sense strand
gagaauccaggaacuagaa

SEQ ID NO: 1995181 - RNA, 19 nt, Homo sapiens
  misc_RNA (1)...(19): siRNA sense strand
caagagaaacgaugaacug

SEQ ID NO: 1995182 - RNA, 19 nt, Homo sapiens
  misc_RNA (1)...(19): siRNA sense strand
gaagagagagagagacgau

SEQ ID NO: 1995183 - RNA, 19 nt, Homo sapiens
  misc_RNA (1)...(19): siRNA sense strand
caaggaaaauucagaaaug

SEQ ID NO: 1995184 - RNA, 19 nt, Homo sapiens
  misc_RNA (1)...(19): siRNA sense strand
gagcaacagaacauuauug

SEQ ID NO: 1995185 - RNA, 19 nt, Homo sapiens
  misc_RNA (1)...(19): siRNA sense strand
gaaaagcucauccguagaa

SEQ ID NO: 1995186 - RNA, 19 nt, Homo sapiens
  misc_RNA (1)...(19): siRNA sense strand
aaagagagaagacucaaga

SEQ ID NO: 1995187 - RNA, 19 nt, Homo sapiens
  misc_RNA (1)...(19): siRNA sense strand
gaagaacuagacuacagaa

SEQ ID NO: 1995188 - RNA, 19 nt, Homo sapiens
  misc_RNA (1)...(19): siRNA sense strand
ggugauaaugggaauuuaa

SEQ ID NO: 1995189 - RNA, 19 nt, Homo sapiens
  misc_RNA (1)...(19): siRNA sense strand
caagaaagggcgaaauaag

SEQ ID NO: 1995190 - RNA, 19 nt, Homo sapiens
  misc_RNA (1)...(19): siRNA sense strand
ggaagagcagagaguauga

SEQ ID NO: 1995191 - RNA, 19 nt, Homo sapiens
  misc_RNA (1)...(19): siRNA sense strand
ugaccaagcauauaugaga

SEQ ID NO: 1995192 - RNA, 19 nt, Homo sapiens
  misc_RNA (1)...(19): siRNA sense strand
ggaagaacuagacuacaga

SEQ ID NO: 1995193 - RNA, 19 nt, Homo sapiens
  misc_RNA (1)...(19): siRNA sense strand
ugagugcucuacagaucua

SEQ ID NO: 1995194 - RNA, 19 nt, Homo sapiens
  misc_RNA (1)...(19): siRNA sense strand
ccaagaaagggcgaaauaa

SEQ ID NO: 1995195 - RNA, 19 nt, Homo sapiens
  misc_RNA (1)...(19): siRNA sense strand
gcgaagaaaucaaaagaga

SEQ ID NO: 1995196 - RNA, 19 nt, Homo sapiens
  misc_RNA (1)...(19): siRNA sense strand
gaggcugagugcaacauga

SEQ ID NO: 1995197 - RNA, 19 nt, Homo sapiens
  misc_RNA (1)...(19): siRNA sense strand
uacagaaacuccaacuuca

SEQ ID NO: 1995198 - RNA, 19 nt, Homo sapiens
  misc_RNA (1)...(19): siRNA sense strand
caagaagccaucucgaaga

SEQ ID NO: 1995199 - RNA, 19 nt, Homo sapiens
  misc_RNA (1)...(19): siRNA sense strand
ugaaagaagguguuaagga

SEQ ID NO: 1995200 - RNA, 19 nt, Homo sapiens
  misc_RNA (1)...(19): siRNA sense strand
ggaggcugauggaugaaau

SEQ ID NO: 1995201 - RNA, 19 nt, Homo sapiens
  misc_RNA (1)...(19): siRNA sense strand
ugauggaauuggaaaguga

SEQ ID NO: 1995202 - RNA, 19 nt, Homo sapiens
  misc_RNA (1)...(19): siRNA sense strand
cagcuacuccugaugauga

SEQ ID NO: 1995203 - RNA, 19 nt, Homo sapiens
  misc_RNA (1)...(19): siRNA sense strand
ugaaugccacuauaagaaa

SEQ ID NO: 1995204 - RNA, 19 nt, Homo sapiens
  misc_RNA (1)...(19): siRNA sense strand
acacggugcuggugacaga

SEQ ID NO: 1995205 - RNA, 19 nt, Homo sapiens
  misc_RNA (1)...(19): siRNA sense strand
aaagagaauagcugaauug

SEQ ID NO: 1995206 - RNA, 19 nt, Homo sapiens
  misc_RNA (1)...(19): siRNA sense strand
ggaauuggaaagugacaug

SEQ ID NO: 1995207 - RNA, 19 nt, Homo sapiens
  misc_RNA (1)...(19): siRNA sense strand
gaacuagacuacagaaaac

SEQ ID NO: 1995208 - RNA, 19 nt, Homo sapiens
  misc_RNA (1)...(19): siRNA sense strand
gaagaaguuccaagccaau

SEQ ID NO: 1995209 - RNA, 19 nt, Homo sapiens
  misc_RNA (1)...(19): siRNA sense strand
ggaggaagaacuagacuac

SEQ ID NO: 1995210 - RNA, 19 nt, Homo sapiens
  misc_RNA (1)...(19): siRNA sense strand
aagaagguguuaaggaugu

SEQ ID NO: 1995211 - RNA, 19 nt, Homo sapiens
  misc_RNA (1)...(19): siRNA sense strand
cagaaagggcagauagaaa

SEQ ID NO: 1995212 - RNA, 19 nt, Homo sapiens
  misc_RNA (1)...(19): siRNA sense strand
gaauaucaggcccuccaaa

SEQ ID NO: 1995213 - RNA, 19 nt, Homo sapiens
  misc_RNA (1)...(19): siRNA sense strand
gcugugagggagaaccuua

SEQ ID NO: 1995214 - RNA, 19 nt, Homo sapiens
  misc_RNA (1)...(19): siRNA sense strand
agaaguggauccagcagau

SEQ ID NO: 1995215 - RNA, 19 nt, Homo sapiens
  misc_RNA (1)...(19): siRNA sense strand
aagaacaaguggccauaau

SEQ ID NO: 1995216 - RNA, 19 nt, Homo sapiens
  misc_RNA (1)...(19): siRNA sense strand
gagcauaugcccuccuaca

SEQ ID NO: 1995217 - RNA, 19 nt, Homo sapiens
  misc_RNA (1)...(19): siRNA sense strand
uccauggccucauuuagaa

SEQ ID NO: 1995218 - RNA, 19 nt, Homo sapiens
  misc_RNA (1)...(19): siRNA sense strand
gagcaggaaaugucaagga

SEQ ID NO: 1995219 - RNA, 19 nt, Homo sapiens
  misc_RNA (1)...(19): siRNA sense strand
gcucauccguagaagaaag

SEQ ID NO: 1995220 - RNA, 19 nt, Homo sapiens
  misc_RNA (1)...(19): siRNA sense strand
aaacagacauccagaaaag

SEQ ID NO: 1995221 - RNA, 19 nt, Homo sapiens
  misc_RNA (1)...(19): siRNA sense strand
acuagaagcuacuuuguac

SEQ ID NO: 1995222 - RNA, 19 nt, Homo sapiens
  misc_RNA (1)...(19): siRNA sense strand
gaaagugacauggaacagu

SEQ ID NO: 1995223 - RNA, 19 nt, Homo sapiens
  misc_RNA (1)...(19): siRNA sense strand
ggcagaaaaucaccgguua

SEQ ID NO: 1995224 - RNA, 19 nt, Homo sapiens
  misc_RNA (1)...(19): siRNA sense strand
gcuaugaugaggacucuau

SEQ ID NO: 1995225 - RNA, 19 nt, Homo sapiens
  misc_RNA (1)...(19): siRNA sense strand
guaaauagguuucauguug

SEQ ID NO: 1995226 - RNA, 19 nt, Homo sapiens
  misc_RNA (1)...(19): siRNA sense strand
ucacauagcugaaauauca

SEQ ID NO: 1995227 - RNA, 19 nt, Homo sapiens
  misc_RNA (1)...(19): siRNA sense strand
caacauagguggacuguau

SEQ ID NO: 1995228 - RNA, 19 nt, Homo sapiens
  misc_RNA (1)...(19): siRNA sense strand
uaggaaagcuggcaaauaa

SEQ ID NO: 1995229 - RNA, 19 nt, Homo sapiens
  misc_RNA (1)...(19): siRNA sense strand
gcaguuaucucacuuaaau

SEQ ID NO: 1995230 - RNA, 19 nt, Homo sapiens
  misc_RNA (1)...(19): siRNA sense strand
acacagagguggcuuauuu

SEQ ID NO: 1995231 - RNA, 19 nt, Homo sapiens
  misc_RNA (1)...(19): siRNA sense strand
ggacuaccaugaucacaua

SEQ ID NO: 1995232 - RNA, 19 nt, Homo sapiens
  misc_RNA (1)...(19): siRNA sense strand
gagccaagcuauuaaguuu

SEQ ID NO: 1995233 - RNA, 19 nt, Homo sapiens
  misc_RNA (1)...(19): siRNA sense strand
caugagagaugcaagaaua

SEQ ID NO: 1995234 - RNA, 19 nt, Homo sapiens
  misc_RNA (1)...(19): siRNA sense strand
ggacagaucuggagcaagu

SEQ ID NO: 1995235 - RNA, 19 nt, Homo sapiens
  misc_RNA (1)...(19): siRNA sense strand
gaagauugcuuuaccugaa

SEQ ID NO: 1995236 - RNA, 19 nt, Homo sapiens
  misc_RNA (1)...(19): siRNA sense strand
gaagagauuucacaacaga

SEQ ID NO: 1995237 - RNA, 19 nt, Homo sapiens
  misc_RNA (1)...(19): siRNA sense strand
gcacgaagcuauauuugau

SEQ ID NO: 1995238 - RNA, 19 nt, Homo sapiens
  misc_RNA (1)...(19): siRNA sense strand
gcacuuaccagaaauaauu

SEQ ID NO: 1995239 - RNA, 19 nt, Homo sapiens
  misc_RNA (1)...(19): siRNA sense strand
gaaaccagcugaaguucuu

SEQ ID NO: 1995240 - RNA, 19 nt, Homo sapiens
  misc_RNA (1)...(19): siRNA sense strand
agaaaugcaucuccaaaua

SEQ ID NO: 1995241 - RNA, 19 nt, Homo sapiens
  misc_RNA (1)...(19): siRNA sense strand
ccaaaggacuagagaauug

SEQ ID NO: 1995242 - RNA, 19 nt, Homo sapiens
  misc_RNA (1)...(19): siRNA sense strand
ggaaagcuggcaaauaaua

SEQ ID NO: 1995243 - RNA, 19 nt, Homo sapiens
  misc_RNA (1)...(19): siRNA sense strand
guacagguguuauuaucua

SEQ ID NO: 1995244 - RNA, 19 nt, Homo sapiens
  misc_RNA (1)...(19): siRNA sense strand
gaaggcauguuuauaagug

SEQ ID NO: 1995245 - RNA, 19 nt, Homo sapiens
  misc_RNA (1)...(19): siRNA sense strand
ugaucgagcugucaaauuu

SEQ ID NO: 1995246 - RNA, 19 nt, Homo sapiens
  misc_RNA (1)...(19): siRNA sense strand
gcaaagagcacacaucauc

SEQ ID NO: 1995247 - RNA, 19 nt, Homo sapiens
  misc_RNA (1)...(19): siRNA sense strand
gacacuaccucucaaagaa

SEQ ID NO: 1995248 - RNA, 19 nt, Homo sapiens
  misc_RNA (1)...(19): siRNA sense strand
guuauaaacuccacuugaa

SEQ ID NO: 1995249 - RNA, 19 nt, Homo sapiens
  misc_RNA (1)...(19): siRNA sense strand
gagcaaguaccuaagauuu

SEQ ID NO: 1995250 - RNA, 19 nt, Homo sapiens
  misc_RNA (1)...(19): siRNA sense strand
gaagaggaaagacuaauau

SEQ ID NO: 1995251 - RNA, 19 nt, Homo sapiens
  misc_RNA (1)...(19): siRNA sense strand
gaauauuuguccuccuaaa

SEQ ID NO: 1995252 - RNA, 19 nt, Homo sapiens
  misc_RNA (1)...(19): siRNA sense strand
gcacagauugauaaaguaa

SEQ ID NO: 1995253 - RNA, 19 nt, Homo sapiens
  misc_RNA (1)...(19): siRNA sense strand
caccagaucucucuacguu

SEQ ID NO: 1995254 - RNA, 19 nt, Homo sapiens
  misc_RNA (1)...(19): siRNA sense strand
gcagugauguuuucuuuaa

SEQ ID NO: 1995255 - RNA, 19 nt, Homo sapiens
  misc_RNA (1)...(19): siRNA sense strand
agacuaauaucccuuguau

SEQ ID NO: 1995256 - RNA, 19 nt, Homo sapiens
  misc_RNA (1)...(19): siRNA sense strand
gcauuggacuuaauagcaa

SEQ ID NO: 1995257 - RNA, 19 nt, Homo sapiens
  misc_RNA (1)...(19): siRNA sense strand
aaacauugcucaccagauc

SEQ ID NO: 1995258 - RNA, 19 nt, Homo sapiens
  misc_RNA (1)...(19): siRNA sense strand
uugacaagcuguuaucuaa

SEQ ID NO: 1995259 - RNA, 19 nt, Homo sapiens
  misc_RNA (1)...(19): siRNA sense strand
gaaucugacuucuucacaa

SEQ ID NO: 1995260 - RNA, 19 nt, Homo sapiens
  misc_RNA (1)...(19): siRNA sense strand
ggaagcagcagugauguuu

SEQ ID NO: 1995261 - RNA, 19 nt, Homo sapiens
  misc_RNA (1)...(19): siRNA sense strand
cagaagaaauagacacaga

SEQ ID NO: 1995262 - RNA, 19 nt, Homo sapiens
  misc_RNA (1)...(19): siRNA sense strand
gacaagcuguuaucuaagu

SEQ ID NO: 1995263 - RNA, 19 nt, Homo sapiens
  misc_RNA (1)...(19): siRNA sense strand
ggaaccguauugcuguuaa

SEQ ID NO: 1995264 - RNA, 19 nt, Homo sapiens
  misc_RNA (1)...(19): siRNA sense strand
gagagugaaggcaacauua

SEQ ID NO: 1995265 - RNA, 19 nt, Homo sapiens
  misc_RNA (1)...(19): siRNA sense strand
gaaauagacacagauguug

SEQ ID NO: 1995266 - RNA, 19 nt, Homo sapiens
  misc_RNA (1)...(19): siRNA sense strand
ccucaaaguugcuucaaga

SEQ ID NO: 1995267 - RNA, 19 nt, Homo sapiens
  misc_RNA (1)...(19): siRNA sense strand
gaaaugcaucuccaaauag

SEQ ID NO: 1995268 - RNA, 19 nt, Homo sapiens
  misc_RNA (1)...(19): siRNA sense strand
agagguggcuuauuuaauc

SEQ ID NO: 1995269 - RNA, 19 nt, Homo sapiens
  misc_RNA (1)...(19): siRNA sense strand
gagagaugcaagaauauuu

SEQ ID NO: 1995270 - RNA, 19 nt, Homo sapiens
  misc_RNA (1)...(19): siRNA sense strand
gaagaaugcugcaaaagau

SEQ ID NO: 1995271 - RNA, 19 nt, Homo sapiens
  misc_RNA (1)...(19): siRNA sense strand
ccagaucucucuacguuca

SEQ ID NO: 1995272 - RNA, 19 nt, Homo sapiens
  misc_RNA (1)...(19): siRNA sense strand
caaaguugcuucaagaaaa

SEQ ID NO: 1995273 - RNA, 19 nt, Homo sapiens
  misc_RNA (1)...(19): siRNA sense strand
gcuuaaagauuuggaccua

SEQ ID NO: 1995274 - RNA, 19 nt, Homo sapiens
  misc_RNA (1)...(19): siRNA sense strand
uucaagaaguugccaguua

SEQ ID NO: 1995275 - RNA, 19 nt, Homo sapiens
  misc_RNA (1)...(19): siRNA sense strand
cagcugaaguucuuauugu

SEQ ID NO: 1995276 - RNA, 19 nt, Homo sapiens
  misc_RNA (1)...(19): siRNA sense strand
ucagauauaugccaugauc

SEQ ID NO: 1995277 - RNA, 19 nt, Homo sapiens
  misc_RNA (1)...(19): siRNA sense strand
gaucagaugagaauguuga

SEQ ID NO: 1995278 - RNA, 19 nt, Homo sapiens
  misc_RNA (1)...(19): siRNA sense strand
gaagaaauagacacagaug

SEQ ID NO: 1995279 - RNA, 19 nt, Homo sapiens
  misc_RNA (1)...(19): siRNA sense strand
aagaaaagcugagccauua

SEQ ID NO: 1995280 - RNA, 19 nt, Homo sapiens
  misc_RNA (1)...(19): siRNA sense strand
caaggaacauuuuacagua

SEQ ID NO: 1995281 - RNA, 19 nt, Homo sapiens
  misc_RNA (1)...(19): siRNA sense strand
uggaagagauuucacaaca

SEQ ID NO: 1995282 - RNA, 19 nt, Homo sapiens
  misc_RNA (1)...(19): siRNA sense strand
gaaggaucacuccacauuu

SEQ ID NO: 1995283 - RNA, 19 nt, Homo sapiens
  misc_RNA (1)...(19): siRNA sense strand
aagaauauuuguccuccua

SEQ ID NO: 1995284 - RNA, 19 nt, Homo sapiens
  misc_RNA (1)...(19): siRNA sense strand
gcacuacauuccugugauc

SEQ ID NO: 1995285 - RNA, 19 nt, Homo sapiens
  misc_RNA (1)...(19): siRNA sense strand
cuucagagccaagcuauua

SEQ ID NO: 1995286 - RNA, 19 nt, Homo sapiens
  misc_RNA (1)...(19): siRNA sense strand
ucaaauuucucaugucaag

SEQ ID NO: 1995287 - RNA, 19 nt, Homo sapiens
  misc_RNA (1)...(19): siRNA sense strand
gaaagcuggcaaauaauau

SEQ ID NO: 1995288 - RNA, 19 nt, Homo sapiens
  misc_RNA (1)...(19): siRNA sense strand
gagcacacaucaucaucug

SEQ ID NO: 1995289 - RNA, 19 nt, Homo sapiens
  misc_RNA (1)...(19): siRNA sense strand
caaggaagcagcagugaug

SEQ ID NO: 1995290 - RNA, 19 nt, Homo sapiens
  misc_RNA (1)...(19): siRNA sense strand
gaaggcaacauuaaauauc

SEQ ID NO: 1995291 - RNA, 19 nt, Homo sapiens
  misc_RNA (1)...(19): siRNA sense strand
uguggacacugaagucaua

SEQ ID NO: 1995292 - RNA, 19 nt, Homo sapiens
  misc_RNA (1)...(19): siRNA sense strand
gaagaacaaacacagaugu

SEQ ID NO: 1995293 - RNA, 19 nt, Homo sapiens
  misc_RNA (1)...(19): siRNA sense strand
aaauuuggcucuuucuuca

SEQ ID NO: 1995294 - RNA, 19 nt, Homo sapiens
  misc_RNA (1)...(19): siRNA sense strand
gugaaggcaacauuaaaua

SEQ ID NO: 1995295 - RNA, 19 nt, Homo sapiens
  misc_RNA (1)...(19): siRNA sense strand
gacuguauaucauuccaaa

SEQ ID NO: 1995296 - RNA, 19 nt, Homo sapiens
  misc_RNA (1)...(19): siRNA sense strand
gccaagcuauuaaguuugu

SEQ ID NO: 1995297 - RNA, 19 nt, Homo sapiens
  misc_RNA (1)...(19): siRNA sense strand
gaaguuaauggccacugua

SEQ ID NO: 1995298 - RNA, 19 nt, Homo sapiens
  misc_RNA (1)...(19): siRNA sense strand
gaagcucgacuaccaccua

SEQ ID NO: 1995299 - RNA, 19 nt, Homo sapiens
  misc_RNA (1)...(19): siRNA sense strand
ucaagaaguugccaguuag

SEQ ID NO: 1995300 - RNA, 19 nt, Homo sapiens
  misc_RNA (1)...(19): siRNA sense strand
uaacaccuauagcaguuga

SEQ ID NO: 1995301 - RNA, 19 nt, Homo sapiens
  misc_RNA (1)...(19): siRNA sense strand
cagaugagaauguugaauu

SEQ ID NO: 1995302 - RNA, 19 nt, Homo sapiens
  misc_RNA (1)...(19): siRNA sense strand
ugccuuggaugauuccuua

SEQ ID NO: 1995303 - RNA, 19 nt, Homo sapiens
  misc_RNA (1)...(19): siRNA sense strand
gaagugaaggcuccuguuc

SEQ ID NO: 1995304 - RNA, 19 nt, Homo sapiens
  misc_RNA (1)...(19): siRNA sense strand
gcuguuaucuaaguaugaa

SEQ ID NO: 1995305 - RNA, 19 nt, Homo sapiens
  misc_RNA (1)...(19): siRNA sense strand
ucacuaaggacuaccauga

SEQ ID NO: 1995306 - RNA, 19 nt, Homo sapiens
  misc_RNA (1)...(19): siRNA sense strand
caggagguguggauauuau

SEQ ID NO: 1995307 - RNA, 19 nt, Homo sapiens
  misc_RNA (1)...(19): siRNA sense strand
guuuauaagugaugcauuc

SEQ ID NO: 1995308 - RNA, 19 nt, Homo sapiens
  misc_RNA (1)...(19): siRNA sense strand
ugaaggaucacuccacauu

SEQ ID NO: 1995309 - RNA, 19 nt, Homo sapiens
  misc_RNA (1)...(19): siRNA sense strand
aaucugacuucuucacaaa

SEQ ID NO: 1995310 - RNA, 19 nt, Homo sapiens
  misc_RNA (1)...(19): siRNA sense strand
ucacgauguuugcaguuaa

SEQ ID NO: 1995311 - RNA, 19 nt, Homo sapiens
  misc_RNA (1)...(19): siRNA sense strand
auaauucacuggacacaga

SEQ ID NO: 1995312 - RNA, 19 nt, Homo sapiens
  misc_RNA (1)...(19): siRNA sense strand
ugaauuuguuggagcauug

SEQ ID NO: 1995313 - RNA, 19 nt, Homo sapiens
  misc_RNA (1)...(19): siRNA sense strand
agucauaccuucauucuac

SEQ ID NO: 1995314 - RNA, 19 nt, Homo sapiens
  misc_RNA (1)...(19): siRNA sense strand
uacaguauaucaacaggaa

SEQ ID NO: 1995315 - RNA, 19 nt, Homo sapiens
  misc_RNA (1)...(19): siRNA sense strand
gaaccguauugcuguuaau

SEQ ID NO: 1995316 - RNA, 19 nt, Homo sapiens
  misc_RNA (1)...(19): siRNA sense strand
agauguuccugcagaauuu

SEQ ID NO: 1995317 - RNA, 19 nt, Homo sapiens
  misc_RNA (1)...(19): siRNA sense strand
gcagaucagaugagaaugu

SEQ ID NO: 1995318 - RNA, 19 nt, Homo sapiens
  misc_RNA (1)...(19): siRNA sense strand
agaaauagacacagauguu

SEQ ID NO: 1995319 - RNA, 19 nt, Homo sapiens
  misc_RNA (1)...(19): siRNA sense strand
ggaagagauuucacaacag

SEQ ID NO: 1995320 - RNA, 19 nt, Homo sapiens
  misc_RNA (1)...(19): siRNA sense strand
gcaaguuguuggacuaaaa

SEQ ID NO: 1995321 - RNA, 19 nt, Homo sapiens
  misc_RNA (1)...(19): siRNA sense strand
caagcucagccuccucuua

SEQ ID NO: 1995322 - RNA, 19 nt, Homo sapiens
  misc_RNA (1)...(19): siRNA sense strand
ugucaaauuucucauguca

SEQ ID NO: 1995323 - RNA, 19 nt, Homo sapiens
  misc_RNA (1)...(19): siRNA sense strand
gcugucaaauuucucaugu

SEQ ID NO: 1995324 - RNA, 19 nt, Homo sapiens
  misc_RNA (1)...(19): siRNA sense strand
gaggguaagcuaacaccua

SEQ ID NO: 1995325 - RNA, 19 nt, Homo sapiens
  misc_RNA (1)...(19): siRNA sense strand
ugacaggugugcuauguga

SEQ ID NO: 1995326 - RNA, 19 nt, Homo sapiens
  misc_RNA (1)...(19): siRNA sense strand
guacacagaccgcaaguuc

SEQ ID NO: 1995327 - RNA, 19 nt, Homo sapiens
  misc_RNA (1)...(19): siRNA sense strand
gcagauggguaugcugguu

SEQ ID NO: 1995328 - RNA, 19 nt, Homo sapiens
  misc_RNA (1)...(19): siRNA sense strand
gcugacaggugugcuaugu

SEQ ID NO: 1995329 - RNA, 19 nt, Homo sapiens
  misc_RNA (1)...(19): siRNA sense strand
gcagcagccugaagugaag

SEQ ID NO: 1995330 - RNA, 19 nt, Homo sapiens
  misc_RNA (1)...(19): siRNA sense strand
gaccgcaaguucaccauca

SEQ ID NO: 1995331 - RNA, 19 nt, Homo sapiens
  misc_RNA (1)...(19): siRNA sense strand
gaccagcaggacaagauua

SEQ ID NO: 1995332 - RNA, 19 nt, Homo sapiens
  misc_RNA (1)...(19): siRNA sense strand
gcaaugagaggaccuacca

SEQ ID NO: 1995333 - RNA, 19 nt, Homo sapiens
  misc_RNA (1)...(19): siRNA sense strand
ucauagcccucgcugucua

SEQ ID NO: 1995334 - RNA, 19 nt, Homo sapiens
  misc_RNA (1)...(19): siRNA sense strand
gcaaggugaucucagucau

SEQ ID NO: 1995335 - RNA, 19 nt, Homo sapiens
  misc_RNA (1)...(19): siRNA sense strand
uagcugugauggcgaaaga

SEQ ID NO: 1995336 - RNA, 19 nt, Homo sapiens
  misc_RNA (1)...(19): siRNA sense strand
ucacagccaucguuaucau

SEQ ID NO: 1995337 - RNA, 19 nt, Homo sapiens
  misc_RNA (1)...(19): siRNA sense strand
aaggugaucucagucauug

SEQ ID NO: 1995338 - RNA, 19 nt, Homo sapiens
  misc_RNA (1)...(19): siRNA sense strand
ugcauugccuuccuaauca

SEQ ID NO: 1995339 - RNA, 19 nt, Homo sapiens
  misc_RNA (1)...(19): siRNA sense strand
ggauggcuguguucaaugc

SEQ ID NO: 1995340 - RNA, 19 nt, Homo sapiens
  misc_RNA (1)...(19): siRNA sense strand
guacgucacagccaucguu

SEQ ID NO: 1995341 - RNA, 19 nt, Homo sapiens
  misc_RNA (1)...(19): siRNA sense strand
gugcaggguuacucaacuu

SEQ ID NO: 1995342 - RNA, 19 nt, Homo sapiens
  misc_RNA (1)...(19): siRNA sense strand
ccagggcugugccucauuc

SEQ ID NO: 1995343 - RNA, 19 nt, Homo sapiens
  misc_RNA (1)...(19): siRNA sense strand
gcagugugcccgucuucaa

SEQ ID NO: 1995344 - RNA, 19 nt, Homo sapiens
  misc_RNA (1)...(19): siRNA sense strand
ccaucguuaucaucaagua

SEQ ID NO: 1995345 - RNA, 19 nt, Homo sapiens
  misc_RNA (1)...(19): siRNA sense strand
caccaucugcuucggauuu

SEQ ID NO: 1995346 - RNA, 19 nt, Homo sapiens
  misc_RNA (1)...(19): siRNA sense strand
caucaucaguggccuuguc

SEQ ID NO: 1995347 - RNA, 19 nt, Homo sapiens
  misc_RNA (1)...(19): siRNA sense strand
uuguggaucucuuggcaua

SEQ ID NO: 1995348 - RNA, 19 nt, Homo sapiens
  misc_RNA (1)...(19): siRNA sense strand
caaggugaucucagucauu

SEQ ID NO: 1995349 - RNA, 19 nt, Homo sapiens
  misc_RNA (1)...(19): siRNA sense strand
ccugggagccuucaucuuc

SEQ ID NO: 1995350 - RNA, 19 nt, Homo sapiens
  misc_RNA (1)...(19): siRNA sense strand
cagcaggacaagauuauag

SEQ ID NO: 1995351 - RNA, 19 nt, Homo sapiens
  misc_RNA (1)...(19): siRNA sense strand
gacaagauuauagcuguga

SEQ ID NO: 1995352 - RNA, 19 nt, Homo sapiens
  misc_RNA (1)...(19): siRNA sense strand
gaggugguaugggcugugu

SEQ ID NO: 1995353 - RNA, 19 nt, Homo sapiens
  misc_RNA (1)...(19): siRNA sense strand
gauggaagaggucaaacca

SEQ ID NO: 1995354 - RNA, 19 nt, Homo sapiens
  misc_RNA (1)...(19): siRNA sense strand
ggugaucucagucauugga

SEQ ID NO: 1995355 - RNA, 19 nt, Homo sapiens
  misc_RNA (1)...(19): siRNA sense strand
caggucagcaucaacaaug

SEQ ID NO: 1995356 - RNA, 19 nt, Homo sapiens
  misc_RNA (1)...(19): siRNA sense strand
caagcugacaggugugcua

SEQ ID NO: 1995357 - RNA, 19 nt, Homo sapiens
  misc_RNA (1)...(19): siRNA sense strand
gcauugccuuccuaaucau

SEQ ID NO: 1995358 - RNA, 19 nt, Homo sapiens
  misc_RNA (1)...(19): siRNA sense strand
gcaugcagcagccugaagu

SEQ ID NO: 1995359 - RNA, 19 nt, Homo sapiens
  misc_RNA (1)...(19): siRNA sense strand
ucaaugccaugcccaccau

SEQ ID NO: 1995360 - RNA, 19 nt, Homo sapiens
  misc_RNA (1)...(19): siRNA sense strand
cuggauggcuguguucaau

SEQ ID NO: 1995361 - RNA, 19 nt, Homo sapiens
  misc_RNA (1)...(19): siRNA sense strand
caccugcauugccuuccua

SEQ ID NO: 1995362 - RNA, 19 nt, Homo sapiens
  misc_RNA (1)...(19): siRNA sense strand
cagcuacggaguccucuug

SEQ ID NO: 1995363 - RNA, 19 nt, Homo sapiens
  misc_RNA (1)...(19): siRNA sense strand
ccagggagauugguuucca

SEQ ID NO: 1995364 - RNA, 19 nt, Homo sapiens
  misc_RNA (1)...(19): siRNA sense strand
cgucacagccaucguuauc

SEQ ID NO: 1995365 - RNA, 19 nt, Homo sapiens
  misc_RNA (1)...(19): siRNA sense strand
ugagauggaagaggucaaa

SEQ ID NO: 1995366 - RNA, 19 nt, Homo sapiens
  misc_RNA (1)...(19): siRNA sense strand
gggcugugccucauucaag

SEQ ID NO: 1995367 - RNA, 19 nt, Homo sapiens
  misc_RNA (1)...(19): siRNA sense strand
cuuuggagcugcuguggau

SEQ ID NO: 1995368 - RNA, 19 nt, Homo sapiens
  misc_RNA (1)...(19): siRNA sense strand
cagauggguaugcugguuu

SEQ ID NO: 1995369 - RNA, 19 nt, Homo sapiens
  misc_RNA (1)...(19): siRNA sense strand
ggcaccacuuccacacuug

SEQ ID NO: 1995370 - RNA, 19 nt, Homo sapiens
  misc_RNA (1)...(19): siRNA sense strand
gcgaccagcaggacaagau

SEQ ID NO: 1995371 - RNA, 19 nt, Homo sapiens
  misc_RNA (1)...(19): siRNA sense strand
gcucccaggccagcaauga

SEQ ID NO: 1995372 - RNA, 19 nt, Homo sapiens
  misc_RNA (1)...(19): siRNA sense strand
gugccucauucaagccaaa

SEQ ID NO: 1995373 - RNA, 19 nt, Homo sapiens
  misc_RNA (1)...(19): siRNA sense strand
aggcaccacuuccacacuu

SEQ ID NO: 1995374 - RNA, 19 nt, Homo sapiens
  misc_RNA (1)...(19): siRNA sense strand
cugcauugccuuccuaauc

SEQ ID NO: 1995375 - RNA, 19 nt, Homo sapiens
  misc_RNA (1)...(19): siRNA sense strand
gcucaccuccuacccuauc

SEQ ID NO: 1995376 - RNA, 19 nt, Homo sapiens
  misc_RNA (1)...(19): siRNA sense strand
cugacgugcuccuguccua

SEQ ID NO: 1995377 - RNA, 19 nt, Homo sapiens
  misc_RNA (1)...(19): siRNA sense strand
ccagcaggacaagauuaua

SEQ ID NO: 1995378 - RNA, 19 nt, Homo sapiens
  misc_RNA (1)...(19): siRNA sense strand
caucaguggccuugucauc

SEQ ID NO: 1995379 - RNA, 19 nt, Homo sapiens
  misc_RNA (1)...(19): siRNA sense strand
ccacagccaacgccaucuu

SEQ ID NO: 1995380 - RNA, 19 nt, Homo sapiens
  misc_RNA (1)...(19): siRNA sense strand
cuacagcgagugggacuug

SEQ ID NO: 1995381 - RNA, 19 nt, Homo sapiens
  misc_RNA (1)...(19): siRNA sense strand
ggugcaggguuacucaacu

SEQ ID NO: 1995382 - RNA, 19 nt, Homo sapiens
  misc_RNA (1)...(19): siRNA sense strand
ucacugccuuccucuucau

SEQ ID NO: 1995383 - RNA, 19 nt, Homo sapiens
  misc_RNA (1)...(19): siRNA sense strand
cgaccagcaggacaagauu

SEQ ID NO: 1995384 - RNA, 19 nt, Homo sapiens
  misc_RNA (1)...(19): siRNA sense strand
gcaccugcauugccuuccu

SEQ ID NO: 1995385 - RNA, 19 nt, Homo sapiens
  misc_RNA (1)...(19): siRNA sense strand
caagauuauagcugugaug

SEQ ID NO: 1995386 - RNA, 19 nt, Homo sapiens
  misc_RNA (1)...(19): siRNA sense strand
gcccaggucagcaucaaca

SEQ ID NO: 1995387 - RNA, 19 nt, Homo sapiens
  misc_RNA (1)...(19): siRNA sense strand
cagccaacgccaucuuugu

SEQ ID NO: 1995388 - RNA, 19 nt, Homo sapiens
  misc_RNA (1)...(19): siRNA sense strand
gcuacggaguccucuuggu

SEQ ID NO: 1995389 - RNA, 19 nt, Homo sapiens
  misc_RNA (1)...(19): siRNA sense strand
gacagcugccauggucaua

SEQ ID NO: 1995390 - RNA, 19 nt, Homo sapiens
  misc_RNA (1)...(19): siRNA sense strand
cagccaucguuaucaucaa

SEQ ID NO: 1995391 - RNA, 19 nt, Homo sapiens
  misc_RNA (1)...(19): siRNA sense strand
ggagaaaugugcagaguuc

SEQ ID NO: 1995392 - RNA, 19 nt, Homo sapiens
  misc_RNA (1)...(19): siRNA sense strand
gaacugugcuguuaacaag

SEQ ID NO: 1995393 - RNA, 19 nt, Homo sapiens
  misc_RNA (1)...(19): siRNA sense strand
gaaaggaaauagaaacaca

SEQ ID NO: 1995394 - RNA, 19 nt, Homo sapiens
  misc_RNA (1)...(19): siRNA sense strand
ucaaggagaucgccacaaa

SEQ ID NO: 1995395 - RNA, 19 nt, Homo sapiens
  misc_RNA (1)...(19): siRNA sense strand
agaagaagcugggaaguuu

SEQ ID NO: 1995396 - RNA, 19 nt, Homo sapiens
  misc_RNA (1)...(19): siRNA sense strand
caaccuggcuacugugauu

SEQ ID NO: 1995397 - RNA, 19 nt, Homo sapiens
  misc_RNA (1)...(19): siRNA sense strand
gaagaccuccgaauuucua

SEQ ID NO: 1995398 - RNA, 19 nt, Homo sapiens
  misc_RNA (1)...(19): siRNA sense strand
ggacuuccaccuacgauaa

SEQ ID NO: 1995399 - RNA, 19 nt, Homo sapiens
  misc_RNA (1)...(19): siRNA sense strand
aagaagaagucaaggaauu

SEQ ID NO: 1995400 - RNA, 19 nt, Homo sapiens
  misc_RNA (1)...(19): siRNA sense strand
ggaagaagaagucaaggaa

SEQ ID NO: 1995401 - RNA, 19 nt, Homo sapiens
  misc_RNA (1)...(19): siRNA sense strand
ggaaguuugucuuugaaau

SEQ ID NO: 1995402 - RNA, 19 nt, Homo sapiens
  misc_RNA (1)...(19): siRNA sense strand
gaucagagaccaugaaguc

SEQ ID NO: 1995403 - RNA, 19 nt, Homo sapiens
  misc_RNA (1)...(19): siRNA sense strand
gaaggaaaauuaugacguu

SEQ ID NO: 1995404 - RNA, 19 nt, Homo sapiens
  misc_RNA (1)...(19): siRNA sense strand
cacuguggcuucccuguua

SEQ ID NO: 1995405 - RNA, 19 nt, Homo sapiens
  misc_RNA (1)...(19): siRNA sense strand
aaacacagaagcaaaugua

SEQ ID NO: 1995406 - RNA, 19 nt, Homo sapiens
  misc_RNA (1)...(19): siRNA sense strand
caaagagugaugacuauga

SEQ ID NO: 1995407 - RNA, 19 nt, Homo sapiens
  misc_RNA (1)...(19): siRNA sense strand
ggaaauagaaacacagaag

SEQ ID NO: 1995408 - RNA, 19 nt, Homo sapiens
  misc_RNA (1)...(19): siRNA sense strand
gagaagaggaaauugauuc

SEQ ID NO: 1995409 - RNA, 19 nt, Homo sapiens
  misc_RNA (1)...(19): siRNA sense strand
ggacagacagcuucaguag

SEQ ID NO: 1995410 - RNA, 19 nt, Homo sapiens
  misc_RNA (1)...(19): siRNA sense strand
cgcagcagcucuacuacua

SEQ ID NO: 1995411 - RNA, 19 nt, Homo sapiens
  misc_RNA (1)...(19): siRNA sense strand
acagacagcuucaguagca

SEQ ID NO: 1995412 - RNA, 19 nt, Homo sapiens
  misc_RNA (1)...(19): siRNA sense strand
cuaccaggauguacaauca

SEQ ID NO: 1995413 - RNA, 19 nt, Homo sapiens
  misc_RNA (1)...(19): siRNA sense strand
aagaugggcuggcugaaga

SEQ ID NO: 1995414 - RNA, 19 nt, Homo sapiens
  misc_RNA (1)...(19): siRNA sense strand
gcaaauguaugaggaacag

SEQ ID NO: 1995415 - RNA, 19 nt, Homo sapiens
  misc_RNA (1)...(19): siRNA sense strand
cgaagacccugccgugauc

SEQ ID NO: 1995416 - RNA, 19 nt, Homo sapiens
  misc_RNA (1)...(19): siRNA sense strand
gcagguuccuacaugaaau

SEQ ID NO: 1995417 - RNA, 19 nt, Homo sapiens
  misc_RNA (1)...(19): siRNA sense strand
ggacucaaacacucccuaa

SEQ ID NO: 1995418 - RNA, 19 nt, Homo sapiens
  misc_RNA (1)...(19): siRNA sense strand
gaagaagucaaggaauuug

SEQ ID NO: 1995419 - RNA, 19 nt, Homo sapiens
  misc_RNA (1)...(19): siRNA sense strand
gggaggauguugagaagag

SEQ ID NO: 1995420 - RNA, 19 nt, Homo sapiens
  misc_RNA (1)...(19): siRNA sense strand
gauguacaaucaaggagau

SEQ ID NO: 1995421 - RNA, 19 nt, Homo sapiens
  misc_RNA (1)...(19): siRNA sense strand
caagagcuacgaaaggaaa

SEQ ID NO: 1995422 - RNA, 19 nt, Homo sapiens
  misc_RNA (1)...(19): siRNA sense strand
ggccagcgcuuggaugaga

SEQ ID NO: 1995423 - RNA, 19 nt, Homo sapiens
  misc_RNA (1)...(19): siRNA sense strand
gaaguuugucuuugaaauc

SEQ ID NO: 1995424 - RNA, 19 nt, Homo sapiens
  misc_RNA (1)...(19): siRNA sense strand
gaagaagaagucaaggaau

SEQ ID NO: 1995425 - RNA, 19 nt, Homo sapiens
  misc_RNA (1)...(19): siRNA sense strand
gagaucagccuccgcaaca

SEQ ID NO: 1995426 - RNA, 19 nt, Homo sapiens
  misc_RNA (1)...(19): siRNA sense strand
cacagaagcaaauguauga

SEQ ID NO: 1995427 - RNA, 19 nt, Homo sapiens
  misc_RNA (1)...(19): siRNA sense strand
ggaggacagcagcaaagua

SEQ ID NO: 1995428 - RNA, 19 nt, Homo sapiens
  misc_RNA (1)...(19): siRNA sense strand
gggcgcagcagcucuacua

SEQ ID NO: 1995429 - RNA, 19 nt, Homo sapiens
  misc_RNA (1)...(19): siRNA sense strand
gaagaacuggagaaggaaa

SEQ ID NO: 1995430 - RNA, 19 nt, Homo sapiens
  misc_RNA (1)...(19): siRNA sense strand
ggagaagaggaaauugauu

SEQ ID NO: 1995431 - RNA, 19 nt, Homo sapiens
  misc_RNA (1)...(19): siRNA sense strand
aaagagugaugacuaugau

SEQ ID NO: 1995432 - RNA, 19 nt, Homo sapiens
  misc_RNA (1)...(19): siRNA sense strand
ccucagauccaaagaguga

SEQ ID NO: 1995433 - RNA, 19 nt, Homo sapiens
  misc_RNA (1)...(19): siRNA sense strand
agaggaaauugauucuuug

SEQ ID NO: 1995434 - RNA, 19 nt, Homo sapiens
  misc_RNA (1)...(19): siRNA sense strand
ggaugagacuguggccuau

SEQ ID NO: 1995435 - RNA, 19 nt, Homo sapiens
  misc_RNA (1)...(19): siRNA sense strand
caaaggcucagcaggaguu

SEQ ID NO: 1995436 - RNA, 19 nt, Homo sapiens
  misc_RNA (1)...(19): siRNA sense strand
gaagaagcugggaaguuug

SEQ ID NO: 1995437 - RNA, 19 nt, Homo sapiens
  misc_RNA (1)...(19): siRNA sense strand
gaggaugguccaagagcua

SEQ ID NO: 1995438 - RNA, 19 nt, Homo sapiens
  misc_RNA (1)...(19): siRNA sense strand
ggaagccagugcacucucu

SEQ ID NO: 1995439 - RNA, 19 nt, Homo sapiens
  misc_RNA (1)...(19): siRNA sense strand
acuauagucuccugagcua

SEQ ID NO: 1995440 - RNA, 19 nt, Homo sapiens
  misc_RNA (1)...(19): siRNA sense strand
ggaggaguggguuaaauuc

SEQ ID NO: 1995441 - RNA, 19 nt, Homo sapiens
  misc_RNA (1)...(19): siRNA sense strand
gaagcaaauguaugaggaa

SEQ ID NO: 1995442 - RNA, 19 nt, Homo sapiens
  misc_RNA (1)...(19): siRNA sense strand
agagguccaucgugaagaa

SEQ ID NO: 1995443 - RNA, 19 nt, Homo sapiens
  misc_RNA (1)...(19): siRNA sense strand
gaagggcacaggagaacga

SEQ ID NO: 1995444 - RNA, 19 nt, Homo sapiens
  misc_RNA (1)...(19): siRNA sense strand
gcugggaaguuugucuuug

SEQ ID NO: 1995445 - RNA, 19 nt, Homo sapiens
  misc_RNA (1)...(19): siRNA sense strand
cugaagaccuccgaauuuc

SEQ ID NO: 1995446 - RNA, 19 nt, Homo sapiens
  misc_RNA (1)...(19): siRNA sense strand
gaaaugugcagaguucauc

SEQ ID NO: 1995447 - RNA, 19 nt, Homo sapiens
  misc_RNA (1)...(19): siRNA sense strand
gacaagcgacucugauaca

SEQ ID NO: 1995448 - RNA, 19 nt, Homo sapiens
  misc_RNA (1)...(19): siRNA sense strand
gaaacacagaagcaaaugu

SEQ ID NO: 1995449 - RNA, 19 nt, Homo sapiens
  misc_RNA (1)...(19): siRNA sense strand
cagcagcucuacuacuaca

SEQ ID NO: 1995450 - RNA, 19 nt, Homo sapiens
  misc_RNA (1)...(19): siRNA sense strand
gcaaaauggagaucuuuaa

SEQ ID NO: 1995451 - RNA, 19 nt, Homo sapiens
  misc_RNA (1)...(19): siRNA sense strand
gaggacagcagcaaaguac

SEQ ID NO: 1995452 - RNA, 19 nt, Homo sapiens
  misc_RNA (1)...(19): siRNA sense strand
cugggaaguuugucuuuga

SEQ ID NO: 1995453 - RNA, 19 nt, Homo sapiens
  misc_RNA (1)...(19): siRNA sense strand
gaagucaaggaauuuguca

SEQ ID NO: 1995454 - RNA, 19 nt, Homo sapiens
  misc_RNA (1)...(19): siRNA sense strand
gcuacgaaaggaaauagaa

SEQ ID NO: 1995455 - RNA, 19 nt, Homo sapiens
  misc_RNA (1)...(19): siRNA sense strand
acugaagaccuccgaauuu

SEQ ID NO: 1995456 - RNA, 19 nt, Homo sapiens
  misc_RNA (1)...(19): siRNA sense strand
gagauggaggaguggguua

SEQ ID NO: 1995457 - RNA, 19 nt, Homo sapiens
  misc_RNA (1)...(19): siRNA sense strand
uccaaagagugaugacuau

SEQ ID NO: 1995458 - RNA, 19 nt, Homo sapiens
  misc_RNA (1)...(19): siRNA sense strand
agaagaagucaaggaauuu

SEQ ID NO: 1995459 - RNA, 19 nt, Homo sapiens
  misc_RNA (1)...(19): siRNA sense strand
gaaaaugcaaucucguaaa

SEQ ID NO: 1995460 - RNA, 19 nt, Homo sapiens
  misc_RNA (1)...(19): siRNA sense strand
cagaagaagcugggaaguu

SEQ ID NO: 1995461 - RNA, 19 nt, Homo sapiens
  misc_RNA (1)...(19): siRNA sense strand
gcagagguccaucgugaag

SEQ ID NO: 1995462 - RNA, 19 nt, Homo sapiens
  misc_RNA (1)...(19): siRNA sense strand
uggacaaccuggcuacugu

SEQ ID NO: 1995463 - RNA, 19 nt, Homo sapiens
  misc_RNA (1)...(19): siRNA sense strand
uccaagagcuacgaaagga

SEQ ID NO: 1995464 - RNA, 19 nt, Homo sapiens
  misc_RNA (1)...(19): siRNA sense strand
gaugaucagagaccaugaa

SEQ ID NO: 1995465 - RNA, 19 nt, Homo sapiens
  misc_RNA (1)...(19): siRNA sense strand
gugggcagcucacgaaugc

SEQ ID NO: 1995466 - RNA, 19 nt, Homo sapiens
  misc_RNA (1)...(19): siRNA sense strand
gaucagccuccgcaacaug

SEQ ID NO: 1995467 - RNA, 19 nt, Homo sapiens
  misc_RNA (1)...(19): siRNA sense strand
uagaaacacagaagcaaau

SEQ ID NO: 1995468 - RNA, 19 nt, Homo sapiens
  misc_RNA (1)...(19): siRNA sense strand
gcugaacugugcuguuaac

SEQ ID NO: 1995469 - RNA, 19 nt, Homo sapiens
  misc_RNA (1)...(19): siRNA sense strand
cgaaugcggaugaggcaaa

SEQ ID NO: 1995470 - RNA, 19 nt, Homo sapiens
  misc_RNA (1)...(19): siRNA sense strand
cuacgaaaggaaauagaaa

SEQ ID NO: 1995471 - RNA, 19 nt, Homo sapiens
  misc_RNA (1)...(19): siRNA sense strand
uguaugaggaacagauuaa

SEQ ID NO: 1995472 - RNA, 19 nt, Homo sapiens
  misc_RNA (1)...(19): siRNA sense strand
gaaugcggaugaggcaaag

SEQ ID NO: 1995473 - RNA, 19 nt, Homo sapiens
  misc_RNA (1)...(19): siRNA sense strand
ggaaaauuaugacguuugg

SEQ ID NO: 1995474 - RNA, 19 nt, Homo sapiens
  misc_RNA (1)...(19): siRNA sense strand
agaacuggcagcagaggua

SEQ ID NO: 1995475 - RNA, 19 nt, Homo sapiens
  misc_RNA (1)...(19): siRNA sense strand
gggcacaggagaacgaugu

SEQ ID NO: 1995476 - RNA, 19 nt, Homo sapiens
  misc_RNA (1)...(19): siRNA sense strand
ggaaaaugcaaucucguaa

SEQ ID NO: 1995477 - RNA, 19 nt, Homo sapiens
  misc_RNA (1)...(19): siRNA sense strand
acaagcgacucugauacaa

SEQ ID NO: 1995478 - RNA, 19 nt, Homo sapiens
  misc_RNA (1)...(19): siRNA sense strand
caagaugaguguggacaac

SEQ ID NO: 1995479 - RNA, 19 nt, Homo sapiens
  misc_RNA (1)...(19): siRNA sense strand
ugaagcagcucuccauccu

SEQ ID NO: 1995480 - RNA, 19 nt, Homo sapiens
  misc_RNA (1)...(19): siRNA sense strand
uacaugaaauacagcugaa

SEQ ID NO: 1995481 - RNA, 19 nt, Homo sapiens
  misc_RNA (1)...(19): siRNA sense strand
guuccuacaugaaauacag

SEQ ID NO: 1995482 - RNA, 19 nt, Homo sapiens
  misc_RNA (1)...(19): siRNA sense strand
acacagaagcaaauguaug

SEQ ID NO: 1995483 - RNA, 19 nt, Homo sapiens
  misc_RNA (1)...(19): siRNA sense strand
ucccuaaccggaaauguuu

SEQ ID NO: 1995484 - RNA, 19 nt, Homo sapiens
  misc_RNA (1)...(19): siRNA sense strand
gcaugacaagcgacucuga

SEQ ID NO: 1995485 - RNA, 19 nt, Homo sapiens
  misc_RNA (1)...(19): siRNA sense strand
gcugggaugccacugaaga

SEQ ID NO: 1995486 - RNA, 19 nt, Homo sapiens
  misc_RNA (1)...(19): siRNA sense strand
agagugaugacuaugauga

SEQ ID NO: 1995487 - RNA, 19 nt, Homo sapiens
  misc_RNA (1)...(19): siRNA sense strand
ggacuccucagauccaaag

SEQ ID NO: 1995488 - RNA, 19 nt, Homo sapiens
  misc_RNA (1)...(19): siRNA sense strand
cagguuccuacaugaaaua

SEQ ID NO: 1995489 - RNA, 19 nt, Homo sapiens
  misc_RNA (1)...(19): siRNA sense strand
uggaggaguggguuaaauu

SEQ ID NO: 1995490 - RNA, 19 nt, Homo sapiens
  misc_RNA (1)...(19): siRNA sense strand
gcucagcaggaguugauga

SEQ ID NO: 1995491 - RNA, 19 nt, Homo sapiens
  misc_RNA (1)...(19): siRNA sense strand
ggacagaucagcaguaugu

SEQ ID NO: 1995492 - RNA, 19 nt, Homo sapiens
  misc_RNA (1)...(19): siRNA sense strand
guagaccucuuucguaaug

SEQ ID NO: 1995493 - RNA, 19 nt, Homo sapiens
  misc_RNA (1)...(19): siRNA sense strand
caagugguauucccauauu

SEQ ID NO: 1995494 - RNA, 19 nt, Homo sapiens
  misc_RNA (1)...(19): siRNA sense strand
gcaaauggccaagaccuaa

SEQ ID NO: 1995495 - RNA, 19 nt, Homo sapiens
  misc_RNA (1)...(19): siRNA sense strand
gaauggaccuauaggacau

SEQ ID NO: 1995496 - RNA, 19 nt, Homo sapiens
  misc_RNA (1)...(19): siRNA sense strand
gaacggaagaguggauuau

SEQ ID NO: 1995497 - RNA, 19 nt, Homo sapiens
  misc_RNA (1)...(19): siRNA sense strand
caacgacaguggcaucuac

SEQ ID NO: 1995498 - RNA, 19 nt, Homo sapiens
  misc_RNA (1)...(19): siRNA sense strand
acggaagaguggauuauuu

SEQ ID NO: 1995499 - RNA, 19 nt, Homo sapiens
  misc_RNA (1)...(19): siRNA sense strand
cuguagaccucuuucguaa

SEQ ID NO: 1995500 - RNA, 19 nt, Homo sapiens
  misc_RNA (1)...(19): siRNA sense strand
gcuguagaccucuuucgua

SEQ ID NO: 1995501 - RNA, 19 nt, Homo sapiens
  misc_RNA (1)...(19): siRNA sense strand
ccaggagggugauaagauc

SEQ ID NO: 1995502 - RNA, 19 nt, Homo sapiens
  misc_RNA (1)...(19): siRNA sense strand
gcaccaggaugcuguagac

SEQ ID NO: 1995503 - RNA, 19 nt, Homo sapiens
  misc_RNA (1)...(19): siRNA sense strand
uggauuauuuggucacuga

SEQ ID NO: 1995504 - RNA, 19 nt, Homo sapiens
  misc_RNA (1)...(19): siRNA sense strand
uauaggacaucgaggugaa

SEQ ID NO: 1995505 - RNA, 19 nt, Homo sapiens
  misc_RNA (1)...(19): siRNA sense strand
gguuacaggugcagaaugg

SEQ ID NO: 1995506 - RNA, 19 nt, Homo sapiens
  misc_RNA (1)...(19): siRNA sense strand
ggugcagaauggaccuaua

SEQ ID NO: 1995507 - RNA, 19 nt, Homo sapiens
  misc_RNA (1)...(19): siRNA sense strand
gcagaauggaccuauagga

SEQ ID NO: 1995508 - RNA, 19 nt, Homo sapiens
  misc_RNA (1)...(19): siRNA sense strand
caaauggccaagaccuaaa

SEQ ID NO: 1995509 - RNA, 19 nt, Homo sapiens
  misc_RNA (1)...(19): siRNA sense strand
auaagauccuuucggcaaa

SEQ ID NO: 1995510 - RNA, 19 nt, Homo sapiens
  misc_RNA (1)...(19): siRNA sense strand
ccugggcuuucaugagaua

SEQ ID NO: 1995511 - RNA, 19 nt, Homo sapiens
  misc_RNA (1)...(19): siRNA sense strand
gaaggggacccaaguggua

SEQ ID NO: 1995512 - RNA, 19 nt, Homo sapiens
  misc_RNA (1)...(19): siRNA sense strand
cggaagaguggauuauuug

SEQ ID NO: 1995513 - RNA, 19 nt, Homo sapiens
  misc_RNA (1)...(19): siRNA sense strand
gaagaguggauuauuuggu

SEQ ID NO: 1995514 - RNA, 19 nt, Homo sapiens
  misc_RNA (1)...(19): siRNA sense strand
uaagauccuuucggcaaau

SEQ ID NO: 1995515 - RNA, 19 nt, Homo sapiens
  misc_RNA (1)...(19): siRNA sense strand
gccaagaccuaaagaaccu

SEQ ID NO: 1995516 - RNA, 19 nt, Homo sapiens
  misc_RNA (1)...(19): siRNA sense strand
ccucagggcugggcuucaa

SEQ ID NO: 1995517 - RNA, 19 nt, Homo sapiens
  misc_RNA (1)...(19): siRNA sense strand
cccaagugguauucccaua

SEQ ID NO: 1995518 - RNA, 19 nt, Homo sapiens
  misc_RNA (1)...(19): siRNA sense strand
ccaagugguauucccauau

SEQ ID NO: 1995519 - RNA, 19 nt, Homo sapiens
  misc_RNA (1)...(19): siRNA sense strand
gagauaccggcaacaacuu

SEQ ID NO: 1995520 - RNA, 19 nt, Homo sapiens
  misc_RNA (1)...(19): siRNA sense strand
agugguauucccauauuua

SEQ ID NO: 1995521 - RNA, 19 nt, Homo sapiens
  misc_RNA (1)...(19): siRNA sense strand
cuacgucagccgcaucaaa

SEQ ID NO: 1995522 - RNA, 19 nt, Homo sapiens
  misc_RNA (1)...(19): siRNA sense strand
ggcaaauggccaagaccua

SEQ ID NO: 1995523 - RNA, 19 nt, Homo sapiens
  misc_RNA (1)...(19): siRNA sense strand
ggagggugauaagauccuu

SEQ ID NO: 1995524 - RNA, 19 nt, Homo sapiens
  misc_RNA (1)...(19): siRNA sense strand
ugggacagaucagcaguau

SEQ ID NO: 1995525 - RNA, 19 nt, Homo sapiens
  misc_RNA (1)...(19): siRNA sense strand
gugcagaauggaccuauag

SEQ ID NO: 1995526 - RNA, 19 nt, Homo sapiens
  misc_RNA (1)...(19): siRNA sense strand
ggaagaguggauuauuugg

SEQ ID NO: 1995527 - RNA, 19 nt, Homo sapiens
  misc_RNA (1)...(19): siRNA sense strand
ucacugaggaagagaucaa

SEQ ID NO: 1995528 - RNA, 19 nt, Homo sapiens
  misc_RNA (1)...(19): siRNA sense strand
caucgucggugggacagau

SEQ ID NO: 1995529 - RNA, 19 nt, Homo sapiens
  misc_RNA (1)...(19): siRNA sense strand
gugguauucccauauuuau

SEQ ID NO: 1995530 - RNA, 19 nt, Homo sapiens
  misc_RNA (1)...(19): siRNA sense strand
ugagauaccggcaacaacu

SEQ ID NO: 1995531 - RNA, 19 nt, Homo sapiens
  misc_RNA (1)...(19): siRNA sense strand
caugagauaccggcaacaa

SEQ ID NO: 1995532 - RNA, 19 nt, Homo sapiens
  misc_RNA (1)...(19): siRNA sense strand
aagugguauucccauauuu

SEQ ID NO: 1995533 - RNA, 19 nt, Homo sapiens
  misc_RNA (1)...(19): siRNA sense strand
cgucagccgcaucaaagaa

SEQ ID NO: 1995534 - RNA, 19 nt, Homo sapiens
  misc_RNA (1)...(19): siRNA sense strand
gucagccgcaucaaagaaa

SEQ ID NO: 1995535 - RNA, 19 nt, Homo sapiens
  misc_RNA (1)...(19): siRNA sense strand
ugagaaagauuaagcauga

SEQ ID NO: 1995536 - RNA, 19 nt, Homo sapiens
  misc_RNA (1)...(19): siRNA sense strand
ccagaaaccuuacagcaaa

SEQ ID NO: 1995537 - RNA, 19 nt, Homo sapiens
  misc_RNA (1)...(19): siRNA sense strand
ugacacagcccucaacaaa

SEQ ID NO: 1995538 - RNA, 19 nt, Homo sapiens
  misc_RNA (1)...(19): siRNA sense strand
ugaaguguaucccuaagaa

SEQ ID NO: 1995539 - RNA, 19 nt, Homo sapiens
  misc_RNA (1)...(19): siRNA sense strand
caaaucaccuguacuuggu

SEQ ID NO: 1995540 - RNA, 19 nt, Homo sapiens
  misc_RNA (1)...(19): siRNA sense strand
gaaagcagcauagagaaug

SEQ ID NO: 1995541 - RNA, 19 nt, Homo sapiens
  misc_RNA (1)...(19): siRNA sense strand
cagcauagagaaugagaua

SEQ ID NO: 1995542 - RNA, 19 nt, Homo sapiens
  misc_RNA (1)...(19): siRNA sense strand
aaagcaagcugaagacauc

SEQ ID NO: 1995543 - RNA, 19 nt, Homo sapiens
  misc_RNA (1)...(19): siRNA sense strand
ugagauagccguccugaga

SEQ ID NO: 1995544 - RNA, 19 nt, Homo sapiens
  misc_RNA (1)...(19): siRNA sense strand
gaugaggaguccaaaauaa

SEQ ID NO: 1995545 - RNA, 19 nt, Homo sapiens
  misc_RNA (1)...(19): siRNA sense strand
gaucagugacuuuggauug

SEQ ID NO: 1995546 - RNA, 19 nt, Homo sapiens
  misc_RNA (1)...(19): siRNA sense strand
gcagcagccuggacaguuc

SEQ ID NO: 1995547 - RNA, 19 nt, Homo sapiens
  misc_RNA (1)...(19): siRNA sense strand
ccgaaaaucucuuguacua

SEQ ID NO: 1995548 - RNA, 19 nt, Homo sapiens
  misc_RNA (1)...(19): siRNA sense strand
ggagaaggacccgaauaaa

SEQ ID NO: 1995549 - RNA, 19 nt, Homo sapiens
  misc_RNA (1)...(19): siRNA sense strand
ggaagacauuuaugaaagc

SEQ ID NO: 1995550 - RNA, 19 nt, Homo sapiens
  misc_RNA (1)...(19): siRNA sense strand
ggaaagcagcauagagaau

SEQ ID NO: 1995551 - RNA, 19 nt, Homo sapiens
  misc_RNA (1)...(19): siRNA sense strand
gggcaaaggagaugugaug

SEQ ID NO: 1995552 - RNA, 19 nt, Homo sapiens
  misc_RNA (1)...(19): siRNA sense strand
uggaagacauuuaugaaag

SEQ ID NO: 1995553 - RNA, 19 nt, Homo sapiens
  misc_RNA (1)...(19): siRNA sense strand
cugaagacaucaagaagau

SEQ ID NO: 1995554 - RNA, 19 nt, Homo sapiens
  misc_RNA (1)...(19): siRNA sense strand
gagaaggacccgaauaaaa

SEQ ID NO: 1995555 - RNA, 19 nt, Homo sapiens
  misc_RNA (1)...(19): siRNA sense strand
guacuacagucaagaugag

SEQ ID NO: 1995556 - RNA, 19 nt, Homo sapiens
  misc_RNA (1)...(19): siRNA sense strand
gaagacaucaagaagaucu

SEQ ID NO: 1995557 - RNA, 19 nt, Homo sapiens
  misc_RNA (1)...(19): siRNA sense strand
ggaaccugauggagaagga

SEQ ID NO: 1995558 - RNA, 19 nt, Homo sapiens
  misc_RNA (1)...(19): siRNA sense strand
gagaaagauuaagcaugaa

SEQ ID NO: 1995559 - RNA, 19 nt, Homo sapiens
  misc_RNA (1)...(19): siRNA sense strand
gcucuuugcugugaagugu

SEQ ID NO: 1995560 - RNA, 19 nt, Homo sapiens
  misc_RNA (1)...(19): siRNA sense strand
uguacuaucuccacagaau

SEQ ID NO: 1995561 - RNA, 19 nt, Homo sapiens
  misc_RNA (1)...(19): siRNA sense strand
aaagcagcauagagaauga

SEQ ID NO: 1995562 - RNA, 19 nt, Homo sapiens
  misc_RNA (1)...(19): siRNA sense strand
caaggcggaauaugaguuu

SEQ ID NO: 1995563 - RNA, 19 nt, Homo sapiens
  misc_RNA (1)...(19): siRNA sense strand
gcccaaaucaccuguacuu

SEQ ID NO: 1995564 - RNA, 19 nt, Homo sapiens
  misc_RNA (1)...(19): siRNA sense strand
gagauagccguccugagaa

SEQ ID NO: 1995565 - RNA, 19 nt, Homo sapiens
  misc_RNA (1)...(19): siRNA sense strand
uggagaaggacccgaauaa

SEQ ID NO: 1995566 - RNA, 19 nt, Homo sapiens
  misc_RNA (1)...(19): siRNA sense strand
gggcaaggaaagcagcaua

SEQ ID NO: 1995567 - RNA, 19 nt, Homo sapiens
  misc_RNA (1)...(19): siRNA sense strand
gcugaagacaucaagaaga

SEQ ID NO: 1995568 - RNA, 19 nt, Homo sapiens
  misc_RNA (1)...(19): siRNA sense strand
agauagccguccugagaaa

SEQ ID NO: 1995569 - RNA, 19 nt, Homo sapiens
  misc_RNA (1)...(19): siRNA sense strand
gcaaggaaagcagcauaga

SEQ ID NO: 1995570 - RNA, 19 nt, Homo sapiens
  misc_RNA (1)...(19): siRNA sense strand
gcaacuggcaagcucuuug

SEQ ID NO: 1995571 - RNA, 19 nt, Homo sapiens
  misc_RNA (1)...(19): siRNA sense strand
aaggaaagcagcauagaga

SEQ ID NO: 1995572 - RNA, 19 nt, Homo sapiens
  misc_RNA (1)...(19): siRNA sense strand
ccaaaauaaugaucaguga

SEQ ID NO: 1995573 - RNA, 19 nt, Homo sapiens
  misc_RNA (1)...(19): siRNA sense strand
gcaaaggagaugugauguc

SEQ ID NO: 1995574 - RNA, 19 nt, Homo sapiens
  misc_RNA (1)...(19): siRNA sense strand
cuaugucgcuccugaaguc

SEQ ID NO: 1995575 - RNA, 19 nt, Homo sapiens
  misc_RNA (1)...(19): siRNA sense strand
aaauauuguugcccuggaa

SEQ ID NO: 1995576 - RNA, 19 nt, Homo sapiens
  misc_RNA (1)...(19): siRNA sense strand
gagaagggguuuuauacag

SEQ ID NO: 1995577 - RNA, 19 nt, Homo sapiens
  misc_RNA (1)...(19): siRNA sense strand
gagcaaauggagacaagca

SEQ ID NO: 1995578 - RNA, 19 nt, Homo sapiens
  misc_RNA (1)...(19): siRNA sense strand
aaugaucagugacuuugga

SEQ ID NO: 1995579 - RNA, 19 nt, Homo sapiens
  misc_RNA (1)...(19): siRNA sense strand
ggacaguucaaaugcaagu

SEQ ID NO: 1995580 - RNA, 19 nt, Homo sapiens
  misc_RNA (1)...(19): siRNA sense strand
gcgcugaagggcaaggaaa

SEQ ID NO: 1995581 - RNA, 19 nt, Homo sapiens
  misc_RNA (1)...(19): siRNA sense strand
cguguacuaucuccacaga

SEQ ID NO: 1995582 - RNA, 19 nt, Homo sapiens
  misc_RNA (1)...(19): siRNA sense strand
gcauagagaaugagauagc

SEQ ID NO: 1995583 - RNA, 19 nt, Homo sapiens
  misc_RNA (1)...(19): siRNA sense strand
cugaaguccucgcccagaa

SEQ ID NO: 1995584 - RNA, 19 nt, Homo sapiens
  misc_RNA (1)...(19): siRNA sense strand
aagcugaagacaucaagaa

SEQ ID NO: 1995585 - RNA, 19 nt, Homo sapiens
  misc_RNA (1)...(19): siRNA sense strand
cagaaaccuuacagcaaag

SEQ ID NO: 1995586 - RNA, 19 nt, Homo sapiens
  misc_RNA (1)...(19): siRNA sense strand
gcacucugauccgccaagu

SEQ ID NO: 1995587 - RNA, 19 nt, Homo sapiens
  misc_RNA (1)...(19): siRNA sense strand
gguuuuagcugaagagaag

SEQ ID NO: 1995588 - RNA, 19 nt, Homo sapiens
  misc_RNA (1)...(19): siRNA sense strand
caagcucuuugcugugaag

SEQ ID NO: 1995589 - RNA, 19 nt, Homo sapiens
  misc_RNA (1)...(19): siRNA sense strand
caguucaaaugcaaguguu

SEQ ID NO: 1995590 - RNA, 19 nt, Homo sapiens
  misc_RNA (1)...(19): siRNA sense strand
agagcuguuugaccggaua

SEQ ID NO: 1995591 - RNA, 19 nt, Homo sapiens
  misc_RNA (1)...(19): siRNA sense strand
caaggaaagcagcauagag

SEQ ID NO: 1995592 - RNA, 19 nt, Homo sapiens
  misc_RNA (1)...(19): siRNA sense strand
ccuggaagacauuuaugaa

SEQ ID NO: 1995593 - RNA, 19 nt, Homo sapiens
  misc_RNA (1)...(19): siRNA sense strand
aagagcaaauggagacaag

SEQ ID NO: 1995594 - RNA, 19 nt, Homo sapiens
  misc_RNA (1)...(19): siRNA sense strand
cuggaagacauuuaugaaa

SEQ ID NO: 1995595 - RNA, 19 nt, Homo sapiens
  misc_RNA (1)...(19): siRNA sense strand
ugaaguccucgcccagaaa

SEQ ID NO: 1995596 - RNA, 19 nt, Homo sapiens
  misc_RNA (1)...(19): siRNA sense strand
gaaggacccgaauaaaaga

SEQ ID NO: 1995597 - RNA, 19 nt, Homo sapiens
  misc_RNA (1)...(19): siRNA sense strand
ggagugauugccuacaucu

SEQ ID NO: 1995598 - RNA, 19 nt, Homo sapiens
  misc_RNA (1)...(19): siRNA sense strand
gaaguguaucccuaagaag

SEQ ID NO: 1995599 - RNA, 19 nt, Homo sapiens
  misc_RNA (1)...(19): siRNA sense strand
cuggacaguucaaaugcaa

SEQ ID NO: 1995600 - RNA, 19 nt, Homo sapiens
  misc_RNA (1)...(19): siRNA sense strand
uucggaaccugauggagaa

SEQ ID NO: 1995601 - RNA, 19 nt, Homo sapiens
  misc_RNA (1)...(19): siRNA sense strand
agugauugccuacaucuug

SEQ ID NO: 1995602 - RNA, 19 nt, Homo sapiens
  misc_RNA (1)...(19): siRNA sense strand
cccagaaaccuuacagcaa

SEQ ID NO: 1995603 - RNA, 19 nt, Homo sapiens
  misc_RNA (1)...(19): siRNA sense strand
guacuaucuccacagaaug

SEQ ID NO: 1995604 - RNA, 19 nt, Homo sapiens
  misc_RNA (1)...(19): siRNA sense strand
auggaucgcuggugacaca

SEQ ID NO: 1995605 - RNA, 19 nt, Homo sapiens
  misc_RNA (1)...(19): siRNA sense strand
cgaagugguuuuagcugaa

SEQ ID NO: 1995606 - RNA, 19 nt, Homo sapiens
  misc_RNA (1)...(19): siRNA sense strand
ucaaggcggaauaugaguu

SEQ ID NO: 1995607 - RNA, 19 nt, Homo sapiens
  misc_RNA (1)...(19): siRNA sense strand
ggagggcaaaggagaugug

SEQ ID NO: 1995608 - RNA, 19 nt, Homo sapiens
  misc_RNA (1)...(19): siRNA sense strand
gaaguccucgcccagaaac

SEQ ID NO: 1995609 - RNA, 19 nt, Homo sapiens
  misc_RNA (1)...(19): siRNA sense strand
ucuuugcugugaaguguau

SEQ ID NO: 1995610 - RNA, 19 nt, Homo sapiens
  misc_RNA (1)...(19): siRNA sense strand
gccguccugagaaagauua

SEQ ID NO: 1995611 - RNA, 19 nt, Homo sapiens
  misc_RNA (1)...(19): siRNA sense strand
ggcagcagccuggacaguu

SEQ ID NO: 1995612 - RNA, 19 nt, Homo sapiens
  misc_RNA (1)...(19): siRNA sense strand
aaggaugccagcacucuga

SEQ ID NO: 1995613 - RNA, 19 nt, Homo sapiens
  misc_RNA (1)...(19): siRNA sense strand
agaagggguuuuauacaga

SEQ ID NO: 1995614 - RNA, 19 nt, Homo sapiens
  misc_RNA (1)...(19): siRNA sense strand
gcaagcugaagacaucaag

SEQ ID NO: 1995615 - RNA, 19 nt, Homo sapiens
  misc_RNA (1)...(19): siRNA sense strand
aaaugacuccaagcucuuu

SEQ ID NO: 1995616 - RNA, 19 nt, Homo sapiens
  misc_RNA (1)...(19): siRNA sense strand
gugaaguguaucccuaaga

SEQ ID NO: 1995617 - RNA, 19 nt, Homo sapiens
  misc_RNA (1)...(19): siRNA sense strand
auaaugaucagugacuuug

SEQ ID NO: 1995618 - RNA, 19 nt, Homo sapiens
  misc_RNA (1)...(19): siRNA sense strand
ugagaaagauuaagcauga

SEQ ID NO: 1995619 - RNA, 19 nt, Homo sapiens
  misc_RNA (1)...(19): siRNA sense strand
ccagaaaccuuacagcaaa

SEQ ID NO: 1995620 - RNA, 19 nt, Homo sapiens
  misc_RNA (1)...(19): siRNA sense strand
ugacacagcccucaacaaa

SEQ ID NO: 1995621 - RNA, 19 nt, Homo sapiens
  misc_RNA (1)...(19): siRNA sense strand
ugaaguguaucccuaagaa

SEQ ID NO: 1995622 - RNA, 19 nt, Homo sapiens
  misc_RNA (1)...(19): siRNA sense strand
caaaucaccuguacuuggu

SEQ ID NO: 1995623 - RNA, 19 nt, Homo sapiens
  misc_RNA (1)...(19): siRNA sense strand
gaaagcagcauagagaaug

SEQ ID NO: 1995624 - RNA, 19 nt, Homo sapiens
  misc_RNA (1)...(19): siRNA sense strand
cagcauagagaaugagaua

SEQ ID NO: 1995625 - RNA, 19 nt, Homo sapiens
  misc_RNA (1)...(19): siRNA sense strand
aaagcaagcugaagacauc

SEQ ID NO: 1995626 - RNA, 19 nt, Homo sapiens
  misc_RNA (1)...(19): siRNA sense strand
ugagauagccguccugaga

SEQ ID NO: 1995627 - RNA, 19 nt, Homo sapiens
  misc_RNA (1)...(19): siRNA sense strand
gaugaggaguccaaaauaa

SEQ ID NO: 1995628 - RNA, 19 nt, Homo sapiens
  misc_RNA (1)...(19): siRNA sense strand
gaucagugacuuuggauug

SEQ ID NO: 1995629 - RNA, 19 nt, Homo sapiens
  misc_RNA (1)...(19): siRNA sense strand
gcagcagccuggacaguuc

SEQ ID NO: 1995630 - RNA, 19 nt, Homo sapiens
  misc_RNA (1)...(19): siRNA sense strand
ccgaaaaucucuuguacua

SEQ ID NO: 1995631 - RNA, 19 nt, Homo sapiens
  misc_RNA (1)...(19): siRNA sense strand
ggagaaggacccgaauaaa

SEQ ID NO: 1995632 - RNA, 19 nt, Homo sapiens
  misc_RNA (1)...(19): siRNA sense strand
ggaagacauuuaugaaagc

SEQ ID NO: 1995633 - RNA, 19 nt, Homo sapiens
  misc_RNA (1)...(19): siRNA sense strand
ggaaagcagcauagagaau

SEQ ID NO: 1995634 - RNA, 19 nt, Homo sapiens
  misc_RNA (1)...(19): siRNA sense strand
gggcaaaggagaugugaug

SEQ ID NO: 1995635 - RNA, 19 nt, Homo sapiens
  misc_RNA (1)...(19): siRNA sense strand
uggaagacauuuaugaaag

SEQ ID NO: 1995636 - RNA, 19 nt, Homo sapiens
  misc_RNA (1)...(19): siRNA sense strand
cugaagacaucaagaagau

SEQ ID NO: 1995637 - RNA, 19 nt, Homo sapiens
  misc_RNA (1)...(19): siRNA sense strand
gagaaggacccgaauaaaa

SEQ ID NO: 1995638 - RNA, 19 nt, Homo sapiens
  misc_RNA (1)...(19): siRNA sense strand
guacuacagucaagaugag

SEQ ID NO: 1995639 - RNA, 19 nt, Homo sapiens
  misc_RNA (1)...(19): siRNA sense strand
gaagacaucaagaagaucu

SEQ ID NO: 1995640 - RNA, 19 nt, Homo sapiens
  misc_RNA (1)...(19): siRNA sense strand
ggaaccugauggagaagga

SEQ ID NO: 1995641 - RNA, 19 nt, Homo sapiens
  misc_RNA (1)...(19): siRNA sense strand
gagaaagauuaagcaugaa

SEQ ID NO: 1995642 - RNA, 19 nt, Homo sapiens
  misc_RNA (1)...(19): siRNA sense strand
gcucuuugcugugaagugu

SEQ ID NO: 1995643 - RNA, 19 nt, Homo sapiens
  misc_RNA (1)...(19): siRNA sense strand
uguacuaucuccacagaau

SEQ ID NO: 1995644 - RNA, 19 nt, Homo sapiens
  misc_RNA (1)...(19): siRNA sense strand
aaagcagcauagagaauga

SEQ ID NO: 1995645 - RNA, 19 nt, Homo sapiens
  misc_RNA (1)...(19): siRNA sense strand
caaggcggaauaugaguuu

SEQ ID NO: 1995646 - RNA, 19 nt, Homo sapiens
  misc_RNA (1)...(19): siRNA sense strand
gcccaaaucaccuguacuu

SEQ ID NO: 1995647 - RNA, 19 nt, Homo sapiens
  misc_RNA (1)...(19): siRNA sense strand
gagauagccguccugagaa

SEQ ID NO: 1995648 - RNA, 19 nt, Homo sapiens
  misc_RNA (1)...(19): siRNA sense strand
uggagaaggacccgaauaa

SEQ ID NO: 1995649 - RNA, 19 nt, Homo sapiens
  misc_RNA (1)...(19): siRNA sense strand
gggcaaggaaagcagcaua

SEQ ID NO: 1995650 - RNA, 19 nt, Homo sapiens
  misc_RNA (1)...(19): siRNA sense strand
gcugaagacaucaagaaga

SEQ ID NO: 1995651 - RNA, 19 nt, Homo sapiens
  misc_RNA (1)...(19): siRNA sense strand
agauagccguccugagaaa

SEQ ID NO: 1995652 - RNA, 19 nt, Homo sapiens
  misc_RNA (1)...(19): siRNA sense strand
gcaaggaaagcagcauaga

SEQ ID NO: 1995653 - RNA, 19 nt, Homo sapiens
  misc_RNA (1)...(19): siRNA sense strand
gcaacuggcaagcucuuug

SEQ ID NO: 1995654 - RNA, 19 nt, Homo sapiens
  misc_RNA (1)...(19): siRNA sense strand
aaggaaagcagcauagaga

SEQ ID NO: 1995655 - RNA, 19 nt, Homo sapiens
  misc_RNA (1)...(19): siRNA sense strand
ccaaaauaaugaucaguga

SEQ ID NO: 1995656 - RNA, 19 nt, Homo sapiens
  misc_RNA (1)...(19): siRNA sense strand
gcaaaggagaugugauguc

SEQ ID NO: 1995657 - RNA, 19 nt, Homo sapiens
  misc_RNA (1)...(19): siRNA sense strand
cuaugucgcuccugaaguc

SEQ ID NO: 1995658 - RNA, 19 nt, Homo sapiens
  misc_RNA (1)...(19): siRNA sense strand
aaauauuguugcccuggaa

SEQ ID NO: 1995659 - RNA, 19 nt, Homo sapiens
  misc_RNA (1)...(19): siRNA sense strand
gagaagggguuuuauacag

SEQ ID NO: 1995660 - RNA, 19 nt, Homo sapiens
  misc_RNA (1)...(19): siRNA sense strand
gagcaaauggagacaagca

SEQ ID NO: 1995661 - RNA, 19 nt, Homo sapiens
  misc_RNA (1)...(19): siRNA sense strand
aaugaucagugacuuugga

SEQ ID NO: 1995662 - RNA, 19 nt, Homo sapiens
  misc_RNA (1)...(19): siRNA sense strand
ggacaguucaaaugcaagu

SEQ ID NO: 1995663 - RNA, 19 nt, Homo sapiens
  misc_RNA (1)...(19): siRNA sense strand
gcgcugaagggcaaggaaa

SEQ ID NO: 1995664 - RNA, 19 nt, Homo sapiens
  misc_RNA (1)...(19): siRNA sense strand
cguguacuaucuccacaga

SEQ ID NO: 1995665 - RNA, 19 nt, Homo sapiens
  misc_RNA (1)...(19): siRNA sense strand
gcauagagaaugagauagc

SEQ ID NO: 1995666 - RNA, 19 nt, Homo sapiens
  misc_RNA (1)...(19): siRNA sense strand
cugaaguccucgcccagaa

SEQ ID NO: 1995667 - RNA, 19 nt, Homo sapiens
  misc_RNA (1)...(19): siRNA sense strand
aagcugaagacaucaagaa

SEQ ID NO: 1995668 - RNA, 19 nt, Homo sapiens
  misc_RNA (1)...(19): siRNA sense strand
cagaaaccuuacagcaaag

SEQ ID NO: 1995669 - RNA, 19 nt, Homo sapiens
  misc_RNA (1)...(19): siRNA sense strand
gcacucugauccgccaagu

SEQ ID NO: 1995670 - RNA, 19 nt, Homo sapiens
  misc_RNA (1)...(19): siRNA sense strand
gguuuuagcugaagagaag

SEQ ID NO: 1995671 - RNA, 19 nt, Homo sapiens
  misc_RNA (1)...(19): siRNA sense strand
caagcucuuugcugugaag

SEQ ID NO: 1995672 - RNA, 19 nt, Homo sapiens
  misc_RNA (1)...(19): siRNA sense strand
caguucaaaugcaaguguu

SEQ ID NO: 1995673 - RNA, 19 nt, Homo sapiens
  misc_RNA (1)...(19): siRNA sense strand
agagcuguuugaccggaua

SEQ ID NO: 1995674 - RNA, 19 nt, Homo sapiens
  misc_RNA (1)...(19): siRNA sense strand
caaggaaagcagcauagag

SEQ ID NO: 1995675 - RNA, 19 nt, Homo sapiens
  misc_RNA (1)...(19): siRNA sense strand
ccuggaagacauuuaugaa

SEQ ID NO: 1995676 - RNA, 19 nt, Homo sapiens
  misc_RNA (1)...(19): siRNA sense strand
aagagcaaauggagacaag

SEQ ID NO: 1995677 - RNA, 19 nt, Homo sapiens
  misc_RNA (1)...(19): siRNA sense strand
cuggaagacauuuaugaaa

SEQ ID NO: 1995678 - RNA, 19 nt, Homo sapiens
  misc_RNA (1)...(19): siRNA sense strand
ugaaguccucgcccagaaa

SEQ ID NO: 1995679 - RNA, 19 nt, Homo sapiens
  misc_RNA (1)...(19): siRNA sense strand
gaaggacccgaauaaaaga

SEQ ID NO: 1995680 - RNA, 19 nt, Homo sapiens
  misc_RNA (1)...(19): siRNA sense strand
ggagugauugccuacaucu

SEQ ID NO: 1995681 - RNA, 19 nt, Homo sapiens
  misc_RNA (1)...(19): siRNA sense strand
gaaguguaucccuaagaag

SEQ ID NO: 1995682 - RNA, 19 nt, Homo sapiens
  misc_RNA (1)...(19): siRNA sense strand
cuggacaguucaaaugcaa

SEQ ID NO: 1995683 - RNA, 19 nt, Homo sapiens
  misc_RNA (1)...(19): siRNA sense strand
uucggaaccugauggagaa

SEQ ID NO: 1995684 - RNA, 19 nt, Homo sapiens
  misc_RNA (1)...(19): siRNA sense strand
agugauugccuacaucuug

SEQ ID NO: 1995685 - RNA, 19 nt, Homo sapiens
  misc_RNA (1)...(19): siRNA sense strand
cccagaaaccuuacagcaa

SEQ ID NO: 1995686 - RNA, 19 nt, Homo sapiens
  misc_RNA (1)...(19): siRNA sense strand
guacuaucuccacagaaug

SEQ ID NO: 1995687 - RNA, 19 nt, Homo sapiens
  misc_RNA (1)...(19): siRNA sense strand
auggaucgcuggugacaca

SEQ ID NO: 1995688 - RNA, 19 nt, Homo sapiens
  misc_RNA (1)...(19): siRNA sense strand
cgaagugguuuuagcugaa

SEQ ID NO: 1995689 - RNA, 19 nt, Homo sapiens
  misc_RNA (1)...(19): siRNA sense strand
ucaaggcggaauaugaguu

SEQ ID NO: 1995690 - RNA, 19 nt, Homo sapiens
  misc_RNA (1)...(19): siRNA sense strand
ggagggcaaaggagaugug

SEQ ID NO: 1995691 - RNA, 19 nt, Homo sapiens
  misc_RNA (1)...(19): siRNA sense strand
gaaguccucgcccagaaac

SEQ ID NO: 1995692 - RNA, 19 nt, Homo sapiens
  misc_RNA (1)...(19): siRNA sense strand
ucuuugcugugaaguguau

SEQ ID NO: 1995693 - RNA, 19 nt, Homo sapiens
  misc_RNA (1)...(19): siRNA sense strand
gccguccugagaaagauua

SEQ ID NO: 1995694 - RNA, 19 nt, Homo sapiens
  misc_RNA (1)...(19): siRNA sense strand
ggcagcagccuggacaguu

SEQ ID NO: 1995695 - RNA, 19 nt, Homo sapiens
  misc_RNA (1)...(19): siRNA sense strand
aaggaugccagcacucuga

SEQ ID NO: 1995696 - RNA, 19 nt, Homo sapiens
  misc_RNA (1)...(19): siRNA sense strand
agaagggguuuuauacaga

SEQ ID NO: 1995697 - RNA, 19 nt, Homo sapiens
  misc_RNA (1)...(19): siRNA sense strand
gcaagcugaagacaucaag

SEQ ID NO: 1995698 - RNA, 19 nt, Homo sapiens
  misc_RNA (1)...(19): siRNA sense strand
aaaugacuccaagcucuuu

SEQ ID NO: 1995699 - RNA, 19 nt, Homo sapiens
  misc_RNA (1)...(19): siRNA sense strand
gugaaguguaucccuaaga

SEQ ID NO: 1995700 - RNA, 19 nt, Homo sapiens
  misc_RNA (1)...(19): siRNA sense strand
auaaugaucagugacuuug

SEQ ID NO: 1995701 - RNA, 19 nt, Homo sapiens
  misc_RNA (1)...(19): siRNA sense strand
ccaacaagcucuacaauuu

SEQ ID NO: 1995702 - RNA, 19 nt, Homo sapiens
  misc_RNA (1)...(19): siRNA sense strand
gaacuugaaugcuaagaau

SEQ ID NO: 1995703 - RNA, 19 nt, Homo sapiens
  misc_RNA (1)...(19): siRNA sense strand
ugagauaacuggcaauuug

SEQ ID NO: 1995704 - RNA, 19 nt, Homo sapiens
  misc_RNA (1)...(19): siRNA sense strand
guacuuagauaccacauau

SEQ ID NO: 1995705 - RNA, 19 nt, Homo sapiens
  misc_RNA (1)...(19): siRNA sense strand
gaagaaguguggugggaaa

SEQ ID NO: 1995706 - RNA, 19 nt, Homo sapiens
  misc_RNA (1)...(19): siRNA sense strand
gcaaguacuuuacaugaga

SEQ ID NO: 1995707 - RNA, 19 nt, Homo sapiens
  misc_RNA (1)...(19): siRNA sense strand
ggagcacaauggagaaaua

SEQ ID NO: 1995708 - RNA, 19 nt, Homo sapiens
  misc_RNA (1)...(19): siRNA sense strand
caacaagcucuacaauuua

SEQ ID NO: 1995709 - RNA, 19 nt, Homo sapiens
  misc_RNA (1)...(19): siRNA sense strand
gcacaauggagaaauauuu

SEQ ID NO: 1995710 - RNA, 19 nt, Homo sapiens
  misc_RNA (1)...(19): siRNA sense strand
gaugaaggauuguauagau

SEQ ID NO: 1995711 - RNA, 19 nt, Homo sapiens
  misc_RNA (1)...(19): siRNA sense strand
gaacaagcuucaugugcaa

SEQ ID NO: 1995712 - RNA, 19 nt, Homo sapiens
  misc_RNA (1)...(19): siRNA sense strand
ggaaccggcuuuacaguug

SEQ ID NO: 1995713 - RNA, 19 nt, Homo sapiens
  misc_RNA (1)...(19): siRNA sense strand
aaagauacguccaguuuau

SEQ ID NO: 1995714 - RNA, 19 nt, Homo sapiens
  misc_RNA (1)...(19): siRNA sense strand
ucaaguuucucuuccguua

SEQ ID NO: 1995715 - RNA, 19 nt, Homo sapiens
  misc_RNA (1)...(19): siRNA sense strand
ccaaagauacguccaguuu

SEQ ID NO: 1995716 - RNA, 19 nt, Homo sapiens
  misc_RNA (1)...(19): siRNA sense strand
ucacucagcucaaucaaau

SEQ ID NO: 1995717 - RNA, 19 nt, Homo sapiens
  misc_RNA (1)...(19): siRNA sense strand
gcaaacaacucagaacaca

SEQ ID NO: 1995718 - RNA, 19 nt, Homo sapiens
  misc_RNA (1)...(19): siRNA sense strand
gaaacagaguguccugaug

SEQ ID NO: 1995719 - RNA, 19 nt, Homo sapiens
  misc_RNA (1)...(19): siRNA sense strand
gaaauuggaagcuggauau

SEQ ID NO: 1995720 - RNA, 19 nt, Homo sapiens
  misc_RNA (1)...(19): siRNA sense strand
gaaggagcgugucagaaga

SEQ ID NO: 1995721 - RNA, 19 nt, Homo sapiens
  misc_RNA (1)...(19): siRNA sense strand
gcucuacaauuuacagauu

SEQ ID NO: 1995722 - RNA, 19 nt, Homo sapiens
  misc_RNA (1)...(19): siRNA sense strand
gcaagagguuauccgguuu

SEQ ID NO: 1995723 - RNA, 19 nt, Homo sapiens
  misc_RNA (1)...(19): siRNA sense strand
ggauaaguaugaugaagga

SEQ ID NO: 1995724 - RNA, 19 nt, Homo sapiens
  misc_RNA (1)...(19): siRNA sense strand
aaacaacucagaacacaua

SEQ ID NO: 1995725 - RNA, 19 nt, Homo sapiens
  misc_RNA (1)...(19): siRNA sense strand
cuucuggucuuaaguauaa

SEQ ID NO: 1995726 - RNA, 19 nt, Homo sapiens
  misc_RNA (1)...(19): siRNA sense strand
gcagcuaccuagaaaugaa

SEQ ID NO: 1995727 - RNA, 19 nt, Homo sapiens
  misc_RNA (1)...(19): siRNA sense strand
caaagugaacagcuucuua

SEQ ID NO: 1995728 - RNA, 19 nt, Homo sapiens
  misc_RNA (1)...(19): siRNA sense strand
caaaugaucccuuauugau

SEQ ID NO: 1995729 - RNA, 19 nt, Homo sapiens
  misc_RNA (1)...(19): siRNA sense strand
gagaguacuuugccuuaug

SEQ ID NO: 1995730 - RNA, 19 nt, Homo sapiens
  misc_RNA (1)...(19): siRNA sense strand
uagaagacauuuccgaaga

SEQ ID NO: 1995731 - RNA, 19 nt, Homo sapiens
  misc_RNA (1)...(19): siRNA sense strand
acacauaaauuugccauug

SEQ ID NO: 1995732 - RNA, 19 nt, Homo sapiens
  misc_RNA (1)...(19): siRNA sense strand
aagaagacauuugggaaua

SEQ ID NO: 1995733 - RNA, 19 nt, Homo sapiens
  misc_RNA (1)...(19): siRNA sense strand
uaaguaugaugaaggauug

SEQ ID NO: 1995734 - RNA, 19 nt, Homo sapiens
  misc_RNA (1)...(19): siRNA sense strand
gaauacaccuuuccaucuc

SEQ ID NO: 1995735 - RNA, 19 nt, Homo sapiens
  misc_RNA (1)...(19): siRNA sense strand
cauaugcuguacuuagaua

SEQ ID NO: 1995736 - RNA, 19 nt, Homo sapiens
  misc_RNA (1)...(19): siRNA sense strand
cagaucaccuuauuaauac

SEQ ID NO: 1995737 - RNA, 19 nt, Homo sapiens
  misc_RNA (1)...(19): siRNA sense strand
aaugaucccuuauugauga

SEQ ID NO: 1995738 - RNA, 19 nt, Homo sapiens
  misc_RNA (1)...(19): siRNA sense strand
gaaccggcuuuacaguuga

SEQ ID NO: 1995739 - RNA, 19 nt, Homo sapiens
  misc_RNA (1)...(19): siRNA sense strand
guaaugaagcaaauggaua

SEQ ID NO: 1995740 - RNA, 19 nt, Homo sapiens
  misc_RNA (1)...(19): siRNA sense strand
gaauuucacucagcucaau

SEQ ID NO: 1995741 - RNA, 19 nt, Homo sapiens
  misc_RNA (1)...(19): siRNA sense strand
ggacacacucuaacaaguu

SEQ ID NO: 1995742 - RNA, 19 nt, Homo sapiens
  misc_RNA (1)...(19): siRNA sense strand
gcacuuacucuauuggaaa

SEQ ID NO: 1995743 - RNA, 19 nt, Homo sapiens
  misc_RNA (1)...(19): siRNA sense strand
gaagcagucaauuuaagua

SEQ ID NO: 1995744 - RNA, 19 nt, Homo sapiens
  misc_RNA (1)...(19): siRNA sense strand
acagaaaacuugucuagua

SEQ ID NO: 1995745 - RNA, 19 nt, Homo sapiens
  misc_RNA (1)...(19): siRNA sense strand
agaaacagguaauugaaga

SEQ ID NO: 1995746 - RNA, 19 nt, Homo sapiens
  misc_RNA (1)...(19): siRNA sense strand
caaagauacguccaguuua

SEQ ID NO: 1995747 - RNA, 19 nt, Homo sapiens
  misc_RNA (1)...(19): siRNA sense strand
aaagagauguagaaaguca

SEQ ID NO: 1995748 - RNA, 19 nt, Homo sapiens
  misc_RNA (1)...(19): siRNA sense strand
gugaacagcuucuuaacuc

SEQ ID NO: 1995749 - RNA, 19 nt, Homo sapiens
  misc_RNA (1)...(19): siRNA sense strand
gguuucaaaugaucccuua

SEQ ID NO: 1995750 - RNA, 19 nt, Homo sapiens
  misc_RNA (1)...(19): siRNA sense strand
ggaguugcuuugcgucuug

SEQ ID NO: 1995751 - RNA, 19 nt, Homo sapiens
  misc_RNA (1)...(19): siRNA sense strand
ucuaaacacuucacauuuc

SEQ ID NO: 1995752 - RNA, 19 nt, Homo sapiens
  misc_RNA (1)...(19): siRNA sense strand
ggaaggagcgugucagaag

SEQ ID NO: 1995753 - RNA, 19 nt, Homo sapiens
  misc_RNA (1)...(19): siRNA sense strand
gaagaagacauuugggaau

SEQ ID NO: 1995754 - RNA, 19 nt, Homo sapiens
  misc_RNA (1)...(19): siRNA sense strand
ugaagacacucaugauauc

SEQ ID NO: 1995755 - RNA, 19 nt, Homo sapiens
  misc_RNA (1)...(19): siRNA sense strand
gaauucaaguuguggagau

SEQ ID NO: 1995756 - RNA, 19 nt, Homo sapiens
  misc_RNA (1)...(19): siRNA sense strand
ggauauagguguguauuuu

SEQ ID NO: 1995757 - RNA, 19 nt, Homo sapiens
  misc_RNA (1)...(19): siRNA sense strand
gugagaacuugaaugcuaa

SEQ ID NO: 1995758 - RNA, 19 nt, Homo sapiens
  misc_RNA (1)...(19): siRNA sense strand
caaauugccagaugccuuu

SEQ ID NO: 1995759 - RNA, 19 nt, Homo sapiens
  misc_RNA (1)...(19): siRNA sense strand
caacucagaacacauaaau

SEQ ID NO: 1995760 - RNA, 19 nt, Homo sapiens
  misc_RNA (1)...(19): siRNA sense strand
ggucuuaaguauaaugcaa

SEQ ID NO: 1995761 - RNA, 19 nt, Homo sapiens
  misc_RNA (1)...(19): siRNA sense strand
agugagaacuugaaugcua

SEQ ID NO: 1995762 - RNA, 19 nt, Homo sapiens
  misc_RNA (1)...(19): siRNA sense strand
gaaggauuguauagauuca

SEQ ID NO: 1995763 - RNA, 19 nt, Homo sapiens
  misc_RNA (1)...(19): siRNA sense strand
acaccucgauggcauguuu

SEQ ID NO: 1995764 - RNA, 19 nt, Homo sapiens
  misc_RNA (1)...(19): siRNA sense strand
caaguucacuagaauagca

SEQ ID NO: 1995765 - RNA, 19 nt, Homo sapiens
  misc_RNA (1)...(19): siRNA sense strand
gacacugaauguauuguga

SEQ ID NO: 1995766 - RNA, 19 nt, Homo sapiens
  misc_RNA (1)...(19): siRNA sense strand
gaaaaugacuucagugacu

SEQ ID NO: 1995767 - RNA, 19 nt, Homo sapiens
  misc_RNA (1)...(19): siRNA sense strand
auaacucgguuucaaauga

SEQ ID NO: 1995768 - RNA, 19 nt, Homo sapiens
  misc_RNA (1)...(19): siRNA sense strand
gaaagucuuccuagccauu

SEQ ID NO: 1995769 - RNA, 19 nt, Homo sapiens
  misc_RNA (1)...(19): siRNA sense strand
ggaaaugcagguugucaga

SEQ ID NO: 1995770 - RNA, 19 nt, Homo sapiens
  misc_RNA (1)...(19): siRNA sense strand
cacagcagcuaccuagaaa

SEQ ID NO: 1995771 - RNA, 19 nt, Homo sapiens
  misc_RNA (1)...(19): siRNA sense strand
caagacauccuucuaccaa

SEQ ID NO: 1995772 - RNA, 19 nt, Homo sapiens
  misc_RNA (1)...(19): siRNA sense strand
guacaccugcuccgaagua

SEQ ID NO: 1995773 - RNA, 19 nt, Homo sapiens
  misc_RNA (1)...(19): siRNA sense strand
gaagaaucaucuguuuaca

SEQ ID NO: 1995774 - RNA, 19 nt, Homo sapiens
  misc_RNA (1)...(19): siRNA sense strand
gaagacauuugggaauaca

SEQ ID NO: 1995775 - RNA, 19 nt, Homo sapiens
  misc_RNA (1)...(19): siRNA sense strand
aaagugaacagcuucuuaa

SEQ ID NO: 1995776 - RNA, 19 nt, Homo sapiens
  misc_RNA (1)...(19): siRNA sense strand
ggaaauuggaagcuggaua

SEQ ID NO: 1995777 - RNA, 19 nt, Homo sapiens
  misc_RNA (1)...(19): siRNA sense strand
gaagggauaaacuuaaauc

SEQ ID NO: 1995778 - RNA, 19 nt, Homo sapiens
  misc_RNA (1)...(19): siRNA sense strand
cgacauggucccuuacuga

SEQ ID NO: 1995779 - RNA, 19 nt, Homo sapiens
  misc_RNA (1)...(19): siRNA sense strand
cuaacaaguucacuagaau

SEQ ID NO: 1995780 - RNA, 19 nt, Homo sapiens
  misc_RNA (1)...(19): siRNA sense strand
gaaguguggugggaaauac

SEQ ID NO: 1995781 - RNA, 19 nt, Homo sapiens
  misc_RNA (1)...(19): siRNA sense strand
acagguaauugaagaauca

SEQ ID NO: 1995782 - RNA, 19 nt, Homo sapiens
  misc_RNA (1)...(19): siRNA sense strand
ugauuugucucaaccuauu

SEQ ID NO: 1995783 - RNA, 19 nt, Homo sapiens
  misc_RNA (1)...(19): siRNA sense strand
ggaaaacucuguagaacuc

SEQ ID NO: 1995784 - RNA, 19 nt, Homo sapiens
  misc_RNA (1)...(19): siRNA sense strand
auuggaagcuggauauuga

SEQ ID NO: 1995785 - RNA, 19 nt, Homo sapiens
  misc_RNA (1)...(19): siRNA sense strand
ggugggaaauacaaucaga

SEQ ID NO: 1995786 - RNA, 19 nt, Homo sapiens
  misc_RNA (1)...(19): siRNA sense strand
gaagacauuuccgaagaag

SEQ ID NO: 1995787 - RNA, 19 nt, Homo sapiens
  misc_RNA (1)...(19): siRNA sense strand
ucacauuuccaguuuauug

SEQ ID NO: 1995788 - RNA, 19 nt, Homo sapiens
  misc_RNA (1)...(19): siRNA sense strand
guugaugccuuucaguaug

SEQ ID NO: 1995789 - RNA, 19 nt, Homo sapiens
  misc_RNA (1)...(19): siRNA sense strand
ggaaacuacuccaggaaaa

SEQ ID NO: 1995790 - RNA, 19 nt, Homo sapiens
  misc_RNA (1)...(19): siRNA sense strand
ucccaaugaugcaaauuaa

SEQ ID NO: 1995791 - RNA, 19 nt, Homo sapiens
  misc_RNA (1)...(19): siRNA sense strand
uuaauucacucaucacuac

SEQ ID NO: 1995792 - RNA, 19 nt, Homo sapiens
  misc_RNA (1)...(19): siRNA sense strand
gaaaguccauaugcuguac

SEQ ID NO: 1995793 - RNA, 19 nt, Homo sapiens
  misc_RNA (1)...(19): siRNA sense strand
aaacagaaacagguaauug

SEQ ID NO: 1995794 - RNA, 19 nt, Homo sapiens
  misc_RNA (1)...(19): siRNA sense strand
uaacucgggauaaguauga

SEQ ID NO: 1995795 - RNA, 19 nt, Homo sapiens
  misc_RNA (1)...(19): siRNA sense strand
caagagauacacucacuuc

SEQ ID NO: 1995796 - RNA, 19 nt, Homo sapiens
  misc_RNA (1)...(19): siRNA sense strand
gaaacagguaauugaagaa

SEQ ID NO: 1995797 - RNA, 19 nt, Homo sapiens
  misc_RNA (1)...(19): siRNA sense strand
caccugcuccgaaguauuu

SEQ ID NO: 1995798 - RNA, 19 nt, Homo sapiens
  misc_RNA (1)...(19): siRNA sense strand
agaagacauuuccgaagaa

SEQ ID NO: 1995799 - RNA, 19 nt, Homo sapiens
  misc_RNA (1)...(19): siRNA sense strand
agaguacuuugccuuauga

SEQ ID NO: 1995800 - RNA, 19 nt, Homo sapiens
  misc_RNA (1)...(19): siRNA sense strand
ccaagguaaugaagcaaau

SEQ ID NO: 1995801 - RNA, 19 nt, Homo sapiens
  misc_RNA (1)...(19): siRNA sense strand
gcacaaaucuccacugaug

SEQ ID NO: 1995802 - RNA, 19 nt, Homo sapiens
  misc_RNA (1)...(19): siRNA sense strand
ggaccgaccugaccaaauu

SEQ ID NO: 1995803 - RNA, 19 nt, Homo sapiens
  misc_RNA (1)...(19): siRNA sense strand
gggaagagauuauagcaaa

SEQ ID NO: 1995804 - RNA, 19 nt, Homo sapiens
  misc_RNA (1)...(19): siRNA sense strand
ggagugguaugacaaauau

SEQ ID NO: 1995805 - RNA, 19 nt, Homo sapiens
  misc_RNA (1)...(19): siRNA sense strand
gaucauugcugccacuguu

SEQ ID NO: 1995806 - RNA, 19 nt, Homo sapiens
  misc_RNA (1)...(19): siRNA sense strand
acacugaucuggagaacaa

SEQ ID NO: 1995807 - RNA, 19 nt, Homo sapiens
  misc_RNA (1)...(19): siRNA sense strand
ggacgagauucaagcaaga

SEQ ID NO: 1995808 - RNA, 19 nt, Homo sapiens
  misc_RNA (1)...(19): siRNA sense strand
gcagagcgcaucacuacaa

SEQ ID NO: 1995809 - RNA, 19 nt, Homo sapiens
  misc_RNA (1)...(19): siRNA sense strand
ggaggugaccguagaaaug

SEQ ID NO: 1995810 - RNA, 19 nt, Homo sapiens
  misc_RNA (1)...(19): siRNA sense strand
ggaagagauuauagcaaau

SEQ ID NO: 1995811 - RNA, 19 nt, Homo sapiens
  misc_RNA (1)...(19): siRNA sense strand
gaggaggaaaugaagaaua

SEQ ID NO: 1995812 - RNA, 19 nt, Homo sapiens
  misc_RNA (1)...(19): siRNA sense strand
gaaauucaaacgcagauca

SEQ ID NO: 1995813 - RNA, 19 nt, Homo sapiens
  misc_RNA (1)...(19): siRNA sense strand
ccaaauuacugaaugacau

SEQ ID NO: 1995814 - RNA, 19 nt, Homo sapiens
  misc_RNA (1)...(19): siRNA sense strand
gcaagguugucucgucuca

SEQ ID NO: 1995815 - RNA, 19 nt, Homo sapiens
  misc_RNA (1)...(19): siRNA sense strand
gaacgcagaguacaagcaa

SEQ ID NO: 1995816 - RNA, 19 nt, Homo sapiens
  misc_RNA (1)...(19): siRNA sense strand
ggaggaggcuaacacugau

SEQ ID NO: 1995817 - RNA, 19 nt, Homo sapiens
  misc_RNA (1)...(19): siRNA sense strand
gcucagcugucagaaauuc

SEQ ID NO: 1995818 - RNA, 19 nt, Homo sapiens
  misc_RNA (1)...(19): siRNA sense strand
ugaccaaauuacugaauga

SEQ ID NO: 1995819 - RNA, 19 nt, Homo sapiens
  misc_RNA (1)...(19): siRNA sense strand
aggaggaaaugaagaauau

SEQ ID NO: 1995820 - RNA, 19 nt, Homo sapiens
  misc_RNA (1)...(19): siRNA sense strand
agaugcagauugagaguuu

SEQ ID NO: 1995821 - RNA, 19 nt, Homo sapiens
  misc_RNA (1)...(19): siRNA sense strand
gcucugaccuggagaugca

SEQ ID NO: 1995822 - RNA, 19 nt, Homo sapiens
  misc_RNA (1)...(19): siRNA sense strand
aagcacaaaucuccacuga

SEQ ID NO: 1995823 - RNA, 19 nt, Homo sapiens
  misc_RNA (1)...(19): siRNA sense strand
gcaagacuagagugacuaa

SEQ ID NO: 1995824 - RNA, 19 nt, Homo sapiens
  misc_RNA (1)...(19): siRNA sense strand
ugacuaagacuaucguaga

SEQ ID NO: 1995825 - RNA, 19 nt, Homo sapiens
  misc_RNA (1)...(19): siRNA sense strand
gaggugaccguagaaauga

SEQ ID NO: 1995826 - RNA, 19 nt, Homo sapiens
  misc_RNA (1)...(19): siRNA sense strand
ucucaagucagcaguauuu

SEQ ID NO: 1995827 - RNA, 19 nt, Homo sapiens
  misc_RNA (1)...(19): siRNA sense strand
uggcucagcugucagaaau

SEQ ID NO: 1995828 - RNA, 19 nt, Homo sapiens
  misc_RNA (1)...(19): siRNA sense strand
ugcaagcccuggaaauuga

SEQ ID NO: 1995829 - RNA, 19 nt, Homo sapiens
  misc_RNA (1)...(19): siRNA sense strand
gguagaaacucaggaucug

SEQ ID NO: 1995830 - RNA, 19 nt, Homo sapiens
  misc_RNA (1)...(19): siRNA sense strand
ggaaaugaagaauaugcaa

SEQ ID NO: 1995831 - RNA, 19 nt, Homo sapiens
  misc_RNA (1)...(19): siRNA sense strand
ccaagaaugagauaacaga

SEQ ID NO: 1995832 - RNA, 19 nt, Homo sapiens
  misc_RNA (1)...(19): siRNA sense strand
gaccugaccaaauuacuga

SEQ ID NO: 1995833 - RNA, 19 nt, Homo sapiens
  misc_RNA (1)...(19): siRNA sense strand
gaagaaccacgaggaggaa

SEQ ID NO: 1995834 - RNA, 19 nt, Homo sapiens
  misc_RNA (1)...(19): siRNA sense strand
cuacguggcucagcuguca

SEQ ID NO: 1995835 - RNA, 19 nt, Homo sapiens
  misc_RNA (1)...(19): siRNA sense strand
cguggaggcugacaucaau

SEQ ID NO: 1995836 - RNA, 19 nt, Homo sapiens
  misc_RNA (1)...(19): siRNA sense strand
ucugguaucuggugacuca

SEQ ID NO: 1995837 - RNA, 19 nt, Homo sapiens
  misc_RNA (1)...(19): siRNA sense strand
uagccuaccugaggaagaa

SEQ ID NO: 1995838 - RNA, 19 nt, Homo sapiens
  misc_RNA (1)...(19): siRNA sense strand
agaaugagauaacagaacu

SEQ ID NO: 1995839 - RNA, 19 nt, Homo sapiens
  misc_RNA (1)...(19): siRNA sense strand
cucaggaucuguaaacaug

SEQ ID NO: 1995840 - RNA, 19 nt, Homo sapiens
  misc_RNA (1)...(19): siRNA sense strand
gguaucuggugacucaaga

SEQ ID NO: 1995841 - RNA, 19 nt, Homo sapiens
  misc_RNA (1)...(19): siRNA sense strand
gaaccacgaggaggaaaug

SEQ ID NO: 1995842 - RNA, 19 nt, Homo sapiens
  misc_RNA (1)...(19): siRNA sense strand
guugguggauggcaagguu

SEQ ID NO: 1995843 - RNA, 19 nt, Homo sapiens
  misc_RNA (1)...(19): siRNA sense strand
uagaaacucaggaucugua

SEQ ID NO: 1995844 - RNA, 19 nt, Homo sapiens
  misc_RNA (1)...(19): siRNA sense strand
caaggagugguaugacaaa

SEQ ID NO: 1995845 - RNA, 19 nt, Homo sapiens
  misc_RNA (1)...(19): siRNA sense strand
uuugguagcugcucaguag

SEQ ID NO: 1995846 - RNA, 19 nt, Homo sapiens
  misc_RNA (1)...(19): siRNA sense strand
ggaggugguucuaguuuug

SEQ ID NO: 1995847 - RNA, 19 nt, Homo sapiens
  misc_RNA (1)...(19): siRNA sense strand
ucaauggccugcggaaagu

SEQ ID NO: 1995848 - RNA, 19 nt, Homo sapiens
  misc_RNA (1)...(19): siRNA sense strand
cagauuggcugcugaugac

SEQ ID NO: 1995849 - RNA, 19 nt, Homo sapiens
  misc_RNA (1)...(19): siRNA sense strand
ccagauuggcugcugauga

SEQ ID NO: 1995850 - RNA, 19 nt, Homo sapiens
  misc_RNA (1)...(19): siRNA sense strand
gaaacucaggaucuguaaa

SEQ ID NO: 1995851 - RNA, 19 nt, Homo sapiens
  misc_RNA (1)...(19): siRNA sense strand
caaauuacugaaugacaug

SEQ ID NO: 1995852 - RNA, 19 nt, Homo sapiens
  misc_RNA (1)...(19): siRNA sense strand
caagucagcaguauuucug

SEQ ID NO: 1995853 - RNA, 19 nt, Homo sapiens
  misc_RNA (1)...(19): siRNA sense strand
uggaggaggcuaacacuga

SEQ ID NO: 1995854 - RNA, 19 nt, Homo sapiens
  misc_RNA (1)...(19): siRNA sense strand
ggagagggaggugguucua

SEQ ID NO: 1995855 - RNA, 19 nt, Homo sapiens
  misc_RNA (1)...(19): siRNA sense strand
aaugaccgcuuggccaauu

SEQ ID NO: 1995856 - RNA, 19 nt, Homo sapiens
  misc_RNA (1)...(19): siRNA sense strand
gacuaagacuaucguagag

SEQ ID NO: 1995857 - RNA, 19 nt, Homo sapiens
  misc_RNA (1)...(19): siRNA sense strand
gaccgaccugaccaaauua

SEQ ID NO: 1995858 - RNA, 19 nt, Homo sapiens
  misc_RNA (1)...(19): siRNA sense strand
caagaaugagauaacagaa

SEQ ID NO: 1995859 - RNA, 19 nt, Homo sapiens
  misc_RNA (1)...(19): siRNA sense strand
gagauucaagcaagacuag

SEQ ID NO: 1995860 - RNA, 19 nt, Homo sapiens
  misc_RNA (1)...(19): siRNA sense strand
agagggaggugguucuagu

SEQ ID NO: 1995861 - RNA, 19 nt, Homo sapiens
  misc_RNA (1)...(19): siRNA sense strand
ugugggaguucuagauuca

SEQ ID NO: 1995862 - RNA, 19 nt, Homo sapiens
  misc_RNA (1)...(19): siRNA sense strand
ccaugcagaaccucaauga

SEQ ID NO: 1995863 - RNA, 19 nt, Homo sapiens
  misc_RNA (1)...(19): siRNA sense strand
aagcuguucuggucaagga

SEQ ID NO: 1995864 - RNA, 19 nt, Homo sapiens
  misc_RNA (1)...(19): siRNA sense strand
gaaugagauaacagaacua

SEQ ID NO: 1995865 - RNA, 19 nt, Homo sapiens
  misc_RNA (1)...(19): siRNA sense strand
gagcgcaucacuacaagca

SEQ ID NO: 1995866 - RNA, 19 nt, Homo sapiens
  misc_RNA (1)...(19): siRNA sense strand
cagcuaugguggugguaug

SEQ ID NO: 1995867 - RNA, 19 nt, Homo sapiens
  misc_RNA (1)...(19): siRNA sense strand
cuggaugaccugacuauga

SEQ ID NO: 1995868 - RNA, 19 nt, Homo sapiens
  misc_RNA (1)...(19): siRNA sense strand
ggaggcuucuacagcuaug

SEQ ID NO: 1995869 - RNA, 19 nt, Homo sapiens
  misc_RNA (1)...(19): siRNA sense strand
cuagagugacuaagacuau

SEQ ID NO: 1995870 - RNA, 19 nt, Homo sapiens
  misc_RNA (1)...(19): siRNA sense strand
ucaagcaagacuagaguga

SEQ ID NO: 1995871 - RNA, 19 nt, Homo sapiens
  misc_RNA (1)...(19): siRNA sense strand
gaacccuggcugacacaga

SEQ ID NO: 1995872 - RNA, 19 nt, Homo sapiens
  misc_RNA (1)...(19): siRNA sense strand
caacaagcagagcgcauca

SEQ ID NO: 1995873 - RNA, 19 nt, Homo sapiens
  misc_RNA (1)...(19): siRNA sense strand
aacccuggcugacacagaa

SEQ ID NO: 1995874 - RNA, 19 nt, Homo sapiens
  misc_RNA (1)...(19): siRNA sense strand
aagcagagcgcaucacuac

SEQ ID NO: 1995875 - RNA, 19 nt, Homo sapiens
  misc_RNA (1)...(19): siRNA sense strand
ccgcuuggccaauuaccua

SEQ ID NO: 1995876 - RNA, 19 nt, Homo sapiens
  misc_RNA (1)...(19): siRNA sense strand
ggucaaggacgagauucaa

SEQ ID NO: 1995877 - RNA, 19 nt, Homo sapiens
  misc_RNA (1)...(19): siRNA sense strand
gaucgggaagagauuauag

SEQ ID NO: 1995878 - RNA, 19 nt, Homo sapiens
  misc_RNA (1)...(19): siRNA sense strand
ucaaggagugguaugacaa

SEQ ID NO: 1995879 - RNA, 19 nt, Homo sapiens
  misc_RNA (1)...(19): siRNA sense strand
agacuagagugacuaagac

SEQ ID NO: 1995880 - RNA, 19 nt, Homo sapiens
  misc_RNA (1)...(19): siRNA sense strand
agaauuuggugguagaaac

SEQ ID NO: 1995881 - RNA, 19 nt, Homo sapiens
  misc_RNA (1)...(19): siRNA sense strand
gagggaggugguucuaguu

SEQ ID NO: 1995882 - RNA, 19 nt, Homo sapiens
  misc_RNA (1)...(19): siRNA sense strand
gaggaaaugaagaauaugc

SEQ ID NO: 1995883 - RNA, 19 nt, Homo sapiens
  misc_RNA (1)...(19): siRNA sense strand
ggaucgggaagagauuaua

SEQ ID NO: 1995884 - RNA, 19 nt, Homo sapiens
  misc_RNA (1)...(19): siRNA sense strand
ucucagaaaccagaucauu

SEQ ID NO: 1995885 - RNA, 19 nt, Homo sapiens
  misc_RNA (1)...(19): siRNA sense strand
aagacuagagugacuaaga

SEQ ID NO: 1995886 - RNA, 19 nt, Homo sapiens
  misc_RNA (1)...(19): siRNA sense strand
gaucugguaucuggugacu

SEQ ID NO: 1995887 - RNA, 19 nt, Homo sapiens
  misc_RNA (1)...(19): siRNA sense strand
caagcagagcgcaucacua

SEQ ID NO: 1995888 - RNA, 19 nt, Homo sapiens
  misc_RNA (1)...(19): siRNA sense strand
uggaugaccugacuaugac

SEQ ID NO: 1995889 - RNA, 19 nt, Homo sapiens
  misc_RNA (1)...(19): siRNA sense strand
ugcggaaaguccuggauga

SEQ ID NO: 1995890 - RNA, 19 nt, Homo sapiens
  misc_RNA (1)...(19): siRNA sense strand
ucagaaaccagaucauugc

SEQ ID NO: 1995891 - RNA, 19 nt, Homo sapiens
  misc_RNA (1)...(19): siRNA sense strand
gagcguggaggcugacauc

SEQ ID NO: 1995892 - RNA, 19 nt, Homo sapiens
  misc_RNA (1)...(19): siRNA sense strand
cgucucaagucagcaguau

SEQ ID NO: 1995893 - RNA, 19 nt, Homo sapiens
  misc_RNA (1)...(19): siRNA sense strand
aaacucaggaucuguaaac

SEQ ID NO: 1995894 - RNA, 19 nt, Homo sapiens
  misc_RNA (1)...(19): siRNA sense strand
gaauuuggugguagaaacu

SEQ ID NO: 1995895 - RNA, 19 nt, Homo sapiens
  misc_RNA (1)...(19): siRNA sense strand
cugaggagcgguucaacaa

SEQ ID NO: 1995896 - RNA, 19 nt, Homo sapiens
  misc_RNA (1)...(19): siRNA sense strand
gaggggaggugaccguaga

SEQ ID NO: 1995897 - RNA, 19 nt, Homo sapiens
  misc_RNA (1)...(19): siRNA sense strand
gaccuggagaugcagauug

SEQ ID NO: 1995898 - RNA, 19 nt, Homo sapiens
  misc_RNA (1)...(19): siRNA sense strand
uggaagcuguucuggucaa

SEQ ID NO: 1995899 - RNA, 19 nt, Homo sapiens
  misc_RNA (1)...(19): siRNA sense strand
aagguugucucgucucaag

SEQ ID NO: 1995900 - RNA, 19 nt, Homo sapiens
  misc_RNA (1)...(19): siRNA sense strand
aagcaagacuagagugacu

SEQ ID NO: 1995901 - RNA, 19 nt, Homo sapiens
  misc_RNA (1)...(19): siRNA sense strand
ggucagggauguucaauag

SEQ ID NO: 1995902 - RNA, 19 nt, Homo sapiens
  misc_RNA (1)...(19): siRNA sense strand
caacgcagcuaucgagaga

SEQ ID NO: 1995903 - RNA, 19 nt, Homo sapiens
  misc_RNA (1)...(19): siRNA sense strand
caauaacccugaacucaug

SEQ ID NO: 1995904 - RNA, 19 nt, Homo sapiens
  misc_RNA (1)...(19): siRNA sense strand
gcaacaaucccuucucuuc

SEQ ID NO: 1995905 - RNA, 19 nt, Homo sapiens
  misc_RNA (1)...(19): siRNA sense strand
cgacuuugcugcucagaug

SEQ ID NO: 1995906 - RNA, 19 nt, Homo sapiens
  misc_RNA (1)...(19): siRNA sense strand
gaucugaugcgucacauga

SEQ ID NO: 1995907 - RNA, 19 nt, Homo sapiens
  misc_RNA (1)...(19): siRNA sense strand
gagccucggucaaggaguu

SEQ ID NO: 1995908 - RNA, 19 nt, Homo sapiens
  misc_RNA (1)...(19): siRNA sense strand
ucagccacaugcucaauaa

SEQ ID NO: 1995909 - RNA, 19 nt, Homo sapiens
  misc_RNA (1)...(19): siRNA sense strand
ugucacagaucauggagaa

SEQ ID NO: 1995910 - RNA, 19 nt, Homo sapiens
  misc_RNA (1)...(19): siRNA sense strand
uccaggauaugaugucuaa

SEQ ID NO: 1995911 - RNA, 19 nt, Homo sapiens
  misc_RNA (1)...(19): siRNA sense strand
ggaacaguuuggcaacaau

SEQ ID NO: 1995912 - RNA, 19 nt, Homo sapiens
  misc_RNA (1)...(19): siRNA sense strand
gaucucagcacccuacaug

SEQ ID NO: 1995913 - RNA, 19 nt, Homo sapiens
  misc_RNA (1)...(19): siRNA sense strand
ucagaaggcucaagaucca

SEQ ID NO: 1995914 - RNA, 19 nt, Homo sapiens
  misc_RNA (1)...(19): siRNA sense strand
gauguucaauagcccagaa

SEQ ID NO: 1995915 - RNA, 19 nt, Homo sapiens
  misc_RNA (1)...(19): siRNA sense strand
gggaacaguuuggcaacaa

SEQ ID NO: 1995916 - RNA, 19 nt, Homo sapiens
  misc_RNA (1)...(19): siRNA sense strand
gaacucaugaggcagacaa

SEQ ID NO: 1995917 - RNA, 19 nt, Homo sapiens
  misc_RNA (1)...(19): siRNA sense strand
gauguccaauccugagaug

SEQ ID NO: 1995918 - RNA, 19 nt, Homo sapiens
  misc_RNA (1)...(19): siRNA sense strand
ggacaucaacgcagcuauc

SEQ ID NO: 1995919 - RNA, 19 nt, Homo sapiens
  misc_RNA (1)...(19): siRNA sense strand
cagcagaugauccagcuuu

SEQ ID NO: 1995920 - RNA, 19 nt, Homo sapiens
  misc_RNA (1)...(19): siRNA sense strand
gagcggaacccugagauca

SEQ ID NO: 1995921 - RNA, 19 nt, Homo sapiens
  misc_RNA (1)...(19): siRNA sense strand
ucugaugcgucacaugauu

SEQ ID NO: 1995922 - RNA, 19 nt, Homo sapiens
  misc_RNA (1)...(19): siRNA sense strand
gcagacgccagaagugaga

SEQ ID NO: 1995923 - RNA, 19 nt, Homo sapiens
  misc_RNA (1)...(19): siRNA sense strand
gaaccagcacggaaucaag

SEQ ID NO: 1995924 - RNA, 19 nt, Homo sapiens
  misc_RNA (1)...(19): siRNA sense strand
ugcagacgcuugcccagaa

SEQ ID NO: 1995925 - RNA, 19 nt, Homo sapiens
  misc_RNA (1)...(19): siRNA sense strand
ugagcaaccuugagagcau

SEQ ID NO: 1995926 - RNA, 19 nt, Homo sapiens
  misc_RNA (1)...(19): siRNA sense strand
cagcugaugcagaauguga

SEQ ID NO: 1995927 - RNA, 19 nt, Homo sapiens
  misc_RNA (1)...(19): siRNA sense strand
gaacaguuuggcaacaauc

SEQ ID NO: 1995928 - RNA, 19 nt, Homo sapiens
  misc_RNA (1)...(19): siRNA sense strand
ccaaggacaaggaggaaau

SEQ ID NO: 1995929 - RNA, 19 nt, Homo sapiens
  misc_RNA (1)...(19): siRNA sense strand
uccaugggcuucaucaauc

SEQ ID NO: 1995930 - RNA, 19 nt, Homo sapiens
  misc_RNA (1)...(19): siRNA sense strand
caauagcccagaaaugcaa

SEQ ID NO: 1995931 - RNA, 19 nt, Homo sapiens
  misc_RNA (1)...(19): siRNA sense strand
gucuaacccugaucugaug

SEQ ID NO: 1995932 - RNA, 19 nt, Homo sapiens
  misc_RNA (1)...(19): siRNA sense strand
ucaauaacccugaacucau

SEQ ID NO: 1995933 - RNA, 19 nt, Homo sapiens
  misc_RNA (1)...(19): siRNA sense strand
ggucaaggaguucaaagag

SEQ ID NO: 1995934 - RNA, 19 nt, Homo sapiens
  misc_RNA (1)...(19): siRNA sense strand
ccugggcucugccaacuuc

SEQ ID NO: 1995935 - RNA, 19 nt, Homo sapiens
  misc_RNA (1)...(19): siRNA sense strand
gaugcagaaugugaucuca

SEQ ID NO: 1995936 - RNA, 19 nt, Homo sapiens
  misc_RNA (1)...(19): siRNA sense strand
ggcuggaaguggaaacuca

SEQ ID NO: 1995937 - RNA, 19 nt, Homo sapiens
  misc_RNA (1)...(19): siRNA sense strand
gcccugagcaaccuugaga

SEQ ID NO: 1995938 - RNA, 19 nt, Homo sapiens
  misc_RNA (1)...(19): siRNA sense strand
cgccagaagugagauuuca

SEQ ID NO: 1995939 - RNA, 19 nt, Homo sapiens
  misc_RNA (1)...(19): siRNA sense strand
cugcucagaugauggugaa

SEQ ID NO: 1995940 - RNA, 19 nt, Homo sapiens
  misc_RNA (1)...(19): siRNA sense strand
caaggacaaggaggaaauu

SEQ ID NO: 1995941 - RNA, 19 nt, Homo sapiens
  misc_RNA (1)...(19): siRNA sense strand
guccauacucucuggcuuu

SEQ ID NO: 1995942 - RNA, 19 nt, Homo sapiens
  misc_RNA (1)...(19): siRNA sense strand
gugcagacgccagaaguga

SEQ ID NO: 1995943 - RNA, 19 nt, Homo sapiens
  misc_RNA (1)...(19): siRNA sense strand
ccagccacaucuucuccaa

SEQ ID NO: 1995944 - RNA, 19 nt, Homo sapiens
  misc_RNA (1)...(19): siRNA sense strand
gcucagaugauggugaaug

SEQ ID NO: 1995945 - RNA, 19 nt, Homo sapiens
  misc_RNA (1)...(19): siRNA sense strand
uaugaugucuaacccugau

SEQ ID NO: 1995946 - RNA, 19 nt, Homo sapiens
  misc_RNA (1)...(19): siRNA sense strand
gcuacugcguccauacucu

SEQ ID NO: 1995947 - RNA, 19 nt, Homo sapiens
  misc_RNA (1)...(19): siRNA sense strand
gcagauccagcagggacua

SEQ ID NO: 1995948 - RNA, 19 nt, Homo sapiens
  misc_RNA (1)...(19): siRNA sense strand
guucaauagcccagaaaug

SEQ ID NO: 1995949 - RNA, 19 nt, Homo sapiens
  misc_RNA (1)...(19): siRNA sense strand
guuuaaggcucagcaggau

SEQ ID NO: 1995950 - RNA, 19 nt, Homo sapiens
  misc_RNA (1)...(19): siRNA sense strand
uggcaacaaucccuucucu

SEQ ID NO: 1995951 - RNA, 19 nt, Homo sapiens
  misc_RNA (1)...(19): siRNA sense strand
gcagacgcuugcccagaac

SEQ ID NO: 1995952 - RNA, 19 nt, Homo sapiens
  misc_RNA (1)...(19): siRNA sense strand
ucaucaaucgugaggcuaa

SEQ ID NO: 1995953 - RNA, 19 nt, Homo sapiens
  misc_RNA (1)...(19): siRNA sense strand
agccacaucuucuccaaca

SEQ ID NO: 1995954 - RNA, 19 nt, Homo sapiens
  misc_RNA (1)...(19): siRNA sense strand
cugaugcgucacaugauua

SEQ ID NO: 1995955 - RNA, 19 nt, Homo sapiens
  misc_RNA (1)...(19): siRNA sense strand
ggaauccagccaugaugca

SEQ ID NO: 1995956 - RNA, 19 nt, Homo sapiens
  misc_RNA (1)...(19): siRNA sense strand
aggaggaaauugugaucug

SEQ ID NO: 1995957 - RNA, 19 nt, Homo sapiens
  misc_RNA (1)...(19): siRNA sense strand
ucaaggacgggcucacugu

SEQ ID NO: 1995958 - RNA, 19 nt, Homo sapiens
  misc_RNA (1)...(19): siRNA sense strand
ggaguucaaagaggaaauc

SEQ ID NO: 1995959 - RNA, 19 nt, Homo sapiens
  misc_RNA (1)...(19): siRNA sense strand
gggucagggauguucaaua

SEQ ID NO: 1995960 - RNA, 19 nt, Homo sapiens
  misc_RNA (1)...(19): siRNA sense strand
caaggaggaaauugugauc

SEQ ID NO: 1995961 - RNA, 19 nt, Homo sapiens
  misc_RNA (1)...(19): siRNA sense strand
cagccaugaugcaagagau

SEQ ID NO: 1995962 - RNA, 19 nt, Homo sapiens
  misc_RNA (1)...(19): siRNA sense strand
gcucggaauccagccauga

SEQ ID NO: 1995963 - RNA, 19 nt, Homo sapiens
  misc_RNA (1)...(19): siRNA sense strand
caaggaguucaaagaggaa

SEQ ID NO: 1995964 - RNA, 19 nt, Homo sapiens
  misc_RNA (1)...(19): siRNA sense strand
gccugcagcucccagucuu

SEQ ID NO: 1995965 - RNA, 19 nt, Homo sapiens
  misc_RNA (1)...(19): siRNA sense strand
gaauccagccaugaugcaa

SEQ ID NO: 1995966 - RNA, 19 nt, Homo sapiens
  misc_RNA (1)...(19): siRNA sense strand
gaucagccacaugcucaau

SEQ ID NO: 1995967 - RNA, 19 nt, Homo sapiens
  misc_RNA (1)...(19): siRNA sense strand
cucagaugauggugaaugu

SEQ ID NO: 1995968 - RNA, 19 nt, Homo sapiens
  misc_RNA (1)...(19): siRNA sense strand
uuaaggcucagcaggauca

SEQ ID NO: 1995969 - RNA, 19 nt, Homo sapiens
  misc_RNA (1)...(19): siRNA sense strand
ccuuggcuccuuugggaua

SEQ ID NO: 1995970 - RNA, 19 nt, Homo sapiens
  misc_RNA (1)...(19): siRNA sense strand
gaugcagaacccagaguca

SEQ ID NO: 1995971 - RNA, 19 nt, Homo sapiens
  misc_RNA (1)...(19): siRNA sense strand
gaaauugcacauuccauua

SEQ ID NO: 1995972 - RNA, 19 nt, Homo sapiens
  misc_RNA (1)...(19): siRNA sense strand
ggaaauacaacacuugaaa

SEQ ID NO: 1995973 - RNA, 19 nt, Homo sapiens
  misc_RNA (1)...(19): siRNA sense strand
gcacaaagcaucaaacuac

SEQ ID NO: 1995974 - RNA, 19 nt, Homo sapiens
  misc_RNA (1)...(19): siRNA sense strand
ccacacagccuccagauga

SEQ ID NO: 1995975 - RNA, 19 nt, Homo sapiens
  misc_RNA (1)...(19): siRNA sense strand
gcuuggacccuauuauuua

SEQ ID NO: 1995976 - RNA, 19 nt, Homo sapiens
  misc_RNA (1)...(19): siRNA sense strand
ggacggaaguggcacaaag

SEQ ID NO: 1995977 - RNA, 19 nt, Homo sapiens
  misc_RNA (1)...(19): siRNA sense strand
gcuacuaucugcugcaaau

SEQ ID NO: 1995978 - RNA, 19 nt, Homo sapiens
  misc_RNA (1)...(19): siRNA sense strand
gaugaauccugcucucaga

SEQ ID NO: 1995979 - RNA, 19 nt, Homo sapiens
  misc_RNA (1)...(19): siRNA sense strand
gaaagaauucacucugcua

SEQ ID NO: 1995980 - RNA, 19 nt, Homo sapiens
  misc_RNA (1)...(19): siRNA sense strand
guauagaacugaaaaguga

SEQ ID NO: 1995981 - RNA, 19 nt, Homo sapiens
  misc_RNA (1)...(19): siRNA sense strand
uguaagaaauugcacauuc

SEQ ID NO: 1995982 - RNA, 19 nt, Homo sapiens
  misc_RNA (1)...(19): siRNA sense strand
gaaaucuugcgguauauga

SEQ ID NO: 1995983 - RNA, 19 nt, Homo sapiens
  misc_RNA (1)...(19): siRNA sense strand
gaaaucuagccgcaacaua

SEQ ID NO: 1995984 - RNA, 19 nt, Homo sapiens
  misc_RNA (1)...(19): siRNA sense strand
gaauuccacuucggucaaa

SEQ ID NO: 1995985 - RNA, 19 nt, Homo sapiens
  misc_RNA (1)...(19): siRNA sense strand
caacauguacgucagcauu

SEQ ID NO: 1995986 - RNA, 19 nt, Homo sapiens
  misc_RNA (1)...(19): siRNA sense strand
agaauucacucugcuacua

SEQ ID NO: 1995987 - RNA, 19 nt, Homo sapiens
  misc_RNA (1)...(19): siRNA sense strand
gcaaacuucugucagugau

SEQ ID NO: 1995988 - RNA, 19 nt, Homo sapiens
  misc_RNA (1)...(19): siRNA sense strand
uuagggagguuacacaaau

SEQ ID NO: 1995989 - RNA, 19 nt, Homo sapiens
  misc_RNA (1)...(19): siRNA sense strand
uagggagguuacacaaaua

SEQ ID NO: 1995990 - RNA, 19 nt, Homo sapiens
  misc_RNA (1)...(19): siRNA sense strand
gaggaaauacaacacuuga

SEQ ID NO: 1995991 - RNA, 19 nt, Homo sapiens
  misc_RNA (1)...(19): siRNA sense strand
gaaauacaacacuugaaag

SEQ ID NO: 1995992 - RNA, 19 nt, Homo sapiens
  misc_RNA (1)...(19): siRNA sense strand
cuaagaguuucaucaucua

SEQ ID NO: 1995993 - RNA, 19 nt, Homo sapiens
  misc_RNA (1)...(19): siRNA sense strand
auacugcuaucacaaagaa

SEQ ID NO: 1995994 - RNA, 19 nt, Homo sapiens
  misc_RNA (1)...(19): siRNA sense strand
caggauggauauucuuuua

SEQ ID NO: 1995995 - RNA, 19 nt, Homo sapiens
  misc_RNA (1)...(19): siRNA sense strand
cuagacauuuccagaauca

SEQ ID NO: 1995996 - RNA, 19 nt, Homo sapiens
  misc_RNA (1)...(19): siRNA sense strand
gcuuugacagguauuauaa

SEQ ID NO: 1995997 - RNA, 19 nt, Homo sapiens
  misc_RNA (1)...(19): siRNA sense strand
ucuaagaguuucaucaucu

SEQ ID NO: 1995998 - RNA, 19 nt, Homo sapiens
  misc_RNA (1)...(19): siRNA sense strand
caucagcuuugacagguau

SEQ ID NO: 1995999 - RNA, 19 nt, Homo sapiens
  misc_RNA (1)...(19): siRNA sense strand
gcgggaauccuacucaaug

SEQ ID NO: 1996000 - RNA, 19 nt, Homo sapiens
  misc_RNA (1)...(19): siRNA sense strand
gaucauuccugugcuguac

SEQ ID NO: 1996001 - RNA, 19 nt, Homo sapiens
  misc_RNA (1)...(19): siRNA sense strand
caucaucuaucucaagaac

SEQ ID NO: 1996002 - RNA, 19 nt, Homo sapiens
  misc_RNA (1)...(19): siRNA sense strand
cauuacagcugccagucaa

SEQ ID NO: 1996003 - RNA, 19 nt, Homo sapiens
  misc_RNA (1)...(19): siRNA sense strand
cagcaucguguuuguguuu

SEQ ID NO: 1996004 - RNA, 19 nt, Homo sapiens
  misc_RNA (1)...(19): siRNA sense strand
aaaucuagccgcaacauau

SEQ ID NO: 1996005 - RNA, 19 nt, Homo sapiens
  misc_RNA (1)...(19): siRNA sense strand
gaauucacucugcuacuau

SEQ ID NO: 1996006 - RNA, 19 nt, Homo sapiens
  misc_RNA (1)...(19): siRNA sense strand
gaaguggcacaaagcauca

SEQ ID NO: 1996007 - RNA, 19 nt, Homo sapiens
  misc_RNA (1)...(19): siRNA sense strand
guaagaaauugcacauucc

SEQ ID NO: 1996008 - RNA, 19 nt, Homo sapiens
  misc_RNA (1)...(19): siRNA sense strand
ucaucuaucucaagaacau

SEQ ID NO: 1996009 - RNA, 19 nt, Homo sapiens
  misc_RNA (1)...(19): siRNA sense strand
agaaauugcacauuccauu

SEQ ID NO: 1996010 - RNA, 19 nt, Homo sapiens
  misc_RNA (1)...(19): siRNA sense strand
aaacuucugucagugauag

SEQ ID NO: 1996011 - RNA, 19 nt, Homo sapiens
  misc_RNA (1)...(19): siRNA sense strand
cgucagcauuguguucuuu

SEQ ID NO: 1996012 - RNA, 19 nt, Homo sapiens
  misc_RNA (1)...(19): siRNA sense strand
acuaucugcugcaaaugua

SEQ ID NO: 1996013 - RNA, 19 nt, Homo sapiens
  misc_RNA (1)...(19): siRNA sense strand
ggaauuccacuucggucaa

SEQ ID NO: 1996014 - RNA, 19 nt, Homo sapiens
  misc_RNA (1)...(19): siRNA sense strand
guggccaucuucuggauug

SEQ ID NO: 1996015 - RNA, 19 nt, Homo sapiens
  misc_RNA (1)...(19): siRNA sense strand
ugcgguauaugaaagaauu

SEQ ID NO: 1996016 - RNA, 19 nt, Homo sapiens
  misc_RNA (1)...(19): siRNA sense strand
acacuugaaagcacagaua

SEQ ID NO: 1996017 - RNA, 19 nt, Homo sapiens
  misc_RNA (1)...(19): siRNA sense strand
gaccuagacauuuccagaa

SEQ ID NO: 1996018 - RNA, 19 nt, Homo sapiens
  misc_RNA (1)...(19): siRNA sense strand
ccuggcagcugaacguguu

SEQ ID NO: 1996019 - RNA, 19 nt, Homo sapiens
  misc_RNA (1)...(19): siRNA sense strand
agacauuuccagaaucaaa

SEQ ID NO: 1996020 - RNA, 19 nt, Homo sapiens
  misc_RNA (1)...(19): siRNA sense strand
cagcugaacguguuugugu

SEQ ID NO: 1996021 - RNA, 19 nt, Homo sapiens
  misc_RNA (1)...(19): siRNA sense strand
gucagugaguuacagcaaa

SEQ ID NO: 1996022 - RNA, 19 nt, Homo sapiens
  misc_RNA (1)...(19): siRNA sense strand
cauauucagcaucguguuu

SEQ ID NO: 1996023 - RNA, 19 nt, Homo sapiens
  misc_RNA (1)...(19): siRNA sense strand
caaagcaucaaacuacauc

SEQ ID NO: 1996024 - RNA, 19 nt, Homo sapiens
  misc_RNA (1)...(19): siRNA sense strand
cacaaagcaucaaacuaca

SEQ ID NO: 1996025 - RNA, 19 nt, Homo sapiens
  misc_RNA (1)...(19): siRNA sense strand
aagaggaaauacaacacuu

SEQ ID NO: 1996026 - RNA, 19 nt, Homo sapiens
  misc_RNA (1)...(19): siRNA sense strand
gcucuucuacgucaacaug

SEQ ID NO: 1996027 - RNA, 19 nt, Homo sapiens
  misc_RNA (1)...(19): siRNA sense strand
cacacagccuccagaugaa

SEQ ID NO: 1996028 - RNA, 19 nt, Homo sapiens
  misc_RNA (1)...(19): siRNA sense strand
ccuccuugcuguuccaaau

SEQ ID NO: 1996029 - RNA, 19 nt, Homo sapiens
  misc_RNA (1)...(19): siRNA sense strand
ucucugccgugcucuucua

SEQ ID NO: 1996030 - RNA, 19 nt, Homo sapiens
  misc_RNA (1)...(19): siRNA sense strand
cuuggacccuauuauuuau

SEQ ID NO: 1996031 - RNA, 19 nt, Homo sapiens
  misc_RNA (1)...(19): siRNA sense strand
guacgucagcauuguguuc

SEQ ID NO: 1996032 - RNA, 19 nt, Homo sapiens
  misc_RNA (1)...(19): siRNA sense strand
cauuguuauugcugacuuu

SEQ ID NO: 1996033 - RNA, 19 nt, Homo sapiens
  misc_RNA (1)...(19): siRNA sense strand
gccaucuucuggauugugu

SEQ ID NO: 1996034 - RNA, 19 nt, Homo sapiens
  misc_RNA (1)...(19): siRNA sense strand
caaacuucugucagugaua

SEQ ID NO: 1996035 - RNA, 19 nt, Homo sapiens
  misc_RNA (1)...(19): siRNA sense strand
ucuucuacgucaacaugua

SEQ ID NO: 1996036 - RNA, 19 nt, Homo sapiens
  misc_RNA (1)...(19): siRNA sense strand
uguuauugcugacuuugug

SEQ ID NO: 1996037 - RNA, 19 nt, Homo sapiens
  misc_RNA (1)...(19): siRNA sense strand
ggacccuauuauuuauuuc

SEQ ID NO: 1996038 - RNA, 19 nt, Homo sapiens
  misc_RNA (1)...(19): siRNA sense strand
aaucuagccgcaacauauu

SEQ ID NO: 1996039 - RNA, 19 nt, Homo sapiens
  misc_RNA (1)...(19): siRNA sense strand
ucuauacugcuaucacaaa

SEQ ID NO: 1996040 - RNA, 19 nt, Homo sapiens
  misc_RNA (1)...(19): siRNA sense strand
caucuucuggauuguguuu

SEQ ID NO: 1996041 - RNA, 19 nt, Homo sapiens
  misc_RNA (1)...(19): siRNA sense strand
ggagugucaggauggauau

SEQ ID NO: 1996042 - RNA, 19 nt, Homo sapiens
  misc_RNA (1)...(19): siRNA sense strand
ugccagccguuuagggaaa

SEQ ID NO: 1996043 - RNA, 19 nt, Homo sapiens
  misc_RNA (1)...(19): siRNA sense strand
ggcacaaagcaucaaacua

SEQ ID NO: 1996044 - RNA, 19 nt, Homo sapiens
  misc_RNA (1)...(19): siRNA sense strand
ucagugaguuacagcaaac

SEQ ID NO: 1996045 - RNA, 19 nt, Homo sapiens
  misc_RNA (1)...(19): siRNA sense strand
ucuuugggcucaucagcuu

SEQ ID NO: 1996046 - RNA, 19 nt, Homo sapiens
  misc_RNA (1)...(19): siRNA sense strand
agaguuucaucaucuaucu

SEQ ID NO: 1996047 - RNA, 19 nt, Homo sapiens
  misc_RNA (1)...(19): siRNA sense strand
ggagguuacacaaauaaaa

SEQ ID NO: 1996048 - RNA, 19 nt, Homo sapiens
  misc_RNA (1)...(19): siRNA sense strand
ucaucagcuuugacaggua

SEQ ID NO: 1996049 - RNA, 19 nt, Homo sapiens
  misc_RNA (1)...(19): siRNA sense strand
gagccugacuuuuccuuuc

SEQ ID NO: 1996050 - RNA, 19 nt, Homo sapiens
  misc_RNA (1)...(19): siRNA sense strand
ccuagacauuuccagaauc

SEQ ID NO: 1996051 - RNA, 19 nt, Homo sapiens
  misc_RNA (1)...(19): siRNA sense strand
ucaauucaaccuccacaca

SEQ ID NO: 1996052 - RNA, 19 nt, Homo sapiens
  misc_RNA (1)...(19): siRNA sense strand
uggagugucaggauggaua

SEQ ID NO: 1996053 - RNA, 19 nt, Homo sapiens
  misc_RNA (1)...(19): siRNA sense strand
guuagggagguuacacaaa

SEQ ID NO: 1996054 - RNA, 19 nt, Homo sapiens
  misc_RNA (1)...(19): siRNA sense strand
gggcucaucagcuuugaca

SEQ ID NO: 1996055 - RNA, 19 nt, Homo sapiens
  misc_RNA (1)...(19): siRNA sense strand
uuccugugcuguacuguau

SEQ ID NO: 1996056 - RNA, 19 nt, Homo sapiens
  misc_RNA (1)...(19): siRNA sense strand
caaaagaggaaauacaaca

SEQ ID NO: 1996057 - RNA, 19 nt, Homo sapiens
  misc_RNA (1)...(19): siRNA sense strand
guacuguauggucuucauu

SEQ ID NO: 1996058 - RNA, 19 nt, Homo sapiens
  misc_RNA (1)...(19): siRNA sense strand
gggagguuacacaaauaaa

SEQ ID NO: 1996059 - RNA, 19 nt, Homo sapiens
  misc_RNA (1)...(19): siRNA sense strand
gucaggauggauauucuuu

SEQ ID NO: 1996060 - RNA, 19 nt, Homo sapiens
  misc_RNA (1)...(19): siRNA sense strand
ucuuuggacuucuuucauc

SEQ ID NO: 1996061 - RNA, 19 nt, Homo sapiens
  misc_RNA (1)...(19): siRNA sense strand
gccguuuagggaaaucuua

SEQ ID NO: 1996062 - RNA, 19 nt, Homo sapiens
  misc_RNA (1)...(19): siRNA sense strand
gauaguauggaugcucaug

SEQ ID NO: 1996063 - RNA, 19 nt, Homo sapiens
  misc_RNA (1)...(19): siRNA sense strand
gugaugagccugacuuuuc

SEQ ID NO: 1996064 - RNA, 19 nt, Homo sapiens
  misc_RNA (1)...(19): siRNA sense strand
aaucuugcgguauaugaaa

SEQ ID NO: 1996065 - RNA, 19 nt, Homo sapiens
  misc_RNA (1)...(19): siRNA sense strand
ugucagugauaguauggau

SEQ ID NO: 1996066 - RNA, 19 nt, Homo sapiens
  misc_RNA (1)...(19): siRNA sense strand
uucaucaucuaucucaaga

SEQ ID NO: 1996067 - RNA, 19 nt, Homo sapiens
  misc_RNA (1)...(19): siRNA sense strand
agaggaaauacaacacuug

SEQ ID NO: 1996068 - RNA, 19 nt, Homo sapiens
  misc_RNA (1)...(19): siRNA sense strand
gcuguacuguauggucuuc

SEQ ID NO: 1996069 - RNA, 19 nt, Homo sapiens
  misc_RNA (1)...(19): siRNA sense strand
agaaccuccugaucacuca

SEQ ID NO: 1996070 - RNA, 19 nt, Homo sapiens
  misc_RNA (1)...(19): siRNA sense strand
cgggaauccuacucaaugg

SEQ ID NO: 1996071 - RNA, 19 nt, Homo sapiens
  misc_RNA (1)...(19): siRNA sense strand
ggaagagaguggugacauc

SEQ ID NO: 1996072 - RNA, 19 nt, Homo sapiens
  misc_RNA (1)...(19): siRNA sense strand
gaagagaggagcacagaag

SEQ ID NO: 1996073 - RNA, 19 nt, Homo sapiens
  misc_RNA (1)...(19): siRNA sense strand
gaauucagcaucuccagaa

SEQ ID NO: 1996074 - RNA, 19 nt, Homo sapiens
  misc_RNA (1)...(19): siRNA sense strand
gacaucgucucucucauuc

SEQ ID NO: 1996075 - RNA, 19 nt, Homo sapiens
  misc_RNA (1)...(19): siRNA sense strand
uccagaagcugucccaaga

SEQ ID NO: 1996076 - RNA, 19 nt, Homo sapiens
  misc_RNA (1)...(19): siRNA sense strand
agagcuagaugaagccauu

SEQ ID NO: 1996077 - RNA, 19 nt, Homo sapiens
  misc_RNA (1)...(19): siRNA sense strand
ugacaucgucucucucauu

SEQ ID NO: 1996078 - RNA, 19 nt, Homo sapiens
  misc_RNA (1)...(19): siRNA sense strand
gcacagaagggcaguggau

SEQ ID NO: 1996079 - RNA, 19 nt, Homo sapiens
  misc_RNA (1)...(19): siRNA sense strand
caucgucucucucauucau

SEQ ID NO: 1996080 - RNA, 19 nt, Homo sapiens
  misc_RNA (1)...(19): siRNA sense strand
gaagagcacccggcugucu

SEQ ID NO: 1996081 - RNA, 19 nt, Homo sapiens
  misc_RNA (1)...(19): siRNA sense strand
gcucacaugcccacccauu

SEQ ID NO: 1996082 - RNA, 19 nt, Homo sapiens
  misc_RNA (1)...(19): siRNA sense strand
ggugacaucgucucucuca

SEQ ID NO: 1996083 - RNA, 19 nt, Homo sapiens
  misc_RNA (1)...(19): siRNA sense strand
ggaagagaggagcacagaa

SEQ ID NO: 1996084 - RNA, 19 nt, Homo sapiens
  misc_RNA (1)...(19): siRNA sense strand
ccagcgagucugacaguga

SEQ ID NO: 1996085 - RNA, 19 nt, Homo sapiens
  misc_RNA (1)...(19): siRNA sense strand
guggugacaucgucucucu

SEQ ID NO: 1996086 - RNA, 19 nt, Homo sapiens
  misc_RNA (1)...(19): siRNA sense strand
gagcuagaugaagccauua

SEQ ID NO: 1996087 - RNA, 19 nt, Homo sapiens
  misc_RNA (1)...(19): siRNA sense strand
gcucagcuaagagugcuuu

SEQ ID NO: 1996088 - RNA, 19 nt, Homo sapiens
  misc_RNA (1)...(19): siRNA sense strand
ucacaugcccacccauuac

SEQ ID NO: 1996089 - RNA, 19 nt, Homo sapiens
  misc_RNA (1)...(19): siRNA sense strand
gcuagaugaagccauuaug

SEQ ID NO: 1996090 - RNA, 19 nt, Homo sapiens
  misc_RNA (1)...(19): siRNA sense strand
ugcagacaguuccaaagga

SEQ ID NO: 1996091 - RNA, 19 nt, Homo sapiens
  misc_RNA (1)...(19): siRNA sense strand
gugcagacaguuccaaagg

SEQ ID NO: 1996092 - RNA, 19 nt, Homo sapiens
  misc_RNA (1)...(19): siRNA sense strand
caucaggagaccucuguag

SEQ ID NO: 1996093 - RNA, 19 nt, Homo sapiens
  misc_RNA (1)...(19): siRNA sense strand
gaacagaaguccugaauca

SEQ ID NO: 1996094 - RNA, 19 nt, Homo sapiens
  misc_RNA (1)...(19): siRNA sense strand
ggaaagcaauucagaguuu

SEQ ID NO: 1996095 - RNA, 19 nt, Homo sapiens
  misc_RNA (1)...(19): siRNA sense strand
ggacaaguauucuuuaugu

SEQ ID NO: 1996096 - RNA, 19 nt, Homo sapiens
  misc_RNA (1)...(19): siRNA sense strand
gcaauggccuauaacauga

SEQ ID NO: 1996097 - RNA, 19 nt, Homo sapiens
  misc_RNA (1)...(19): siRNA sense strand
ccacagaggacuuagauua

SEQ ID NO: 1996098 - RNA, 19 nt, Homo sapiens
  misc_RNA (1)...(19): siRNA sense strand
guuagaggcuuuagaacua

SEQ ID NO: 1996099 - RNA, 19 nt, Homo sapiens
  misc_RNA (1)...(19): siRNA sense strand
uaaaucagcagcagaauaa

SEQ ID NO: 1996100 - RNA, 19 nt, Homo sapiens
  misc_RNA (1)...(19): siRNA sense strand
ggagauagcccaguauaaa

SEQ ID NO: 1996101 - RNA, 19 nt, Homo sapiens
  misc_RNA (1)...(19): siRNA sense strand
caaagucaaugcuguuuau

SEQ ID NO: 1996102 - RNA, 19 nt, Homo sapiens
  misc_RNA (1)...(19): siRNA sense strand
ggacuuagauuaugguuuu

SEQ ID NO: 1996103 - RNA, 19 nt, Homo sapiens
  misc_RNA (1)...(19): siRNA sense strand
ccaaagagaagguuuauga

SEQ ID NO: 1996104 - RNA, 19 nt, Homo sapiens
  misc_RNA (1)...(19): siRNA sense strand
gaucaaguguuuagaauac

SEQ ID NO: 1996105 - RNA, 19 nt, Homo sapiens
  misc_RNA (1)...(19): siRNA sense strand
cuacagaauugccucauuu

SEQ ID NO: 1996106 - RNA, 19 nt, Homo sapiens
  misc_RNA (1)...(19): siRNA sense strand
ggaaugcugugaagaacuu

SEQ ID NO: 1996107 - RNA, 19 nt, Homo sapiens
  misc_RNA (1)...(19): siRNA sense strand
caaggaaucuguagguaug

SEQ ID NO: 1996108 - RNA, 19 nt, Homo sapiens
  misc_RNA (1)...(19): siRNA sense strand
ugaaugggaugguaacaaa

SEQ ID NO: 1996109 - RNA, 19 nt, Homo sapiens
  misc_RNA (1)...(19): siRNA sense strand
gaagacauauguguugaau

SEQ ID NO: 1996110 - RNA, 19 nt, Homo sapiens
  misc_RNA (1)...(19): siRNA sense strand
gcaacagaaucaccuaaug

SEQ ID NO: 1996111 - RNA, 19 nt, Homo sapiens
  misc_RNA (1)...(19): siRNA sense strand
guaacgcccucucuggaua

SEQ ID NO: 1996112 - RNA, 19 nt, Homo sapiens
  misc_RNA (1)...(19): siRNA sense strand
gaaagugcuuagugaaugu

SEQ ID NO: 1996113 - RNA, 19 nt, Homo sapiens
  misc_RNA (1)...(19): siRNA sense strand
gcaguuacauggaaaccuu

SEQ ID NO: 1996114 - RNA, 19 nt, Homo sapiens
  misc_RNA (1)...(19): siRNA sense strand
gcaguugauccucgaauua

SEQ ID NO: 1996115 - RNA, 19 nt, Homo sapiens
  misc_RNA (1)...(19): siRNA sense strand
agaaaucgcuggguaaaga

SEQ ID NO: 1996116 - RNA, 19 nt, Homo sapiens
  misc_RNA (1)...(19): siRNA sense strand
ccaaucuucuuucaacuuu

SEQ ID NO: 1996117 - RNA, 19 nt, Homo sapiens
  misc_RNA (1)...(19): siRNA sense strand
caaagaagaaucucaucua

SEQ ID NO: 1996118 - RNA, 19 nt, Homo sapiens
  misc_RNA (1)...(19): siRNA sense strand
cagcacaccuuguuaaauc

SEQ ID NO: 1996119 - RNA, 19 nt, Homo sapiens
  misc_RNA (1)...(19): siRNA sense strand
guagaagaguuaagaagga

SEQ ID NO: 1996120 - RNA, 19 nt, Homo sapiens
  misc_RNA (1)...(19): siRNA sense strand
gcacagaggcccuucuuuc

SEQ ID NO: 1996121 - RNA, 19 nt, Homo sapiens
  misc_RNA (1)...(19): siRNA sense strand
ggaaauagaacgcaucaca

SEQ ID NO: 1996122 - RNA, 19 nt, Homo sapiens
  misc_RNA (1)...(19): siRNA sense strand
caaauuuccucgcaaagau

SEQ ID NO: 1996123 - RNA, 19 nt, Homo sapiens
  misc_RNA (1)...(19): siRNA sense strand
cauaaacagacaccaauua

SEQ ID NO: 1996124 - RNA, 19 nt, Homo sapiens
  misc_RNA (1)...(19): siRNA sense strand
uagaaagggugcuaaaugu

SEQ ID NO: 1996125 - RNA, 19 nt, Homo sapiens
  misc_RNA (1)...(19): siRNA sense strand
aaacagaaguuaguacaga

SEQ ID NO: 1996126 - RNA, 19 nt, Homo sapiens
  misc_RNA (1)...(19): siRNA sense strand
agacuaggauucucauuug

SEQ ID NO: 1996127 - RNA, 19 nt, Homo sapiens
  misc_RNA (1)...(19): siRNA sense strand
cagcagagacauugaagua

SEQ ID NO: 1996128 - RNA, 19 nt, Homo sapiens
  misc_RNA (1)...(19): siRNA sense strand
gcaauccuauuagagcaua

SEQ ID NO: 1996129 - RNA, 19 nt, Homo sapiens
  misc_RNA (1)...(19): siRNA sense strand
guuguuaccuugaauacuu

SEQ ID NO: 1996130 - RNA, 19 nt, Homo sapiens
  misc_RNA (1)...(19): siRNA sense strand
gaaguaagcacuccucaag

SEQ ID NO: 1996131 - RNA, 19 nt, Homo sapiens
  misc_RNA (1)...(19): siRNA sense strand
ggagaaggaucaacaugag

SEQ ID NO: 1996132 - RNA, 19 nt, Homo sapiens
  misc_RNA (1)...(19): siRNA sense strand
gaaagggugcuaaauguuc

SEQ ID NO: 1996133 - RNA, 19 nt, Homo sapiens
  misc_RNA (1)...(19): siRNA sense strand
aaagauuucuacccacuaa

SEQ ID NO: 1996134 - RNA, 19 nt, Homo sapiens
  misc_RNA (1)...(19): siRNA sense strand
acaaugggaugaacaguug

SEQ ID NO: 1996135 - RNA, 19 nt, Homo sapiens
  misc_RNA (1)...(19): siRNA sense strand
ccaccucaaucaagacuuu

SEQ ID NO: 1996136 - RNA, 19 nt, Homo sapiens
  misc_RNA (1)...(19): siRNA sense strand
gcucugugcucuauuggaa

SEQ ID NO: 1996137 - RNA, 19 nt, Homo sapiens
  misc_RNA (1)...(19): siRNA sense strand
uagaauacgugcugaacuu

SEQ ID NO: 1996138 - RNA, 19 nt, Homo sapiens
  misc_RNA (1)...(19): siRNA sense strand
ggagagaaaccuucacguu

SEQ ID NO: 1996139 - RNA, 19 nt, Homo sapiens
  misc_RNA (1)...(19): siRNA sense strand
gaacaaggaaucuguaggu

SEQ ID NO: 1996140 - RNA, 19 nt, Homo sapiens
  misc_RNA (1)...(19): siRNA sense strand
guagaaagggugcuaaaug

SEQ ID NO: 1996141 - RNA, 19 nt, Homo sapiens
  misc_RNA (1)...(19): siRNA sense strand
gcauuacccugcugaguuc

SEQ ID NO: 1996142 - RNA, 19 nt, Homo sapiens
  misc_RNA (1)...(19): siRNA sense strand
caagaccucucaggguaua

SEQ ID NO: 1996143 - RNA, 19 nt, Homo sapiens
  misc_RNA (1)...(19): siRNA sense strand
gaaauagaacgcaucacaa

SEQ ID NO: 1996144 - RNA, 19 nt, Homo sapiens
  misc_RNA (1)...(19): siRNA sense strand
uaaccaaucuucuuucaac

SEQ ID NO: 1996145 - RNA, 19 nt, Homo sapiens
  misc_RNA (1)...(19): siRNA sense strand
cugcugaucucuacauaaa

SEQ ID NO: 1996146 - RNA, 19 nt, Homo sapiens
  misc_RNA (1)...(19): siRNA sense strand
ggauagcauuuaacacaga

SEQ ID NO: 1996147 - RNA, 19 nt, Homo sapiens
  misc_RNA (1)...(19): siRNA sense strand
gagcucaucuggcagcaau

SEQ ID NO: 1996148 - RNA, 19 nt, Homo sapiens
  misc_RNA (1)...(19): siRNA sense strand
ggucggcccuuguaccaaa

SEQ ID NO: 1996149 - RNA, 19 nt, Homo sapiens
  misc_RNA (1)...(19): siRNA sense strand
gaacuaaagaagacauaug

SEQ ID NO: 1996150 - RNA, 19 nt, Homo sapiens
  misc_RNA (1)...(19): siRNA sense strand
gaugaagauuguagacaug

SEQ ID NO: 1996151 - RNA, 19 nt, Homo sapiens
  misc_RNA (1)...(19): siRNA sense strand
ucacccaccugucaccaua

SEQ ID NO: 1996152 - RNA, 19 nt, Homo sapiens
  misc_RNA (1)...(19): siRNA sense strand
ccagaaugauggaauuguu

SEQ ID NO: 1996153 - RNA, 19 nt, Homo sapiens
  misc_RNA (1)...(19): siRNA sense strand
cuacagaagaucucgaaua

SEQ ID NO: 1996154 - RNA, 19 nt, Homo sapiens
  misc_RNA (1)...(19): siRNA sense strand
gcaagcugaugaagauugu

SEQ ID NO: 1996155 - RNA, 19 nt, Homo sapiens
  misc_RNA (1)...(19): siRNA sense strand
guaaacaccaccucaucua

SEQ ID NO: 1996156 - RNA, 19 nt, Homo sapiens
  misc_RNA (1)...(19): siRNA sense strand
aaagaagaaucucaucuag

SEQ ID NO: 1996157 - RNA, 19 nt, Homo sapiens
  misc_RNA (1)...(19): siRNA sense strand
gauaacagcagagacauug

SEQ ID NO: 1996158 - RNA, 19 nt, Homo sapiens
  misc_RNA (1)...(19): siRNA sense strand
ggaaucaaauccacagaac

SEQ ID NO: 1996159 - RNA, 19 nt, Homo sapiens
  misc_RNA (1)...(19): siRNA sense strand
aggagaagauguacaagaa

SEQ ID NO: 1996160 - RNA, 19 nt, Homo sapiens
  misc_RNA (1)...(19): siRNA sense strand
gaacuaccgcucccaugaa

SEQ ID NO: 1996161 - RNA, 19 nt, Homo sapiens
  misc_RNA (1)...(19): siRNA sense strand
gauuagaucauuacgugua

SEQ ID NO: 1996162 - RNA, 19 nt, Homo sapiens
  misc_RNA (1)...(19): siRNA sense strand
gaggaaagauggcccaaaa

SEQ ID NO: 1996163 - RNA, 19 nt, Homo sapiens
  misc_RNA (1)...(19): siRNA sense strand
gaguaaagguagagcacaa

SEQ ID NO: 1996164 - RNA, 19 nt, Homo sapiens
  misc_RNA (1)...(19): siRNA sense strand
gauaucacguggaagacuu

SEQ ID NO: 1996165 - RNA, 19 nt, Homo sapiens
  misc_RNA (1)...(19): siRNA sense strand
aaacagcucucaggcaguu

SEQ ID NO: 1996166 - RNA, 19 nt, Homo sapiens
  misc_RNA (1)...(19): siRNA sense strand
gaaaugccaccaccucaau

SEQ ID NO: 1996167 - RNA, 19 nt, Homo sapiens
  misc_RNA (1)...(19): siRNA sense strand
ccuauaacaugaaccuauu

SEQ ID NO: 1996168 - RNA, 19 nt, Homo sapiens
  misc_RNA (1)...(19): siRNA sense strand
ggaaaagucuucaucauac

SEQ ID NO: 1996169 - RNA, 19 nt, Homo sapiens
  misc_RNA (1)...(19): siRNA sense strand
cagaagagcugaaaaguca

SEQ ID NO: 1996170 - RNA, 19 nt, Homo sapiens
  misc_RNA (1)...(19): siRNA sense strand
gaucaaagcccaguuagag

SEQ ID NO: 1996171 - RNA, 19 nt, Homo sapiens
  misc_RNA (1)...(19): siRNA sense strand
gaagacagaagagcugaaa

SEQ ID NO: 1996172 - RNA, 19 nt, Homo sapiens
  misc_RNA (1)...(19): siRNA sense strand
caaaguaugcucagaaugg

SEQ ID NO: 1996173 - RNA, 19 nt, Homo sapiens
  misc_RNA (1)...(19): siRNA sense strand
gcaauggcuuuuacucaua

SEQ ID NO: 1996174 - RNA, 19 nt, Homo sapiens
  misc_RNA (1)...(19): siRNA sense strand
gcagaacccuuuuguacaa

SEQ ID NO: 1996175 - RNA, 19 nt, Homo sapiens
  misc_RNA (1)...(19): siRNA sense strand
gaaagagcaacuucuggaa

SEQ ID NO: 1996176 - RNA, 19 nt, Homo sapiens
  misc_RNA (1)...(19): siRNA sense strand
gagaagauguacaagaaaa

SEQ ID NO: 1996177 - RNA, 19 nt, Homo sapiens
  misc_RNA (1)...(19): siRNA sense strand
ccucugagcuuuucuauga

SEQ ID NO: 1996178 - RNA, 19 nt, Homo sapiens
  misc_RNA (1)...(19): siRNA sense strand
caaccuguauccaccauuc

SEQ ID NO: 1996179 - RNA, 19 nt, Homo sapiens
  misc_RNA (1)...(19): siRNA sense strand
ggacagcucagcccagaga

SEQ ID NO: 1996180 - RNA, 19 nt, Homo sapiens
  misc_RNA (1)...(19): siRNA sense strand
ucagcaaguucaaccuuaa

SEQ ID NO: 1996181 - RNA, 19 nt, Homo sapiens
  misc_RNA (1)...(19): siRNA sense strand
gaggagauagcccaguaua

SEQ ID NO: 1996182 - RNA, 19 nt, Homo sapiens
  misc_RNA (1)...(19): siRNA sense strand
gacaaaucauugaccaaga

SEQ ID NO: 1996183 - RNA, 19 nt, Homo sapiens
  misc_RNA (1)...(19): siRNA sense strand
gaaccaguacucaugcaaa

SEQ ID NO: 1996184 - RNA, 19 nt, Homo sapiens
  misc_RNA (1)...(19): siRNA sense strand
gcucuaagacugcagcauu

SEQ ID NO: 1996185 - RNA, 19 nt, Homo sapiens
  misc_RNA (1)...(19): siRNA sense strand
guugauccucgaauuauua

SEQ ID NO: 1996186 - RNA, 19 nt, Homo sapiens
  misc_RNA (1)...(19): siRNA sense strand
gagaaagugcuuagugaau

SEQ ID NO: 1996187 - RNA, 19 nt, Homo sapiens
  misc_RNA (1)...(19): siRNA sense strand
ugaacaagcaugugaauca

SEQ ID NO: 1996188 - RNA, 19 nt, Homo sapiens
  misc_RNA (1)...(19): siRNA sense strand
gaccagcuauuuacucagu

SEQ ID NO: 1996189 - RNA, 19 nt, Homo sapiens
  misc_RNA (1)...(19): siRNA sense strand
cagaagaucucgaauaccu

SEQ ID NO: 1996190 - RNA, 19 nt, Homo sapiens
  misc_RNA (1)...(19): siRNA sense strand
gauagcauuuaacacagaa

SEQ ID NO: 1996191 - RNA, 19 nt, Homo sapiens
  misc_RNA (1)...(19): siRNA sense strand
guacaaauacagaaucauc

SEQ ID NO: 1996192 - RNA, 19 nt, Homo sapiens
  misc_RNA (1)...(19): siRNA sense strand
agaagaaucucaucuagcu

SEQ ID NO: 1996193 - RNA, 19 nt, Homo sapiens
  misc_RNA (1)...(19): siRNA sense strand
gaaagcagcagacauaauu

SEQ ID NO: 1996194 - RNA, 19 nt, Homo sapiens
  misc_RNA (1)...(19): siRNA sense strand
gaacuaagucuuuaucaug

SEQ ID NO: 1996195 - RNA, 19 nt, Homo sapiens
  misc_RNA (1)...(19): siRNA sense strand
gcacagagcugacuuuuca

SEQ ID NO: 1996196 - RNA, 19 nt, Homo sapiens
  misc_RNA (1)...(19): siRNA sense strand
gaaacugaacccacaauaa

SEQ ID NO: 1996197 - RNA, 19 nt, Homo sapiens
  misc_RNA (1)...(19): siRNA sense strand
ccugguaucuuaauuauga

SEQ ID NO: 1996198 - RNA, 19 nt, Homo sapiens
  misc_RNA (1)...(19): siRNA sense strand
guaauacccuugccuggaa

SEQ ID NO: 1996199 - RNA, 19 nt, Homo sapiens
  misc_RNA (1)...(19): siRNA sense strand
gguauacucugcacuuuau

SEQ ID NO: 1996200 - RNA, 19 nt, Homo sapiens
  misc_RNA (1)...(19): siRNA sense strand
ugaaauguguugccuggua

SEQ ID NO: 1996201 - RNA, 19 nt, Homo sapiens
  misc_RNA (1)...(19): siRNA sense strand
cagaagauauggaucagaa

SEQ ID NO: 1996202 - RNA, 19 nt, Homo sapiens
  misc_RNA (1)...(19): siRNA sense strand
caacaaaggaucauugguu

SEQ ID NO: 1996203 - RNA, 19 nt, Homo sapiens
  misc_RNA (1)...(19): siRNA sense strand
gaaauguguugccugguau

SEQ ID NO: 1996204 - RNA, 19 nt, Homo sapiens
  misc_RNA (1)...(19): siRNA sense strand
gagagaaucuuagcuuuac

SEQ ID NO: 1996205 - RNA, 19 nt, Homo sapiens
  misc_RNA (1)...(19): siRNA sense strand
uguguugccugguaucuua

SEQ ID NO: 1996206 - RNA, 19 nt, Homo sapiens
  misc_RNA (1)...(19): siRNA sense strand
guggaaagcagcagacaua

SEQ ID NO: 1996207 - RNA, 19 nt, Homo sapiens
  misc_RNA (1)...(19): siRNA sense strand
ucagauacacccuauauga

SEQ ID NO: 1996208 - RNA, 19 nt, Homo sapiens
  misc_RNA (1)...(19): siRNA sense strand
gaaugaugcuugucugucu

SEQ ID NO: 1996209 - RNA, 19 nt, Homo sapiens
  misc_RNA (1)...(19): siRNA sense strand
ggagcccaauuacaucuuu

SEQ ID NO: 1996210 - RNA, 19 nt, Homo sapiens
  misc_RNA (1)...(19): siRNA sense strand
gcaauacacagaagauaug

SEQ ID NO: 1996211 - RNA, 19 nt, Homo sapiens
  misc_RNA (1)...(19): siRNA sense strand
gaaagaagugugcaaccuu

SEQ ID NO: 1996212 - RNA, 19 nt, Homo sapiens
  misc_RNA (1)...(19): siRNA sense strand
gauacacccuauaugaaau

SEQ ID NO: 1996213 - RNA, 19 nt, Homo sapiens
  misc_RNA (1)...(19): siRNA sense strand
gaagauauggaucagaaau

SEQ ID NO: 1996214 - RNA, 19 nt, Homo sapiens
  misc_RNA (1)...(19): siRNA sense strand
aaacugaacccacaauaau

SEQ ID NO: 1996215 - RNA, 19 nt, Homo sapiens
  misc_RNA (1)...(19): siRNA sense strand
acucagaacuaagucuuua

SEQ ID NO: 1996216 - RNA, 19 nt, Homo sapiens
  misc_RNA (1)...(19): siRNA sense strand
caauccaaauccugaauga

SEQ ID NO: 1996217 - RNA, 19 nt, Homo sapiens
  misc_RNA (1)...(19): siRNA sense strand
gaaaggaacggauguagac

SEQ ID NO: 1996218 - RNA, 19 nt, Homo sapiens
  misc_RNA (1)...(19): siRNA sense strand
aacaaaggaucauugguuu

SEQ ID NO: 1996219 - RNA, 19 nt, Homo sapiens
  misc_RNA (1)...(19): siRNA sense strand
gagcccaauuacaucuuua

SEQ ID NO: 1996220 - RNA, 19 nt, Homo sapiens
  misc_RNA (1)...(19): siRNA sense strand
caaaggaucauugguuuau

SEQ ID NO: 1996221 - RNA, 19 nt, Homo sapiens
  misc_RNA (1)...(19): siRNA sense strand
gcagcuacauuacugucaa

SEQ ID NO: 1996222 - RNA, 19 nt, Homo sapiens
  misc_RNA (1)...(19): siRNA sense strand
guugauagauuuguugugu

SEQ ID NO: 1996223 - RNA, 19 nt, Homo sapiens
  misc_RNA (1)...(19): siRNA sense strand
cuggcuagcugcugguuua

SEQ ID NO: 1996224 - RNA, 19 nt, Homo sapiens
  misc_RNA (1)...(19): siRNA sense strand
caaaaccacuuuaugaguu

SEQ ID NO: 1996225 - RNA, 19 nt, Homo sapiens
  misc_RNA (1)...(19): siRNA sense strand
ggaguggguuggauaagca

SEQ ID NO: 1996226 - RNA, 19 nt, Homo sapiens
  misc_RNA (1)...(19): siRNA sense strand
ugggauaucugcagcaaau

SEQ ID NO: 1996227 - RNA, 19 nt, Homo sapiens
  misc_RNA (1)...(19): siRNA sense strand
agagagaaucuuagcuuua

SEQ ID NO: 1996228 - RNA, 19 nt, Homo sapiens
  misc_RNA (1)...(19): siRNA sense strand
caauaugggaucuuagaaa

SEQ ID NO: 1996229 - RNA, 19 nt, Homo sapiens
  misc_RNA (1)...(19): siRNA sense strand
gaucuuuacguuuaucuga

SEQ ID NO: 1996230 - RNA, 19 nt, Homo sapiens
  misc_RNA (1)...(19): siRNA sense strand
gaaaucuccaggcaacaaa

SEQ ID NO: 1996231 - RNA, 19 nt, Homo sapiens
  misc_RNA (1)...(19): siRNA sense strand
guugcaauaugggaucuua

SEQ ID NO: 1996232 - RNA, 19 nt, Homo sapiens
  misc_RNA (1)...(19): siRNA sense strand
cauguggaaucuacuguga

SEQ ID NO: 1996233 - RNA, 19 nt, Homo sapiens
  misc_RNA (1)...(19): siRNA sense strand
gaagugugcaaccuuguga

SEQ ID NO: 1996234 - RNA, 19 nt, Homo sapiens
  misc_RNA (1)...(19): siRNA sense strand
caucguaaccuagcuauau

SEQ ID NO: 1996235 - RNA, 19 nt, Homo sapiens
  misc_RNA (1)...(19): siRNA sense strand
gucaagaucauaacucaaa

SEQ ID NO: 1996236 - RNA, 19 nt, Homo sapiens
  misc_RNA (1)...(19): siRNA sense strand
ggaaagcagcagacauaau

SEQ ID NO: 1996237 - RNA, 19 nt, Homo sapiens
  misc_RNA (1)...(19): siRNA sense strand
caauggcuuuaucggguua

SEQ ID NO: 1996238 - RNA, 19 nt, Homo sapiens
  misc_RNA (1)...(19): siRNA sense strand
gcuagcugcugguuuagau

SEQ ID NO: 1996239 - RNA, 19 nt, Homo sapiens
  misc_RNA (1)...(19): siRNA sense strand
ccaaaacccuuaacaaaag

SEQ ID NO: 1996240 - RNA, 19 nt, Homo sapiens
  misc_RNA (1)...(19): siRNA sense strand
acaagcaaauggucgaguu

SEQ ID NO: 1996241 - RNA, 19 nt, Homo sapiens
  misc_RNA (1)...(19): siRNA sense strand
ugauagauuuguugugugu

SEQ ID NO: 1996242 - RNA, 19 nt, Homo sapiens
  misc_RNA (1)...(19): siRNA sense strand
gcaccacaccauguugaua

SEQ ID NO: 1996243 - RNA, 19 nt, Homo sapiens
  misc_RNA (1)...(19): siRNA sense strand
gccaaaagauguucguaaa

SEQ ID NO: 1996244 - RNA, 19 nt, Homo sapiens
  misc_RNA (1)...(19): siRNA sense strand
ugaagacucugcagcuaca

SEQ ID NO: 1996245 - RNA, 19 nt, Homo sapiens
  misc_RNA (1)...(19): siRNA sense strand
ucaagucacucugguauac

SEQ ID NO: 1996246 - RNA, 19 nt, Homo sapiens
  misc_RNA (1)...(19): siRNA sense strand
ggcuuguggucgucauuua

SEQ ID NO: 1996247 - RNA, 19 nt, Homo sapiens
  misc_RNA (1)...(19): siRNA sense strand
cagauacacccuauaugaa

SEQ ID NO: 1996248 - RNA, 19 nt, Homo sapiens
  misc_RNA (1)...(19): siRNA sense strand
gaagcaauacacagaagau

SEQ ID NO: 1996249 - RNA, 19 nt, Homo sapiens
  misc_RNA (1)...(19): siRNA sense strand
aaagauauagcaacgaaga

SEQ ID NO: 1996250 - RNA, 19 nt, Homo sapiens
  misc_RNA (1)...(19): siRNA sense strand
gcaauaugggaucuuagaa

SEQ ID NO: 1996251 - RNA, 19 nt, Homo sapiens
  misc_RNA (1)...(19): siRNA sense strand
cagcaaauauacuccugau

SEQ ID NO: 1996252 - RNA, 19 nt, Homo sapiens
  misc_RNA (1)...(19): siRNA sense strand
acaccauguugauagauuu

SEQ ID NO: 1996253 - RNA, 19 nt, Homo sapiens
  misc_RNA (1)...(19): siRNA sense strand
aaucuacugugaauucaga

SEQ ID NO: 1996254 - RNA, 19 nt, Homo sapiens
  misc_RNA (1)...(19): siRNA sense strand
guaccaaaccugauauuuu

SEQ ID NO: 1996255 - RNA, 19 nt, Homo sapiens
  misc_RNA (1)...(19): siRNA sense strand
aaacuucuccuugcuggua

SEQ ID NO: 1996256 - RNA, 19 nt, Homo sapiens
  misc_RNA (1)...(19): siRNA sense strand
gacgguagacccauauuuc

SEQ ID NO: 1996257 - RNA, 19 nt, Homo sapiens
  misc_RNA (1)...(19): siRNA sense strand
gauaagcaaagugauauuc

SEQ ID NO: 1996258 - RNA, 19 nt, Homo sapiens
  misc_RNA (1)...(19): siRNA sense strand
gaaggucagguugcaauau

SEQ ID NO: 1996259 - RNA, 19 nt, Homo sapiens
  misc_RNA (1)...(19): siRNA sense strand
agcuggaucuuuacguuua

SEQ ID NO: 1996260 - RNA, 19 nt, Homo sapiens
  misc_RNA (1)...(19): siRNA sense strand
gcucaagucacucugguau

SEQ ID NO: 1996261 - RNA, 19 nt, Homo sapiens
  misc_RNA (1)...(19): siRNA sense strand
agauacacccuauaugaaa

SEQ ID NO: 1996262 - RNA, 19 nt, Homo sapiens
  misc_RNA (1)...(19): siRNA sense strand
gcuacauuacugucaauaa

SEQ ID NO: 1996263 - RNA, 19 nt, Homo sapiens
  misc_RNA (1)...(19): siRNA sense strand
agacucugcagcuacauua

SEQ ID NO: 1996264 - RNA, 19 nt, Homo sapiens
  misc_RNA (1)...(19): siRNA sense strand
gaagauccacagcucaagu

SEQ ID NO: 1996265 - RNA, 19 nt, Homo sapiens
  misc_RNA (1)...(19): siRNA sense strand
gcauacacccacucccauu

SEQ ID NO: 1996266 - RNA, 19 nt, Homo sapiens
  misc_RNA (1)...(19): siRNA sense strand
guagcauggugucccacua

SEQ ID NO: 1996267 - RNA, 19 nt, Homo sapiens
  misc_RNA (1)...(19): siRNA sense strand
cacccuauaugaaaugugu

SEQ ID NO: 1996268 - RNA, 19 nt, Homo sapiens
  misc_RNA (1)...(19): siRNA sense strand
acaaaggaucauugguuua

SEQ ID NO: 1996269 - RNA, 19 nt, Homo sapiens
  misc_RNA (1)...(19): siRNA sense strand
caaaaucgaaugauaguug

SEQ ID NO: 1996270 - RNA, 19 nt, Homo sapiens
  misc_RNA (1)...(19): siRNA sense strand
ugaaacugaacccacaaua

SEQ ID NO: 1996271 - RNA, 19 nt, Homo sapiens
  misc_RNA (1)...(19): siRNA sense strand
aaauucagauacacccuau

SEQ ID NO: 1996272 - RNA, 19 nt, Homo sapiens
  misc_RNA (1)...(19): siRNA sense strand
acacagaagauauggauca

SEQ ID NO: 1996273 - RNA, 19 nt, Homo sapiens
  misc_RNA (1)...(19): siRNA sense strand
gugugugacucagaacuaa

SEQ ID NO: 1996274 - RNA, 19 nt, Homo sapiens
  misc_RNA (1)...(19): siRNA sense strand
cacaccauguugauagauu

SEQ ID NO: 1996275 - RNA, 19 nt, Homo sapiens
  misc_RNA (1)...(19): siRNA sense strand
caugcacgacaauguaaua

SEQ ID NO: 1996276 - RNA, 19 nt, Homo sapiens
  misc_RNA (1)...(19): siRNA sense strand
ggauaagcaaagugauauu

SEQ ID NO: 1996277 - RNA, 19 nt, Homo sapiens
  misc_RNA (1)...(19): siRNA sense strand
auagauuuguuguguguga

SEQ ID NO: 1996278 - RNA, 19 nt, Homo sapiens
  misc_RNA (1)...(19): siRNA sense strand
cgaacaaugucagacuuca

SEQ ID NO: 1996279 - RNA, 19 nt, Homo sapiens
  misc_RNA (1)...(19): siRNA sense strand
gcuugucugucucuuuguu

SEQ ID NO: 1996280 - RNA, 19 nt, Homo sapiens
  misc_RNA (1)...(19): siRNA sense strand
gcaaauggucgaguuguac

SEQ ID NO: 1996281 - RNA, 19 nt, Homo sapiens
  misc_RNA (1)...(19): siRNA sense strand
gcaauccaaauccugaaug

SEQ ID NO: 1996282 - RNA, 19 nt, Homo sapiens
  misc_RNA (1)...(19): siRNA sense strand
gagcugcugcuguggcauu

SEQ ID NO: 1996283 - RNA, 19 nt, Homo sapiens
  misc_RNA (1)...(19): siRNA sense strand
cagagcagguguggaggaa

SEQ ID NO: 1996284 - RNA, 19 nt, Homo sapiens
  misc_RNA (1)...(19): siRNA sense strand
uguggaaucuacugugaau

SEQ ID NO: 1996285 - RNA, 19 nt, Homo sapiens
  misc_RNA (1)...(19): siRNA sense strand
cacuaggacuggucuacuu

SEQ ID NO: 1996286 - RNA, 19 nt, Homo sapiens
  misc_RNA (1)...(19): siRNA sense strand
aaggucagguugcaauaug

SEQ ID NO: 1996287 - RNA, 19 nt, Homo sapiens
  misc_RNA (1)...(19): siRNA sense strand
gguaccaaaccugauauuu

SEQ ID NO: 1996288 - RNA, 19 nt, Homo sapiens
  misc_RNA (1)...(19): siRNA sense strand
ccacgagaccagaaacuuc

SEQ ID NO: 1996289 - RNA, 19 nt, Homo sapiens
  misc_RNA (1)...(19): siRNA sense strand
gcaguuggacaagcaaaug

SEQ ID NO: 1996290 - RNA, 19 nt, Homo sapiens
  misc_RNA (1)...(19): siRNA sense strand
ugaauguacggaagaagaa

SEQ ID NO: 1996291 - RNA, 19 nt, Homo sapiens
  misc_RNA (1)...(19): siRNA sense strand
aaagaaaggaacggaugua

SEQ ID NO: 1996292 - RNA, 19 nt, Homo sapiens
  misc_RNA (1)...(19): siRNA sense strand
gcaaagugauauucaaaac

SEQ ID NO: 1996293 - RNA, 19 nt, Homo sapiens
  misc_RNA (1)...(19): siRNA sense strand
gcacagagaucacaacuug

SEQ ID NO: 1996294 - RNA, 19 nt, Homo sapiens
  misc_RNA (1)...(19): siRNA sense strand
gcagacagccuaauuaaua

SEQ ID NO: 1996295 - RNA, 19 nt, Homo sapiens
  misc_RNA (1)...(19): siRNA sense strand
gaaugaagauccacaacua

SEQ ID NO: 1996296 - RNA, 19 nt, Homo sapiens
  misc_RNA (1)...(19): siRNA sense strand
uaaccaagcccguuuaaua

SEQ ID NO: 1996297 - RNA, 19 nt, Homo sapiens
  misc_RNA (1)...(19): siRNA sense strand
ggaauuauguuucaaaugg

SEQ ID NO: 1996298 - RNA, 19 nt, Homo sapiens
  misc_RNA (1)...(19): siRNA sense strand
agaaacacgucuuacauua

SEQ ID NO: 1996299 - RNA, 19 nt, Homo sapiens
  misc_RNA (1)...(19): siRNA sense strand
gaauaaagguguaccaaag

SEQ ID NO: 1996300 - RNA, 19 nt, Homo sapiens
  misc_RNA (1)...(19): siRNA sense strand
gaaaacagcugaaauagau

SEQ ID NO: 1996301 - RNA, 19 nt, Homo sapiens
  misc_RNA (1)...(19): siRNA sense strand
acaggaaacuuguaucaua

SEQ ID NO: 1996302 - RNA, 19 nt, Homo sapiens
  misc_RNA (1)...(19): siRNA sense strand
gaaugaaacugcaucaaca

SEQ ID NO: 1996303 - RNA, 19 nt, Homo sapiens
  misc_RNA (1)...(19): siRNA sense strand
gcaaagacauauguaaaug

SEQ ID NO: 1996304 - RNA, 19 nt, Homo sapiens
  misc_RNA (1)...(19): siRNA sense strand
ggaaauaaauaaccagaag

SEQ ID NO: 1996305 - RNA, 19 nt, Homo sapiens
  misc_RNA (1)...(19): siRNA sense strand
caaagaguguggaaagaaa

SEQ ID NO: 1996306 - RNA, 19 nt, Homo sapiens
  misc_RNA (1)...(19): siRNA sense strand
caaaagaacuucagcauga

SEQ ID NO: 1996307 - RNA, 19 nt, Homo sapiens
  misc_RNA (1)...(19): siRNA sense strand
ccagaaggcuaaucacaaa

SEQ ID NO: 1996308 - RNA, 19 nt, Homo sapiens
  misc_RNA (1)...(19): siRNA sense strand
caagaauucuggaagcuuu

SEQ ID NO: 1996309 - RNA, 19 nt, Homo sapiens
  misc_RNA (1)...(19): siRNA sense strand
gaaggugugaguauuaaua

SEQ ID NO: 1996310 - RNA, 19 nt, Homo sapiens
  misc_RNA (1)...(19): siRNA sense strand
gaagaaagcccugauuugu

SEQ ID NO: 1996311 - RNA, 19 nt, Homo sapiens
  misc_RNA (1)...(19): siRNA sense strand
gcaguuagcaguucugaaa

SEQ ID NO: 1996312 - RNA, 19 nt, Homo sapiens
  misc_RNA (1)...(19): siRNA sense strand
acaacaagcuguaaaguau

SEQ ID NO: 1996313 - RNA, 19 nt, Homo sapiens
  misc_RNA (1)...(19): siRNA sense strand
gaacacaaacugacaacaa

SEQ ID NO: 1996314 - RNA, 19 nt, Homo sapiens
  misc_RNA (1)...(19): siRNA sense strand
gcaauccagucacuuacua

SEQ ID NO: 1996315 - RNA, 19 nt, Homo sapiens
  misc_RNA (1)...(19): siRNA sense strand
ggaaauaaacaaagagcua

SEQ ID NO: 1996316 - RNA, 19 nt, Homo sapiens
  misc_RNA (1)...(19): siRNA sense strand
uaacagcggugauauucuu

SEQ ID NO: 1996317 - RNA, 19 nt, Homo sapiens
  misc_RNA (1)...(19): siRNA sense strand
agaaagcccugauuuguug

SEQ ID NO: 1996318 - RNA, 19 nt, Homo sapiens
  misc_RNA (1)...(19): siRNA sense strand
gaaagcaggaauuauguuu

SEQ ID NO: 1996319 - RNA, 19 nt, Homo sapiens
  misc_RNA (1)...(19): siRNA sense strand
gauaugaacgcuaaguuaa

SEQ ID NO: 1996320 - RNA, 19 nt, Homo sapiens
  misc_RNA (1)...(19): siRNA sense strand
gaacaggaaacuuguauca

SEQ ID NO: 1996321 - RNA, 19 nt, Homo sapiens
  misc_RNA (1)...(19): siRNA sense strand
gaagaacaccaacaaucua

SEQ ID NO: 1996322 - RNA, 19 nt, Homo sapiens
  misc_RNA (1)...(19): siRNA sense strand
gaggucagcuaucacauug

SEQ ID NO: 1996323 - RNA, 19 nt, Homo sapiens
  misc_RNA (1)...(19): siRNA sense strand
ggaacacccugacacgaaa

SEQ ID NO: 1996324 - RNA, 19 nt, Homo sapiens
  misc_RNA (1)...(19): siRNA sense strand
gacuuaagcugcauuugaa

SEQ ID NO: 1996325 - RNA, 19 nt, Homo sapiens
  misc_RNA (1)...(19): siRNA sense strand
caaaauaguucaucacuga

SEQ ID NO: 1996326 - RNA, 19 nt, Homo sapiens
  misc_RNA (1)...(19): siRNA sense strand
aaugauggcugauaagaaa

SEQ ID NO: 1996327 - RNA, 19 nt, Homo sapiens
  misc_RNA (1)...(19): siRNA sense strand
caucuuugcuuguuaguga

SEQ ID NO: 1996328 - RNA, 19 nt, Homo sapiens
  misc_RNA (1)...(19): siRNA sense strand
gcaccaguuucuucacuuu

SEQ ID NO: 1996329 - RNA, 19 nt, Homo sapiens
  misc_RNA (1)...(19): siRNA sense strand
gaagaaaugaugcaaggaa

SEQ ID NO: 1996330 - RNA, 19 nt, Homo sapiens
  misc_RNA (1)...(19): siRNA sense strand
cuacugguaugaaugauaa

SEQ ID NO: 1996331 - RNA, 19 nt, Homo sapiens
  misc_RNA (1)...(19): siRNA sense strand
gagauacuccuauaaguga

SEQ ID NO: 1996332 - RNA, 19 nt, Homo sapiens
  misc_RNA (1)...(19): siRNA sense strand
ggacaaaucaagcacuauu

SEQ ID NO: 1996333 - RNA, 19 nt, Homo sapiens
  misc_RNA (1)...(19): siRNA sense strand
gaacaggaaauauauguca

SEQ ID NO: 1996334 - RNA, 19 nt, Homo sapiens
  misc_RNA (1)...(19): siRNA sense strand
uaaauaaccagaaggcuaa

SEQ ID NO: 1996335 - RNA, 19 nt, Homo sapiens
  misc_RNA (1)...(19): siRNA sense strand
gagaaacagucggaauauu

SEQ ID NO: 1996336 - RNA, 19 nt, Homo sapiens
  misc_RNA (1)...(19): siRNA sense strand
gcagugagcucagaggaau

SEQ ID NO: 1996337 - RNA, 19 nt, Homo sapiens
  misc_RNA (1)...(19): siRNA sense strand
gaagcaaagacauauguaa

SEQ ID NO: 1996338 - RNA, 19 nt, Homo sapiens
  misc_RNA (1)...(19): siRNA sense strand
gaaacagucggaauauuga

SEQ ID NO: 1996339 - RNA, 19 nt, Homo sapiens
  misc_RNA (1)...(19): siRNA sense strand
gaacuacaaggaacaaaga

SEQ ID NO: 1996340 - RNA, 19 nt, Homo sapiens
  misc_RNA (1)...(19): siRNA sense strand
gcacugaaaggaugccaua

SEQ ID NO: 1996341 - RNA, 19 nt, Homo sapiens
  misc_RNA (1)...(19): siRNA sense strand
gaaggcaaguacaagaaga

SEQ ID NO: 1996342 - RNA, 19 nt, Homo sapiens
  misc_RNA (1)...(19): siRNA sense strand
gguguaggcuuaggaauga

SEQ ID NO: 1996343 - RNA, 19 nt, Homo sapiens
  misc_RNA (1)...(19): siRNA sense strand
cagcagaaucggaauaaua

SEQ ID NO: 1996344 - RNA, 19 nt, Homo sapiens
  misc_RNA (1)...(19): siRNA sense strand
gaagagauacuccuauaag

SEQ ID NO: 1996345 - RNA, 19 nt, Homo sapiens
  misc_RNA (1)...(19): siRNA sense strand
guucuuacauggcuguuaa

SEQ ID NO: 1996346 - RNA, 19 nt, Homo sapiens
  misc_RNA (1)...(19): siRNA sense strand
gaacacgaucacagaauaa

SEQ ID NO: 1996347 - RNA, 19 nt, Homo sapiens
  misc_RNA (1)...(19): siRNA sense strand
agaacacgaucacagaaua

SEQ ID NO: 1996348 - RNA, 19 nt, Homo sapiens
  misc_RNA (1)...(19): siRNA sense strand
gaacaccucugcaggaaaa

SEQ ID NO: 1996349 - RNA, 19 nt, Homo sapiens
  misc_RNA (1)...(19): siRNA sense strand
caucaauacugaagaauag

SEQ ID NO: 1996350 - RNA, 19 nt, Homo sapiens
  misc_RNA (1)...(19): siRNA sense strand
ggucagcuaucacauugaa

SEQ ID NO: 1996351 - RNA, 19 nt, Homo sapiens
  misc_RNA (1)...(19): siRNA sense strand
uggaagagauacuccuaua

SEQ ID NO: 1996352 - RNA, 19 nt, Homo sapiens
  misc_RNA (1)...(19): siRNA sense strand
gaaucaucuuugcuuguua

SEQ ID NO: 1996353 - RNA, 19 nt, Homo sapiens
  misc_RNA (1)...(19): siRNA sense strand
ggaagaacacgaucacaga

SEQ ID NO: 1996354 - RNA, 19 nt, Homo sapiens
  misc_RNA (1)...(19): siRNA sense strand
ugaagaaccaggaauaauu

SEQ ID NO: 1996355 - RNA, 19 nt, Homo sapiens
  misc_RNA (1)...(19): siRNA sense strand
ggaaacuuguaucauagaa

SEQ ID NO: 1996356 - RNA, 19 nt, Homo sapiens
  misc_RNA (1)...(19): siRNA sense strand
gcuaaaagcugcucagaga

SEQ ID NO: 1996357 - RNA, 19 nt, Homo sapiens
  misc_RNA (1)...(19): siRNA sense strand
caagcacuauuuacucaaa

SEQ ID NO: 1996358 - RNA, 19 nt, Homo sapiens
  misc_RNA (1)...(19): siRNA sense strand
gagaugcugcuauauauga

SEQ ID NO: 1996359 - RNA, 19 nt, Homo sapiens
  misc_RNA (1)...(19): siRNA sense strand
gaaaugauggcugauaaga

SEQ ID NO: 1996360 - RNA, 19 nt, Homo sapiens
  misc_RNA (1)...(19): siRNA sense strand
caaagaagaacaccaacaa

SEQ ID NO: 1996361 - RNA, 19 nt, Homo sapiens
  misc_RNA (1)...(19): siRNA sense strand
caucuuugcugaaucgaaa

SEQ ID NO: 1996362 - RNA, 19 nt, Homo sapiens
  misc_RNA (1)...(19): siRNA sense strand
auacaaguccauccaauua

SEQ ID NO: 1996363 - RNA, 19 nt, Homo sapiens
  misc_RNA (1)...(19): siRNA sense strand
agaagagucucaaaggaaa

SEQ ID NO: 1996364 - RNA, 19 nt, Homo sapiens
  misc_RNA (1)...(19): siRNA sense strand
uaccaaaccuuguuaaucu

SEQ ID NO: 1996365 - RNA, 19 nt, Homo sapiens
  misc_RNA (1)...(19): siRNA sense strand
gcaagaaauaacauccuua

SEQ ID NO: 1996366 - RNA, 19 nt, Homo sapiens
  misc_RNA (1)...(19): siRNA sense strand
cauauacgaugaugggauu

SEQ ID NO: 1996367 - RNA, 19 nt, Homo sapiens
  misc_RNA (1)...(19): siRNA sense strand
gaaaagaccccuuaaaagu

SEQ ID NO: 1996368 - RNA, 19 nt, Homo sapiens
  misc_RNA (1)...(19): siRNA sense strand
caaguuggauaucaaagug

SEQ ID NO: 1996369 - RNA, 19 nt, Homo sapiens
  misc_RNA (1)...(19): siRNA sense strand
aaacacgucuuacauuaca

SEQ ID NO: 1996370 - RNA, 19 nt, Homo sapiens
  misc_RNA (1)...(19): siRNA sense strand
ggaagagauacuccuauaa

SEQ ID NO: 1996371 - RNA, 19 nt, Homo sapiens
  misc_RNA (1)...(19): siRNA sense strand
uaauggagaucgacuaaag

SEQ ID NO: 1996372 - RNA, 19 nt, Homo sapiens
  misc_RNA (1)...(19): siRNA sense strand
guuccuuucuugcaaauaa

SEQ ID NO: 1996373 - RNA, 19 nt, Homo sapiens
  misc_RNA (1)...(19): siRNA sense strand
gaugauccauuauugagau

SEQ ID NO: 1996374 - RNA, 19 nt, Homo sapiens
  misc_RNA (1)...(19): siRNA sense strand
caaauaaacaggaaagauc

SEQ ID NO: 1996375 - RNA, 19 nt, Homo sapiens
  misc_RNA (1)...(19): siRNA sense strand
gaacaccaacaaucuaaau

SEQ ID NO: 1996376 - RNA, 19 nt, Homo sapiens
  misc_RNA (1)...(19): siRNA sense strand
gauauuccuucuucccaaa

SEQ ID NO: 1996377 - RNA, 19 nt, Homo sapiens
  misc_RNA (1)...(19): siRNA sense strand
uaaaucuucuccagacuug

SEQ ID NO: 1996378 - RNA, 19 nt, Homo sapiens
  misc_RNA (1)...(19): siRNA sense strand
gaaaacaucuuugcugaau

SEQ ID NO: 1996379 - RNA, 19 nt, Homo sapiens
  misc_RNA (1)...(19): siRNA sense strand
gaugaagaaagucaagaua

SEQ ID NO: 1996380 - RNA, 19 nt, Homo sapiens
  misc_RNA (1)...(19): siRNA sense strand
cagagaaacagucggaaua

SEQ ID NO: 1996381 - RNA, 19 nt, Homo sapiens
  misc_RNA (1)...(19): siRNA sense strand
gcagaaauugcaaagcuaa

SEQ ID NO: 1996382 - RNA, 19 nt, Homo sapiens
  misc_RNA (1)...(19): siRNA sense strand
acacaguacucauaauaga

SEQ ID NO: 1996383 - RNA, 19 nt, Homo sapiens
  misc_RNA (1)...(19): siRNA sense strand
caggaaagauccgcagaaa

SEQ ID NO: 1996384 - RNA, 19 nt, Homo sapiens
  misc_RNA (1)...(19): siRNA sense strand
gggaggcuacuuacaguua

SEQ ID NO: 1996385 - RNA, 19 nt, Homo sapiens
  misc_RNA (1)...(19): siRNA sense strand
ggacagaguuaugaugaag

SEQ ID NO: 1996386 - RNA, 19 nt, Homo sapiens
  misc_RNA (1)...(19): siRNA sense strand
ggugggacagugaguauua

SEQ ID NO: 1996387 - RNA, 19 nt, Homo sapiens
  misc_RNA (1)...(19): siRNA sense strand
gcaaagaguguggaaagaa

SEQ ID NO: 1996388 - RNA, 19 nt, Homo sapiens
  misc_RNA (1)...(19): siRNA sense strand
uaucgugaaucuguucuua

SEQ ID NO: 1996389 - RNA, 19 nt, Homo sapiens
  misc_RNA (1)...(19): siRNA sense strand
cgacuuaagcugcauuuga

SEQ ID NO: 1996390 - RNA, 19 nt, Homo sapiens
  misc_RNA (1)...(19): siRNA sense strand
uaccaaagcgugucuauga

SEQ ID NO: 1996391 - RNA, 19 nt, Homo sapiens
  misc_RNA (1)...(19): siRNA sense strand
cagggaugcuguuuggaua

SEQ ID NO: 1996392 - RNA, 19 nt, Homo sapiens
  misc_RNA (1)...(19): siRNA sense strand
agaacaagaugaagaaagu

SEQ ID NO: 1996393 - RNA, 19 nt, Homo sapiens
  misc_RNA (1)...(19): siRNA sense strand
caaagaagauggcuccaaa

SEQ ID NO: 1996394 - RNA, 19 nt, Homo sapiens
  misc_RNA (1)...(19): siRNA sense strand
ggugaaauaugauggaauu

SEQ ID NO: 1996395 - RNA, 19 nt, Homo sapiens
  misc_RNA (1)...(19): siRNA sense strand
gaaaggguuuugucucuua

SEQ ID NO: 1996396 - RNA, 19 nt, Homo sapiens
  misc_RNA (1)...(19): siRNA sense strand
gaagauggcuccaaaagga

SEQ ID NO: 1996397 - RNA, 19 nt, Homo sapiens
  misc_RNA (1)...(19): siRNA sense strand
ggaauugacugugucuaug

SEQ ID NO: 1996398 - RNA, 19 nt, Homo sapiens
  misc_RNA (1)...(19): siRNA sense strand
ucaagcaccuaucaugaaa

SEQ ID NO: 1996399 - RNA, 19 nt, Homo sapiens
  misc_RNA (1)...(19): siRNA sense strand
gcaaagcaguggaacacau

SEQ ID NO: 1996400 - RNA, 19 nt, Homo sapiens
  misc_RNA (1)...(19): siRNA sense strand
guaagcauguggaauauac

SEQ ID NO: 1996401 - RNA, 19 nt, Homo sapiens
  misc_RNA (1)...(19): siRNA sense strand
gauccugucuuguacaugu

SEQ ID NO: 1996402 - RNA, 19 nt, Homo sapiens
  misc_RNA (1)...(19): siRNA sense strand
gaaauaugauggaauugac

SEQ ID NO: 1996403 - RNA, 19 nt, Homo sapiens
  misc_RNA (1)...(19): siRNA sense strand
caaguuugaugaugauuuc

SEQ ID NO: 1996404 - RNA, 19 nt, Homo sapiens
  misc_RNA (1)...(19): siRNA sense strand
uagguaagcauguggaaua

SEQ ID NO: 1996405 - RNA, 19 nt, Homo sapiens
  misc_RNA (1)...(19): siRNA sense strand
gacuggaacuucacagaga

SEQ ID NO: 1996406 - RNA, 19 nt, Homo sapiens
  misc_RNA (1)...(19): siRNA sense strand
gaugaugauuuccauaucu

SEQ ID NO: 1996407 - RNA, 19 nt, Homo sapiens
  misc_RNA (1)...(19): siRNA sense strand
aguuguagauggccuaaua

SEQ ID NO: 1996408 - RNA, 19 nt, Homo sapiens
  misc_RNA (1)...(19): siRNA sense strand
gaucaggugccuauaaauc

SEQ ID NO: 1996409 - RNA, 19 nt, Homo sapiens
  misc_RNA (1)...(19): siRNA sense strand
uguaccagcuucuagauga

SEQ ID NO: 1996410 - RNA, 19 nt, Homo sapiens
  misc_RNA (1)...(19): siRNA sense strand
cucuuuaucuggugaaaua

SEQ ID NO: 1996411 - RNA, 19 nt, Homo sapiens
  misc_RNA (1)...(19): siRNA sense strand
gcucaagcaccuaucauga

SEQ ID NO: 1996412 - RNA, 19 nt, Homo sapiens
  misc_RNA (1)...(19): siRNA sense strand
uggaucaggugccuauaaa

SEQ ID NO: 1996413 - RNA, 19 nt, Homo sapiens
  misc_RNA (1)...(19): siRNA sense strand
ccaaacccucuguguauuu

SEQ ID NO: 1996414 - RNA, 19 nt, Homo sapiens
  misc_RNA (1)...(19): siRNA sense strand
gcagagaggcagaccuuca

SEQ ID NO: 1996415 - RNA, 19 nt, Homo sapiens
  misc_RNA (1)...(19): siRNA sense strand
gaauauaccaaagaagaug

SEQ ID NO: 1996416 - RNA, 19 nt, Homo sapiens
  misc_RNA (1)...(19): siRNA sense strand
gaugccaaccuugcaaaua

SEQ ID NO: 1996417 - RNA, 19 nt, Homo sapiens
  misc_RNA (1)...(19): siRNA sense strand
ggcaucaucucacauuagu

SEQ ID NO: 1996418 - RNA, 19 nt, Homo sapiens
  misc_RNA (1)...(19): siRNA sense strand
ggaauauaccaaagaagau

SEQ ID NO: 1996419 - RNA, 19 nt, Homo sapiens
  misc_RNA (1)...(19): siRNA sense strand
caaacccucuguguauuuc

SEQ ID NO: 1996420 - RNA, 19 nt, Homo sapiens
  misc_RNA (1)...(19): siRNA sense strand
gcuucuagaugauuauaag

SEQ ID NO: 1996421 - RNA, 19 nt, Homo sapiens
  misc_RNA (1)...(19): siRNA sense strand
caaccuugcaaauaccaua

SEQ ID NO: 1996422 - RNA, 19 nt, Homo sapiens
  misc_RNA (1)...(19): siRNA sense strand
gcauguggaauauaccaaa

SEQ ID NO: 1996423 - RNA, 19 nt, Homo sapiens
  misc_RNA (1)...(19): siRNA sense strand
uggaauauaccaaagaaga

SEQ ID NO: 1996424 - RNA, 19 nt, Homo sapiens
  misc_RNA (1)...(19): siRNA sense strand
guggcaucaucucacauua

SEQ ID NO: 1996425 - RNA, 19 nt, Homo sapiens
  misc_RNA (1)...(19): siRNA sense strand
caucgugggcugcagaauu

SEQ ID NO: 1996426 - RNA, 19 nt, Homo sapiens
  misc_RNA (1)...(19): siRNA sense strand
uguggaauauaccaaagaa

SEQ ID NO: 1996427 - RNA, 19 nt, Homo sapiens
  misc_RNA (1)...(19): siRNA sense strand
ccuauaaaucccucucuuu

SEQ ID NO: 1996428 - RNA, 19 nt, Homo sapiens
  misc_RNA (1)...(19): siRNA sense strand
ggagccaggaggaguugua

SEQ ID NO: 1996429 - RNA, 19 nt, Homo sapiens
  misc_RNA (1)...(19): siRNA sense strand
ggaucggcauggucauuca

SEQ ID NO: 1996430 - RNA, 19 nt, Homo sapiens
  misc_RNA (1)...(19): siRNA sense strand
ucuauggacuggaacuuca

SEQ ID NO: 1996431 - RNA, 19 nt, Homo sapiens
  misc_RNA (1)...(19): siRNA sense strand
gaauuucucauggauggaa

SEQ ID NO: 1996432 - RNA, 19 nt, Homo sapiens
  misc_RNA (1)...(19): siRNA sense strand
gggauggucuuagcucaag

SEQ ID NO: 1996433 - RNA, 19 nt, Homo sapiens
  misc_RNA (1)...(19): siRNA sense strand
caaagcaguggaacacaug

SEQ ID NO: 1996434 - RNA, 19 nt, Homo sapiens
  misc_RNA (1)...(19): siRNA sense strand
uaccauaauuggcaaagca

SEQ ID NO: 1996435 - RNA, 19 nt, Homo sapiens
  misc_RNA (1)...(19): siRNA sense strand
gaauugacugugucuaugg

SEQ ID NO: 1996436 - RNA, 19 nt, Homo sapiens
  misc_RNA (1)...(19): siRNA sense strand
gagagcaugguucuaagga

SEQ ID NO: 1996437 - RNA, 19 nt, Homo sapiens
  misc_RNA (1)...(19): siRNA sense strand
aucgugggcugcagaauuu

SEQ ID NO: 1996438 - RNA, 19 nt, Homo sapiens
  misc_RNA (1)...(19): siRNA sense strand
gguggcaucaucucacauu

SEQ ID NO: 1996439 - RNA, 19 nt, Homo sapiens
  misc_RNA (1)...(19): siRNA sense strand
gggagagcaugguucuaag

SEQ ID NO: 1996440 - RNA, 19 nt, Homo sapiens
  misc_RNA (1)...(19): siRNA sense strand
gguaagcauguggaauaua

SEQ ID NO: 1996441 - RNA, 19 nt, Homo sapiens
  misc_RNA (1)...(19): siRNA sense strand
guaccagcuucuagaugau

SEQ ID NO: 1996442 - RNA, 19 nt, Homo sapiens
  misc_RNA (1)...(19): siRNA sense strand
uaucaugaaagccugguuu

SEQ ID NO: 1996443 - RNA, 19 nt, Homo sapiens
  misc_RNA (1)...(19): siRNA sense strand
gccuauaaaucccucucuu

SEQ ID NO: 1996444 - RNA, 19 nt, Homo sapiens
  misc_RNA (1)...(19): siRNA sense strand
gugagucuccuccaacaga

SEQ ID NO: 1996445 - RNA, 19 nt, Homo sapiens
  misc_RNA (1)...(19): siRNA sense strand
ccuugcaaauaccauaauu

SEQ ID NO: 1996446 - RNA, 19 nt, Homo sapiens
  misc_RNA (1)...(19): siRNA sense strand
ggucauucaccaaguggaa

SEQ ID NO: 1996447 - RNA, 19 nt, Homo sapiens
  misc_RNA (1)...(19): siRNA sense strand
gcaugguucuaaggaugaa

SEQ ID NO: 1996448 - RNA, 19 nt, Homo sapiens
  misc_RNA (1)...(19): siRNA sense strand
cauuagugaugccaaccuu

SEQ ID NO: 1996449 - RNA, 19 nt, Homo sapiens
  misc_RNA (1)...(19): siRNA sense strand
ugaugaugauuuccauauc

SEQ ID NO: 1996450 - RNA, 19 nt, Homo sapiens
  misc_RNA (1)...(19): siRNA sense strand
gauggaaggaaggagauga

SEQ ID NO: 1996451 - RNA, 19 nt, Homo sapiens
  misc_RNA (1)...(19): siRNA sense strand
cagugagucuccuccaaca

SEQ ID NO: 1996452 - RNA, 19 nt, Homo sapiens
  misc_RNA (1)...(19): siRNA sense strand
augaaagccugguuuuaua

SEQ ID NO: 1996453 - RNA, 19 nt, Homo sapiens
  misc_RNA (1)...(19): siRNA sense strand
agggagagcaugguucuaa

SEQ ID NO: 1996454 - RNA, 19 nt, Homo sapiens
  misc_RNA (1)...(19): siRNA sense strand
gccaggaggaguuguagau

SEQ ID NO: 1996455 - RNA, 19 nt, Homo sapiens
  misc_RNA (1)...(19): siRNA sense strand
gagggagccaggaggaguu

SEQ ID NO: 1996456 - RNA, 19 nt, Homo sapiens
  misc_RNA (1)...(19): siRNA sense strand
gaaagccugguuuuauauu

SEQ ID NO: 1996457 - RNA, 19 nt, Homo sapiens
  misc_RNA (1)...(19): siRNA sense strand
ccaaagaagauggcuccaa

SEQ ID NO: 1996458 - RNA, 19 nt, Homo sapiens
  misc_RNA (1)...(19): siRNA sense strand
uggaauugacugugucuau

SEQ ID NO: 1996459 - RNA, 19 nt, Homo sapiens
  misc_RNA (1)...(19): siRNA sense strand
cuguguauuucaucaaguu

SEQ ID NO: 1996460 - RNA, 19 nt, Homo sapiens
  misc_RNA (1)...(19): siRNA sense strand
augccaaccuugcaaauac

SEQ ID NO: 1996461 - RNA, 19 nt, Homo sapiens
  misc_RNA (1)...(19): siRNA sense strand
cauguggaauauaccaaag

SEQ ID NO: 1996462 - RNA, 19 nt, Homo sapiens
  misc_RNA (1)...(19): siRNA sense strand
accagcuucuagaugauua

SEQ ID NO: 1996463 - RNA, 19 nt, Homo sapiens
  misc_RNA (1)...(19): siRNA sense strand
aagcagagaggcagaccuu

SEQ ID NO: 1996464 - RNA, 19 nt, Homo sapiens
  misc_RNA (1)...(19): siRNA sense strand
ggagagcaugguucuaagg

SEQ ID NO: 1996465 - RNA, 19 nt, Homo sapiens
  misc_RNA (1)...(19): siRNA sense strand
caugaaagccugguuuuau

SEQ ID NO: 1996466 - RNA, 19 nt, Homo sapiens
  misc_RNA (1)...(19): siRNA sense strand
ggaucaggugccuauaaau

SEQ ID NO: 1996467 - RNA, 19 nt, Homo sapiens
  misc_RNA (1)...(19): siRNA sense strand
cuggaucaggugccuauaa

SEQ ID NO: 1996468 - RNA, 19 nt, Homo sapiens
  misc_RNA (1)...(19): siRNA sense strand
ggaguuguagauggccuaa

SEQ ID NO: 1996469 - RNA, 19 nt, Homo sapiens
  misc_RNA (1)...(19): siRNA sense strand
gccagaauccagugagucu

SEQ ID NO: 1996470 - RNA, 19 nt, Homo sapiens
  misc_RNA (1)...(19): siRNA sense strand
cagcuucuagaugauuaua

SEQ ID NO: 1996471 - RNA, 19 nt, Homo sapiens
  misc_RNA (1)...(19): siRNA sense strand
cucaagcaccuaucaugaa

SEQ ID NO: 1996472 - RNA, 19 nt, Homo sapiens
  misc_RNA (1)...(19): siRNA sense strand
ggaauaagaccaagcauga

SEQ ID NO: 1996473 - RNA, 19 nt, Homo sapiens
  misc_RNA (1)...(19): siRNA sense strand
gcagggagcugguggacuu

SEQ ID NO: 1996474 - RNA, 19 nt, Homo sapiens
  misc_RNA (1)...(19): siRNA sense strand
cagaagauccacucgauua

SEQ ID NO: 1996475 - RNA, 19 nt, Homo sapiens
  misc_RNA (1)...(19): siRNA sense strand
acaggaaaguguuggauaa

SEQ ID NO: 1996476 - RNA, 19 nt, Homo sapiens
  misc_RNA (1)...(19): siRNA sense strand
caauaaaucuggaggaaaa

SEQ ID NO: 1996477 - RNA, 19 nt, Homo sapiens
  misc_RNA (1)...(19): siRNA sense strand
ugcagaaagucauguauaa

SEQ ID NO: 1996478 - RNA, 19 nt, Homo sapiens
  misc_RNA (1)...(19): siRNA sense strand
ggaaaguguuggauaaagg

SEQ ID NO: 1996479 - RNA, 19 nt, Homo sapiens
  misc_RNA (1)...(19): siRNA sense strand
gagacucaccuuuaaacua

SEQ ID NO: 1996480 - RNA, 19 nt, Homo sapiens
  misc_RNA (1)...(19): siRNA sense strand
gcagaaacaacacaggaaa

SEQ ID NO: 1996481 - RNA, 19 nt, Homo sapiens
  misc_RNA (1)...(19): siRNA sense strand
cuaaagagcggacugagaa

SEQ ID NO: 1996482 - RNA, 19 nt, Homo sapiens
  misc_RNA (1)...(19): siRNA sense strand
agacucaccuuuaaacuag

SEQ ID NO: 1996483 - RNA, 19 nt, Homo sapiens
  misc_RNA (1)...(19): siRNA sense strand
cgaaggacaugaagacuac

SEQ ID NO: 1996484 - RNA, 19 nt, Homo sapiens
  misc_RNA (1)...(19): siRNA sense strand
ccacggaagccucuuacua

SEQ ID NO: 1996485 - RNA, 19 nt, Homo sapiens
  misc_RNA (1)...(19): siRNA sense strand
guaaacacacccaaagaug

SEQ ID NO: 1996486 - RNA, 19 nt, Homo sapiens
  misc_RNA (1)...(19): siRNA sense strand
gaaaguguuggauaaagga

SEQ ID NO: 1996487 - RNA, 19 nt, Homo sapiens
  misc_RNA (1)...(19): siRNA sense strand
auagaaaccuccaccuguu

SEQ ID NO: 1996488 - RNA, 19 nt, Homo sapiens
  misc_RNA (1)...(19): siRNA sense strand
guacuggguuccaacucaa

SEQ ID NO: 1996489 - RNA, 19 nt, Homo sapiens
  misc_RNA (1)...(19): siRNA sense strand
gaccaagcaugacgugaag

SEQ ID NO: 1996490 - RNA, 19 nt, Homo sapiens
  misc_RNA (1)...(19): siRNA sense strand
caugauggcguuucaguug

SEQ ID NO: 1996491 - RNA, 19 nt, Homo sapiens
  misc_RNA (1)...(19): siRNA sense strand
gcaguaaacacacccaaag

SEQ ID NO: 1996492 - RNA, 19 nt, Homo sapiens
  misc_RNA (1)...(19): siRNA sense strand
uguccggcauguacaauaa

SEQ ID NO: 1996493 - RNA, 19 nt, Homo sapiens
  misc_RNA (1)...(19): siRNA sense strand
gcacuaaagagcggacuga

SEQ ID NO: 1996494 - RNA, 19 nt, Homo sapiens
  misc_RNA (1)...(19): siRNA sense strand
uacaauaaaucuggaggaa

SEQ ID NO: 1996495 - RNA, 19 nt, Homo sapiens
  misc_RNA (1)...(19): siRNA sense strand
ucagccagcucgccucuuc

SEQ ID NO: 1996496 - RNA, 19 nt, Homo sapiens
  misc_RNA (1)...(19): siRNA sense strand
ccuuuaaacuagaacaaga

SEQ ID NO: 1996497 - RNA, 19 nt, Homo sapiens
  misc_RNA (1)...(19): siRNA sense strand
aggcgggucuccauagaaa

SEQ ID NO: 1996498 - RNA, 19 nt, Homo sapiens
  misc_RNA (1)...(19): siRNA sense strand
cagugaaccuaucgaagga

SEQ ID NO: 1996499 - RNA, 19 nt, Homo sapiens
  misc_RNA (1)...(19): siRNA sense strand
gaagauccacucgauuaca

SEQ ID NO: 1996500 - RNA, 19 nt, Homo sapiens
  misc_RNA (1)...(19): siRNA sense strand
ccgagacuguggcuacuga

SEQ ID NO: 1996501 - RNA, 19 nt, Homo sapiens
  misc_RNA (1)...(19): siRNA sense strand
gaaacaacacaggaaagug

SEQ ID NO: 1996502 - RNA, 19 nt, Homo sapiens
  misc_RNA (1)...(19): siRNA sense strand
auauguggaugcaaucaaa

SEQ ID NO: 1996503 - RNA, 19 nt, Homo sapiens
  misc_RNA (1)...(19): siRNA sense strand
caugugggauggaauagca

SEQ ID NO: 1996504 - RNA, 19 nt, Homo sapiens
  misc_RNA (1)...(19): siRNA sense strand
gaaccuaucgaaggacaug

SEQ ID NO: 1996505 - RNA, 19 nt, Homo sapiens
  misc_RNA (1)...(19): siRNA sense strand
caagaccagcuguggauug

SEQ ID NO: 1996506 - RNA, 19 nt, Homo sapiens
  misc_RNA (1)...(19): siRNA sense strand
ccgaagagaacaagaagga

SEQ ID NO: 1996507 - RNA, 19 nt, Homo sapiens
  misc_RNA (1)...(19): siRNA sense strand
gcuguggauuggcacuaaa

SEQ ID NO: 1996508 - RNA, 19 nt, Homo sapiens
  misc_RNA (1)...(19): siRNA sense strand
aacagaagauccacucgau

SEQ ID NO: 1996509 - RNA, 19 nt, Homo sapiens
  misc_RNA (1)...(19): siRNA sense strand
agagcggacugagaaauug

SEQ ID NO: 1996510 - RNA, 19 nt, Homo sapiens
  misc_RNA (1)...(19): siRNA sense strand
gggagcugguggacuugaa

SEQ ID NO: 1996511 - RNA, 19 nt, Homo sapiens
  misc_RNA (1)...(19): siRNA sense strand
ccaagcaugacgugaaguu

SEQ ID NO: 1996512 - RNA, 19 nt, Homo sapiens
  misc_RNA (1)...(19): siRNA sense strand
gcagaaagucauguauaag

SEQ ID NO: 1996513 - RNA, 19 nt, Homo sapiens
  misc_RNA (1)...(19): siRNA sense strand
ugaagacuaccacaugaug

SEQ ID NO: 1996514 - RNA, 19 nt, Homo sapiens
  misc_RNA (1)...(19): siRNA sense strand
cacaggaaaguguuggaua

SEQ ID NO: 1996515 - RNA, 19 nt, Homo sapiens
  misc_RNA (1)...(19): siRNA sense strand
cagaaagucauguauaagg

SEQ ID NO: 1996516 - RNA, 19 nt, Homo sapiens
  misc_RNA (1)...(19): siRNA sense strand
gguuccaacucaauaugug

SEQ ID NO: 1996517 - RNA, 19 nt, Homo sapiens
  misc_RNA (1)...(19): siRNA sense strand
acacggaggccgagacugu

SEQ ID NO: 1996518 - RNA, 19 nt, Homo sapiens
  misc_RNA (1)...(19): siRNA sense strand
cucaauauguggaugcaau

SEQ ID NO: 1996519 - RNA, 19 nt, Homo sapiens
  misc_RNA (1)...(19): siRNA sense strand
ggucagugaaccuaucgaa

SEQ ID NO: 1996520 - RNA, 19 nt, Homo sapiens
  misc_RNA (1)...(19): siRNA sense strand
uaaagagcggacugagaaa

SEQ ID NO: 1996521 - RNA, 19 nt, Homo sapiens
  misc_RNA (1)...(19): siRNA sense strand
cugguggacuugaagauca

SEQ ID NO: 1996522 - RNA, 19 nt, Homo sapiens
  misc_RNA (1)...(19): siRNA sense strand
uguacuggguuccaacuca

SEQ ID NO: 1996523 - RNA, 19 nt, Homo sapiens
  misc_RNA (1)...(19): siRNA sense strand
ucgaaggacaugaagacua

SEQ ID NO: 1996524 - RNA, 19 nt, Homo sapiens
  misc_RNA (1)...(19): siRNA sense strand
agaccaagcaugacgugaa

SEQ ID NO: 1996525 - RNA, 19 nt, Homo sapiens
  misc_RNA (1)...(19): siRNA sense strand
gcaaaggccgaagagaaca

SEQ ID NO: 1996526 - RNA, 19 nt, Homo sapiens
  misc_RNA (1)...(19): siRNA sense strand
aagagcggacugagaaauu

SEQ ID NO: 1996527 - RNA, 19 nt, Homo sapiens
  misc_RNA (1)...(19): siRNA sense strand
gggcagaggccagagaaag

SEQ ID NO: 1996528 - RNA, 19 nt, Homo sapiens
  misc_RNA (1)...(19): siRNA sense strand
caguaaacacacccaaaga

SEQ ID NO: 1996529 - RNA, 19 nt, Homo sapiens
  misc_RNA (1)...(19): siRNA sense strand
caggaaaguguuggauaaa

SEQ ID NO: 1996530 - RNA, 19 nt, Homo sapiens
  misc_RNA (1)...(19): siRNA sense strand
ggcagaaacaacacaggaa

SEQ ID NO: 1996531 - RNA, 19 nt, Homo sapiens
  misc_RNA (1)...(19): siRNA sense strand
caaaggccgaagagaacaa

SEQ ID NO: 1996532 - RNA, 19 nt, Homo sapiens
  misc_RNA (1)...(19): siRNA sense strand
cacggaagccucuuacuac

SEQ ID NO: 1996533 - RNA, 19 nt, Homo sapiens
  misc_RNA (1)...(19): siRNA sense strand
ugacaccaccggaaaggau

SEQ ID NO: 1996534 - RNA, 19 nt, Homo sapiens
  misc_RNA (1)...(19): siRNA sense strand
gaggcgggucuccauagaa

SEQ ID NO: 1996535 - RNA, 19 nt, Homo sapiens
  misc_RNA (1)...(19): siRNA sense strand
augcagaaagucauguaua

SEQ ID NO: 1996536 - RNA, 19 nt, Homo sapiens
  misc_RNA (1)...(19): siRNA sense strand
ccaccggaaaggauucauu

SEQ ID NO: 1996537 - RNA, 19 nt, Homo sapiens
  misc_RNA (1)...(19): siRNA sense strand
guaccgcuguccggcaugu

SEQ ID NO: 1996538 - RNA, 19 nt, Homo sapiens
  misc_RNA (1)...(19): siRNA sense strand
caaugauguuuuagcagua

SEQ ID NO: 1996539 - RNA, 19 nt, Homo sapiens
  misc_RNA (1)...(19): siRNA sense strand
augcaaaggccgaagagaa

SEQ ID NO: 1996540 - RNA, 19 nt, Homo sapiens
  misc_RNA (1)...(19): siRNA sense strand
gagcugguggacuugaaga

SEQ ID NO: 1996541 - RNA, 19 nt, Homo sapiens
  misc_RNA (1)...(19): siRNA sense strand
gacaccaccggaaaggauu

SEQ ID NO: 1996542 - RNA, 19 nt, Homo sapiens
  misc_RNA (1)...(19): siRNA sense strand
agaaacaacacaggaaagu

SEQ ID NO: 1996543 - RNA, 19 nt, Homo sapiens
  misc_RNA (1)...(19): siRNA sense strand
aggaaaguguuggauaaag

SEQ ID NO: 1996544 - RNA, 19 nt, Homo sapiens
  misc_RNA (1)...(19): siRNA sense strand
acaauaaaucuggaggaaa

SEQ ID NO: 1996545 - RNA, 19 nt, Homo sapiens
  misc_RNA (1)...(19): siRNA sense strand
gccagagaaagggcuauuu

SEQ ID NO: 1996546 - RNA, 19 nt, Homo sapiens
  misc_RNA (1)...(19): siRNA sense strand
acucaccuuuaaacuagaa

SEQ ID NO: 1996547 - RNA, 19 nt, Homo sapiens
  misc_RNA (1)...(19): siRNA sense strand
aggaaaaccugaagaugug

SEQ ID NO: 1996548 - RNA, 19 nt, Homo sapiens
  misc_RNA (1)...(19): siRNA sense strand
ggauaaaacauugagagaa

SEQ ID NO: 1996549 - RNA, 19 nt, Homo sapiens
  misc_RNA (1)...(19): siRNA sense strand
aagauccacucgauuacag

SEQ ID NO: 1996550 - RNA, 19 nt, Homo sapiens
  misc_RNA (1)...(19): siRNA sense strand
gcgcagccuugccccuuaa

SEQ ID NO: 1996551 - RNA, 19 nt, Homo sapiens
  misc_RNA (1)...(19): siRNA sense strand
ggacaccgauccucacuuu

SEQ ID NO: 1996552 - RNA, 19 nt, Homo sapiens
  misc_RNA (1)...(19): siRNA sense strand
gaggagaaaugcuacuauu

SEQ ID NO: 1996553 - RNA, 19 nt, Homo sapiens
  misc_RNA (1)...(19): siRNA sense strand
ggacucagauauugcuuuc

SEQ ID NO: 1996554 - RNA, 19 nt, Homo sapiens
  misc_RNA (1)...(19): siRNA sense strand
ggagauaugaggagaaaug

SEQ ID NO: 1996555 - RNA, 19 nt, Homo sapiens
  misc_RNA (1)...(19): siRNA sense strand
gauaugaggagaaaugcua

SEQ ID NO: 1996556 - RNA, 19 nt, Homo sapiens
  misc_RNA (1)...(19): siRNA sense strand
ggaauacaagguaauggua

SEQ ID NO: 1996557 - RNA, 19 nt, Homo sapiens
  misc_RNA (1)...(19): siRNA sense strand
gaauacaagguaaugguaa

SEQ ID NO: 1996558 - RNA, 19 nt, Homo sapiens
  misc_RNA (1)...(19): siRNA sense strand
ccaacgcauuuacaacuuu

SEQ ID NO: 1996559 - RNA, 19 nt, Homo sapiens
  misc_RNA (1)...(19): siRNA sense strand
ucacaaggaauacaaggua

SEQ ID NO: 1996560 - RNA, 19 nt, Homo sapiens
  misc_RNA (1)...(19): siRNA sense strand
caacuuugcccaucgauuc

SEQ ID NO: 1996561 - RNA, 19 nt, Homo sapiens
  misc_RNA (1)...(19): siRNA sense strand
caacgcauuuacaacuuug

SEQ ID NO: 1996562 - RNA, 19 nt, Homo sapiens
  misc_RNA (1)...(19): siRNA sense strand
cauuugagcugugcaucua

SEQ ID NO: 1996563 - RNA, 19 nt, Homo sapiens
  misc_RNA (1)...(19): siRNA sense strand
cacaaggaauacaagguaa

SEQ ID NO: 1996564 - RNA, 19 nt, Homo sapiens
  misc_RNA (1)...(19): siRNA sense strand
ggaggugaauuucuacacu

SEQ ID NO: 1996565 - RNA, 19 nt, Homo sapiens
  misc_RNA (1)...(19): siRNA sense strand
gcuacuauuuacccuuuga

SEQ ID NO: 1996566 - RNA, 19 nt, Homo sapiens
  misc_RNA (1)...(19): siRNA sense strand
cgacugcacuuuggucauc

SEQ ID NO: 1996567 - RNA, 19 nt, Homo sapiens
  misc_RNA (1)...(19): siRNA sense strand
gccaacgcauuuacaacuu

SEQ ID NO: 1996568 - RNA, 19 nt, Homo sapiens
  misc_RNA (1)...(19): siRNA sense strand
cauacacacugccuguuuc

SEQ ID NO: 1996569 - RNA, 19 nt, Homo sapiens
  misc_RNA (1)...(19): siRNA sense strand
ccauacacacugccuguuu

SEQ ID NO: 1996570 - RNA, 19 nt, Homo sapiens
  misc_RNA (1)...(19): siRNA sense strand
caucacuacccguaccaua

SEQ ID NO: 1996571 - RNA, 19 nt, Homo sapiens
  misc_RNA (1)...(19): siRNA sense strand
caaggaauacaagguaaug

SEQ ID NO: 1996572 - RNA, 19 nt, Homo sapiens
  misc_RNA (1)...(19): siRNA sense strand
cuauuuacccuuugaagau

SEQ ID NO: 1996573 - RNA, 19 nt, Homo sapiens
  misc_RNA (1)...(19): siRNA sense strand
acaagguaaugguaaaugg

SEQ ID NO: 1996574 - RNA, 19 nt, Homo sapiens
  misc_RNA (1)...(19): siRNA sense strand
cugcaaucaugaacaguug

SEQ ID NO: 1996575 - RNA, 19 nt, Homo sapiens
  misc_RNA (1)...(19): siRNA sense strand
ccuguuuccuugccuguug

SEQ ID NO: 1996576 - RNA, 19 nt, Homo sapiens
  misc_RNA (1)...(19): siRNA sense strand
acccacagcuggaggugaa

SEQ ID NO: 1996577 - RNA, 19 nt, Homo sapiens
  misc_RNA (1)...(19): siRNA sense strand
augcuacuauuuacccuuu

SEQ ID NO: 1996578 - RNA, 19 nt, Homo sapiens
  misc_RNA (1)...(19): siRNA sense strand
gcaaucaugaacaguugug

SEQ ID NO: 1996579 - RNA, 19 nt, Homo sapiens
  misc_RNA (1)...(19): siRNA sense strand
gugaagaugcugcaagucu

SEQ ID NO: 1996580 - RNA, 19 nt, Homo sapiens
  misc_RNA (1)...(19): siRNA sense strand
acucagauauugcuuucca

SEQ ID NO: 1996581 - RNA, 19 nt, Homo sapiens
  misc_RNA (1)...(19): siRNA sense strand
uuacaacuuugcccaucga

SEQ ID NO: 1996582 - RNA, 19 nt, Homo sapiens
  misc_RNA (1)...(19): siRNA sense strand
uauuuacccuuugaagaug

SEQ ID NO: 1996583 - RNA, 19 nt, Homo sapiens
  misc_RNA (1)...(19): siRNA sense strand
ccaauuccgacugcacuuu

SEQ ID NO: 1996584 - RNA, 19 nt, Homo sapiens
  misc_RNA (1)...(19): siRNA sense strand
caauuccgacugcacuuug

SEQ ID NO: 1996585 - RNA, 19 nt, Homo sapiens
  misc_RNA (1)...(19): siRNA sense strand
gauccucacuuuugucaag

SEQ ID NO: 1996586 - RNA, 19 nt, Homo sapiens
  misc_RNA (1)...(19): siRNA sense strand
ucacuacccguaccauaca

SEQ ID NO: 1996587 - RNA, 19 nt, Homo sapiens
  misc_RNA (1)...(19): siRNA sense strand
ggccaacgcauuuacaacu

SEQ ID NO: 1996588 - RNA, 19 nt, Homo sapiens
  misc_RNA (1)...(19): siRNA sense strand
auggagauaugaggagaaa

SEQ ID NO: 1996589 - RNA, 19 nt, Homo sapiens
  misc_RNA (1)...(19): siRNA sense strand
acacacugccuguuuccuu

SEQ ID NO: 1996590 - RNA, 19 nt, Homo sapiens
  misc_RNA (1)...(19): siRNA sense strand
agcuggaggugaauuucua

SEQ ID NO: 1996591 - RNA, 19 nt, Homo sapiens
  misc_RNA (1)...(19): siRNA sense strand
guugguucgugcgugauaa

SEQ ID NO: 1996592 - RNA, 19 nt, Homo sapiens
  misc_RNA (1)...(19): siRNA sense strand
ugaggagaaaugcuacuau

SEQ ID NO: 1996593 - RNA, 19 nt, Homo sapiens
  misc_RNA (1)...(19): siRNA sense strand
uacaggaucuuuccaauua

SEQ ID NO: 1996594 - RNA, 19 nt, Homo sapiens
  misc_RNA (1)...(19): siRNA sense strand
cauggagacuucuuuauaa

SEQ ID NO: 1996595 - RNA, 19 nt, Homo sapiens
  misc_RNA (1)...(19): siRNA sense strand
ucccaaagcugaaccuaua

SEQ ID NO: 1996596 - RNA, 19 nt, Homo sapiens
  misc_RNA (1)...(19): siRNA sense strand
ugaaagcacugaugagguu

SEQ ID NO: 1996597 - RNA, 19 nt, Homo sapiens
  misc_RNA (1)...(19): siRNA sense strand
gguacaacaucauucagua

SEQ ID NO: 1996598 - RNA, 19 nt, Homo sapiens
  misc_RNA (1)...(19): siRNA sense strand
ucgaaggaaucauguauaa

SEQ ID NO: 1996599 - RNA, 19 nt, Homo sapiens
  misc_RNA (1)...(19): siRNA sense strand
ggaauuguuucucuaguuc

SEQ ID NO: 1996600 - RNA, 19 nt, Homo sapiens
  misc_RNA (1)...(19): siRNA sense strand
gauauacagugauggaaug

SEQ ID NO: 1996601 - RNA, 19 nt, Homo sapiens
  misc_RNA (1)...(19): siRNA sense strand
gaggagaugcuaaagaauu

SEQ ID NO: 1996602 - RNA, 19 nt, Homo sapiens
  misc_RNA (1)...(19): siRNA sense strand
gaucgaaaauggauuguuu

SEQ ID NO: 1996603 - RNA, 19 nt, Homo sapiens
  misc_RNA (1)...(19): siRNA sense strand
aggagaugcuaaagaauua

SEQ ID NO: 1996604 - RNA, 19 nt, Homo sapiens
  misc_RNA (1)...(19): siRNA sense strand
gggagaagauauuaaagca

SEQ ID NO: 1996605 - RNA, 19 nt, Homo sapiens
  misc_RNA (1)...(19): siRNA sense strand
gggaugguaugcuggauau

SEQ ID NO: 1996606 - RNA, 19 nt, Homo sapiens
  misc_RNA (1)...(19): siRNA sense strand
agaaacaagucaggcauuu

SEQ ID NO: 1996607 - RNA, 19 nt, Homo sapiens
  misc_RNA (1)...(19): siRNA sense strand
ucauggagacuucuuuaua

SEQ ID NO: 1996608 - RNA, 19 nt, Homo sapiens
  misc_RNA (1)...(19): siRNA sense strand
aguaagcgguucugguaua

SEQ ID NO: 1996609 - RNA, 19 nt, Homo sapiens
  misc_RNA (1)...(19): siRNA sense strand
uaucagcgguuuguugaaa

SEQ ID NO: 1996610 - RNA, 19 nt, Homo sapiens
  misc_RNA (1)...(19): siRNA sense strand
cugaugaccuuaccacuug

SEQ ID NO: 1996611 - RNA, 19 nt, Homo sapiens
  misc_RNA (1)...(19): siRNA sense strand
gagcagagaucgaaaaugg

SEQ ID NO: 1996612 - RNA, 19 nt, Homo sapiens
  misc_RNA (1)...(19): siRNA sense strand
aggaggagaugcuaaagaa

SEQ ID NO: 1996613 - RNA, 19 nt, Homo sapiens
  misc_RNA (1)...(19): siRNA sense strand
ggcuauaacuuuggaagaa

SEQ ID NO: 1996614 - RNA, 19 nt, Homo sapiens
  misc_RNA (1)...(19): siRNA sense strand
gcagugauguuggugaauc

SEQ ID NO: 1996615 - RNA, 19 nt, Homo sapiens
  misc_RNA (1)...(19): siRNA sense strand
caggaucuuuccaauuaaa

SEQ ID NO: 1996616 - RNA, 19 nt, Homo sapiens
  misc_RNA (1)...(19): siRNA sense strand
gaucuuaucgugaccaaca

SEQ ID NO: 1996617 - RNA, 19 nt, Homo sapiens
  misc_RNA (1)...(19): siRNA sense strand
acaguaagcgguucuggua

SEQ ID NO: 1996618 - RNA, 19 nt, Homo sapiens
  misc_RNA (1)...(19): siRNA sense strand
guaagcgguucugguauau

SEQ ID NO: 1996619 - RNA, 19 nt, Homo sapiens
  misc_RNA (1)...(19): siRNA sense strand
agaauuagacagcaaauca

SEQ ID NO: 1996620 - RNA, 19 nt, Homo sapiens
  misc_RNA (1)...(19): siRNA sense strand
aagcugaaccuauagauau

SEQ ID NO: 1996621 - RNA, 19 nt, Homo sapiens
  misc_RNA (1)...(19): siRNA sense strand
uagauacaacgauagcuua

SEQ ID NO: 1996622 - RNA, 19 nt, Homo sapiens
  misc_RNA (1)...(19): siRNA sense strand
gaauuagacagcaaaucaa

SEQ ID NO: 1996623 - RNA, 19 nt, Homo sapiens
  misc_RNA (1)...(19): siRNA sense strand
guucauggagacuucuuua

SEQ ID NO: 1996624 - RNA, 19 nt, Homo sapiens
  misc_RNA (1)...(19): siRNA sense strand
gaaacaagucaggcauuug

SEQ ID NO: 1996625 - RNA, 19 nt, Homo sapiens
  misc_RNA (1)...(19): siRNA sense strand
gagaaacaagucaggcauu

SEQ ID NO: 1996626 - RNA, 19 nt, Homo sapiens
  misc_RNA (1)...(19): siRNA sense strand
gcucagaugaugugguuga

SEQ ID NO: 1996627 - RNA, 19 nt, Homo sapiens
  misc_RNA (1)...(19): siRNA sense strand
gcuauuccauccuacaucu

SEQ ID NO: 1996628 - RNA, 19 nt, Homo sapiens
  misc_RNA (1)...(19): siRNA sense strand
uggaauuguuucucuaguu

SEQ ID NO: 1996629 - RNA, 19 nt, Homo sapiens
  misc_RNA (1)...(19): siRNA sense strand
guacaacaucauucaguau

SEQ ID NO: 1996630 - RNA, 19 nt, Homo sapiens
  misc_RNA (1)...(19): siRNA sense strand
ggaagaggcgagaaacaag

SEQ ID NO: 1996631 - RNA, 19 nt, Homo sapiens
  misc_RNA (1)...(19): siRNA sense strand
gagaugacccucagcaacu

SEQ ID NO: 1996632 - RNA, 19 nt, Homo sapiens
  misc_RNA (1)...(19): siRNA sense strand
gaagaggcgagaaacaagu

SEQ ID NO: 1996633 - RNA, 19 nt, Homo sapiens
  misc_RNA (1)...(19): siRNA sense strand
ggauauacagugauggaau

SEQ ID NO: 1996634 - RNA, 19 nt, Homo sapiens
  misc_RNA (1)...(19): siRNA sense strand
aaagcugaaccuauagaua

SEQ ID NO: 1996635 - RNA, 19 nt, Homo sapiens
  misc_RNA (1)...(19): siRNA sense strand
uaacuugccauuucuuaca

SEQ ID NO: 1996636 - RNA, 19 nt, Homo sapiens
  misc_RNA (1)...(19): siRNA sense strand
cauacagucuuuugcauuu

SEQ ID NO: 1996637 - RNA, 19 nt, Homo sapiens
  misc_RNA (1)...(19): siRNA sense strand
gaaaccaacagucacacau

SEQ ID NO: 1996638 - RNA, 19 nt, Homo sapiens
  misc_RNA (1)...(19): siRNA sense strand
ggcuauaugugguacaaca

SEQ ID NO: 1996639 - RNA, 19 nt, Homo sapiens
  misc_RNA (1)...(19): siRNA sense strand
guacauuacaggaucuuuc

SEQ ID NO: 1996640 - RNA, 19 nt, Homo sapiens
  misc_RNA (1)...(19): siRNA sense strand
guauaucgaaggaaucaug

SEQ ID NO: 1996641 - RNA, 19 nt, Homo sapiens
  misc_RNA (1)...(19): siRNA sense strand
ucaagaagcacuuagaaaa

SEQ ID NO: 1996642 - RNA, 19 nt, Homo sapiens
  misc_RNA (1)...(19): siRNA sense strand
guucugguauaucgaagga

SEQ ID NO: 1996643 - RNA, 19 nt, Homo sapiens
  misc_RNA (1)...(19): siRNA sense strand
acaggaucuuuccaauuaa

SEQ ID NO: 1996644 - RNA, 19 nt, Homo sapiens
  misc_RNA (1)...(19): siRNA sense strand
gcuauaacuuuggaagaag

SEQ ID NO: 1996645 - RNA, 19 nt, Homo sapiens
  misc_RNA (1)...(19): siRNA sense strand
aagcagugauguuggugaa

SEQ ID NO: 1996646 - RNA, 19 nt, Homo sapiens
  misc_RNA (1)...(19): siRNA sense strand
uaugcuggauauacaguga

SEQ ID NO: 1996647 - RNA, 19 nt, Homo sapiens
  misc_RNA (1)...(19): siRNA sense strand
cucagcaacuuguggauau

SEQ ID NO: 1996648 - RNA, 19 nt, Homo sapiens
  misc_RNA (1)...(19): siRNA sense strand
ugaugugccuccaggacaa

SEQ ID NO: 1996649 - RNA, 19 nt, Homo sapiens
  misc_RNA (1)...(19): siRNA sense strand
uuacaggaucuuuccaauu

SEQ ID NO: 1996650 - RNA, 19 nt, Homo sapiens
  misc_RNA (1)...(19): siRNA sense strand
uaucgaaggaaucauguau

SEQ ID NO: 1996651 - RNA, 19 nt, Homo sapiens
  misc_RNA (1)...(19): siRNA sense strand
guggauauuucucauacag

SEQ ID NO: 1996652 - RNA, 19 nt, Homo sapiens
  misc_RNA (1)...(19): siRNA sense strand
ggaaaccaacagucacaca

SEQ ID NO: 1996653 - RNA, 19 nt, Homo sapiens
  misc_RNA (1)...(19): siRNA sense strand
uucgagugcuggacaguaa

SEQ ID NO: 1996654 - RNA, 19 nt, Homo sapiens
  misc_RNA (1)...(19): siRNA sense strand
uugcucagaugaugugguu

SEQ ID NO: 1996655 - RNA, 19 nt, Homo sapiens
  misc_RNA (1)...(19): siRNA sense strand
aaccaacagucacacaugu

SEQ ID NO: 1996656 - RNA, 19 nt, Homo sapiens
  misc_RNA (1)...(19): siRNA sense strand
ccuggagacugaugaccuu

SEQ ID NO: 1996657 - RNA, 19 nt, Homo sapiens
  misc_RNA (1)...(19): siRNA sense strand
cagucacacauguacauua

SEQ ID NO: 1996658 - RNA, 19 nt, Homo sapiens
  misc_RNA (1)...(19): siRNA sense strand
ggaauggggagaagauauu

SEQ ID NO: 1996659 - RNA, 19 nt, Homo sapiens
  misc_RNA (1)...(19): siRNA sense strand
gaaagcacugaugagguuu

SEQ ID NO: 1996660 - RNA, 19 nt, Homo sapiens
  misc_RNA (1)...(19): siRNA sense strand
cagcaacuuguggauauuu

SEQ ID NO: 1996661 - RNA, 19 nt, Homo sapiens
  misc_RNA (1)...(19): siRNA sense strand
ucagcaacuuguggauauu

SEQ ID NO: 1996662 - RNA, 19 nt, Homo sapiens
  misc_RNA (1)...(19): siRNA sense strand
ucugguauaucgaaggaau

SEQ ID NO: 1996663 - RNA, 19 nt, Homo sapiens
  misc_RNA (1)...(19): siRNA sense strand
cgaaggaaucauguauaaa

SEQ ID NO: 1996664 - RNA, 19 nt, Homo sapiens
  misc_RNA (1)...(19): siRNA sense strand
ccaaagcugaaccuauaga

SEQ ID NO: 1996665 - RNA, 19 nt, Homo sapiens
  misc_RNA (1)...(19): siRNA sense strand
gguuguugcucagaugaug

SEQ ID NO: 1996666 - RNA, 19 nt, Homo sapiens
  misc_RNA (1)...(19): siRNA sense strand
aaacaagucaggcauuugc

SEQ ID NO: 1996667 - RNA, 19 nt, Homo sapiens
  misc_RNA (1)...(19): siRNA sense strand
ucuaucagcgguuuguuga

SEQ ID NO: 1996668 - RNA, 19 nt, Homo sapiens
  misc_RNA (1)...(19): siRNA sense strand
agucacacauguacauuac

SEQ ID NO: 1996669 - RNA, 19 nt, Homo sapiens
  misc_RNA (1)...(19): siRNA sense strand
agacagggaagaucuuauc

SEQ ID NO: 1996670 - RNA, 19 nt, Homo sapiens
  misc_RNA (1)...(19): siRNA sense strand
caggcuauaugugguacaa

SEQ ID NO: 1996671 - RNA, 19 nt, Homo sapiens
  misc_RNA (1)...(19): siRNA sense strand
aaaccaacagucacacaug

SEQ ID NO: 1996672 - RNA, 19 nt, Homo sapiens
  misc_RNA (1)...(19): siRNA sense strand
caagaagcacuuagaaaau

SEQ ID NO: 1996673 - RNA, 19 nt, Homo sapiens
  misc_RNA (1)...(19): siRNA sense strand
ggaggagaugcuaaagaau

SEQ ID NO: 1996674 - RNA, 19 nt, Homo sapiens
  misc_RNA (1)...(19): siRNA sense strand
gaauggggagaagauauua

SEQ ID NO: 1996675 - RNA, 19 nt, Homo sapiens
  misc_RNA (1)...(19): siRNA sense strand
caaagcugaaccuauagau

SEQ ID NO: 1996676 - RNA, 19 nt, Homo sapiens
  misc_RNA (1)...(19): siRNA sense strand
caggaggagaugcuaaaga

SEQ ID NO: 1996677 - RNA, 19 nt, Homo sapiens
  misc_RNA (1)...(19): siRNA sense strand
ucucaagaagcacuuagaa

SEQ ID NO: 1996678 - RNA, 19 nt, Homo sapiens
  misc_RNA (1)...(19): siRNA sense strand
uauaagacagggaagaucu

SEQ ID NO: 1996679 - RNA, 19 nt, Homo sapiens
  misc_RNA (1)...(19): siRNA sense strand
ccucagcaacuuguggaua

SEQ ID NO: 1996680 - RNA, 19 nt, Homo sapiens
  misc_RNA (1)...(19): siRNA sense strand
cugaugagguuugccuuca

SEQ ID NO: 1996681 - RNA, 19 nt, Homo sapiens
  misc_RNA (1)...(19): siRNA sense strand
agaugaagcagugauguug

SEQ ID NO: 1996682 - RNA, 19 nt, Homo sapiens
  misc_RNA (1)...(19): siRNA sense strand
ggccauaaggaagcuguuu

SEQ ID NO: 1996683 - RNA, 19 nt, Homo sapiens
  misc_RNA (1)...(19): siRNA sense strand
gaauuguuucucuaguuca

SEQ ID NO: 1996684 - RNA, 19 nt, Homo sapiens
  misc_RNA (1)...(19): siRNA sense strand
ggagacugaugaccuuacc

SEQ ID NO: 1996685 - RNA, 19 nt, Homo sapiens
  misc_RNA (1)...(19): siRNA sense strand
uacaggaaaccaacaguca

SEQ ID NO: 1996686 - RNA, 19 nt, Homo sapiens
  misc_RNA (1)...(19): siRNA sense strand
agcugaaccuauagauauu

SEQ ID NO: 1996687 - RNA, 19 nt, Homo sapiens
  misc_RNA (1)...(19): siRNA sense strand
ucuaguucauggagacuuc

SEQ ID NO: 1996688 - RNA, 19 nt, Homo sapiens
  misc_RNA (1)...(19): siRNA sense strand
ugggcuggcucuuggugaa

SEQ ID NO: 1996689 - RNA, 19 nt, Homo sapiens
  misc_RNA (1)...(19): siRNA sense strand
agaugacccucagcaacuu

SEQ ID NO: 1996690 - RNA, 19 nt, Homo sapiens
  misc_RNA (1)...(19): siRNA sense strand
caggaaaccaacagucaca

SEQ ID NO: 1996691 - RNA, 19 nt, Homo sapiens
  misc_RNA (1)...(19): siRNA sense strand
ugguugcuauuccauccua

SEQ ID NO: 1996692 - RNA, 19 nt, Homo sapiens
  misc_RNA (1)...(19): siRNA sense strand
aagcgguucugguauaucg

SEQ ID NO: 1996693 - RNA, 19 nt, Homo sapiens
  misc_RNA (1)...(19): siRNA sense strand
gcugagaaguccuuuaaua

SEQ ID NO: 1996694 - RNA, 19 nt, Homo sapiens
  misc_RNA (1)...(19): siRNA sense strand
gcaguaaauugaagaaugu

SEQ ID NO: 1996695 - RNA, 19 nt, Homo sapiens
  misc_RNA (1)...(19): siRNA sense strand
gaaaggagaguguaagaga

SEQ ID NO: 1996696 - RNA, 19 nt, Homo sapiens
  misc_RNA (1)...(19): siRNA sense strand
guaaauggccgcagacuga

SEQ ID NO: 1996697 - RNA, 19 nt, Homo sapiens
  misc_RNA (1)...(19): siRNA sense strand
gagaaguccuuuaauaagu

SEQ ID NO: 1996698 - RNA, 19 nt, Homo sapiens
  misc_RNA (1)...(19): siRNA sense strand
aaagucagaugucaacaaa

SEQ ID NO: 1996699 - RNA, 19 nt, Homo sapiens
  misc_RNA (1)...(19): siRNA sense strand
caacaaagaguacuauaca

SEQ ID NO: 1996700 - RNA, 19 nt, Homo sapiens
  misc_RNA (1)...(19): siRNA sense strand
ggagaggaauguccauaca

SEQ ID NO: 1996701 - RNA, 19 nt, Homo sapiens
  misc_RNA (1)...(19): siRNA sense strand
gaccacacccuacuacaaa

SEQ ID NO: 1996702 - RNA, 19 nt, Homo sapiens
  misc_RNA (1)...(19): siRNA sense strand
gaaguccuuuaauaaguug

SEQ ID NO: 1996703 - RNA, 19 nt, Homo sapiens
  misc_RNA (1)...(19): siRNA sense strand
agucagaugucaacaaaga

SEQ ID NO: 1996704 - RNA, 19 nt, Homo sapiens
  misc_RNA (1)...(19): siRNA sense strand
ugccaaaccugcaguaaau

SEQ ID NO: 1996705 - RNA, 19 nt, Homo sapiens
  misc_RNA (1)...(19): siRNA sense strand
agagagagauuucuaacuc

SEQ ID NO: 1996706 - RNA, 19 nt, Homo sapiens
  misc_RNA (1)...(19): siRNA sense strand
gaagaagccucugccaacu

SEQ ID NO: 1996707 - RNA, 19 nt, Homo sapiens
  misc_RNA (1)...(19): siRNA sense strand
gaauauggagagagagauu

SEQ ID NO: 1996708 - RNA, 19 nt, Homo sapiens
  misc_RNA (1)...(19): siRNA sense strand
agagaaagauggaacuaca

SEQ ID NO: 1996709 - RNA, 19 nt, Homo sapiens
  misc_RNA (1)...(19): siRNA sense strand
aaagaguacuauacacaga

SEQ ID NO: 1996710 - RNA, 19 nt, Homo sapiens
  misc_RNA (1)...(19): siRNA sense strand
agaaguggcugcugagaag

SEQ ID NO: 1996711 - RNA, 19 nt, Homo sapiens
  misc_RNA (1)...(19): siRNA sense strand
ggugauaccauuacugaga

SEQ ID NO: 1996712 - RNA, 19 nt, Homo sapiens
  misc_RNA (1)...(19): siRNA sense strand
ggaccacacccuacuacaa

SEQ ID NO: 1996713 - RNA, 19 nt, Homo sapiens
  misc_RNA (1)...(19): siRNA sense strand
cacagaauauggagagaga

SEQ ID NO: 1996714 - RNA, 19 nt, Homo sapiens
  misc_RNA (1)...(19): siRNA sense strand
agaggaauguccauacaga

SEQ ID NO: 1996715 - RNA, 19 nt, Homo sapiens
  misc_RNA (1)...(19): siRNA sense strand
ugucagaccugccucuuag

SEQ ID NO: 1996716 - RNA, 19 nt, Homo sapiens
  misc_RNA (1)...(19): siRNA sense strand
cugagaaguccuuuaauaa

SEQ ID NO: 1996717 - RNA, 19 nt, Homo sapiens
  misc_RNA (1)...(19): siRNA sense strand
ggaccaauccacuauccuu

SEQ ID NO: 1996718 - RNA, 19 nt, Homo sapiens
  misc_RNA (1)...(19): siRNA sense strand
gauggaacacggccaguug

SEQ ID NO: 1996719 - RNA, 19 nt, Homo sapiens
  misc_RNA (1)...(19): siRNA sense strand
ggucuaggugauaccauua

SEQ ID NO: 1996720 - RNA, 19 nt, Homo sapiens
  misc_RNA (1)...(19): siRNA sense strand
caaagucagaugucaacaa

SEQ ID NO: 1996721 - RNA, 19 nt, Homo sapiens
  misc_RNA (1)...(19): siRNA sense strand
ccagugacaugcugcucaa

SEQ ID NO: 1996722 - RNA, 19 nt, Homo sapiens
  misc_RNA (1)...(19): siRNA sense strand
ccaaaccugcaguaaauug

SEQ ID NO: 1996723 - RNA, 19 nt, Homo sapiens
  misc_RNA (1)...(19): siRNA sense strand
gaucaaacuagaaccuguu

SEQ ID NO: 1996724 - RNA, 19 nt, Homo sapiens
  misc_RNA (1)...(19): siRNA sense strand
ugcaguaaauugaagaaug

SEQ ID NO: 1996725 - RNA, 19 nt, Homo sapiens
  misc_RNA (1)...(19): siRNA sense strand
uaagagaggagaggaaugu

SEQ ID NO: 1996726 - RNA, 19 nt, Homo sapiens
  misc_RNA (1)...(19): siRNA sense strand
aagaugacaugccaaaguc

SEQ ID NO: 1996727 - RNA, 19 nt, Homo sapiens
  misc_RNA (1)...(19): siRNA sense strand
gcagacugaaugugaaaug

SEQ ID NO: 1996728 - RNA, 19 nt, Homo sapiens
  misc_RNA (1)...(19): siRNA sense strand
ugagaaguccuuuaauaag

SEQ ID NO: 1996729 - RNA, 19 nt, Homo sapiens
  misc_RNA (1)...(19): siRNA sense strand
aaacuaucaccacacuaua

SEQ ID NO: 1996730 - RNA, 19 nt, Homo sapiens
  misc_RNA (1)...(19): siRNA sense strand
gaggagaggaauguccaua

SEQ ID NO: 1996731 - RNA, 19 nt, Homo sapiens
  misc_RNA (1)...(19): siRNA sense strand
gacgcaggauugucuuuua

SEQ ID NO: 1996732 - RNA, 19 nt, Homo sapiens
  misc_RNA (1)...(19): siRNA sense strand
guuauuacggaaucaauga

SEQ ID NO: 1996733 - RNA, 19 nt, Homo sapiens
  misc_RNA (1)...(19): siRNA sense strand
uuaaagaugacaugccaaa

SEQ ID NO: 1996734 - RNA, 19 nt, Homo sapiens
  misc_RNA (1)...(19): siRNA sense strand
ggaguccgcaugcguuuca

SEQ ID NO: 1996735 - RNA, 19 nt, Homo sapiens
  misc_RNA (1)...(19): siRNA sense strand
aaacccauauauccgaaug

SEQ ID NO: 1996736 - RNA, 19 nt, Homo sapiens
  misc_RNA (1)...(19): siRNA sense strand
caaaccugcaguaaauuga

SEQ ID NO: 1996737 - RNA, 19 nt, Homo sapiens
  misc_RNA (1)...(19): siRNA sense strand
aaagaugacaugccaaagu

SEQ ID NO: 1996738 - RNA, 19 nt, Homo sapiens
  misc_RNA (1)...(19): siRNA sense strand
uaggugauaccauuacuga

SEQ ID NO: 1996739 - RNA, 19 nt, Homo sapiens
  misc_RNA (1)...(19): siRNA sense strand
ggccgcagacugaauguga

SEQ ID NO: 1996740 - RNA, 19 nt, Homo sapiens
  misc_RNA (1)...(19): siRNA sense strand
gccaggccauucacagugu

SEQ ID NO: 1996741 - RNA, 19 nt, Homo sapiens
  misc_RNA (1)...(19): siRNA sense strand
cugcugagaaguccuuuaa

SEQ ID NO: 1996742 - RNA, 19 nt, Homo sapiens
  misc_RNA (1)...(19): siRNA sense strand
gaucacuguugugcagaga

SEQ ID NO: 1996743 - RNA, 19 nt, Homo sapiens
  misc_RNA (1)...(19): siRNA sense strand
acaaagaguacuauacaca

SEQ ID NO: 1996744 - RNA, 19 nt, Homo sapiens
  misc_RNA (1)...(19): siRNA sense strand
gugccaaaccugcaguaaa

SEQ ID NO: 1996745 - RNA, 19 nt, Homo sapiens
  misc_RNA (1)...(19): siRNA sense strand
ccgcaugcguuucaagaag

SEQ ID NO: 1996746 - RNA, 19 nt, Homo sapiens
  misc_RNA (1)...(19): siRNA sense strand
ggacccaccagaggauaaa

SEQ ID NO: 1996747 - RNA, 19 nt, Homo sapiens
  misc_RNA (1)...(19): siRNA sense strand
ucuuagaccuagaguaugg

SEQ ID NO: 1996748 - RNA, 19 nt, Homo sapiens
  misc_RNA (1)...(19): siRNA sense strand
gugaaaggagaguguaaga

SEQ ID NO: 1996749 - RNA, 19 nt, Homo sapiens
  misc_RNA (1)...(19): siRNA sense strand
ggagagagagauuucuaac

SEQ ID NO: 1996750 - RNA, 19 nt, Homo sapiens
  misc_RNA (1)...(19): siRNA sense strand
cgaccucucuggguuccaa

SEQ ID NO: 1996751 - RNA, 19 nt, Homo sapiens
  misc_RNA (1)...(19): siRNA sense strand
agaagccucugccaacuac

SEQ ID NO: 1996752 - RNA, 19 nt, Homo sapiens
  misc_RNA (1)...(19): siRNA sense strand
acucugggaucaaacuaga

SEQ ID NO: 1996753 - RNA, 19 nt, Homo sapiens
  misc_RNA (1)...(19): siRNA sense strand
agaaagauggaacuacaga

SEQ ID NO: 1996754 - RNA, 19 nt, Homo sapiens
  misc_RNA (1)...(19): siRNA sense strand
cagaauauggagagagaga

SEQ ID NO: 1996755 - RNA, 19 nt, Homo sapiens
  misc_RNA (1)...(19): siRNA sense strand
agaguacuauacacagaau

SEQ ID NO: 1996756 - RNA, 19 nt, Homo sapiens
  misc_RNA (1)...(19): siRNA sense strand
cagaaguggcugcugagaa

SEQ ID NO: 1996757 - RNA, 19 nt, Homo sapiens
  misc_RNA (1)...(19): siRNA sense strand
cgcaugcguuucaagaaga

SEQ ID NO: 1996758 - RNA, 19 nt, Homo sapiens
  misc_RNA (1)...(19): siRNA sense strand
aaagagaaagauggaacua

SEQ ID NO: 1996759 - RNA, 19 nt, Homo sapiens
  misc_RNA (1)...(19): siRNA sense strand
ucacuguugugcagagaca

SEQ ID NO: 1996760 - RNA, 19 nt, Homo sapiens
  misc_RNA (1)...(19): siRNA sense strand
ccauuacugagacagauuu

SEQ ID NO: 1996761 - RNA, 19 nt, Homo sapiens
  misc_RNA (1)...(19): siRNA sense strand
uaucaccacacuauauguu

SEQ ID NO: 1996762 - RNA, 19 nt, Homo sapiens
  misc_RNA (1)...(19): siRNA sense strand
gggaaggaaugcaaaaucu

SEQ ID NO: 1996763 - RNA, 19 nt, Homo sapiens
  misc_RNA (1)...(19): siRNA sense strand
gugacaugcugcucaaacu

SEQ ID NO: 1996764 - RNA, 19 nt, Homo sapiens
  misc_RNA (1)...(19): siRNA sense strand
ggagaaaacccauauaucc

SEQ ID NO: 1996765 - RNA, 19 nt, Homo sapiens
  misc_RNA (1)...(19): siRNA sense strand
agauggaacuacagacucu

SEQ ID NO: 1996766 - RNA, 19 nt, Homo sapiens
  misc_RNA (1)...(19): siRNA sense strand
gccgcagacugaaugugaa

SEQ ID NO: 1996767 - RNA, 19 nt, Homo sapiens
  misc_RNA (1)...(19): siRNA sense strand
ucaacaaagaguacuauac

SEQ ID NO: 1996768 - RNA, 19 nt, Homo sapiens
  misc_RNA (1)...(19): siRNA sense strand
ccaauccacuauccuucuc

SEQ ID NO: 1996769 - RNA, 19 nt, Homo sapiens
  misc_RNA (1)...(19): siRNA sense strand
uuacugagacagauuuaag

SEQ ID NO: 1996770 - RNA, 19 nt, Homo sapiens
  misc_RNA (1)...(19): siRNA sense strand
ggaaucgaccccacauuug

SEQ ID NO: 1996771 - RNA, 19 nt, Homo sapiens
  misc_RNA (1)...(19): siRNA sense strand
gggaaagccacaucuacca

SEQ ID NO: 1996772 - RNA, 19 nt, Homo sapiens
  misc_RNA (1)...(19): siRNA sense strand
gagagagagauuucuaacu

SEQ ID NO: 1996773 - RNA, 19 nt, Homo sapiens
  misc_RNA (1)...(19): siRNA sense strand
guacuauacacagaauaug

SEQ ID NO: 1996774 - RNA, 19 nt, Homo sapiens
  misc_RNA (1)...(19): siRNA sense strand
gaaggaaugcaaaaucugu

SEQ ID NO: 1996775 - RNA, 19 nt, Homo sapiens
  misc_RNA (1)...(19): siRNA sense strand
gaccugccucuuagaccua

SEQ ID NO: 1996776 - RNA, 19 nt, Homo sapiens
  misc_RNA (1)...(19): siRNA sense strand
aaaccugcaguaaauugaa

SEQ ID NO: 1996777 - RNA, 19 nt, Homo sapiens
  misc_RNA (1)...(19): siRNA sense strand
acacauguuccacccaaug

SEQ ID NO: 1996778 - RNA, 19 nt, Homo sapiens
  misc_RNA (1)...(19): siRNA sense strand
cagcuguggugaacauugc

SEQ ID NO: 1996779 - RNA, 19 nt, Homo sapiens
  misc_RNA (1)...(19): siRNA sense strand
aagaagccucugccaacua

SEQ ID NO: 1996780 - RNA, 19 nt, Homo sapiens
  misc_RNA (1)...(19): siRNA sense strand
guaagagaggagaggaaug

SEQ ID NO: 1996781 - RNA, 19 nt, Homo sapiens
  misc_RNA (1)...(19): siRNA sense strand
uggagagagagauuucuaa

SEQ ID NO: 1996782 - RNA, 19 nt, Homo sapiens
  misc_RNA (1)...(19): siRNA sense strand
cagaugucaacaaagagua

SEQ ID NO: 1996783 - RNA, 19 nt, Homo sapiens
  misc_RNA (1)...(19): siRNA sense strand
gucaacaaagaguacuaua

SEQ ID NO: 1996784 - RNA, 19 nt, Homo sapiens
  misc_RNA (1)...(19): siRNA sense strand
agacugaagugugccaaac

SEQ ID NO: 1996785 - RNA, 19 nt, Homo sapiens
  misc_RNA (1)...(19): siRNA sense strand
cagacugaaugugaaaugg

SEQ ID NO: 1996786 - RNA, 19 nt, Homo sapiens
  misc_RNA (1)...(19): siRNA sense strand
gggugaaaggagaguguaa

SEQ ID NO: 1996787 - RNA, 19 nt, Homo sapiens
  misc_RNA (1)...(19): siRNA sense strand
uaaauggccgcagacugaa

SEQ ID NO: 1996788 - RNA, 19 nt, Homo sapiens
  misc_RNA (1)...(19): siRNA sense strand
gcugaucagaauauuaaag

SEQ ID NO: 1996789 - RNA, 19 nt, Homo sapiens
  misc_RNA (1)...(19): siRNA sense strand
ugccaacuacuucaacuug

SEQ ID NO: 1996790 - RNA, 19 nt, Homo sapiens
  misc_RNA (1)...(19): siRNA sense strand
gaaaggagauuugacauau

SEQ ID NO: 1996791 - RNA, 19 nt, Homo sapiens
  misc_RNA (1)...(19): siRNA sense strand
gaaauuugcuugugauugu

SEQ ID NO: 1996792 - RNA, 19 nt, Homo sapiens
  misc_RNA (1)...(19): siRNA sense strand
ggaauugguugucuccuua

SEQ ID NO: 1996793 - RNA, 19 nt, Homo sapiens
  misc_RNA (1)...(19): siRNA sense strand
gauggaagcuuugaaauug

SEQ ID NO: 1996794 - RNA, 19 nt, Homo sapiens
  misc_RNA (1)...(19): siRNA sense strand
gggcuuaucuauagcuuua

SEQ ID NO: 1996795 - RNA, 19 nt, Homo sapiens
  misc_RNA (1)...(19): siRNA sense strand
gaugauauccuucuuguuu

SEQ ID NO: 1996796 - RNA, 19 nt, Homo sapiens
  misc_RNA (1)...(19): siRNA sense strand
ggaccaacaucaacauuug

SEQ ID NO: 1996797 - RNA, 19 nt, Homo sapiens
  misc_RNA (1)...(19): siRNA sense strand
caaauugucuuuaguugga

SEQ ID NO: 1996798 - RNA, 19 nt, Homo sapiens
  misc_RNA (1)...(19): siRNA sense strand
gcacugggaucucuguuug

SEQ ID NO: 1996799 - RNA, 19 nt, Homo sapiens
  misc_RNA (1)...(19): siRNA sense strand
gcacuagguggaaucauua

SEQ ID NO: 1996800 - RNA, 19 nt, Homo sapiens
  misc_RNA (1)...(19): siRNA sense strand
gaacaucaccugagauagu

SEQ ID NO: 1996801 - RNA, 19 nt, Homo sapiens
  misc_RNA (1)...(19): siRNA sense strand
gcaauggauucaagauguu

SEQ ID NO: 1996802 - RNA, 19 nt, Homo sapiens
  misc_RNA (1)...(19): siRNA sense strand
ggaacaauggaauaacuua

SEQ ID NO: 1996803 - RNA, 19 nt, Homo sapiens
  misc_RNA (1)...(19): siRNA sense strand
uggaauaacuuaccuguca

SEQ ID NO: 1996804 - RNA, 19 nt, Homo sapiens
  misc_RNA (1)...(19): siRNA sense strand
gaagcaaacuuagaauucu

SEQ ID NO: 1996805 - RNA, 19 nt, Homo sapiens
  misc_RNA (1)...(19): siRNA sense strand
ggacauucuuccuuguauu

SEQ ID NO: 1996806 - RNA, 19 nt, Homo sapiens
  misc_RNA (1)...(19): siRNA sense strand
gagcuuguaggauauauaa

SEQ ID NO: 1996807 - RNA, 19 nt, Homo sapiens
  misc_RNA (1)...(19): siRNA sense strand
gguugcaacuggaauguuu

SEQ ID NO: 1996808 - RNA, 19 nt, Homo sapiens
  misc_RNA (1)...(19): siRNA sense strand
gacauauccucuucucuug

SEQ ID NO: 1996809 - RNA, 19 nt, Homo sapiens
  misc_RNA (1)...(19): siRNA sense strand
ugacaucuuuaccacauuu

SEQ ID NO: 1996810 - RNA, 19 nt, Homo sapiens
  misc_RNA (1)...(19): siRNA sense strand
ggugaaugcccaagagaua

SEQ ID NO: 1996811 - RNA, 19 nt, Homo sapiens
  misc_RNA (1)...(19): siRNA sense strand
ggaauucuagcuccaauau

SEQ ID NO: 1996812 - RNA, 19 nt, Homo sapiens
  misc_RNA (1)...(19): siRNA sense strand
gcaauggguuuccagucaa

SEQ ID NO: 1996813 - RNA, 19 nt, Homo sapiens
  misc_RNA (1)...(19): siRNA sense strand
caaugcugcugccaacuaa

SEQ ID NO: 1996814 - RNA, 19 nt, Homo sapiens
  misc_RNA (1)...(19): siRNA sense strand
ggaugaagcaaacuuagaa

SEQ ID NO: 1996815 - RNA, 19 nt, Homo sapiens
  misc_RNA (1)...(19): siRNA sense strand
uaugggaacuggaaguauu

SEQ ID NO: 1996816 - RNA, 19 nt, Homo sapiens
  misc_RNA (1)...(19): siRNA sense strand
gaaucugggucacacaugu

SEQ ID NO: 1996817 - RNA, 19 nt, Homo sapiens
  misc_RNA (1)...(19): siRNA sense strand
ccucuucucuugcugguuu

SEQ ID NO: 1996818 - RNA, 19 nt, Homo sapiens
  misc_RNA (1)...(19): siRNA sense strand
gaaccagucugugggaaca

SEQ ID NO: 1996819 - RNA, 19 nt, Homo sapiens
  misc_RNA (1)...(19): siRNA sense strand
ucauucagcuauauugcua

SEQ ID NO: 1996820 - RNA, 19 nt, Homo sapiens
  misc_RNA (1)...(19): siRNA sense strand
ggccuaaccuugaccuaug

SEQ ID NO: 1996821 - RNA, 19 nt, Homo sapiens
  misc_RNA (1)...(19): siRNA sense strand
caugggauauuauagguau

SEQ ID NO: 1996822 - RNA, 19 nt, Homo sapiens
  misc_RNA (1)...(19): siRNA sense strand
acaagacgcugcaauggau

SEQ ID NO: 1996823 - RNA, 19 nt, Homo sapiens
  misc_RNA (1)...(19): siRNA sense strand
ggagguaccacauuuaucu

SEQ ID NO: 1996824 - RNA, 19 nt, Homo sapiens
  misc_RNA (1)...(19): siRNA sense strand
gucagcaucuucagagaaa

SEQ ID NO: 1996825 - RNA, 19 nt, Homo sapiens
  misc_RNA (1)...(19): siRNA sense strand
ccuugugucuggacuauuu

SEQ ID NO: 1996826 - RNA, 19 nt, Homo sapiens
  misc_RNA (1)...(19): siRNA sense strand
ugggaucucuguuugcuaa

SEQ ID NO: 1996827 - RNA, 19 nt, Homo sapiens
  misc_RNA (1)...(19): siRNA sense strand
cuacacagaccgaaguuaa

SEQ ID NO: 1996828 - RNA, 19 nt, Homo sapiens
  misc_RNA (1)...(19): siRNA sense strand
gaccuaugauggaaauaau

SEQ ID NO: 1996829 - RNA, 19 nt, Homo sapiens
  misc_RNA (1)...(19): siRNA sense strand
ugacauauccucuucucuu

SEQ ID NO: 1996830 - RNA, 19 nt, Homo sapiens
  misc_RNA (1)...(19): siRNA sense strand
cuacuugggcuuaucuaua

SEQ ID NO: 1996831 - RNA, 19 nt, Homo sapiens
  misc_RNA (1)...(19): siRNA sense strand
caacaggagguaccacauu

SEQ ID NO: 1996832 - RNA, 19 nt, Homo sapiens
  misc_RNA (1)...(19): siRNA sense strand
gacauucuuccuuguauuu

SEQ ID NO: 1996833 - RNA, 19 nt, Homo sapiens
  misc_RNA (1)...(19): siRNA sense strand
agaccgaaguuaauuggaa

SEQ ID NO: 1996834 - RNA, 19 nt, Homo sapiens
  misc_RNA (1)...(19): siRNA sense strand
gaaauuacucagcacacuu

SEQ ID NO: 1996835 - RNA, 19 nt, Homo sapiens
  misc_RNA (1)...(19): siRNA sense strand
agaaaggagauuugacaua

SEQ ID NO: 1996836 - RNA, 19 nt, Homo sapiens
  misc_RNA (1)...(19): siRNA sense strand
gaacagauaguaaaacaug

SEQ ID NO: 1996837 - RNA, 19 nt, Homo sapiens
  misc_RNA (1)...(19): siRNA sense strand
guaccacauuuaucuuguu

SEQ ID NO: 1996838 - RNA, 19 nt, Homo sapiens
  misc_RNA (1)...(19): siRNA sense strand
ucauguagauguaccacuu

SEQ ID NO: 1996839 - RNA, 19 nt, Homo sapiens
  misc_RNA (1)...(19): siRNA sense strand
uuacuucgaugauauccuu

SEQ ID NO: 1996840 - RNA, 19 nt, Homo sapiens
  misc_RNA (1)...(19): siRNA sense strand
gauuugacauauccucuuc

SEQ ID NO: 1996841 - RNA, 19 nt, Homo sapiens
  misc_RNA (1)...(19): siRNA sense strand
gauguaccacuuucuuauu

SEQ ID NO: 1996842 - RNA, 19 nt, Homo sapiens
  misc_RNA (1)...(19): siRNA sense strand
aacaggagguaccacauuu

SEQ ID NO: 1996843 - RNA, 19 nt, Homo sapiens
  misc_RNA (1)...(19): siRNA sense strand
cauaaacucuuuguucucu

SEQ ID NO: 1996844 - RNA, 19 nt, Homo sapiens
  misc_RNA (1)...(19): siRNA sense strand
gcaauugugaugaaaguca

SEQ ID NO: 1996845 - RNA, 19 nt, Homo sapiens
  misc_RNA (1)...(19): siRNA sense strand
ggaaauuugcuugugauug

SEQ ID NO: 1996846 - RNA, 19 nt, Homo sapiens
  misc_RNA (1)...(19): siRNA sense strand
gaccgaaguuaauuggaau

SEQ ID NO: 1996847 - RNA, 19 nt, Homo sapiens
  misc_RNA (1)...(19): siRNA sense strand
gauagaaaucaaacagcua

SEQ ID NO: 1996848 - RNA, 19 nt, Homo sapiens
  misc_RNA (1)...(19): siRNA sense strand
gguuuccagucaaugguua

SEQ ID NO: 1996849 - RNA, 19 nt, Homo sapiens
  misc_RNA (1)...(19): siRNA sense strand
gcagcuuuauugguucuuu

SEQ ID NO: 1996850 - RNA, 19 nt, Homo sapiens
  misc_RNA (1)...(19): siRNA sense strand
gcuugugauuguauuugua

SEQ ID NO: 1996851 - RNA, 19 nt, Homo sapiens
  misc_RNA (1)...(19): siRNA sense strand
ugaagcaaacuuagaauuc

SEQ ID NO: 1996852 - RNA, 19 nt, Homo sapiens
  misc_RNA (1)...(19): siRNA sense strand
uuccaucacucaaauagaa

SEQ ID NO: 1996853 - RNA, 19 nt, Homo sapiens
  misc_RNA (1)...(19): siRNA sense strand
gaauucuagcuccaauaua

SEQ ID NO: 1996854 - RNA, 19 nt, Homo sapiens
  misc_RNA (1)...(19): siRNA sense strand
guggaucuaugucuucaug

SEQ ID NO: 1996855 - RNA, 19 nt, Homo sapiens
  misc_RNA (1)...(19): siRNA sense strand
ccauauuaauccaucagaa

SEQ ID NO: 1996856 - RNA, 19 nt, Homo sapiens
  misc_RNA (1)...(19): siRNA sense strand
gaauugaaagcacuugcaa

SEQ ID NO: 1996857 - RNA, 19 nt, Homo sapiens
  misc_RNA (1)...(19): siRNA sense strand
ggagcuugguggcuugguu

SEQ ID NO: 1996858 - RNA, 19 nt, Homo sapiens
  misc_RNA (1)...(19): siRNA sense strand
ggaaugauugguccaguca

SEQ ID NO: 1996859 - RNA, 19 nt, Homo sapiens
  misc_RNA (1)...(19): siRNA sense strand
ugauggaagcuuugaaauu

SEQ ID NO: 1996860 - RNA, 19 nt, Homo sapiens
  misc_RNA (1)...(19): siRNA sense strand
gaggaauucuagcuccaau

SEQ ID NO: 1996861 - RNA, 19 nt, Homo sapiens
  misc_RNA (1)...(19): siRNA sense strand
gucauaaacucuuuguucu

SEQ ID NO: 1996862 - RNA, 19 nt, Homo sapiens
  misc_RNA (1)...(19): siRNA sense strand
uuagguaguuugaaugcaa

SEQ ID NO: 1996863 - RNA, 19 nt, Homo sapiens
  misc_RNA (1)...(19): siRNA sense strand
aacaucaccugagauagua

SEQ ID NO: 1996864 - RNA, 19 nt, Homo sapiens
  misc_RNA (1)...(19): siRNA sense strand
ggaaguauuuugacaucuu

SEQ ID NO: 1996865 - RNA, 19 nt, Homo sapiens
  misc_RNA (1)...(19): siRNA sense strand
uggaacaucaccugagaua

SEQ ID NO: 1996866 - RNA, 19 nt, Homo sapiens
  misc_RNA (1)...(19): siRNA sense strand
ugcaaauccucaaguggua

SEQ ID NO: 1996867 - RNA, 19 nt, Homo sapiens
  misc_RNA (1)...(19): siRNA sense strand
uagauguaccacuuucuua

SEQ ID NO: 1996868 - RNA, 19 nt, Homo sapiens
  misc_RNA (1)...(19): siRNA sense strand
agagugcaauugugaugaa

SEQ ID NO: 1996869 - RNA, 19 nt, Homo sapiens
  misc_RNA (1)...(19): siRNA sense strand
caucggacaaugaaagaaa

SEQ ID NO: 1996870 - RNA, 19 nt, Homo sapiens
  misc_RNA (1)...(19): siRNA sense strand
gcccugucauucagcuaua

SEQ ID NO: 1996871 - RNA, 19 nt, Homo sapiens
  misc_RNA (1)...(19): siRNA sense strand
caauucaagucauaaacuc

SEQ ID NO: 1996872 - RNA, 19 nt, Homo sapiens
  misc_RNA (1)...(19): siRNA sense strand
ugcaauggauucaagaugu

SEQ ID NO: 1996873 - RNA, 19 nt, Homo sapiens
  misc_RNA (1)...(19): siRNA sense strand
guagaucugagcacuauca

SEQ ID NO: 1996874 - RNA, 19 nt, Homo sapiens
  misc_RNA (1)...(19): siRNA sense strand
caaggcaucggacaaugaa

SEQ ID NO: 1996875 - RNA, 19 nt, Homo sapiens
  misc_RNA (1)...(19): siRNA sense strand
uacuugggcuuaucuauag

SEQ ID NO: 1996876 - RNA, 19 nt, Homo sapiens
  misc_RNA (1)...(19): siRNA sense strand
uaagaacacuaggaggaau

SEQ ID NO: 1996877 - RNA, 19 nt, Homo sapiens
  misc_RNA (1)...(19): siRNA sense strand
gcaauucaagucauaaacu

SEQ ID NO: 1996878 - RNA, 19 nt, Homo sapiens
  misc_RNA (1)...(19): siRNA sense strand
gugcaauugugaugaaagu

SEQ ID NO: 1996879 - RNA, 19 nt, Homo sapiens
  misc_RNA (1)...(19): siRNA sense strand
acacagaccgaaguuaauu

SEQ ID NO: 1996880 - RNA, 19 nt, Homo sapiens
  misc_RNA (1)...(19): siRNA sense strand
ccaaggcaucggacaauga

SEQ ID NO: 1996881 - RNA, 19 nt, Homo sapiens
  misc_RNA (1)...(19): siRNA sense strand
gguaccacauuuaucuugu

SEQ ID NO: 1996882 - RNA, 19 nt, Homo sapiens
  misc_RNA (1)...(19): siRNA sense strand
guagauguaccacuuucuu

SEQ ID NO: 1996883 - RNA, 19 nt, Homo sapiens
  misc_RNA (1)...(19): siRNA sense strand
aaauguacguggauauugg

SEQ ID NO: 1996884 - RNA, 19 nt, Homo sapiens
  misc_RNA (1)...(19): siRNA sense strand
gaaugcaauaggaaugauu

SEQ ID NO: 1996885 - RNA, 19 nt, Homo sapiens
  misc_RNA (1)...(19): siRNA sense strand
aauggaacaucaccugaga

SEQ ID NO: 1996886 - RNA, 19 nt, Homo sapiens
  misc_RNA (1)...(19): siRNA sense strand
ucaaguuuaucaaccuguu

SEQ ID NO: 1996887 - RNA, 19 nt, Homo sapiens
  misc_RNA (1)...(19): siRNA sense strand
gaacaauggaauaacuuac

SEQ ID NO: 1996888 - RNA, 19 nt, Homo sapiens
  misc_RNA (1)...(19): siRNA sense strand
ucaucuauguugcaauuca

SEQ ID NO: 1996889 - RNA, 19 nt, Homo sapiens
  misc_RNA (1)...(19): siRNA sense strand
gaaugcccaagagauaaua

SEQ ID NO: 1996890 - RNA, 19 nt, Homo sapiens
  misc_RNA (1)...(19): siRNA sense strand
cuaaauacguggagaagaa

SEQ ID NO: 1996891 - RNA, 19 nt, Homo sapiens
  misc_RNA (1)...(19): siRNA sense strand
gcacuggucuccuggaaag

SEQ ID NO: 1996892 - RNA, 19 nt, Homo sapiens
  misc_RNA (1)...(19): siRNA sense strand
uagugaagcucauguguga

SEQ ID NO: 1996893 - RNA, 19 nt, Homo sapiens
  misc_RNA (1)...(19): siRNA sense strand
agacguaucuugacaucuu

SEQ ID NO: 1996894 - RNA, 19 nt, Homo sapiens
  misc_RNA (1)...(19): siRNA sense strand
gaaaugucaucaucaacca

SEQ ID NO: 1996895 - RNA, 19 nt, Homo sapiens
  misc_RNA (1)...(19): siRNA sense strand
ugaccaagcugccugagau

SEQ ID NO: 1996896 - RNA, 19 nt, Homo sapiens
  misc_RNA (1)...(19): siRNA sense strand
gaugagacguaucuugaca

SEQ ID NO: 1996897 - RNA, 19 nt, Homo sapiens
  misc_RNA (1)...(19): siRNA sense strand
gaggaaguuugacaucaug

SEQ ID NO: 1996898 - RNA, 19 nt, Homo sapiens
  misc_RNA (1)...(19): siRNA sense strand
ggccacagcugcuaauucu

SEQ ID NO: 1996899 - RNA, 19 nt, Homo sapiens
  misc_RNA (1)...(19): siRNA sense strand
ugacuguggugguggauga

SEQ ID NO: 1996900 - RNA, 19 nt, Homo sapiens
  misc_RNA (1)...(19): siRNA sense strand
agaagaaguuccugaccaa

SEQ ID NO: 1996901 - RNA, 19 nt, Homo sapiens
  misc_RNA (1)...(19): siRNA sense strand
gaugucaacugggucaaug

SEQ ID NO: 1996902 - RNA, 19 nt, Homo sapiens
  misc_RNA (1)...(19): siRNA sense strand
ccagggagcuugagaucca

SEQ ID NO: 1996903 - RNA, 19 nt, Homo sapiens
  misc_RNA (1)...(19): siRNA sense strand
gguggaagccgaaguguca

SEQ ID NO: 1996904 - RNA, 19 nt, Homo sapiens
  misc_RNA (1)...(19): siRNA sense strand
ggagccagaaccaagcuua

SEQ ID NO: 1996905 - RNA, 19 nt, Homo sapiens
  misc_RNA (1)...(19): siRNA sense strand
ggacagccaugcggagcuu

SEQ ID NO: 1996906 - RNA, 19 nt, Homo sapiens
  misc_RNA (1)...(19): siRNA sense strand
gcugggaaaugucaucauc

SEQ ID NO: 1996907 - RNA, 19 nt, Homo sapiens
  misc_RNA (1)...(19): siRNA sense strand
ccauggagcugaugucaac

SEQ ID NO: 1996908 - RNA, 19 nt, Homo sapiens
  misc_RNA (1)...(19): siRNA sense strand
ggagaaggaggccuggauu

SEQ ID NO: 1996909 - RNA, 19 nt, Homo sapiens
  misc_RNA (1)...(19): siRNA sense strand
gaaacucugcccugacuca

SEQ ID NO: 1996910 - RNA, 19 nt, Homo sapiens
  misc_RNA (1)...(19): siRNA sense strand
gguguucacuucuccaaag

SEQ ID NO: 1996911 - RNA, 19 nt, Homo sapiens
  misc_RNA (1)...(19): siRNA sense strand
gagccuugguguucacuuc

SEQ ID NO: 1996912 - RNA, 19 nt, Homo sapiens
  misc_RNA (1)...(19): siRNA sense strand
gagagaagagggacaugga

SEQ ID NO: 1996913 - RNA, 19 nt, Homo sapiens
  misc_RNA (1)...(19): siRNA sense strand
gacacgugcugcugaaaca

SEQ ID NO: 1996914 - RNA, 19 nt, Homo sapiens
  misc_RNA (1)...(19): siRNA sense strand
ugagccggcugucccagua

SEQ ID NO: 1996915 - RNA, 19 nt, Homo sapiens
  misc_RNA (1)...(19): siRNA sense strand
cuucgucucugcacaguga

SEQ ID NO: 1996916 - RNA, 19 nt, Homo sapiens
  misc_RNA (1)...(19): siRNA sense strand
gaauucagcacgagagaag

SEQ ID NO: 1996917 - RNA, 19 nt, Homo sapiens
  misc_RNA (1)...(19): siRNA sense strand
gauuaugcccugcagauca

SEQ ID NO: 1996918 - RNA, 19 nt, Homo sapiens
  misc_RNA (1)...(19): siRNA sense strand
ggcaggagaugagacguau

SEQ ID NO: 1996919 - RNA, 19 nt, Homo sapiens
  misc_RNA (1)...(19): siRNA sense strand
ugugugagcugggaaaugu

SEQ ID NO: 1996920 - RNA, 19 nt, Homo sapiens
  misc_RNA (1)...(19): siRNA sense strand
aagccgaagugucagaauu

SEQ ID NO: 1996921 - RNA, 19 nt, Homo sapiens
  misc_RNA (1)...(19): siRNA sense strand
gaacuagugaagcucaugu

SEQ ID NO: 1996922 - RNA, 19 nt, Homo sapiens
  misc_RNA (1)...(19): siRNA sense strand
gggcacuggucuccuggaa

SEQ ID NO: 1996923 - RNA, 19 nt, Homo sapiens
  misc_RNA (1)...(19): siRNA sense strand
ugggaaaugucaucaucaa

SEQ ID NO: 1996924 - RNA, 19 nt, Homo sapiens
  misc_RNA (1)...(19): siRNA sense strand
gagccagaaccaagcuuaa

SEQ ID NO: 1996925 - RNA, 19 nt, Homo sapiens
  misc_RNA (1)...(19): siRNA sense strand
gugaaacucugcccugacu

SEQ ID NO: 1996926 - RNA, 19 nt, Homo sapiens
  misc_RNA (1)...(19): siRNA sense strand
acaaggacccugugacugu

SEQ ID NO: 1996927 - RNA, 19 nt, Homo sapiens
  misc_RNA (1)...(19): siRNA sense strand
gacgggcacuggauuaugc

SEQ ID NO: 1996928 - RNA, 19 nt, Homo sapiens
  misc_RNA (1)...(19): siRNA sense strand
guacaaggacccugugacu

SEQ ID NO: 1996929 - RNA, 19 nt, Homo sapiens
  misc_RNA (1)...(19): siRNA sense strand
gagaaggaggccuggauuc

SEQ ID NO: 1996930 - RNA, 19 nt, Homo sapiens
  misc_RNA (1)...(19): siRNA sense strand
gacaagaggaaguuugaca

SEQ ID NO: 1996931 - RNA, 19 nt, Homo sapiens
  misc_RNA (1)...(19): siRNA sense strand
ugagacguaucuugacauc

SEQ ID NO: 1996932 - RNA, 19 nt, Homo sapiens
  misc_RNA (1)...(19): siRNA sense strand
aagaggaaguuugacauca

SEQ ID NO: 1996933 - RNA, 19 nt, Homo sapiens
  misc_RNA (1)...(19): siRNA sense strand
gccagcaacgcauuuaaga

SEQ ID NO: 1996934 - RNA, 19 nt, Homo sapiens
  misc_RNA (1)...(19): siRNA sense strand
agagacacgugcugcugaa

SEQ ID NO: 1996935 - RNA, 19 nt, Homo sapiens
  misc_RNA (1)...(19): siRNA sense strand
gaggacaagaggaaguuug

SEQ ID NO: 1996936 - RNA, 19 nt, Homo sapiens
  misc_RNA (1)...(19): siRNA sense strand
ccacagcugcuaauucucu

SEQ ID NO: 1996937 - RNA, 19 nt, Homo sapiens
  misc_RNA (1)...(19): siRNA sense strand
ggccauggcagugaagaaa

SEQ ID NO: 1996938 - RNA, 19 nt, Homo sapiens
  misc_RNA (1)...(19): siRNA sense strand
gccagaaccaagcuuaaga

SEQ ID NO: 1996939 - RNA, 19 nt, Homo sapiens
  misc_RNA (1)...(19): siRNA sense strand
cagcuggucuugaauucag

SEQ ID NO: 1996940 - RNA, 19 nt, Homo sapiens
  misc_RNA (1)...(19): siRNA sense strand
ggcccaggcuacccauuuc

SEQ ID NO: 1996941 - RNA, 19 nt, Homo sapiens
  misc_RNA (1)...(19): siRNA sense strand
agaggaaguuugacaucau

SEQ ID NO: 1996942 - RNA, 19 nt, Homo sapiens
  misc_RNA (1)...(19): siRNA sense strand
caagaggaaguuugacauc

SEQ ID NO: 1996943 - RNA, 19 nt, Homo sapiens
  misc_RNA (1)...(19): siRNA sense strand
ccugggcucugguggaaug

SEQ ID NO: 1996944 - RNA, 19 nt, Homo sapiens
  misc_RNA (1)...(19): siRNA sense strand
gcaccacgcaaccauucuu

SEQ ID NO: 1996945 - RNA, 19 nt, Homo sapiens
  misc_RNA (1)...(19): siRNA sense strand
ccacaggagccuugguguu

SEQ ID NO: 1996946 - RNA, 19 nt, Homo sapiens
  misc_RNA (1)...(19): siRNA sense strand
ggacgggcacuggauuaug

SEQ ID NO: 1996947 - RNA, 19 nt, Homo sapiens
  misc_RNA (1)...(19): siRNA sense strand
ggccuggauucacgcuaaa

SEQ ID NO: 1996948 - RNA, 19 nt, Homo sapiens
  misc_RNA (1)...(19): siRNA sense strand
caacgugauugaggacaag

SEQ ID NO: 1996949 - RNA, 19 nt, Homo sapiens
  misc_RNA (1)...(19): siRNA sense strand
caucaucaaccagaucuau

SEQ ID NO: 1996950 - RNA, 19 nt, Homo sapiens
  misc_RNA (1)...(19): siRNA sense strand
uggaaaagcuccugaaacu

SEQ ID NO: 1996951 - RNA, 19 nt, Homo sapiens
  misc_RNA (1)...(19): siRNA sense strand
aggccuggauucacgcuaa

SEQ ID NO: 1996952 - RNA, 19 nt, Homo sapiens
  misc_RNA (1)...(19): siRNA sense strand
ggaaguuugacaucaugga

SEQ ID NO: 1996953 - RNA, 19 nt, Homo sapiens
  misc_RNA (1)...(19): siRNA sense strand
ggagugggccagcaucaac

SEQ ID NO: 1996954 - RNA, 19 nt, Homo sapiens
  misc_RNA (1)...(19): siRNA sense strand
aaggacaucucuucaaacg

SEQ ID NO: 1996955 - RNA, 19 nt, Homo sapiens
  misc_RNA (1)...(19): siRNA sense strand
cacaggagccuugguguuc

SEQ ID NO: 1996956 - RNA, 19 nt, Homo sapiens
  misc_RNA (1)...(19): siRNA sense strand
gggcauccuccaucucuuc

SEQ ID NO: 1996957 - RNA, 19 nt, Homo sapiens
  misc_RNA (1)...(19): siRNA sense strand
caagcugccugagauucga

SEQ ID NO: 1996958 - RNA, 19 nt, Homo sapiens
  misc_RNA (1)...(19): siRNA sense strand
ccuggauucacgcuaaaua

SEQ ID NO: 1996959 - RNA, 19 nt, Homo sapiens
  misc_RNA (1)...(19): siRNA sense strand
ugauugaggacaagaggaa

SEQ ID NO: 1996960 - RNA, 19 nt, Homo sapiens
  misc_RNA (1)...(19): siRNA sense strand
ugacaucuuccgcgacuuc

SEQ ID NO: 1996961 - RNA, 19 nt, Homo sapiens
  misc_RNA (1)...(19): siRNA sense strand
cuacgacuggcaaagauga

SEQ ID NO: 1996962 - RNA, 19 nt, Homo sapiens
  misc_RNA (1)...(19): siRNA sense strand
gaccaagcugccugagauu

SEQ ID NO: 1996963 - RNA, 19 nt, Homo sapiens
  misc_RNA (1)...(19): siRNA sense strand
uccaaaguccggucucuga

SEQ ID NO: 1996964 - RNA, 19 nt, Homo sapiens
  misc_RNA (1)...(19): siRNA sense strand
ggaagccgaagugucagaa

SEQ ID NO: 1996965 - RNA, 19 nt, Homo sapiens
  misc_RNA (1)...(19): siRNA sense strand
uggaguuugugcugcguuu

SEQ ID NO: 1996966 - RNA, 19 nt, Homo sapiens
  misc_RNA (1)...(19): siRNA sense strand
gggccagcaacgcauuuaa

SEQ ID NO: 1996967 - RNA, 19 nt, Homo sapiens
  misc_RNA (1)...(19): siRNA sense strand
gacguaucuugacaucuuc

SEQ ID NO: 1996968 - RNA, 19 nt, Homo sapiens
  misc_RNA (1)...(19): siRNA sense strand
ggugguggaugaccuucgu

SEQ ID NO: 1996969 - RNA, 19 nt, Homo sapiens
  misc_RNA (1)...(19): siRNA sense strand
cggucaagcuggauuucga

SEQ ID NO: 1996970 - RNA, 19 nt, Homo sapiens
  misc_RNA (1)...(19): siRNA sense strand
agaaggaggccuggauuca

SEQ ID NO: 1996971 - RNA, 19 nt, Homo sapiens
  misc_RNA (1)...(19): siRNA sense strand
aguuugacaucauggaguu

SEQ ID NO: 1996972 - RNA, 19 nt, Homo sapiens
  misc_RNA (1)...(19): siRNA sense strand
agaaguuccugaccaagcu

SEQ ID NO: 1996973 - RNA, 19 nt, Homo sapiens
  misc_RNA (1)...(19): siRNA sense strand
gcuaaauacguggagaaga

SEQ ID NO: 1996974 - RNA, 19 nt, Homo sapiens
  misc_RNA (1)...(19): siRNA sense strand
cgccuucguugucggcauu

SEQ ID NO: 1996975 - RNA, 19 nt, Homo sapiens
  misc_RNA (1)...(19): siRNA sense strand
cagaaccaagcuuaagaga

SEQ ID NO: 1996976 - RNA, 19 nt, Homo sapiens
  misc_RNA (1)...(19): siRNA sense strand
aggcugcccugacccacaa

SEQ ID NO: 1996977 - RNA, 19 nt, Homo sapiens
  misc_RNA (1)...(19): siRNA sense strand
gaaggaggccuggauucac

SEQ ID NO: 1996978 - RNA, 19 nt, Homo sapiens
  misc_RNA (1)...(19): siRNA sense strand
auuaugcccugcagaucaa

SEQ ID NO: 1996979 - RNA, 19 nt, Homo sapiens
  misc_RNA (1)...(19): siRNA sense strand
ggagccagaacuagugaag

SEQ ID NO: 1996980 - RNA, 19 nt, Homo sapiens
  misc_RNA (1)...(19): siRNA sense strand
acaggagccuugguguuca

SEQ ID NO: 1996981 - RNA, 19 nt, Homo sapiens
  misc_RNA (1)...(19): siRNA sense strand
gauggcggagugucuggaa

SEQ ID NO: 1996982 - RNA, 19 nt, Homo sapiens
  misc_RNA (1)...(19): siRNA sense strand
gcugagccgucgcagucau

SEQ ID NO: 1996983 - RNA, 19 nt, Homo sapiens
  misc_RNA (1)...(19): siRNA sense strand
ucgccugccuguuccugaa

SEQ ID NO: 1996984 - RNA, 19 nt, Homo sapiens
  misc_RNA (1)...(19): siRNA sense strand
ggauucacgcuaaauacgu

SEQ ID NO: 1996985 - RNA, 19 nt, Homo sapiens
  misc_RNA (1)...(19): siRNA sense strand
gaagccgaagugucagaau

SEQ ID NO: 1996986 - RNA, 19 nt, Homo sapiens
  misc_RNA (1)...(19): siRNA sense strand
ccaaguacaucgacaagac

SEQ ID NO: 1996987 - RNA, 19 nt, Homo sapiens
  misc_RNA (1)...(19): siRNA sense strand
gagagcaucuuggacuugu

SEQ ID NO: 1996988 - RNA, 19 nt, Homo sapiens
  misc_RNA (1)...(19): siRNA sense strand
gacaagacgauccggguaa

SEQ ID NO: 1996989 - RNA, 19 nt, Homo sapiens
  misc_RNA (1)...(19): siRNA sense strand
cggauaaggagaagaagaa

SEQ ID NO: 1996990 - RNA, 19 nt, Homo sapiens
  misc_RNA (1)...(19): siRNA sense strand
acaagacgauccggguaaa

SEQ ID NO: 1996991 - RNA, 19 nt, Homo sapiens
  misc_RNA (1)...(19): siRNA sense strand
ggacggcaccauugaguac

SEQ ID NO: 1996992 - RNA, 19 nt, Homo sapiens
  misc_RNA (1)...(19): siRNA sense strand
ggagagcaucuuggacuug

SEQ ID NO: 1996993 - RNA, 19 nt, Homo sapiens
  misc_RNA (1)...(19): siRNA sense strand
ggauaaggagaagaagaaa

SEQ ID NO: 1996994 - RNA, 19 nt, Homo sapiens
  misc_RNA (1)...(19): siRNA sense strand
gcggauaaggagaagaaga

SEQ ID NO: 1996995 - RNA, 19 nt, Homo sapiens
  misc_RNA (1)...(19): siRNA sense strand
ccgcgaagccaguggaauc

SEQ ID NO: 1996996 - RNA, 19 nt, Homo sapiens
  misc_RNA (1)...(19): siRNA sense strand
agacgauccggguaaaguu

SEQ ID NO: 1996997 - RNA, 19 nt, Homo sapiens
  misc_RNA (1)...(19): siRNA sense strand
gacgauccggguaaaguuc

SEQ ID NO: 1996998 - RNA, 19 nt, Homo sapiens
  misc_RNA (1)...(19): siRNA sense strand
ggaaauaacuuuacugcaa

SEQ ID NO: 1996999 - RNA, 19 nt, Homo sapiens
  misc_RNA (1)...(19): siRNA sense strand
caaauaaccuagagcauaa

SEQ ID NO: 1997000 - RNA, 19 nt, Homo sapiens
  misc_RNA (1)...(19): siRNA sense strand
uaacagugcuggcaacaug

SEQ ID NO: 1997001 - RNA, 19 nt, Homo sapiens
  misc_RNA (1)...(19): siRNA sense strand
gcaagaaggccuuaucaga

SEQ ID NO: 1997002 - RNA, 19 nt, Homo sapiens
  misc_RNA (1)...(19): siRNA sense strand
uauaagcacucaaagacua

SEQ ID NO: 1997003 - RNA, 19 nt, Homo sapiens
  misc_RNA (1)...(19): siRNA sense strand
uguaauggaugucuuauug

SEQ ID NO: 1997004 - RNA, 19 nt, Homo sapiens
  misc_RNA (1)...(19): siRNA sense strand
gagcagaggaaauaacuuu

SEQ ID NO: 1997005 - RNA, 19 nt, Homo sapiens
  misc_RNA (1)...(19): siRNA sense strand
cauuugaacucuguuguua

SEQ ID NO: 1997006 - RNA, 19 nt, Homo sapiens
  misc_RNA (1)...(19): siRNA sense strand
ggagcuacguccucauuug

SEQ ID NO: 1997007 - RNA, 19 nt, Homo sapiens
  misc_RNA (1)...(19): siRNA sense strand
guagagaacccauuuagug

SEQ ID NO: 1997008 - RNA, 19 nt, Homo sapiens
  misc_RNA (1)...(19): siRNA sense strand
agagggagcucgcaaguau

SEQ ID NO: 1997009 - RNA, 19 nt, Homo sapiens
  misc_RNA (1)...(19): siRNA sense strand
ggagagcaauguaauggau

SEQ ID NO: 1997010 - RNA, 19 nt, Homo sapiens
  misc_RNA (1)...(19): siRNA sense strand
gggaggagccaguaacuuu

SEQ ID NO: 1997011 - RNA, 19 nt, Homo sapiens
  misc_RNA (1)...(19): siRNA sense strand
gaagauagugcgaucaugu

SEQ ID NO: 1997012 - RNA, 19 nt, Homo sapiens
  misc_RNA (1)...(19): siRNA sense strand
ccaaggaggagaacaguuu

SEQ ID NO: 1997013 - RNA, 19 nt, Homo sapiens
  misc_RNA (1)...(19): siRNA sense strand
ggcaagagguuuagucagu

SEQ ID NO: 1997014 - RNA, 19 nt, Homo sapiens
  misc_RNA (1)...(19): siRNA sense strand
gcucugugauugugucauu

SEQ ID NO: 1997015 - RNA, 19 nt, Homo sapiens
  misc_RNA (1)...(19): siRNA sense strand
acaaauaaccuagagcaua

SEQ ID NO: 1997016 - RNA, 19 nt, Homo sapiens
  misc_RNA (1)...(19): siRNA sense strand
guucucagcuaaugaugaa

SEQ ID NO: 1997017 - RNA, 19 nt, Homo sapiens
  misc_RNA (1)...(19): siRNA sense strand
ggccuuugcugcacugauu

SEQ ID NO: 1997018 - RNA, 19 nt, Homo sapiens
  misc_RNA (1)...(19): siRNA sense strand
ggaagucacaaauaaccua

SEQ ID NO: 1997019 - RNA, 19 nt, Homo sapiens
  misc_RNA (1)...(19): siRNA sense strand
ggaaggaguuguggucagu

SEQ ID NO: 1997020 - RNA, 19 nt, Homo sapiens
  misc_RNA (1)...(19): siRNA sense strand
gggaauagacacuuuaaag

SEQ ID NO: 1997021 - RNA, 19 nt, Homo sapiens
  misc_RNA (1)...(19): siRNA sense strand
caaggacgcugcccauguc

SEQ ID NO: 1997022 - RNA, 19 nt, Homo sapiens
  misc_RNA (1)...(19): siRNA sense strand
caauguaauggaugucuua

SEQ ID NO: 1997023 - RNA, 19 nt, Homo sapiens
  misc_RNA (1)...(19): siRNA sense strand
gcuacguccucauuugaaa

SEQ ID NO: 1997024 - RNA, 19 nt, Homo sapiens
  misc_RNA (1)...(19): siRNA sense strand
gcaauguaauggaugucuu

SEQ ID NO: 1997025 - RNA, 19 nt, Homo sapiens
  misc_RNA (1)...(19): siRNA sense strand
gaguggugguuaaaucuga

SEQ ID NO: 1997026 - RNA, 19 nt, Homo sapiens
  misc_RNA (1)...(19): siRNA sense strand
gcucuuccaugcgcaguaa

SEQ ID NO: 1997027 - RNA, 19 nt, Homo sapiens
  misc_RNA (1)...(19): siRNA sense strand
ggucagugccgagaagaua

SEQ ID NO: 1997028 - RNA, 19 nt, Homo sapiens
  misc_RNA (1)...(19): siRNA sense strand
ccucucaccugcauuugaa

SEQ ID NO: 1997029 - RNA, 19 nt, Homo sapiens
  misc_RNA (1)...(19): siRNA sense strand
gagcuacguccucauuuga

SEQ ID NO: 1997030 - RNA, 19 nt, Homo sapiens
  misc_RNA (1)...(19): siRNA sense strand
ccgcauagcucccaaaaug

SEQ ID NO: 1997031 - RNA, 19 nt, Homo sapiens
  misc_RNA (1)...(19): siRNA sense strand
gagaacaguuugggaugga

SEQ ID NO: 1997032 - RNA, 19 nt, Homo sapiens
  misc_RNA (1)...(19): siRNA sense strand
ugagaguggugguuaaauc

SEQ ID NO: 1997033 - RNA, 19 nt, Homo sapiens
  misc_RNA (1)...(19): siRNA sense strand
cugcaaaucagaacaauga

SEQ ID NO: 1997034 - RNA, 19 nt, Homo sapiens
  misc_RNA (1)...(19): siRNA sense strand
aacaagagcagaggaaaua

SEQ ID NO: 1997035 - RNA, 19 nt, Homo sapiens
  misc_RNA (1)...(19): siRNA sense strand
gcucacagaucccagaaaa

SEQ ID NO: 1997036 - RNA, 19 nt, Homo sapiens
  misc_RNA (1)...(19): siRNA sense strand
gcagcgcuccuuuaugcua

SEQ ID NO: 1997037 - RNA, 19 nt, Homo sapiens
  misc_RNA (1)...(19): siRNA sense strand
auagugcgaucauguuuga

SEQ ID NO: 1997038 - RNA, 19 nt, Homo sapiens
  misc_RNA (1)...(19): siRNA sense strand
gcaugcagcgcuccuuuau

SEQ ID NO: 1997039 - RNA, 19 nt, Homo sapiens
  misc_RNA (1)...(19): siRNA sense strand
gagaacccauuuagugaac

SEQ ID NO: 1997040 - RNA, 19 nt, Homo sapiens
  misc_RNA (1)...(19): siRNA sense strand
uagagaacccauuuaguga

SEQ ID NO: 1997041 - RNA, 19 nt, Homo sapiens
  misc_RNA (1)...(19): siRNA sense strand
ggaagcugcaccugagaaa

SEQ ID NO: 1997042 - RNA, 19 nt, Homo sapiens
  misc_RNA (1)...(19): siRNA sense strand
ggaagauagugcgaucaug

SEQ ID NO: 1997043 - RNA, 19 nt, Homo sapiens
  misc_RNA (1)...(19): siRNA sense strand
gagccaguaacuuuccuua

SEQ ID NO: 1997044 - RNA, 19 nt, Homo sapiens
  misc_RNA (1)...(19): siRNA sense strand
gagaucagaccaugaacau

SEQ ID NO: 1997045 - RNA, 19 nt, Homo sapiens
  misc_RNA (1)...(19): siRNA sense strand
ggaauagacacuuuaaagc

SEQ ID NO: 1997046 - RNA, 19 nt, Homo sapiens
  misc_RNA (1)...(19): siRNA sense strand
ggaaguggaaggaguugug

SEQ ID NO: 1997047 - RNA, 19 nt, Homo sapiens
  misc_RNA (1)...(19): siRNA sense strand
gaaagcagugaucggaguu

SEQ ID NO: 1997048 - RNA, 19 nt, Homo sapiens
  misc_RNA (1)...(19): siRNA sense strand
gaaggagaucagaccauga

SEQ ID NO: 1997049 - RNA, 19 nt, Homo sapiens
  misc_RNA (1)...(19): siRNA sense strand
uaacuuuacugcaaaucag

SEQ ID NO: 1997050 - RNA, 19 nt, Homo sapiens
  misc_RNA (1)...(19): siRNA sense strand
gcugacggaaugacugaua

SEQ ID NO: 1997051 - RNA, 19 nt, Homo sapiens
  misc_RNA (1)...(19): siRNA sense strand
uccuaaagcugacggaaug

SEQ ID NO: 1997052 - RNA, 19 nt, Homo sapiens
  misc_RNA (1)...(19): siRNA sense strand
caggguaggugauauccau

SEQ ID NO: 1997053 - RNA, 19 nt, Homo sapiens
  misc_RNA (1)...(19): siRNA sense strand
gcaaucuucccagcacuuu

SEQ ID NO: 1997054 - RNA, 19 nt, Homo sapiens
  misc_RNA (1)...(19): siRNA sense strand
ucgcaaguaugccugcaaa

SEQ ID NO: 1997055 - RNA, 19 nt, Homo sapiens
  misc_RNA (1)...(19): siRNA sense strand
gcauuugaacucuguuguu

SEQ ID NO: 1997056 - RNA, 19 nt, Homo sapiens
  misc_RNA (1)...(19): siRNA sense strand
uaacaagagcagaggaaau

SEQ ID NO: 1997057 - RNA, 19 nt, Homo sapiens
  misc_RNA (1)...(19): siRNA sense strand
uggcagagcagcaaucuuc

SEQ ID NO: 1997058 - RNA, 19 nt, Homo sapiens
  misc_RNA (1)...(19): siRNA sense strand
ccagccaccuguauaagca

SEQ ID NO: 1997059 - RNA, 19 nt, Homo sapiens
  misc_RNA (1)...(19): siRNA sense strand
ggauuuuccuggucacuuu

SEQ ID NO: 1997060 - RNA, 19 nt, Homo sapiens
  misc_RNA (1)...(19): siRNA sense strand
gcagaggaaauaacuuuac

SEQ ID NO: 1997061 - RNA, 19 nt, Homo sapiens
  misc_RNA (1)...(19): siRNA sense strand
auagaugagucugccauuu

SEQ ID NO: 1997062 - RNA, 19 nt, Homo sapiens
  misc_RNA (1)...(19): siRNA sense strand
cagcgagucuguggaagug

SEQ ID NO: 1997063 - RNA, 19 nt, Homo sapiens
  misc_RNA (1)...(19): siRNA sense strand
cagccagucugauaacagu

SEQ ID NO: 1997064 - RNA, 19 nt, Homo sapiens
  misc_RNA (1)...(19): siRNA sense strand
agaugagucugccauuuca

SEQ ID NO: 1997065 - RNA, 19 nt, Homo sapiens
  misc_RNA (1)...(19): siRNA sense strand
gauagugcgaucauguuug

SEQ ID NO: 1997066 - RNA, 19 nt, Homo sapiens
  misc_RNA (1)...(19): siRNA sense strand
ggaggagccaguaacuuuc

SEQ ID NO: 1997067 - RNA, 19 nt, Homo sapiens
  misc_RNA (1)...(19): siRNA sense strand
ccauguagagaacccauuu

SEQ ID NO: 1997068 - RNA, 19 nt, Homo sapiens
  misc_RNA (1)...(19): siRNA sense strand
ugacugauaaccaggaaga

SEQ ID NO: 1997069 - RNA, 19 nt, Homo sapiens
  misc_RNA (1)...(19): siRNA sense strand
cagaggaaauaacuuuacu

SEQ ID NO: 1997070 - RNA, 19 nt, Homo sapiens
  misc_RNA (1)...(19): siRNA sense strand
ggccagcucugugauugug

SEQ ID NO: 1997071 - RNA, 19 nt, Homo sapiens
  misc_RNA (1)...(19): siRNA sense strand
ggagaucagaccaugaaca

SEQ ID NO: 1997072 - RNA, 19 nt, Homo sapiens
  misc_RNA (1)...(19): siRNA sense strand
acaugagaguggugguuaa

SEQ ID NO: 1997073 - RNA, 19 nt, Homo sapiens
  misc_RNA (1)...(19): siRNA sense strand
agaaggagcacaugagagu

SEQ ID NO: 1997074 - RNA, 19 nt, Homo sapiens
  misc_RNA (1)...(19): siRNA sense strand
gagguuggccuuggugaga

SEQ ID NO: 1997075 - RNA, 19 nt, Homo sapiens
  misc_RNA (1)...(19): siRNA sense strand
cugacggaaugacugauaa

SEQ ID NO: 1997076 - RNA, 19 nt, Homo sapiens
  misc_RNA (1)...(19): siRNA sense strand
uaucagagcacaauguuuu

SEQ ID NO: 1997077 - RNA, 19 nt, Homo sapiens
  misc_RNA (1)...(19): siRNA sense strand
gcacaugagaguggugguu

SEQ ID NO: 1997078 - RNA, 19 nt, Homo sapiens
  misc_RNA (1)...(19): siRNA sense strand
gugcccagccagucugaua

SEQ ID NO: 1997079 - RNA, 19 nt, Homo sapiens
  misc_RNA (1)...(19): siRNA sense strand
gcagcugaacuaccagaga

SEQ ID NO: 1997080 - RNA, 19 nt, Homo sapiens
  misc_RNA (1)...(19): siRNA sense strand
ggugacagcagaggccuuu

SEQ ID NO: 1997081 - RNA, 19 nt, Homo sapiens
  misc_RNA (1)...(19): siRNA sense strand
gaaguguggcaagagguuu

SEQ ID NO: 1997082 - RNA, 19 nt, Homo sapiens
  misc_RNA (1)...(19): siRNA sense strand
ucuaccaguucucagcuaa

SEQ ID NO: 1997083 - RNA, 19 nt, Homo sapiens
  misc_RNA (1)...(19): siRNA sense strand
cacaugagaguggugguua

SEQ ID NO: 1997084 - RNA, 19 nt, Homo sapiens
  misc_RNA (1)...(19): siRNA sense strand
ugagaaggagcacaugaga

SEQ ID NO: 1997085 - RNA, 19 nt, Homo sapiens
  misc_RNA (1)...(19): siRNA sense strand
uagaugagucugccauuuc

SEQ ID NO: 1997086 - RNA, 19 nt, Homo sapiens
  misc_RNA (1)...(19): siRNA sense strand
ggugagaaggagcacauga

SEQ ID NO: 1997087 - RNA, 19 nt, Homo sapiens
  misc_RNA (1)...(19): siRNA sense strand
uaccaguucucagcuaaug

SEQ ID NO: 1997088 - RNA, 19 nt, Homo sapiens
  misc_RNA (1)...(19): siRNA sense strand
gugauugugucauuguagu

SEQ ID NO: 1997089 - RNA, 19 nt, Homo sapiens
  misc_RNA (1)...(19): siRNA sense strand
gagaguggugguuaaaucu

SEQ ID NO: 1997090 - RNA, 19 nt, Homo sapiens
  misc_RNA (1)...(19): siRNA sense strand
gagcucagcccucaauucc

SEQ ID NO: 1997091 - RNA, 19 nt, Homo sapiens
  misc_RNA (1)...(19): siRNA sense strand
ugaugggccugccgugugu

SEQ ID NO: 1997092 - RNA, 19 nt, Homo sapiens
  misc_RNA (1)...(19): siRNA sense strand
gauguuacaccggagaaug

SEQ ID NO: 1997093 - RNA, 19 nt, Homo sapiens
  misc_RNA (1)...(19): siRNA sense strand
augcagcgcuccuuuaugc

SEQ ID NO: 1997094 - RNA, 19 nt, Homo sapiens
  misc_RNA (1)...(19): siRNA sense strand
aaggagaucagaccaugaa

SEQ ID NO: 1997095 - RNA, 19 nt, Homo sapiens
  misc_RNA (1)...(19): siRNA sense strand
cagccucucaccugcauuu

SEQ ID NO: 1997096 - RNA, 19 nt, Homo sapiens
  misc_RNA (1)...(19): siRNA sense strand
cauguagagaacccauuua

SEQ ID NO: 1997097 - RNA, 19 nt, Homo sapiens
  misc_RNA (1)...(19): siRNA sense strand
acugcaggcuggagaguga

SEQ ID NO: 1997098 - RNA, 19 nt, Homo sapiens
  misc_RNA (1)...(19): siRNA sense strand
caucaucucuuacaaauca

SEQ ID NO: 1997099 - RNA, 19 nt, Homo sapiens
  misc_RNA (1)...(19): siRNA sense strand
uaaccaagcuggaguggaa

SEQ ID NO: 1997100 - RNA, 19 nt, Homo sapiens
  misc_RNA (1)...(19): siRNA sense strand
ggaacagucucucgacaug

SEQ ID NO: 1997101 - RNA, 19 nt, Homo sapiens
  misc_RNA (1)...(19): siRNA sense strand
cuaaggauauccacagaaa

SEQ ID NO: 1997102 - RNA, 19 nt, Homo sapiens
  misc_RNA (1)...(19): siRNA sense strand
ggacaguggccuuugguuu

SEQ ID NO: 1997103 - RNA, 19 nt, Homo sapiens
  misc_RNA (1)...(19): siRNA sense strand
uacaguccaucaucucuua

SEQ ID NO: 1997104 - RNA, 19 nt, Homo sapiens
  misc_RNA (1)...(19): siRNA sense strand
ugucugugcuucacuaauu

SEQ ID NO: 1997105 - RNA, 19 nt, Homo sapiens
  misc_RNA (1)...(19): siRNA sense strand
ggucaucucugccguuucu

SEQ ID NO: 1997106 - RNA, 19 nt, Homo sapiens
  misc_RNA (1)...(19): siRNA sense strand
gauugucugugcuucacua

SEQ ID NO: 1997107 - RNA, 19 nt, Homo sapiens
  misc_RNA (1)...(19): siRNA sense strand
cauccaagauuuccagagu

SEQ ID NO: 1997108 - RNA, 19 nt, Homo sapiens
  misc_RNA (1)...(19): siRNA sense strand
gagugucacccuaaggaua

SEQ ID NO: 1997109 - RNA, 19 nt, Homo sapiens
  misc_RNA (1)...(19): siRNA sense strand
ucacuaauuuccauaacca

SEQ ID NO: 1997110 - RNA, 19 nt, Homo sapiens
  misc_RNA (1)...(19): siRNA sense strand
uuauguauaucacguagug

SEQ ID NO: 1997111 - RNA, 19 nt, Homo sapiens
  misc_RNA (1)...(19): siRNA sense strand
gauauccacagaaaucaau

SEQ ID NO: 1997112 - RNA, 19 nt, Homo sapiens
  misc_RNA (1)...(19): siRNA sense strand
cuuccuaacuuucauccaa

SEQ ID NO: 1997113 - RNA, 19 nt, Homo sapiens
  misc_RNA (1)...(19): siRNA sense strand
uccaucaucucuuacaaau

SEQ ID NO: 1997114 - RNA, 19 nt, Homo sapiens
  misc_RNA (1)...(19): siRNA sense strand
ugagugcgaucugugaaug

SEQ ID NO: 1997115 - RNA, 19 nt, Homo sapiens
  misc_RNA (1)...(19): siRNA sense strand
caagauuuccagaguguca

SEQ ID NO: 1997116 - RNA, 19 nt, Homo sapiens
  misc_RNA (1)...(19): siRNA sense strand
ggauuauguauaucacgua

SEQ ID NO: 1997117 - RNA, 19 nt, Homo sapiens
  misc_RNA (1)...(19): siRNA sense strand
gugcuucacuaauuuccau

SEQ ID NO: 1997118 - RNA, 19 nt, Homo sapiens
  misc_RNA (1)...(19): siRNA sense strand
ggauauccacagaaaucaa

SEQ ID NO: 1997119 - RNA, 19 nt, Homo sapiens
  misc_RNA (1)...(19): siRNA sense strand
gucugugcuucacuaauuu

SEQ ID NO: 1997120 - RNA, 19 nt, Homo sapiens
  misc_RNA (1)...(19): siRNA sense strand
aaggauauccacagaaauc

SEQ ID NO: 1997121 - RNA, 19 nt, Homo sapiens
  misc_RNA (1)...(19): siRNA sense strand
uccaagauuuccagagugu

SEQ ID NO: 1997122 - RNA, 19 nt, Homo sapiens
  misc_RNA (1)...(19): siRNA sense strand
caagagaaaaggauuaugu

SEQ ID NO: 1997123 - RNA, 19 nt, Homo sapiens
  misc_RNA (1)...(19): siRNA sense strand
acaguggccuuugguuuua

SEQ ID NO: 1997124 - RNA, 19 nt, Homo sapiens
  misc_RNA (1)...(19): siRNA sense strand
gacaguggccuuugguuuu

SEQ ID NO: 1997125 - RNA, 19 nt, Homo sapiens
  misc_RNA (1)...(19): siRNA sense strand
gaauggacaguggccuuug

SEQ ID NO: 1997126 - RNA, 19 nt, Homo sapiens
  misc_RNA (1)...(19): siRNA sense strand
cagagugucacccuaagga

SEQ ID NO: 1997127 - RNA, 19 nt, Homo sapiens
  misc_RNA (1)...(19): siRNA sense strand
guccaucaucucuuacaaa

SEQ ID NO: 1997128 - RNA, 19 nt, Homo sapiens
  misc_RNA (1)...(19): siRNA sense strand
ugaauggacaguggccuuu

SEQ ID NO: 1997129 - RNA, 19 nt, Homo sapiens
  misc_RNA (1)...(19): siRNA sense strand
ucucucgacaugccacaua

SEQ ID NO: 1997130 - RNA, 19 nt, Homo sapiens
  misc_RNA (1)...(19): siRNA sense strand
cuaacuuucauccaagauu

SEQ ID NO: 1997131 - RNA, 19 nt, Homo sapiens
  misc_RNA (1)...(19): siRNA sense strand
gcuucacuaauuuccauaa

SEQ ID NO: 1997132 - RNA, 19 nt, Homo sapiens
  misc_RNA (1)...(19): siRNA sense strand
gaaaguaccugcaauccuu

SEQ ID NO: 1997133 - RNA, 19 nt, Homo sapiens
  misc_RNA (1)...(19): siRNA sense strand
gcaugaagcugugcaguuu

SEQ ID NO: 1997134 - RNA, 19 nt, Homo sapiens
  misc_RNA (1)...(19): siRNA sense strand
caucaaauauuccaagcua

SEQ ID NO: 1997135 - RNA, 19 nt, Homo sapiens
  misc_RNA (1)...(19): siRNA sense strand
gccgauaucuuucauguga

SEQ ID NO: 1997136 - RNA, 19 nt, Homo sapiens
  misc_RNA (1)...(19): siRNA sense strand
gcaaggugaccaucaaaua

SEQ ID NO: 1997137 - RNA, 19 nt, Homo sapiens
  misc_RNA (1)...(19): siRNA sense strand
gaacaaggaauuugcuuug

SEQ ID NO: 1997138 - RNA, 19 nt, Homo sapiens
  misc_RNA (1)...(19): siRNA sense strand
agaacaaccucaaguauau

SEQ ID NO: 1997139 - RNA, 19 nt, Homo sapiens
  misc_RNA (1)...(19): siRNA sense strand
uaacaacucucaagucuac

SEQ ID NO: 1997140 - RNA, 19 nt, Homo sapiens
  misc_RNA (1)...(19): siRNA sense strand
gaaggugucuacucugaau

SEQ ID NO: 1997141 - RNA, 19 nt, Homo sapiens
  misc_RNA (1)...(19): siRNA sense strand
gauacaaccugaacaucaa

SEQ ID NO: 1997142 - RNA, 19 nt, Homo sapiens
  misc_RNA (1)...(19): siRNA sense strand
ugagagaccuccguacuuu

SEQ ID NO: 1997143 - RNA, 19 nt, Homo sapiens
  misc_RNA (1)...(19): siRNA sense strand
ugacaugaauuggaaagua

SEQ ID NO: 1997144 - RNA, 19 nt, Homo sapiens
  misc_RNA (1)...(19): siRNA sense strand
caagauggcaguaaagaaa

SEQ ID NO: 1997145 - RNA, 19 nt, Homo sapiens
  misc_RNA (1)...(19): siRNA sense strand
gaccuuguuugcuggauua

SEQ ID NO: 1997146 - RNA, 19 nt, Homo sapiens
  misc_RNA (1)...(19): siRNA sense strand
caacccagccgauaucuuu

SEQ ID NO: 1997147 - RNA, 19 nt, Homo sapiens
  misc_RNA (1)...(19): siRNA sense strand
uaccugcaauccuuuauua

SEQ ID NO: 1997148 - RNA, 19 nt, Homo sapiens
  misc_RNA (1)...(19): siRNA sense strand
gagcugggcuuccuguuuc

SEQ ID NO: 1997149 - RNA, 19 nt, Homo sapiens
  misc_RNA (1)...(19): siRNA sense strand
ggagucagacagugaauuu

SEQ ID NO: 1997150 - RNA, 19 nt, Homo sapiens
  misc_RNA (1)...(19): siRNA sense strand
ucacucaacugcaucaaga

SEQ ID NO: 1997151 - RNA, 19 nt, Homo sapiens
  misc_RNA (1)...(19): siRNA sense strand
gcaccaggcugcgcaauca

SEQ ID NO: 1997152 - RNA, 19 nt, Homo sapiens
  misc_RNA (1)...(19): siRNA sense strand
ggguauacauugugccuuu

SEQ ID NO: 1997153 - RNA, 19 nt, Homo sapiens
  misc_RNA (1)...(19): siRNA sense strand
gaaaacacauacuaccuuu

SEQ ID NO: 1997154 - RNA, 19 nt, Homo sapiens
  misc_RNA (1)...(19): siRNA sense strand
ggaggagcauggugucuau

SEQ ID NO: 1997155 - RNA, 19 nt, Homo sapiens
  misc_RNA (1)...(19): siRNA sense strand
cagcagcacucuacucguu

SEQ ID NO: 1997156 - RNA, 19 nt, Homo sapiens
  misc_RNA (1)...(19): siRNA sense strand
gggaagaacuaugacuuug

SEQ ID NO: 1997157 - RNA, 19 nt, Homo sapiens
  misc_RNA (1)...(19): siRNA sense strand
ugaaugagaugccacagau

SEQ ID NO: 1997158 - RNA, 19 nt, Homo sapiens
  misc_RNA (1)...(19): siRNA sense strand
guaccaagucuaccauuaa

SEQ ID NO: 1997159 - RNA, 19 nt, Homo sapiens
  misc_RNA (1)...(19): siRNA sense strand
ccacacgucuggcaagguu

SEQ ID NO: 1997160 - RNA, 19 nt, Homo sapiens
  misc_RNA (1)...(19): siRNA sense strand
gaagaacuaugacuuugcu

SEQ ID NO: 1997161 - RNA, 19 nt, Homo sapiens
  misc_RNA (1)...(19): siRNA sense strand
gagguggaaucgcuucauu

SEQ ID NO: 1997162 - RNA, 19 nt, Homo sapiens
  misc_RNA (1)...(19): siRNA sense strand
ccaagaacaaccucaagua

SEQ ID NO: 1997163 - RNA, 19 nt, Homo sapiens
  misc_RNA (1)...(19): siRNA sense strand
agugguaucuguucaauga

SEQ ID NO: 1997164 - RNA, 19 nt, Homo sapiens
  misc_RNA (1)...(19): siRNA sense strand
ggaaccacaucuccacaug

SEQ ID NO: 1997165 - RNA, 19 nt, Homo sapiens
  misc_RNA (1)...(19): siRNA sense strand
acaaaucgcuucuucuucu

SEQ ID NO: 1997166 - RNA, 19 nt, Homo sapiens
  misc_RNA (1)...(19): siRNA sense strand
gaaguggguguaccuguuu

SEQ ID NO: 1997167 - RNA, 19 nt, Homo sapiens
  misc_RNA (1)...(19): siRNA sense strand
ggaaauaccacaggcuuau

SEQ ID NO: 1997168 - RNA, 19 nt, Homo sapiens
  misc_RNA (1)...(19): siRNA sense strand
caauggcagugaugauauu

SEQ ID NO: 1997169 - RNA, 19 nt, Homo sapiens
  misc_RNA (1)...(19): siRNA sense strand
ccuguacgcugucuaauuc

SEQ ID NO: 1997170 - RNA, 19 nt, Homo sapiens
  misc_RNA (1)...(19): siRNA sense strand
gcaaggagggcguuacuca

SEQ ID NO: 1997171 - RNA, 19 nt, Homo sapiens
  misc_RNA (1)...(19): siRNA sense strand
ccugauggcuacuguggua

SEQ ID NO: 1997172 - RNA, 19 nt, Homo sapiens
  misc_RNA (1)...(19): siRNA sense strand
gaacaucaagaacccuauu

SEQ ID NO: 1997173 - RNA, 19 nt, Homo sapiens
  misc_RNA (1)...(19): siRNA sense strand
aggagcaggugguggauua

SEQ ID NO: 1997174 - RNA, 19 nt, Homo sapiens
  misc_RNA (1)...(19): siRNA sense strand
caagaacaaccucaaguau

SEQ ID NO: 1997175 - RNA, 19 nt, Homo sapiens
  misc_RNA (1)...(19): siRNA sense strand
ccugguggcucacaucaaa

SEQ ID NO: 1997176 - RNA, 19 nt, Homo sapiens
  misc_RNA (1)...(19): siRNA sense strand
gcugugagauggagaacug

SEQ ID NO: 1997177 - RNA, 19 nt, Homo sapiens
  misc_RNA (1)...(19): siRNA sense strand
gugcaccucuggacugauu

SEQ ID NO: 1997178 - RNA, 19 nt, Homo sapiens
  misc_RNA (1)...(19): siRNA sense strand
gcaaucagauacccuacag

SEQ ID NO: 1997179 - RNA, 19 nt, Homo sapiens
  misc_RNA (1)...(19): siRNA sense strand
gguauacauugugccuuua

SEQ ID NO: 1997180 - RNA, 19 nt, Homo sapiens
  misc_RNA (1)...(19): siRNA sense strand
uaccaagucuaccauuaaa

SEQ ID NO: 1997181 - RNA, 19 nt, Homo sapiens
  misc_RNA (1)...(19): siRNA sense strand
ggaaucagugcacauaaug

SEQ ID NO: 1997182 - RNA, 19 nt, Homo sapiens
  misc_RNA (1)...(19): siRNA sense strand
caaggugaccaucaaauau

SEQ ID NO: 1997183 - RNA, 19 nt, Homo sapiens
  misc_RNA (1)...(19): siRNA sense strand
ccacaucuccacaugguuu

SEQ ID NO: 1997184 - RNA, 19 nt, Homo sapiens
  misc_RNA (1)...(19): siRNA sense strand
aagaacaaccucaaguaua

SEQ ID NO: 1997185 - RNA, 19 nt, Homo sapiens
  misc_RNA (1)...(19): siRNA sense strand
aaacugggaagaacuauga

SEQ ID NO: 1997186 - RNA, 19 nt, Homo sapiens
  misc_RNA (1)...(19): siRNA sense strand
ugauccaggugcucuauuu

SEQ ID NO: 1997187 - RNA, 19 nt, Homo sapiens
  misc_RNA (1)...(19): siRNA sense strand
uugauuaccugcuggauga

SEQ ID NO: 1997188 - RNA, 19 nt, Homo sapiens
  misc_RNA (1)...(19): siRNA sense strand
ugaaguggguguaccuguu

SEQ ID NO: 1997189 - RNA, 19 nt, Homo sapiens
  misc_RNA (1)...(19): siRNA sense strand
ggaauuugcuuuggcugau

SEQ ID NO: 1997190 - RNA, 19 nt, Homo sapiens
  misc_RNA (1)...(19): siRNA sense strand
gcgcuucauuccuacauau

SEQ ID NO: 1997191 - RNA, 19 nt, Homo sapiens
  misc_RNA (1)...(19): siRNA sense strand
gcaauccuuuauuauguca

SEQ ID NO: 1997192 - RNA, 19 nt, Homo sapiens
  misc_RNA (1)...(19): siRNA sense strand
gaauuugcuuuggcugauu

SEQ ID NO: 1997193 - RNA, 19 nt, Homo sapiens
  misc_RNA (1)...(19): siRNA sense strand
acacacuucucucugauug

SEQ ID NO: 1997194 - RNA, 19 nt, Homo sapiens
  misc_RNA (1)...(19): siRNA sense strand
uaagguggaacaugaguuu

SEQ ID NO: 1997195 - RNA, 19 nt, Homo sapiens
  misc_RNA (1)...(19): siRNA sense strand
gcugcagaaucacauacua

SEQ ID NO: 1997196 - RNA, 19 nt, Homo sapiens
  misc_RNA (1)...(19): siRNA sense strand
ccuaacaacucucaagucu

SEQ ID NO: 1997197 - RNA, 19 nt, Homo sapiens
  misc_RNA (1)...(19): siRNA sense strand
ccacugaugcugaaugaga

SEQ ID NO: 1997198 - RNA, 19 nt, Homo sapiens
  misc_RNA (1)...(19): siRNA sense strand
gacaugaauuggaaaguac

SEQ ID NO: 1997199 - RNA, 19 nt, Homo sapiens
  misc_RNA (1)...(19): siRNA sense strand
gcagugguaucuguucaau

SEQ ID NO: 1997200 - RNA, 19 nt, Homo sapiens
  misc_RNA (1)...(19): siRNA sense strand
ccaggagacucagaaguau

SEQ ID NO: 1997201 - RNA, 19 nt, Homo sapiens
  misc_RNA (1)...(19): siRNA sense strand
acauauacuucucgucuug

SEQ ID NO: 1997202 - RNA, 19 nt, Homo sapiens
  misc_RNA (1)...(19): siRNA sense strand
uggaaggugucuacucuga

SEQ ID NO: 1997203 - RNA, 19 nt, Homo sapiens
  misc_RNA (1)...(19): siRNA sense strand
cagauauucuugucaucaa

SEQ ID NO: 1997204 - RNA, 19 nt, Homo sapiens
  misc_RNA (1)...(19): siRNA sense strand
gagauucugcgcaccauga

SEQ ID NO: 1997205 - RNA, 19 nt, Homo sapiens
  misc_RNA (1)...(19): siRNA sense strand
acagacaaaucgcuucuuc

SEQ ID NO: 1997206 - RNA, 19 nt, Homo sapiens
  misc_RNA (1)...(19): siRNA sense strand
ugaggaggaagcagaguua

SEQ ID NO: 1997207 - RNA, 19 nt, Homo sapiens
  misc_RNA (1)...(19): siRNA sense strand
cugcaauccuuuauuaugu

SEQ ID NO: 1997208 - RNA, 19 nt, Homo sapiens
  misc_RNA (1)...(19): siRNA sense strand
cagauacccuacagacuca

SEQ ID NO: 1997209 - RNA, 19 nt, Homo sapiens
  misc_RNA (1)...(19): siRNA sense strand
cagccgauaucuuucaugu

SEQ ID NO: 1997210 - RNA, 19 nt, Homo sapiens
  misc_RNA (1)...(19): siRNA sense strand
ccaagcaccuaacaacucu

SEQ ID NO: 1997211 - RNA, 19 nt, Homo sapiens
  misc_RNA (1)...(19): siRNA sense strand
cagaaucacauacuagaga

SEQ ID NO: 1997212 - RNA, 19 nt, Homo sapiens
  misc_RNA (1)...(19): siRNA sense strand
gggucuggaugcugaguuu

SEQ ID NO: 1997213 - RNA, 19 nt, Homo sapiens
  misc_RNA (1)...(19): siRNA sense strand
ccaggaaucagugcacaua

SEQ ID NO: 1997214 - RNA, 19 nt, Homo sapiens
  misc_RNA (1)...(19): siRNA sense strand
ucaacugcaucaagauaug

SEQ ID NO: 1997215 - RNA, 19 nt, Homo sapiens
  misc_RNA (1)...(19): siRNA sense strand
agacaaaucgcuucuucuu

SEQ ID NO: 1997216 - RNA, 19 nt, Homo sapiens
  misc_RNA (1)...(19): siRNA sense strand
ggaguucugucuggcaugu

SEQ ID NO: 1997217 - RNA, 19 nt, Homo sapiens
  misc_RNA (1)...(19): siRNA sense strand
gagccuguacgcugucuaa

SEQ ID NO: 1997218 - RNA, 19 nt, Homo sapiens
  misc_RNA (1)...(19): siRNA sense strand
ucagaaguaugcaguagag

SEQ ID NO: 1997219 - RNA, 19 nt, Homo sapiens
  misc_RNA (1)...(19): siRNA sense strand
gaacgucuggcuuccuuuc

SEQ ID NO: 1997220 - RNA, 19 nt, Homo sapiens
  misc_RNA (1)...(19): siRNA sense strand
ggaugagaaugaggauaug

SEQ ID NO: 1997221 - RNA, 19 nt, Homo sapiens
  misc_RNA (1)...(19): siRNA sense strand
gaacaaccucaaguauaug

SEQ ID NO: 1997222 - RNA, 19 nt, Homo sapiens
  misc_RNA (1)...(19): siRNA sense strand
gcaggugguggauuacuug

SEQ ID NO: 1997223 - RNA, 19 nt, Homo sapiens
  misc_RNA (1)...(19): siRNA sense strand
ggagcauggugucuaugug

SEQ ID NO: 1997224 - RNA, 19 nt, Homo sapiens
  misc_RNA (1)...(19): siRNA sense strand
ggaaaucuccaagaacaag

SEQ ID NO: 1997225 - RNA, 19 nt, Homo sapiens
  misc_RNA (1)...(19): siRNA sense strand
acccuggacuggcagaaua

SEQ ID NO: 1997226 - RNA, 19 nt, Homo sapiens
  misc_RNA (1)...(19): siRNA sense strand
gagcgcuacucauccuuuc

SEQ ID NO: 1997227 - RNA, 19 nt, Homo sapiens
  misc_RNA (1)...(19): siRNA sense strand
gcuggugugucccuccauu

SEQ ID NO: 1997228 - RNA, 19 nt, Homo sapiens
  misc_RNA (1)...(19): siRNA sense strand
acacauacuaccuuuauuc

SEQ ID NO: 1997229 - RNA, 19 nt, Homo sapiens
  misc_RNA (1)...(19): siRNA sense strand
gcugugcaguuugacauga

SEQ ID NO: 1997230 - RNA, 19 nt, Homo sapiens
  misc_RNA (1)...(19): siRNA sense strand
gagcauggugucuaugugu

SEQ ID NO: 1997231 - RNA, 19 nt, Homo sapiens
  misc_RNA (1)...(19): siRNA sense strand
ccauugaggaguugaagaa

SEQ ID NO: 1997232 - RNA, 19 nt, Homo sapiens
  misc_RNA (1)...(19): siRNA sense strand
gaaacuggcuaaacaauuu

SEQ ID NO: 1997233 - RNA, 19 nt, Homo sapiens
  misc_RNA (1)...(19): siRNA sense strand
acaaauagcucacaaauag

SEQ ID NO: 1997234 - RNA, 19 nt, Homo sapiens
  misc_RNA (1)...(19): siRNA sense strand
gcacgagccucaucuguaa

SEQ ID NO: 1997235 - RNA, 19 nt, Homo sapiens
  misc_RNA (1)...(19): siRNA sense strand
cgacaugccugaacucuuu

SEQ ID NO: 1997236 - RNA, 19 nt, Homo sapiens
  misc_RNA (1)...(19): siRNA sense strand
gaacauggagccaaacuaa

SEQ ID NO: 1997237 - RNA, 19 nt, Homo sapiens
  misc_RNA (1)...(19): siRNA sense strand
gaugagauuucacauauug

SEQ ID NO: 1997238 - RNA, 19 nt, Homo sapiens
  misc_RNA (1)...(19): siRNA sense strand
ccacaaauuugacuaugua

SEQ ID NO: 1997239 - RNA, 19 nt, Homo sapiens
  misc_RNA (1)...(19): siRNA sense strand
gaucagaauucuccauuga

SEQ ID NO: 1997240 - RNA, 19 nt, Homo sapiens
  misc_RNA (1)...(19): siRNA sense strand
gaaaguauaugugagauca

SEQ ID NO: 1997241 - RNA, 19 nt, Homo sapiens
  misc_RNA (1)...(19): siRNA sense strand
gaaaguauaugugagauca

SEQ ID NO: 1997242 - RNA, 19 nt, Homo sapiens
  misc_RNA (1)...(19): siRNA sense strand
ggaagcagaugauguagau

SEQ ID NO: 1997243 - RNA, 19 nt, Homo sapiens
  misc_RNA (1)...(19): siRNA sense strand
gcaguuagguaaaggaaga

SEQ ID NO: 1997244 - RNA, 19 nt, Homo sapiens
  misc_RNA (1)...(19): siRNA sense strand
gaaauguagcggacaguua

SEQ ID NO: 1997245 - RNA, 19 nt, Homo sapiens
  misc_RNA (1)...(19): siRNA sense strand
ggaaauguauggaaauucu

SEQ ID NO: 1997246 - RNA, 19 nt, Homo sapiens
  misc_RNA (1)...(19): siRNA sense strand
ugagaacucuuccaauaaa

SEQ ID NO: 1997247 - RNA, 19 nt, Homo sapiens
  misc_RNA (1)...(19): siRNA sense strand
ucaaguagauacacccaua

SEQ ID NO: 1997248 - RNA, 19 nt, Homo sapiens
  misc_RNA (1)...(19): siRNA sense strand
gaaguaauuugguacaauc

SEQ ID NO: 1997249 - RNA, 19 nt, Homo sapiens
  misc_RNA (1)...(19): siRNA sense strand
ugacaaagcaguuagguaa

SEQ ID NO: 1997250 - RNA, 19 nt, Homo sapiens
  misc_RNA (1)...(19): siRNA sense strand
gaauguaacuucagaucau

SEQ ID NO: 1997251 - RNA, 19 nt, Homo sapiens
  misc_RNA (1)...(19): siRNA sense strand
caagauaucuguggcaaau

SEQ ID NO: 1997252 - RNA, 19 nt, Homo sapiens
  misc_RNA (1)...(19): siRNA sense strand
gaagucagcuuugaacaca

SEQ ID NO: 1997253 - RNA, 19 nt, Homo sapiens
  misc_RNA (1)...(19): siRNA sense strand
guagauacacccauaauga

SEQ ID NO: 1997254 - RNA, 19 nt, Homo sapiens
  misc_RNA (1)...(19): siRNA sense strand
caaaggaaacaccaagaua

SEQ ID NO: 1997255 - RNA, 19 nt, Homo sapiens
  misc_RNA (1)...(19): siRNA sense strand
cgaaauagauaaugcuaca

SEQ ID NO: 1997256 - RNA, 19 nt, Homo sapiens
  misc_RNA (1)...(19): siRNA sense strand
caaacuaacucagcaacaa

SEQ ID NO: 1997257 - RNA, 19 nt, Homo sapiens
  misc_RNA (1)...(19): siRNA sense strand
ccaagcaugugaugauauu

SEQ ID NO: 1997258 - RNA, 19 nt, Homo sapiens
  misc_RNA (1)...(19): siRNA sense strand
uuugagaacucuuccaaua

SEQ ID NO: 1997259 - RNA, 19 nt, Homo sapiens
  misc_RNA (1)...(19): siRNA sense strand
ugauguagaugaugauuug

SEQ ID NO: 1997260 - RNA, 19 nt, Homo sapiens
  misc_RNA (1)...(19): siRNA sense strand
gaaaggugucaacccauua

SEQ ID NO: 1997261 - RNA, 19 nt, Homo sapiens
  misc_RNA (1)...(19): siRNA sense strand
gcaaauacaaguccagaug

SEQ ID NO: 1997262 - RNA, 19 nt, Homo sapiens
  misc_RNA (1)...(19): siRNA sense strand
acaaggaaguaauuuggua

SEQ ID NO: 1997263 - RNA, 19 nt, Homo sapiens
  misc_RNA (1)...(19): siRNA sense strand
cagauucuuucucaguuua

SEQ ID NO: 1997264 - RNA, 19 nt, Homo sapiens
  misc_RNA (1)...(19): siRNA sense strand
caauacaagugaauaguuc

SEQ ID NO: 1997265 - RNA, 19 nt, Homo sapiens
  misc_RNA (1)...(19): siRNA sense strand
ggaaguaauuugguacaau

SEQ ID NO: 1997266 - RNA, 19 nt, Homo sapiens
  misc_RNA (1)...(19): siRNA sense strand
agauaucuguggcaaauaa

SEQ ID NO: 1997267 - RNA, 19 nt, Homo sapiens
  misc_RNA (1)...(19): siRNA sense strand
aaagacauaugacagagaa

SEQ ID NO: 1997268 - RNA, 19 nt, Homo sapiens
  misc_RNA (1)...(19): siRNA sense strand
gacagagaauuaauagaug

SEQ ID NO: 1997269 - RNA, 19 nt, Homo sapiens
  misc_RNA (1)...(19): siRNA sense strand
gacaaauagcucacaaaua

SEQ ID NO: 1997270 - RNA, 19 nt, Homo sapiens
  misc_RNA (1)...(19): siRNA sense strand
cagaugauguagaugauga

SEQ ID NO: 1997271 - RNA, 19 nt, Homo sapiens
  misc_RNA (1)...(19): siRNA sense strand
gacauaugacagagaauua

SEQ ID NO: 1997272 - RNA, 19 nt, Homo sapiens
  misc_RNA (1)...(19): siRNA sense strand
caaugaagauggagaaagg

SEQ ID NO: 1997273 - RNA, 19 nt, Homo sapiens
  misc_RNA (1)...(19): siRNA sense strand
gaaaggacaguaagacauc

SEQ ID NO: 1997274 - RNA, 19 nt, Homo sapiens
  misc_RNA (1)...(19): siRNA sense strand
gaaaggacaguaagacauc

SEQ ID NO: 1997275 - RNA, 19 nt, Homo sapiens
  misc_RNA (1)...(19): siRNA sense strand
gaacacaagguauucuaau

SEQ ID NO: 1997276 - RNA, 19 nt, Homo sapiens
  misc_RNA (1)...(19): siRNA sense strand
guuaggagauucaaaagua

SEQ ID NO: 1997277 - RNA, 19 nt, Homo sapiens
  misc_RNA (1)...(19): siRNA sense strand
gugcagacaucuuugacaa

SEQ ID NO: 1997278 - RNA, 19 nt, Homo sapiens
  misc_RNA (1)...(19): siRNA sense strand
ccagauggacagaaugaua

SEQ ID NO: 1997279 - RNA, 19 nt, Homo sapiens
  misc_RNA (1)...(19): siRNA sense strand
cagaucauaugaauacaga

SEQ ID NO: 1997280 - RNA, 19 nt, Homo sapiens
  misc_RNA (1)...(19): siRNA sense strand
gaaacucuggucauugaaa

SEQ ID NO: 1997281 - RNA, 19 nt, Homo sapiens
  misc_RNA (1)...(19): siRNA sense strand
gaaaguguucuccugaaga

SEQ ID NO: 1997282 - RNA, 19 nt, Homo sapiens
  misc_RNA (1)...(19): siRNA sense strand
acaaauagauaagccaaug

SEQ ID NO: 1997283 - RNA, 19 nt, Homo sapiens
  misc_RNA (1)...(19): siRNA sense strand
aguaagacaucagaaagua

SEQ ID NO: 1997284 - RNA, 19 nt, Homo sapiens
  misc_RNA (1)...(19): siRNA sense strand
aguaagacaucagaaagua

SEQ ID NO: 1997285 - RNA, 19 nt, Homo sapiens
  misc_RNA (1)...(19): siRNA sense strand
ccugaacucuuuccuucua

SEQ ID NO: 1997286 - RNA, 19 nt, Homo sapiens
  misc_RNA (1)...(19): siRNA sense strand
guacauugaugcauuuacu

SEQ ID NO: 1997287 - RNA, 19 nt, Homo sapiens
  misc_RNA (1)...(19): siRNA sense strand
agaaaggugucaacccauu

SEQ ID NO: 1997288 - RNA, 19 nt, Homo sapiens
  misc_RNA (1)...(19): siRNA sense strand
gaaauugaguacuaaucag

SEQ ID NO: 1997289 - RNA, 19 nt, Homo sapiens
  misc_RNA (1)...(19): siRNA sense strand
caucagaaaguauauguga

SEQ ID NO: 1997290 - RNA, 19 nt, Homo sapiens
  misc_RNA (1)...(19): siRNA sense strand
caucagaaaguauauguga

SEQ ID NO: 1997291 - RNA, 19 nt, Homo sapiens
  misc_RNA (1)...(19): siRNA sense strand
ggaucagaauucuccauug

SEQ ID NO: 1997292 - RNA, 19 nt, Homo sapiens
  misc_RNA (1)...(19): siRNA sense strand
cacaagguauucuaaugaa

SEQ ID NO: 1997293 - RNA, 19 nt, Homo sapiens
  misc_RNA (1)...(19): siRNA sense strand
caaauucuaugcuggacau

SEQ ID NO: 1997294 - RNA, 19 nt, Homo sapiens
  misc_RNA (1)...(19): siRNA sense strand
gaagaagaacuuaugaaac

SEQ ID NO: 1997295 - RNA, 19 nt, Homo sapiens
  misc_RNA (1)...(19): siRNA sense strand
gcagucagaagccauuuga

SEQ ID NO: 1997296 - RNA, 19 nt, Homo sapiens
  misc_RNA (1)...(19): siRNA sense strand
aaucagccaugccauaaga

SEQ ID NO: 1997297 - RNA, 19 nt, Homo sapiens
  misc_RNA (1)...(19): siRNA sense strand
cugcaugugucuuauacua

SEQ ID NO: 1997298 - RNA, 19 nt, Homo sapiens
  misc_RNA (1)...(19): siRNA sense strand
caacaagacauuagaaagg

SEQ ID NO: 1997299 - RNA, 19 nt, Homo sapiens
  misc_RNA (1)...(19): siRNA sense strand
caacaagacauuagaaagg

SEQ ID NO: 1997300 - RNA, 19 nt, Homo sapiens
  misc_RNA (1)...(19): siRNA sense strand
caagaagaagaacuuauga

SEQ ID NO: 1997301 - RNA, 19 nt, Homo sapiens
  misc_RNA (1)...(19): siRNA sense strand
gcucccacuucauuucuuu

SEQ ID NO: 1997302 - RNA, 19 nt, Homo sapiens
  misc_RNA (1)...(19): siRNA sense strand
ucagauucuuucucaguuu

SEQ ID NO: 1997303 - RNA, 19 nt, Homo sapiens
  misc_RNA (1)...(19): siRNA sense strand
acacugauguuccaauaca

SEQ ID NO: 1997304 - RNA, 19 nt, Homo sapiens
  misc_RNA (1)...(19): siRNA sense strand
aaauguagcggacaguuaa

SEQ ID NO: 1997305 - RNA, 19 nt, Homo sapiens
  misc_RNA (1)...(19): siRNA sense strand
gaaaauggacucacuguca

SEQ ID NO: 1997306 - RNA, 19 nt, Homo sapiens
  misc_RNA (1)...(19): siRNA sense strand
cacgaucacuuucuucuca

SEQ ID NO: 1997307 - RNA, 19 nt, Homo sapiens
  misc_RNA (1)...(19): siRNA sense strand
gaaacugcuauuccuugua

SEQ ID NO: 1997308 - RNA, 19 nt, Homo sapiens
  misc_RNA (1)...(19): siRNA sense strand
aaaggaaacaccaagauau

SEQ ID NO: 1997309 - RNA, 19 nt, Homo sapiens
  misc_RNA (1)...(19): siRNA sense strand
uuaugaaacuggcuaaaca

SEQ ID NO: 1997310 - RNA, 19 nt, Homo sapiens
  misc_RNA (1)...(19): siRNA sense strand
ucaagaagaagaacuuaug

SEQ ID NO: 1997311 - RNA, 19 nt, Homo sapiens
  misc_RNA (1)...(19): siRNA sense strand
aaacugcuauuccuuguac

SEQ ID NO: 1997312 - RNA, 19 nt, Homo sapiens
  misc_RNA (1)...(19): siRNA sense strand
gcaacaagacauuagaaag

SEQ ID NO: 1997313 - RNA, 19 nt, Homo sapiens
  misc_RNA (1)...(19): siRNA sense strand
gcaacaagacauuagaaag

SEQ ID NO: 1997314 - RNA, 19 nt, Homo sapiens
  misc_RNA (1)...(19): siRNA sense strand
cauaauauaguucccgaaa

SEQ ID NO: 1997315 - RNA, 19 nt, Homo sapiens
  misc_RNA (1)...(19): siRNA sense strand
ucagaauucuccauugaca

SEQ ID NO: 1997316 - RNA, 19 nt, Homo sapiens
  misc_RNA (1)...(19): siRNA sense strand
gcaugugucuuauacuaac

SEQ ID NO: 1997317 - RNA, 19 nt, Homo sapiens
  misc_RNA (1)...(19): siRNA sense strand
gcauuucagugcagacauc

SEQ ID NO: 1997318 - RNA, 19 nt, Homo sapiens
  misc_RNA (1)...(19): siRNA sense strand
gacaguaagacaucagaaa

SEQ ID NO: 1997319 - RNA, 19 nt, Homo sapiens
  misc_RNA (1)...(19): siRNA sense strand
gacaguaagacaucagaaa

SEQ ID NO: 1997320 - RNA, 19 nt, Homo sapiens
  misc_RNA (1)...(19): siRNA sense strand
uaccaagcaugugaugaua

SEQ ID NO: 1997321 - RNA, 19 nt, Homo sapiens
  misc_RNA (1)...(19): siRNA sense strand
acacaagguauucuaauga

SEQ ID NO: 1997322 - RNA, 19 nt, Homo sapiens
  misc_RNA (1)...(19): siRNA sense strand
cuaaggagccagaaacuuc

SEQ ID NO: 1997323 - RNA, 19 nt, Homo sapiens
  misc_RNA (1)...(19): siRNA sense strand
uggaagagcuagaugugau

SEQ ID NO: 1997324 - RNA, 19 nt, Homo sapiens
  misc_RNA (1)...(19): siRNA sense strand
aaaugcagcucccacuuca

SEQ ID NO: 1997325 - RNA, 19 nt, Homo sapiens
  misc_RNA (1)...(19): siRNA sense strand
acagcaaucuuuggugaaa

SEQ ID NO: 1997326 - RNA, 19 nt, Homo sapiens
  misc_RNA (1)...(19): siRNA sense strand
gagcaaccuuaacacaaca

SEQ ID NO: 1997327 - RNA, 19 nt, Homo sapiens
  misc_RNA (1)...(19): siRNA sense strand
gauaaauaaucugcaugug

SEQ ID NO: 1997328 - RNA, 19 nt, Homo sapiens
  misc_RNA (1)...(19): siRNA sense strand
uagauaagccaaugaagau

SEQ ID NO: 1997329 - RNA, 19 nt, Homo sapiens
  misc_RNA (1)...(19): siRNA sense strand
ugacaaauagcucacaaau

SEQ ID NO: 1997330 - RNA, 19 nt, Homo sapiens
  misc_RNA (1)...(19): siRNA sense strand
auacagauguggucauuac

SEQ ID NO: 1997331 - RNA, 19 nt, Homo sapiens
  misc_RNA (1)...(19): siRNA sense strand
uaacuggaaguaugucuga

SEQ ID NO: 1997332 - RNA, 19 nt, Homo sapiens
  misc_RNA (1)...(19): siRNA sense strand
uaagaaagcuggauugacu

SEQ ID NO: 1997333 - RNA, 19 nt, Homo sapiens
  misc_RNA (1)...(19): siRNA sense strand
gaagagucccuuaccauga

SEQ ID NO: 1997334 - RNA, 19 nt, Homo sapiens
  misc_RNA (1)...(19): siRNA sense strand
ugacuguuguuccuucaua

SEQ ID NO: 1997335 - RNA, 19 nt, Homo sapiens
  misc_RNA (1)...(19): siRNA sense strand
cuaccaagguucuuucaga

SEQ ID NO: 1997336 - RNA, 19 nt, Homo sapiens
  misc_RNA (1)...(19): siRNA sense strand
caaaaucucuggaguggaa

SEQ ID NO: 1997337 - RNA, 19 nt, Homo sapiens
  misc_RNA (1)...(19): siRNA sense strand
ggaauggagcuaucucaga

SEQ ID NO: 1997338 - RNA, 19 nt, Homo sapiens
  misc_RNA (1)...(19): siRNA sense strand
cauauaaugccuugagaaa

SEQ ID NO: 1997339 - RNA, 19 nt, Homo sapiens
  misc_RNA (1)...(19): siRNA sense strand
uggauagacuucugcguaa

SEQ ID NO: 1997340 - RNA, 19 nt, Homo sapiens
  misc_RNA (1)...(19): siRNA sense strand
ggaacauucuaccaagguu

SEQ ID NO: 1997341 - RNA, 19 nt, Homo sapiens
  misc_RNA (1)...(19): siRNA sense strand
aaagcuggauugacuguug

SEQ ID NO: 1997342 - RNA, 19 nt, Homo sapiens
  misc_RNA (1)...(19): siRNA sense strand
aaaggcaguuuguuuggaa

SEQ ID NO: 1997343 - RNA, 19 nt, Homo sapiens
  misc_RNA (1)...(19): siRNA sense strand
gggcuggacuuagaucaga

SEQ ID NO: 1997344 - RNA, 19 nt, Homo sapiens
  misc_RNA (1)...(19): siRNA sense strand
ucacgaaagagccaaguuu

SEQ ID NO: 1997345 - RNA, 19 nt, Homo sapiens
  misc_RNA (1)...(19): siRNA sense strand
ucaauuaggcaucacgaaa

SEQ ID NO: 1997346 - RNA, 19 nt, Homo sapiens
  misc_RNA (1)...(19): siRNA sense strand
ggaguggaauggagcuauc

SEQ ID NO: 1997347 - RNA, 19 nt, Homo sapiens
  misc_RNA (1)...(19): siRNA sense strand
uaccaugacccacagauuu

SEQ ID NO: 1997348 - RNA, 19 nt, Homo sapiens
  misc_RNA (1)...(19): siRNA sense strand
cuucagauguggaaaauaa

SEQ ID NO: 1997349 - RNA, 19 nt, Homo sapiens
  misc_RNA (1)...(19): siRNA sense strand
gauagacuucugcguaaga

SEQ ID NO: 1997350 - RNA, 19 nt, Homo sapiens
  misc_RNA (1)...(19): siRNA sense strand
cccaugggcuggacuuaga

SEQ ID NO: 1997351 - RNA, 19 nt, Homo sapiens
  misc_RNA (1)...(19): siRNA sense strand
ucaaggggcugagugaaua

SEQ ID NO: 1997352 - RNA, 19 nt, Homo sapiens
  misc_RNA (1)...(19): siRNA sense strand
ucagaucaauuaggcauca

SEQ ID NO: 1997353 - RNA, 19 nt, Homo sapiens
  misc_RNA (1)...(19): siRNA sense strand
guuguuccuucauauaaug

SEQ ID NO: 1997354 - RNA, 19 nt, Homo sapiens
  misc_RNA (1)...(19): siRNA sense strand
auaaugaggguguaacaaa

SEQ ID NO: 1997355 - RNA, 19 nt, Homo sapiens
  misc_RNA (1)...(19): siRNA sense strand
aaagaagagucccuuacca

SEQ ID NO: 1997356 - RNA, 19 nt, Homo sapiens
  misc_RNA (1)...(19): siRNA sense strand
gaggguguaacaaaccaua

SEQ ID NO: 1997357 - RNA, 19 nt, Homo sapiens
  misc_RNA (1)...(19): siRNA sense strand
caaaccauacaccaguuaa

SEQ ID NO: 1997358 - RNA, 19 nt, Homo sapiens
  misc_RNA (1)...(19): siRNA sense strand
gaacuggaacauucuacca

SEQ ID NO: 1997359 - RNA, 19 nt, Homo sapiens
  misc_RNA (1)...(19): siRNA sense strand
uaaugaggguguaacaaac

SEQ ID NO: 1997360 - RNA, 19 nt, Homo sapiens
  misc_RNA (1)...(19): siRNA sense strand
aauuaggcaucacgaaaga

SEQ ID NO: 1997361 - RNA, 19 nt, Homo sapiens
  misc_RNA (1)...(19): siRNA sense strand
gaaagagccaaguuuuauu

SEQ ID NO: 1997362 - RNA, 19 nt, Homo sapiens
  misc_RNA (1)...(19): siRNA sense strand
ccauacaccaguuaaugaa

SEQ ID NO: 1997363 - RNA, 19 nt, Homo sapiens
  misc_RNA (1)...(19): siRNA sense strand
acaaaccauacaccaguua

SEQ ID NO: 1997364 - RNA, 19 nt, Homo sapiens
  misc_RNA (1)...(19): siRNA sense strand
gagccaaguuuuauuucaa

SEQ ID NO: 1997365 - RNA, 19 nt, Homo sapiens
  misc_RNA (1)...(19): siRNA sense strand
ggaaaauaaugagggugua

SEQ ID NO: 1997366 - RNA, 19 nt, Homo sapiens
  misc_RNA (1)...(19): siRNA sense strand
aagaaacugcuccagcuuu

SEQ ID NO: 1997367 - RNA, 19 nt, Homo sapiens
  misc_RNA (1)...(19): siRNA sense strand
gugaauaccagaggaacuu

SEQ ID NO: 1997368 - RNA, 19 nt, Homo sapiens
  misc_RNA (1)...(19): siRNA sense strand
ggauagacuucugcguaag

SEQ ID NO: 1997369 - RNA, 19 nt, Homo sapiens
  misc_RNA (1)...(19): siRNA sense strand
caauuaggcaucacgaaag

SEQ ID NO: 1997370 - RNA, 19 nt, Homo sapiens
  misc_RNA (1)...(19): siRNA sense strand
gaaaauaaugaggguguaa

SEQ ID NO: 1997371 - RNA, 19 nt, Homo sapiens
  misc_RNA (1)...(19): siRNA sense strand
gacuguuguuccuucauau

SEQ ID NO: 1997372 - RNA, 19 nt, Homo sapiens
  misc_RNA (1)...(19): siRNA sense strand
cagaaaauguagauaaugg

SEQ ID NO: 1997373 - RNA, 19 nt, Homo sapiens
  misc_RNA (1)...(19): siRNA sense strand
cgaaagagccaaguuuuau

SEQ ID NO: 1997374 - RNA, 19 nt, Homo sapiens
  misc_RNA (1)...(19): siRNA sense strand
ucacaagaagcagaacaaa

SEQ ID NO: 1997375 - RNA, 19 nt, Homo sapiens
  misc_RNA (1)...(19): siRNA sense strand
agaaacugcuccagcuuuu

SEQ ID NO: 1997376 - RNA, 19 nt, Homo sapiens
  misc_RNA (1)...(19): siRNA sense strand
aacaaaccauacaccaguu

SEQ ID NO: 1997377 - RNA, 19 nt, Homo sapiens
  misc_RNA (1)...(19): siRNA sense strand
cauacaccaguuaaugaaa

SEQ ID NO: 1997378 - RNA, 19 nt, Homo sapiens
  misc_RNA (1)...(19): siRNA sense strand
cguaagaaagcuggauuga

SEQ ID NO: 1997379 - RNA, 19 nt, Homo sapiens
  misc_RNA (1)...(19): siRNA sense strand
auaaugccuugagaaauuc

SEQ ID NO: 1997380 - RNA, 19 nt, Homo sapiens
  misc_RNA (1)...(19): siRNA sense strand
ucauauaaugccuugagaa

SEQ ID NO: 1997381 - RNA, 19 nt, Homo sapiens
  misc_RNA (1)...(19): siRNA sense strand
ggaaacaccaaaaucacaa

SEQ ID NO: 1997382 - RNA, 19 nt, Homo sapiens
  misc_RNA (1)...(19): siRNA sense strand
gcguaagaaagcuggauug

SEQ ID NO: 1997383 - RNA, 19 nt, Homo sapiens
  misc_RNA (1)...(19): siRNA sense strand
gcaguuuguuuggaagacu

SEQ ID NO: 1997384 - RNA, 19 nt, Homo sapiens
  misc_RNA (1)...(19): siRNA sense strand
aaagaaacugcuccagcuu

SEQ ID NO: 1997385 - RNA, 19 nt, Homo sapiens
  misc_RNA (1)...(19): siRNA sense strand
aaccauacaccaguuaaug

SEQ ID NO: 1997386 - RNA, 19 nt, Homo sapiens
  misc_RNA (1)...(19): siRNA sense strand
gaaagcuggauugacuguu

SEQ ID NO: 1997387 - RNA, 19 nt, Homo sapiens
  misc_RNA (1)...(19): siRNA sense strand
aagagucccuuaccaugac

SEQ ID NO: 1997388 - RNA, 19 nt, Homo sapiens
  misc_RNA (1)...(19): siRNA sense strand
gaagagucccuuaccauga

SEQ ID NO: 1997389 - RNA, 19 nt, Homo sapiens
  misc_RNA (1)...(19): siRNA sense strand
cuaccaagguucuuucaga

SEQ ID NO: 1997390 - RNA, 19 nt, Homo sapiens
  misc_RNA (1)...(19): siRNA sense strand
caaaaucucuggaguggaa

SEQ ID NO: 1997391 - RNA, 19 nt, Homo sapiens
  misc_RNA (1)...(19): siRNA sense strand
ggaauggagcuaucucaga

SEQ ID NO: 1997392 - RNA, 19 nt, Homo sapiens
  misc_RNA (1)...(19): siRNA sense strand
ggaacauucuaccaagguu

SEQ ID NO: 1997393 - RNA, 19 nt, Homo sapiens
  misc_RNA (1)...(19): siRNA sense strand
gggcuggacuuagaucaga

SEQ ID NO: 1997394 - RNA, 19 nt, Homo sapiens
  misc_RNA (1)...(19): siRNA sense strand
ucacgaaagagccaaguuu

SEQ ID NO: 1997395 - RNA, 19 nt, Homo sapiens
  misc_RNA (1)...(19): siRNA sense strand
ucaauuaggcaucacgaaa

SEQ ID NO: 1997396 - RNA, 19 nt, Homo sapiens
  misc_RNA (1)...(19): siRNA sense strand
ggaguggaauggagcuauc

SEQ ID NO: 1997397 - RNA, 19 nt, Homo sapiens
  misc_RNA (1)...(19): siRNA sense strand
uaccaugacccacagauuu

SEQ ID NO: 1997398 - RNA, 19 nt, Homo sapiens
  misc_RNA (1)...(19): siRNA sense strand
cuucagauguggaaaauaa

SEQ ID NO: 1997399 - RNA, 19 nt, Homo sapiens
  misc_RNA (1)...(19): siRNA sense strand
cccaugggcuggacuuaga

SEQ ID NO: 1997400 - RNA, 19 nt, Homo sapiens
  misc_RNA (1)...(19): siRNA sense strand
ucaaggggcugagugaaua

SEQ ID NO: 1997401 - RNA, 19 nt, Homo sapiens
  misc_RNA (1)...(19): siRNA sense strand
ucagaucaauuaggcauca

SEQ ID NO: 1997402 - RNA, 19 nt, Homo sapiens
  misc_RNA (1)...(19): siRNA sense strand
auaaugaggguguaacaaa

SEQ ID NO: 1997403 - RNA, 19 nt, Homo sapiens
  misc_RNA (1)...(19): siRNA sense strand
aaagaagagucccuuacca

SEQ ID NO: 1997404 - RNA, 19 nt, Homo sapiens
  misc_RNA (1)...(19): siRNA sense strand
gaggguguaacaaaccaua

SEQ ID NO: 1997405 - RNA, 19 nt, Homo sapiens
  misc_RNA (1)...(19): siRNA sense strand
caaaccauacaccaguuaa

SEQ ID NO: 1997406 - RNA, 19 nt, Homo sapiens
  misc_RNA (1)...(19): siRNA sense strand
gaacuggaacauucuacca

SEQ ID NO: 1997407 - RNA, 19 nt, Homo sapiens
  misc_RNA (1)...(19): siRNA sense strand
uaaugaggguguaacaaac

SEQ ID NO: 1997408 - RNA, 19 nt, Homo sapiens
  misc_RNA (1)...(19): siRNA sense strand
aauuaggcaucacgaaaga

SEQ ID NO: 1997409 - RNA, 19 nt, Homo sapiens
  misc_RNA (1)...(19): siRNA sense strand
gaaagagccaaguuuuauu

SEQ ID NO: 1997410 - RNA, 19 nt, Homo sapiens
  misc_RNA (1)...(19): siRNA sense strand
ccauacaccaguuaaugaa

SEQ ID NO: 1997411 - RNA, 19 nt, Homo sapiens
  misc_RNA (1)...(19): siRNA sense strand
acaaaccauacaccaguua

SEQ ID NO: 1997412 - RNA, 19 nt, Homo sapiens
  misc_RNA (1)...(19): siRNA sense strand
gagccaaguuuuauuucaa

SEQ ID NO: 1997413 - RNA, 19 nt, Homo sapiens
  misc_RNA (1)...(19): siRNA sense strand
ggaaaauaaugagggugua

SEQ ID NO: 1997414 - RNA, 19 nt, Homo sapiens
  misc_RNA (1)...(19): siRNA sense strand
gugaauaccagaggaacuu

SEQ ID NO: 1997415 - RNA, 19 nt, Homo sapiens
  misc_RNA (1)...(19): siRNA sense strand
caauuaggcaucacgaaag

SEQ ID NO: 1997416 - RNA, 19 nt, Homo sapiens
  misc_RNA (1)...(19): siRNA sense strand
gaaaauaaugaggguguaa

SEQ ID NO: 1997417 - RNA, 19 nt, Homo sapiens
  misc_RNA (1)...(19): siRNA sense strand
cagaaaauguagauaaugg

SEQ ID NO: 1997418 - RNA, 19 nt, Homo sapiens
  misc_RNA (1)...(19): siRNA sense strand
cgaaagagccaaguuuuau

SEQ ID NO: 1997419 - RNA, 19 nt, Homo sapiens
  misc_RNA (1)...(19): siRNA sense strand
ucacaagaagcagaacaaa

SEQ ID NO: 1997420 - RNA, 19 nt, Homo sapiens
  misc_RNA (1)...(19): siRNA sense strand
aacaaaccauacaccaguu

SEQ ID NO: 1997421 - RNA, 19 nt, Homo sapiens
  misc_RNA (1)...(19): siRNA sense strand
cauacaccaguuaaugaaa

SEQ ID NO: 1997422 - RNA, 19 nt, Homo sapiens
  misc_RNA (1)...(19): siRNA sense strand
ggaaacaccaaaaucacaa

SEQ ID NO: 1997423 - RNA, 19 nt, Homo sapiens
  misc_RNA (1)...(19): siRNA sense strand
aagagucccuuaccaugac

SEQ ID NO: 1997424 - RNA, 19 nt, Homo sapiens
  misc_RNA (1)...(19): siRNA sense strand
aaccauacaccaguuaaug

SEQ ID NO: 1997425 - RNA, 19 nt, Homo sapiens
  misc_RNA (1)...(19): siRNA sense strand
ggaagaaauucaccgauga

SEQ ID NO: 1997426 - RNA, 19 nt, Homo sapiens
  misc_RNA (1)...(19): siRNA sense strand
gagcagauaucaaaguguu

SEQ ID NO: 1997427 - RNA, 19 nt, Homo sapiens
  misc_RNA (1)...(19): siRNA sense strand
cgagaaaucuuccuguuca

SEQ ID NO: 1997428 - RNA, 19 nt, Homo sapiens
  misc_RNA (1)...(19): siRNA sense strand
ucaccaagaucuuccagaa

SEQ ID NO: 1997429 - RNA, 19 nt, Homo sapiens
  misc_RNA (1)...(19): siRNA sense strand
ggaugcaguucuccuuuga

SEQ ID NO: 1997430 - RNA, 19 nt, Homo sapiens
  misc_RNA (1)...(19): siRNA sense strand
cuagaggacuucaucaaga

SEQ ID NO: 1997431 - RNA, 19 nt, Homo sapiens
  misc_RNA (1)...(19): siRNA sense strand
ggacgauggugaggacauu

SEQ ID NO: 1997432 - RNA, 19 nt, Homo sapiens
  misc_RNA (1)...(19): siRNA sense strand
ggacuacaccagcgagaaa

SEQ ID NO: 1997433 - RNA, 19 nt, Homo sapiens
  misc_RNA (1)...(19): siRNA sense strand
gcagauaucaaaguguuaa

SEQ ID NO: 1997434 - RNA, 19 nt, Homo sapiens
  misc_RNA (1)...(19): siRNA sense strand
agagagcaauguggaauuu

SEQ ID NO: 1997435 - RNA, 19 nt, Homo sapiens
  misc_RNA (1)...(19): siRNA sense strand
uagaggacuucaucaagaa

SEQ ID NO: 1997436 - RNA, 19 nt, Homo sapiens
  misc_RNA (1)...(19): siRNA sense strand
ccagugcucuagccucaaa

SEQ ID NO: 1997437 - RNA, 19 nt, Homo sapiens
  misc_RNA (1)...(19): siRNA sense strand
gcaagcagaccuaccacaa

SEQ ID NO: 1997438 - RNA, 19 nt, Homo sapiens
  misc_RNA (1)...(19): siRNA sense strand
gacaguccuucuccuugua

SEQ ID NO: 1997439 - RNA, 19 nt, Homo sapiens
  misc_RNA (1)...(19): siRNA sense strand
aaaugaagcuagaggacuu

SEQ ID NO: 1997440 - RNA, 19 nt, Homo sapiens
  misc_RNA (1)...(19): siRNA sense strand
gcagcuccaugucagagaa

SEQ ID NO: 1997441 - RNA, 19 nt, Homo sapiens
  misc_RNA (1)...(19): siRNA sense strand
ggauugugcuguccaacau

SEQ ID NO: 1997442 - RNA, 19 nt, Homo sapiens
  misc_RNA (1)...(19): siRNA sense strand
cgacaguccuucuccuugu

SEQ ID NO: 1997443 - RNA, 19 nt, Homo sapiens
  misc_RNA (1)...(19): siRNA sense strand
gagaaaucuuccuguucaa

SEQ ID NO: 1997444 - RNA, 19 nt, Homo sapiens
  misc_RNA (1)...(19): siRNA sense strand
ucaagaggcagagugcuua

SEQ ID NO: 1997445 - RNA, 19 nt, Homo sapiens
  misc_RNA (1)...(19): siRNA sense strand
aagcaggucucagugacua

SEQ ID NO: 1997446 - RNA, 19 nt, Homo sapiens
  misc_RNA (1)...(19): siRNA sense strand
gagaagcacaggauagagu

SEQ ID NO: 1997447 - RNA, 19 nt, Homo sapiens
  misc_RNA (1)...(19): siRNA sense strand
agucggagcucgagaagca

SEQ ID NO: 1997448 - RNA, 19 nt, Homo sapiens
  misc_RNA (1)...(19): siRNA sense strand
ggacucgccugccuuuagc

SEQ ID NO: 1997449 - RNA, 19 nt, Homo sapiens
  misc_RNA (1)...(19): siRNA sense strand
agagcaauguggaauuuca

SEQ ID NO: 1997450 - RNA, 19 nt, Homo sapiens
  misc_RNA (1)...(19): siRNA sense strand
caacugcagcuccgaguca

SEQ ID NO: 1997451 - RNA, 19 nt, Homo sapiens
  misc_RNA (1)...(19): siRNA sense strand
cgucagugcugugcuccua

SEQ ID NO: 1997452 - RNA, 19 nt, Homo sapiens
  misc_RNA (1)...(19): siRNA sense strand
gcagggcagucccaagcau

SEQ ID NO: 1997453 - RNA, 19 nt, Homo sapiens
  misc_RNA (1)...(19): siRNA sense strand
gauggagaagcacaggaua

SEQ ID NO: 1997454 - RNA, 19 nt, Homo sapiens
  misc_RNA (1)...(19): siRNA sense strand
gggaguccauugcggaagu

SEQ ID NO: 1997455 - RNA, 19 nt, Homo sapiens
  misc_RNA (1)...(19): siRNA sense strand
cggagcagauaucaaagug

SEQ ID NO: 1997456 - RNA, 19 nt, Homo sapiens
  misc_RNA (1)...(19): siRNA sense strand
aguaccagaugaacaagaa

SEQ ID NO: 1997457 - RNA, 19 nt, Homo sapiens
  misc_RNA (1)...(19): siRNA sense strand
gcaaccggcagaagcaguu

SEQ ID NO: 1997458 - RNA, 19 nt, Homo sapiens
  misc_RNA (1)...(19): siRNA sense strand
gcagaugaucggcgaguuc

SEQ ID NO: 1997459 - RNA, 19 nt, Homo sapiens
  misc_RNA (1)...(19): siRNA sense strand
gacaaugacagcaucaaca

SEQ ID NO: 1997460 - RNA, 19 nt, Homo sapiens
  misc_RNA (1)...(19): siRNA sense strand
gggaagcaggucucaguga

SEQ ID NO: 1997461 - RNA, 19 nt, Homo sapiens
  misc_RNA (1)...(19): siRNA sense strand
gccaguaccagaugaacaa

SEQ ID NO: 1997462 - RNA, 19 nt, Homo sapiens
  misc_RNA (1)...(19): siRNA sense strand
cgggaucgcuagagagcaa

SEQ ID NO: 1997463 - RNA, 19 nt, Homo sapiens
  misc_RNA (1)...(19): siRNA sense strand
agaagaacucggugacgua

SEQ ID NO: 1997464 - RNA, 19 nt, Homo sapiens
  misc_RNA (1)...(19): siRNA sense strand
caacaagaagccugagaag

SEQ ID NO: 1997465 - RNA, 19 nt, Homo sapiens
  misc_RNA (1)...(19): siRNA sense strand
gcgagaaaucuuccuguuc

SEQ ID NO: 1997466 - RNA, 19 nt, Homo sapiens
  misc_RNA (1)...(19): siRNA sense strand
gaagguggagaagcucauu

SEQ ID NO: 1997467 - RNA, 19 nt, Homo sapiens
  misc_RNA (1)...(19): siRNA sense strand
gcaucggccugaaccucuu

SEQ ID NO: 1997468 - RNA, 19 nt, Homo sapiens
  misc_RNA (1)...(19): siRNA sense strand
cucaagaccggaagaaauu

SEQ ID NO: 1997469 - RNA, 19 nt, Homo sapiens
  misc_RNA (1)...(19): siRNA sense strand
ccucaagaccggaagaaau

SEQ ID NO: 1997470 - RNA, 19 nt, Homo sapiens
  misc_RNA (1)...(19): siRNA sense strand
ucaacaagaagccugagaa

SEQ ID NO: 1997471 - RNA, 19 nt, Homo sapiens
  misc_RNA (1)...(19): siRNA sense strand
caucgagcguggcuuugug

SEQ ID NO: 1997472 - RNA, 19 nt, Homo sapiens
  misc_RNA (1)...(19): siRNA sense strand
gcuagaggacuucaucaag

SEQ ID NO: 1997473 - RNA, 19 nt, Homo sapiens
  misc_RNA (1)...(19): siRNA sense strand
gcugaacaccgacauguac

SEQ ID NO: 1997474 - RNA, 19 nt, Homo sapiens
  misc_RNA (1)...(19): siRNA sense strand
cuacucagacggugacaau

SEQ ID NO: 1997475 - RNA, 19 nt, Homo sapiens
  misc_RNA (1)...(19): siRNA sense strand
gggacucgccugccuuuag

SEQ ID NO: 1997476 - RNA, 19 nt, Homo sapiens
  misc_RNA (1)...(19): siRNA sense strand
gcacguccaacuccaacga

SEQ ID NO: 1997477 - RNA, 19 nt, Homo sapiens
  misc_RNA (1)...(19): siRNA sense strand
acucagacggugacaauga

SEQ ID NO: 1997478 - RNA, 19 nt, Homo sapiens
  misc_RNA (1)...(19): siRNA sense strand
gaagaaauucaccgaugac

SEQ ID NO: 1997479 - RNA, 19 nt, Homo sapiens
  misc_RNA (1)...(19): siRNA sense strand
ccaacgauaccaucaacug

SEQ ID NO: 1997480 - RNA, 19 nt, Homo sapiens
  misc_RNA (1)...(19): siRNA sense strand
ccucaucgagcguggcuuu

SEQ ID NO: 1997481 - RNA, 19 nt, Homo sapiens
  misc_RNA (1)...(19): siRNA sense strand
agcgagagcuaaagaccaa

SEQ ID NO: 1997482 - RNA, 19 nt, Homo sapiens
  misc_RNA (1)...(19): siRNA sense strand
cggcauggaccaccgcaaa

SEQ ID NO: 1997483 - RNA, 19 nt, Homo sapiens
  misc_RNA (1)...(19): siRNA sense strand
gcuacugccggcucuuuga

SEQ ID NO: 1997484 - RNA, 19 nt, Homo sapiens
  misc_RNA (1)...(19): siRNA sense strand
gagagcuaaagaccaauga

SEQ ID NO: 1997485 - RNA, 19 nt, Homo sapiens
  misc_RNA (1)...(19): siRNA sense strand
gaaauuccaggcgcacauc

SEQ ID NO: 1997486 - RNA, 19 nt, Homo sapiens
  misc_RNA (1)...(19): siRNA sense strand
gcucuguggaccuuaguga

SEQ ID NO: 1997487 - RNA, 19 nt, Homo sapiens
  misc_RNA (1)...(19): siRNA sense strand
caagaccggaagaaauuca

SEQ ID NO: 1997488 - RNA, 19 nt, Homo sapiens
  misc_RNA (1)...(19): siRNA sense strand
caagcagaccuaccacaag

SEQ ID NO: 1997489 - RNA, 19 nt, Homo sapiens
  misc_RNA (1)...(19): siRNA sense strand
gcuagagagcaauguggaa

SEQ ID NO: 1997490 - RNA, 19 nt, Homo sapiens
  misc_RNA (1)...(19): siRNA sense strand
cguaagcgagagcuaaaga

SEQ ID NO: 1997491 - RNA, 19 nt, Homo sapiens
  misc_RNA (1)...(19): siRNA sense strand
gccaucauccugcugaaca

SEQ ID NO: 1997492 - RNA, 19 nt, Homo sapiens
  misc_RNA (1)...(19): siRNA sense strand
gagaugacggccucguaca

SEQ ID NO: 1997493 - RNA, 19 nt, Homo sapiens
  misc_RNA (1)...(19): siRNA sense strand
uagagagcaauguggaauu

SEQ ID NO: 1997494 - RNA, 19 nt, Homo sapiens
  misc_RNA (1)...(19): siRNA sense strand
ggacauuccccgugagaug

SEQ ID NO: 1997495 - RNA, 19 nt, Homo sapiens
  misc_RNA (1)...(19): siRNA sense strand
ugacggccucguacaguga

SEQ ID NO: 1997496 - RNA, 19 nt, Homo sapiens
  misc_RNA (1)...(19): siRNA sense strand
gaugacggccucguacagu

SEQ ID NO: 1997497 - RNA, 19 nt, Homo sapiens
  misc_RNA (1)...(19): siRNA sense strand
acguacagcuuccgacagu

SEQ ID NO: 1997498 - RNA, 19 nt, Homo sapiens
  misc_RNA (1)...(19): siRNA sense strand
agaacucggugacguacag

SEQ ID NO: 1997499 - RNA, 19 nt, Homo sapiens
  misc_RNA (1)...(19): siRNA sense strand
aaaucuuccuguucaacga

SEQ ID NO: 1997500 - RNA, 19 nt, Homo sapiens
  misc_RNA (1)...(19): siRNA sense strand
caaacaagccccagaaacu

SEQ ID NO: 1997501 - RNA, 19 nt, Homo sapiens
  misc_RNA (1)...(19): siRNA sense strand
caacaugaggaugcaguuc

SEQ ID NO: 1997502 - RNA, 19 nt, Homo sapiens
  misc_RNA (1)...(19): siRNA sense strand
gaccugcgggaguccauug

SEQ ID NO: 1997503 - RNA, 19 nt, Homo sapiens
  misc_RNA (1)...(19): siRNA sense strand
agaaagugcacagcuccua

SEQ ID NO: 1997504 - RNA, 19 nt, Homo sapiens
  misc_RNA (1)...(19): siRNA sense strand
agcgagaaaucuuccuguu

SEQ ID NO: 1997505 - RNA, 19 nt, Homo sapiens
  misc_RNA (1)...(19): siRNA sense strand
ggcagaugaucggcgaguu

SEQ ID NO: 1997506 - RNA, 19 nt, Homo sapiens
  misc_RNA (1)...(19): siRNA sense strand
gcagugcgggaucgcuaga

SEQ ID NO: 1997507 - RNA, 19 nt, Homo sapiens
  misc_RNA (1)...(19): siRNA sense strand
uugcggaaguccaagagau

SEQ ID NO: 1997508 - RNA, 19 nt, Homo sapiens
  misc_RNA (1)...(19): siRNA sense strand
ccgcaugucacgccggauu

SEQ ID NO: 1997509 - RNA, 19 nt, Homo sapiens
  misc_RNA (1)...(19): siRNA sense strand
gaagcaggucucagugacu

SEQ ID NO: 1997510 - RNA, 19 nt, Homo sapiens
  misc_RNA (1)...(19): siRNA sense strand
gaacgugcccucgcucuuu

SEQ ID NO: 1997511 - RNA, 19 nt, Homo sapiens
  misc_RNA (1)...(19): siRNA sense strand
aacgugcccucgcucuuua

SEQ ID NO: 1997512 - RNA, 19 nt, Homo sapiens
  misc_RNA (1)...(19): siRNA sense strand
aagacuacuucccuuguug

SEQ ID NO: 1997513 - RNA, 19 nt, Homo sapiens
  misc_RNA (1)...(19): siRNA sense strand
acagcaagccggcuacgaa

SEQ ID NO: 1997514 - RNA, 19 nt, Homo sapiens
  misc_RNA (1)...(19): siRNA sense strand
gagccuagaggaccugcuu

SEQ ID NO: 1997515 - RNA, 19 nt, Homo sapiens
  misc_RNA (1)...(19): siRNA sense strand
uuaccagaguggacgaguu

SEQ ID NO: 1997516 - RNA, 19 nt, Homo sapiens
  misc_RNA (1)...(19): siRNA sense strand
ccagggcguucaagaagcu

SEQ ID NO: 1997517 - RNA, 19 nt, Homo sapiens
  misc_RNA (1)...(19): siRNA sense strand
ugcccucgcucuuuagcaa

SEQ ID NO: 1997518 - RNA, 19 nt, Homo sapiens
  misc_RNA (1)...(19): siRNA sense strand
uggaggagcaggucaccaa

SEQ ID NO: 1997519 - RNA, 19 nt, Homo sapiens
  misc_RNA (1)...(19): siRNA sense strand
ucuaucgccugcucaagua

SEQ ID NO: 1997520 - RNA, 19 nt, Homo sapiens
  misc_RNA (1)...(19): siRNA sense strand
gggucagcgugucccgaua

SEQ ID NO: 1997521 - RNA, 19 nt, Homo sapiens
  misc_RNA (1)...(19): siRNA sense strand
ugugcguccucuacaacua

SEQ ID NO: 1997522 - RNA, 19 nt, Homo sapiens
  misc_RNA (1)...(19): siRNA sense strand
ccuggacggucaccucuac

SEQ ID NO: 1997523 - RNA, 19 nt, Homo sapiens
  misc_RNA (1)...(19): siRNA sense strand
gacagaagcuuagagacaa

SEQ ID NO: 1997524 - RNA, 19 nt, Homo sapiens
  misc_RNA (1)...(19): siRNA sense strand
ggacagaagcuuagagaca

SEQ ID NO: 1997525 - RNA, 19 nt, Homo sapiens
  misc_RNA (1)...(19): siRNA sense strand
gguuugagcuggacagaag

SEQ ID NO: 1997526 - RNA, 19 nt, Homo sapiens
  misc_RNA (1)...(19): siRNA sense strand
gagacaaaggcuucaagaa

SEQ ID NO: 1997527 - RNA, 19 nt, Homo sapiens
  misc_RNA (1)...(19): siRNA sense strand
gcgcaagucuacccaacag

SEQ ID NO: 1997528 - RNA, 19 nt, Homo sapiens
  misc_RNA (1)...(19): siRNA sense strand
gcaucggccuccugcuuca

SEQ ID NO: 1997529 - RNA, 19 nt, Homo sapiens
  misc_RNA (1)...(19): siRNA sense strand
acagaagcuuagagacaaa

SEQ ID NO: 1997530 - RNA, 19 nt, Homo sapiens
  misc_RNA (1)...(19): siRNA sense strand
gcccagcuccuccugauca

SEQ ID NO: 1997531 - RNA, 19 nt, Homo sapiens
  misc_RNA (1)...(19): siRNA sense strand
gcucccugguguccaaaga

SEQ ID NO: 1997532 - RNA, 19 nt, Homo sapiens
  misc_RNA (1)...(19): siRNA sense strand
cggaugccauugacaaagg

SEQ ID NO: 1997533 - RNA, 19 nt, Homo sapiens
  misc_RNA (1)...(19): siRNA sense strand
gugcaucggccuccugcuu

SEQ ID NO: 1997534 - RNA, 19 nt, Homo sapiens
  misc_RNA (1)...(19): siRNA sense strand
gaggcuuuccgcucucuug

SEQ ID NO: 1997535 - RNA, 19 nt, Homo sapiens
  misc_RNA (1)...(19): siRNA sense strand
ugacaggucgguggauuuc

SEQ ID NO: 1997536 - RNA, 19 nt, Homo sapiens
  misc_RNA (1)...(19): siRNA sense strand
auuccgggcuucaccauca

SEQ ID NO: 1997537 - RNA, 19 nt, Homo sapiens
  misc_RNA (1)...(19): siRNA sense strand
agagacaaaggcuucaaga

SEQ ID NO: 1997538 - RNA, 19 nt, Homo sapiens
  misc_RNA (1)...(19): siRNA sense strand
aagcccagcuccuccugau

SEQ ID NO: 1997539 - RNA, 19 nt, Homo sapiens
  misc_RNA (1)...(19): siRNA sense strand
ggacauggauuaccaaguu

SEQ ID NO: 1997540 - RNA, 19 nt, Homo sapiens
  misc_RNA (1)...(19): siRNA sense strand
cagcauagaugaacacuuu

SEQ ID NO: 1997541 - RNA, 19 nt, Homo sapiens
  misc_RNA (1)...(19): siRNA sense strand
gaagaagggacuagccaua

SEQ ID NO: 1997542 - RNA, 19 nt, Homo sapiens
  misc_RNA (1)...(19): siRNA sense strand
ccacugauaucacugaaga

SEQ ID NO: 1997543 - RNA, 19 nt, Homo sapiens
  misc_RNA (1)...(19): siRNA sense strand
gaacugaggcauuggaaga

SEQ ID NO: 1997544 - RNA, 19 nt, Homo sapiens
  misc_RNA (1)...(19): siRNA sense strand
ugaauuugcccuagacuua

SEQ ID NO: 1997545 - RNA, 19 nt, Homo sapiens
  misc_RNA (1)...(19): siRNA sense strand
gaagagcugcuaacaguga

SEQ ID NO: 1997546 - RNA, 19 nt, Homo sapiens
  misc_RNA (1)...(19): siRNA sense strand
gaagugcugucugaagaaa

SEQ ID NO: 1997547 - RNA, 19 nt, Homo sapiens
  misc_RNA (1)...(19): siRNA sense strand
caagaagaguuugaagaaa

SEQ ID NO: 1997548 - RNA, 19 nt, Homo sapiens
  misc_RNA (1)...(19): siRNA sense strand
cuacuuaucuggacaugga

SEQ ID NO: 1997549 - RNA, 19 nt, Homo sapiens
  misc_RNA (1)...(19): siRNA sense strand
gaguaagcuuccugagaua

SEQ ID NO: 1997550 - RNA, 19 nt, Homo sapiens
  misc_RNA (1)...(19): siRNA sense strand
gaagaaaagucacguuugu

SEQ ID NO: 1997551 - RNA, 19 nt, Homo sapiens
  misc_RNA (1)...(19): siRNA sense strand
gaucaacccuacuuaucug

SEQ ID NO: 1997552 - RNA, 19 nt, Homo sapiens
  misc_RNA (1)...(19): siRNA sense strand
cgaagcagauugucaaguc

SEQ ID NO: 1997553 - RNA, 19 nt, Homo sapiens
  misc_RNA (1)...(19): siRNA sense strand
gcagaaaccacugauauca

SEQ ID NO: 1997554 - RNA, 19 nt, Homo sapiens
  misc_RNA (1)...(19): siRNA sense strand
agaguaagcuuccugagau

SEQ ID NO: 1997555 - RNA, 19 nt, Homo sapiens
  misc_RNA (1)...(19): siRNA sense strand
gaacagguuucugggacuu

SEQ ID NO: 1997556 - RNA, 19 nt, Homo sapiens
  misc_RNA (1)...(19): siRNA sense strand
gaaauucacgaaagucugu

SEQ ID NO: 1997557 - RNA, 19 nt, Homo sapiens
  misc_RNA (1)...(19): siRNA sense strand
gaagaccggucacuacacu

SEQ ID NO: 1997558 - RNA, 19 nt, Homo sapiens
  misc_RNA (1)...(19): siRNA sense strand
auaaguggcugguuucaug

SEQ ID NO: 1997559 - RNA, 19 nt, Homo sapiens
  misc_RNA (1)...(19): siRNA sense strand
gaaggagugcaugaaguua

SEQ ID NO: 1997560 - RNA, 19 nt, Homo sapiens
  misc_RNA (1)...(19): siRNA sense strand
ugagaaagcugaggagagu

SEQ ID NO: 1997561 - RNA, 19 nt, Homo sapiens
  misc_RNA (1)...(19): siRNA sense strand
gcccuagacuuaauucugu

SEQ ID NO: 1997562 - RNA, 19 nt, Homo sapiens
  misc_RNA (1)...(19): siRNA sense strand
gagaguaagcuuccugaga

SEQ ID NO: 1997563 - RNA, 19 nt, Homo sapiens
  misc_RNA (1)...(19): siRNA sense strand
gaagaugaagagcugcuaa

SEQ ID NO: 1997564 - RNA, 19 nt, Homo sapiens
  misc_RNA (1)...(19): siRNA sense strand
guucugaaauucuccugaa

SEQ ID NO: 1997565 - RNA, 19 nt, Homo sapiens
  misc_RNA (1)...(19): siRNA sense strand
gaauuugcccuagacuuaa

SEQ ID NO: 1997566 - RNA, 19 nt, Homo sapiens
  misc_RNA (1)...(19): siRNA sense strand
ugccaaaggugaagaugaa

SEQ ID NO: 1997567 - RNA, 19 nt, Homo sapiens
  misc_RNA (1)...(19): siRNA sense strand
aagaagaguuugaagaaag

SEQ ID NO: 1997568 - RNA, 19 nt, Homo sapiens
  misc_RNA (1)...(19): siRNA sense strand
aagaaagaaucaaguguuc

SEQ ID NO: 1997569 - RNA, 19 nt, Homo sapiens
  misc_RNA (1)...(19): siRNA sense strand
cagauugucaagucucuua

SEQ ID NO: 1997570 - RNA, 19 nt, Homo sapiens
  misc_RNA (1)...(19): siRNA sense strand
ugucugaagugcugucuga

SEQ ID NO: 1997571 - RNA, 19 nt, Homo sapiens
  misc_RNA (1)...(19): siRNA sense strand
aaagucacguuugucuaua

SEQ ID NO: 1997572 - RNA, 19 nt, Homo sapiens
  misc_RNA (1)...(19): siRNA sense strand
cccacaagaucaugagauu

SEQ ID NO: 1997573 - RNA, 19 nt, Homo sapiens
  misc_RNA (1)...(19): siRNA sense strand
ggauuaccaaguucaaauu

SEQ ID NO: 1997574 - RNA, 19 nt, Homo sapiens
  misc_RNA (1)...(19): siRNA sense strand
augaagagcugcuaacagu

SEQ ID NO: 1997575 - RNA, 19 nt, Homo sapiens
  misc_RNA (1)...(19): siRNA sense strand
cugaagugcugucugaaga

SEQ ID NO: 1997576 - RNA, 19 nt, Homo sapiens
  misc_RNA (1)...(19): siRNA sense strand
gacaggagcauggguggua

SEQ ID NO: 1997577 - RNA, 19 nt, Homo sapiens
  misc_RNA (1)...(19): siRNA sense strand
ugacucggccucccaacua

SEQ ID NO: 1997578 - RNA, 19 nt, Homo sapiens
  misc_RNA (1)...(19): siRNA sense strand
gaagcagauugucaagucu

SEQ ID NO: 1997579 - RNA, 19 nt, Homo sapiens
  misc_RNA (1)...(19): siRNA sense strand
uaagcuuccugagauauug

SEQ ID NO: 1997580 - RNA, 19 nt, Homo sapiens
  misc_RNA (1)...(19): siRNA sense strand
gugguacccuggaccugua

SEQ ID NO: 1997581 - RNA, 19 nt, Homo sapiens
  misc_RNA (1)...(19): siRNA sense strand
ucacguuugucuauaagug

SEQ ID NO: 1997582 - RNA, 19 nt, Homo sapiens
  misc_RNA (1)...(19): siRNA sense strand
gucuauaaguggcugguuu

SEQ ID NO: 1997583 - RNA, 19 nt, Homo sapiens
  misc_RNA (1)...(19): siRNA sense strand
caaagaaagaaucaagugu

SEQ ID NO: 1997584 - RNA, 19 nt, Homo sapiens
  misc_RNA (1)...(19): siRNA sense strand
ggaucaacccuacuuaucu

SEQ ID NO: 1997585 - RNA, 19 nt, Homo sapiens
  misc_RNA (1)...(19): siRNA sense strand
ccugagaaauucacgaaag

SEQ ID NO: 1997586 - RNA, 19 nt, Homo sapiens
  misc_RNA (1)...(19): siRNA sense strand
ccauagcaaggcugaauuu

SEQ ID NO: 1997587 - RNA, 19 nt, Homo sapiens
  misc_RNA (1)...(19): siRNA sense strand
ugaaggagugcaugaaguu

SEQ ID NO: 1997588 - RNA, 19 nt, Homo sapiens
  misc_RNA (1)...(19): siRNA sense strand
guaagcuuccugagauauu

SEQ ID NO: 1997589 - RNA, 19 nt, Homo sapiens
  misc_RNA (1)...(19): siRNA sense strand
agaaagcugaggagaguaa

SEQ ID NO: 1997590 - RNA, 19 nt, Homo sapiens
  misc_RNA (1)...(19): siRNA sense strand
agaagaguuugaagaaagu

SEQ ID NO: 1997591 - RNA, 19 nt, Homo sapiens
  misc_RNA (1)...(19): siRNA sense strand
agaaaccacugauaucacu

SEQ ID NO: 1997592 - RNA, 19 nt, Homo sapiens
  misc_RNA (1)...(19): siRNA sense strand
gcccucacaucccacaaga

SEQ ID NO: 1997593 - RNA, 19 nt, Homo sapiens
  misc_RNA (1)...(19): siRNA sense strand
cuccugagccagagaauaa

SEQ ID NO: 1997594 - RNA, 19 nt, Homo sapiens
  misc_RNA (1)...(19): siRNA sense strand
aaucaaguguucccaugug

SEQ ID NO: 1997595 - RNA, 19 nt, Homo sapiens
  misc_RNA (1)...(19): siRNA sense strand
caccgaagccuggaacaaa

SEQ ID NO: 1997596 - RNA, 19 nt, Homo sapiens
  misc_RNA (1)...(19): siRNA sense strand
uggcauuggucuacagaga

SEQ ID NO: 1997597 - RNA, 19 nt, Homo sapiens
  misc_RNA (1)...(19): siRNA sense strand
gaauauggcgguuuuacuu

SEQ ID NO: 1997598 - RNA, 19 nt, Homo sapiens
  misc_RNA (1)...(19): siRNA sense strand
gaccggucacuacacuuua

SEQ ID NO: 1997599 - RNA, 19 nt, Homo sapiens
  misc_RNA (1)...(19): siRNA sense strand
guccugugcuaaauaugaa

SEQ ID NO: 1997600 - RNA, 19 nt, Homo sapiens
  misc_RNA (1)...(19): siRNA sense strand
aagaaaaccuucccaaaca

SEQ ID NO: 1997601 - RNA, 19 nt, Homo sapiens
  misc_RNA (1)...(19): siRNA sense strand
agacuuaauucuguacugu

SEQ ID NO: 1997602 - RNA, 19 nt, Homo sapiens
  misc_RNA (1)...(19): siRNA sense strand
gccagagaauaaucagaug

SEQ ID NO: 1997603 - RNA, 19 nt, Homo sapiens
  misc_RNA (1)...(19): siRNA sense strand
aggagugcaugaaguuauu

SEQ ID NO: 1997604 - RNA, 19 nt, Homo sapiens
  misc_RNA (1)...(19): siRNA sense strand
gacauggauuaccaaguuc

SEQ ID NO: 1997605 - RNA, 19 nt, Homo sapiens
  misc_RNA (1)...(19): siRNA sense strand
gcucugaggcacuauucuu

SEQ ID NO: 1997606 - RNA, 19 nt, Homo sapiens
  misc_RNA (1)...(19): siRNA sense strand
gcccugcugugccaugaug

SEQ ID NO: 1997607 - RNA, 19 nt, Homo sapiens
  misc_RNA (1)...(19): siRNA sense strand
ggucacuacacuuuaauuc

SEQ ID NO: 1997608 - RNA, 19 nt, Homo sapiens
  misc_RNA (1)...(19): siRNA sense strand
gaaucaaguguucccaugu

SEQ ID NO: 1997609 - RNA, 19 nt, Homo sapiens
  misc_RNA (1)...(19): siRNA sense strand
gagaaauucacgaaagucu

SEQ ID NO: 1997610 - RNA, 19 nt, Homo sapiens
  misc_RNA (1)...(19): siRNA sense strand
aagucacguuugucuauaa

SEQ ID NO: 1997611 - RNA, 19 nt, Homo sapiens
  misc_RNA (1)...(19): siRNA sense strand
acaaagaaagaaucaagug

SEQ ID NO: 1997612 - RNA, 19 nt, Homo sapiens
  misc_RNA (1)...(19): siRNA sense strand
gaccauagcaaggcugaau

SEQ ID NO: 1997613 - RNA, 19 nt, Homo sapiens
  misc_RNA (1)...(19): siRNA sense strand
gaggcagaaaccacugaua

SEQ ID NO: 1997614 - RNA, 19 nt, Homo sapiens
  misc_RNA (1)...(19): siRNA sense strand
ccacaagaucaugagauuu

SEQ ID NO: 1997615 - RNA, 19 nt, Homo sapiens
  misc_RNA (1)...(19): siRNA sense strand
ucuuaagccugagaaauuc

SEQ ID NO: 1997616 - RNA, 19 nt, Homo sapiens
  misc_RNA (1)...(19): siRNA sense strand
uaacagugaauccagaaag

SEQ ID NO: 1997617 - RNA, 19 nt, Homo sapiens
  misc_RNA (1)...(19): siRNA sense strand
ccaaaggugaagaugaaga

SEQ ID NO: 1997618 - RNA, 19 nt, Homo sapiens
  misc_RNA (1)...(19): siRNA sense strand
cuucuuacauugccaaagg

SEQ ID NO: 1997619 - RNA, 19 nt, Homo sapiens
  misc_RNA (1)...(19): siRNA sense strand
aggcagaaaccacugauau

SEQ ID NO: 1997620 - RNA, 19 nt, Homo sapiens
  misc_RNA (1)...(19): siRNA sense strand
uaucuccuguguccuuuca

SEQ ID NO: 1997621 - RNA, 19 nt, Homo sapiens
  misc_RNA (1)...(19): siRNA sense strand
cugagaaauucacgaaagu

SEQ ID NO: 1997622 - RNA, 19 nt, Homo sapiens
  misc_RNA (1)...(19): siRNA sense strand
gaaaagucacguuugucua

SEQ ID NO: 1997623 - RNA, 19 nt, Homo sapiens
  misc_RNA (1)...(19): siRNA sense strand
agaccggucacuacacuuu

SEQ ID NO: 1997624 - RNA, 19 nt, Homo sapiens
  misc_RNA (1)...(19): siRNA sense strand
gauuaccaaguucaaauuc

SEQ ID NO: 1997625 - RNA, 19 nt, Homo sapiens
  misc_RNA (1)...(19): siRNA sense strand
ccucacaucccacaagauc

SEQ ID NO: 1997626 - RNA, 19 nt, Homo sapiens
  misc_RNA (1)...(19): siRNA sense strand
gcuaacagugaauccagaa

SEQ ID NO: 1997627 - RNA, 19 nt, Homo sapiens
  misc_RNA (1)...(19): siRNA sense strand
ugaaguuauuucgcucuga

SEQ ID NO: 1997628 - RNA, 19 nt, Homo sapiens
  misc_RNA (1)...(19): siRNA sense strand
ggagugcaugaaguuauuu

SEQ ID NO: 1997629 - RNA, 19 nt, Homo sapiens
  misc_RNA (1)...(19): siRNA sense strand
ggaccuguacagcauagau

SEQ ID NO: 1997630 - RNA, 19 nt, Homo sapiens
  misc_RNA (1)...(19): siRNA sense strand
gauuggaucaacccuacuu

SEQ ID NO: 1997631 - RNA, 19 nt, Homo sapiens
  misc_RNA (1)...(19): siRNA sense strand
cacaagaucaugagauuuu

SEQ ID NO: 1997632 - RNA, 19 nt, Homo sapiens
  misc_RNA (1)...(19): siRNA sense strand
caaguucaaauucaagaag

SEQ ID NO: 1997633 - RNA, 19 nt, Homo sapiens
  misc_RNA (1)...(19): siRNA sense strand
aaaccacugauaucacuga

SEQ ID NO: 1997634 - RNA, 19 nt, Homo sapiens
  misc_RNA (1)...(19): siRNA sense strand
ggcagaaaccacugauauc

SEQ ID NO: 1997635 - RNA, 19 nt, Homo sapiens
  misc_RNA (1)...(19): siRNA sense strand
cacuacacuuuaauucaug

SEQ ID NO: 1997636 - RNA, 19 nt, Homo sapiens
  misc_RNA (1)...(19): siRNA sense strand
caaaggugaagaugaagag

SEQ ID NO: 1997637 - RNA, 19 nt, Homo sapiens
  misc_RNA (1)...(19): siRNA sense strand
gaugaagagcugcuaacag

SEQ ID NO: 1997638 - RNA, 19 nt, Homo sapiens
  misc_RNA (1)...(19): siRNA sense strand
gugaauccagaaagcaauu

SEQ ID NO: 1997639 - RNA, 19 nt, Homo sapiens
  misc_RNA (1)...(19): siRNA sense strand
guaagaugcuugacaauuu

SEQ ID NO: 1997640 - RNA, 19 nt, Homo sapiens
  misc_RNA (1)...(19): siRNA sense strand
gaacuguuaugcucugaua

SEQ ID NO: 1997641 - RNA, 19 nt, Homo sapiens
  misc_RNA (1)...(19): siRNA sense strand
gaaggagacccagaaauua

SEQ ID NO: 1997642 - RNA, 19 nt, Homo sapiens
  misc_RNA (1)...(19): siRNA sense strand
gaaauucucugugaguuug

SEQ ID NO: 1997643 - RNA, 19 nt, Homo sapiens
  misc_RNA (1)...(19): siRNA sense strand
uaacacagcuacuucaguu

SEQ ID NO: 1997644 - RNA, 19 nt, Homo sapiens
  misc_RNA (1)...(19): siRNA sense strand
ugaaacagcuccucuccua

SEQ ID NO: 1997645 - RNA, 19 nt, Homo sapiens
  misc_RNA (1)...(19): siRNA sense strand
caaagaagauacucuggaa

SEQ ID NO: 1997646 - RNA, 19 nt, Homo sapiens
  misc_RNA (1)...(19): siRNA sense strand
gcauagggcuggaugagaa

SEQ ID NO: 1997647 - RNA, 19 nt, Homo sapiens
  misc_RNA (1)...(19): siRNA sense strand
gcagaaggaugaguugaaa

SEQ ID NO: 1997648 - RNA, 19 nt, Homo sapiens
  misc_RNA (1)...(19): siRNA sense strand
gaagagaggcaaccaauuc

SEQ ID NO: 1997649 - RNA, 19 nt, Homo sapiens
  misc_RNA (1)...(19): siRNA sense strand
gaagaagaauuugucaguu

SEQ ID NO: 1997650 - RNA, 19 nt, Homo sapiens
  misc_RNA (1)...(19): siRNA sense strand
cagcagagaugacagaaga

SEQ ID NO: 1997651 - RNA, 19 nt, Homo sapiens
  misc_RNA (1)...(19): siRNA sense strand
ggaggugauugaauucuuu

SEQ ID NO: 1997652 - RNA, 19 nt, Homo sapiens
  misc_RNA (1)...(19): siRNA sense strand
ucaaugagcucucccacaa

SEQ ID NO: 1997653 - RNA, 19 nt, Homo sapiens
  misc_RNA (1)...(19): siRNA sense strand
gaauuugucaguuugguua

SEQ ID NO: 1997654 - RNA, 19 nt, Homo sapiens
  misc_RNA (1)...(19): siRNA sense strand
ggagauuccugagcaaauu

SEQ ID NO: 1997655 - RNA, 19 nt, Homo sapiens
  misc_RNA (1)...(19): siRNA sense strand
ucagcaagaugauguauga

SEQ ID NO: 1997656 - RNA, 19 nt, Homo sapiens
  misc_RNA (1)...(19): siRNA sense strand
ccaaagaucccaaggagaa

SEQ ID NO: 1997657 - RNA, 19 nt, Homo sapiens
  misc_RNA (1)...(19): siRNA sense strand
gcaacugacuauggaauga

SEQ ID NO: 1997658 - RNA, 19 nt, Homo sapiens
  misc_RNA (1)...(19): siRNA sense strand
agaccaggcucuugaauau

SEQ ID NO: 1997659 - RNA, 19 nt, Homo sapiens
  misc_RNA (1)...(19): siRNA sense strand
ugccaaagcuaguuacaaa

SEQ ID NO: 1997660 - RNA, 19 nt, Homo sapiens
  misc_RNA (1)...(19): siRNA sense strand
gugauggucuuccaauuug

SEQ ID NO: 1997661 - RNA, 19 nt, Homo sapiens
  misc_RNA (1)...(19): siRNA sense strand
gggaaaugaugaacuagug

SEQ ID NO: 1997662 - RNA, 19 nt, Homo sapiens
  misc_RNA (1)...(19): siRNA sense strand
gcaacgcaaucuauaaucu

SEQ ID NO: 1997663 - RNA, 19 nt, Homo sapiens
  misc_RNA (1)...(19): siRNA sense strand
gaggaaagccagaaauugu

SEQ ID NO: 1997664 - RNA, 19 nt, Homo sapiens
  misc_RNA (1)...(19): siRNA sense strand
gagcgaggccuccguaaga

SEQ ID NO: 1997665 - RNA, 19 nt, Homo sapiens
  misc_RNA (1)...(19): siRNA sense strand
gaagaucuuucagcagaga

SEQ ID NO: 1997666 - RNA, 19 nt, Homo sapiens
  misc_RNA (1)...(19): siRNA sense strand
aaaguugucuucucaagug

SEQ ID NO: 1997667 - RNA, 19 nt, Homo sapiens
  misc_RNA (1)...(19): siRNA sense strand
gugauugaauucuuuguga

SEQ ID NO: 1997668 - RNA, 19 nt, Homo sapiens
  misc_RNA (1)...(19): siRNA sense strand
gagcauagugggagagauu

SEQ ID NO: 1997669 - RNA, 19 nt, Homo sapiens
  misc_RNA (1)...(19): siRNA sense strand
ccacuuuccuguugaugaa

SEQ ID NO: 1997670 - RNA, 19 nt, Homo sapiens
  misc_RNA (1)...(19): siRNA sense strand
ggaaauucucugugaguuu

SEQ ID NO: 1997671 - RNA, 19 nt, Homo sapiens
  misc_RNA (1)...(19): siRNA sense strand
gagaccaggcucuugaaua

SEQ ID NO: 1997672 - RNA, 19 nt, Homo sapiens
  misc_RNA (1)...(19): siRNA sense strand
agaaggagacccagaaauu

SEQ ID NO: 1997673 - RNA, 19 nt, Homo sapiens
  misc_RNA (1)...(19): siRNA sense strand
gacacuggcugccuuuguu

SEQ ID NO: 1997674 - RNA, 19 nt, Homo sapiens
  misc_RNA (1)...(19): siRNA sense strand
gaaaggacgcaucuaucaa

SEQ ID NO: 1997675 - RNA, 19 nt, Homo sapiens
  misc_RNA (1)...(19): siRNA sense strand
gggaagcaauuuagacaca

SEQ ID NO: 1997676 - RNA, 19 nt, Homo sapiens
  misc_RNA (1)...(19): siRNA sense strand
uggagaagcuagaagagaa

SEQ ID NO: 1997677 - RNA, 19 nt, Homo sapiens
  misc_RNA (1)...(19): siRNA sense strand
gaacuaauccguggcaucu

SEQ ID NO: 1997678 - RNA, 19 nt, Homo sapiens
  misc_RNA (1)...(19): siRNA sense strand
ugaguuccaucugccauua

SEQ ID NO: 1997679 - RNA, 19 nt, Homo sapiens
  misc_RNA (1)...(19): siRNA sense strand
gcaagaugauguaugaaaa

SEQ ID NO: 1997680 - RNA, 19 nt, Homo sapiens
  misc_RNA (1)...(19): siRNA sense strand
gaaaugaugaacuagugaa

SEQ ID NO: 1997681 - RNA, 19 nt, Homo sapiens
  misc_RNA (1)...(19): siRNA sense strand
ugggagagauuguaagaga

SEQ ID NO: 1997682 - RNA, 19 nt, Homo sapiens
  misc_RNA (1)...(19): siRNA sense strand
gagaaucccaccauuaauc

SEQ ID NO: 1997683 - RNA, 19 nt, Homo sapiens
  misc_RNA (1)...(19): siRNA sense strand
agaagaauuugucaguuug

SEQ ID NO: 1997684 - RNA, 19 nt, Homo sapiens
  misc_RNA (1)...(19): siRNA sense strand
gcucuugaauauauuagga

SEQ ID NO: 1997685 - RNA, 19 nt, Homo sapiens
  misc_RNA (1)...(19): siRNA sense strand
gaaucucucucugcugcua

SEQ ID NO: 1997686 - RNA, 19 nt, Homo sapiens
  misc_RNA (1)...(19): siRNA sense strand
agucagugcuaguauguaa

SEQ ID NO: 1997687 - RNA, 19 nt, Homo sapiens
  misc_RNA (1)...(19): siRNA sense strand
uaacaacccaggccucuau

SEQ ID NO: 1997688 - RNA, 19 nt, Homo sapiens
  misc_RNA (1)...(19): siRNA sense strand
gaaucaguauguugugcaa

SEQ ID NO: 1997689 - RNA, 19 nt, Homo sapiens
  misc_RNA (1)...(19): siRNA sense strand
guucuuggauacuuuacaa

SEQ ID NO: 1997690 - RNA, 19 nt, Homo sapiens
  misc_RNA (1)...(19): siRNA sense strand
gaaaacaacucccauucuc

SEQ ID NO: 1997691 - RNA, 19 nt, Homo sapiens
  misc_RNA (1)...(19): siRNA sense strand
ccaagcagguagccagaga

SEQ ID NO: 1997692 - RNA, 19 nt, Homo sapiens
  misc_RNA (1)...(19): siRNA sense strand
uagaugaauuugagcagaa

SEQ ID NO: 1997693 - RNA, 19 nt, Homo sapiens
  misc_RNA (1)...(19): siRNA sense strand
agagacaacugaagaugug

SEQ ID NO: 1997694 - RNA, 19 nt, Homo sapiens
  misc_RNA (1)...(19): siRNA sense strand
caaccaauucuucagcuuu

SEQ ID NO: 1997695 - RNA, 19 nt, Homo sapiens
  misc_RNA (1)...(19): siRNA sense strand
ucaaggacauggugaaggu

SEQ ID NO: 1997696 - RNA, 19 nt, Homo sapiens
  misc_RNA (1)...(19): siRNA sense strand
ggcaaguucugcaugauca

SEQ ID NO: 1997697 - RNA, 19 nt, Homo sapiens
  misc_RNA (1)...(19): siRNA sense strand
ugacacagaggcagaacua

SEQ ID NO: 1997698 - RNA, 19 nt, Homo sapiens
  misc_RNA (1)...(19): siRNA sense strand
ugcaggaggugauugaauu

SEQ ID NO: 1997699 - RNA, 19 nt, Homo sapiens
  misc_RNA (1)...(19): siRNA sense strand
gaggagaccaggcucuuga

SEQ ID NO: 1997700 - RNA, 19 nt, Homo sapiens
  misc_RNA (1)...(19): siRNA sense strand
uccgaacccuucagucaua

SEQ ID NO: 1997701 - RNA, 19 nt, Homo sapiens
  misc_RNA (1)...(19): siRNA sense strand
ugaaaggacgcaucuauca

SEQ ID NO: 1997702 - RNA, 19 nt, Homo sapiens
  misc_RNA (1)...(19): siRNA sense strand
ggagagauuguaagagaga

SEQ ID NO: 1997703 - RNA, 19 nt, Homo sapiens
  misc_RNA (1)...(19): siRNA sense strand
uggagaaucccaccauuaa

SEQ ID NO: 1997704 - RNA, 19 nt, Homo sapiens
  misc_RNA (1)...(19): siRNA sense strand
uauagauccuggccucaaa

SEQ ID NO: 1997705 - RNA, 19 nt, Homo sapiens
  misc_RNA (1)...(19): siRNA sense strand
uaagagagauuggacaaaa

SEQ ID NO: 1997706 - RNA, 19 nt, Homo sapiens
  misc_RNA (1)...(19): siRNA sense strand
gcaaccaauucuucagcuu

SEQ ID NO: 1997707 - RNA, 19 nt, Homo sapiens
  misc_RNA (1)...(19): siRNA sense strand
ccaucuaaaugcccucaaa

SEQ ID NO: 1997708 - RNA, 19 nt, Homo sapiens
  misc_RNA (1)...(19): siRNA sense strand
gauacaacuuugaguggau

SEQ ID NO: 1997709 - RNA, 19 nt, Homo sapiens
  misc_RNA (1)...(19): siRNA sense strand
aagaagauacucuggaauu

SEQ ID NO: 1997710 - RNA, 19 nt, Homo sapiens
  misc_RNA (1)...(19): siRNA sense strand
ggaaaugaugaacuaguga

SEQ ID NO: 1997711 - RNA, 19 nt, Homo sapiens
  misc_RNA (1)...(19): siRNA sense strand
gcagaaggagacccagaaa

SEQ ID NO: 1997712 - RNA, 19 nt, Homo sapiens
  misc_RNA (1)...(19): siRNA sense strand
agagaccaguucuuggaua

SEQ ID NO: 1997713 - RNA, 19 nt, Homo sapiens
  misc_RNA (1)...(19): siRNA sense strand
uaaaugcccucaaaaugaa

SEQ ID NO: 1997714 - RNA, 19 nt, Homo sapiens
  misc_RNA (1)...(19): siRNA sense strand
gcucagugcuacagugaag

SEQ ID NO: 1997715 - RNA, 19 nt, Homo sapiens
  misc_RNA (1)...(19): siRNA sense strand
caagugaugaguccaguga

SEQ ID NO: 1997716 - RNA, 19 nt, Homo sapiens
  misc_RNA (1)...(19): siRNA sense strand
gagauuggccaagcaggua

SEQ ID NO: 1997717 - RNA, 19 nt, Homo sapiens
  misc_RNA (1)...(19): siRNA sense strand
gcacgaggaaagccagaaa

SEQ ID NO: 1997718 - RNA, 19 nt, Homo sapiens
  misc_RNA (1)...(19): siRNA sense strand
gccaugaugucaacuccuu

SEQ ID NO: 1997719 - RNA, 19 nt, Homo sapiens
  misc_RNA (1)...(19): siRNA sense strand
gaccaguucuuggauacuu

SEQ ID NO: 1997720 - RNA, 19 nt, Homo sapiens
  misc_RNA (1)...(19): siRNA sense strand
acucuggaauuccugauaa

SEQ ID NO: 1997721 - RNA, 19 nt, Homo sapiens
  misc_RNA (1)...(19): siRNA sense strand
ccaaaguugucuucucaag

SEQ ID NO: 1997722 - RNA, 19 nt, Homo sapiens
  misc_RNA (1)...(19): siRNA sense strand
caacagcagaugacacaga

SEQ ID NO: 1997723 - RNA, 19 nt, Homo sapiens
  misc_RNA (1)...(19): siRNA sense strand
gggaagaacaggagcacaa

SEQ ID NO: 1997724 - RNA, 19 nt, Homo sapiens
  misc_RNA (1)...(19): siRNA sense strand
caucuuccaccacagcuua

SEQ ID NO: 1997725 - RNA, 19 nt, Homo sapiens
  misc_RNA (1)...(19): siRNA sense strand
cugcagcacuuugauacua

SEQ ID NO: 1997726 - RNA, 19 nt, Homo sapiens
  misc_RNA (1)...(19): siRNA sense strand
gaagaagagaggcaaccaa

SEQ ID NO: 1997727 - RNA, 19 nt, Homo sapiens
  misc_RNA (1)...(19): siRNA sense strand
ccauuaaucaccagaagaa

SEQ ID NO: 1997728 - RNA, 19 nt, Homo sapiens
  misc_RNA (1)...(19): siRNA sense strand
caagagguacuguccauca

SEQ ID NO: 1997729 - RNA, 19 nt, Homo sapiens
  misc_RNA (1)...(19): siRNA sense strand
uugaggaaauucucuguga

SEQ ID NO: 1997730 - RNA, 19 nt, Homo sapiens
  misc_RNA (1)...(19): siRNA sense strand
aggagaugcugguacagua

SEQ ID NO: 1997731 - RNA, 19 nt, Homo sapiens
  misc_RNA (1)...(19): siRNA sense strand
gaagaacaggagcacaaga

SEQ ID NO: 1997732 - RNA, 19 nt, Homo sapiens
  misc_RNA (1)...(19): siRNA sense strand
gaccuggccuacugugugu

SEQ ID NO: 1997733 - RNA, 19 nt, Homo sapiens
  misc_RNA (1)...(19): siRNA sense strand
cagcuccucuccuacauca

SEQ ID NO: 1997734 - RNA, 19 nt, Homo sapiens
  misc_RNA (1)...(19): siRNA sense strand
ucugauacgucuccuggaa

SEQ ID NO: 1997735 - RNA, 19 nt, Homo sapiens
  misc_RNA (1)...(19): siRNA sense strand
guuccacucuugcuuaaag

SEQ ID NO: 1997736 - RNA, 19 nt, Homo sapiens
  misc_RNA (1)...(19): siRNA sense strand
gaagcuagaagagaagaga

SEQ ID NO: 1997737 - RNA, 19 nt, Homo sapiens
  misc_RNA (1)...(19): siRNA sense strand
gcagaacgugucccagcua

SEQ ID NO: 1997738 - RNA, 19 nt, Homo sapiens
  misc_RNA (1)...(19): siRNA sense strand
gagaggcaaccaauucuuc

SEQ ID NO: 1997739 - RNA, 19 nt, Homo sapiens
  misc_RNA (1)...(19): siRNA sense strand
gaacgaggcucaaggaugu

SEQ ID NO: 1997740 - RNA, 19 nt, Homo sapiens
  misc_RNA (1)...(19): siRNA sense strand
gaaacaggcgccuauuuaa

SEQ ID NO: 1997741 - RNA, 19 nt, Homo sapiens
  misc_RNA (1)...(19): siRNA sense strand
ugaaacaggcgccuauuua

SEQ ID NO: 1997742 - RNA, 19 nt, Homo sapiens
  misc_RNA (1)...(19): siRNA sense strand
gcaagcuggugauuaacaa

SEQ ID NO: 1997743 - RNA, 19 nt, Homo sapiens
  misc_RNA (1)...(19): siRNA sense strand
ccaaggagcugcacaacac

SEQ ID NO: 1997744 - RNA, 19 nt, Homo sapiens
  misc_RNA (1)...(19): siRNA sense strand
gcuggaaguucgagcaguu

SEQ ID NO: 1997745 - RNA, 19 nt, Homo sapiens
  misc_RNA (1)...(19): siRNA sense strand
acggcaagcuggugauuaa

SEQ ID NO: 1997746 - RNA, 19 nt, Homo sapiens
  misc_RNA (1)...(19): siRNA sense strand
caagaacgaggcucaagga

SEQ ID NO: 1997747 - RNA, 19 nt, Homo sapiens
  misc_RNA (1)...(19): siRNA sense strand
cggcuccucuuacaacuau

SEQ ID NO: 1997748 - RNA, 19 nt, Homo sapiens
  misc_RNA (1)...(19): siRNA sense strand
aaacaggcgccuauuuaau

SEQ ID NO: 1997749 - RNA, 19 nt, Homo sapiens
  misc_RNA (1)...(19): siRNA sense strand
ggaugaaacaggcgccuau

SEQ ID NO: 1997750 - RNA, 19 nt, Homo sapiens
  misc_RNA (1)...(19): siRNA sense strand
ggacaaaauuagagaacga

SEQ ID NO: 1997751 - RNA, 19 nt, Homo sapiens
  misc_RNA (1)...(19): siRNA sense strand
aggaggagcucacgcagau

SEQ ID NO: 1997752 - RNA, 19 nt, Homo sapiens
  misc_RNA (1)...(19): siRNA sense strand
uuacaacuaugggaacgaa

SEQ ID NO: 1997753 - RNA, 19 nt, Homo sapiens
  misc_RNA (1)...(19): siRNA sense strand
ggaaggaguguuggaggaa

SEQ ID NO: 1997754 - RNA, 19 nt, Homo sapiens
  misc_RNA (1)...(19): siRNA sense strand
ggacucagacaaggaugaa

SEQ ID NO: 1997755 - RNA, 19 nt, Homo sapiens
  misc_RNA (1)...(19): siRNA sense strand
guuggaggaagcagaauuu

SEQ ID NO: 1997756 - RNA, 19 nt, Homo sapiens
  misc_RNA (1)...(19): siRNA sense strand
gcgagaaggccaagauuuu

SEQ ID NO: 1997757 - RNA, 19 nt, Homo sapiens
  misc_RNA (1)...(19): siRNA sense strand
ccuauuuaaucgacagaga

SEQ ID NO: 1997758 - RNA, 19 nt, Homo sapiens
  misc_RNA (1)...(19): siRNA sense strand
ccaaguggguccgacucaa

SEQ ID NO: 1997759 - RNA, 19 nt, Homo sapiens
  misc_RNA (1)...(19): siRNA sense strand
gaugaaacaggcgccuauu

SEQ ID NO: 1997760 - RNA, 19 nt, Homo sapiens
  misc_RNA (1)...(19): siRNA sense strand
ggaggaagcagaauuuuac

SEQ ID NO: 1997761 - RNA, 19 nt, Homo sapiens
  misc_RNA (1)...(19): siRNA sense strand
aagccgaguuccucugugu

SEQ ID NO: 1997762 - RNA, 19 nt, Homo sapiens
  misc_RNA (1)...(19): siRNA sense strand
ggaagcagaauuuuacaau

SEQ ID NO: 1997763 - RNA, 19 nt, Homo sapiens
  misc_RNA (1)...(19): siRNA sense strand
aacaggcgccuauuuaauc

SEQ ID NO: 1997764 - RNA, 19 nt, Homo sapiens
  misc_RNA (1)...(19): siRNA sense strand
uagagaacgagacagcaaa

SEQ ID NO: 1997765 - RNA, 19 nt, Homo sapiens
  misc_RNA (1)...(19): siRNA sense strand
gaacgagacagcaaaacau

SEQ ID NO: 1997766 - RNA, 19 nt, Homo sapiens
  misc_RNA (1)...(19): siRNA sense strand
ggcaagcuggugauuaaca

SEQ ID NO: 1997767 - RNA, 19 nt, Homo sapiens
  misc_RNA (1)...(19): siRNA sense strand
cagcgagaaggccaagauu

SEQ ID NO: 1997768 - RNA, 19 nt, Homo sapiens
  misc_RNA (1)...(19): siRNA sense strand
cgaagaccaagccgaguuc

SEQ ID NO: 1997769 - RNA, 19 nt, Homo sapiens
  misc_RNA (1)...(19): siRNA sense strand
caagcuggugauuaacaaa

SEQ ID NO: 1997770 - RNA, 19 nt, Homo sapiens
  misc_RNA (1)...(19): siRNA sense strand
cagcaucggcuccucuuac

SEQ ID NO: 1997771 - RNA, 19 nt, Homo sapiens
  misc_RNA (1)...(19): siRNA sense strand
acaacuaugggaacgaaga

SEQ ID NO: 1997772 - RNA, 19 nt, Homo sapiens
  misc_RNA (1)...(19): siRNA sense strand
cgaccuggacucagacaag

SEQ ID NO: 1997773 - RNA, 19 nt, Homo sapiens
  misc_RNA (1)...(19): siRNA sense strand
gaaagacucucccauguua

SEQ ID NO: 1997774 - RNA, 19 nt, Homo sapiens
  misc_RNA (1)...(19): siRNA sense strand
ggagauagaugccauuugc

SEQ ID NO: 1997775 - RNA, 19 nt, Homo sapiens
  misc_RNA (1)...(19): siRNA sense strand
gcguaaagguuguacaaga

SEQ ID NO: 1997776 - RNA, 19 nt, Homo sapiens
  misc_RNA (1)...(19): siRNA sense strand
ggaagagcaucgcccaaga

SEQ ID NO: 1997777 - RNA, 19 nt, Homo sapiens
  misc_RNA (1)...(19): siRNA sense strand
acaagaguaugaaagagua

SEQ ID NO: 1997778 - RNA, 19 nt, Homo sapiens
  misc_RNA (1)...(19): siRNA sense strand
gaaucaaaguggagagaau

SEQ ID NO: 1997779 - RNA, 19 nt, Homo sapiens
  misc_RNA (1)...(19): siRNA sense strand
ucacugaaauucuucuaga

SEQ ID NO: 1997780 - RNA, 19 nt, Homo sapiens
  misc_RNA (1)...(19): siRNA sense strand
gcaaagacaagccaaagug

SEQ ID NO: 1997781 - RNA, 19 nt, Homo sapiens
  misc_RNA (1)...(19): siRNA sense strand
gaccaaagacauguuuaua

SEQ ID NO: 1997782 - RNA, 19 nt, Homo sapiens
  misc_RNA (1)...(19): siRNA sense strand
guggagagaauagaaauua

SEQ ID NO: 1997783 - RNA, 19 nt, Homo sapiens
  misc_RNA (1)...(19): siRNA sense strand
cauuugaccuacugaauug

SEQ ID NO: 1997784 - RNA, 19 nt, Homo sapiens
  misc_RNA (1)...(19): siRNA sense strand
uaccaaauccuccggcuua

SEQ ID NO: 1997785 - RNA, 19 nt, Homo sapiens
  misc_RNA (1)...(19): siRNA sense strand
gaggauggcagcugagauu

SEQ ID NO: 1997786 - RNA, 19 nt, Homo sapiens
  misc_RNA (1)...(19): siRNA sense strand
uaaagguuguacaagagua

SEQ ID NO: 1997787 - RNA, 19 nt, Homo sapiens
  misc_RNA (1)...(19): siRNA sense strand
aagaaagacucucccaugu

SEQ ID NO: 1997788 - RNA, 19 nt, Homo sapiens
  misc_RNA (1)...(19): siRNA sense strand
caaaguggagagaauagaa

SEQ ID NO: 1997789 - RNA, 19 nt, Homo sapiens
  misc_RNA (1)...(19): siRNA sense strand
ggagauaccuuuucaugag

SEQ ID NO: 1997790 - RNA, 19 nt, Homo sapiens
  misc_RNA (1)...(19): siRNA sense strand
gcaggacuccgcacaagga

SEQ ID NO: 1997791 - RNA, 19 nt, Homo sapiens
  misc_RNA (1)...(19): siRNA sense strand
uaucuaaagcugugcaauu

SEQ ID NO: 1997792 - RNA, 19 nt, Homo sapiens
  misc_RNA (1)...(19): siRNA sense strand
gaagagcaucgcccaagau

SEQ ID NO: 1997793 - RNA, 19 nt, Homo sapiens
  misc_RNA (1)...(19): siRNA sense strand
gaucgugaccaaagacaug

SEQ ID NO: 1997794 - RNA, 19 nt, Homo sapiens
  misc_RNA (1)...(19): siRNA sense strand
gcggaugauugcugcagaa

SEQ ID NO: 1997795 - RNA, 19 nt, Homo sapiens
  misc_RNA (1)...(19): siRNA sense strand
ccauuugaccuacugaauu

SEQ ID NO: 1997796 - RNA, 19 nt, Homo sapiens
  misc_RNA (1)...(19): siRNA sense strand
gauggcagcugagauucug

SEQ ID NO: 1997797 - RNA, 19 nt, Homo sapiens
  misc_RNA (1)...(19): siRNA sense strand
uagaugccauuugcuacua

SEQ ID NO: 1997798 - RNA, 19 nt, Homo sapiens
  misc_RNA (1)...(19): siRNA sense strand
aaaugccucucuucuccua

SEQ ID NO: 1997799 - RNA, 19 nt, Homo sapiens
  misc_RNA (1)...(19): siRNA sense strand
guacaagaguaugaaagag

SEQ ID NO: 1997800 - RNA, 19 nt, Homo sapiens
  misc_RNA (1)...(19): siRNA sense strand
cguaaagguuguacaagag

SEQ ID NO: 1997801 - RNA, 19 nt, Homo sapiens
  misc_RNA (1)...(19): siRNA sense strand
uggauucagugaccuguau

SEQ ID NO: 1997802 - RNA, 19 nt, Homo sapiens
  misc_RNA (1)...(19): siRNA sense strand
aagacucucccauguuaua

SEQ ID NO: 1997803 - RNA, 19 nt, Homo sapiens
  misc_RNA (1)...(19): siRNA sense strand
aaucaaaguggagagaaua

SEQ ID NO: 1997804 - RNA, 19 nt, Homo sapiens
  misc_RNA (1)...(19): siRNA sense strand
gccaaagugcggaugauug

SEQ ID NO: 1997805 - RNA, 19 nt, Homo sapiens
  misc_RNA (1)...(19): siRNA sense strand
cuacugaauugccugucuu

SEQ ID NO: 1997806 - RNA, 19 nt, Homo sapiens
  misc_RNA (1)...(19): siRNA sense strand
agaaagacucucccauguu

SEQ ID NO: 1997807 - RNA, 19 nt, Homo sapiens
  misc_RNA (1)...(19): siRNA sense strand
cgaggaagguaccaaaucc

SEQ ID NO: 1997808 - RNA, 19 nt, Homo sapiens
  misc_RNA (1)...(19): siRNA sense strand
agauagaugccauuugcua

SEQ ID NO: 1997809 - RNA, 19 nt, Homo sapiens
  misc_RNA (1)...(19): siRNA sense strand
ggaaucaaaguggagagaa

SEQ ID NO: 1997810 - RNA, 19 nt, Homo sapiens
  misc_RNA (1)...(19): siRNA sense strand
cgcccaagaugcaaagguu

SEQ ID NO: 1997811 - RNA, 19 nt, Homo sapiens
  misc_RNA (1)...(19): siRNA sense strand
caucgaucccucacugaaa

SEQ ID NO: 1997812 - RNA, 19 nt, Homo sapiens
  misc_RNA (1)...(19): siRNA sense strand
ugaccaaagacauguuuau

SEQ ID NO: 1997813 - RNA, 19 nt, Homo sapiens
  misc_RNA (1)...(19): siRNA sense strand
ucccugcucuucaucauca

SEQ ID NO: 1997814 - RNA, 19 nt, Homo sapiens
  misc_RNA (1)...(19): siRNA sense strand
gguuuuaccuuugccauuu

SEQ ID NO: 1997815 - RNA, 19 nt, Homo sapiens
  misc_RNA (1)...(19): siRNA sense strand
aaaguggagagaauagaaa

SEQ ID NO: 1997816 - RNA, 19 nt, Homo sapiens
  misc_RNA (1)...(19): siRNA sense strand
uaugaagcgucuccuagca

SEQ ID NO: 1997817 - RNA, 19 nt, Homo sapiens
  misc_RNA (1)...(19): siRNA sense strand
caugagaucgugaccaaag

SEQ ID NO: 1997818 - RNA, 19 nt, Homo sapiens
  misc_RNA (1)...(19): siRNA sense strand
guugagccacuaaauccua

SEQ ID NO: 1997819 - RNA, 19 nt, Homo sapiens
  misc_RNA (1)...(19): siRNA sense strand
gauucagugaccuguauuu

SEQ ID NO: 1997820 - RNA, 19 nt, Homo sapiens
  misc_RNA (1)...(19): siRNA sense strand
uguacaagaguaugaaaga

SEQ ID NO: 1997821 - RNA, 19 nt, Homo sapiens
  misc_RNA (1)...(19): siRNA sense strand
gagauaccuuuucaugaga

SEQ ID NO: 1997822 - RNA, 19 nt, Homo sapiens
  misc_RNA (1)...(19): siRNA sense strand
caagaguaugaaagaguaa

SEQ ID NO: 1997823 - RNA, 19 nt, Homo sapiens
  misc_RNA (1)...(19): siRNA sense strand
guaaagguuguacaagagu

SEQ ID NO: 1997824 - RNA, 19 nt, Homo sapiens
  misc_RNA (1)...(19): siRNA sense strand
ucauuucccugcucuucau

SEQ ID NO: 1997825 - RNA, 19 nt, Homo sapiens
  misc_RNA (1)...(19): siRNA sense strand
uucaugagaucgugaccaa

SEQ ID NO: 1997826 - RNA, 19 nt, Homo sapiens
  misc_RNA (1)...(19): siRNA sense strand
gccugugaguggcuucuug

SEQ ID NO: 1997827 - RNA, 19 nt, Homo sapiens
  misc_RNA (1)...(19): siRNA sense strand
ccaaagugcggaugauugc

SEQ ID NO: 1997828 - RNA, 19 nt, Homo sapiens
  misc_RNA (1)...(19): siRNA sense strand
uugagccacuaaauccuaa

SEQ ID NO: 1997829 - RNA, 19 nt, Homo sapiens
  misc_RNA (1)...(19): siRNA sense strand
caucaugaccuucccuuuu

SEQ ID NO: 1997830 - RNA, 19 nt, Homo sapiens
  misc_RNA (1)...(19): siRNA sense strand
gcgcaaagacaagccaaag

SEQ ID NO: 1997831 - RNA, 19 nt, Homo sapiens
  misc_RNA (1)...(19): siRNA sense strand
caagccaaagugcggauga

SEQ ID NO: 1997832 - RNA, 19 nt, Homo sapiens
  misc_RNA (1)...(19): siRNA sense strand
aaacucuggagauaccuuu

SEQ ID NO: 1997833 - RNA, 19 nt, Homo sapiens
  misc_RNA (1)...(19): siRNA sense strand
cuaaagcugugcaauuccu

SEQ ID NO: 1997834 - RNA, 19 nt, Homo sapiens
  misc_RNA (1)...(19): siRNA sense strand
cagucuugcucauguaucu

SEQ ID NO: 1997835 - RNA, 19 nt, Homo sapiens
  misc_RNA (1)...(19): siRNA sense strand
aucuaaagcugugcaauuc

SEQ ID NO: 1997836 - RNA, 19 nt, Homo sapiens
  misc_RNA (1)...(19): siRNA sense strand
caaaccuguugagccacua

SEQ ID NO: 1997837 - RNA, 19 nt, Homo sapiens
  misc_RNA (1)...(19): siRNA sense strand
aaauucuucuagagaggaa

SEQ ID NO: 1997838 - RNA, 19 nt, Homo sapiens
  misc_RNA (1)...(19): siRNA sense strand
gcaauuccuugugcaaacc

SEQ ID NO: 1997839 - RNA, 19 nt, Homo sapiens
  misc_RNA (1)...(19): siRNA sense strand
cggaaaaggcugcuucuga

SEQ ID NO: 1997840 - RNA, 19 nt, Homo sapiens
  misc_RNA (1)...(19): siRNA sense strand
ugcccugccuggauaccua

SEQ ID NO: 1997841 - RNA, 19 nt, Homo sapiens
  misc_RNA (1)...(19): siRNA sense strand
gccauuugaccuacugaau

SEQ ID NO: 1997842 - RNA, 19 nt, Homo sapiens
  misc_RNA (1)...(19): siRNA sense strand
gggaaucaaaguggagaga

SEQ ID NO: 1997843 - RNA, 19 nt, Homo sapiens
  misc_RNA (1)...(19): siRNA sense strand
agaaggagaucgacgagua

SEQ ID NO: 1997844 - RNA, 19 nt, Homo sapiens
  misc_RNA (1)...(19): siRNA sense strand
ccgagacgcucacggauau

SEQ ID NO: 1997845 - RNA, 19 nt, Homo sapiens
  misc_RNA (1)...(19): siRNA sense strand
gaucgucuuugccuucuuc

SEQ ID NO: 1997846 - RNA, 19 nt, Homo sapiens
  misc_RNA (1)...(19): siRNA sense strand
ggacaccaucgaggacuua

SEQ ID NO: 1997847 - RNA, 19 nt, Homo sapiens
  misc_RNA (1)...(19): siRNA sense strand
acccaacgcuguccaacaa

SEQ ID NO: 1997848 - RNA, 19 nt, Homo sapiens
  misc_RNA (1)...(19): siRNA sense strand
ggagaucgacgaguacauc

SEQ ID NO: 1997849 - RNA, 19 nt, Homo sapiens
  misc_RNA (1)...(19): siRNA sense strand
gccgagacgcucacggaua

SEQ ID NO: 1997850 - RNA, 19 nt, Homo sapiens
  misc_RNA (1)...(19): siRNA sense strand
gcuaugagaccaugaugag

SEQ ID NO: 1997851 - RNA, 19 nt, Homo sapiens
  misc_RNA (1)...(19): siRNA sense strand
auauagugcucuccugguu

SEQ ID NO: 1997852 - RNA, 19 nt, Homo sapiens
  misc_RNA (1)...(19): siRNA sense strand
gauguacuggaucgucuuu

SEQ ID NO: 1997853 - RNA, 19 nt, Homo sapiens
  misc_RNA (1)...(19): siRNA sense strand
gaaggagaucgacgaguac

SEQ ID NO: 1997854 - RNA, 19 nt, Homo sapiens
  misc_RNA (1)...(19): siRNA sense strand
cgccaaugcugcagucaca

SEQ ID NO: 1997855 - RNA, 19 nt, Homo sapiens
  misc_RNA (1)...(19): siRNA sense strand
cgagacaagagcuaugaga

SEQ ID NO: 1997856 - RNA, 19 nt, Homo sapiens
  misc_RNA (1)...(19): siRNA sense strand
ccaacaaggagaaggagau

SEQ ID NO: 1997857 - RNA, 19 nt, Homo sapiens
  misc_RNA (1)...(19): siRNA sense strand
aagaucgccuucgugauau

SEQ ID NO: 1997858 - RNA, 19 nt, Homo sapiens
  misc_RNA (1)...(19): siRNA sense strand
caucgaggacuuaggagau

SEQ ID NO: 1997859 - RNA, 19 nt, Homo sapiens
  misc_RNA (1)...(19): siRNA sense strand
gaaccuugccgccaaugcu

SEQ ID NO: 1997860 - RNA, 19 nt, Homo sapiens
  misc_RNA (1)...(19): siRNA sense strand
gagaucgacgaguacauca

SEQ ID NO: 1997861 - RNA, 19 nt, Homo sapiens
  misc_RNA (1)...(19): siRNA sense strand
caccaucgaggacuuagga

SEQ ID NO: 1997862 - RNA, 19 nt, Homo sapiens
  misc_RNA (1)...(19): siRNA sense strand
caacaaggagaaggagauc

SEQ ID NO: 1997863 - RNA, 19 nt, Homo sapiens
  misc_RNA (1)...(19): siRNA sense strand
caacgcuguccaacaagga

SEQ ID NO: 1997864 - RNA, 19 nt, Homo sapiens
  misc_RNA (1)...(19): siRNA sense strand
gagcuaugagaccaugaug

SEQ ID NO: 1997865 - RNA, 19 nt, Homo sapiens
  misc_RNA (1)...(19): siRNA sense strand
acaaggagaaggagaucga

SEQ ID NO: 1997866 - RNA, 19 nt, Homo sapiens
  misc_RNA (1)...(19): siRNA sense strand
gagacgcucacggauauag

SEQ ID NO: 1997867 - RNA, 19 nt, Homo sapiens
  misc_RNA (1)...(19): siRNA sense strand
gauagaagcuccagagaug

SEQ ID NO: 1997868 - RNA, 19 nt, Homo sapiens
  misc_RNA (1)...(19): siRNA sense strand
ggagagagcucagcaaauc

SEQ ID NO: 1997869 - RNA, 19 nt, Homo sapiens
  misc_RNA (1)...(19): siRNA sense strand
gagauucugucuucuacaa

SEQ ID NO: 1997870 - RNA, 19 nt, Homo sapiens
  misc_RNA (1)...(19): siRNA sense strand
gggaggagauggugcugaa

SEQ ID NO: 1997871 - RNA, 19 nt, Homo sapiens
  misc_RNA (1)...(19): siRNA sense strand
guaccuacuucuuaaacaa

SEQ ID NO: 1997872 - RNA, 19 nt, Homo sapiens
  misc_RNA (1)...(19): siRNA sense strand
caccugagauucugucuuc

SEQ ID NO: 1997873 - RNA, 19 nt, Homo sapiens
  misc_RNA (1)...(19): siRNA sense strand
ggaccaccgucgucuauac

SEQ ID NO: 1997874 - RNA, 19 nt, Homo sapiens
  misc_RNA (1)...(19): siRNA sense strand
ggacuaaaccacccaaagg

SEQ ID NO: 1997875 - RNA, 19 nt, Homo sapiens
  misc_RNA (1)...(19): siRNA sense strand
gaacagucaggacacaaga

SEQ ID NO: 1997876 - RNA, 19 nt, Homo sapiens
  misc_RNA (1)...(19): siRNA sense strand
ucaauagccguaaggagua

SEQ ID NO: 1997877 - RNA, 19 nt, Homo sapiens
  misc_RNA (1)...(19): siRNA sense strand
caaagucaccugagauucu

SEQ ID NO: 1997878 - RNA, 19 nt, Homo sapiens
  misc_RNA (1)...(19): siRNA sense strand
caggaccacuggagagcua

SEQ ID NO: 1997879 - RNA, 19 nt, Homo sapiens
  misc_RNA (1)...(19): siRNA sense strand
ccaggaaguuuggccacua

SEQ ID NO: 1997880 - RNA, 19 nt, Homo sapiens
  misc_RNA (1)...(19): siRNA sense strand
gagcucagcaaaucaagga

SEQ ID NO: 1997881 - RNA, 19 nt, Homo sapiens
  misc_RNA (1)...(19): siRNA sense strand
gggacaggcucaccaaagg

SEQ ID NO: 1997882 - RNA, 19 nt, Homo sapiens
  misc_RNA (1)...(19): siRNA sense strand
ccacuuggccauggaauug

SEQ ID NO: 1997883 - RNA, 19 nt, Homo sapiens
  misc_RNA (1)...(19): siRNA sense strand
gaucaaagucaccugagau

SEQ ID NO: 1997884 - RNA, 19 nt, Homo sapiens
  misc_RNA (1)...(19): siRNA sense strand
gauggaagacagaccuuug

SEQ ID NO: 1997885 - RNA, 19 nt, Homo sapiens
  misc_RNA (1)...(19): siRNA sense strand
gaggagauggugcugaaga

SEQ ID NO: 1997886 - RNA, 19 nt, Homo sapiens
  misc_RNA (1)...(19): siRNA sense strand
gaaguuuggccacuacaca

SEQ ID NO: 1997887 - RNA, 19 nt, Homo sapiens
  misc_RNA (1)...(19): siRNA sense strand
ggaaacccagccaagagaa

SEQ ID NO: 1997888 - RNA, 19 nt, Homo sapiens
  misc_RNA (1)...(19): siRNA sense strand
gauucugucuucuacaaag

SEQ ID NO: 1997889 - RNA, 19 nt, Homo sapiens
  misc_RNA (1)...(19): siRNA sense strand
gccaagagaagaccagaga

SEQ ID NO: 1997890 - RNA, 19 nt, Homo sapiens
  misc_RNA (1)...(19): siRNA sense strand
acagcugucugcacucuau

SEQ ID NO: 1997891 - RNA, 19 nt, Homo sapiens
  misc_RNA (1)...(19): siRNA sense strand
caagagaagaccagagaca

SEQ ID NO: 1997892 - RNA, 19 nt, Homo sapiens
  misc_RNA (1)...(19): siRNA sense strand
cgucgucuauaccaucaaa

SEQ ID NO: 1997893 - RNA, 19 nt, Homo sapiens
  misc_RNA (1)...(19): siRNA sense strand
gaccaguccuacagagaca

SEQ ID NO: 1997894 - RNA, 19 nt, Homo sapiens
  misc_RNA (1)...(19): siRNA sense strand
caggagagagcucagcaaa

SEQ ID NO: 1997895 - RNA, 19 nt, Homo sapiens
  misc_RNA (1)...(19): siRNA sense strand
gagccugacugccgaacag

SEQ ID NO: 1997896 - RNA, 19 nt, Homo sapiens
  misc_RNA (1)...(19): siRNA sense strand
uucaagagcuucaguacca

SEQ ID NO: 1997897 - RNA, 19 nt, Homo sapiens
  misc_RNA (1)...(19): siRNA sense strand
ggagacaggguagcaaauc

SEQ ID NO: 1997898 - RNA, 19 nt, Homo sapiens
  misc_RNA (1)...(19): siRNA sense strand
caaagggccagacgaugga

SEQ ID NO: 1997899 - RNA, 19 nt, Homo sapiens
  misc_RNA (1)...(19): siRNA sense strand
gaaccacuucccaugugaa

SEQ ID NO: 1997900 - RNA, 19 nt, Homo sapiens
  misc_RNA (1)...(19): siRNA sense strand
ccagagacacgacaaggau

SEQ ID NO: 1997901 - RNA, 19 nt, Homo sapiens
  misc_RNA (1)...(19): siRNA sense strand
ccagaaaacuagaccacaa

SEQ ID NO: 1997902 - RNA, 19 nt, Homo sapiens
  misc_RNA (1)...(19): siRNA sense strand
cagccaaccucagcuucaa

SEQ ID NO: 1997903 - RNA, 19 nt, Homo sapiens
  misc_RNA (1)...(19): siRNA sense strand
gagauggugcugaagaagu

SEQ ID NO: 1997904 - RNA, 19 nt, Homo sapiens
  misc_RNA (1)...(19): siRNA sense strand
ccagaagccacagaucaaa

SEQ ID NO: 1997905 - RNA, 19 nt, Homo sapiens
  misc_RNA (1)...(19): siRNA sense strand
agaugaagcagaacaggaa

SEQ ID NO: 1997906 - RNA, 19 nt, Homo sapiens
  misc_RNA (1)...(19): siRNA sense strand
aggagauggugcugaagaa

SEQ ID NO: 1997907 - RNA, 19 nt, Homo sapiens
  misc_RNA (1)...(19): siRNA sense strand
aaagucaccugagauucug

SEQ ID NO: 1997908 - RNA, 19 nt, Homo sapiens
  misc_RNA (1)...(19): siRNA sense strand
agaucaaagucaccugaga

SEQ ID NO: 1997909 - RNA, 19 nt, Homo sapiens
  misc_RNA (1)...(19): siRNA sense strand
cucgaucucuggaggacua

SEQ ID NO: 1997910 - RNA, 19 nt, Homo sapiens
  misc_RNA (1)...(19): siRNA sense strand
gcagagaaccaugcuacag

SEQ ID NO: 1997911 - RNA, 19 nt, Homo sapiens
  misc_RNA (1)...(19): siRNA sense strand
gagacaggguagcaaaucc

SEQ ID NO: 1997912 - RNA, 19 nt, Homo sapiens
  misc_RNA (1)...(19): siRNA sense strand
gaugaagcagaacaggaaa

SEQ ID NO: 1997913 - RNA, 19 nt, Homo sapiens
  misc_RNA (1)...(19): siRNA sense strand
gagagagcucagcaaauca

SEQ ID NO: 1997914 - RNA, 19 nt, Homo sapiens
  misc_RNA (1)...(19): siRNA sense strand
gaaacccagccaagagaag

SEQ ID NO: 1997915 - RNA, 19 nt, Homo sapiens
  misc_RNA (1)...(19): siRNA sense strand
caggagacaggguagcaaa

SEQ ID NO: 1997916 - RNA, 19 nt, Homo sapiens
  misc_RNA (1)...(19): siRNA sense strand
agauggugcugaagaaguc

SEQ ID NO: 1997917 - RNA, 19 nt, Homo sapiens
  misc_RNA (1)...(19): siRNA sense strand
ccugagauucugucuucua

SEQ ID NO: 1997918 - RNA, 19 nt, Homo sapiens
  misc_RNA (1)...(19): siRNA sense strand
agaagccacagaucaaaga

SEQ ID NO: 1997919 - RNA, 19 nt, Homo sapiens
  misc_RNA (1)...(19): siRNA sense strand
cugcaacaggccaucaaua

SEQ ID NO: 1997920 - RNA, 19 nt, Homo sapiens
  misc_RNA (1)...(19): siRNA sense strand
cuucuuaaacaaacacuga

SEQ ID NO: 1997921 - RNA, 19 nt, Homo sapiens
  misc_RNA (1)...(19): siRNA sense strand
gcaacaggccaucaauagc

SEQ ID NO: 1997922 - RNA, 19 nt, Homo sapiens
  misc_RNA (1)...(19): siRNA sense strand
gaccugggcacgcuucagu

SEQ ID NO: 1997923 - RNA, 19 nt, Homo sapiens
  misc_RNA (1)...(19): siRNA sense strand
acuauaccauggagaucaa

SEQ ID NO: 1997924 - RNA, 19 nt, Homo sapiens
  misc_RNA (1)...(19): siRNA sense strand
caggaaguuuggccacuac

SEQ ID NO: 1997925 - RNA, 19 nt, Homo sapiens
  misc_RNA (1)...(19): siRNA sense strand
ccacagccaaccucagcuu

SEQ ID NO: 1997926 - RNA, 19 nt, Homo sapiens
  misc_RNA (1)...(19): siRNA sense strand
ugauagaagcuccagagau

SEQ ID NO: 1997927 - RNA, 19 nt, Homo sapiens
  misc_RNA (1)...(19): siRNA sense strand
agucaggacacaagaguug

SEQ ID NO: 1997928 - RNA, 19 nt, Homo sapiens
  misc_RNA (1)...(19): siRNA sense strand
ggaaccauugucccaggaa

SEQ ID NO: 1997929 - RNA, 19 nt, Homo sapiens
  misc_RNA (1)...(19): siRNA sense strand
caggaaacccagccaagag

SEQ ID NO: 1997930 - RNA, 19 nt, Homo sapiens
  misc_RNA (1)...(19): siRNA sense strand
gacuauaccauggagauca

SEQ ID NO: 1997931 - RNA, 19 nt, Homo sapiens
  misc_RNA (1)...(19): siRNA sense strand
cgcgauuccucccagagaa

SEQ ID NO: 1997932 - RNA, 19 nt, Homo sapiens
  misc_RNA (1)...(19): siRNA sense strand
acacagcugucugcacucu

SEQ ID NO: 1997933 - RNA, 19 nt, Homo sapiens
  misc_RNA (1)...(19): siRNA sense strand
agagagcucagcaaaucaa

SEQ ID NO: 1997934 - RNA, 19 nt, Homo sapiens
  misc_RNA (1)...(19): siRNA sense strand
ggucaaaucaccccacaga

SEQ ID NO: 1997935 - RNA, 19 nt, Homo sapiens
  misc_RNA (1)...(19): siRNA sense strand
ugcaacaggccaucaauag

SEQ ID NO: 1997936 - RNA, 19 nt, Homo sapiens
  misc_RNA (1)...(19): siRNA sense strand
gccaaccucagcuucaaga

SEQ ID NO: 1997937 - RNA, 19 nt, Homo sapiens
  misc_RNA (1)...(19): siRNA sense strand
gaauccagaagccacagau

SEQ ID NO: 1997938 - RNA, 19 nt, Homo sapiens
  misc_RNA (1)...(19): siRNA sense strand
acaggaaacccagccaaga

SEQ ID NO: 1997939 - RNA, 19 nt, Homo sapiens
  misc_RNA (1)...(19): siRNA sense strand
uucggaaggugucugcauu

SEQ ID NO: 1997940 - RNA, 19 nt, Homo sapiens
  misc_RNA (1)...(19): siRNA sense strand
ggccaucaauagccguaag

SEQ ID NO: 1997941 - RNA, 19 nt, Homo sapiens
  misc_RNA (1)...(19): siRNA sense strand
caauagccguaaggaguac

SEQ ID NO: 1997942 - RNA, 19 nt, Homo sapiens
  misc_RNA (1)...(19): siRNA sense strand
gcaggagacaggguagcaa

SEQ ID NO: 1997943 - RNA, 19 nt, Homo sapiens
  misc_RNA (1)...(19): siRNA sense strand
ggacuauaccauggagauc

SEQ ID NO: 1997944 - RNA, 19 nt, Homo sapiens
  misc_RNA (1)...(19): siRNA sense strand
gaaaacuagaccacaaaga

SEQ ID NO: 1997945 - RNA, 19 nt, Homo sapiens
  misc_RNA (1)...(19): siRNA sense strand
caccaaagggccagacgau

SEQ ID NO: 1997946 - RNA, 19 nt, Homo sapiens
  misc_RNA (1)...(19): siRNA sense strand
gagccugcgagcugaguau

SEQ ID NO: 1997947 - RNA, 19 nt, Homo sapiens
  misc_RNA (1)...(19): siRNA sense strand
ccacagauccccaggaagu

SEQ ID NO: 1997948 - RNA, 19 nt, Homo sapiens
  misc_RNA (1)...(19): siRNA sense strand
cacagcuccuggcuucaga

SEQ ID NO: 1997949 - RNA, 19 nt, Homo sapiens
  misc_RNA (1)...(19): siRNA sense strand
gagagggaccagucacaac

SEQ ID NO: 1997950 - RNA, 19 nt, Homo sapiens
  misc_RNA (1)...(19): siRNA sense strand
gcugaaagccuuacugaua

SEQ ID NO: 1997951 - RNA, 19 nt, Homo sapiens
  misc_RNA (1)...(19): siRNA sense strand
gaugagagcuacugugaug

SEQ ID NO: 1997952 - RNA, 19 nt, Homo sapiens
  misc_RNA (1)...(19): siRNA sense strand
acacagcugucuuugauua

SEQ ID NO: 1997953 - RNA, 19 nt, Homo sapiens
  misc_RNA (1)...(19): siRNA sense strand
uaugagagcuuucaagaug

SEQ ID NO: 1997954 - RNA, 19 nt, Homo sapiens
  misc_RNA (1)...(19): siRNA sense strand
guaguuggcagauuuguua

SEQ ID NO: 1997955 - RNA, 19 nt, Homo sapiens
  misc_RNA (1)...(19): siRNA sense strand
ggagggaucugucacacuu

SEQ ID NO: 1997956 - RNA, 19 nt, Homo sapiens
  misc_RNA (1)...(19): siRNA sense strand
gcaauucuccuugucauuu

SEQ ID NO: 1997957 - RNA, 19 nt, Homo sapiens
  misc_RNA (1)...(19): siRNA sense strand
gggcaggacuuaccgagaa

SEQ ID NO: 1997958 - RNA, 19 nt, Homo sapiens
  misc_RNA (1)...(19): siRNA sense strand
agacugaacuaccuaaaga

SEQ ID NO: 1997959 - RNA, 19 nt, Homo sapiens
  misc_RNA (1)...(19): siRNA sense strand
gaaggaggccagaaaguug

SEQ ID NO: 1997960 - RNA, 19 nt, Homo sapiens
  misc_RNA (1)...(19): siRNA sense strand
gcagugcaccgaccaguuu

SEQ ID NO: 1997961 - RNA, 19 nt, Homo sapiens
  misc_RNA (1)...(19): siRNA sense strand
gcuaaagucugccuuaaaa

SEQ ID NO: 1997962 - RNA, 19 nt, Homo sapiens
  misc_RNA (1)...(19): siRNA sense strand
gguagcagccuuucacuug

SEQ ID NO: 1997963 - RNA, 19 nt, Homo sapiens
  misc_RNA (1)...(19): siRNA sense strand
gaacagacugaacuaccua

SEQ ID NO: 1997964 - RNA, 19 nt, Homo sapiens
  misc_RNA (1)...(19): siRNA sense strand
aagcugauguggguuauaa

SEQ ID NO: 1997965 - RNA, 19 nt, Homo sapiens
  misc_RNA (1)...(19): siRNA sense strand
gcucauccuucuugauaau

SEQ ID NO: 1997966 - RNA, 19 nt, Homo sapiens
  misc_RNA (1)...(19): siRNA sense strand
ccuaaagaauggugugcua

SEQ ID NO: 1997967 - RNA, 19 nt, Homo sapiens
  misc_RNA (1)...(19): siRNA sense strand
ugaacuaccuaaagaaugg

SEQ ID NO: 1997968 - RNA, 19 nt, Homo sapiens
  misc_RNA (1)...(19): siRNA sense strand
acacaguacugguggaaga

SEQ ID NO: 1997969 - RNA, 19 nt, Homo sapiens
  misc_RNA (1)...(19): siRNA sense strand
uaaagaauggugugcuaaa

SEQ ID NO: 1997970 - RNA, 19 nt, Homo sapiens
  misc_RNA (1)...(19): siRNA sense strand
gugcuaaagucugccuuaa

SEQ ID NO: 1997971 - RNA, 19 nt, Homo sapiens
  misc_RNA (1)...(19): siRNA sense strand
ggacaggauucuggguuuc

SEQ ID NO: 1997972 - RNA, 19 nt, Homo sapiens
  misc_RNA (1)...(19): siRNA sense strand
ggaacagacugaacuaccu

SEQ ID NO: 1997973 - RNA, 19 nt, Homo sapiens
  misc_RNA (1)...(19): siRNA sense strand
cuugguaguuggcagauuu

SEQ ID NO: 1997974 - RNA, 19 nt, Homo sapiens
  misc_RNA (1)...(19): siRNA sense strand
gaagacaggaugccucucu

SEQ ID NO: 1997975 - RNA, 19 nt, Homo sapiens
  misc_RNA (1)...(19): siRNA sense strand
ggaugccucucucacacuu

SEQ ID NO: 1997976 - RNA, 19 nt, Homo sapiens
  misc_RNA (1)...(19): siRNA sense strand
uagacacaaugcagaggua

SEQ ID NO: 1997977 - RNA, 19 nt, Homo sapiens
  misc_RNA (1)...(19): siRNA sense strand
ugucuuugauuaccugauu

SEQ ID NO: 1997978 - RNA, 19 nt, Homo sapiens
  misc_RNA (1)...(19): siRNA sense strand
uuaaagcugauguggguua

SEQ ID NO: 1997979 - RNA, 19 nt, Homo sapiens
  misc_RNA (1)...(19): siRNA sense strand
gaagaaaacguccccuuau

SEQ ID NO: 1997980 - RNA, 19 nt, Homo sapiens
  misc_RNA (1)...(19): siRNA sense strand
ugaaggaggccagaaaguu

SEQ ID NO: 1997981 - RNA, 19 nt, Homo sapiens
  misc_RNA (1)...(19): siRNA sense strand
uaucaguguugcaucauuc

SEQ ID NO: 1997982 - RNA, 19 nt, Homo sapiens
  misc_RNA (1)...(19): siRNA sense strand
gaugaaggcgcuaguaugc

SEQ ID NO: 1997983 - RNA, 19 nt, Homo sapiens
  misc_RNA (1)...(19): siRNA sense strand
cacccaagcuggaccauac

SEQ ID NO: 1997984 - RNA, 19 nt, Homo sapiens
  misc_RNA (1)...(19): siRNA sense strand
ggaaguguacccugaagag

SEQ ID NO: 1997985 - RNA, 19 nt, Homo sapiens
  misc_RNA (1)...(19): siRNA sense strand
agaauggugugcuaaaguc

SEQ ID NO: 1997986 - RNA, 19 nt, Homo sapiens
  misc_RNA (1)...(19): siRNA sense strand
gggaguaugaugagagcua

SEQ ID NO: 1997987 - RNA, 19 nt, Homo sapiens
  misc_RNA (1)...(19): siRNA sense strand
cugaaagccuuacugauac

SEQ ID NO: 1997988 - RNA, 19 nt, Homo sapiens
  misc_RNA (1)...(19): siRNA sense strand
gaaguguacccugaagaga

SEQ ID NO: 1997989 - RNA, 19 nt, Homo sapiens
  misc_RNA (1)...(19): siRNA sense strand
cagcugaaagccuuacuga

SEQ ID NO: 1997990 - RNA, 19 nt, Homo sapiens
  misc_RNA (1)...(19): siRNA sense strand
gaugaugaaggcgcuagua

SEQ ID NO: 1997991 - RNA, 19 nt, Homo sapiens
  misc_RNA (1)...(19): siRNA sense strand
uggacaggauucuggguuu

SEQ ID NO: 1997992 - RNA, 19 nt, Homo sapiens
  misc_RNA (1)...(19): siRNA sense strand
uaaagggacacagcugaaa

SEQ ID NO: 1997993 - RNA, 19 nt, Homo sapiens
  misc_RNA (1)...(19): siRNA sense strand
aaagaauggugugcuaaag

SEQ ID NO: 1997994 - RNA, 19 nt, Homo sapiens
  misc_RNA (1)...(19): siRNA sense strand
caccaaaguuuuccugauu

SEQ ID NO: 1997995 - RNA, 19 nt, Homo sapiens
  misc_RNA (1)...(19): siRNA sense strand
guaugcugguuaugauaga

SEQ ID NO: 1997996 - RNA, 19 nt, Homo sapiens
  misc_RNA (1)...(19): siRNA sense strand
ggacacaguacugguggaa

SEQ ID NO: 1997997 - RNA, 19 nt, Homo sapiens
  misc_RNA (1)...(19): siRNA sense strand
ugagagcuuucaagaugau

SEQ ID NO: 1997998 - RNA, 19 nt, Homo sapiens
  misc_RNA (1)...(19): siRNA sense strand
uuaccgagaaggcaaauug

SEQ ID NO: 1997999 - RNA, 19 nt, Homo sapiens
  misc_RNA (1)...(19): siRNA sense strand
cacuuuggcuuccagaugu

SEQ ID NO: 1998000 - RNA, 19 nt, Homo sapiens
  misc_RNA (1)...(19): siRNA sense strand
gagcaccuuccuaacugua

SEQ ID NO: 1998001 - RNA, 19 nt, Homo sapiens
  misc_RNA (1)...(19): siRNA sense strand
uuuccugauugacaacuua

SEQ ID NO: 1998002 - RNA, 19 nt, Homo sapiens
  misc_RNA (1)...(19): siRNA sense strand
ccaggugggaguaugauga

SEQ ID NO: 1998003 - RNA, 19 nt, Homo sapiens
  misc_RNA (1)...(19): siRNA sense strand
cuaacuguaggaaacaaua

SEQ ID NO: 1998004 - RNA, 19 nt, Homo sapiens
  misc_RNA (1)...(19): siRNA sense strand
gcuguuagcaauucuccuu

SEQ ID NO: 1998005 - RNA, 19 nt, Homo sapiens
  misc_RNA (1)...(19): siRNA sense strand
gcacccaagcuggaccaua

SEQ ID NO: 1998006 - RNA, 19 nt, Homo sapiens
  misc_RNA (1)...(19): siRNA sense strand
uaaagcugauguggguuau

SEQ ID NO: 1998007 - RNA, 19 nt, Homo sapiens
  misc_RNA (1)...(19): siRNA sense strand
cuacugugaugcugugaag

SEQ ID NO: 1998008 - RNA, 19 nt, Homo sapiens
  misc_RNA (1)...(19): siRNA sense strand
uagcagccuuucacuugga

SEQ ID NO: 1998009 - RNA, 19 nt, Homo sapiens
  misc_RNA (1)...(19): siRNA sense strand
ugaagaaaacguccccuua

SEQ ID NO: 1998010 - RNA, 19 nt, Homo sapiens
  misc_RNA (1)...(19): siRNA sense strand
aagccuuacugauacuuga

SEQ ID NO: 1998011 - RNA, 19 nt, Homo sapiens
  misc_RNA (1)...(19): siRNA sense strand
cuaucaguguugcaucauu

SEQ ID NO: 1998012 - RNA, 19 nt, Homo sapiens
  misc_RNA (1)...(19): siRNA sense strand
augcucauccuucuugaua

SEQ ID NO: 1998013 - RNA, 19 nt, Homo sapiens
  misc_RNA (1)...(19): siRNA sense strand
cuaguaugcucauccuucu

SEQ ID NO: 1998014 - RNA, 19 nt, Homo sapiens
  misc_RNA (1)...(19): siRNA sense strand
gaaacagaaccagcuugug

SEQ ID NO: 1998015 - RNA, 19 nt, Homo sapiens
  misc_RNA (1)...(19): siRNA sense strand
ccaagaaaaucauuaaagc

SEQ ID NO: 1998016 - RNA, 19 nt, Homo sapiens
  misc_RNA (1)...(19): siRNA sense strand
ugacaacuuagauacauca

SEQ ID NO: 1998017 - RNA, 19 nt, Homo sapiens
  misc_RNA (1)...(19): siRNA sense strand
gagggccuuucaccgaaug

SEQ ID NO: 1998018 - RNA, 19 nt, Homo sapiens
  misc_RNA (1)...(19): siRNA sense strand
uagcaauucuccuugucau

SEQ ID NO: 1998019 - RNA, 19 nt, Homo sapiens
  misc_RNA (1)...(19): siRNA sense strand
uuucaaaccuaagcgguau

SEQ ID NO: 1998020 - RNA, 19 nt, Homo sapiens
  misc_RNA (1)...(19): siRNA sense strand
uaugggaagugcuauuacu

SEQ ID NO: 1998021 - RNA, 19 nt, Homo sapiens
  misc_RNA (1)...(19): siRNA sense strand
cuaaagaauggugugcuaa

SEQ ID NO: 1998022 - RNA, 19 nt, Homo sapiens
  misc_RNA (1)...(19): siRNA sense strand
guuaaucuucggacagaga

SEQ ID NO: 1998023 - RNA, 19 nt, Homo sapiens
  misc_RNA (1)...(19): siRNA sense strand
ccaaaguuuuccugauuga

SEQ ID NO: 1998024 - RNA, 19 nt, Homo sapiens
  misc_RNA (1)...(19): siRNA sense strand
cugauugacaacuuagaua

SEQ ID NO: 1998025 - RNA, 19 nt, Homo sapiens
  misc_RNA (1)...(19): siRNA sense strand
caauucuccuugucauuuu

SEQ ID NO: 1998026 - RNA, 19 nt, Homo sapiens
  misc_RNA (1)...(19): siRNA sense strand
uuuaugggaagugcuauua

SEQ ID NO: 1998027 - RNA, 19 nt, Homo sapiens
  misc_RNA (1)...(19): siRNA sense strand
gccuuucaccgaaugauga

SEQ ID NO: 1998028 - RNA, 19 nt, Homo sapiens
  misc_RNA (1)...(19): siRNA sense strand
gcugauguggguuauaaag

SEQ ID NO: 1998029 - RNA, 19 nt, Homo sapiens
  misc_RNA (1)...(19): siRNA sense strand
agggaucugucacacuuug

SEQ ID NO: 1998030 - RNA, 19 nt, Homo sapiens
  misc_RNA (1)...(19): siRNA sense strand
agaaacagaaccagcuugu

SEQ ID NO: 1998031 - RNA, 19 nt, Homo sapiens
  misc_RNA (1)...(19): siRNA sense strand
ugaaagccuuacugauacu

SEQ ID NO: 1998032 - RNA, 19 nt, Homo sapiens
  misc_RNA (1)...(19): siRNA sense strand
guaugcucauccuucuuga

SEQ ID NO: 1998033 - RNA, 19 nt, Homo sapiens
  misc_RNA (1)...(19): siRNA sense strand
ugaugaaggcgcuaguaug

SEQ ID NO: 1998034 - RNA, 19 nt, Homo sapiens
  misc_RNA (1)...(19): siRNA sense strand
acuaugagagcuuucaaga

SEQ ID NO: 1998035 - RNA, 19 nt, Homo sapiens
  misc_RNA (1)...(19): siRNA sense strand
ccaucacuaugagagcuuu

SEQ ID NO: 1998036 - RNA, 19 nt, Homo sapiens
  misc_RNA (1)...(19): siRNA sense strand
gauugacaacuuagauaca

SEQ ID NO: 1998037 - RNA, 19 nt, Homo sapiens
  misc_RNA (1)...(19): siRNA sense strand
ugccauggccaccaagaaa

SEQ ID NO: 1998038 - RNA, 19 nt, Homo sapiens
  misc_RNA (1)...(19): siRNA sense strand
uugagcaccuuccuaacug

SEQ ID NO: 1998039 - RNA, 19 nt, Homo sapiens
  misc_RNA (1)...(19): siRNA sense strand
gguaguuggcagauuuguu

SEQ ID NO: 1998040 - RNA, 19 nt, Homo sapiens
  misc_RNA (1)...(19): siRNA sense strand
gcucucugauccucaucug

SEQ ID NO: 1998041 - RNA, 19 nt, Homo sapiens
  misc_RNA (1)...(19): siRNA sense strand
aagaaaacguccccuuaug

SEQ ID NO: 1998042 - RNA, 19 nt, Homo sapiens
  misc_RNA (1)...(19): siRNA sense strand
gaaagccuuacugauacuu

SEQ ID NO: 1998043 - RNA, 19 nt, Homo sapiens
  misc_RNA (1)...(19): siRNA sense strand
cgagaaacagaaccagcuu

SEQ ID NO: 1998044 - RNA, 19 nt, Homo sapiens
  misc_RNA (1)...(19): siRNA sense strand
guuagcaauucuccuuguc

SEQ ID NO: 1998045 - RNA, 19 nt, Homo sapiens
  misc_RNA (1)...(19): siRNA sense strand
gcaaugcugaccgccauca

SEQ ID NO: 1998046 - RNA, 19 nt, Homo sapiens
  misc_RNA (1)...(19): siRNA sense strand
gcugauggagacauaaugg

SEQ ID NO: 1998047 - RNA, 19 nt, Homo sapiens
  misc_RNA (1)...(19): siRNA sense strand
guugagcaccuuccuaacu

SEQ ID NO: 1998048 - RNA, 19 nt, Homo sapiens
  misc_RNA (1)...(19): siRNA sense strand
gcugaccgccaucacuaug

SEQ ID NO: 1998049 - RNA, 19 nt, Homo sapiens
  misc_RNA (1)...(19): siRNA sense strand
acacuuuggcuuccagaug

SEQ ID NO: 1998050 - RNA, 19 nt, Homo sapiens
  misc_RNA (1)...(19): siRNA sense strand
cgaccacgcugcuuacuua

SEQ ID NO: 1998051 - RNA, 19 nt, Homo sapiens
  misc_RNA (1)...(19): siRNA sense strand
caagccugcugcuggagaa

SEQ ID NO: 1998052 - RNA, 19 nt, Homo sapiens
  misc_RNA (1)...(19): siRNA sense strand
ggacuuucuuccagcuucu

SEQ ID NO: 1998053 - RNA, 19 nt, Homo sapiens
  misc_RNA (1)...(19): siRNA sense strand
ccagagcacgugccacaug

SEQ ID NO: 1998054 - RNA, 19 nt, Homo sapiens
  misc_RNA (1)...(19): siRNA sense strand
gugcagggacucagcugaa

SEQ ID NO: 1998055 - RNA, 19 nt, Homo sapiens
  misc_RNA (1)...(19): siRNA sense strand
cuucugcuguccuucuuug

SEQ ID NO: 1998056 - RNA, 19 nt, Homo sapiens
  misc_RNA (1)...(19): siRNA sense strand
gagcagagcaagaugaaua

SEQ ID NO: 1998057 - RNA, 19 nt, Homo sapiens
  misc_RNA (1)...(19): siRNA sense strand
gaaggacuauccaagcauu

SEQ ID NO: 1998058 - RNA, 19 nt, Homo sapiens
  misc_RNA (1)...(19): siRNA sense strand
gcacaaggucuuccaguuu

SEQ ID NO: 1998059 - RNA, 19 nt, Homo sapiens
  misc_RNA (1)...(19): siRNA sense strand
gcuaucccguggaagauua

SEQ ID NO: 1998060 - RNA, 19 nt, Homo sapiens
  misc_RNA (1)...(19): siRNA sense strand
uagaagaccuuaagaagca

SEQ ID NO: 1998061 - RNA, 19 nt, Homo sapiens
  misc_RNA (1)...(19): siRNA sense strand
ccagacagcucccagacuu

SEQ ID NO: 1998062 - RNA, 19 nt, Homo sapiens
  misc_RNA (1)...(19): siRNA sense strand
ucucaucaccuuuccauua

SEQ ID NO: 1998063 - RNA, 19 nt, Homo sapiens
  misc_RNA (1)...(19): siRNA sense strand
ccaauccucuguaaauaau

SEQ ID NO: 1998064 - RNA, 19 nt, Homo sapiens
  misc_RNA (1)...(19): siRNA sense strand
gcacugcagcuguuugaaa

SEQ ID NO: 1998065 - RNA, 19 nt, Homo sapiens
  misc_RNA (1)...(19): siRNA sense strand
gaagcgauguagccucguu

SEQ ID NO: 1998066 - RNA, 19 nt, Homo sapiens
  misc_RNA (1)...(19): siRNA sense strand
caccaauccucuguaaaua

SEQ ID NO: 1998067 - RNA, 19 nt, Homo sapiens
  misc_RNA (1)...(19): siRNA sense strand
cagaagcacugcagcuguu

SEQ ID NO: 1998068 - RNA, 19 nt, Homo sapiens
  misc_RNA (1)...(19): siRNA sense strand
ccaacaaauuccuuccaaa

SEQ ID NO: 1998069 - RNA, 19 nt, Homo sapiens
  misc_RNA (1)...(19): siRNA sense strand
gaaccuagggcccuuaagu

SEQ ID NO: 1998070 - RNA, 19 nt, Homo sapiens
  misc_RNA (1)...(19): siRNA sense strand
ccaaaugccagacugauug

SEQ ID NO: 1998071 - RNA, 19 nt, Homo sapiens
  misc_RNA (1)...(19): siRNA sense strand
gauaauaaugaccuuggua

SEQ ID NO: 1998072 - RNA, 19 nt, Homo sapiens
  misc_RNA (1)...(19): siRNA sense strand
ccaccaauccucuguaaau

SEQ ID NO: 1998073 - RNA, 19 nt, Homo sapiens
  misc_RNA (1)...(19): siRNA sense strand
gaaaauugcaugcuugauu

SEQ ID NO: 1998074 - RNA, 19 nt, Homo sapiens
  misc_RNA (1)...(19): siRNA sense strand
caaauuccuuccaaacagu

SEQ ID NO: 1998075 - RNA, 19 nt, Homo sapiens
  misc_RNA (1)...(19): siRNA sense strand
ggacgacuuccaugagaaa

SEQ ID NO: 1998076 - RNA, 19 nt, Homo sapiens
  misc_RNA (1)...(19): siRNA sense strand
gcaacaguuucucauucuu

SEQ ID NO: 1998077 - RNA, 19 nt, Homo sapiens
  misc_RNA (1)...(19): siRNA sense strand
agagcaagaugaauacaau

SEQ ID NO: 1998078 - RNA, 19 nt, Homo sapiens
  misc_RNA (1)...(19): siRNA sense strand
gcggacgacuuccaugaga

SEQ ID NO: 1998079 - RNA, 19 nt, Homo sapiens
  misc_RNA (1)...(19): siRNA sense strand
caccaccaauccucuguaa

SEQ ID NO: 1998080 - RNA, 19 nt, Homo sapiens
  misc_RNA (1)...(19): siRNA sense strand
cacaaggucuuccaguuuc

SEQ ID NO: 1998081 - RNA, 19 nt, Homo sapiens
  misc_RNA (1)...(19): siRNA sense strand
caaaggagcagagcaagau

SEQ ID NO: 1998082 - RNA, 19 nt, Homo sapiens
  misc_RNA (1)...(19): siRNA sense strand
gcaaaggagcagagcaaga

SEQ ID NO: 1998083 - RNA, 19 nt, Homo sapiens
  misc_RNA (1)...(19): siRNA sense strand
ggacuucauccacgccuuu

SEQ ID NO: 1998084 - RNA, 19 nt, Homo sapiens
  misc_RNA (1)...(19): siRNA sense strand
aagcaacaguuucucauuc

SEQ ID NO: 1998085 - RNA, 19 nt, Homo sapiens
  misc_RNA (1)...(19): siRNA sense strand
caacaacacccucaacaac

SEQ ID NO: 1998086 - RNA, 19 nt, Homo sapiens
  misc_RNA (1)...(19): siRNA sense strand
cuagggcccuuaagugaga

SEQ ID NO: 1998087 - RNA, 19 nt, Homo sapiens
  misc_RNA (1)...(19): siRNA sense strand
ggacuauccaagcauuaaa

SEQ ID NO: 1998088 - RNA, 19 nt, Homo sapiens
  misc_RNA (1)...(19): siRNA sense strand
ggacguucuucuacgacaa

SEQ ID NO: 1998089 - RNA, 19 nt, Homo sapiens
  misc_RNA (1)...(19): siRNA sense strand
ggaccacagaccucuauga

SEQ ID NO: 1998090 - RNA, 19 nt, Homo sapiens
  misc_RNA (1)...(19): siRNA sense strand
caacaaauuccuuccaaac

SEQ ID NO: 1998091 - RNA, 19 nt, Homo sapiens
  misc_RNA (1)...(19): siRNA sense strand
cagacuaucucuacuuugc

SEQ ID NO: 1998092 - RNA, 19 nt, Homo sapiens
  misc_RNA (1)...(19): siRNA sense strand
guacucagacuaucucuac

SEQ ID NO: 1998093 - RNA, 19 nt, Homo sapiens
  misc_RNA (1)...(19): siRNA sense strand
auaaugaccuugguaaugg

SEQ ID NO: 1998094 - RNA, 19 nt, Homo sapiens
  misc_RNA (1)...(19): siRNA sense strand
acaguaagcagaugaacuu

SEQ ID NO: 1998095 - RNA, 19 nt, Homo sapiens
  misc_RNA (1)...(19): siRNA sense strand
gacuaucucuacuuugcaa

SEQ ID NO: 1998096 - RNA, 19 nt, Homo sapiens
  misc_RNA (1)...(19): siRNA sense strand
gccagugccuccacgaugu

SEQ ID NO: 1998097 - RNA, 19 nt, Homo sapiens
  misc_RNA (1)...(19): siRNA sense strand
caagcaacaguuucucauu

SEQ ID NO: 1998098 - RNA, 19 nt, Homo sapiens
  misc_RNA (1)...(19): siRNA sense strand
gagguuguacucagacuau

SEQ ID NO: 1998099 - RNA, 19 nt, Homo sapiens
  misc_RNA (1)...(19): siRNA sense strand
gcucuaugcuguguaccuu

SEQ ID NO: 1998100 - RNA, 19 nt, Homo sapiens
  misc_RNA (1)...(19): siRNA sense strand
ucaacagcaucacaacuag

SEQ ID NO: 1998101 - RNA, 19 nt, Homo sapiens
  misc_RNA (1)...(19): siRNA sense strand
acaaauuccuuccaaacag

SEQ ID NO: 1998102 - RNA, 19 nt, Homo sapiens
  misc_RNA (1)...(19): siRNA sense strand
caacaguuucucauucuuc

SEQ ID NO: 1998103 - RNA, 19 nt, Homo sapiens
  misc_RNA (1)...(19): siRNA sense strand
aaaggagcaucaccaccaa

SEQ ID NO: 1998104 - RNA, 19 nt, Homo sapiens
  misc_RNA (1)...(19): siRNA sense strand
gcgccugcgucuacaacaa

SEQ ID NO: 1998105 - RNA, 19 nt, Homo sapiens
  misc_RNA (1)...(19): siRNA sense strand
uaaauccgcggacgacuuc

SEQ ID NO: 1998106 - RNA, 19 nt, Homo sapiens
  misc_RNA (1)...(19): siRNA sense strand
ggaaucguccgccuaagag

SEQ ID NO: 1998107 - RNA, 19 nt, Homo sapiens
  misc_RNA (1)...(19): siRNA sense strand
aauaaugccuggacguucu

SEQ ID NO: 1998108 - RNA, 19 nt, Homo sapiens
  misc_RNA (1)...(19): siRNA sense strand
cucagacuaucucuacuuu

SEQ ID NO: 1998109 - RNA, 19 nt, Homo sapiens
  misc_RNA (1)...(19): siRNA sense strand
gccaaaugccagacugauu

SEQ ID NO: 1998110 - RNA, 19 nt, Homo sapiens
  misc_RNA (1)...(19): siRNA sense strand
ccuugguaauggcuucuua

SEQ ID NO: 1998111 - RNA, 19 nt, Homo sapiens
  misc_RNA (1)...(19): siRNA sense strand
caaguucuccgccaucaag

SEQ ID NO: 1998112 - RNA, 19 nt, Homo sapiens
  misc_RNA (1)...(19): siRNA sense strand
aaacccaagugacacaaag

SEQ ID NO: 1998113 - RNA, 19 nt, Homo sapiens
  misc_RNA (1)...(19): siRNA sense strand
cggaagcgcuuuggaaucg

SEQ ID NO: 1998114 - RNA, 19 nt, Homo sapiens
  misc_RNA (1)...(19): siRNA sense strand
aauaaugaccuugguaaug

SEQ ID NO: 1998115 - RNA, 19 nt, Homo sapiens
  misc_RNA (1)...(19): siRNA sense strand
cccaacaaauuccuuccaa

SEQ ID NO: 1998116 - RNA, 19 nt, Homo sapiens
  misc_RNA (1)...(19): siRNA sense strand
accaagagcuucugaucuc

SEQ ID NO: 1998117 - RNA, 19 nt, Homo sapiens
  misc_RNA (1)...(19): siRNA sense strand
gacaagcaacaguuucuca

SEQ ID NO: 1998118 - RNA, 19 nt, Homo sapiens
  misc_RNA (1)...(19): siRNA sense strand
uggagagguuguacucaga

SEQ ID NO: 1998119 - RNA, 19 nt, Homo sapiens
  misc_RNA (1)...(19): siRNA sense strand
ccaagagcuucugaucuca

SEQ ID NO: 1998120 - RNA, 19 nt, Homo sapiens
  misc_RNA (1)...(19): siRNA sense strand
ggacugaagggaacgaaaa

SEQ ID NO: 1998121 - RNA, 19 nt, Homo sapiens
  misc_RNA (1)...(19): siRNA sense strand
gaucucaucaccuuuccau

SEQ ID NO: 1998122 - RNA, 19 nt, Homo sapiens
  misc_RNA (1)...(19): siRNA sense strand
ugcacaaggucuuccaguu

SEQ ID NO: 1998123 - RNA, 19 nt, Homo sapiens
  misc_RNA (1)...(19): siRNA sense strand
cagcaucacaacuaggauu

SEQ ID NO: 1998124 - RNA, 19 nt, Homo sapiens
  misc_RNA (1)...(19): siRNA sense strand
cagacagcucccagacuua

SEQ ID NO: 1998125 - RNA, 19 nt, Homo sapiens
  misc_RNA (1)...(19): siRNA sense strand
gaagcacugcagcuguuug

SEQ ID NO: 1998126 - RNA, 19 nt, Homo sapiens
  misc_RNA (1)...(19): siRNA sense strand
ccaccaagagcuucugauc

SEQ ID NO: 1998127 - RNA, 19 nt, Homo sapiens
  misc_RNA (1)...(19): siRNA sense strand
gcacaccagauccaucaag

SEQ ID NO: 1998128 - RNA, 19 nt, Homo sapiens
  misc_RNA (1)...(19): siRNA sense strand
agaccgcuaucccguggaa

SEQ ID NO: 1998129 - RNA, 19 nt, Homo sapiens
  misc_RNA (1)...(19): siRNA sense strand
caucacaacuaggauugag

SEQ ID NO: 1998130 - RNA, 19 nt, Homo sapiens
  misc_RNA (1)...(19): siRNA sense strand
acaacaacacccucaacaa

SEQ ID NO: 1998131 - RNA, 19 nt, Homo sapiens
  misc_RNA (1)...(19): siRNA sense strand
cggacgacuuccaugagaa

SEQ ID NO: 1998132 - RNA, 19 nt, Homo sapiens
  misc_RNA (1)...(19): siRNA sense strand
ccuacgugcucuacuccaa

SEQ ID NO: 1998133 - RNA, 19 nt, Homo sapiens
  misc_RNA (1)...(19): siRNA sense strand
caaaugccagacugauugu

SEQ ID NO: 1998134 - RNA, 19 nt, Homo sapiens
  misc_RNA (1)...(19): siRNA sense strand
gcccaucacacagaagauu

SEQ ID NO: 1998135 - RNA, 19 nt, Homo sapiens
  misc_RNA (1)...(19): siRNA sense strand
gcuccagguugggcucuau

SEQ ID NO: 1998136 - RNA, 19 nt, Homo sapiens
  misc_RNA (1)...(19): siRNA sense strand
uugcaugcuugauuauuca

SEQ ID NO: 1998137 - RNA, 19 nt, Homo sapiens
  misc_RNA (1)...(19): siRNA sense strand
acaagcagcaggucaacug

SEQ ID NO: 1998138 - RNA, 19 nt, Homo sapiens
  misc_RNA (1)...(19): siRNA sense strand
accaauccucuguaaauaa

SEQ ID NO: 1998139 - RNA, 19 nt, Homo sapiens
  misc_RNA (1)...(19): siRNA sense strand
gugcaaaggagaaaacaaa

SEQ ID NO: 1998140 - RNA, 19 nt, Homo sapiens
  misc_RNA (1)...(19): siRNA sense strand
gggacccuguggagagguu

SEQ ID NO: 1998141 - RNA, 19 nt, Homo sapiens
  misc_RNA (1)...(19): siRNA sense strand
cagagcaagaugaauacaa

SEQ ID NO: 1998142 - RNA, 19 nt, Homo sapiens
  misc_RNA (1)...(19): siRNA sense strand
uggaaucguccgccuaaga

SEQ ID NO: 1998143 - RNA, 19 nt, Homo sapiens
  misc_RNA (1)...(19): siRNA sense strand
cugccgcacuucuacauca

SEQ ID NO: 1998144 - RNA, 19 nt, Homo sapiens
  misc_RNA (1)...(19): siRNA sense strand
gacuauccaagcauuaaau

SEQ ID NO: 1998145 - RNA, 19 nt, Homo sapiens
  misc_RNA (1)...(19): siRNA sense strand
ggcgagccaccguuucuga

SEQ ID NO: 1998146 - RNA, 19 nt, Homo sapiens
  misc_RNA (1)...(19): siRNA sense strand
ccgcacuucuacaucauag

SEQ ID NO: 1998147 - RNA, 19 nt, Homo sapiens
  misc_RNA (1)...(19): siRNA sense strand
cauccaacgucaaguacac

SEQ ID NO: 1998148 - RNA, 19 nt, Homo sapiens
  misc_RNA (1)...(19): siRNA sense strand
gcaaaggagaaaacaaaau

SEQ ID NO: 1998149 - RNA, 19 nt, Homo sapiens
  misc_RNA (1)...(19): siRNA sense strand
caugagaaagugacagaag

SEQ ID NO: 1998150 - RNA, 19 nt, Homo sapiens
  misc_RNA (1)...(19): siRNA sense strand
gagcaagaugaauacaauc

SEQ ID NO: 1998151 - RNA, 19 nt, Homo sapiens
  misc_RNA (1)...(19): siRNA sense strand
ccgcacaccagauccauca

SEQ ID NO: 1998152 - RNA, 19 nt, Homo sapiens
  misc_RNA (1)...(19): siRNA sense strand
gaccacagaccucuaugac

SEQ ID NO: 1998153 - RNA, 19 nt, Homo sapiens
  misc_RNA (1)...(19): siRNA sense strand
gucaaguucuccgccauca

SEQ ID NO: 1998154 - RNA, 19 nt, Homo sapiens
  misc_RNA (1)...(19): siRNA sense strand
ccuggacguucuucuacga

SEQ ID NO: 1998155 - RNA, 19 nt, Homo sapiens
  misc_RNA (1)...(19): siRNA sense strand
gaaucguccgccuaagaga

SEQ ID NO: 1998156 - RNA, 19 nt, Homo sapiens
  misc_RNA (1)...(19): siRNA sense strand
gagcagagcaagaugaaua

SEQ ID NO: 1998157 - RNA, 19 nt, Homo sapiens
  misc_RNA (1)...(19): siRNA sense strand
gaaggacuauccaagcauu

SEQ ID NO: 1998158 - RNA, 19 nt, Homo sapiens
  misc_RNA (1)...(19): siRNA sense strand
gcacaaggucuuccaguuu

SEQ ID NO: 1998159 - RNA, 19 nt, Homo sapiens
  misc_RNA (1)...(19): siRNA sense strand
gcuaucccguggaagauua

SEQ ID NO: 1998160 - RNA, 19 nt, Homo sapiens
  misc_RNA (1)...(19): siRNA sense strand
uagaagaccuuaagaagca

SEQ ID NO: 1998161 - RNA, 19 nt, Homo sapiens
  misc_RNA (1)...(19): siRNA sense strand
ccagacagcucccagacuu

SEQ ID NO: 1998162 - RNA, 19 nt, Homo sapiens
  misc_RNA (1)...(19): siRNA sense strand
ucucaucaccuuuccauua

SEQ ID NO: 1998163 - RNA, 19 nt, Homo sapiens
  misc_RNA (1)...(19): siRNA sense strand
ccaauccucuguaaauaau

SEQ ID NO: 1998164 - RNA, 19 nt, Homo sapiens
  misc_RNA (1)...(19): siRNA sense strand
gcacugcagcuguuugaaa

SEQ ID NO: 1998165 - RNA, 19 nt, Homo sapiens
  misc_RNA (1)...(19): siRNA sense strand
gaagcgauguagccucguu

SEQ ID NO: 1998166 - RNA, 19 nt, Homo sapiens
  misc_RNA (1)...(19): siRNA sense strand
caccaauccucuguaaaua

SEQ ID NO: 1998167 - RNA, 19 nt, Homo sapiens
  misc_RNA (1)...(19): siRNA sense strand
cagaagcacugcagcuguu

SEQ ID NO: 1998168 - RNA, 19 nt, Homo sapiens
  misc_RNA (1)...(19): siRNA sense strand
ccaacaaauuccuuccaaa

SEQ ID NO: 1998169 - RNA, 19 nt, Homo sapiens
  misc_RNA (1)...(19): siRNA sense strand
gaaccuagggcccuuaagu

SEQ ID NO: 1998170 - RNA, 19 nt, Homo sapiens
  misc_RNA (1)...(19): siRNA sense strand
ccaaaugccagacugauug

SEQ ID NO: 1998171 - RNA, 19 nt, Homo sapiens
  misc_RNA (1)...(19): siRNA sense strand
gauaauaaugaccuuggua

SEQ ID NO: 1998172 - RNA, 19 nt, Homo sapiens
  misc_RNA (1)...(19): siRNA sense strand
ccaccaauccucuguaaau

SEQ ID NO: 1998173 - RNA, 19 nt, Homo sapiens
  misc_RNA (1)...(19): siRNA sense strand
gaaaauugcaugcuugauu

SEQ ID NO: 1998174 - RNA, 19 nt, Homo sapiens
  misc_RNA (1)...(19): siRNA sense strand
caaauuccuuccaaacagu

SEQ ID NO: 1998175 - RNA, 19 nt, Homo sapiens
  misc_RNA (1)...(19): siRNA sense strand
ggacgacuuccaugagaaa

SEQ ID NO: 1998176 - RNA, 19 nt, Homo sapiens
  misc_RNA (1)...(19): siRNA sense strand
gcaacaguuucucauucuu

SEQ ID NO: 1998177 - RNA, 19 nt, Homo sapiens
  misc_RNA (1)...(19): siRNA sense strand
agagcaagaugaauacaau

SEQ ID NO: 1998178 - RNA, 19 nt, Homo sapiens
  misc_RNA (1)...(19): siRNA sense strand
gcggacgacuuccaugaga

SEQ ID NO: 1998179 - RNA, 19 nt, Homo sapiens
  misc_RNA (1)...(19): siRNA sense strand
caccaccaauccucuguaa

SEQ ID NO: 1998180 - RNA, 19 nt, Homo sapiens
  misc_RNA (1)...(19): siRNA sense strand
cacaaggucuuccaguuuc

SEQ ID NO: 1998181 - RNA, 19 nt, Homo sapiens
  misc_RNA (1)...(19): siRNA sense strand
caaaggagcagagcaagau

SEQ ID NO: 1998182 - RNA, 19 nt, Homo sapiens
  misc_RNA (1)...(19): siRNA sense strand
gcaaaggagcagagcaaga

SEQ ID NO: 1998183 - RNA, 19 nt, Homo sapiens
  misc_RNA (1)...(19): siRNA sense strand
ggacuucauccacgccuuu

SEQ ID NO: 1998184 - RNA, 19 nt, Homo sapiens
  misc_RNA (1)...(19): siRNA sense strand
aagcaacaguuucucauuc

SEQ ID NO: 1998185 - RNA, 19 nt, Homo sapiens
  misc_RNA (1)...(19): siRNA sense strand
caacaacacccucaacaac

SEQ ID NO: 1998186 - RNA, 19 nt, Homo sapiens
  misc_RNA (1)...(19): siRNA sense strand
ggacuauccaagcauuaaa

SEQ ID NO: 1998187 - RNA, 19 nt, Homo sapiens
  misc_RNA (1)...(19): siRNA sense strand
ggacguucuucuacgacaa

SEQ ID NO: 1998188 - RNA, 19 nt, Homo sapiens
  misc_RNA (1)...(19): siRNA sense strand
ggaccacagaccucuauga

SEQ ID NO: 1998189 - RNA, 19 nt, Homo sapiens
  misc_RNA (1)...(19): siRNA sense strand
caacaaauuccuuccaaac

SEQ ID NO: 1998190 - RNA, 19 nt, Homo sapiens
  misc_RNA (1)...(19): siRNA sense strand
cagacuaucucuacuuugc

SEQ ID NO: 1998191 - RNA, 19 nt, Homo sapiens
  misc_RNA (1)...(19): siRNA sense strand
guacucagacuaucucuac

SEQ ID NO: 1998192 - RNA, 19 nt, Homo sapiens
  misc_RNA (1)...(19): siRNA sense strand
auaaugaccuugguaaugg

SEQ ID NO: 1998193 - RNA, 19 nt, Homo sapiens
  misc_RNA (1)...(19): siRNA sense strand
gacuaucucuacuuugcaa

SEQ ID NO: 1998194 - RNA, 19 nt, Homo sapiens
  misc_RNA (1)...(19): siRNA sense strand
acaguaagcagaugaacuu

SEQ ID NO: 1998195 - RNA, 19 nt, Homo sapiens
  misc_RNA (1)...(19): siRNA sense strand
gccagugccuccacgaugu

SEQ ID NO: 1998196 - RNA, 19 nt, Homo sapiens
  misc_RNA (1)...(19): siRNA sense strand
caagcaacaguuucucauu

SEQ ID NO: 1998197 - RNA, 19 nt, Homo sapiens
  misc_RNA (1)...(19): siRNA sense strand
gagguuguacucagacuau

SEQ ID NO: 1998198 - RNA, 19 nt, Homo sapiens
  misc_RNA (1)...(19): siRNA sense strand
gcucuaugcuguguaccuu

SEQ ID NO: 1998199 - RNA, 19 nt, Homo sapiens
  misc_RNA (1)...(19): siRNA sense strand
ucaacagcaucacaacuag

SEQ ID NO: 1998200 - RNA, 19 nt, Homo sapiens
  misc_RNA (1)...(19): siRNA sense strand
acaaauuccuuccaaacag

SEQ ID NO: 1998201 - RNA, 19 nt, Homo sapiens
  misc_RNA (1)...(19): siRNA sense strand
caacaguuucucauucuuc

SEQ ID NO: 1998202 - RNA, 19 nt, Homo sapiens
  misc_RNA (1)...(19): siRNA sense strand
aaaggagcaucaccaccaa

SEQ ID NO: 1998203 - RNA, 19 nt, Homo sapiens
  misc_RNA (1)...(19): siRNA sense strand
gcgccugcgucuacaacaa

SEQ ID NO: 1998204 - RNA, 19 nt, Homo sapiens
  misc_RNA (1)...(19): siRNA sense strand
uaaauccgcggacgacuuc

SEQ ID NO: 1998205 - RNA, 19 nt, Homo sapiens
  misc_RNA (1)...(19): siRNA sense strand
ggaaucguccgccuaagag

SEQ ID NO: 1998206 - RNA, 19 nt, Homo sapiens
  misc_RNA (1)...(19): siRNA sense strand
aauaaugccuggacguucu

SEQ ID NO: 1998207 - RNA, 19 nt, Homo sapiens
  misc_RNA (1)...(19): siRNA sense strand
cucagacuaucucuacuuu

SEQ ID NO: 1998208 - RNA, 19 nt, Homo sapiens
  misc_RNA (1)...(19): siRNA sense strand
gccaaaugccagacugauu

SEQ ID NO: 1998209 - RNA, 19 nt, Homo sapiens
  misc_RNA (1)...(19): siRNA sense strand
ccuugguaauggcuucuua

SEQ ID NO: 1998210 - RNA, 19 nt, Homo sapiens
  misc_RNA (1)...(19): siRNA sense strand
caaguucuccgccaucaag

SEQ ID NO: 1998211 - RNA, 19 nt, Homo sapiens
  misc_RNA (1)...(19): siRNA sense strand
aauaaugaccuugguaaug

SEQ ID NO: 1998212 - RNA, 19 nt, Homo sapiens
  misc_RNA (1)...(19): siRNA sense strand
cggaagcgcuuuggaaucg

SEQ ID NO: 1998213 - RNA, 19 nt, Homo sapiens
  misc_RNA (1)...(19): siRNA sense strand
aaacccaagugacacaaag

SEQ ID NO: 1998214 - RNA, 19 nt, Homo sapiens
  misc_RNA (1)...(19): siRNA sense strand
cccaacaaauuccuuccaa

SEQ ID NO: 1998215 - RNA, 19 nt, Homo sapiens
  misc_RNA (1)...(19): siRNA sense strand
accaagagcuucugaucuc

SEQ ID NO: 1998216 - RNA, 19 nt, Homo sapiens
  misc_RNA (1)...(19): siRNA sense strand
gacaagcaacaguuucuca

SEQ ID NO: 1998217 - RNA, 19 nt, Homo sapiens
  misc_RNA (1)...(19): siRNA sense strand
uggagagguuguacucaga

SEQ ID NO: 1998218 - RNA, 19 nt, Homo sapiens
  misc_RNA (1)...(19): siRNA sense strand
ccaagagcuucugaucuca

SEQ ID NO: 1998219 - RNA, 19 nt, Homo sapiens
  misc_RNA (1)...(19): siRNA sense strand
ggacugaagggaacgaaaa

SEQ ID NO: 1998220 - RNA, 19 nt, Homo sapiens
  misc_RNA (1)...(19): siRNA sense strand
gaucucaucaccuuuccau

SEQ ID NO: 1998221 - RNA, 19 nt, Homo sapiens
  misc_RNA (1)...(19): siRNA sense strand
ugcacaaggucuuccaguu

SEQ ID NO: 1998222 - RNA, 19 nt, Homo sapiens
  misc_RNA (1)...(19): siRNA sense strand
cagcaucacaacuaggauu

SEQ ID NO: 1998223 - RNA, 19 nt, Homo sapiens
  misc_RNA (1)...(19): siRNA sense strand
cagacagcucccagacuua

SEQ ID NO: 1998224 - RNA, 19 nt, Homo sapiens
  misc_RNA (1)...(19): siRNA sense strand
gaagcacugcagcuguuug

SEQ ID NO: 1998225 - RNA, 19 nt, Homo sapiens
  misc_RNA (1)...(19): siRNA sense strand
ccaccaagagcuucugauc

SEQ ID NO: 1998226 - RNA, 19 nt, Homo sapiens
  misc_RNA (1)...(19): siRNA sense strand
gcacaccagauccaucaag

SEQ ID NO: 1998227 - RNA, 19 nt, Homo sapiens
  misc_RNA (1)...(19): siRNA sense strand
agaccgcuaucccguggaa

SEQ ID NO: 1998228 - RNA, 19 nt, Homo sapiens
  misc_RNA (1)...(19): siRNA sense strand
caucacaacuaggauugag

SEQ ID NO: 1998229 - RNA, 19 nt, Homo sapiens
  misc_RNA (1)...(19): siRNA sense strand
acaacaacacccucaacaa

SEQ ID NO: 1998230 - RNA, 19 nt, Homo sapiens
  misc_RNA (1)...(19): siRNA sense strand
cggacgacuuccaugagaa

SEQ ID NO: 1998231 - RNA, 19 nt, Homo sapiens
  misc_RNA (1)...(19): siRNA sense strand
ccuacgugcucuacuccaa

SEQ ID NO: 1998232 - RNA, 19 nt, Homo sapiens
  misc_RNA (1)...(19): siRNA sense strand
caaaugccagacugauugu

SEQ ID NO: 1998233 - RNA, 19 nt, Homo sapiens
  misc_RNA (1)...(19): siRNA sense strand
gcuccagguugggcucuau

SEQ ID NO: 1998234 - RNA, 19 nt, Homo sapiens
  misc_RNA (1)...(19): siRNA sense strand
uugcaugcuugauuauuca

SEQ ID NO: 1998235 - RNA, 19 nt, Homo sapiens
  misc_RNA (1)...(19): siRNA sense strand
acaagcagcaggucaacug

SEQ ID NO: 1998236 - RNA, 19 nt, Homo sapiens
  misc_RNA (1)...(19): siRNA sense strand
accaauccucuguaaauaa

SEQ ID NO: 1998237 - RNA, 19 nt, Homo sapiens
  misc_RNA (1)...(19): siRNA sense strand
gugcaaaggagaaaacaaa

SEQ ID NO: 1998238 - RNA, 19 nt, Homo sapiens
  misc_RNA (1)...(19): siRNA sense strand
gggacccuguggagagguu

SEQ ID NO: 1998239 - RNA, 19 nt, Homo sapiens
  misc_RNA (1)...(19): siRNA sense strand
cagagcaagaugaauacaa

SEQ ID NO: 1998240 - RNA, 19 nt, Homo sapiens
  misc_RNA (1)...(19): siRNA sense strand
uggaaucguccgccuaaga

SEQ ID NO: 1998241 - RNA, 19 nt, Homo sapiens
  misc_RNA (1)...(19): siRNA sense strand
cugccgcacuucuacauca

SEQ ID NO: 1998242 - RNA, 19 nt, Homo sapiens
  misc_RNA (1)...(19): siRNA sense strand
gacuauccaagcauuaaau

SEQ ID NO: 1998243 - RNA, 19 nt, Homo sapiens
  misc_RNA (1)...(19): siRNA sense strand
ggcgagccaccguuucuga

SEQ ID NO: 1998244 - RNA, 19 nt, Homo sapiens
  misc_RNA (1)...(19): siRNA sense strand
ccgcacuucuacaucauag

SEQ ID NO: 1998245 - RNA, 19 nt, Homo sapiens
  misc_RNA (1)...(19): siRNA sense strand
cauccaacgucaaguacac

SEQ ID NO: 1998246 - RNA, 19 nt, Homo sapiens
  misc_RNA (1)...(19): siRNA sense strand
gcaaaggagaaaacaaaau

SEQ ID NO: 1998247 - RNA, 19 nt, Homo sapiens
  misc_RNA (1)...(19): siRNA sense strand
caugagaaagugacagaag

SEQ ID NO: 1998248 - RNA, 19 nt, Homo sapiens
  misc_RNA (1)...(19): siRNA sense strand
gagcaagaugaauacaauc

SEQ ID NO: 1998249 - RNA, 19 nt, Homo sapiens
  misc_RNA (1)...(19): siRNA sense strand
ccgcacaccagauccauca

SEQ ID NO: 1998250 - RNA, 19 nt, Homo sapiens
  misc_RNA (1)...(19): siRNA sense strand
gaccacagaccucuaugac

SEQ ID NO: 1998251 - RNA, 19 nt, Homo sapiens
  misc_RNA (1)...(19): siRNA sense strand
ccaagugcgggaccacaga

SEQ ID NO: 1998252 - RNA, 19 nt, Homo sapiens
  misc_RNA (1)...(19): siRNA sense strand
gaugaacuugcuugcuguu

SEQ ID NO: 1998253 - RNA, 19 nt, Homo sapiens
  misc_RNA (1)...(19): siRNA sense strand
ccuggacguucuucuacga

SEQ ID NO: 1998254 - RNA, 19 nt, Homo sapiens
  misc_RNA (1)...(19): siRNA sense strand
gaaucguccgccuaagaga

SEQ ID NO: 1998255 - RNA, 19 nt, Homo sapiens
  misc_RNA (1)...(19): siRNA sense strand
gucaaguucuccgccauca

SEQ ID NO: 1998256 - RNA, 19 nt, Homo sapiens
  misc_RNA (1)...(19): siRNA sense strand
gaagauguguccggcagua

SEQ ID NO: 1998257 - RNA, 19 nt, Homo sapiens
  misc_RNA (1)...(19): siRNA sense strand
gaaaggaucccucaaagca

SEQ ID NO: 1998258 - RNA, 19 nt, Homo sapiens
  misc_RNA (1)...(19): siRNA sense strand
ugaaagugcucuaucaguu

SEQ ID NO: 1998259 - RNA, 19 nt, Homo sapiens
  misc_RNA (1)...(19): siRNA sense strand
ggccaucuaugauauauau

SEQ ID NO: 1998260 - RNA, 19 nt, Homo sapiens
  misc_RNA (1)...(19): siRNA sense strand
gaucaucuaucagcacaaa

SEQ ID NO: 1998261 - RNA, 19 nt, Homo sapiens
  misc_RNA (1)...(19): siRNA sense strand
gcacauaucccaguccauu

SEQ ID NO: 1998262 - RNA, 19 nt, Homo sapiens
  misc_RNA (1)...(19): siRNA sense strand
aggaggagcuggacaauga

SEQ ID NO: 1998263 - RNA, 19 nt, Homo sapiens
  misc_RNA (1)...(19): siRNA sense strand
gaucagcguuggaguagau

SEQ ID NO: 1998264 - RNA, 19 nt, Homo sapiens
  misc_RNA (1)...(19): siRNA sense strand
gcagaagaguccagaaugg

SEQ ID NO: 1998265 - RNA, 19 nt, Homo sapiens
  misc_RNA (1)...(19): siRNA sense strand
acaccaagaugcuuuguga

SEQ ID NO: 1998266 - RNA, 19 nt, Homo sapiens
  misc_RNA (1)...(19): siRNA sense strand
gcagggaggccucuucuga

SEQ ID NO: 1998267 - RNA, 19 nt, Homo sapiens
  misc_RNA (1)...(19): siRNA sense strand
gaagagaggacuggaaaug

SEQ ID NO: 1998268 - RNA, 19 nt, Homo sapiens
  misc_RNA (1)...(19): siRNA sense strand
gaaucuguccgaaggauaa

SEQ ID NO: 1998269 - RNA, 19 nt, Homo sapiens
  misc_RNA (1)...(19): siRNA sense strand
gaugggagguuguggaaag

SEQ ID NO: 1998270 - RNA, 19 nt, Homo sapiens
  misc_RNA (1)...(19): siRNA sense strand
cagcacaaauuccaagaug

SEQ ID NO: 1998271 - RNA, 19 nt, Homo sapiens
  misc_RNA (1)...(19): siRNA sense strand
ucaccaggcuuacgaagug

SEQ ID NO: 1998272 - RNA, 19 nt, Homo sapiens
  misc_RNA (1)...(19): siRNA sense strand
agacauacuucuucccuau

SEQ ID NO: 1998273 - RNA, 19 nt, Homo sapiens
  misc_RNA (1)...(19): siRNA sense strand
gaaagugcucuaucaguuc

SEQ ID NO: 1998274 - RNA, 19 nt, Homo sapiens
  misc_RNA (1)...(19): siRNA sense strand
gagaaccccugcugaaauu

SEQ ID NO: 1998275 - RNA, 19 nt, Homo sapiens
  misc_RNA (1)...(19): siRNA sense strand
gaucgauacagauggauaa

SEQ ID NO: 1998276 - RNA, 19 nt, Homo sapiens
  misc_RNA (1)...(19): siRNA sense strand
gcgagaaggugaaggugau

SEQ ID NO: 1998277 - RNA, 19 nt, Homo sapiens
  misc_RNA (1)...(19): siRNA sense strand
gcuaugaugaggaguauga

SEQ ID NO: 1998278 - RNA, 19 nt, Homo sapiens
  misc_RNA (1)...(19): siRNA sense strand
ccagggccaucuaugauau

SEQ ID NO: 1998279 - RNA, 19 nt, Homo sapiens
  misc_RNA (1)...(19): siRNA sense strand
ccaccgaugugcugcagaa

SEQ ID NO: 1998280 - RNA, 19 nt, Homo sapiens
  misc_RNA (1)...(19): siRNA sense strand
gcuggacaaugaagacuau

SEQ ID NO: 1998281 - RNA, 19 nt, Homo sapiens
  misc_RNA (1)...(19): siRNA sense strand
gggaagagaggacuggaaa

SEQ ID NO: 1998282 - RNA, 19 nt, Homo sapiens
  misc_RNA (1)...(19): siRNA sense strand
ggaggagguuccauuaacu

SEQ ID NO: 1998283 - RNA, 19 nt, Homo sapiens
  misc_RNA (1)...(19): siRNA sense strand
ccgaugugcugcagaagaa

SEQ ID NO: 1998284 - RNA, 19 nt, Homo sapiens
  misc_RNA (1)...(19): siRNA sense strand
ccacagggcguuucucuca

SEQ ID NO: 1998285 - RNA, 19 nt, Homo sapiens
  misc_RNA (1)...(19): siRNA sense strand
gugaaaggaucccucaaag

SEQ ID NO: 1998286 - RNA, 19 nt, Homo sapiens
  misc_RNA (1)...(19): siRNA sense strand
caacagggccagucagaca

SEQ ID NO: 1998287 - RNA, 19 nt, Homo sapiens
  misc_RNA (1)...(19): siRNA sense strand
agagaggacuggaaaugga

SEQ ID NO: 1998288 - RNA, 19 nt, Homo sapiens
  misc_RNA (1)...(19): siRNA sense strand
cgaucagacucgugugaaa

SEQ ID NO: 1998289 - RNA, 19 nt, Homo sapiens
  misc_RNA (1)...(19): siRNA sense strand
gggaagagaagaaccugaa

SEQ ID NO: 1998290 - RNA, 19 nt, Homo sapiens
  misc_RNA (1)...(19): siRNA sense strand
aaaccagggccaucuauga

SEQ ID NO: 1998291 - RNA, 19 nt, Homo sapiens
  misc_RNA (1)...(19): siRNA sense strand
gaaugggccucaucaucgu

SEQ ID NO: 1998292 - RNA, 19 nt, Homo sapiens
  misc_RNA (1)...(19): siRNA sense strand
ugauauauaugggaagaga

SEQ ID NO: 1998293 - RNA, 19 nt, Homo sapiens
  misc_RNA (1)...(19): siRNA sense strand
acgggaaguuugucaauga

SEQ ID NO: 1998294 - RNA, 19 nt, Homo sapiens
  misc_RNA (1)...(19): siRNA sense strand
ugauggugcuggacaguga

SEQ ID NO: 1998295 - RNA, 19 nt, Homo sapiens
  misc_RNA (1)...(19): siRNA sense strand
gaagagaagaaccugaaag

SEQ ID NO: 1998296 - RNA, 19 nt, Homo sapiens
  misc_RNA (1)...(19): siRNA sense strand
ggaagagaagaaccugaaa

SEQ ID NO: 1998297 - RNA, 19 nt, Homo sapiens
  misc_RNA (1)...(19): siRNA sense strand
ggacaaugaagacuauuac

SEQ ID NO: 1998298 - RNA, 19 nt, Homo sapiens
  misc_RNA (1)...(19): siRNA sense strand
gaaggugauugacgugacu

SEQ ID NO: 1998299 - RNA, 19 nt, Homo sapiens
  misc_RNA (1)...(19): siRNA sense strand
acccagagcucaagucaca

SEQ ID NO: 1998300 - RNA, 19 nt, Homo sapiens
  misc_RNA (1)...(19): siRNA sense strand
agaaagagaaggaauugga

SEQ ID NO: 1998301 - RNA, 19 nt, Homo sapiens
  misc_RNA (1)...(19): siRNA sense strand
gggcguuucucucaaaguc

SEQ ID NO: 1998302 - RNA, 19 nt, Homo sapiens
  misc_RNA (1)...(19): siRNA sense strand
acagggcguuucucucaaa

SEQ ID NO: 1998303 - RNA, 19 nt, Homo sapiens
  misc_RNA (1)...(19): siRNA sense strand
gucucaagcuguuccguaa

SEQ ID NO: 1998304 - RNA, 19 nt, Homo sapiens
  misc_RNA (1)...(19): siRNA sense strand
ccgcagauugaaauuaaua

SEQ ID NO: 1998305 - RNA, 19 nt, Homo sapiens
  misc_RNA (1)...(19): siRNA sense strand
gcaguagcuuuccgcagau

SEQ ID NO: 1998306 - RNA, 19 nt, Homo sapiens
  misc_RNA (1)...(19): siRNA sense strand
ggaaucuguccgaaggaua

SEQ ID NO: 1998307 - RNA, 19 nt, Homo sapiens
  misc_RNA (1)...(19): siRNA sense strand
uuccgcagauugaaauuaa

SEQ ID NO: 1998308 - RNA, 19 nt, Homo sapiens
  misc_RNA (1)...(19): siRNA sense strand
gaaauucgagaggaguuug

SEQ ID NO: 1998309 - RNA, 19 nt, Homo sapiens
  misc_RNA (1)...(19): siRNA sense strand
gcucuaccauccagacaag

SEQ ID NO: 1998310 - RNA, 19 nt, Homo sapiens
  misc_RNA (1)...(19): siRNA sense strand
gcacaaauuccaagaugac

SEQ ID NO: 1998311 - RNA, 19 nt, Homo sapiens
  misc_RNA (1)...(19): siRNA sense strand
gaugaggaguaugaagaug

SEQ ID NO: 1998312 - RNA, 19 nt, Homo sapiens
  misc_RNA (1)...(19): siRNA sense strand
gcagagagagagagaagag

SEQ ID NO: 1998313 - RNA, 19 nt, Homo sapiens
  misc_RNA (1)...(19): siRNA sense strand
gagguuccauuaacuuugc

SEQ ID NO: 1998314 - RNA, 19 nt, Homo sapiens
  misc_RNA (1)...(19): siRNA sense strand
caggaucgauacagaugga

SEQ ID NO: 1998315 - RNA, 19 nt, Homo sapiens
  misc_RNA (1)...(19): siRNA sense strand
gcaggaagagcgagaaggu

SEQ ID NO: 1998316 - RNA, 19 nt, Homo sapiens
  misc_RNA (1)...(19): siRNA sense strand
agaaggaauuggagaagca

SEQ ID NO: 1998317 - RNA, 19 nt, Homo sapiens
  misc_RNA (1)...(19): siRNA sense strand
gcucggaaccuagacaaga

SEQ ID NO: 1998318 - RNA, 19 nt, Homo sapiens
  misc_RNA (1)...(19): siRNA sense strand
cuuacgaagugcuuaguga

SEQ ID NO: 1998319 - RNA, 19 nt, Homo sapiens
  misc_RNA (1)...(19): siRNA sense strand
ggaucgauacagauggaua

SEQ ID NO: 1998320 - RNA, 19 nt, Homo sapiens
  misc_RNA (1)...(19): siRNA sense strand
cuucuucccuauucacuug

SEQ ID NO: 1998321 - RNA, 19 nt, Homo sapiens
  misc_RNA (1)...(19): siRNA sense strand
uguccuagcucggaaccua

SEQ ID NO: 1998322 - RNA, 19 nt, Homo sapiens
  misc_RNA (1)...(19): siRNA sense strand
ugaggaguaugaagaugug

SEQ ID NO: 1998323 - RNA, 19 nt, Homo sapiens
  misc_RNA (1)...(19): siRNA sense strand
ccuuugcacugaucaucua

SEQ ID NO: 1998324 - RNA, 19 nt, Homo sapiens
  misc_RNA (1)...(19): siRNA sense strand
ggagguuccauuaacuuug

SEQ ID NO: 1998325 - RNA, 19 nt, Homo sapiens
  misc_RNA (1)...(19): siRNA sense strand
gagaggacuggaaauggaa

SEQ ID NO: 1998326 - RNA, 19 nt, Homo sapiens
  misc_RNA (1)...(19): siRNA sense strand
ucagaaagagaaggaauug

SEQ ID NO: 1998327 - RNA, 19 nt, Homo sapiens
  misc_RNA (1)...(19): siRNA sense strand
ccucagggcucagaaagag

SEQ ID NO: 1998328 - RNA, 19 nt, Homo sapiens
  misc_RNA (1)...(19): siRNA sense strand
gcguuucucucaaagucaa

SEQ ID NO: 1998329 - RNA, 19 nt, Homo sapiens
  misc_RNA (1)...(19): siRNA sense strand
gagagaagagaggagauug

SEQ ID NO: 1998330 - RNA, 19 nt, Homo sapiens
  misc_RNA (1)...(19): siRNA sense strand
gaggagguuccauuaacuu

SEQ ID NO: 1998331 - RNA, 19 nt, Homo sapiens
  misc_RNA (1)...(19): siRNA sense strand
ucaucuaucagcacaaauu

SEQ ID NO: 1998332 - RNA, 19 nt, Homo sapiens
  misc_RNA (1)...(19): siRNA sense strand
gguauccagucagccauga

SEQ ID NO: 1998333 - RNA, 19 nt, Homo sapiens
  misc_RNA (1)...(19): siRNA sense strand
ggaagagcgagaaggugaa

SEQ ID NO: 1998334 - RNA, 19 nt, Homo sapiens
  misc_RNA (1)...(19): siRNA sense strand
cagaaugggccucaucauc

SEQ ID NO: 1998335 - RNA, 19 nt, Homo sapiens
  misc_RNA (1)...(19): siRNA sense strand
acauacuucuucccuauuc

SEQ ID NO: 1998336 - RNA, 19 nt, Homo sapiens
  misc_RNA (1)...(19): siRNA sense strand
guagaugccaccgaccuuu

SEQ ID NO: 1998337 - RNA, 19 nt, Homo sapiens
  misc_RNA (1)...(19): siRNA sense strand
gaaccugaaagugcucuau

SEQ ID NO: 1998338 - RNA, 19 nt, Homo sapiens
  misc_RNA (1)...(19): siRNA sense strand
gagaagagaggagauugca

SEQ ID NO: 1998339 - RNA, 19 nt, Homo sapiens
  misc_RNA (1)...(19): siRNA sense strand
caaagcagucccacaggau

SEQ ID NO: 1998340 - RNA, 19 nt, Homo sapiens
  misc_RNA (1)...(19): siRNA sense strand
guacgggaaguuugucaau

SEQ ID NO: 1998341 - RNA, 19 nt, Homo sapiens
  misc_RNA (1)...(19): siRNA sense strand
ggcagaagaguccagaaug

SEQ ID NO: 1998342 - RNA, 19 nt, Homo sapiens
  misc_RNA (1)...(19): siRNA sense strand
gauaauugaggcagaagag

SEQ ID NO: 1998343 - RNA, 19 nt, Homo sapiens
  misc_RNA (1)...(19): siRNA sense strand
uggacaaugaagacuauua

SEQ ID NO: 1998344 - RNA, 19 nt, Homo sapiens
  misc_RNA (1)...(19): siRNA sense strand
ugugaaaggaucccucaaa

SEQ ID NO: 1998345 - RNA, 19 nt, Homo sapiens
  misc_RNA (1)...(19): siRNA sense strand
caaauuccaagaugacgau

SEQ ID NO: 1998346 - RNA, 19 nt, Homo sapiens
  misc_RNA (1)...(19): siRNA sense strand
ggaacgacuguuuaaccuu

SEQ ID NO: 1998347 - RNA, 19 nt, Homo sapiens
  misc_RNA (1)...(19): siRNA sense strand
auuuggagcuggagaccua

SEQ ID NO: 1998348 - RNA, 19 nt, Homo sapiens
  misc_RNA (1)...(19): siRNA sense strand
ggaagagaggacuggaaau

SEQ ID NO: 1998349 - RNA, 19 nt, Homo sapiens
  misc_RNA (1)...(19): siRNA sense strand
agucagccaugaacacuag

SEQ ID NO: 1998350 - RNA, 19 nt, Homo sapiens
  misc_RNA (1)...(19): siRNA sense strand
guagcuuuccgcagauuga

SEQ ID NO: 1998351 - RNA, 19 nt, Homo sapiens
  misc_RNA (1)...(19): siRNA sense strand
gcgaggaggagcuggacaa

SEQ ID NO: 1998352 - RNA, 19 nt, Homo sapiens
  misc_RNA (1)...(19): siRNA sense strand
gcaaagggauggggagagu

SEQ ID NO: 1998353 - RNA, 19 nt, Homo sapiens
  misc_RNA (1)...(19): siRNA sense strand
gccaugcaccgucugauca

SEQ ID NO: 1998354 - RNA, 19 nt, Homo sapiens
  misc_RNA (1)...(19): siRNA sense strand
gacauacuucuucccuauu

SEQ ID NO: 1998355 - RNA, 19 nt, Homo sapiens
  misc_RNA (1)...(19): siRNA sense strand
ugcagugccuggugaagga

SEQ ID NO: 1998356 - RNA, 19 nt, Homo sapiens
  misc_RNA (1)...(19): siRNA sense strand
ggaagaagcuuggagaaga

SEQ ID NO: 1998357 - RNA, 19 nt, Homo sapiens
  misc_RNA (1)...(19): siRNA sense strand
ccaaggaucuuaucuauag

SEQ ID NO: 1998358 - RNA, 19 nt, Homo sapiens
  misc_RNA (1)...(19): siRNA sense strand
gaagaagcuuggagaagaa

SEQ ID NO: 1998359 - RNA, 19 nt, Homo sapiens
  misc_RNA (1)...(19): siRNA sense strand
gaacuuagacagcuuguug

SEQ ID NO: 1998360 - RNA, 19 nt, Homo sapiens
  misc_RNA (1)...(19): siRNA sense strand
caaaguaccugcuacaaag

SEQ ID NO: 1998361 - RNA, 19 nt, Homo sapiens
  misc_RNA (1)...(19): siRNA sense strand
ggacucagacgucuacuaa

SEQ ID NO: 1998362 - RNA, 19 nt, Homo sapiens
  misc_RNA (1)...(19): siRNA sense strand
gagaaacacuaucgggaaa

SEQ ID NO: 1998363 - RNA, 19 nt, Homo sapiens
  misc_RNA (1)...(19): siRNA sense strand
uaaagcagcugucacacuu

SEQ ID NO: 1998364 - RNA, 19 nt, Homo sapiens
  misc_RNA (1)...(19): siRNA sense strand
acacagauauuaagccauu

SEQ ID NO: 1998365 - RNA, 19 nt, Homo sapiens
  misc_RNA (1)...(19): siRNA sense strand
gaaaagcccuguauucaau

SEQ ID NO: 1998366 - RNA, 19 nt, Homo sapiens
  misc_RNA (1)...(19): siRNA sense strand
gaaugucccuguuauacug

SEQ ID NO: 1998367 - RNA, 19 nt, Homo sapiens
  misc_RNA (1)...(19): siRNA sense strand
gagcagaaugucccuguua

SEQ ID NO: 1998368 - RNA, 19 nt, Homo sapiens
  misc_RNA (1)...(19): siRNA sense strand
ccugagcucuuccuaagua

SEQ ID NO: 1998369 - RNA, 19 nt, Homo sapiens
  misc_RNA (1)...(19): siRNA sense strand
gaaacacuaucgggaaaug

SEQ ID NO: 1998370 - RNA, 19 nt, Homo sapiens
  misc_RNA (1)...(19): siRNA sense strand
caaauaggaucugcaguca

SEQ ID NO: 1998371 - RNA, 19 nt, Homo sapiens
  misc_RNA (1)...(19): siRNA sense strand
gaaggaggcagaagggaaa

SEQ ID NO: 1998372 - RNA, 19 nt, Homo sapiens
  misc_RNA (1)...(19): siRNA sense strand
gcagaaugucccuguuaua

SEQ ID NO: 1998373 - RNA, 19 nt, Homo sapiens
  misc_RNA (1)...(19): siRNA sense strand
gagaagaugcagaggaauu

SEQ ID NO: 1998374 - RNA, 19 nt, Homo sapiens
  misc_RNA (1)...(19): siRNA sense strand
ggagacaauuacaaacaug

SEQ ID NO: 1998375 - RNA, 19 nt, Homo sapiens
  misc_RNA (1)...(19): siRNA sense strand
gaaccugagcucuuccuaa

SEQ ID NO: 1998376 - RNA, 19 nt, Homo sapiens
  misc_RNA (1)...(19): siRNA sense strand
gaaacgaguggaugacuau

SEQ ID NO: 1998377 - RNA, 19 nt, Homo sapiens
  misc_RNA (1)...(19): siRNA sense strand
ggaaguagaagagcagaaa

SEQ ID NO: 1998378 - RNA, 19 nt, Homo sapiens
  misc_RNA (1)...(19): siRNA sense strand
caacaguggugauuuacuc

SEQ ID NO: 1998379 - RNA, 19 nt, Homo sapiens
  misc_RNA (1)...(19): siRNA sense strand
aauaggaucugcagucaug

SEQ ID NO: 1998380 - RNA, 19 nt, Homo sapiens
  misc_RNA (1)...(19): siRNA sense strand
ggaaauggaagagaaauca

SEQ ID NO: 1998381 - RNA, 19 nt, Homo sapiens
  misc_RNA (1)...(19): siRNA sense strand
ugaauucagucaagaacuu

SEQ ID NO: 1998382 - RNA, 19 nt, Homo sapiens
  misc_RNA (1)...(19): siRNA sense strand
caucugcugugauugcuuu

SEQ ID NO: 1998383 - RNA, 19 nt, Homo sapiens
  misc_RNA (1)...(19): siRNA sense strand
gagcagcgcuuaaauuccu

SEQ ID NO: 1998384 - RNA, 19 nt, Homo sapiens
  misc_RNA (1)...(19): siRNA sense strand
uaaauaggcagaaggaaga

SEQ ID NO: 1998385 - RNA, 19 nt, Homo sapiens
  misc_RNA (1)...(19): siRNA sense strand
gagaauugcagcugaguau

SEQ ID NO: 1998386 - RNA, 19 nt, Homo sapiens
  misc_RNA (1)...(19): siRNA sense strand
caaaggaugagcuuaguau

SEQ ID NO: 1998387 - RNA, 19 nt, Homo sapiens
  misc_RNA (1)...(19): siRNA sense strand
gauucucucuucuggcuuu

SEQ ID NO: 1998388 - RNA, 19 nt, Homo sapiens
  misc_RNA (1)...(19): siRNA sense strand
ucaaagagcagcgcuuaaa

SEQ ID NO: 1998389 - RNA, 19 nt, Homo sapiens
  misc_RNA (1)...(19): siRNA sense strand
uaagaaguacugcuacaaa

SEQ ID NO: 1998390 - RNA, 19 nt, Homo sapiens
  misc_RNA (1)...(19): siRNA sense strand
gagcagaaacuacaucaag

SEQ ID NO: 1998391 - RNA, 19 nt, Homo sapiens
  misc_RNA (1)...(19): siRNA sense strand
gaauucagucaagaacuua

SEQ ID NO: 1998392 - RNA, 19 nt, Homo sapiens
  misc_RNA (1)...(19): siRNA sense strand
ucacaacccugaagcacau

SEQ ID NO: 1998393 - RNA, 19 nt, Homo sapiens
  misc_RNA (1)...(19): siRNA sense strand
gaucagcaccaacguugaa

SEQ ID NO: 1998394 - RNA, 19 nt, Homo sapiens
  misc_RNA (1)...(19): siRNA sense strand
uuaggaagcucagaguuga

SEQ ID NO: 1998395 - RNA, 19 nt, Homo sapiens
  misc_RNA (1)...(19): siRNA sense strand
aaagagcagcgcuuaaauu

SEQ ID NO: 1998396 - RNA, 19 nt, Homo sapiens
  misc_RNA (1)...(19): siRNA sense strand
ggagauaaauaggcagaag

SEQ ID NO: 1998397 - RNA, 19 nt, Homo sapiens
  misc_RNA (1)...(19): siRNA sense strand
gaaagagauuaaagaagcu

SEQ ID NO: 1998398 - RNA, 19 nt, Homo sapiens
  misc_RNA (1)...(19): siRNA sense strand
aaacaucacaccuuuagga

SEQ ID NO: 1998399 - RNA, 19 nt, Homo sapiens
  misc_RNA (1)...(19): siRNA sense strand
aagaacgacugcaacacua

SEQ ID NO: 1998400 - RNA, 19 nt, Homo sapiens
  misc_RNA (1)...(19): siRNA sense strand
gaagaaaagcccuguauuc

SEQ ID NO: 1998401 - RNA, 19 nt, Homo sapiens
  misc_RNA (1)...(19): siRNA sense strand
gggaggccauguugaacuu

SEQ ID NO: 1998402 - RNA, 19 nt, Homo sapiens
  misc_RNA (1)...(19): siRNA sense strand
cagcuuacacagauauuaa

SEQ ID NO: 1998403 - RNA, 19 nt, Homo sapiens
  misc_RNA (1)...(19): siRNA sense strand
gcucagaguugaagaaaau

SEQ ID NO: 1998404 - RNA, 19 nt, Homo sapiens
  misc_RNA (1)...(19): siRNA sense strand
gguccucagucaagauuau

SEQ ID NO: 1998405 - RNA, 19 nt, Homo sapiens
  misc_RNA (1)...(19): siRNA sense strand
caccaacguugaacagcua

SEQ ID NO: 1998406 - RNA, 19 nt, Homo sapiens
  misc_RNA (1)...(19): siRNA sense strand
agaaacgaguggaugacua

SEQ ID NO: 1998407 - RNA, 19 nt, Homo sapiens
  misc_RNA (1)...(19): siRNA sense strand
caugagacuuucccgagaa

SEQ ID NO: 1998408 - RNA, 19 nt, Homo sapiens
  misc_RNA (1)...(19): siRNA sense strand
gggagacaauuacaaacau

SEQ ID NO: 1998409 - RNA, 19 nt, Homo sapiens
  misc_RNA (1)...(19): siRNA sense strand
gcagaggaauuuuacaaug

SEQ ID NO: 1998410 - RNA, 19 nt, Homo sapiens
  misc_RNA (1)...(19): siRNA sense strand
ggaugagcuuaguauagaa

SEQ ID NO: 1998411 - RNA, 19 nt, Homo sapiens
  misc_RNA (1)...(19): siRNA sense strand
aggaugagcuuaguauaga

SEQ ID NO: 1998412 - RNA, 19 nt, Homo sapiens
  misc_RNA (1)...(19): siRNA sense strand
cgacugcaacacuacuuua

SEQ ID NO: 1998413 - RNA, 19 nt, Homo sapiens
  misc_RNA (1)...(19): siRNA sense strand
guauaaagcagcugucaca

SEQ ID NO: 1998414 - RNA, 19 nt, Homo sapiens
  misc_RNA (1)...(19): siRNA sense strand
ugaugaugcuacagaauau

SEQ ID NO: 1998415 - RNA, 19 nt, Homo sapiens
  misc_RNA (1)...(19): siRNA sense strand
guuauaagaaguacugcua

SEQ ID NO: 1998416 - RNA, 19 nt, Homo sapiens
  misc_RNA (1)...(19): siRNA sense strand
ugucagauguggucaguag

SEQ ID NO: 1998417 - RNA, 19 nt, Homo sapiens
  misc_RNA (1)...(19): siRNA sense strand
aggagaagaugcagaggaa

SEQ ID NO: 1998418 - RNA, 19 nt, Homo sapiens
  misc_RNA (1)...(19): siRNA sense strand
cagcacugauuauccagaa

SEQ ID NO: 1998419 - RNA, 19 nt, Homo sapiens
  misc_RNA (1)...(19): siRNA sense strand
agauguugcuggagauaaa

SEQ ID NO: 1998420 - RNA, 19 nt, Homo sapiens
  misc_RNA (1)...(19): siRNA sense strand
caaagauguugcuggagau

SEQ ID NO: 1998421 - RNA, 19 nt, Homo sapiens
  misc_RNA (1)...(19): siRNA sense strand
acaaaguaccugcuacaaa

SEQ ID NO: 1998422 - RNA, 19 nt, Homo sapiens
  misc_RNA (1)...(19): siRNA sense strand
ugaagaaacgaguggauga

SEQ ID NO: 1998423 - RNA, 19 nt, Homo sapiens
  misc_RNA (1)...(19): siRNA sense strand
ugaguaugcucgaaauagu

SEQ ID NO: 1998424 - RNA, 19 nt, Homo sapiens
  misc_RNA (1)...(19): siRNA sense strand
gagacuuucccgagaauug

SEQ ID NO: 1998425 - RNA, 19 nt, Homo sapiens
  misc_RNA (1)...(19): siRNA sense strand
cuacaaaacuccuacuguu

SEQ ID NO: 1998426 - RNA, 19 nt, Homo sapiens
  misc_RNA (1)...(19): siRNA sense strand
gcagcugucacacuucaaa

SEQ ID NO: 1998427 - RNA, 19 nt, Homo sapiens
  misc_RNA (1)...(19): siRNA sense strand
gaagcucagaguugaagaa

SEQ ID NO: 1998428 - RNA, 19 nt, Homo sapiens
  misc_RNA (1)...(19): siRNA sense strand
ugaaucccaucaggaaauu

SEQ ID NO: 1998429 - RNA, 19 nt, Homo sapiens
  misc_RNA (1)...(19): siRNA sense strand
gaggccauguugaacuuau

SEQ ID NO: 1998430 - RNA, 19 nt, Homo sapiens
  misc_RNA (1)...(19): siRNA sense strand
agauugauguuccaaagga

SEQ ID NO: 1998431 - RNA, 19 nt, Homo sapiens
  misc_RNA (1)...(19): siRNA sense strand
ugagauugauguuccaaag

SEQ ID NO: 1998432 - RNA, 19 nt, Homo sapiens
  misc_RNA (1)...(19): siRNA sense strand
caaagagcagcgcuuaaau

SEQ ID NO: 1998433 - RNA, 19 nt, Homo sapiens
  misc_RNA (1)...(19): siRNA sense strand
caggucagguggagaaaca

SEQ ID NO: 1998434 - RNA, 19 nt, Homo sapiens
  misc_RNA (1)...(19): siRNA sense strand
cagagagccaugagacuuu

SEQ ID NO: 1998435 - RNA, 19 nt, Homo sapiens
  misc_RNA (1)...(19): siRNA sense strand
gcuuccaucugcugugauu

SEQ ID NO: 1998436 - RNA, 19 nt, Homo sapiens
  misc_RNA (1)...(19): siRNA sense strand
acucagacgucuacuaagu

SEQ ID NO: 1998437 - RNA, 19 nt, Homo sapiens
  misc_RNA (1)...(19): siRNA sense strand
acccaaggaucuuaucuau

SEQ ID NO: 1998438 - RNA, 19 nt, Homo sapiens
  misc_RNA (1)...(19): siRNA sense strand
cuagcgaagugccguaaga

SEQ ID NO: 1998439 - RNA, 19 nt, Homo sapiens
  misc_RNA (1)...(19): siRNA sense strand
uuaaauuccuagcgaagug

SEQ ID NO: 1998440 - RNA, 19 nt, Homo sapiens
  misc_RNA (1)...(19): siRNA sense strand
uccaaacgaucaaagaugu

SEQ ID NO: 1998441 - RNA, 19 nt, Homo sapiens
  misc_RNA (1)...(19): siRNA sense strand
uauaagaaguacugcuaca

SEQ ID NO: 1998442 - RNA, 19 nt, Homo sapiens
  misc_RNA (1)...(19): siRNA sense strand
cauucaauauugccucuug

SEQ ID NO: 1998443 - RNA, 19 nt, Homo sapiens
  misc_RNA (1)...(19): siRNA sense strand
aaagcccuguauucaauuu

SEQ ID NO: 1998444 - RNA, 19 nt, Homo sapiens
  misc_RNA (1)...(19): siRNA sense strand
cagaggaauuuuacaauga

SEQ ID NO: 1998445 - RNA, 19 nt, Homo sapiens
  misc_RNA (1)...(19): siRNA sense strand
gcucuccaaugucagaugu

SEQ ID NO: 1998446 - RNA, 19 nt, Homo sapiens
  misc_RNA (1)...(19): siRNA sense strand
acuacaauuucccagcuua

SEQ ID NO: 1998447 - RNA, 19 nt, Homo sapiens
  misc_RNA (1)...(19): siRNA sense strand
uagaagagcagaaacuaca

SEQ ID NO: 1998448 - RNA, 19 nt, Homo sapiens
  misc_RNA (1)...(19): siRNA sense strand
ucaagaacuuagacagcuu

SEQ ID NO: 1998449 - RNA, 19 nt, Homo sapiens
  misc_RNA (1)...(19): siRNA sense strand
cagacaagaaagagauuaa

SEQ ID NO: 1998450 - RNA, 19 nt, Homo sapiens
  misc_RNA (1)...(19): siRNA sense strand
gcagaaacuacaucaagca

SEQ ID NO: 1998451 - RNA, 19 nt, Homo sapiens
  misc_RNA (1)...(19): siRNA sense strand
gacccaaggaucuuaucua

SEQ ID NO: 1998452 - RNA, 19 nt, Homo sapiens
  misc_RNA (1)...(19): siRNA sense strand
ccaaaggaugagcuuagua

SEQ ID NO: 1998453 - RNA, 19 nt, Homo sapiens
  misc_RNA (1)...(19): siRNA sense strand
guacagacccaaggaucuu

SEQ ID NO: 1998454 - RNA, 19 nt, Homo sapiens
  misc_RNA (1)...(19): siRNA sense strand
gaagagcagaaacuacauc

SEQ ID NO: 1998455 - RNA, 19 nt, Homo sapiens
  misc_RNA (1)...(19): siRNA sense strand
gacaagaaagagauuaaag

SEQ ID NO: 1998456 - RNA, 19 nt, Homo sapiens
  misc_RNA (1)...(19): siRNA sense strand
ggacagcgaugaugaguuu

SEQ ID NO: 1998457 - RNA, 19 nt, Homo sapiens
  misc_RNA (1)...(19): siRNA sense strand
gcaaggcccugcuggaauu

SEQ ID NO: 1998458 - RNA, 19 nt, Homo sapiens
  misc_RNA (1)...(19): siRNA sense strand
gaacaagaaggcccaguuu

SEQ ID NO: 1998459 - RNA, 19 nt, Homo sapiens
  misc_RNA (1)...(19): siRNA sense strand
gaccacgucugaggacaua

SEQ ID NO: 1998460 - RNA, 19 nt, Homo sapiens
  misc_RNA (1)...(19): siRNA sense strand
ggacguggcugagaaagac

SEQ ID NO: 1998461 - RNA, 19 nt, Homo sapiens
  misc_RNA (1)...(19): siRNA sense strand
ggaaccugguggugaagaa

SEQ ID NO: 1998462 - RNA, 19 nt, Homo sapiens
  misc_RNA (1)...(19): siRNA sense strand
gagcggaucagaagcaaga

SEQ ID NO: 1998463 - RNA, 19 nt, Homo sapiens
  misc_RNA (1)...(19): siRNA sense strand
gcaaggcuguccucaucug

SEQ ID NO: 1998464 - RNA, 19 nt, Homo sapiens
  misc_RNA (1)...(19): siRNA sense strand
ccaaggugcuucugcaucu

SEQ ID NO: 1998465 - RNA, 19 nt, Homo sapiens
  misc_RNA (1)...(19): siRNA sense strand
ugaugugccuggcuguuaa

SEQ ID NO: 1998466 - RNA, 19 nt, Homo sapiens
  misc_RNA (1)...(19): siRNA sense strand
gaaauuccaguacgaagag

SEQ ID NO: 1998467 - RNA, 19 nt, Homo sapiens
  misc_RNA (1)...(19): siRNA sense strand
guacgaagaggaugaacug

SEQ ID NO: 1998468 - RNA, 19 nt, Homo sapiens
  misc_RNA (1)...(19): siRNA sense strand
uaucugaccucacaguucu

SEQ ID NO: 1998469 - RNA, 19 nt, Homo sapiens
  misc_RNA (1)...(19): siRNA sense strand
caagaaggcccaguuugug

SEQ ID NO: 1998470 - RNA, 19 nt, Homo sapiens
  misc_RNA (1)...(19): siRNA sense strand
ccgacuaucugaccucaca

SEQ ID NO: 1998471 - RNA, 19 nt, Homo sapiens
  misc_RNA (1)...(19): siRNA sense strand
ggacagccgggaugaacug

SEQ ID NO: 1998472 - RNA, 19 nt, Homo sapiens
  misc_RNA (1)...(19): siRNA sense strand
ugaaauuccaguacgaaga

SEQ ID NO: 1998473 - RNA, 19 nt, Homo sapiens
  misc_RNA (1)...(19): siRNA sense strand
gaucguggcagaggucguu

SEQ ID NO: 1998474 - RNA, 19 nt, Homo sapiens
  misc_RNA (1)...(19): siRNA sense strand
uggcggacguggcugagaa

SEQ ID NO: 1998475 - RNA, 19 nt, Homo sapiens
  misc_RNA (1)...(19): siRNA sense strand
cgagggagaaggaggaguu

SEQ ID NO: 1998476 - RNA, 19 nt, Homo sapiens
  misc_RNA (1)...(19): siRNA sense strand
aagaaggcccaguuuguga

SEQ ID NO: 1998477 - RNA, 19 nt, Homo sapiens
  misc_RNA (1)...(19): siRNA sense strand
gaaggcccaguuugugaug

SEQ ID NO: 1998478 - RNA, 19 nt, Homo sapiens
  misc_RNA (1)...(19): siRNA sense strand
agaccuguguggugggauu

SEQ ID NO: 1998479 - RNA, 19 nt, Homo sapiens
  misc_RNA (1)...(19): siRNA sense strand
gauccugggcgugcuggua

SEQ ID NO: 1998480 - RNA, 19 nt, Homo sapiens
  misc_RNA (1)...(19): siRNA sense strand
caaccuggcuccccaaguc

SEQ ID NO: 1998481 - RNA, 19 nt, Homo sapiens
  misc_RNA (1)...(19): siRNA sense strand
gaggagcggaucagaagca

SEQ ID NO: 1998482 - RNA, 19 nt, Homo sapiens
  misc_RNA (1)...(19): siRNA sense strand
cugcagagacucaagaaca

SEQ ID NO: 1998483 - RNA, 19 nt, Homo sapiens
  misc_RNA (1)...(19): siRNA sense strand
ccacgucugaggacauaga

SEQ ID NO: 1998484 - RNA, 19 nt, Homo sapiens
  misc_RNA (1)...(19): siRNA sense strand
ucuaugcccucaacuacag

SEQ ID NO: 1998485 - RNA, 19 nt, Homo sapiens
  misc_RNA (1)...(19): siRNA sense strand
agaacaagaaggcccaguu

SEQ ID NO: 1998486 - RNA, 19 nt, Homo sapiens
  misc_RNA (1)...(19): siRNA sense strand
ugagggcccugcugcuucu

SEQ ID NO: 1998487 - RNA, 19 nt, Homo sapiens
  misc_RNA (1)...(19): siRNA sense strand
ggcaaggcccugcuggaau

SEQ ID NO: 1998488 - RNA, 19 nt, Homo sapiens
  misc_RNA (1)...(19): siRNA sense strand
ggaccuggacagcgaugau

SEQ ID NO: 1998489 - RNA, 19 nt, Homo sapiens
  misc_RNA (1)...(19): siRNA sense strand
cuucucgccuguccucaga

SEQ ID NO: 1998490 - RNA, 19 nt, Homo sapiens
  misc_RNA (1)...(19): siRNA sense strand
cugaugugccuggcuguua

SEQ ID NO: 1998491 - RNA, 19 nt, Homo sapiens
  misc_RNA (1)...(19): siRNA sense strand
acaggccucuggugaccuu

SEQ ID NO: 1998492 - RNA, 19 nt, Homo sapiens
  misc_RNA (1)...(19): siRNA sense strand
gagggagaaggaggaguuu

SEQ ID NO: 1998493 - RNA, 19 nt, Homo sapiens
  misc_RNA (1)...(19): siRNA sense strand
gggagaaggaggaguuugc

SEQ ID NO: 1998494 - RNA, 19 nt, Homo sapiens
  misc_RNA (1)...(19): siRNA sense strand
guucuaugcccucaacuac

SEQ ID NO: 1998495 - RNA, 19 nt, Homo sapiens
  misc_RNA (1)...(19): siRNA sense strand
ggaaagagauccucgguuu

SEQ ID NO: 1998496 - RNA, 19 nt, Homo sapiens
  misc_RNA (1)...(19): siRNA sense strand
ggaacaagaugacucagua

SEQ ID NO: 1998497 - RNA, 19 nt, Homo sapiens
  misc_RNA (1)...(19): siRNA sense strand
ugaagcagcugauggauuu

SEQ ID NO: 1998498 - RNA, 19 nt, Homo sapiens
  misc_RNA (1)...(19): siRNA sense strand
ggacaaggcaguaaauauu

SEQ ID NO: 1998499 - RNA, 19 nt, Homo sapiens
  misc_RNA (1)...(19): siRNA sense strand
gaaaggacauuuuggaauu

SEQ ID NO: 1998500 - RNA, 19 nt, Homo sapiens
  misc_RNA (1)...(19): siRNA sense strand
ccagagagauggauuguca

SEQ ID NO: 1998501 - RNA, 19 nt, Homo sapiens
  misc_RNA (1)...(19): siRNA sense strand
gaauggacuucgaugauga

SEQ ID NO: 1998502 - RNA, 19 nt, Homo sapiens
  misc_RNA (1)...(19): siRNA sense strand
caagagagaaucauaguga

SEQ ID NO: 1998503 - RNA, 19 nt, Homo sapiens
  misc_RNA (1)...(19): siRNA sense strand
ggaauggacuucgaugaug

SEQ ID NO: 1998504 - RNA, 19 nt, Homo sapiens
  misc_RNA (1)...(19): siRNA sense strand
gcugauggauuucuguuug

SEQ ID NO: 1998505 - RNA, 19 nt, Homo sapiens
  misc_RNA (1)...(19): siRNA sense strand
ugaagcaucucauccuuga

SEQ ID NO: 1998506 - RNA, 19 nt, Homo sapiens
  misc_RNA (1)...(19): siRNA sense strand
gaccauaccugaagaagac

SEQ ID NO: 1998507 - RNA, 19 nt, Homo sapiens
  misc_RNA (1)...(19): siRNA sense strand
ugaaauguuugcaggaauu

SEQ ID NO: 1998508 - RNA, 19 nt, Homo sapiens
  misc_RNA (1)...(19): siRNA sense strand
gcaaucuucucccaggaaa

SEQ ID NO: 1998509 - RNA, 19 nt, Homo sapiens
  misc_RNA (1)...(19): siRNA sense strand
gauauucaguccucuucuu

SEQ ID NO: 1998510 - RNA, 19 nt, Homo sapiens
  misc_RNA (1)...(19): siRNA sense strand
agacagggcgagugauuua

SEQ ID NO: 1998511 - RNA, 19 nt, Homo sapiens
  misc_RNA (1)...(19): siRNA sense strand
ggagcacacuguaugaaca

SEQ ID NO: 1998512 - RNA, 19 nt, Homo sapiens
  misc_RNA (1)...(19): siRNA sense strand
gggcauguuuccaccguuu

SEQ ID NO: 1998513 - RNA, 19 nt, Homo sapiens
  misc_RNA (1)...(19): siRNA sense strand
gcugaaaguggacaaagua

SEQ ID NO: 1998514 - RNA, 19 nt, Homo sapiens
  misc_RNA (1)...(19): siRNA sense strand
gaaauguuugcaggaauua

SEQ ID NO: 1998515 - RNA, 19 nt, Homo sapiens
  misc_RNA (1)...(19): siRNA sense strand
gaaugaccauaccugaaga

SEQ ID NO: 1998516 - RNA, 19 nt, Homo sapiens
  misc_RNA (1)...(19): siRNA sense strand
ucaagcaacuucagcaaca

SEQ ID NO: 1998517 - RNA, 19 nt, Homo sapiens
  misc_RNA (1)...(19): siRNA sense strand
gaauaaccaccaugaggaa

SEQ ID NO: 1998518 - RNA, 19 nt, Homo sapiens
  misc_RNA (1)...(19): siRNA sense strand
ggaugucggugcccacaga

SEQ ID NO: 1998519 - RNA, 19 nt, Homo sapiens
  misc_RNA (1)...(19): siRNA sense strand
gaccagcucuccuguaugc

SEQ ID NO: 1998520 - RNA, 19 nt, Homo sapiens
  misc_RNA (1)...(19): siRNA sense strand
ggaaugaccauaccugaag

SEQ ID NO: 1998521 - RNA, 19 nt, Homo sapiens
  misc_RNA (1)...(19): siRNA sense strand
ucacagagcaggaacugaa

SEQ ID NO: 1998522 - RNA, 19 nt, Homo sapiens
  misc_RNA (1)...(19): siRNA sense strand
gcugaaauguuugcaggaa

SEQ ID NO: 1998523 - RNA, 19 nt, Homo sapiens
  misc_RNA (1)...(19): siRNA sense strand
gauccucgguuugcugaaa

SEQ ID NO: 1998524 - RNA, 19 nt, Homo sapiens
  misc_RNA (1)...(19): siRNA sense strand
gaaagaagggcagcaguca

SEQ ID NO: 1998525 - RNA, 19 nt, Homo sapiens
  misc_RNA (1)...(19): siRNA sense strand
gugaccagcucuccuguau

SEQ ID NO: 1998526 - RNA, 19 nt, Homo sapiens
  misc_RNA (1)...(19): siRNA sense strand
caacugugcaccucagaaa

SEQ ID NO: 1998527 - RNA, 19 nt, Homo sapiens
  misc_RNA (1)...(19): siRNA sense strand
cagaacaugucccaaaucu

SEQ ID NO: 1998528 - RNA, 19 nt, Homo sapiens
  misc_RNA (1)...(19): siRNA sense strand
gaaagagauccucgguuug

SEQ ID NO: 1998529 - RNA, 19 nt, Homo sapiens
  misc_RNA (1)...(19): siRNA sense strand
cggcauaacuccgauggaa

SEQ ID NO: 1998530 - RNA, 19 nt, Homo sapiens
  misc_RNA (1)...(19): siRNA sense strand
gacaaggcaguaaauauug

SEQ ID NO: 1998531 - RNA, 19 nt, Homo sapiens
  misc_RNA (1)...(19): siRNA sense strand
gaaaggcgcaaacggaaca

SEQ ID NO: 1998532 - RNA, 19 nt, Homo sapiens
  misc_RNA (1)...(19): siRNA sense strand
gcaacuauaacaucgaaga

SEQ ID NO: 1998533 - RNA, 19 nt, Homo sapiens
  misc_RNA (1)...(19): siRNA sense strand
gacagcaaaucccaucuca

SEQ ID NO: 1998534 - RNA, 19 nt, Homo sapiens
  misc_RNA (1)...(19): siRNA sense strand
gcucuucagugguucaugu

SEQ ID NO: 1998535 - RNA, 19 nt, Homo sapiens
  misc_RNA (1)...(19): siRNA sense strand
gcagaucuacucccaagga

SEQ ID NO: 1998536 - RNA, 19 nt, Homo sapiens
  misc_RNA (1)...(19): siRNA sense strand
ucgguuugcugaaauguuu

SEQ ID NO: 1998537 - RNA, 19 nt, Homo sapiens
  misc_RNA (1)...(19): siRNA sense strand
gaagugcaccagagagaug

SEQ ID NO: 1998538 - RNA, 19 nt, Homo sapiens
  misc_RNA (1)...(19): siRNA sense strand
gaaucauagugaaaucgaa

SEQ ID NO: 1998539 - RNA, 19 nt, Homo sapiens
  misc_RNA (1)...(19): siRNA sense strand
gccagaacaugucccaaau

SEQ ID NO: 1998540 - RNA, 19 nt, Homo sapiens
  misc_RNA (1)...(19): siRNA sense strand
ccaccuuccucuaaacaga

SEQ ID NO: 1998541 - RNA, 19 nt, Homo sapiens
  misc_RNA (1)...(19): siRNA sense strand
gaaagcggcguuccggaau

SEQ ID NO: 1998542 - RNA, 19 nt, Homo sapiens
  misc_RNA (1)...(19): siRNA sense strand
cagcaaaucccaucucagu

SEQ ID NO: 1998543 - RNA, 19 nt, Homo sapiens
  misc_RNA (1)...(19): siRNA sense strand
cuucagcucuucagugguu

SEQ ID NO: 1998544 - RNA, 19 nt, Homo sapiens
  misc_RNA (1)...(19): siRNA sense strand
gcaggugguuaagcugaaa

SEQ ID NO: 1998545 - RNA, 19 nt, Homo sapiens
  misc_RNA (1)...(19): siRNA sense strand
gcauaacuccgauggaauc

SEQ ID NO: 1998546 - RNA, 19 nt, Homo sapiens
  misc_RNA (1)...(19): siRNA sense strand
agaaggagaagcccaauau

SEQ ID NO: 1998547 - RNA, 19 nt, Homo sapiens
  misc_RNA (1)...(19): siRNA sense strand
gggacaaggcaguaaauau

SEQ ID NO: 1998548 - RNA, 19 nt, Homo sapiens
  misc_RNA (1)...(19): siRNA sense strand
gagagaaucauagugaaau

SEQ ID NO: 1998549 - RNA, 19 nt, Homo sapiens
  misc_RNA (1)...(19): siRNA sense strand
gcaacagcaggcagaauug

SEQ ID NO: 1998550 - RNA, 19 nt, Homo sapiens
  misc_RNA (1)...(19): siRNA sense strand
gaacccagcagaucuacuc

SEQ ID NO: 1998551 - RNA, 19 nt, Homo sapiens
  misc_RNA (1)...(19): siRNA sense strand
gaaggagaagcccaauaug

SEQ ID NO: 1998552 - RNA, 19 nt, Homo sapiens
  misc_RNA (1)...(19): siRNA sense strand
ugaagaagacgcugaugug

SEQ ID NO: 1998553 - RNA, 19 nt, Homo sapiens
  misc_RNA (1)...(19): siRNA sense strand
ggccagaacaugucccaaa

SEQ ID NO: 1998554 - RNA, 19 nt, Homo sapiens
  misc_RNA (1)...(19): siRNA sense strand
aaaggcggaugcaaucuuc

SEQ ID NO: 1998555 - RNA, 19 nt, Homo sapiens
  misc_RNA (1)...(19): siRNA sense strand
cugaugagauugaguacau

SEQ ID NO: 1998556 - RNA, 19 nt, Homo sapiens
  misc_RNA (1)...(19): siRNA sense strand
ccaaaucucccggcagcua

SEQ ID NO: 1998557 - RNA, 19 nt, Homo sapiens
  misc_RNA (1)...(19): siRNA sense strand
caaaucucccggcagcuaa

SEQ ID NO: 1998558 - RNA, 19 nt, Homo sapiens
  misc_RNA (1)...(19): siRNA sense strand
ggaccaccuuccucuaaac

SEQ ID NO: 1998559 - RNA, 19 nt, Homo sapiens
  misc_RNA (1)...(19): siRNA sense strand
ucaugugccuggagugaau

SEQ ID NO: 1998560 - RNA, 19 nt, Homo sapiens
  misc_RNA (1)...(19): siRNA sense strand
gaaccgggaguggauguug

SEQ ID NO: 1998561 - RNA, 19 nt, Homo sapiens
  misc_RNA (1)...(19): siRNA sense strand
gagacagggcgagugauuu

SEQ ID NO: 1998562 - RNA, 19 nt, Homo sapiens
  misc_RNA (1)...(19): siRNA sense strand
acuauaacaucgaagacuu

SEQ ID NO: 1998563 - RNA, 19 nt, Homo sapiens
  misc_RNA (1)...(19): siRNA sense strand
gcaggaacccagcagaucu

SEQ ID NO: 1998564 - RNA, 19 nt, Homo sapiens
  misc_RNA (1)...(19): siRNA sense strand
gcaccagagagauggauug

SEQ ID NO: 1998565 - RNA, 19 nt, Homo sapiens
  misc_RNA (1)...(19): siRNA sense strand
caacaccaacgucaagcaa

SEQ ID NO: 1998566 - RNA, 19 nt, Homo sapiens
  misc_RNA (1)...(19): siRNA sense strand
gcaccagcagcuucacauu

SEQ ID NO: 1998567 - RNA, 19 nt, Homo sapiens
  misc_RNA (1)...(19): siRNA sense strand
agacugggacggucaagaa

SEQ ID NO: 1998568 - RNA, 19 nt, Homo sapiens
  misc_RNA (1)...(19): siRNA sense strand
aggaugagguguggaaaug

SEQ ID NO: 1998569 - RNA, 19 nt, Homo sapiens
  misc_RNA (1)...(19): siRNA sense strand
uggcaacuauaacaucgaa

SEQ ID NO: 1998570 - RNA, 19 nt, Homo sapiens
  misc_RNA (1)...(19): siRNA sense strand
cagaucuacucccaaggaa

SEQ ID NO: 1998571 - RNA, 19 nt, Homo sapiens
  misc_RNA (1)...(19): siRNA sense strand
aagagagaaucauagugaa

SEQ ID NO: 1998572 - RNA, 19 nt, Homo sapiens
  misc_RNA (1)...(19): siRNA sense strand
gaauuagugcaucggagaa

SEQ ID NO: 1998573 - RNA, 19 nt, Homo sapiens
  misc_RNA (1)...(19): siRNA sense strand
gcaccaacaccaacgucaa

SEQ ID NO: 1998574 - RNA, 19 nt, Homo sapiens
  misc_RNA (1)...(19): siRNA sense strand
gcugagacagggcgaguga

SEQ ID NO: 1998575 - RNA, 19 nt, Homo sapiens
  misc_RNA (1)...(19): siRNA sense strand
ggacuggcaacuauaacau

SEQ ID NO: 1998576 - RNA, 19 nt, Homo sapiens
  misc_RNA (1)...(19): siRNA sense strand
uacaucaucugcaccaaca

SEQ ID NO: 1998577 - RNA, 19 nt, Homo sapiens
  misc_RNA (1)...(19): siRNA sense strand
gaugagguguggaaaugcu

SEQ ID NO: 1998578 - RNA, 19 nt, Homo sapiens
  misc_RNA (1)...(19): siRNA sense strand
gcgagugauuuaugugucu

SEQ ID NO: 1998579 - RNA, 19 nt, Homo sapiens
  misc_RNA (1)...(19): siRNA sense strand
ugagacagggcgagugauu

SEQ ID NO: 1998580 - RNA, 19 nt, Homo sapiens
  misc_RNA (1)...(19): siRNA sense strand
gaacaagaugacucaguac

SEQ ID NO: 1998581 - RNA, 19 nt, Homo sapiens
  misc_RNA (1)...(19): siRNA sense strand
caaccuaccagccgguguu

SEQ ID NO: 1998582 - RNA, 19 nt, Homo sapiens
  misc_RNA (1)...(19): siRNA sense strand
ccaagaaccgggaguggau

SEQ ID NO: 1998583 - RNA, 19 nt, Homo sapiens
  misc_RNA (1)...(19): siRNA sense strand
guguggaaaugcuccuuug

SEQ ID NO: 1998584 - RNA, 19 nt, Homo sapiens
  misc_RNA (1)...(19): siRNA sense strand
cugggacggucaagaaaga

SEQ ID NO: 1998585 - RNA, 19 nt, Homo sapiens
  misc_RNA (1)...(19): siRNA sense strand
ggaaaaggcggaugcaauc

SEQ ID NO: 1998586 - RNA, 19 nt, Homo sapiens
  misc_RNA (1)...(19): siRNA sense strand
ucccuauucugaugagauu

SEQ ID NO: 1998587 - RNA, 19 nt, Homo sapiens
  misc_RNA (1)...(19): siRNA sense strand
gaguucuuaucccggcaua

SEQ ID NO: 1998588 - RNA, 19 nt, Homo sapiens
  misc_RNA (1)...(19): siRNA sense strand
ggaaaagguucaggaaugg

SEQ ID NO: 1998589 - RNA, 19 nt, Homo sapiens
  misc_RNA (1)...(19): siRNA sense strand
uggaccaccuuccucuaaa

SEQ ID NO: 1998590 - RNA, 19 nt, Homo sapiens
  misc_RNA (1)...(19): siRNA sense strand
cagggcgagugauuuaugu

SEQ ID NO: 1998591 - RNA, 19 nt, Homo sapiens
  misc_RNA (1)...(19): siRNA sense strand
gugccuggagugaaugaua

SEQ ID NO: 1998592 - RNA, 19 nt, Homo sapiens
  misc_RNA (1)...(19): siRNA sense strand
agagagaaucauagugaaa

SEQ ID NO: 1998593 - RNA, 19 nt, Homo sapiens
  misc_RNA (1)...(19): siRNA sense strand
gcgcaaacggaacaagaug

SEQ ID NO: 1998594 - RNA, 19 nt, Homo sapiens
  misc_RNA (1)...(19): siRNA sense strand
cagacaagcucaccauccu

SEQ ID NO: 1998595 - RNA, 19 nt, Homo sapiens
  misc_RNA (1)...(19): siRNA sense strand
gagaaacacaccucaauga

SEQ ID NO: 1998596 - RNA, 19 nt, Homo sapiens
  misc_RNA (1)...(19): siRNA sense strand
ggugggcucuuucaaauuc

SEQ ID NO: 1998597 - RNA, 19 nt, Homo sapiens
  misc_RNA (1)...(19): siRNA sense strand
gaagauggcgcuggccuuu

SEQ ID NO: 1998598 - RNA, 19 nt, Homo sapiens
  misc_RNA (1)...(19): siRNA sense strand
ugaaggcccugucagaaga

SEQ ID NO: 1998599 - RNA, 19 nt, Homo sapiens
  misc_RNA (1)...(19): siRNA sense strand
ucaaagagcugcgagaaac

SEQ ID NO: 1998600 - RNA, 19 nt, Homo sapiens
  misc_RNA (1)...(19): siRNA sense strand
gcagaaaggagaugugauc

SEQ ID NO: 1998601 - RNA, 19 nt, Homo sapiens
  misc_RNA (1)...(19): siRNA sense strand
caaggugggcucuuucaaa

SEQ ID NO: 1998602 - RNA, 19 nt, Homo sapiens
  misc_RNA (1)...(19): siRNA sense strand
gcaagaggagcaugaacuu

SEQ ID NO: 1998603 - RNA, 19 nt, Homo sapiens
  misc_RNA (1)...(19): siRNA sense strand
agaaggagcccacucagaa

SEQ ID NO: 1998604 - RNA, 19 nt, Homo sapiens
  misc_RNA (1)...(19): siRNA sense strand
gaugauaacauuccagaag

SEQ ID NO: 1998605 - RNA, 19 nt, Homo sapiens
  misc_RNA (1)...(19): siRNA sense strand
gcagugaggaggcugaaga

SEQ ID NO: 1998606 - RNA, 19 nt, Homo sapiens
  misc_RNA (1)...(19): siRNA sense strand
gaaggaguuuaaucuggau

SEQ ID NO: 1998607 - RNA, 19 nt, Homo sapiens
  misc_RNA (1)...(19): siRNA sense strand
gaaguggagggcagugauu

SEQ ID NO: 1998608 - RNA, 19 nt, Homo sapiens
  misc_RNA (1)...(19): siRNA sense strand
gcagugauuucccgaacca

SEQ ID NO: 1998609 - RNA, 19 nt, Homo sapiens
  misc_RNA (1)...(19): siRNA sense strand
gaagaugggcaagaugaug

SEQ ID NO: 1998610 - RNA, 19 nt, Homo sapiens
  misc_RNA (1)...(19): siRNA sense strand
gagaaggagcccacucaga

SEQ ID NO: 1998611 - RNA, 19 nt, Homo sapiens
  misc_RNA (1)...(19): siRNA sense strand
aaggugggcucuuucaaau

SEQ ID NO: 1998612 - RNA, 19 nt, Homo sapiens
  misc_RNA (1)...(19): siRNA sense strand
ggagcccacucagaagaaa

SEQ ID NO: 1998613 - RNA, 19 nt, Homo sapiens
  misc_RNA (1)...(19): siRNA sense strand
ccagcagcuucaaggauuu

SEQ ID NO: 1998614 - RNA, 19 nt, Homo sapiens
  misc_RNA (1)...(19): siRNA sense strand
gcgagaaacacaccucaau

SEQ ID NO: 1998615 - RNA, 19 nt, Homo sapiens
  misc_RNA (1)...(19): siRNA sense strand
gcgagaaggaguuuaaucu

SEQ ID NO: 1998616 - RNA, 19 nt, Homo sapiens
  misc_RNA (1)...(19): siRNA sense strand
uccagcagcuucaaggauu

SEQ ID NO: 1998617 - RNA, 19 nt, Homo sapiens
  misc_RNA (1)...(19): siRNA sense strand
ugagcgagaaggaguuuaa

SEQ ID NO: 1998618 - RNA, 19 nt, Homo sapiens
  misc_RNA (1)...(19): siRNA sense strand
gaguuuaaucuggaugaua

SEQ ID NO: 1998619 - RNA, 19 nt, Homo sapiens
  misc_RNA (1)...(19): siRNA sense strand
cgagaaacacaccucaaug

SEQ ID NO: 1998620 - RNA, 19 nt, Homo sapiens
  misc_RNA (1)...(19): siRNA sense strand
cgacagagcaagggcaaga

SEQ ID NO: 1998621 - RNA, 19 nt, Homo sapiens
  misc_RNA (1)...(19): siRNA sense strand
gaaggagcccacucagaag

SEQ ID NO: 1998622 - RNA, 19 nt, Homo sapiens
  misc_RNA (1)...(19): siRNA sense strand
gaccacgacucgcugaaac

SEQ ID NO: 1998623 - RNA, 19 nt, Homo sapiens
  misc_RNA (1)...(19): siRNA sense strand
acaggaagaugggcaagau

SEQ ID NO: 1998624 - RNA, 19 nt, Homo sapiens
  misc_RNA (1)...(19): siRNA sense strand
aaggagaugugauccagau

SEQ ID NO: 1998625 - RNA, 19 nt, Homo sapiens
  misc_RNA (1)...(19): siRNA sense strand
ugauaacauuccagaagau

SEQ ID NO: 1998626 - RNA, 19 nt, Homo sapiens
  misc_RNA (1)...(19): siRNA sense strand
caaauucaucuauguggau

SEQ ID NO: 1998627 - RNA, 19 nt, Homo sapiens
  misc_RNA (1)...(19): siRNA sense strand
ggugaaggcccugucagaa

SEQ ID NO: 1998628 - RNA, 19 nt, Homo sapiens
  misc_RNA (1)...(19): siRNA sense strand
augauaacauuccagaaga

SEQ ID NO: 1998629 - RNA, 19 nt, Homo sapiens
  misc_RNA (1)...(19): siRNA sense strand
gcgcgacucaggcugcuuu

SEQ ID NO: 1998630 - RNA, 19 nt, Homo sapiens
  misc_RNA (1)...(19): siRNA sense strand
gauaacauuccagaagaug

SEQ ID NO: 1998631 - RNA, 19 nt, Homo sapiens
  misc_RNA (1)...(19): siRNA sense strand
ggaguuuaaucuggaugau

SEQ ID NO: 1998632 - RNA, 19 nt, Homo sapiens
  misc_RNA (1)...(19): siRNA sense strand
gcaaggugggcucuuucaa

SEQ ID NO: 1998633 - RNA, 19 nt, Homo sapiens
  misc_RNA (1)...(19): siRNA sense strand
ccgagcugcugcuggacua

SEQ ID NO: 1998634 - RNA, 19 nt, Homo sapiens
  misc_RNA (1)...(19): siRNA sense strand
gugauuucccgaaccauga

SEQ ID NO: 1998635 - RNA, 19 nt, Homo sapiens
  misc_RNA (1)...(19): siRNA sense strand
ggaagaugggcaagaugau

SEQ ID NO: 1998636 - RNA, 19 nt, Homo sapiens
  misc_RNA (1)...(19): siRNA sense strand
cauccacccuccugcucaa

SEQ ID NO: 1998637 - RNA, 19 nt, Homo sapiens
  misc_RNA (1)...(19): siRNA sense strand
gcucaauggcuaccagaca

SEQ ID NO: 1998638 - RNA, 19 nt, Homo sapiens
  misc_RNA (1)...(19): siRNA sense strand
agaagaugcugggaagagu

SEQ ID NO: 1998639 - RNA, 19 nt, Homo sapiens
  misc_RNA (1)...(19): siRNA sense strand
ccaaugccagugagaagga

SEQ ID NO: 1998640 - RNA, 19 nt, Homo sapiens
  misc_RNA (1)...(19): siRNA sense strand
cgagaaggaguuuaaucug

SEQ ID NO: 1998641 - RNA, 19 nt, Homo sapiens
  misc_RNA (1)...(19): siRNA sense strand
cccgaaccaugaacaggaa

SEQ ID NO: 1998642 - RNA, 19 nt, Homo sapiens
  misc_RNA (1)...(19): siRNA sense strand
caaagagcugcgagaaaca

SEQ ID NO: 1998643 - RNA, 19 nt, Homo sapiens
  misc_RNA (1)...(19): siRNA sense strand
uggcugggccuacucaaug

SEQ ID NO: 1998644 - RNA, 19 nt, Homo sapiens
  misc_RNA (1)...(19): siRNA sense strand
cgacaucuccagacuacag

SEQ ID NO: 1998645 - RNA, 19 nt, Homo sapiens
  misc_RNA (1)...(19): siRNA sense strand
gugaaggcccugucagaag

SEQ ID NO: 1998646 - RNA, 19 nt, Homo sapiens
  misc_RNA (1)...(19): siRNA sense strand
ugggcaagaugauggugaa

SEQ ID NO: 1998647 - RNA, 19 nt, Homo sapiens
  misc_RNA (1)...(19): siRNA sense strand
gaaacugcagaaaggagau

SEQ ID NO: 1998648 - RNA, 19 nt, Homo sapiens
  misc_RNA (1)...(19): siRNA sense strand
aggaagaugggcaagauga

SEQ ID NO: 1998649 - RNA, 19 nt, Homo sapiens
  misc_RNA (1)...(19): siRNA sense strand
gaaccaugaacaggaagau

SEQ ID NO: 1998650 - RNA, 19 nt, Homo sapiens
  misc_RNA (1)...(19): siRNA sense strand
ccacccuccugcucaaugg

SEQ ID NO: 1998651 - RNA, 19 nt, Homo sapiens
  misc_RNA (1)...(19): siRNA sense strand
cccgacaucuccagacuac

SEQ ID NO: 1998652 - RNA, 19 nt, Homo sapiens
  misc_RNA (1)...(19): siRNA sense strand
gcccuggcccugagaagau

SEQ ID NO: 1998653 - RNA, 19 nt, Homo sapiens
  misc_RNA (1)...(19): siRNA sense strand
caagaggagcaugaacuuc

SEQ ID NO: 1998654 - RNA, 19 nt, Homo sapiens
  misc_RNA (1)...(19): siRNA sense strand
ggugagcgagaaggaguuu

SEQ ID NO: 1998655 - RNA, 19 nt, Homo sapiens
  misc_RNA (1)...(19): siRNA sense strand
agccuaagacccugcauga

SEQ ID NO: 1998656 - RNA, 19 nt, Homo sapiens
  misc_RNA (1)...(19): siRNA sense strand
gaacagaucugaaagaguu

SEQ ID NO: 1998657 - RNA, 19 nt, Homo sapiens
  misc_RNA (1)...(19): siRNA sense strand
caagggaacuuuaggauua

SEQ ID NO: 1998658 - RNA, 19 nt, Homo sapiens
  misc_RNA (1)...(19): siRNA sense strand
ucagaaacgugaagaauua

SEQ ID NO: 1998659 - RNA, 19 nt, Homo sapiens
  misc_RNA (1)...(19): siRNA sense strand
gaagaaauauccguaugua

SEQ ID NO: 1998660 - RNA, 19 nt, Homo sapiens
  misc_RNA (1)...(19): siRNA sense strand
caaaggagaucacagauau

SEQ ID NO: 1998661 - RNA, 19 nt, Homo sapiens
  misc_RNA (1)...(19): siRNA sense strand
gcuagacccugaugaguua

SEQ ID NO: 1998662 - RNA, 19 nt, Homo sapiens
  misc_RNA (1)...(19): siRNA sense strand
gcugugagcucagaacuua

SEQ ID NO: 1998663 - RNA, 19 nt, Homo sapiens
  misc_RNA (1)...(19): siRNA sense strand
gaaugaagcucggguaaug

SEQ ID NO: 1998664 - RNA, 19 nt, Homo sapiens
  misc_RNA (1)...(19): siRNA sense strand
gcugagauguuccuuagua

SEQ ID NO: 1998665 - RNA, 19 nt, Homo sapiens
  misc_RNA (1)...(19): siRNA sense strand
ggaauggauuucagucuuu

SEQ ID NO: 1998666 - RNA, 19 nt, Homo sapiens
  misc_RNA (1)...(19): siRNA sense strand
gaaccgaaguggaagagaa

SEQ ID NO: 1998667 - RNA, 19 nt, Homo sapiens
  misc_RNA (1)...(19): siRNA sense strand
ccaaggaaaucuaugauga

SEQ ID NO: 1998668 - RNA, 19 nt, Homo sapiens
  misc_RNA (1)...(19): siRNA sense strand
gaacgagacuaccuggauu

SEQ ID NO: 1998669 - RNA, 19 nt, Homo sapiens
  misc_RNA (1)...(19): siRNA sense strand
ccaaagagauaagcuauga

SEQ ID NO: 1998670 - RNA, 19 nt, Homo sapiens
  misc_RNA (1)...(19): siRNA sense strand
caaccucucuuacaacaaa

SEQ ID NO: 1998671 - RNA, 19 nt, Homo sapiens
  misc_RNA (1)...(19): siRNA sense strand
gaaaggaacugagguaaac

SEQ ID NO: 1998672 - RNA, 19 nt, Homo sapiens
  misc_RNA (1)...(19): siRNA sense strand
ccaaugaaauggcaccuuu

SEQ ID NO: 1998673 - RNA, 19 nt, Homo sapiens
  misc_RNA (1)...(19): siRNA sense strand
ugaacuaucugacaaagaa

SEQ ID NO: 1998674 - RNA, 19 nt, Homo sapiens
  misc_RNA (1)...(19): siRNA sense strand
gcagauagcagcugaugaa

SEQ ID NO: 1998675 - RNA, 19 nt, Homo sapiens
  misc_RNA (1)...(19): siRNA sense strand
gacaggaguuugcuauaaa

SEQ ID NO: 1998676 - RNA, 19 nt, Homo sapiens
  misc_RNA (1)...(19): siRNA sense strand
cccaagaaguggaugauua

SEQ ID NO: 1998677 - RNA, 19 nt, Homo sapiens
  misc_RNA (1)...(19): siRNA sense strand
guagagagcaccaaugaaa

SEQ ID NO: 1998678 - RNA, 19 nt, Homo sapiens
  misc_RNA (1)...(19): siRNA sense strand
aguaugagcuuguucagua

SEQ ID NO: 1998679 - RNA, 19 nt, Homo sapiens
  misc_RNA (1)...(19): siRNA sense strand
ggaagcagcugugcggauu

SEQ ID NO: 1998680 - RNA, 19 nt, Homo sapiens
  misc_RNA (1)...(19): siRNA sense strand
ugacaggaguuugcuauaa

SEQ ID NO: 1998681 - RNA, 19 nt, Homo sapiens
  misc_RNA (1)...(19): siRNA sense strand
gaaaccaucacaaugcaua

SEQ ID NO: 1998682 - RNA, 19 nt, Homo sapiens
  misc_RNA (1)...(19): siRNA sense strand
gagaagaaauauccguaug

SEQ ID NO: 1998683 - RNA, 19 nt, Homo sapiens
  misc_RNA (1)...(19): siRNA sense strand
auagugagcucuuuaauca

SEQ ID NO: 1998684 - RNA, 19 nt, Homo sapiens
  misc_RNA (1)...(19): siRNA sense strand
gagcugacauugcggaguu

SEQ ID NO: 1998685 - RNA, 19 nt, Homo sapiens
  misc_RNA (1)...(19): siRNA sense strand
caucagaaauccaguaaca

SEQ ID NO: 1998686 - RNA, 19 nt, Homo sapiens
  misc_RNA (1)...(19): siRNA sense strand
gaaauauccguauguagaa

SEQ ID NO: 1998687 - RNA, 19 nt, Homo sapiens
  misc_RNA (1)...(19): siRNA sense strand
ggaagagaaucagaaguau

SEQ ID NO: 1998688 - RNA, 19 nt, Homo sapiens
  misc_RNA (1)...(19): siRNA sense strand
ucacauggauuuagauaca

SEQ ID NO: 1998689 - RNA, 19 nt, Homo sapiens
  misc_RNA (1)...(19): siRNA sense strand
aaagaagacuugugaaucu

SEQ ID NO: 1998690 - RNA, 19 nt, Homo sapiens
  misc_RNA (1)...(19): siRNA sense strand
aaacaugaaucugagagua

SEQ ID NO: 1998691 - RNA, 19 nt, Homo sapiens
  misc_RNA (1)...(19): siRNA sense strand
gggcagcucuccaaacuca

SEQ ID NO: 1998692 - RNA, 19 nt, Homo sapiens
  misc_RNA (1)...(19): siRNA sense strand
gagauaagcuaugagaaca

SEQ ID NO: 1998693 - RNA, 19 nt, Homo sapiens
  misc_RNA (1)...(19): siRNA sense strand
gaaagaagacuugugaauc

SEQ ID NO: 1998694 - RNA, 19 nt, Homo sapiens
  misc_RNA (1)...(19): siRNA sense strand
ggacuacaguuuaccuuag

SEQ ID NO: 1998695 - RNA, 19 nt, Homo sapiens
  misc_RNA (1)...(19): siRNA sense strand
ucaauaauccugccaaaga

SEQ ID NO: 1998696 - RNA, 19 nt, Homo sapiens
  misc_RNA (1)...(19): siRNA sense strand
gaucaauaauccugccaaa

SEQ ID NO: 1998697 - RNA, 19 nt, Homo sapiens
  misc_RNA (1)...(19): siRNA sense strand
ggaaagaagacuugugaau

SEQ ID NO: 1998698 - RNA, 19 nt, Homo sapiens
  misc_RNA (1)...(19): siRNA sense strand
ccaagacuccugugaaauu

SEQ ID NO: 1998699 - RNA, 19 nt, Homo sapiens
  misc_RNA (1)...(19): siRNA sense strand
uagaagagguggacagugu

SEQ ID NO: 1998700 - RNA, 19 nt, Homo sapiens
  misc_RNA (1)...(19): siRNA sense strand
ggaugauuaugcuagauuu

SEQ ID NO: 1998701 - RNA, 19 nt, Homo sapiens
  misc_RNA (1)...(19): siRNA sense strand
gaaggccuuucucugcaua

SEQ ID NO: 1998702 - RNA, 19 nt, Homo sapiens
  misc_RNA (1)...(19): siRNA sense strand
ugaaggaucuuagucagaa

SEQ ID NO: 1998703 - RNA, 19 nt, Homo sapiens
  misc_RNA (1)...(19): siRNA sense strand
acagauaucccucgucuaa

SEQ ID NO: 1998704 - RNA, 19 nt, Homo sapiens
  misc_RNA (1)...(19): siRNA sense strand
guaauaauccgaugaccaa

SEQ ID NO: 1998705 - RNA, 19 nt, Homo sapiens
  misc_RNA (1)...(19): siRNA sense strand
gaauggcuuuggugugaaa

SEQ ID NO: 1998706 - RNA, 19 nt, Homo sapiens
  misc_RNA (1)...(19): siRNA sense strand
ugaaagaacucagaaagca

SEQ ID NO: 1998707 - RNA, 19 nt, Homo sapiens
  misc_RNA (1)...(19): siRNA sense strand
gauuggcucugaggaauuu

SEQ ID NO: 1998708 - RNA, 19 nt, Homo sapiens
  misc_RNA (1)...(19): siRNA sense strand
gcuuggauccucagacuua

SEQ ID NO: 1998709 - RNA, 19 nt, Homo sapiens
  misc_RNA (1)...(19): siRNA sense strand
gaaacgugaagaauuauga

SEQ ID NO: 1998710 - RNA, 19 nt, Homo sapiens
  misc_RNA (1)...(19): siRNA sense strand
ccgagaagguccucagaaa

SEQ ID NO: 1998711 - RNA, 19 nt, Homo sapiens
  misc_RNA (1)...(19): siRNA sense strand
uuaaaucccucccucaaga

SEQ ID NO: 1998712 - RNA, 19 nt, Homo sapiens
  misc_RNA (1)...(19): siRNA sense strand
gggcgaaaguaucauauca

SEQ ID NO: 1998713 - RNA, 19 nt, Homo sapiens
  misc_RNA (1)...(19): siRNA sense strand
ugaaagcccuguggugauu

SEQ ID NO: 1998714 - RNA, 19 nt, Homo sapiens
  misc_RNA (1)...(19): siRNA sense strand
gaacucagaaagcaucuug

SEQ ID NO: 1998715 - RNA, 19 nt, Homo sapiens
  misc_RNA (1)...(19): siRNA sense strand
guuagaagccagugaguuu

SEQ ID NO: 1998716 - RNA, 19 nt, Homo sapiens
  misc_RNA (1)...(19): siRNA sense strand
aucaagaucugcccaauaa

SEQ ID NO: 1998717 - RNA, 19 nt, Homo sapiens
  misc_RNA (1)...(19): siRNA sense strand
uaccuuacauggcaaauga

SEQ ID NO: 1998718 - RNA, 19 nt, Homo sapiens
  misc_RNA (1)...(19): siRNA sense strand
gggacgcucugaagauauu

SEQ ID NO: 1998719 - RNA, 19 nt, Homo sapiens
  misc_RNA (1)...(19): siRNA sense strand
gggaauggauuucagucuu

SEQ ID NO: 1998720 - RNA, 19 nt, Homo sapiens
  misc_RNA (1)...(19): siRNA sense strand
caggauauauucagucugu

SEQ ID NO: 1998721 - RNA, 19 nt, Homo sapiens
  misc_RNA (1)...(19): siRNA sense strand
gaagagaaucagaaguauu

SEQ ID NO: 1998722 - RNA, 19 nt, Homo sapiens
  misc_RNA (1)...(19): siRNA sense strand
agaaggauguaauucguuu

SEQ ID NO: 1998723 - RNA, 19 nt, Homo sapiens
  misc_RNA (1)...(19): siRNA sense strand
uaccaaagccagagcaaua

SEQ ID NO: 1998724 - RNA, 19 nt, Homo sapiens
  misc_RNA (1)...(19): siRNA sense strand
aagaauggcuuugguguga

SEQ ID NO: 1998725 - RNA, 19 nt, Homo sapiens
  misc_RNA (1)...(19): siRNA sense strand
uaccaagacuccugugaaa

SEQ ID NO: 1998726 - RNA, 19 nt, Homo sapiens
  misc_RNA (1)...(19): siRNA sense strand
gauuuaacagcgaguaaua

SEQ ID NO: 1998727 - RNA, 19 nt, Homo sapiens
  misc_RNA (1)...(19): siRNA sense strand
uaaugacucugaagauguu

SEQ ID NO: 1998728 - RNA, 19 nt, Homo sapiens
  misc_RNA (1)...(19): siRNA sense strand
ggauuuagauacacaggau

SEQ ID NO: 1998729 - RNA, 19 nt, Homo sapiens
  misc_RNA (1)...(19): siRNA sense strand
gagauuggcucugaggaau

SEQ ID NO: 1998730 - RNA, 19 nt, Homo sapiens
  misc_RNA (1)...(19): siRNA sense strand
uaacagccuuucaaaucuu

SEQ ID NO: 1998731 - RNA, 19 nt, Homo sapiens
  misc_RNA (1)...(19): siRNA sense strand
gcgaaaguaucauaucagu

SEQ ID NO: 1998732 - RNA, 19 nt, Homo sapiens
  misc_RNA (1)...(19): siRNA sense strand
gcaagauaaagaugacaua

SEQ ID NO: 1998733 - RNA, 19 nt, Homo sapiens
  misc_RNA (1)...(19): siRNA sense strand
gcagugaucagcaauggaa

SEQ ID NO: 1998734 - RNA, 19 nt, Homo sapiens
  misc_RNA (1)...(19): siRNA sense strand
gagacuaccuggauuuaac

SEQ ID NO: 1998735 - RNA, 19 nt, Homo sapiens
  misc_RNA (1)...(19): siRNA sense strand
ccaaagagcgguguacuug

SEQ ID NO: 1998736 - RNA, 19 nt, Homo sapiens
  misc_RNA (1)...(19): siRNA sense strand
ucaauggacuucacaugga

SEQ ID NO: 1998737 - RNA, 19 nt, Homo sapiens
  misc_RNA (1)...(19): siRNA sense strand
agaagacagucaagagaaa

SEQ ID NO: 1998738 - RNA, 19 nt, Homo sapiens
  misc_RNA (1)...(19): siRNA sense strand
cuacagauccgcuuucaga

SEQ ID NO: 1998739 - RNA, 19 nt, Homo sapiens
  misc_RNA (1)...(19): siRNA sense strand
gugaaauucugguucuuga

SEQ ID NO: 1998740 - RNA, 19 nt, Homo sapiens
  misc_RNA (1)...(19): siRNA sense strand
ggaagugaagcaagauaaa

SEQ ID NO: 1998741 - RNA, 19 nt, Homo sapiens
  misc_RNA (1)...(19): siRNA sense strand
ccagagauuucuuucacuu

SEQ ID NO: 1998742 - RNA, 19 nt, Homo sapiens
  misc_RNA (1)...(19): siRNA sense strand
agaaauauccguauguaga

SEQ ID NO: 1998743 - RNA, 19 nt, Homo sapiens
  misc_RNA (1)...(19): siRNA sense strand
ggagguugauagcagauau

SEQ ID NO: 1998744 - RNA, 19 nt, Homo sapiens
  misc_RNA (1)...(19): siRNA sense strand
cuacuaucaugcaauauug

SEQ ID NO: 1998745 - RNA, 19 nt, Homo sapiens
  misc_RNA (1)...(19): siRNA sense strand
gaacgaagacuugcugagu

SEQ ID NO: 1998746 - RNA, 19 nt, Homo sapiens
  misc_RNA (1)...(19): siRNA sense strand
gaagggacgcucugaagau

SEQ ID NO: 1998747 - RNA, 19 nt, Homo sapiens
  misc_RNA (1)...(19): siRNA sense strand
gcagaagacagucaagaga

SEQ ID NO: 1998748 - RNA, 19 nt, Homo sapiens
  misc_RNA (1)...(19): siRNA sense strand
gcacagagacuugcuccuu

SEQ ID NO: 1998749 - RNA, 19 nt, Homo sapiens
  misc_RNA (1)...(19): siRNA sense strand
uaacagcgaguaauaacuu

SEQ ID NO: 1998750 - RNA, 19 nt, Homo sapiens
  misc_RNA (1)...(19): siRNA sense strand
ggauugauucugcuuauga

SEQ ID NO: 1998751 - RNA, 19 nt, Homo sapiens
  misc_RNA (1)...(19): siRNA sense strand
cagcugagauguuccuuag

SEQ ID NO: 1998752 - RNA, 19 nt, Homo sapiens
  misc_RNA (1)...(19): siRNA sense strand
ggauauauucagucuguuu

SEQ ID NO: 1998753 - RNA, 19 nt, Homo sapiens
  misc_RNA (1)...(19): siRNA sense strand
gauagcagcugaugaaccu

SEQ ID NO: 1998754 - RNA, 19 nt, Homo sapiens
  misc_RNA (1)...(19): siRNA sense strand
cacagagacuugcuccuuu

SEQ ID NO: 1998755 - RNA, 19 nt, Homo sapiens
  misc_RNA (1)...(19): siRNA sense strand
uguaguggcugcugaguau

SEQ ID NO: 1998756 - RNA, 19 nt, Homo sapiens
  misc_RNA (1)...(19): siRNA sense strand
ggaaggagaugccugaaga

SEQ ID NO: 1998757 - RNA, 19 nt, Homo sapiens
  misc_RNA (1)...(19): siRNA sense strand
ggagaaguguuuaagauga

SEQ ID NO: 1998758 - RNA, 19 nt, Homo sapiens
  misc_RNA (1)...(19): siRNA sense strand
ggagaugccugaagacaga

SEQ ID NO: 1998759 - RNA, 19 nt, Homo sapiens
  misc_RNA (1)...(19): siRNA sense strand
gaaagcaacugacacucuu

SEQ ID NO: 1998760 - RNA, 19 nt, Homo sapiens
  misc_RNA (1)...(19): siRNA sense strand
agaaauaccuggaucaguu

SEQ ID NO: 1998761 - RNA, 19 nt, Homo sapiens
  misc_RNA (1)...(19): siRNA sense strand
agaccaagcugauauuuga

SEQ ID NO: 1998762 - RNA, 19 nt, Homo sapiens
  misc_RNA (1)...(19): siRNA sense strand
gaauguaacugccuaagag

SEQ ID NO: 1998763 - RNA, 19 nt, Homo sapiens
  misc_RNA (1)...(19): siRNA sense strand
ccaaggaagucauuaagga

SEQ ID NO: 1998764 - RNA, 19 nt, Homo sapiens
  misc_RNA (1)...(19): siRNA sense strand
gcagagcccucauccugaa

SEQ ID NO: 1998765 - RNA, 19 nt, Homo sapiens
  misc_RNA (1)...(19): siRNA sense strand
gaaggaagcaguccagguu

SEQ ID NO: 1998766 - RNA, 19 nt, Homo sapiens
  misc_RNA (1)...(19): siRNA sense strand
aagauggacuuaagugaua

SEQ ID NO: 1998767 - RNA, 19 nt, Homo sapiens
  misc_RNA (1)...(19): siRNA sense strand
gaaccuguguggaagaaau

SEQ ID NO: 1998768 - RNA, 19 nt, Homo sapiens
  misc_RNA (1)...(19): siRNA sense strand
cauaaucggucucaucaug

SEQ ID NO: 1998769 - RNA, 19 nt, Homo sapiens
  misc_RNA (1)...(19): siRNA sense strand
ggaagucauuaaggaauuu

SEQ ID NO: 1998770 - RNA, 19 nt, Homo sapiens
  misc_RNA (1)...(19): siRNA sense strand
gaaauaccuggaucaguuu

SEQ ID NO: 1998771 - RNA, 19 nt, Homo sapiens
  misc_RNA (1)...(19): siRNA sense strand
acaaugcggucaucagaaa

SEQ ID NO: 1998772 - RNA, 19 nt, Homo sapiens
  misc_RNA (1)...(19): siRNA sense strand
gcggugaaaugcagucuga

SEQ ID NO: 1998773 - RNA, 19 nt, Homo sapiens
  misc_RNA (1)...(19): siRNA sense strand
gaagauggacuuaagugau

SEQ ID NO: 1998774 - RNA, 19 nt, Homo sapiens
  misc_RNA (1)...(19): siRNA sense strand
acacugggcugucggaguu

SEQ ID NO: 1998775 - RNA, 19 nt, Homo sapiens
  misc_RNA (1)...(19): siRNA sense strand
ugucagagcuccucaaacu

SEQ ID NO: 1998776 - RNA, 19 nt, Homo sapiens
  misc_RNA (1)...(19): siRNA sense strand
gaacaagucccagcaccuu

SEQ ID NO: 1998777 - RNA, 19 nt, Homo sapiens
  misc_RNA (1)...(19): siRNA sense strand
gagaaguguuuaagaugau

SEQ ID NO: 1998778 - RNA, 19 nt, Homo sapiens
  misc_RNA (1)...(19): siRNA sense strand
gcccauggcuggaaugagu

SEQ ID NO: 1998779 - RNA, 19 nt, Homo sapiens
  misc_RNA (1)...(19): siRNA sense strand
caacaaugcggucaucaga

SEQ ID NO: 1998780 - RNA, 19 nt, Homo sapiens
  misc_RNA (1)...(19): siRNA sense strand
cgaugacguucacuuguuu

SEQ ID NO: 1998781 - RNA, 19 nt, Homo sapiens
  misc_RNA (1)...(19): siRNA sense strand
gcucugcccuggugagugu

SEQ ID NO: 1998782 - RNA, 19 nt, Homo sapiens
  misc_RNA (1)...(19): siRNA sense strand
gaugcaggcugaagagaca

SEQ ID NO: 1998783 - RNA, 19 nt, Homo sapiens
  misc_RNA (1)...(19): siRNA sense strand
cauggaagccgcugccuuu

SEQ ID NO: 1998784 - RNA, 19 nt, Homo sapiens
  misc_RNA (1)...(19): siRNA sense strand
ggaucaacaucaucaugga

SEQ ID NO: 1998785 - RNA, 19 nt, Homo sapiens
  misc_RNA (1)...(19): siRNA sense strand
ggacucugacugccaauga

SEQ ID NO: 1998786 - RNA, 19 nt, Homo sapiens
  misc_RNA (1)...(19): siRNA sense strand
cgaugaagauggacuuaag

SEQ ID NO: 1998787 - RNA, 19 nt, Homo sapiens
  misc_RNA (1)...(19): siRNA sense strand
gguagagcccguugacaaa

SEQ ID NO: 1998788 - RNA, 19 nt, Homo sapiens
  misc_RNA (1)...(19): siRNA sense strand
gacauuuacuucaugaaag

SEQ ID NO: 1998789 - RNA, 19 nt, Homo sapiens
  misc_RNA (1)...(19): siRNA sense strand
ggaagccgcugccuuucag

SEQ ID NO: 1998790 - RNA, 19 nt, Homo sapiens
  misc_RNA (1)...(19): siRNA sense strand
gaggaaggcaaggguauuu

SEQ ID NO: 1998791 - RNA, 19 nt, Homo sapiens
  misc_RNA (1)...(19): siRNA sense strand
ggaaagcaacugacacucu

SEQ ID NO: 1998792 - RNA, 19 nt, Homo sapiens
  misc_RNA (1)...(19): siRNA sense strand
gcaccugcuugcucgagaa

SEQ ID NO: 1998793 - RNA, 19 nt, Homo sapiens
  misc_RNA (1)...(19): siRNA sense strand
ucagagcuccucaaacuau

SEQ ID NO: 1998794 - RNA, 19 nt, Homo sapiens
  misc_RNA (1)...(19): siRNA sense strand
gucacuggcuugugccuuu

SEQ ID NO: 1998795 - RNA, 19 nt, Homo sapiens
  misc_RNA (1)...(19): siRNA sense strand
gaagccgagccauguagua

SEQ ID NO: 1998796 - RNA, 19 nt, Homo sapiens
  misc_RNA (1)...(19): siRNA sense strand
ggaagaaauaccuggauca

SEQ ID NO: 1998797 - RNA, 19 nt, Homo sapiens
  misc_RNA (1)...(19): siRNA sense strand
gcgggacccucuuuaucuu

SEQ ID NO: 1998798 - RNA, 19 nt, Homo sapiens
  misc_RNA (1)...(19): siRNA sense strand
gcaccacgacgaugacguu

SEQ ID NO: 1998799 - RNA, 19 nt, Homo sapiens
  misc_RNA (1)...(19): siRNA sense strand
gggagucuguacccuguug

SEQ ID NO: 1998800 - RNA, 19 nt, Homo sapiens
  misc_RNA (1)...(19): siRNA sense strand
gaugcacccugaagaugug

SEQ ID NO: 1998801 - RNA, 19 nt, Homo sapiens
  misc_RNA (1)...(19): siRNA sense strand
caaggaagucauuaaggaa

SEQ ID NO: 1998802 - RNA, 19 nt, Homo sapiens
  misc_RNA (1)...(19): siRNA sense strand
ucggagaaguguuuaagau

SEQ ID NO: 1998803 - RNA, 19 nt, Homo sapiens
  misc_RNA (1)...(19): siRNA sense strand
agaaguggauggcggugaa

SEQ ID NO: 1998804 - RNA, 19 nt, Homo sapiens
  misc_RNA (1)...(19): siRNA sense strand
gcagcguucucuguucuga

SEQ ID NO: 1998805 - RNA, 19 nt, Homo sapiens
  misc_RNA (1)...(19): siRNA sense strand
ggucucaucaugcucauug

SEQ ID NO: 1998806 - RNA, 19 nt, Homo sapiens
  misc_RNA (1)...(19): siRNA sense strand
gaguacaggucggagaaau

SEQ ID NO: 1998807 - RNA, 19 nt, Homo sapiens
  misc_RNA (1)...(19): siRNA sense strand
ggguagagcccguugacaa

SEQ ID NO: 1998808 - RNA, 19 nt, Homo sapiens
  misc_RNA (1)...(19): siRNA sense strand
gagcaucuccgcccugagu

SEQ ID NO: 1998809 - RNA, 19 nt, Homo sapiens
  misc_RNA (1)...(19): siRNA sense strand
guucagagcagaaguggau

SEQ ID NO: 1998810 - RNA, 19 nt, Homo sapiens
  misc_RNA (1)...(19): siRNA sense strand
aaagagauuccauucaguu

SEQ ID NO: 1998811 - RNA, 19 nt, Homo sapiens
  misc_RNA (1)...(19): siRNA sense strand
gcgaaccuguguggaagaa

SEQ ID NO: 1998812 - RNA, 19 nt, Homo sapiens
  misc_RNA (1)...(19): siRNA sense strand
uaacuggauuggccucauc

SEQ ID NO: 1998813 - RNA, 19 nt, Homo sapiens
  misc_RNA (1)...(19): siRNA sense strand
gguggaugaugacuucuca

SEQ ID NO: 1998814 - RNA, 19 nt, Homo sapiens
  misc_RNA (1)...(19): siRNA sense strand
acagugacccagcuuguaa

SEQ ID NO: 1998815 - RNA, 19 nt, Homo sapiens
  misc_RNA (1)...(19): siRNA sense strand
gagauuccauucaguucag

SEQ ID NO: 1998816 - RNA, 19 nt, Homo sapiens
  misc_RNA (1)...(19): siRNA sense strand
ucaguucggagaaguguuu

SEQ ID NO: 1998817 - RNA, 19 nt, Homo sapiens
  misc_RNA (1)...(19): siRNA sense strand
ccaagagaguccagaugca

SEQ ID NO: 1998818 - RNA, 19 nt, Homo sapiens
  misc_RNA (1)...(19): siRNA sense strand
ggccucauccgucuucauu

SEQ ID NO: 1998819 - RNA, 19 nt, Homo sapiens
  misc_RNA (1)...(19): siRNA sense strand
cgacgaugacguucacuug

SEQ ID NO: 1998820 - RNA, 19 nt, Homo sapiens
  misc_RNA (1)...(19): siRNA sense strand
ggucaucgugaagaaguua

SEQ ID NO: 1998821 - RNA, 19 nt, Homo sapiens
  misc_RNA (1)...(19): siRNA sense strand
acgaugacguucacuuguu

SEQ ID NO: 1998822 - RNA, 19 nt, Homo sapiens
  misc_RNA (1)...(19): siRNA sense strand
gcccaaagcacaagcucaa

SEQ ID NO: 1998823 - RNA, 19 nt, Homo sapiens
  misc_RNA (1)...(19): siRNA sense strand
ggacccuggugcaguaugg

SEQ ID NO: 1998824 - RNA, 19 nt, Homo sapiens
  misc_RNA (1)...(19): siRNA sense strand
uagagcccguugacaaaga

SEQ ID NO: 1998825 - RNA, 19 nt, Homo sapiens
  misc_RNA (1)...(19): siRNA sense strand
ccugguggaugaugacuuc

SEQ ID NO: 1998826 - RNA, 19 nt, Homo sapiens
  misc_RNA (1)...(19): siRNA sense strand
ugauggcccuggcgaugaa

SEQ ID NO: 1998827 - RNA, 19 nt, Homo sapiens
  misc_RNA (1)...(19): siRNA sense strand
aggaagucauuaaggaauu

SEQ ID NO: 1998828 - RNA, 19 nt, Homo sapiens
  misc_RNA (1)...(19): siRNA sense strand
cauccaaggaagucauuaa

SEQ ID NO: 1998829 - RNA, 19 nt, Homo sapiens
  misc_RNA (1)...(19): siRNA sense strand
gacagugacccagcuugua

SEQ ID NO: 1998830 - RNA, 19 nt, Homo sapiens
  misc_RNA (1)...(19): siRNA sense strand
caucuuuucugcuguaauu

SEQ ID NO: 1998831 - RNA, 19 nt, Homo sapiens
  misc_RNA (1)...(19): siRNA sense strand
ggcauaaucggucucauca

SEQ ID NO: 1998832 - RNA, 19 nt, Homo sapiens
  misc_RNA (1)...(19): siRNA sense strand
gaagaaauaccuggaucag

SEQ ID NO: 1998833 - RNA, 19 nt, Homo sapiens
  misc_RNA (1)...(19): siRNA sense strand
ggaggaaggcaaggguauu

SEQ ID NO: 1998834 - RNA, 19 nt, Homo sapiens
  misc_RNA (1)...(19): siRNA sense strand
gcauggacaggcuaggaaa

SEQ ID NO: 1998835 - RNA, 19 nt, Homo sapiens
  misc_RNA (1)...(19): siRNA sense strand
gauauuugagaucggcuuu

SEQ ID NO: 1998836 - RNA, 19 nt, Homo sapiens
  misc_RNA (1)...(19): siRNA sense strand
gugaaaugcagucugaaga

SEQ ID NO: 1998837 - RNA, 19 nt, Homo sapiens
  misc_RNA (1)...(19): siRNA sense strand
gccaaugaaaugacaguga

SEQ ID NO: 1998838 - RNA, 19 nt, Homo sapiens
  misc_RNA (1)...(19): siRNA sense strand
gacucugacugccaaugaa

SEQ ID NO: 1998839 - RNA, 19 nt, Homo sapiens
  misc_RNA (1)...(19): siRNA sense strand
ccggaucccugcagacauc

SEQ ID NO: 1998840 - RNA, 19 nt, Homo sapiens
  misc_RNA (1)...(19): siRNA sense strand
ccugggagcgcuugauuug

SEQ ID NO: 1998841 - RNA, 19 nt, Homo sapiens
  misc_RNA (1)...(19): siRNA sense strand
caucagcgggacccucuuu

SEQ ID NO: 1998842 - RNA, 19 nt, Homo sapiens
  misc_RNA (1)...(19): siRNA sense strand
ggucagcggaguuggguau

SEQ ID NO: 1998843 - RNA, 19 nt, Homo sapiens
  misc_RNA (1)...(19): siRNA sense strand
agaagcgggucaucgugaa

SEQ ID NO: 1998844 - RNA, 19 nt, Homo sapiens
  misc_RNA (1)...(19): siRNA sense strand
ggacaggcuaggaaagcaa

SEQ ID NO: 1998845 - RNA, 19 nt, Homo sapiens
  misc_RNA (1)...(19): siRNA sense strand
guacaggucggagaaaucu

SEQ ID NO: 1998846 - RNA, 19 nt, Homo sapiens
  misc_RNA (1)...(19): siRNA sense strand
ugacuucucagccaucaug

SEQ ID NO: 1998847 - RNA, 19 nt, Homo sapiens
  misc_RNA (1)...(19): siRNA sense strand
ugaagauggacuuaaguga

SEQ ID NO: 1998848 - RNA, 19 nt, Homo sapiens
  misc_RNA (1)...(19): siRNA sense strand
cagaaagaacgccgugaug

SEQ ID NO: 1998849 - RNA, 19 nt, Homo sapiens
  misc_RNA (1)...(19): siRNA sense strand
ucaagggacugugugucuu

SEQ ID NO: 1998850 - RNA, 19 nt, Homo sapiens
  misc_RNA (1)...(19): siRNA sense strand
acucuucuccuuuggcaua

SEQ ID NO: 1998851 - RNA, 19 nt, Homo sapiens
  misc_RNA (1)...(19): siRNA sense strand
ccucauccgucuucauuuu

SEQ ID NO: 1998852 - RNA, 19 nt, Homo sapiens
  misc_RNA (1)...(19): siRNA sense strand
ggaccagcccaaagcacaa

SEQ ID NO: 1998853 - RNA, 19 nt, Homo sapiens
  misc_RNA (1)...(19): siRNA sense strand
gcgaugaagauggacuuaa

SEQ ID NO: 1998854 - RNA, 19 nt, Homo sapiens
  misc_RNA (1)...(19): siRNA sense strand
ugucucagugggaaaguua

SEQ ID NO: 1998855 - RNA, 19 nt, Homo sapiens
  misc_RNA (1)...(19): siRNA sense strand
ccagaugcacccugaagau

SEQ ID NO: 1998856 - RNA, 19 nt, Homo sapiens
  misc_RNA (1)...(19): siRNA sense strand
gaaacgugaugcugaaaua

SEQ ID NO: 1998857 - RNA, 19 nt, Homo sapiens
  misc_RNA (1)...(19): siRNA sense strand
gaaaguauaucaacaaagg

SEQ ID NO: 1998858 - RNA, 19 nt, Homo sapiens
  misc_RNA (1)...(19): siRNA sense strand
ugaaaggcaucagaaauua

SEQ ID NO: 1998859 - RNA, 19 nt, Homo sapiens
  misc_RNA (1)...(19): siRNA sense strand
ggaagaacaagcugaaaua

SEQ ID NO: 1998860 - RNA, 19 nt, Homo sapiens
  misc_RNA (1)...(19): siRNA sense strand
gcauugagcuuagagaauu

SEQ ID NO: 1998861 - RNA, 19 nt, Homo sapiens
  misc_RNA (1)...(19): siRNA sense strand
gaagaacacaagagaauaa

SEQ ID NO: 1998862 - RNA, 19 nt, Homo sapiens
  misc_RNA (1)...(19): siRNA sense strand
caagcaauuucucagauua

SEQ ID NO: 1998863 - RNA, 19 nt, Homo sapiens
  misc_RNA (1)...(19): siRNA sense strand
gaagguauauagaagaguu

SEQ ID NO: 1998864 - RNA, 19 nt, Homo sapiens
  misc_RNA (1)...(19): siRNA sense strand
gaaacaacuugaagaacaa

SEQ ID NO: 1998865 - RNA, 19 nt, Homo sapiens
  misc_RNA (1)...(19): siRNA sense strand
caaacaacgugaacuagaa

SEQ ID NO: 1998866 - RNA, 19 nt, Homo sapiens
  misc_RNA (1)...(19): siRNA sense strand
caacaaaggagugaaauuu

SEQ ID NO: 1998867 - RNA, 19 nt, Homo sapiens
  misc_RNA (1)...(19): siRNA sense strand
ggaaucaaauggugcagaa

SEQ ID NO: 1998868 - RNA, 19 nt, Homo sapiens
  misc_RNA (1)...(19): siRNA sense strand
gcaagcaauuucucagauu

SEQ ID NO: 1998869 - RNA, 19 nt, Homo sapiens
  misc_RNA (1)...(19): siRNA sense strand
cagcuuacaugaauaaaga

SEQ ID NO: 1998870 - RNA, 19 nt, Homo sapiens
  misc_RNA (1)...(19): siRNA sense strand
ggaagagaaugcugcagaa

SEQ ID NO: 1998871 - RNA, 19 nt, Homo sapiens
  misc_RNA (1)...(19): siRNA sense strand
aagagaaacucaugauuga

SEQ ID NO: 1998872 - RNA, 19 nt, Homo sapiens
  misc_RNA (1)...(19): siRNA sense strand
ugaaagaacuccagcucaa

SEQ ID NO: 1998873 - RNA, 19 nt, Homo sapiens
  misc_RNA (1)...(19): siRNA sense strand
acaguacuaucuugacuua

SEQ ID NO: 1998874 - RNA, 19 nt, Homo sapiens
  misc_RNA (1)...(19): siRNA sense strand
gaacaagugcgacaagaau

SEQ ID NO: 1998875 - RNA, 19 nt, Homo sapiens
  misc_RNA (1)...(19): siRNA sense strand
cggcaaggauuuauuaaug

SEQ ID NO: 1998876 - RNA, 19 nt, Homo sapiens
  misc_RNA (1)...(19): siRNA sense strand
gaagcaagauuuugaagaa

SEQ ID NO: 1998877 - RNA, 19 nt, Homo sapiens
  misc_RNA (1)...(19): siRNA sense strand
ggagugaaauuugugaaga

SEQ ID NO: 1998878 - RNA, 19 nt, Homo sapiens
  misc_RNA (1)...(19): siRNA sense strand
gaacaaaugaaacgugaug

SEQ ID NO: 1998879 - RNA, 19 nt, Homo sapiens
  misc_RNA (1)...(19): siRNA sense strand
uuaaagagcaugcuacaaa

SEQ ID NO: 1998880 - RNA, 19 nt, Homo sapiens
  misc_RNA (1)...(19): siRNA sense strand
agaaacaacuugaagaaca

SEQ ID NO: 1998881 - RNA, 19 nt, Homo sapiens
  misc_RNA (1)...(19): siRNA sense strand
gugaggagauggaagaaga

SEQ ID NO: 1998882 - RNA, 19 nt, Homo sapiens
  misc_RNA (1)...(19): siRNA sense strand
gcaaaggcggcaaggauuu

SEQ ID NO: 1998883 - RNA, 19 nt, Homo sapiens
  misc_RNA (1)...(19): siRNA sense strand
gcucagaaacaaagaauga

SEQ ID NO: 1998884 - RNA, 19 nt, Homo sapiens
  misc_RNA (1)...(19): siRNA sense strand
ggaagaacacaagagaaua

SEQ ID NO: 1998885 - RNA, 19 nt, Homo sapiens
  misc_RNA (1)...(19): siRNA sense strand
aauuugagcuguagugaaa

SEQ ID NO: 1998886 - RNA, 19 nt, Homo sapiens
  misc_RNA (1)...(19): siRNA sense strand
ugaagaagaucaguuggaa

SEQ ID NO: 1998887 - RNA, 19 nt, Homo sapiens
  misc_RNA (1)...(19): siRNA sense strand
gugaaaggcaucagaaauu

SEQ ID NO: 1998888 - RNA, 19 nt, Homo sapiens
  misc_RNA (1)...(19): siRNA sense strand
gaaaacagcauugagcuua

SEQ ID NO: 1998889 - RNA, 19 nt, Homo sapiens
  misc_RNA (1)...(19): siRNA sense strand
gaagaguucaggaaaguau

SEQ ID NO: 1998890 - RNA, 19 nt, Homo sapiens
  misc_RNA (1)...(19): siRNA sense strand
gaaaagaaauugagaaagc

SEQ ID NO: 1998891 - RNA, 19 nt, Homo sapiens
  misc_RNA (1)...(19): siRNA sense strand
uuaggaagaucuaugaaga

SEQ ID NO: 1998892 - RNA, 19 nt, Homo sapiens
  misc_RNA (1)...(19): siRNA sense strand
ggagaaauuugagcuguag

SEQ ID NO: 1998893 - RNA, 19 nt, Homo sapiens
  misc_RNA (1)...(19): siRNA sense strand
gaugaaaacuacugcaaaa

SEQ ID NO: 1998894 - RNA, 19 nt, Homo sapiens
  misc_RNA (1)...(19): siRNA sense strand
gcaaugcgaagguauauag

SEQ ID NO: 1998895 - RNA, 19 nt, Homo sapiens
  misc_RNA (1)...(19): siRNA sense strand
gagaaacucaugauugaug

SEQ ID NO: 1998896 - RNA, 19 nt, Homo sapiens
  misc_RNA (1)...(19): siRNA sense strand
aaagagaaacucaugauug

SEQ ID NO: 1998897 - RNA, 19 nt, Homo sapiens
  misc_RNA (1)...(19): siRNA sense strand
gaaagaacuccagcucaaa

SEQ ID NO: 1998898 - RNA, 19 nt, Homo sapiens
  misc_RNA (1)...(19): siRNA sense strand
gaaagggcagcucagauug

SEQ ID NO: 1998899 - RNA, 19 nt, Homo sapiens
  misc_RNA (1)...(19): siRNA sense strand
gcaaggauuuauuaaugca

SEQ ID NO: 1998900 - RNA, 19 nt, Homo sapiens
  misc_RNA (1)...(19): siRNA sense strand
gaagaacaagcugaaauau

SEQ ID NO: 1998901 - RNA, 19 nt, Homo sapiens
  misc_RNA (1)...(19): siRNA sense strand
gaagacaaacgaaacaaag

SEQ ID NO: 1998902 - RNA, 19 nt, Homo sapiens
  misc_RNA (1)...(19): siRNA sense strand
uuagagaauuggagaagaa

SEQ ID NO: 1998903 - RNA, 19 nt, Homo sapiens
  misc_RNA (1)...(19): siRNA sense strand
gaaugaagcagcuggaaca

SEQ ID NO: 1998904 - RNA, 19 nt, Homo sapiens
  misc_RNA (1)...(19): siRNA sense strand
cagaaugcguugacacaga

SEQ ID NO: 1998905 - RNA, 19 nt, Homo sapiens
  misc_RNA (1)...(19): siRNA sense strand
gaagaggagaacuuuagaa

SEQ ID NO: 1998906 - RNA, 19 nt, Homo sapiens
  misc_RNA (1)...(19): siRNA sense strand
gaagagcgucgccaacaau

SEQ ID NO: 1998907 - RNA, 19 nt, Homo sapiens
  misc_RNA (1)...(19): siRNA sense strand
agagcaugcuacaaacuua

SEQ ID NO: 1998908 - RNA, 19 nt, Homo sapiens
  misc_RNA (1)...(19): siRNA sense strand
caaaggcggcaaggauuua

SEQ ID NO: 1998909 - RNA, 19 nt, Homo sapiens
  misc_RNA (1)...(19): siRNA sense strand
gcacaguacuaucuugacu

SEQ ID NO: 1998910 - RNA, 19 nt, Homo sapiens
  misc_RNA (1)...(19): siRNA sense strand
ugaaaaggaugccauuaaa

SEQ ID NO: 1998911 - RNA, 19 nt, Homo sapiens
  misc_RNA (1)...(19): siRNA sense strand
ugaggaugaucgaauagaa

SEQ ID NO: 1998912 - RNA, 19 nt, Homo sapiens
  misc_RNA (1)...(19): siRNA sense strand
acaagugcgacaagaauua

SEQ ID NO: 1998913 - RNA, 19 nt, Homo sapiens
  misc_RNA (1)...(19): siRNA sense strand
ggaacaagugcgacaagaa

SEQ ID NO: 1998914 - RNA, 19 nt, Homo sapiens
  misc_RNA (1)...(19): siRNA sense strand
gaaagcacaguacuaucuu

SEQ ID NO: 1998915 - RNA, 19 nt, Homo sapiens
  misc_RNA (1)...(19): siRNA sense strand
aaagaaacgugaggagaug

SEQ ID NO: 1998916 - RNA, 19 nt, Homo sapiens
  misc_RNA (1)...(19): siRNA sense strand
gaaauuugagcuguaguga

SEQ ID NO: 1998917 - RNA, 19 nt, Homo sapiens
  misc_RNA (1)...(19): siRNA sense strand
agacaaacaacgugaacua

SEQ ID NO: 1998918 - RNA, 19 nt, Homo sapiens
  misc_RNA (1)...(19): siRNA sense strand
uaaauuugcugaggaugau

SEQ ID NO: 1998919 - RNA, 19 nt, Homo sapiens
  misc_RNA (1)...(19): siRNA sense strand
ugaaugcaaugcgaaggua

SEQ ID NO: 1998920 - RNA, 19 nt, Homo sapiens
  misc_RNA (1)...(19): siRNA sense strand
agaaagggcagcucagauu

SEQ ID NO: 1998921 - RNA, 19 nt, Homo sapiens
  misc_RNA (1)...(19): siRNA sense strand
gaacaauuugaguuggaua

SEQ ID NO: 1998922 - RNA, 19 nt, Homo sapiens
  misc_RNA (1)...(19): siRNA sense strand
gaagaaaacaagagauuga

SEQ ID NO: 1998923 - RNA, 19 nt, Homo sapiens
  misc_RNA (1)...(19): siRNA sense strand
gcggcaacgugaagauuug

SEQ ID NO: 1998924 - RNA, 19 nt, Homo sapiens
  misc_RNA (1)...(19): siRNA sense strand
gaagaagaucaguuggaaa

SEQ ID NO: 1998925 - RNA, 19 nt, Homo sapiens
  misc_RNA (1)...(19): siRNA sense strand
caaauggugcagaaugaaa

SEQ ID NO: 1998926 - RNA, 19 nt, Homo sapiens
  misc_RNA (1)...(19): siRNA sense strand
gauggaagaacacaagaga

SEQ ID NO: 1998927 - RNA, 19 nt, Homo sapiens
  misc_RNA (1)...(19): siRNA sense strand
aggaugccauuaaauauga

SEQ ID NO: 1998928 - RNA, 19 nt, Homo sapiens
  misc_RNA (1)...(19): siRNA sense strand
aaagaugaggcaacaagua

SEQ ID NO: 1998929 - RNA, 19 nt, Homo sapiens
  misc_RNA (1)...(19): siRNA sense strand
acaauuccuugcagacaaa

SEQ ID NO: 1998930 - RNA, 19 nt, Homo sapiens
  misc_RNA (1)...(19): siRNA sense strand
aagaacaaauggccuugaa

SEQ ID NO: 1998931 - RNA, 19 nt, Homo sapiens
  misc_RNA (1)...(19): siRNA sense strand
gugaagauuuggaacaagu

SEQ ID NO: 1998932 - RNA, 19 nt, Homo sapiens
  misc_RNA (1)...(19): siRNA sense strand
agaaugcguugacacagaa

SEQ ID NO: 1998933 - RNA, 19 nt, Homo sapiens
  misc_RNA (1)...(19): siRNA sense strand
ucauagaguuugcuaacau

SEQ ID NO: 1998934 - RNA, 19 nt, Homo sapiens
  misc_RNA (1)...(19): siRNA sense strand
ggaagaggagaacuuuaga

SEQ ID NO: 1998935 - RNA, 19 nt, Homo sapiens
  misc_RNA (1)...(19): siRNA sense strand
uaaagagcaugcuacaaac

SEQ ID NO: 1998936 - RNA, 19 nt, Homo sapiens
  misc_RNA (1)...(19): siRNA sense strand
ugaagagcgucgccaacaa

SEQ ID NO: 1998937 - RNA, 19 nt, Homo sapiens
  misc_RNA (1)...(19): siRNA sense strand
gcagaagacaaacgaaaca

SEQ ID NO: 1998938 - RNA, 19 nt, Homo sapiens
  misc_RNA (1)...(19): siRNA sense strand
gaugaaauuguuaggaaga

SEQ ID NO: 1998939 - RNA, 19 nt, Homo sapiens
  misc_RNA (1)...(19): siRNA sense strand
aguacuaucuugacuuaga

SEQ ID NO: 1998940 - RNA, 19 nt, Homo sapiens
  misc_RNA (1)...(19): siRNA sense strand
uggcaaaacugaaacauga

SEQ ID NO: 1998941 - RNA, 19 nt, Homo sapiens
  misc_RNA (1)...(19): siRNA sense strand
gaaaggcuaaaacuucuua

SEQ ID NO: 1998942 - RNA, 19 nt, Homo sapiens
  misc_RNA (1)...(19): siRNA sense strand
gaggaagaggagaacuuua

SEQ ID NO: 1998943 - RNA, 19 nt, Homo sapiens
  misc_RNA (1)...(19): siRNA sense strand
gcgaagguauauagaagag

SEQ ID NO: 1998944 - RNA, 19 nt, Homo sapiens
  misc_RNA (1)...(19): siRNA sense strand
cgaaagcacaguacuaucu

SEQ ID NO: 1998945 - RNA, 19 nt, Homo sapiens
  misc_RNA (1)...(19): siRNA sense strand
aagaugaggcaacaaguaa

SEQ ID NO: 1998946 - RNA, 19 nt, Homo sapiens
  misc_RNA (1)...(19): siRNA sense strand
gaaaggcaucagaaauuag

SEQ ID NO: 1998947 - RNA, 19 nt, Homo sapiens
  misc_RNA (1)...(19): siRNA sense strand
cauagaguuugcuaacaug

SEQ ID NO: 1998948 - RNA, 19 nt, Homo sapiens
  misc_RNA (1)...(19): siRNA sense strand
aaugaaacgugaugcugaa

SEQ ID NO: 1998949 - RNA, 19 nt, Homo sapiens
  misc_RNA (1)...(19): siRNA sense strand
gaugaggcaacaaguaaga

SEQ ID NO: 1998950 - RNA, 19 nt, Homo sapiens
  misc_RNA (1)...(19): siRNA sense strand
aaacagcauugagcuuaga

SEQ ID NO: 1998951 - RNA, 19 nt, Homo sapiens
  misc_RNA (1)...(19): siRNA sense strand
ucaggaaaguauaucaaca

SEQ ID NO: 1998952 - RNA, 19 nt, Homo sapiens
  misc_RNA (1)...(19): siRNA sense strand
ggaugaucgaauagaauua

SEQ ID NO: 1998953 - RNA, 19 nt, Homo sapiens
  misc_RNA (1)...(19): siRNA sense strand
agucaaaucaggaaucaaa

SEQ ID NO: 1998954 - RNA, 19 nt, Homo sapiens
  misc_RNA (1)...(19): siRNA sense strand
ggcaaaaguucaagaaaau

SEQ ID NO: 1998955 - RNA, 19 nt, Homo sapiens
  misc_RNA (1)...(19): siRNA sense strand
caaacgaaacaaagcgaaa

SEQ ID NO: 1998956 - RNA, 19 nt, Homo sapiens
  misc_RNA (1)...(19): siRNA sense strand
gggaggaccugcaacauuu

SEQ ID NO: 1998957 - RNA, 19 nt, Homo sapiens
  misc_RNA (1)...(19): siRNA sense strand
cauccagucuuucuacaua

SEQ ID NO: 1998958 - RNA, 19 nt, Homo sapiens
  misc_RNA (1)...(19): siRNA sense strand
gcuguuggcugcaguauuc

SEQ ID NO: 1998959 - RNA, 19 nt, Homo sapiens
  misc_RNA (1)...(19): siRNA sense strand
cgacauugguuauaacuuc

SEQ ID NO: 1998960 - RNA, 19 nt, Homo sapiens
  misc_RNA (1)...(19): siRNA sense strand
gaacaaaacacaagcuaaa

SEQ ID NO: 1998961 - RNA, 19 nt, Homo sapiens
  misc_RNA (1)...(19): siRNA sense strand
ggagaccacuguccaggau

SEQ ID NO: 1998962 - RNA, 19 nt, Homo sapiens
  misc_RNA (1)...(19): siRNA sense strand
caacaucucccugggcuuu

SEQ ID NO: 1998963 - RNA, 19 nt, Homo sapiens
  misc_RNA (1)...(19): siRNA sense strand
caccuggccucauuucaaa

SEQ ID NO: 1998964 - RNA, 19 nt, Homo sapiens
  misc_RNA (1)...(19): siRNA sense strand
ggugugauguggccuacaa

SEQ ID NO: 1998965 - RNA, 19 nt, Homo sapiens
  misc_RNA (1)...(19): siRNA sense strand
gcaccuggccucauuucaa

SEQ ID NO: 1998966 - RNA, 19 nt, Homo sapiens
  misc_RNA (1)...(19): siRNA sense strand
gaagguguuggcuggaaua

SEQ ID NO: 1998967 - RNA, 19 nt, Homo sapiens
  misc_RNA (1)...(19): siRNA sense strand
aacacaagcuaaacaggua

SEQ ID NO: 1998968 - RNA, 19 nt, Homo sapiens
  misc_RNA (1)...(19): siRNA sense strand
caugcgacauugguuauaa

SEQ ID NO: 1998969 - RNA, 19 nt, Homo sapiens
  misc_RNA (1)...(19): siRNA sense strand
gcucaagucaugcgacauu

SEQ ID NO: 1998970 - RNA, 19 nt, Homo sapiens
  misc_RNA (1)...(19): siRNA sense strand
ccagugaauguccuuguua

SEQ ID NO: 1998971 - RNA, 19 nt, Homo sapiens
  misc_RNA (1)...(19): siRNA sense strand
uagacaggcucaagucaug

SEQ ID NO: 1998972 - RNA, 19 nt, Homo sapiens
  misc_RNA (1)...(19): siRNA sense strand
ugaauguccuuguuauaca

SEQ ID NO: 1998973 - RNA, 19 nt, Homo sapiens
  misc_RNA (1)...(19): siRNA sense strand
guaccugacucccaacuac

SEQ ID NO: 1998974 - RNA, 19 nt, Homo sapiens
  misc_RNA (1)...(19): siRNA sense strand
cgaaguauggcaucauuau

SEQ ID NO: 1998975 - RNA, 19 nt, Homo sapiens
  misc_RNA (1)...(19): siRNA sense strand
gaacugcaggcccaucaug

SEQ ID NO: 1998976 - RNA, 19 nt, Homo sapiens
  misc_RNA (1)...(19): siRNA sense strand
gaacaucucccagcucacu

SEQ ID NO: 1998977 - RNA, 19 nt, Homo sapiens
  misc_RNA (1)...(19): siRNA sense strand
agacaagccugaagaagcu

SEQ ID NO: 1998978 - RNA, 19 nt, Homo sapiens
  misc_RNA (1)...(19): siRNA sense strand
gguguuggcuggaauaucc

SEQ ID NO: 1998979 - RNA, 19 nt, Homo sapiens
  misc_RNA (1)...(19): siRNA sense strand
gccagugaauguccuuguu

SEQ ID NO: 1998980 - RNA, 19 nt, Homo sapiens
  misc_RNA (1)...(19): siRNA sense strand
ggacauccagucuuucuac

SEQ ID NO: 1998981 - RNA, 19 nt, Homo sapiens
  misc_RNA (1)...(19): siRNA sense strand
caacaacagugggugugau

SEQ ID NO: 1998982 - RNA, 19 nt, Homo sapiens
  misc_RNA (1)...(19): siRNA sense strand
gggcaggcuuuguacaaca

SEQ ID NO: 1998983 - RNA, 19 nt, Homo sapiens
  misc_RNA (1)...(19): siRNA sense strand
ccugcaacauuucugauga

SEQ ID NO: 1998984 - RNA, 19 nt, Homo sapiens
  misc_RNA (1)...(19): siRNA sense strand
ggaccugcaacauuucuga

SEQ ID NO: 1998985 - RNA, 19 nt, Homo sapiens
  misc_RNA (1)...(19): siRNA sense strand
cagugaauguccuuguuau

SEQ ID NO: 1998986 - RNA, 19 nt, Homo sapiens
  misc_RNA (1)...(19): siRNA sense strand
gcgaaguauggcaucauua

SEQ ID NO: 1998987 - RNA, 19 nt, Homo sapiens
  misc_RNA (1)...(19): siRNA sense strand
uccaguaccuauuugagaa

SEQ ID NO: 1998988 - RNA, 19 nt, Homo sapiens
  misc_RNA (1)...(19): siRNA sense strand
cagcugaccacgccaguga

SEQ ID NO: 1998989 - RNA, 19 nt, Homo sapiens
  misc_RNA (1)...(19): siRNA sense strand
agaccacuguccaggauga

SEQ ID NO: 1998990 - RNA, 19 nt, Homo sapiens
  misc_RNA (1)...(19): siRNA sense strand
cagaagacaagccugaaga

SEQ ID NO: 1998991 - RNA, 19 nt, Homo sapiens
  misc_RNA (1)...(19): siRNA sense strand
gaaguauggcaucauuauc

SEQ ID NO: 1998992 - RNA, 19 nt, Homo sapiens
  misc_RNA (1)...(19): siRNA sense strand
guaccuauuugagaacauc

SEQ ID NO: 1998993 - RNA, 19 nt, Homo sapiens
  misc_RNA (1)...(19): siRNA sense strand
gaagacaagccugaagaag

SEQ ID NO: 1998994 - RNA, 19 nt, Homo sapiens
  misc_RNA (1)...(19): siRNA sense strand
gggcuccaguaccuauuug

SEQ ID NO: 1998995 - RNA, 19 nt, Homo sapiens
  misc_RNA (1)...(19): siRNA sense strand
ccagaagggccaccuguca

SEQ ID NO: 1998996 - RNA, 19 nt, Homo sapiens
  misc_RNA (1)...(19): siRNA sense strand
ggccaccugucauccaguu

SEQ ID NO: 1998997 - RNA, 19 nt, Homo sapiens
  misc_RNA (1)...(19): siRNA sense strand
gaauguccuuguuauacac

SEQ ID NO: 1998998 - RNA, 19 nt, Homo sapiens
  misc_RNA (1)...(19): siRNA sense strand
gaagcuguuggcugcagua

SEQ ID NO: 1998999 - RNA, 19 nt, Homo sapiens
  misc_RNA (1)...(19): siRNA sense strand
gcuguggcuucuugucuuc

SEQ ID NO: 1999000 - RNA, 19 nt, Homo sapiens
  misc_RNA (1)...(19): siRNA sense strand
uccgggacauccagucuuu

SEQ ID NO: 1999001 - RNA, 19 nt, Homo sapiens
  misc_RNA (1)...(19): siRNA sense strand
aagcuaaacagguaucaga

SEQ ID NO: 1999002 - RNA, 19 nt, Homo sapiens
  misc_RNA (1)...(19): siRNA sense strand
caacagugggugugaugug

SEQ ID NO: 1999003 - RNA, 19 nt, Homo sapiens
  misc_RNA (1)...(19): siRNA sense strand
ugauguggccuacaacuuc

SEQ ID NO: 1999004 - RNA, 19 nt, Homo sapiens
  misc_RNA (1)...(19): siRNA sense strand
caucauguccacaacaaca

SEQ ID NO: 1999005 - RNA, 19 nt, Homo sapiens
  misc_RNA (1)...(19): siRNA sense strand
gcagaagacaagccugaag

SEQ ID NO: 1999006 - RNA, 19 nt, Homo sapiens
  misc_RNA (1)...(19): siRNA sense strand
caccuaugcuguccagaag

SEQ ID NO: 1999007 - RNA, 19 nt, Homo sapiens
  misc_RNA (1)...(19): siRNA sense strand
ucaccuaugcuguccagaa

SEQ ID NO: 1999008 - RNA, 19 nt, Homo sapiens
  misc_RNA (1)...(19): siRNA sense strand
caggguguaugaagguguu

SEQ ID NO: 1999009 - RNA, 19 nt, Homo sapiens
  misc_RNA (1)...(19): siRNA sense strand
ugaccacgccagugaaugu

SEQ ID NO: 1999010 - RNA, 19 nt, Homo sapiens
  misc_RNA (1)...(19): siRNA sense strand
cgggaggaccugcaacauu

SEQ ID NO: 1999011 - RNA, 19 nt, Homo sapiens
  misc_RNA (1)...(19): siRNA sense strand
uggaaaaccuaaucaccua

SEQ ID NO: 1999012 - RNA, 19 nt, Homo sapiens
  misc_RNA (1)...(19): siRNA sense strand
gugaauguccuuguuauac

SEQ ID NO: 1999013 - RNA, 19 nt, Homo sapiens
  misc_RNA (1)...(19): siRNA sense strand
gaugauggcaggguguaug

SEQ ID NO: 1999014 - RNA, 19 nt, Homo sapiens
  misc_RNA (1)...(19): siRNA sense strand
gauguggcccgaaccuugu

SEQ ID NO: 1999015 - RNA, 19 nt, Homo sapiens
  misc_RNA (1)...(19): siRNA sense strand
gacauccagucuuucuaca

SEQ ID NO: 1999016 - RNA, 19 nt, Homo sapiens
  misc_RNA (1)...(19): siRNA sense strand
cccaucauguccacaacaa

SEQ ID NO: 1999017 - RNA, 19 nt, Homo sapiens
  misc_RNA (1)...(19): siRNA sense strand
ugaagguguuggcuggaau

SEQ ID NO: 1999018 - RNA, 19 nt, Homo sapiens
  misc_RNA (1)...(19): siRNA sense strand
agaagacaagccugaagaa

SEQ ID NO: 1999019 - RNA, 19 nt, Homo sapiens
  misc_RNA (1)...(19): siRNA sense strand
acagguauaccacccaaug

SEQ ID NO: 1999020 - RNA, 19 nt, Homo sapiens
  misc_RNA (1)...(19): siRNA sense strand
agucaugcgacauugguua

SEQ ID NO: 1999021 - RNA, 19 nt, Homo sapiens
  misc_RNA (1)...(19): siRNA sense strand
ggaacaaaacacaagcuaa

SEQ ID NO: 1999022 - RNA, 19 nt, Homo sapiens
  misc_RNA (1)...(19): siRNA sense strand
ucccuggacuggaguguca

SEQ ID NO: 1999023 - RNA, 19 nt, Homo sapiens
  misc_RNA (1)...(19): siRNA sense strand
ccaccugucauccaguuau

SEQ ID NO: 1999024 - RNA, 19 nt, Homo sapiens
  misc_RNA (1)...(19): siRNA sense strand
acccaaggcuacaacaaca

SEQ ID NO: 1999025 - RNA, 19 nt, Homo sapiens
  misc_RNA (1)...(19): siRNA sense strand
agcgaaguauggcaucauu

SEQ ID NO: 1999026 - RNA, 19 nt, Homo sapiens
  misc_RNA (1)...(19): siRNA sense strand
caccugucauccaguuaug

SEQ ID NO: 1999027 - RNA, 19 nt, Homo sapiens
  misc_RNA (1)...(19): siRNA sense strand
ggcaggcuuuguacaacau

SEQ ID NO: 1999028 - RNA, 19 nt, Homo sapiens
  misc_RNA (1)...(19): siRNA sense strand
ggaggaccugcaacauuuc

SEQ ID NO: 1999029 - RNA, 19 nt, Homo sapiens
  misc_RNA (1)...(19): siRNA sense strand
ugacucucccagcgaagua

SEQ ID NO: 1999030 - RNA, 19 nt, Homo sapiens
  misc_RNA (1)...(19): siRNA sense strand
ucagccacuucuugggaaa

SEQ ID NO: 1999031 - RNA, 19 nt, Homo sapiens
  misc_RNA (1)...(19): siRNA sense strand
gauggcaggguguaugaag

SEQ ID NO: 1999032 - RNA, 19 nt, Homo sapiens
  misc_RNA (1)...(19): siRNA sense strand
uauguucagccacuucuug

SEQ ID NO: 1999033 - RNA, 19 nt, Homo sapiens
  misc_RNA (1)...(19): siRNA sense strand
gggaacugcaggcccauca

SEQ ID NO: 1999034 - RNA, 19 nt, Homo sapiens
  misc_RNA (1)...(19): siRNA sense strand
ggccuacaacuuccugguu

SEQ ID NO: 1999035 - RNA, 19 nt, Homo sapiens
  misc_RNA (1)...(19): siRNA sense strand
gggaugauggcagggugua

SEQ ID NO: 1999036 - RNA, 19 nt, Homo sapiens
  misc_RNA (1)...(19): siRNA sense strand
caagucaugcgacauuggu

SEQ ID NO: 1999037 - RNA, 19 nt, Homo sapiens
  misc_RNA (1)...(19): siRNA sense strand
ccagcgaaguauggcauca

SEQ ID NO: 1999038 - RNA, 19 nt, Homo sapiens
  misc_RNA (1)...(19): siRNA sense strand
gagccagggagaccacugu

SEQ ID NO: 1999039 - RNA, 19 nt, Homo sapiens
  misc_RNA (1)...(19): siRNA sense strand
ccaaggcuacaacaacauc

SEQ ID NO: 1999040 - RNA, 19 nt, Homo sapiens
  misc_RNA (1)...(19): siRNA sense strand
gcacaugaguauugccuua

SEQ ID NO: 1999041 - RNA, 19 nt, Homo sapiens
  misc_RNA (1)...(19): siRNA sense strand
gcaacucucugaagaauau

SEQ ID NO: 1999042 - RNA, 19 nt, Homo sapiens
  misc_RNA (1)...(19): siRNA sense strand
guaaaugcuucuccucuuu

SEQ ID NO: 1999043 - RNA, 19 nt, Homo sapiens
  misc_RNA (1)...(19): siRNA sense strand
guaagcaacucucugaaga

SEQ ID NO: 1999044 - RNA, 19 nt, Homo sapiens
  misc_RNA (1)...(19): siRNA sense strand
gaguauugccuuaaguuua

SEQ ID NO: 1999045 - RNA, 19 nt, Homo sapiens
  misc_RNA (1)...(19): siRNA sense strand
gcaagaagaggaugaggaa

SEQ ID NO: 1999046 - RNA, 19 nt, Homo sapiens
  misc_RNA (1)...(19): siRNA sense strand
gagcagguauuccaugaag

SEQ ID NO: 1999047 - RNA, 19 nt, Homo sapiens
  misc_RNA (1)...(19): siRNA sense strand
gaaucuggcccaugugaaa

SEQ ID NO: 1999048 - RNA, 19 nt, Homo sapiens
  misc_RNA (1)...(19): siRNA sense strand
gguaaaugcuucuccucuu

SEQ ID NO: 1999049 - RNA, 19 nt, Homo sapiens
  misc_RNA (1)...(19): siRNA sense strand
gcgaacgcuucccaucuaa

SEQ ID NO: 1999050 - RNA, 19 nt, Homo sapiens
  misc_RNA (1)...(19): siRNA sense strand
cugaugaccuccugccuuu

SEQ ID NO: 1999051 - RNA, 19 nt, Homo sapiens
  misc_RNA (1)...(19): siRNA sense strand
ucaaggacuaucacaguua

SEQ ID NO: 1999052 - RNA, 19 nt, Homo sapiens
  misc_RNA (1)...(19): siRNA sense strand
gccuuuagauuguaagaau

SEQ ID NO: 1999053 - RNA, 19 nt, Homo sapiens
  misc_RNA (1)...(19): siRNA sense strand
aaccagcgcugcaagaaga

SEQ ID NO: 1999054 - RNA, 19 nt, Homo sapiens
  misc_RNA (1)...(19): siRNA sense strand
gaaaauggagccucaagaa

SEQ ID NO: 1999055 - RNA, 19 nt, Homo sapiens
  misc_RNA (1)...(19): siRNA sense strand
gaauaugaaaggauuguca

SEQ ID NO: 1999056 - RNA, 19 nt, Homo sapiens
  misc_RNA (1)...(19): siRNA sense strand
ucagagccauguagucuca

SEQ ID NO: 1999057 - RNA, 19 nt, Homo sapiens
  misc_RNA (1)...(19): siRNA sense strand
uuaccaaguugcugcguuu

SEQ ID NO: 1999058 - RNA, 19 nt, Homo sapiens
  misc_RNA (1)...(19): siRNA sense strand
gccuuaaguuuaccaaguu

SEQ ID NO: 1999059 - RNA, 19 nt, Homo sapiens
  misc_RNA (1)...(19): siRNA sense strand
gcagguauuccaugaagug

SEQ ID NO: 1999060 - RNA, 19 nt, Homo sapiens
  misc_RNA (1)...(19): siRNA sense strand
cgacgucuucgcaaccuua

SEQ ID NO: 1999061 - RNA, 19 nt, Homo sapiens
  misc_RNA (1)...(19): siRNA sense strand
caaggacuaucacaguuac

SEQ ID NO: 1999062 - RNA, 19 nt, Homo sapiens
  misc_RNA (1)...(19): siRNA sense strand
cuaaaccugugaagaucaa

SEQ ID NO: 1999063 - RNA, 19 nt, Homo sapiens
  misc_RNA (1)...(19): siRNA sense strand
gcacagugacccagagagu

SEQ ID NO: 1999064 - RNA, 19 nt, Homo sapiens
  misc_RNA (1)...(19): siRNA sense strand
acaguuacaugcuacagau

SEQ ID NO: 1999065 - RNA, 19 nt, Homo sapiens
  misc_RNA (1)...(19): siRNA sense strand
cagcacaaccgacgucuuc

SEQ ID NO: 1999066 - RNA, 19 nt, Homo sapiens
  misc_RNA (1)...(19): siRNA sense strand
gaagcugggauuccucaga

SEQ ID NO: 1999067 - RNA, 19 nt, Homo sapiens
  misc_RNA (1)...(19): siRNA sense strand
aagcaacucucugaagaau

SEQ ID NO: 1999068 - RNA, 19 nt, Homo sapiens
  misc_RNA (1)...(19): siRNA sense strand
ugacugugcuaaugagagu

SEQ ID NO: 1999069 - RNA, 19 nt, Homo sapiens
  misc_RNA (1)...(19): siRNA sense strand
ccacagcucaggcccagaa

SEQ ID NO: 1999070 - RNA, 19 nt, Homo sapiens
  misc_RNA (1)...(19): siRNA sense strand
gcugggcagugaugucuuc

SEQ ID NO: 1999071 - RNA, 19 nt, Homo sapiens
  misc_RNA (1)...(19): siRNA sense strand
caccuccucucccugauga

SEQ ID NO: 1999072 - RNA, 19 nt, Homo sapiens
  misc_RNA (1)...(19): siRNA sense strand
gcagacagaagguguaaaa

SEQ ID NO: 1999073 - RNA, 19 nt, Homo sapiens
  misc_RNA (1)...(19): siRNA sense strand
gcagcagacagaaggugua

SEQ ID NO: 1999074 - RNA, 19 nt, Homo sapiens
  misc_RNA (1)...(19): siRNA sense strand
aaauggagccucaagaaag

SEQ ID NO: 1999075 - RNA, 19 nt, Homo sapiens
  misc_RNA (1)...(19): siRNA sense strand
gaagaauaugaaaggauug

SEQ ID NO: 1999076 - RNA, 19 nt, Homo sapiens
  misc_RNA (1)...(19): siRNA sense strand
caucaaggacuaucacagu

SEQ ID NO: 1999077 - RNA, 19 nt, Homo sapiens
  misc_RNA (1)...(19): siRNA sense strand
agaaucagcagcagacaga

SEQ ID NO: 1999078 - RNA, 19 nt, Homo sapiens
  misc_RNA (1)...(19): siRNA sense strand
uuaguaagcaacucucuga

SEQ ID NO: 1999079 - RNA, 19 nt, Homo sapiens
  misc_RNA (1)...(19): siRNA sense strand
gaugaccuccugccuuuag

SEQ ID NO: 1999080 - RNA, 19 nt, Homo sapiens
  misc_RNA (1)...(19): siRNA sense strand
cagcucaggcccagaauca

SEQ ID NO: 1999081 - RNA, 19 nt, Homo sapiens
  misc_RNA (1)...(19): siRNA sense strand
aauggagccucaagaaagu

SEQ ID NO: 1999082 - RNA, 19 nt, Homo sapiens
  misc_RNA (1)...(19): siRNA sense strand
uaaaugcuucuccucuuug

SEQ ID NO: 1999083 - RNA, 19 nt, Homo sapiens
  misc_RNA (1)...(19): siRNA sense strand
ccuccugccuuuagauugu

SEQ ID NO: 1999084 - RNA, 19 nt, Homo sapiens
  misc_RNA (1)...(19): siRNA sense strand
aguauugccuuaaguuuac

SEQ ID NO: 1999085 - RNA, 19 nt, Homo sapiens
  misc_RNA (1)...(19): siRNA sense strand
uaagcaacucucugaagaa

SEQ ID NO: 1999086 - RNA, 19 nt, Homo sapiens
  misc_RNA (1)...(19): siRNA sense strand
cgucuucgcaaccuuauug

SEQ ID NO: 1999087 - RNA, 19 nt, Homo sapiens
  misc_RNA (1)...(19): siRNA sense strand
ggcuucaagugcagaggua

SEQ ID NO: 1999088 - RNA, 19 nt, Homo sapiens
  misc_RNA (1)...(19): siRNA sense strand
ggacuaucacaguuacaug

SEQ ID NO: 1999089 - RNA, 19 nt, Homo sapiens
  misc_RNA (1)...(19): siRNA sense strand
acagugacccagagaguga

SEQ ID NO: 1999090 - RNA, 19 nt, Homo sapiens
  misc_RNA (1)...(19): siRNA sense strand
guuacaugcuacagauuag

SEQ ID NO: 1999091 - RNA, 19 nt, Homo sapiens
  misc_RNA (1)...(19): siRNA sense strand
ugaguauugccuuaaguuu

SEQ ID NO: 1999092 - RNA, 19 nt, Homo sapiens
  misc_RNA (1)...(19): siRNA sense strand
gaaagugaagaaggcaaug

SEQ ID NO: 1999093 - RNA, 19 nt, Homo sapiens
  misc_RNA (1)...(19): siRNA sense strand
gcuggaggcugaccuugcu

SEQ ID NO: 1999094 - RNA, 19 nt, Homo sapiens
  misc_RNA (1)...(19): siRNA sense strand
ugaagaaggcaaugucucu

SEQ ID NO: 1999095 - RNA, 19 nt, Homo sapiens
  misc_RNA (1)...(19): siRNA sense strand
ggaaucuggcccaugugaa

SEQ ID NO: 1999096 - RNA, 19 nt, Homo sapiens
  misc_RNA (1)...(19): siRNA sense strand
uuuggaaucuggcccaugu

SEQ ID NO: 1999097 - RNA, 19 nt, Homo sapiens
  misc_RNA (1)...(19): siRNA sense strand
gggaaccugugacugaacu

SEQ ID NO: 1999098 - RNA, 19 nt, Homo sapiens
  misc_RNA (1)...(19): siRNA sense strand
aguuacaugcuacagauua

SEQ ID NO: 1999099 - RNA, 19 nt, Homo sapiens
  misc_RNA (1)...(19): siRNA sense strand
uggagacccuaacugaugu

SEQ ID NO: 1999100 - RNA, 19 nt, Homo sapiens
  misc_RNA (1)...(19): siRNA sense strand
gaccuccugccuuuagauu

SEQ ID NO: 1999101 - RNA, 19 nt, Homo sapiens
  misc_RNA (1)...(19): siRNA sense strand
uguagucucaccauccaua

SEQ ID NO: 1999102 - RNA, 19 nt, Homo sapiens
  misc_RNA (1)...(19): siRNA sense strand
ggcuuugacugugcuaaug

SEQ ID NO: 1999103 - RNA, 19 nt, Homo sapiens
  misc_RNA (1)...(19): siRNA sense strand
cagcagacagaagguguaa

SEQ ID NO: 1999104 - RNA, 19 nt, Homo sapiens
  misc_RNA (1)...(19): siRNA sense strand
gcuaaaccugugaagauca

SEQ ID NO: 1999105 - RNA, 19 nt, Homo sapiens
  misc_RNA (1)...(19): siRNA sense strand
ggccacagaggacgcuaaa

SEQ ID NO: 1999106 - RNA, 19 nt, Homo sapiens
  misc_RNA (1)...(19): siRNA sense strand
cuaucacaguuacaugcua

SEQ ID NO: 1999107 - RNA, 19 nt, Homo sapiens
  misc_RNA (1)...(19): siRNA sense strand
caccaacccucagccaaca

SEQ ID NO: 1999108 - RNA, 19 nt, Homo sapiens
  misc_RNA (1)...(19): siRNA sense strand
cauguagucucaccaucca

SEQ ID NO: 1999109 - RNA, 19 nt, Homo sapiens
  misc_RNA (1)...(19): siRNA sense strand
ugccuuaaguuuaccaagu

SEQ ID NO: 1999110 - RNA, 19 nt, Homo sapiens
  misc_RNA (1)...(19): siRNA sense strand
caugaguauugccuuaagu

SEQ ID NO: 1999111 - RNA, 19 nt, Homo sapiens
  misc_RNA (1)...(19): siRNA sense strand
gaaccugugacugaacuca

SEQ ID NO: 1999112 - RNA, 19 nt, Homo sapiens
  misc_RNA (1)...(19): siRNA sense strand
acgcuaaaccugugaagau

SEQ ID NO: 1999113 - RNA, 19 nt, Homo sapiens
  misc_RNA (1)...(19): siRNA sense strand
uacaugcuacagauuagua

SEQ ID NO: 1999114 - RNA, 19 nt, Homo sapiens
  misc_RNA (1)...(19): siRNA sense strand
cuggagacccuaacugaug

SEQ ID NO: 1999115 - RNA, 19 nt, Homo sapiens
  misc_RNA (1)...(19): siRNA sense strand
gcuuugacugugcuaauga

SEQ ID NO: 1999116 - RNA, 19 nt, Homo sapiens
  misc_RNA (1)...(19): siRNA sense strand
ccauacgauucaguugauu

SEQ ID NO: 1999117 - RNA, 19 nt, Homo sapiens
  misc_RNA (1)...(19): siRNA sense strand
ggagcagguauuccaugaa

SEQ ID NO: 1999118 - RNA, 19 nt, Homo sapiens
  misc_RNA (1)...(19): siRNA sense strand
uccauacgauucaguugau

SEQ ID NO: 1999119 - RNA, 19 nt, Homo sapiens
  misc_RNA (1)...(19): siRNA sense strand
ugacccagagagugacuuu

SEQ ID NO: 1999120 - RNA, 19 nt, Homo sapiens
  misc_RNA (1)...(19): siRNA sense strand
gcuacagauuaguaagcaa

SEQ ID NO: 1999121 - RNA, 19 nt, Homo sapiens
  misc_RNA (1)...(19): siRNA sense strand
caagccagaccaacagaag

SEQ ID NO: 1999122 - RNA, 19 nt, Homo sapiens
  misc_RNA (1)...(19): siRNA sense strand
gaggaugaggaaaauauaa

SEQ ID NO: 1999123 - RNA, 19 nt, Homo sapiens
  misc_RNA (1)...(19): siRNA sense strand
gagugaagcugggauuccu

SEQ ID NO: 1999124 - RNA, 19 nt, Homo sapiens
  misc_RNA (1)...(19): siRNA sense strand
caaugucucugggcauggu

SEQ ID NO: 1999125 - RNA, 19 nt, Homo sapiens
  misc_RNA (1)...(19): siRNA sense strand
gaaccugugagcgacauca

SEQ ID NO: 1999126 - RNA, 19 nt, Homo sapiens
  misc_RNA (1)...(19): siRNA sense strand
ccacagaggacgcuaaacc

SEQ ID NO: 1999127 - RNA, 19 nt, Homo sapiens
  misc_RNA (1)...(19): siRNA sense strand
gaugugauggagcagguau

SEQ ID NO: 1999128 - RNA, 19 nt, Homo sapiens
  misc_RNA (1)...(19): siRNA sense strand
ccuuaaguuuaccaaguug

SEQ ID NO: 1999129 - RNA, 19 nt, Homo sapiens
  misc_RNA (1)...(19): siRNA sense strand
ucaaccagcgcugcaagaa

SEQ ID NO: 1999130 - RNA, 19 nt, Homo sapiens
  misc_RNA (1)...(19): siRNA sense strand
gucggcagcuccucuacca

SEQ ID NO: 1999131 - RNA, 19 nt, Homo sapiens
  misc_RNA (1)...(19): siRNA sense strand
gaacgcuucccaucuaacc

SEQ ID NO: 1999132 - RNA, 19 nt, Homo sapiens
  misc_RNA (1)...(19): siRNA sense strand
acaugaguauugccuuaag

SEQ ID NO: 1999133 - RNA, 19 nt, Homo sapiens
  misc_RNA (1)...(19): siRNA sense strand
caaagauacuggggagaga

SEQ ID NO: 1999134 - RNA, 19 nt, Homo sapiens
  misc_RNA (1)...(19): siRNA sense strand
gggcuuugacugugcuaau

SEQ ID NO: 1999135 - RNA, 19 nt, Homo sapiens
  misc_RNA (1)...(19): siRNA sense strand
gaaggagacuguaacuuug

SEQ ID NO: 1999136 - RNA, 19 nt, Homo sapiens
  misc_RNA (1)...(19): siRNA sense strand
ccucuaagcucgccuauug

SEQ ID NO: 1999137 - RNA, 19 nt, Homo sapiens
  misc_RNA (1)...(19): siRNA sense strand
gaaagaaucaggugcagaa

SEQ ID NO: 1999138 - RNA, 19 nt, Homo sapiens
  misc_RNA (1)...(19): siRNA sense strand
ucacaccacugucccauuu

SEQ ID NO: 1999139 - RNA, 19 nt, Homo sapiens
  misc_RNA (1)...(19): siRNA sense strand
gacaucaccaccuuaauua

SEQ ID NO: 1999140 - RNA, 19 nt, Homo sapiens
  misc_RNA (1)...(19): siRNA sense strand
gcaguuugaucuuauuguu

SEQ ID NO: 1999141 - RNA, 19 nt, Homo sapiens
  misc_RNA (1)...(19): siRNA sense strand
ggaaguauccaaacaaaca

SEQ ID NO: 1999142 - RNA, 19 nt, Homo sapiens
  misc_RNA (1)...(19): siRNA sense strand
gauaauaagaagcgcaaua

SEQ ID NO: 1999143 - RNA, 19 nt, Homo sapiens
  misc_RNA (1)...(19): siRNA sense strand
ggcaguacaucaccaguaa

SEQ ID NO: 1999144 - RNA, 19 nt, Homo sapiens
  misc_RNA (1)...(19): siRNA sense strand
ccuaagagaugacaaaugg

SEQ ID NO: 1999145 - RNA, 19 nt, Homo sapiens
  misc_RNA (1)...(19): siRNA sense strand
agaaggagacuguaacuuu

SEQ ID NO: 1999146 - RNA, 19 nt, Homo sapiens
  misc_RNA (1)...(19): siRNA sense strand
gaugauggcgauuggauuu

SEQ ID NO: 1999147 - RNA, 19 nt, Homo sapiens
  misc_RNA (1)...(19): siRNA sense strand
ugacaucaccaccuuaauu

SEQ ID NO: 1999148 - RNA, 19 nt, Homo sapiens
  misc_RNA (1)...(19): siRNA sense strand
gaugacaaaugggaaguau

SEQ ID NO: 1999149 - RNA, 19 nt, Homo sapiens
  misc_RNA (1)...(19): siRNA sense strand
caauauagagucaucagaa

SEQ ID NO: 1999150 - RNA, 19 nt, Homo sapiens
  misc_RNA (1)...(19): siRNA sense strand
gagcuacuccucucgauau

SEQ ID NO: 1999151 - RNA, 19 nt, Homo sapiens
  misc_RNA (1)...(19): siRNA sense strand
gauuggauuucccaucuga

SEQ ID NO: 1999152 - RNA, 19 nt, Homo sapiens
  misc_RNA (1)...(19): siRNA sense strand
gaagcgcaauauagaguca

SEQ ID NO: 1999153 - RNA, 19 nt, Homo sapiens
  misc_RNA (1)...(19): siRNA sense strand
gaugaaagaaggagacugu

SEQ ID NO: 1999154 - RNA, 19 nt, Homo sapiens
  misc_RNA (1)...(19): siRNA sense strand
caaaugggaaguauccaaa

SEQ ID NO: 1999155 - RNA, 19 nt, Homo sapiens
  misc_RNA (1)...(19): siRNA sense strand
ugacacagaucaaccuaag

SEQ ID NO: 1999156 - RNA, 19 nt, Homo sapiens
  misc_RNA (1)...(19): siRNA sense strand
ccugagcaguuugaucuua

SEQ ID NO: 1999157 - RNA, 19 nt, Homo sapiens
  misc_RNA (1)...(19): siRNA sense strand
ugaaagaaggagacuguaa

SEQ ID NO: 1999158 - RNA, 19 nt, Homo sapiens
  misc_RNA (1)...(19): siRNA sense strand
gcgauuggauuucccaucu

SEQ ID NO: 1999159 - RNA, 19 nt, Homo sapiens
  misc_RNA (1)...(19): siRNA sense strand
caccugcacuccucauuau

SEQ ID NO: 1999160 - RNA, 19 nt, Homo sapiens
  misc_RNA (1)...(19): siRNA sense strand
caaccuaagagaugacaaa

SEQ ID NO: 1999161 - RNA, 19 nt, Homo sapiens
  misc_RNA (1)...(19): siRNA sense strand
gaaagaaggagacuguaac

SEQ ID NO: 1999162 - RNA, 19 nt, Homo sapiens
  misc_RNA (1)...(19): siRNA sense strand
gaaggaauggugaugaaag

SEQ ID NO: 1999163 - RNA, 19 nt, Homo sapiens
  misc_RNA (1)...(19): siRNA sense strand
ggccuucccucgugauuca

SEQ ID NO: 1999164 - RNA, 19 nt, Homo sapiens
  misc_RNA (1)...(19): siRNA sense strand
ugacuugggugcucaguac

SEQ ID NO: 1999165 - RNA, 19 nt, Homo sapiens
  misc_RNA (1)...(19): siRNA sense strand
gcauugaggaugugcaaga

SEQ ID NO: 1999166 - RNA, 19 nt, Homo sapiens
  misc_RNA (1)...(19): siRNA sense strand
agaaucaggugcagaaguc

SEQ ID NO: 1999167 - RNA, 19 nt, Homo sapiens
  misc_RNA (1)...(19): siRNA sense strand
ugggaaguauccaaacaaa

SEQ ID NO: 1999168 - RNA, 19 nt, Homo sapiens
  misc_RNA (1)...(19): siRNA sense strand
ucaccugcacuccucauua

SEQ ID NO: 1999169 - RNA, 19 nt, Homo sapiens
  misc_RNA (1)...(19): siRNA sense strand
auaagaagcgcaauauaga

SEQ ID NO: 1999170 - RNA, 19 nt, Homo sapiens
  misc_RNA (1)...(19): siRNA sense strand
aauaagaagcgcaauauag

SEQ ID NO: 1999171 - RNA, 19 nt, Homo sapiens
  misc_RNA (1)...(19): siRNA sense strand
aaggaauggugaugaaaga

SEQ ID NO: 1999172 - RNA, 19 nt, Homo sapiens
  misc_RNA (1)...(19): siRNA sense strand
caccaguaaucccugcaua

SEQ ID NO: 1999173 - RNA, 19 nt, Homo sapiens
  misc_RNA (1)...(19): siRNA sense strand
gaugaacuguuagccuaug

SEQ ID NO: 1999174 - RNA, 19 nt, Homo sapiens
  misc_RNA (1)...(19): siRNA sense strand
cagaucaaccuaagagaug

SEQ ID NO: 1999175 - RNA, 19 nt, Homo sapiens
  misc_RNA (1)...(19): siRNA sense strand
gcgaagagccccuggauga

SEQ ID NO: 1999176 - RNA, 19 nt, Homo sapiens
  misc_RNA (1)...(19): siRNA sense strand
gauaugcucugggccucuu

SEQ ID NO: 1999177 - RNA, 19 nt, Homo sapiens
  misc_RNA (1)...(19): siRNA sense strand
uguggcaccucaaggaauu

SEQ ID NO: 1999178 - RNA, 19 nt, Homo sapiens
  misc_RNA (1)...(19): siRNA sense strand
gggcaguacaucaccagua

SEQ ID NO: 1999179 - RNA, 19 nt, Homo sapiens
  misc_RNA (1)...(19): siRNA sense strand
gaagcugguacgaagauug

SEQ ID NO: 1999180 - RNA, 19 nt, Homo sapiens
  misc_RNA (1)...(19): siRNA sense strand
gccaauugcuaccaaaugc

SEQ ID NO: 1999181 - RNA, 19 nt, Homo sapiens
  misc_RNA (1)...(19): siRNA sense strand
gcaauauagagucaucaga

SEQ ID NO: 1999182 - RNA, 19 nt, Homo sapiens
  misc_RNA (1)...(19): siRNA sense strand
auggagacauucacaggua

SEQ ID NO: 1999183 - RNA, 19 nt, Homo sapiens
  misc_RNA (1)...(19): siRNA sense strand
cuucagacaucgugugaca

SEQ ID NO: 1999184 - RNA, 19 nt, Homo sapiens
  misc_RNA (1)...(19): siRNA sense strand
ggaauggugaugaaagaag

SEQ ID NO: 1999185 - RNA, 19 nt, Homo sapiens
  misc_RNA (1)...(19): siRNA sense strand
cauuuggaguuacauacuu

SEQ ID NO: 1999186 - RNA, 19 nt, Homo sapiens
  misc_RNA (1)...(19): siRNA sense strand
ugagcaguuugaucuuauu

SEQ ID NO: 1999187 - RNA, 19 nt, Homo sapiens
  misc_RNA (1)...(19): siRNA sense strand
ggguuugccucagccaauu

SEQ ID NO: 1999188 - RNA, 19 nt, Homo sapiens
  misc_RNA (1)...(19): siRNA sense strand
uugaaggaauggugaugaa

SEQ ID NO: 1999189 - RNA, 19 nt, Homo sapiens
  misc_RNA (1)...(19): siRNA sense strand
gcucgccuauugaaggaau

SEQ ID NO: 1999190 - RNA, 19 nt, Homo sapiens
  misc_RNA (1)...(19): siRNA sense strand
uugaggaugugcaagaguu

SEQ ID NO: 1999191 - RNA, 19 nt, Homo sapiens
  misc_RNA (1)...(19): siRNA sense strand
ucgucuccauugauaauaa

SEQ ID NO: 1999192 - RNA, 19 nt, Homo sapiens
  misc_RNA (1)...(19): siRNA sense strand
caucaccaccuuaauuagu

SEQ ID NO: 1999193 - RNA, 19 nt, Homo sapiens
  misc_RNA (1)...(19): siRNA sense strand
ggaugauggcgauuggauu

SEQ ID NO: 1999194 - RNA, 19 nt, Homo sapiens
  misc_RNA (1)...(19): siRNA sense strand
cucaaggaauuucuucaau

SEQ ID NO: 1999195 - RNA, 19 nt, Homo sapiens
  misc_RNA (1)...(19): siRNA sense strand
gagcaguuugaucuuauug

SEQ ID NO: 1999196 - RNA, 19 nt, Homo sapiens
  misc_RNA (1)...(19): siRNA sense strand
gcaccucaaggaauuucuu

SEQ ID NO: 1999197 - RNA, 19 nt, Homo sapiens
  misc_RNA (1)...(19): siRNA sense strand
ugaggaugugcaagaguua

SEQ ID NO: 1999198 - RNA, 19 nt, Homo sapiens
  misc_RNA (1)...(19): siRNA sense strand
cugagcaguuugaucuuau

SEQ ID NO: 1999199 - RNA, 19 nt, Homo sapiens
  misc_RNA (1)...(19): siRNA sense strand
aaugggaaguauccaaaca

SEQ ID NO: 1999200 - RNA, 19 nt, Homo sapiens
  misc_RNA (1)...(19): siRNA sense strand
cgcuucgucuccauugaua

SEQ ID NO: 1999201 - RNA, 19 nt, Homo sapiens
  misc_RNA (1)...(19): siRNA sense strand
auagagucaucagaaauug

SEQ ID NO: 1999202 - RNA, 19 nt, Homo sapiens
  misc_RNA (1)...(19): siRNA sense strand
acacagaucaaccuaagag

SEQ ID NO: 1999203 - RNA, 19 nt, Homo sapiens
  misc_RNA (1)...(19): siRNA sense strand
ccucaaggaauuucuucaa

SEQ ID NO: 1999204 - RNA, 19 nt, Homo sapiens
  misc_RNA (1)...(19): siRNA sense strand
ucagccaauugcuaccaaa

SEQ ID NO: 1999205 - RNA, 19 nt, Homo sapiens
  misc_RNA (1)...(19): siRNA sense strand
ucuaagcucgccuauugaa

SEQ ID NO: 1999206 - RNA, 19 nt, Homo sapiens
  misc_RNA (1)...(19): siRNA sense strand
ccaccuuaauuagugaaug

SEQ ID NO: 1999207 - RNA, 19 nt, Homo sapiens
  misc_RNA (1)...(19): siRNA sense strand
caaugccaguuccugagau

SEQ ID NO: 1999208 - RNA, 19 nt, Homo sapiens
  misc_RNA (1)...(19): siRNA sense strand
agaucaaccuaagagauga

SEQ ID NO: 1999209 - RNA, 19 nt, Homo sapiens
  misc_RNA (1)...(19): siRNA sense strand
aagcucgccuauugaagga

SEQ ID NO: 1999210 - RNA, 19 nt, Homo sapiens
  misc_RNA (1)...(19): siRNA sense strand
ugacaaaugggaaguaucc

SEQ ID NO: 1999211 - RNA, 19 nt, Homo sapiens
  misc_RNA (1)...(19): siRNA sense strand
uaagaagcgcaauauagag

SEQ ID NO: 1999212 - RNA, 19 nt, Homo sapiens
  misc_RNA (1)...(19): siRNA sense strand
aagcugguacgaagauuga

SEQ ID NO: 1999213 - RNA, 19 nt, Homo sapiens
  misc_RNA (1)...(19): siRNA sense strand
ugagcuacuccucucgaua

SEQ ID NO: 1999214 - RNA, 19 nt, Homo sapiens
  misc_RNA (1)...(19): siRNA sense strand
aaugccaguuccugagauu

SEQ ID NO: 1999215 - RNA, 19 nt, Homo sapiens
  misc_RNA (1)...(19): siRNA sense strand
gggaugacaggaagcuugu

SEQ ID NO: 1999216 - RNA, 19 nt, Homo sapiens
  misc_RNA (1)...(19): siRNA sense strand
gacguccggucccuuguac

SEQ ID NO: 1999217 - RNA, 19 nt, Homo sapiens
  misc_RNA (1)...(19): siRNA sense strand
caccuuaauuagugaaugc

SEQ ID NO: 1999218 - RNA, 19 nt, Homo sapiens
  misc_RNA (1)...(19): siRNA sense strand
ugaaggaauggugaugaaa

SEQ ID NO: 1999219 - RNA, 19 nt, Homo sapiens
  misc_RNA (1)...(19): siRNA sense strand
ggaacacagcauugaggau

SEQ ID NO: 1999220 - RNA, 19 nt, Homo sapiens
  misc_RNA (1)...(19): siRNA sense strand
gcauacgcuucgucuccau

SEQ ID NO: 1999221 - RNA, 19 nt, Homo sapiens
  misc_RNA (1)...(19): siRNA sense strand
gagauucugcagcuucaag

SEQ ID NO: 1999222 - RNA, 19 nt, Homo sapiens
  misc_RNA (1)...(19): siRNA sense strand
acaaaugggaaguauccaa

SEQ ID NO: 1999223 - RNA, 19 nt, Homo sapiens
  misc_RNA (1)...(19): siRNA sense strand
gcauuacuugaaagaauca

SEQ ID NO: 1999224 - RNA, 19 nt, Homo sapiens
  misc_RNA (1)...(19): siRNA sense strand
gaagagccccuggaugaug

SEQ ID NO: 1999225 - RNA, 19 nt, Homo sapiens
  misc_RNA (1)...(19): siRNA sense strand
caguacaucaccaguaauc

SEQ ID NO: 1999226 - RNA, 19 nt, Homo sapiens
  misc_RNA (1)...(19): siRNA sense strand
ugaagcugguacgaagauu

SEQ ID NO: 1999227 - RNA, 19 nt, Homo sapiens
  misc_RNA (1)...(19): siRNA sense strand
gaaguauccaaacaaacag

SEQ ID NO: 1999228 - RNA, 19 nt, Homo sapiens
  misc_RNA (1)...(19): siRNA sense strand
acagaucaaccuaagagau

SEQ ID NO: 1999229 - RNA, 19 nt, Homo sapiens
  misc_RNA (1)...(19): siRNA sense strand
acugucccauuuggaguua

SEQ ID NO: 1999230 - RNA, 19 nt, Homo sapiens
  misc_RNA (1)...(19): siRNA sense strand
acaccacugucccauuugg

SEQ ID NO: 1999231 - RNA, 19 nt, Homo sapiens
  misc_RNA (1)...(19): siRNA sense strand
gcucugggccucuuuuaug

SEQ ID NO: 1999232 - RNA, 19 nt, Homo sapiens
  misc_RNA (1)...(19): siRNA sense strand
cuacuccucucgauaugcu

SEQ ID NO: 1999233 - RNA, 19 nt, Homo sapiens
  misc_RNA (1)...(19): siRNA sense strand
cagccugcaguccucauaa

SEQ ID NO: 1999234 - RNA, 19 nt, Homo sapiens
  misc_RNA (1)...(19): siRNA sense strand
agacguccggucccuugua

SEQ ID NO: 1999235 - RNA, 19 nt, Homo sapiens
  misc_RNA (1)...(19): siRNA sense strand
gagauagaguucaacauua

SEQ ID NO: 1999236 - RNA, 19 nt, Homo sapiens
  misc_RNA (1)...(19): siRNA sense strand
ggaagaggcugccaacaga

SEQ ID NO: 1999237 - RNA, 19 nt, Homo sapiens
  misc_RNA (1)...(19): siRNA sense strand
uauccaagcugucagaaua

SEQ ID NO: 1999238 - RNA, 19 nt, Homo sapiens
  misc_RNA (1)...(19): siRNA sense strand
caacauuacuggcaauuau

SEQ ID NO: 1999239 - RNA, 19 nt, Homo sapiens
  misc_RNA (1)...(19): siRNA sense strand
ggaagucccugacacuauu

SEQ ID NO: 1999240 - RNA, 19 nt, Homo sapiens
  misc_RNA (1)...(19): siRNA sense strand
cagcugauauguacaguuu

SEQ ID NO: 1999241 - RNA, 19 nt, Homo sapiens
  misc_RNA (1)...(19): siRNA sense strand
gaaagcaugucuacagauc

SEQ ID NO: 1999242 - RNA, 19 nt, Homo sapiens
  misc_RNA (1)...(19): siRNA sense strand
ggagauagaguucaacauu

SEQ ID NO: 1999243 - RNA, 19 nt, Homo sapiens
  misc_RNA (1)...(19): siRNA sense strand
ccaaagaaauugacuaugc

SEQ ID NO: 1999244 - RNA, 19 nt, Homo sapiens
  misc_RNA (1)...(19): siRNA sense strand
cuacagaucuuguccacuu

SEQ ID NO: 1999245 - RNA, 19 nt, Homo sapiens
  misc_RNA (1)...(19): siRNA sense strand
gaagggaacauuacagaga

SEQ ID NO: 1999246 - RNA, 19 nt, Homo sapiens
  misc_RNA (1)...(19): siRNA sense strand
caggagcuuugaaaucuua

SEQ ID NO: 1999247 - RNA, 19 nt, Homo sapiens
  misc_RNA (1)...(19): siRNA sense strand
caagaugacucccaguaau

SEQ ID NO: 1999248 - RNA, 19 nt, Homo sapiens
  misc_RNA (1)...(19): siRNA sense strand
caacauccgauacuugaua

SEQ ID NO: 1999249 - RNA, 19 nt, Homo sapiens
  misc_RNA (1)...(19): siRNA sense strand
gaucuuguccacuuugaua

SEQ ID NO: 1999250 - RNA, 19 nt, Homo sapiens
  misc_RNA (1)...(19): siRNA sense strand
gcaaauuguugggaucauu

SEQ ID NO: 1999251 - RNA, 19 nt, Homo sapiens
  misc_RNA (1)...(19): siRNA sense strand
gcucucagcugauauguac

SEQ ID NO: 1999252 - RNA, 19 nt, Homo sapiens
  misc_RNA (1)...(19): siRNA sense strand
gaaauugacuaugcaaacu

SEQ ID NO: 1999253 - RNA, 19 nt, Homo sapiens
  misc_RNA (1)...(19): siRNA sense strand
gggaaagcaugucuacaga

SEQ ID NO: 1999254 - RNA, 19 nt, Homo sapiens
  misc_RNA (1)...(19): siRNA sense strand
ggagaugacacacuucuug

SEQ ID NO: 1999255 - RNA, 19 nt, Homo sapiens
  misc_RNA (1)...(19): siRNA sense strand
gucagaauaucaagaugua

SEQ ID NO: 1999256 - RNA, 19 nt, Homo sapiens
  misc_RNA (1)...(19): siRNA sense strand
ccaguaauauggcaauugu

SEQ ID NO: 1999257 - RNA, 19 nt, Homo sapiens
  misc_RNA (1)...(19): siRNA sense strand
caaagaaauugacuaugca

SEQ ID NO: 1999258 - RNA, 19 nt, Homo sapiens
  misc_RNA (1)...(19): siRNA sense strand
guggaaaucccaaauauuc

SEQ ID NO: 1999259 - RNA, 19 nt, Homo sapiens
  misc_RNA (1)...(19): siRNA sense strand
ccuuugaacucuaugauga

SEQ ID NO: 1999260 - RNA, 19 nt, Homo sapiens
  misc_RNA (1)...(19): siRNA sense strand
ggaaaucccaaauauucaa

SEQ ID NO: 1999261 - RNA, 19 nt, Homo sapiens
  misc_RNA (1)...(19): siRNA sense strand
caacaacauccgauacuug

SEQ ID NO: 1999262 - RNA, 19 nt, Homo sapiens
  misc_RNA (1)...(19): siRNA sense strand
gauccaggcuuccaauguc

SEQ ID NO: 1999263 - RNA, 19 nt, Homo sapiens
  misc_RNA (1)...(19): siRNA sense strand
caguacacgugaaccauaa

SEQ ID NO: 1999264 - RNA, 19 nt, Homo sapiens
  misc_RNA (1)...(19): siRNA sense strand
ccaacagaguggagauuug

SEQ ID NO: 1999265 - RNA, 19 nt, Homo sapiens
  misc_RNA (1)...(19): siRNA sense strand
gagguggaaaucccaaaua

SEQ ID NO: 1999266 - RNA, 19 nt, Homo sapiens
  misc_RNA (1)...(19): siRNA sense strand
cagaaccucuuaugaccuu

SEQ ID NO: 1999267 - RNA, 19 nt, Homo sapiens
  misc_RNA (1)...(19): siRNA sense strand
gaacauuacagagaugaug

SEQ ID NO: 1999268 - RNA, 19 nt, Homo sapiens
  misc_RNA (1)...(19): siRNA sense strand
gaaccauaaugccaacuac

SEQ ID NO: 1999269 - RNA, 19 nt, Homo sapiens
  misc_RNA (1)...(19): siRNA sense strand
gcaggagcuuugaaaucuu

SEQ ID NO: 1999270 - RNA, 19 nt, Homo sapiens
  misc_RNA (1)...(19): siRNA sense strand
guaaaccucucggccucua

SEQ ID NO: 1999271 - RNA, 19 nt, Homo sapiens
  misc_RNA (1)...(19): siRNA sense strand
gcugauacauuuugaguug

SEQ ID NO: 1999272 - RNA, 19 nt, Homo sapiens
  misc_RNA (1)...(19): siRNA sense strand
caagcagaagggaacauua

SEQ ID NO: 1999273 - RNA, 19 nt, Homo sapiens
  misc_RNA (1)...(19): siRNA sense strand
agacagaaguuuugaguga

SEQ ID NO: 1999274 - RNA, 19 nt, Homo sapiens
  misc_RNA (1)...(19): siRNA sense strand
aagaugacucccaguaaua

SEQ ID NO: 1999275 - RNA, 19 nt, Homo sapiens
  misc_RNA (1)...(19): siRNA sense strand
cagugucgcugcaaauugu

SEQ ID NO: 1999276 - RNA, 19 nt, Homo sapiens
  misc_RNA (1)...(19): siRNA sense strand
gacauggauuccucacgaa

SEQ ID NO: 1999277 - RNA, 19 nt, Homo sapiens
  misc_RNA (1)...(19): siRNA sense strand
ccaguacacgugaaccaua

SEQ ID NO: 1999278 - RNA, 19 nt, Homo sapiens
  misc_RNA (1)...(19): siRNA sense strand
caagauguaaacaagauga

SEQ ID NO: 1999279 - RNA, 19 nt, Homo sapiens
  misc_RNA (1)...(19): siRNA sense strand
aaucuuaccuccgagaguu

SEQ ID NO: 1999280 - RNA, 19 nt, Homo sapiens
  misc_RNA (1)...(19): siRNA sense strand
ggccucuccuucugucuuu

SEQ ID NO: 1999281 - RNA, 19 nt, Homo sapiens
  misc_RNA (1)...(19): siRNA sense strand
gcacaugcggcgacacuca

SEQ ID NO: 1999282 - RNA, 19 nt, Homo sapiens
  misc_RNA (1)...(19): siRNA sense strand
ggccaaagaaauugacuau

SEQ ID NO: 1999283 - RNA, 19 nt, Homo sapiens
  misc_RNA (1)...(19): siRNA sense strand
agauagaguucaacauuac

SEQ ID NO: 1999284 - RNA, 19 nt, Homo sapiens
  misc_RNA (1)...(19): siRNA sense strand
caaauuguugggaucauug

SEQ ID NO: 1999285 - RNA, 19 nt, Homo sapiens
  misc_RNA (1)...(19): siRNA sense strand
uguauugccucagaucaaa

SEQ ID NO: 1999286 - RNA, 19 nt, Homo sapiens
  misc_RNA (1)...(19): siRNA sense strand
ugacuaugcaaacuacuuu

SEQ ID NO: 1999287 - RNA, 19 nt, Homo sapiens
  misc_RNA (1)...(19): siRNA sense strand
gggaagaugcugaaacucu

SEQ ID NO: 1999288 - RNA, 19 nt, Homo sapiens
  misc_RNA (1)...(19): siRNA sense strand
aagcaugucuacagaucuu

SEQ ID NO: 1999289 - RNA, 19 nt, Homo sapiens
  misc_RNA (1)...(19): siRNA sense strand
gagaugaugaccacagugu

SEQ ID NO: 1999290 - RNA, 19 nt, Homo sapiens
  misc_RNA (1)...(19): siRNA sense strand
uagaagugcaagcugaaua

SEQ ID NO: 1999291 - RNA, 19 nt, Homo sapiens
  misc_RNA (1)...(19): siRNA sense strand
ccugggagaugacacacuu

SEQ ID NO: 1999292 - RNA, 19 nt, Homo sapiens
  misc_RNA (1)...(19): siRNA sense strand
cagaagggaacauuacaga

SEQ ID NO: 1999293 - RNA, 19 nt, Homo sapiens
  misc_RNA (1)...(19): siRNA sense strand
gucuggagcuggugaaaca

SEQ ID NO: 1999294 - RNA, 19 nt, Homo sapiens
  misc_RNA (1)...(19): siRNA sense strand
gguggaaaucccaaauauu

SEQ ID NO: 1999295 - RNA, 19 nt, Homo sapiens
  misc_RNA (1)...(19): siRNA sense strand
gagcgcaccagcacaacaa

SEQ ID NO: 1999296 - RNA, 19 nt, Homo sapiens
  misc_RNA (1)...(19): siRNA sense strand
auaauaugaugcuggaguu

SEQ ID NO: 1999297 - RNA, 19 nt, Homo sapiens
  misc_RNA (1)...(19): siRNA sense strand
acaagaugacucccaguaa

SEQ ID NO: 1999298 - RNA, 19 nt, Homo sapiens
  misc_RNA (1)...(19): siRNA sense strand
caagaagcuucaggcucua

SEQ ID NO: 1999299 - RNA, 19 nt, Homo sapiens
  misc_RNA (1)...(19): siRNA sense strand
gcaauugcaggagcuuuga

SEQ ID NO: 1999300 - RNA, 19 nt, Homo sapiens
  misc_RNA (1)...(19): siRNA sense strand
gggcagggcugaaaagaca

SEQ ID NO: 1999301 - RNA, 19 nt, Homo sapiens
  misc_RNA (1)...(19): siRNA sense strand
gaucauugaaccuaucauc

SEQ ID NO: 1999302 - RNA, 19 nt, Homo sapiens
  misc_RNA (1)...(19): siRNA sense strand
gcaggaggagggacucuuc

SEQ ID NO: 1999303 - RNA, 19 nt, Homo sapiens
  misc_RNA (1)...(19): siRNA sense strand
ggaaagcaugucuacagau

SEQ ID NO: 1999304 - RNA, 19 nt, Homo sapiens
  misc_RNA (1)...(19): siRNA sense strand
cagcuauccugggagauga

SEQ ID NO: 1999305 - RNA, 19 nt, Homo sapiens
  misc_RNA (1)...(19): siRNA sense strand
ugagggucauggacacaaa

SEQ ID NO: 1999306 - RNA, 19 nt, Homo sapiens
  misc_RNA (1)...(19): siRNA sense strand
guagagagagacgugauug

SEQ ID NO: 1999307 - RNA, 19 nt, Homo sapiens
  misc_RNA (1)...(19): siRNA sense strand
aacauccgauacuugauaa

SEQ ID NO: 1999308 - RNA, 19 nt, Homo sapiens
  misc_RNA (1)...(19): siRNA sense strand
gcuucaggcucuauggaau

SEQ ID NO: 1999309 - RNA, 19 nt, Homo sapiens
  misc_RNA (1)...(19): siRNA sense strand
gaaccucuuaugaccuuug

SEQ ID NO: 1999310 - RNA, 19 nt, Homo sapiens
  misc_RNA (1)...(19): siRNA sense strand
gcugauauguacaguuuug

SEQ ID NO: 1999311 - RNA, 19 nt, Homo sapiens
  misc_RNA (1)...(19): siRNA sense strand
ugcaggagcuuugaaaucu

SEQ ID NO: 1999312 - RNA, 19 nt, Homo sapiens
  misc_RNA (1)...(19): siRNA sense strand
cagaucuuguccacuuuga

SEQ ID NO: 1999313 - RNA, 19 nt, Homo sapiens
  misc_RNA (1)...(19): siRNA sense strand
ggaguccaguacacgugaa

SEQ ID NO: 1999314 - RNA, 19 nt, Homo sapiens
  misc_RNA (1)...(19): siRNA sense strand
acaacaacauccgauacuu

SEQ ID NO: 1999315 - RNA, 19 nt, Homo sapiens
  misc_RNA (1)...(19): siRNA sense strand
ggauccaggcuuccaaugu

SEQ ID NO: 1999316 - RNA, 19 nt, Homo sapiens
  misc_RNA (1)...(19): siRNA sense strand
gaagaugcugaaacucugu

SEQ ID NO: 1999317 - RNA, 19 nt, Homo sapiens
  misc_RNA (1)...(19): siRNA sense strand
ucaacauuacuggcaauua

SEQ ID NO: 1999318 - RNA, 19 nt, Homo sapiens
  misc_RNA (1)...(19): siRNA sense strand
cagagaugaugaccacagu

SEQ ID NO: 1999319 - RNA, 19 nt, Homo sapiens
  misc_RNA (1)...(19): siRNA sense strand
agguggaaaucccaaauau

SEQ ID NO: 1999320 - RNA, 19 nt, Homo sapiens
  misc_RNA (1)...(19): siRNA sense strand
ccacagcacgcacaagaag

SEQ ID NO: 1999321 - RNA, 19 nt, Homo sapiens
  misc_RNA (1)...(19): siRNA sense strand
uaugaccuuugaacucuau

SEQ ID NO: 1999322 - RNA, 19 nt, Homo sapiens
  misc_RNA (1)...(19): siRNA sense strand
gccaacagaguggagauuu

SEQ ID NO: 1999323 - RNA, 19 nt, Homo sapiens
  misc_RNA (1)...(19): siRNA sense strand
uuccaagucuucagguuug

SEQ ID NO: 1999324 - RNA, 19 nt, Homo sapiens
  misc_RNA (1)...(19): siRNA sense strand
ccagguggcagcagacuuc

SEQ ID NO: 1999325 - RNA, 19 nt, Homo sapiens
  misc_RNA (1)...(19): siRNA sense strand
aagggaacauuacagagau

SEQ ID NO: 1999326 - RNA, 19 nt, Homo sapiens
  misc_RNA (1)...(19): siRNA sense strand
ucuauggaaugcuugugaa

SEQ ID NO: 1999327 - RNA, 19 nt, Homo sapiens
  misc_RNA (1)...(19): siRNA sense strand
ugguggaugugcaggagua

SEQ ID NO: 1999328 - RNA, 19 nt, Homo sapiens
  misc_RNA (1)...(19): siRNA sense strand
ccuccaaacugaagaagcu

SEQ ID NO: 1999329 - RNA, 19 nt, Homo sapiens
  misc_RNA (1)...(19): siRNA sense strand
guggagagacggaggacaa

SEQ ID NO: 1999330 - RNA, 19 nt, Homo sapiens
  misc_RNA (1)...(19): siRNA sense strand
aacaacauccgauacuuga

SEQ ID NO: 1999331 - RNA, 19 nt, Homo sapiens
  misc_RNA (1)...(19): siRNA sense strand
ggagguggaaaucccaaau

SEQ ID NO: 1999332 - RNA, 19 nt, Homo sapiens
  misc_RNA (1)...(19): siRNA sense strand
gaguugccagaaccucuua

SEQ ID NO: 1999333 - RNA, 19 nt, Homo sapiens
  misc_RNA (1)...(19): siRNA sense strand
caaggccaaucacaacaac

SEQ ID NO: 1999334 - RNA, 19 nt, Homo sapiens
  misc_RNA (1)...(19): siRNA sense strand
guacacgugaaccauaaug

SEQ ID NO: 1999335 - RNA, 19 nt, Homo sapiens
  misc_RNA (1)...(19): siRNA sense strand
ggccuuggauucaauauua

SEQ ID NO: 1999336 - RNA, 19 nt, Homo sapiens
  misc_RNA (1)...(19): siRNA sense strand
gaucaacuccucucuguua

SEQ ID NO: 1999337 - RNA, 19 nt, Homo sapiens
  misc_RNA (1)...(19): siRNA sense strand
ggagagagauauuuguaga

SEQ ID NO: 1999338 - RNA, 19 nt, Homo sapiens
  misc_RNA (1)...(19): siRNA sense strand
gaacaaaacucuccaaucu

SEQ ID NO: 1999339 - RNA, 19 nt, Homo sapiens
  misc_RNA (1)...(19): siRNA sense strand
gaaauggagucgcgcuuug

SEQ ID NO: 1999340 - RNA, 19 nt, Homo sapiens
  misc_RNA (1)...(19): siRNA sense strand
acaaaggaguggagaagua

SEQ ID NO: 1999341 - RNA, 19 nt, Homo sapiens
  misc_RNA (1)...(19): siRNA sense strand
caaagugaauucugcaaug

SEQ ID NO: 1999342 - RNA, 19 nt, Homo sapiens
  misc_RNA (1)...(19): siRNA sense strand
gcaaagaguccuucaaagu

SEQ ID NO: 1999343 - RNA, 19 nt, Homo sapiens
  misc_RNA (1)...(19): siRNA sense strand
cacagaaacuucaggcuuu

SEQ ID NO: 1999344 - RNA, 19 nt, Homo sapiens
  misc_RNA (1)...(19): siRNA sense strand
aaagaguccuucaaaguga

SEQ ID NO: 1999345 - RNA, 19 nt, Homo sapiens
  misc_RNA (1)...(19): siRNA sense strand
gaagagggccuuggauuca

SEQ ID NO: 1999346 - RNA, 19 nt, Homo sapiens
  misc_RNA (1)...(19): siRNA sense strand
caacuccucucuguuaaug

SEQ ID NO: 1999347 - RNA, 19 nt, Homo sapiens
  misc_RNA (1)...(19): siRNA sense strand
caaagaguccuucaaagug

SEQ ID NO: 1999348 - RNA, 19 nt, Homo sapiens
  misc_RNA (1)...(19): siRNA sense strand
gcugaaagccgcacaagga

SEQ ID NO: 1999349 - RNA, 19 nt, Homo sapiens
  misc_RNA (1)...(19): siRNA sense strand
ugagagagguauaugaaca

SEQ ID NO: 1999350 - RNA, 19 nt, Homo sapiens
  misc_RNA (1)...(19): siRNA sense strand
gaaggagaacaucaugaaa

SEQ ID NO: 1999351 - RNA, 19 nt, Homo sapiens
  misc_RNA (1)...(19): siRNA sense strand
auacacacccaaagucuua

SEQ ID NO: 1999352 - RNA, 19 nt, Homo sapiens
  misc_RNA (1)...(19): siRNA sense strand
ggagaaguaccaccacaga

SEQ ID NO: 1999353 - RNA, 19 nt, Homo sapiens
  misc_RNA (1)...(19): siRNA sense strand
ccucaaacguggagaucaa

SEQ ID NO: 1999354 - RNA, 19 nt, Homo sapiens
  misc_RNA (1)...(19): siRNA sense strand
gaaagccgcacaaggaaag

SEQ ID NO: 1999355 - RNA, 19 nt, Homo sapiens
  misc_RNA (1)...(19): siRNA sense strand
uagcaguccugaagugaga

SEQ ID NO: 1999356 - RNA, 19 nt, Homo sapiens
  misc_RNA (1)...(19): siRNA sense strand
agagauauuuguagagcaa

SEQ ID NO: 1999357 - RNA, 19 nt, Homo sapiens
  misc_RNA (1)...(19): siRNA sense strand
agaaguaccaccacagaaa

SEQ ID NO: 1999358 - RNA, 19 nt, Homo sapiens
  misc_RNA (1)...(19): siRNA sense strand
ugaaggagaacaucaugaa

SEQ ID NO: 1999359 - RNA, 19 nt, Homo sapiens
  misc_RNA (1)...(19): siRNA sense strand
acaaaacucuccaaucuau

SEQ ID NO: 1999360 - RNA, 19 nt, Homo sapiens
  misc_RNA (1)...(19): siRNA sense strand
caaggaaagguuaaauuag

SEQ ID NO: 1999361 - RNA, 19 nt, Homo sapiens
  misc_RNA (1)...(19): siRNA sense strand
gcacaaggaaagguuaaau

SEQ ID NO: 1999362 - RNA, 19 nt, Homo sapiens
  misc_RNA (1)...(19): siRNA sense strand
cagaagagggccuuggauu

SEQ ID NO: 1999363 - RNA, 19 nt, Homo sapiens
  misc_RNA (1)...(19): siRNA sense strand
guuaauggagugaguguug

SEQ ID NO: 1999364 - RNA, 19 nt, Homo sapiens
  misc_RNA (1)...(19): siRNA sense strand
gagaaguaccaccacagaa

SEQ ID NO: 1999365 - RNA, 19 nt, Homo sapiens
  misc_RNA (1)...(19): siRNA sense strand
uaaauuagugguacgauac

SEQ ID NO: 1999366 - RNA, 19 nt, Homo sapiens
  misc_RNA (1)...(19): siRNA sense strand
gcaaaacgcaggcaacaga

SEQ ID NO: 1999367 - RNA, 19 nt, Homo sapiens
  misc_RNA (1)...(19): siRNA sense strand
agagguauaugaacauguc

SEQ ID NO: 1999368 - RNA, 19 nt, Homo sapiens
  misc_RNA (1)...(19): siRNA sense strand
cacaaggaaagguuaaauu

SEQ ID NO: 1999369 - RNA, 19 nt, Homo sapiens
  misc_RNA (1)...(19): siRNA sense strand
uggaauugcugauagacau

SEQ ID NO: 1999370 - RNA, 19 nt, Homo sapiens
  misc_RNA (1)...(19): siRNA sense strand
caaucuauauaucccgaau

SEQ ID NO: 1999371 - RNA, 19 nt, Homo sapiens
  misc_RNA (1)...(19): siRNA sense strand
gaaguaccaccacagaaac

SEQ ID NO: 1999372 - RNA, 19 nt, Homo sapiens
  misc_RNA (1)...(19): siRNA sense strand
cagguggaauugcugauag

SEQ ID NO: 1999373 - RNA, 19 nt, Homo sapiens
  misc_RNA (1)...(19): siRNA sense strand
gguauaugaacaugucuau

SEQ ID NO: 1999374 - RNA, 19 nt, Homo sapiens
  misc_RNA (1)...(19): siRNA sense strand
caguagcaguccugaagug

SEQ ID NO: 1999375 - RNA, 19 nt, Homo sapiens
  misc_RNA (1)...(19): siRNA sense strand
acagaaacuucaggcuuug

SEQ ID NO: 1999376 - RNA, 19 nt, Homo sapiens
  misc_RNA (1)...(19): siRNA sense strand
uugcaaagaguccuucaaa

SEQ ID NO: 1999377 - RNA, 19 nt, Homo sapiens
  misc_RNA (1)...(19): siRNA sense strand
ccagguggaauugcugaua

SEQ ID NO: 1999378 - RNA, 19 nt, Homo sapiens
  misc_RNA (1)...(19): siRNA sense strand
gauacacacccaaagucuu

SEQ ID NO: 1999379 - RNA, 19 nt, Homo sapiens
  misc_RNA (1)...(19): siRNA sense strand
aggaaagguuaaauuagug

SEQ ID NO: 1999380 - RNA, 19 nt, Homo sapiens
  misc_RNA (1)...(19): siRNA sense strand
uggagugaguguugaagga

SEQ ID NO: 1999381 - RNA, 19 nt, Homo sapiens
  misc_RNA (1)...(19): siRNA sense strand
aaacuucaggcuuugcaaa

SEQ ID NO: 1999382 - RNA, 19 nt, Homo sapiens
  misc_RNA (1)...(19): siRNA sense strand
uuaauggagugaguguuga

SEQ ID NO: 1999383 - RNA, 19 nt, Homo sapiens
  misc_RNA (1)...(19): siRNA sense strand
agaagagggccuuggauuc

SEQ ID NO: 1999384 - RNA, 19 nt, Homo sapiens
  misc_RNA (1)...(19): siRNA sense strand
ugugagagagguauaugaa

SEQ ID NO: 1999385 - RNA, 19 nt, Homo sapiens
  misc_RNA (1)...(19): siRNA sense strand
gauauuuguagagcaauug

SEQ ID NO: 1999386 - RNA, 19 nt, Homo sapiens
  misc_RNA (1)...(19): siRNA sense strand
ugaaagccgcacaaggaaa

SEQ ID NO: 1999387 - RNA, 19 nt, Homo sapiens
  misc_RNA (1)...(19): siRNA sense strand
gagagagguauaugaacau

SEQ ID NO: 1999388 - RNA, 19 nt, Homo sapiens
  misc_RNA (1)...(19): siRNA sense strand
ggaauugcugauagacaug

SEQ ID NO: 1999389 - RNA, 19 nt, Homo sapiens
  misc_RNA (1)...(19): siRNA sense strand
gaaacuucaggcuuugcaa

SEQ ID NO: 1999390 - RNA, 19 nt, Homo sapiens
  misc_RNA (1)...(19): siRNA sense strand
gccuuggauucaauauuau

SEQ ID NO: 1999391 - RNA, 19 nt, Homo sapiens
  misc_RNA (1)...(19): siRNA sense strand
aaagugaauucugcaaugc

SEQ ID NO: 1999392 - RNA, 19 nt, Homo sapiens
  misc_RNA (1)...(19): siRNA sense strand
agaaauggagucgcgcuuu

SEQ ID NO: 1999393 - RNA, 19 nt, Homo sapiens
  misc_RNA (1)...(19): siRNA sense strand
cuggagagagauauuugua

SEQ ID NO: 1999394 - RNA, 19 nt, Homo sapiens
  misc_RNA (1)...(19): siRNA sense strand
gguacgauacacacccaaa

SEQ ID NO: 1999395 - RNA, 19 nt, Homo sapiens
  misc_RNA (1)...(19): siRNA sense strand
agagagguauaugaacaug

SEQ ID NO: 1999396 - RNA, 19 nt, Homo sapiens
  misc_RNA (1)...(19): siRNA sense strand
aggcuacuguugcugcauu

SEQ ID NO: 1999397 - RNA, 19 nt, Homo sapiens
  misc_RNA (1)...(19): siRNA sense strand
ucaaagugaauucugcaau

SEQ ID NO: 1999398 - RNA, 19 nt, Homo sapiens
  misc_RNA (1)...(19): siRNA sense strand
ggcuacuguugcugcauuu

SEQ ID NO: 1999399 - RNA, 19 nt, Homo sapiens
  misc_RNA (1)...(19): siRNA sense strand
aaaaugagaucagcaaaac

SEQ ID NO: 1999400 - RNA, 19 nt, Homo sapiens
  misc_RNA (1)...(19): siRNA sense strand
uaugggaggcaaagaacaa

SEQ ID NO: 1999401 - RNA, 19 nt, Homo sapiens
  misc_RNA (1)...(19): siRNA sense strand
gagggccuuggauucaaua

SEQ ID NO: 1999402 - RNA, 19 nt, Homo sapiens
  misc_RNA (1)...(19): siRNA sense strand
ugcauuugcugccagugaa

SEQ ID NO: 1999403 - RNA, 19 nt, Homo sapiens
  misc_RNA (1)...(19): siRNA sense strand
acuccucucuguuaaugga

SEQ ID NO: 1999404 - RNA, 19 nt, Homo sapiens
  misc_RNA (1)...(19): siRNA sense strand
caaaggaguggagaaguac

SEQ ID NO: 1999405 - RNA, 19 nt, Homo sapiens
  misc_RNA (1)...(19): siRNA sense strand
uauuaugggaggcaaagaa

SEQ ID NO: 1999406 - RNA, 19 nt, Homo sapiens
  misc_RNA (1)...(19): siRNA sense strand
aagagggccuuggauucaa

SEQ ID NO: 1999407 - RNA, 19 nt, Homo sapiens
  misc_RNA (1)...(19): siRNA sense strand
agagggccuuggauucaau

SEQ ID NO: 1999408 - RNA, 19 nt, Homo sapiens
  misc_RNA (1)...(19): siRNA sense strand
ugcaaagaguccuucaaag

SEQ ID NO: 1999409 - RNA, 19 nt, Homo sapiens
  misc_RNA (1)...(19): siRNA sense strand
guaccaccacagaaacuuc

SEQ ID NO: 1999410 - RNA, 19 nt, Homo sapiens
  misc_RNA (1)...(19): siRNA sense strand
guacgauacacacccaaag

SEQ ID NO: 1999411 - RNA, 19 nt, Homo sapiens
  misc_RNA (1)...(19): siRNA sense strand
cuguagaacugcugaaagc

SEQ ID NO: 1999412 - RNA, 19 nt, Homo sapiens
  misc_RNA (1)...(19): siRNA sense strand
ccagugaaggacauucuca

SEQ ID NO: 1999413 - RNA, 19 nt, Homo sapiens
  misc_RNA (1)...(19): siRNA sense strand
cuacaaaggaguggagaag

SEQ ID NO: 1999414 - RNA, 19 nt, Homo sapiens
  misc_RNA (1)...(19): siRNA sense strand
gggccuuggauucaauauu

SEQ ID NO: 1999415 - RNA, 19 nt, Homo sapiens
  misc_RNA (1)...(19): siRNA sense strand
gagagagauauuuguagag

SEQ ID NO: 1999416 - RNA, 19 nt, Homo sapiens
  misc_RNA (1)...(19): siRNA sense strand
ggaaagaacuuaaacaaag

SEQ ID NO: 1999417 - RNA, 19 nt, Homo sapiens
  misc_RNA (1)...(19): siRNA sense strand
aaacaaaucuucagaguga

SEQ ID NO: 1999418 - RNA, 19 nt, Homo sapiens
  misc_RNA (1)...(19): siRNA sense strand
gaaugcaucugaccgauuu

SEQ ID NO: 1999419 - RNA, 19 nt, Homo sapiens
  misc_RNA (1)...(19): siRNA sense strand
gaaauacgaccacaaauuc

SEQ ID NO: 1999420 - RNA, 19 nt, Homo sapiens
  misc_RNA (1)...(19): siRNA sense strand
ggaucaaacucgccauuaa

SEQ ID NO: 1999421 - RNA, 19 nt, Homo sapiens
  misc_RNA (1)...(19): siRNA sense strand
gaaaugggcaugcugaauu

SEQ ID NO: 1999422 - RNA, 19 nt, Homo sapiens
  misc_RNA (1)...(19): siRNA sense strand
ggagaacugugaaagauau

SEQ ID NO: 1999423 - RNA, 19 nt, Homo sapiens
  misc_RNA (1)...(19): siRNA sense strand
gaacaagggcaaagacauu

SEQ ID NO: 1999424 - RNA, 19 nt, Homo sapiens
  misc_RNA (1)...(19): siRNA sense strand
ucacggagcugcugcugaa

SEQ ID NO: 1999425 - RNA, 19 nt, Homo sapiens
  misc_RNA (1)...(19): siRNA sense strand
ugaaggaaaucaagcaaga

SEQ ID NO: 1999426 - RNA, 19 nt, Homo sapiens
  misc_RNA (1)...(19): siRNA sense strand
ggaaugauuugguccgaau

SEQ ID NO: 1999427 - RNA, 19 nt, Homo sapiens
  misc_RNA (1)...(19): siRNA sense strand
gaaguuaucuaugcaaugc

SEQ ID NO: 1999428 - RNA, 19 nt, Homo sapiens
  misc_RNA (1)...(19): siRNA sense strand
gagaagggcaccagucuga

SEQ ID NO: 1999429 - RNA, 19 nt, Homo sapiens
  misc_RNA (1)...(19): siRNA sense strand
caaacucgccauuaaauau

SEQ ID NO: 1999430 - RNA, 19 nt, Homo sapiens
  misc_RNA (1)...(19): siRNA sense strand
gaucaaacucgccauuaaa

SEQ ID NO: 1999431 - RNA, 19 nt, Homo sapiens
  misc_RNA (1)...(19): siRNA sense strand
cagaagagguggaagcaau

SEQ ID NO: 1999432 - RNA, 19 nt, Homo sapiens
  misc_RNA (1)...(19): siRNA sense strand
ccaagacccuuaacuucaa

SEQ ID NO: 1999433 - RNA, 19 nt, Homo sapiens
  misc_RNA (1)...(19): siRNA sense strand
cggcuuaucugaaguaauc

SEQ ID NO: 1999434 - RNA, 19 nt, Homo sapiens
  misc_RNA (1)...(19): siRNA sense strand
caacauugagacugaauuu

SEQ ID NO: 1999435 - RNA, 19 nt, Homo sapiens
  misc_RNA (1)...(19): siRNA sense strand
ugaaauacgaccacaaauu

SEQ ID NO: 1999436 - RNA, 19 nt, Homo sapiens
  misc_RNA (1)...(19): siRNA sense strand
uguggaaccugcuagauuu

SEQ ID NO: 1999437 - RNA, 19 nt, Homo sapiens
  misc_RNA (1)...(19): siRNA sense strand
gaaauuccuggcugucuuu

SEQ ID NO: 1999438 - RNA, 19 nt, Homo sapiens
  misc_RNA (1)...(19): siRNA sense strand
gcgagaaguuuggaaagaa

SEQ ID NO: 1999439 - RNA, 19 nt, Homo sapiens
  misc_RNA (1)...(19): siRNA sense strand
gaggagcccuuucaugaag

SEQ ID NO: 1999440 - RNA, 19 nt, Homo sapiens
  misc_RNA (1)...(19): siRNA sense strand
guuuguagcucaugcaguu

SEQ ID NO: 1999441 - RNA, 19 nt, Homo sapiens
  misc_RNA (1)...(19): siRNA sense strand
gaacucuaccugcuccuuu

SEQ ID NO: 1999442 - RNA, 19 nt, Homo sapiens
  misc_RNA (1)...(19): siRNA sense strand
ugagcaagcccaccagaua

SEQ ID NO: 1999443 - RNA, 19 nt, Homo sapiens
  misc_RNA (1)...(19): siRNA sense strand
caaauacaacccagcguuu

SEQ ID NO: 1999444 - RNA, 19 nt, Homo sapiens
  misc_RNA (1)...(19): siRNA sense strand
acacaacgcugagggagaa

SEQ ID NO: 1999445 - RNA, 19 nt, Homo sapiens
  misc_RNA (1)...(19): siRNA sense strand
gaacgauuacaggaaguua

SEQ ID NO: 1999446 - RNA, 19 nt, Homo sapiens
  misc_RNA (1)...(19): siRNA sense strand
gcugaaauacgaccacaaa

SEQ ID NO: 1999447 - RNA, 19 nt, Homo sapiens
  misc_RNA (1)...(19): siRNA sense strand
uguucaaccuguacucuua

SEQ ID NO: 1999448 - RNA, 19 nt, Homo sapiens
  misc_RNA (1)...(19): siRNA sense strand
gagcuucucucgcauugca

SEQ ID NO: 1999449 - RNA, 19 nt, Homo sapiens
  misc_RNA (1)...(19): siRNA sense strand
gcaaugagugcaccgagaa

SEQ ID NO: 1999450 - RNA, 19 nt, Homo sapiens
  misc_RNA (1)...(19): siRNA sense strand
uggcagaccugauucaaca

SEQ ID NO: 1999451 - RNA, 19 nt, Homo sapiens
  misc_RNA (1)...(19): siRNA sense strand
gaagugggucuuaggaaug

SEQ ID NO: 1999452 - RNA, 19 nt, Homo sapiens
  misc_RNA (1)...(19): siRNA sense strand
ugaagugggucuuaggaau

SEQ ID NO: 1999453 - RNA, 19 nt, Homo sapiens
  misc_RNA (1)...(19): siRNA sense strand
ugacagcaaauaacacuuu

SEQ ID NO: 1999454 - RNA, 19 nt, Homo sapiens
  misc_RNA (1)...(19): siRNA sense strand
uagccaacauugagacuga

SEQ ID NO: 1999455 - RNA, 19 nt, Homo sapiens
  misc_RNA (1)...(19): siRNA sense strand
ggaaaucaagcaagauauc

SEQ ID NO: 1999456 - RNA, 19 nt, Homo sapiens
  misc_RNA (1)...(19): siRNA sense strand
gaagagguggaagcaauuu

SEQ ID NO: 1999457 - RNA, 19 nt, Homo sapiens
  misc_RNA (1)...(19): siRNA sense strand
ggcgagugcugccuacuug

SEQ ID NO: 1999458 - RNA, 19 nt, Homo sapiens
  misc_RNA (1)...(19): siRNA sense strand
gaagggcucuacgcgauag

SEQ ID NO: 1999459 - RNA, 19 nt, Homo sapiens
  misc_RNA (1)...(19): siRNA sense strand
caaacgaaaccuucacaga

SEQ ID NO: 1999460 - RNA, 19 nt, Homo sapiens
  misc_RNA (1)...(19): siRNA sense strand
caugaacgccuacaaagga

SEQ ID NO: 1999461 - RNA, 19 nt, Homo sapiens
  misc_RNA (1)...(19): siRNA sense strand
ggaagggcucuacgcgaua

SEQ ID NO: 1999462 - RNA, 19 nt, Homo sapiens
  misc_RNA (1)...(19): siRNA sense strand
ucaaacucgccauuaaaua

SEQ ID NO: 1999463 - RNA, 19 nt, Homo sapiens
  misc_RNA (1)...(19): siRNA sense strand
agacugaauuuaagaacga

SEQ ID NO: 1999464 - RNA, 19 nt, Homo sapiens
  misc_RNA (1)...(19): siRNA sense strand
aaagauacguccugaaagc

SEQ ID NO: 1999465 - RNA, 19 nt, Homo sapiens
  misc_RNA (1)...(19): siRNA sense strand
gaaaaucugacagcaaaua

SEQ ID NO: 1999466 - RNA, 19 nt, Homo sapiens
  misc_RNA (1)...(19): siRNA sense strand
cgagaacauuggcuacguu

SEQ ID NO: 1999467 - RNA, 19 nt, Homo sapiens
  misc_RNA (1)...(19): siRNA sense strand
cuaccgaggugccaaauac

SEQ ID NO: 1999468 - RNA, 19 nt, Homo sapiens
  misc_RNA (1)...(19): siRNA sense strand
gggagaacugugaaagaua

SEQ ID NO: 1999469 - RNA, 19 nt, Homo sapiens
  misc_RNA (1)...(19): siRNA sense strand
gcgcaugaacgccuacaaa

SEQ ID NO: 1999470 - RNA, 19 nt, Homo sapiens
  misc_RNA (1)...(19): siRNA sense strand
gccaaaagcugugaaaaug

SEQ ID NO: 1999471 - RNA, 19 nt, Homo sapiens
  misc_RNA (1)...(19): siRNA sense strand
gcaaaacucuggcugucuu

SEQ ID NO: 1999472 - RNA, 19 nt, Homo sapiens
  misc_RNA (1)...(19): siRNA sense strand
gaaguucgcccgagcaaaa

SEQ ID NO: 1999473 - RNA, 19 nt, Homo sapiens
  misc_RNA (1)...(19): siRNA sense strand
ggagcucagcaacgaguua

SEQ ID NO: 1999474 - RNA, 19 nt, Homo sapiens
  misc_RNA (1)...(19): siRNA sense strand
uuacuuugaugaaggaaga

SEQ ID NO: 1999475 - RNA, 19 nt, Homo sapiens
  misc_RNA (1)...(19): siRNA sense strand
ugaaauuccuggcugucuu

SEQ ID NO: 1999476 - RNA, 19 nt, Homo sapiens
  misc_RNA (1)...(19): siRNA sense strand
cugaggagcccuuucauga

SEQ ID NO: 1999477 - RNA, 19 nt, Homo sapiens
  misc_RNA (1)...(19): siRNA sense strand
aaauacaacccagcguuua

SEQ ID NO: 1999478 - RNA, 19 nt, Homo sapiens
  misc_RNA (1)...(19): siRNA sense strand
aaggaaaucaagcaagaua

SEQ ID NO: 1999479 - RNA, 19 nt, Homo sapiens
  misc_RNA (1)...(19): siRNA sense strand
aaaugggcaugcugaauuc

SEQ ID NO: 1999480 - RNA, 19 nt, Homo sapiens
  misc_RNA (1)...(19): siRNA sense strand
aucaagaugugccucauaa

SEQ ID NO: 1999481 - RNA, 19 nt, Homo sapiens
  misc_RNA (1)...(19): siRNA sense strand
ggaugcagauguggaaugg

SEQ ID NO: 1999482 - RNA, 19 nt, Homo sapiens
  misc_RNA (1)...(19): siRNA sense strand
caaaacaaaucuucagagu

SEQ ID NO: 1999483 - RNA, 19 nt, Homo sapiens
  misc_RNA (1)...(19): siRNA sense strand
aaggcgagcugaaggaaau

SEQ ID NO: 1999484 - RNA, 19 nt, Homo sapiens
  misc_RNA (1)...(19): siRNA sense strand
uaaugagaaucaagaugug

SEQ ID NO: 1999485 - RNA, 19 nt, Homo sapiens
  misc_RNA (1)...(19): siRNA sense strand
ggaggaugcagauguggaa

SEQ ID NO: 1999486 - RNA, 19 nt, Homo sapiens
  misc_RNA (1)...(19): siRNA sense strand
ccacggaggcacagcugua

SEQ ID NO: 1999487 - RNA, 19 nt, Homo sapiens
  misc_RNA (1)...(19): siRNA sense strand
gaaaaucucucaggcuuac

SEQ ID NO: 1999488 - RNA, 19 nt, Homo sapiens
  misc_RNA (1)...(19): siRNA sense strand
gcgcgacgacgacuucuau

SEQ ID NO: 1999489 - RNA, 19 nt, Homo sapiens
  misc_RNA (1)...(19): siRNA sense strand
gaaggcgagcugaaggaaa

SEQ ID NO: 1999490 - RNA, 19 nt, Homo sapiens
  misc_RNA (1)...(19): siRNA sense strand
ugaggaggaugcagaugug

SEQ ID NO: 1999491 - RNA, 19 nt, Homo sapiens
  misc_RNA (1)...(19): siRNA sense strand
ggagcccuuucaugaaguu

SEQ ID NO: 1999492 - RNA, 19 nt, Homo sapiens
  misc_RNA (1)...(19): siRNA sense strand
gcaacgaguuagccagacu

SEQ ID NO: 1999493 - RNA, 19 nt, Homo sapiens
  misc_RNA (1)...(19): siRNA sense strand
gaaaucaagcaagauaucu

SEQ ID NO: 1999494 - RNA, 19 nt, Homo sapiens
  misc_RNA (1)...(19): siRNA sense strand
gaggaacagcaccuucaaa

SEQ ID NO: 1999495 - RNA, 19 nt, Homo sapiens
  misc_RNA (1)...(19): siRNA sense strand
gaaguucguugcucauccu

SEQ ID NO: 1999496 - RNA, 19 nt, Homo sapiens
  misc_RNA (1)...(19): siRNA sense strand
gaaaaugaccuugaaaugg

SEQ ID NO: 1999497 - RNA, 19 nt, Homo sapiens
  misc_RNA (1)...(19): siRNA sense strand
gauuauuaguugugaaugc

SEQ ID NO: 1999498 - RNA, 19 nt, Homo sapiens
  misc_RNA (1)...(19): siRNA sense strand
cggagcugcugcugaagaa

SEQ ID NO: 1999499 - RNA, 19 nt, Homo sapiens
  misc_RNA (1)...(19): siRNA sense strand
caaauucaucgagaacauu

SEQ ID NO: 1999500 - RNA, 19 nt, Homo sapiens
  misc_RNA (1)...(19): siRNA sense strand
acaaauucaucgagaacau

SEQ ID NO: 1999501 - RNA, 19 nt, Homo sapiens
  misc_RNA (1)...(19): siRNA sense strand
gucuaucgcugugaaauuc

SEQ ID NO: 1999502 - RNA, 19 nt, Homo sapiens
  misc_RNA (1)...(19): siRNA sense strand
gccauuaaauaugaaguca

SEQ ID NO: 1999503 - RNA, 19 nt, Homo sapiens
  misc_RNA (1)...(19): siRNA sense strand
aaacggugaugugaacuuc

SEQ ID NO: 1999504 - RNA, 19 nt, Homo sapiens
  misc_RNA (1)...(19): siRNA sense strand
ggaaguuaucuaugcaaug

SEQ ID NO: 1999505 - RNA, 19 nt, Homo sapiens
  misc_RNA (1)...(19): siRNA sense strand
cauugagacugaauuuaag

SEQ ID NO: 1999506 - RNA, 19 nt, Homo sapiens
  misc_RNA (1)...(19): siRNA sense strand
gaggaguccaagacccuua

SEQ ID NO: 1999507 - RNA, 19 nt, Homo sapiens
  misc_RNA (1)...(19): siRNA sense strand
ugaccgauuugaagguguu

SEQ ID NO: 1999508 - RNA, 19 nt, Homo sapiens
  misc_RNA (1)...(19): siRNA sense strand
cugcaaaucuaaggccaaa

SEQ ID NO: 1999509 - RNA, 19 nt, Homo sapiens
  misc_RNA (1)...(19): siRNA sense strand
augcagauguggaauggaa

SEQ ID NO: 1999510 - RNA, 19 nt, Homo sapiens
  misc_RNA (1)...(19): siRNA sense strand
cauauucggcuuaucugaa

SEQ ID NO: 1999511 - RNA, 19 nt, Homo sapiens
  misc_RNA (1)...(19): siRNA sense strand
cuaauagccaugauaaaca

SEQ ID NO: 1999512 - RNA, 19 nt, Homo sapiens
  misc_RNA (1)...(19): siRNA sense strand
cgacaucacgcccaucauc

SEQ ID NO: 1999513 - RNA, 19 nt, Homo sapiens
  misc_RNA (1)...(19): siRNA sense strand
gagcaagcccaccagauac

SEQ ID NO: 1999514 - RNA, 19 nt, Homo sapiens
  misc_RNA (1)...(19): siRNA sense strand
gaaucaagaugugccucau

SEQ ID NO: 1999515 - RNA, 19 nt, Homo sapiens
  misc_RNA (1)...(19): siRNA sense strand
gaugaaggaagaacucuac

SEQ ID NO: 1999516 - RNA, 19 nt, Homo sapiens
  misc_RNA (1)...(19): siRNA sense strand
ccaagaagcugaagaaaua

SEQ ID NO: 1999517 - RNA, 19 nt, Homo sapiens
  misc_RNA (1)...(19): siRNA sense strand
gagcaggcuugcaauauua

SEQ ID NO: 1999518 - RNA, 19 nt, Homo sapiens
  misc_RNA (1)...(19): siRNA sense strand
gaaagaauaucagacaaug

SEQ ID NO: 1999519 - RNA, 19 nt, Homo sapiens
  misc_RNA (1)...(19): siRNA sense strand
gaagauaguuucuaauggu

SEQ ID NO: 1999520 - RNA, 19 nt, Homo sapiens
  misc_RNA (1)...(19): siRNA sense strand
uaagccaucucuucaguua

SEQ ID NO: 1999521 - RNA, 19 nt, Homo sapiens
  misc_RNA (1)...(19): siRNA sense strand
ggagcaggcuugcaauauu

SEQ ID NO: 1999522 - RNA, 19 nt, Homo sapiens
  misc_RNA (1)...(19): siRNA sense strand
gaacaggugaugugucuaa

SEQ ID NO: 1999523 - RNA, 19 nt, Homo sapiens
  misc_RNA (1)...(19): siRNA sense strand
ggucagagcuucauuacag

SEQ ID NO: 1999524 - RNA, 19 nt, Homo sapiens
  misc_RNA (1)...(19): siRNA sense strand
ggucaagaaucgcucuaua

SEQ ID NO: 1999525 - RNA, 19 nt, Homo sapiens
  misc_RNA (1)...(19): siRNA sense strand
gauagauaccgaauucuua

SEQ ID NO: 1999526 - RNA, 19 nt, Homo sapiens
  misc_RNA (1)...(19): siRNA sense strand
guaaugaaguagaggcuuu

SEQ ID NO: 1999527 - RNA, 19 nt, Homo sapiens
  misc_RNA (1)...(19): siRNA sense strand
gaacagugacaugcauuua

SEQ ID NO: 1999528 - RNA, 19 nt, Homo sapiens
  misc_RNA (1)...(19): siRNA sense strand
acaagugucugauguuaaa

SEQ ID NO: 1999529 - RNA, 19 nt, Homo sapiens
  misc_RNA (1)...(19): siRNA sense strand
cgaaagggcugucuacucu

SEQ ID NO: 1999530 - RNA, 19 nt, Homo sapiens
  misc_RNA (1)...(19): siRNA sense strand
gcagcaacuuucuaacaaa

SEQ ID NO: 1999531 - RNA, 19 nt, Homo sapiens
  misc_RNA (1)...(19): siRNA sense strand
gcagagguauggcaguuau

SEQ ID NO: 1999532 - RNA, 19 nt, Homo sapiens
  misc_RNA (1)...(19): siRNA sense strand
gaagaguggugucccugaa

SEQ ID NO: 1999533 - RNA, 19 nt, Homo sapiens
  misc_RNA (1)...(19): siRNA sense strand
aagaaucgcucuauaagau

SEQ ID NO: 1999534 - RNA, 19 nt, Homo sapiens
  misc_RNA (1)...(19): siRNA sense strand
ccuggaagcucauauguau

SEQ ID NO: 1999535 - RNA, 19 nt, Homo sapiens
  misc_RNA (1)...(19): siRNA sense strand
gaagagauuuugagagauu

SEQ ID NO: 1999536 - RNA, 19 nt, Homo sapiens
  misc_RNA (1)...(19): siRNA sense strand
gcacaugauuacuuuaaag

SEQ ID NO: 1999537 - RNA, 19 nt, Homo sapiens
  misc_RNA (1)...(19): siRNA sense strand
gaagaacagugacaugcau

SEQ ID NO: 1999538 - RNA, 19 nt, Homo sapiens
  misc_RNA (1)...(19): siRNA sense strand
guacgacuaugguuugaga

SEQ ID NO: 1999539 - RNA, 19 nt, Homo sapiens
  misc_RNA (1)...(19): siRNA sense strand
gaaacaacuucgaagaucu

SEQ ID NO: 1999540 - RNA, 19 nt, Homo sapiens
  misc_RNA (1)...(19): siRNA sense strand
caaauaagccaucucuuca

SEQ ID NO: 1999541 - RNA, 19 nt, Homo sapiens
  misc_RNA (1)...(19): siRNA sense strand
ugaaggugcuuuaaaguuc

SEQ ID NO: 1999542 - RNA, 19 nt, Homo sapiens
  misc_RNA (1)...(19): siRNA sense strand
gcagucuucuuguugauug

SEQ ID NO: 1999543 - RNA, 19 nt, Homo sapiens
  misc_RNA (1)...(19): siRNA sense strand
gagaaagaauaucagacaa

SEQ ID NO: 1999544 - RNA, 19 nt, Homo sapiens
  misc_RNA (1)...(19): siRNA sense strand
gaaccagucacuccuacua

SEQ ID NO: 1999545 - RNA, 19 nt, Homo sapiens
  misc_RNA (1)...(19): siRNA sense strand
guuaaagacucaguuauuc

SEQ ID NO: 1999546 - RNA, 19 nt, Homo sapiens
  misc_RNA (1)...(19): siRNA sense strand
gaacaacagagagcaauug

SEQ ID NO: 1999547 - RNA, 19 nt, Homo sapiens
  misc_RNA (1)...(19): siRNA sense strand
aggcaaugcuggauagaua

SEQ ID NO: 1999548 - RNA, 19 nt, Homo sapiens
  misc_RNA (1)...(19): siRNA sense strand
gaaauuaaagaggcaguaa

SEQ ID NO: 1999549 - RNA, 19 nt, Homo sapiens
  misc_RNA (1)...(19): siRNA sense strand
caugaaaucuuccagucaa

SEQ ID NO: 1999550 - RNA, 19 nt, Homo sapiens
  misc_RNA (1)...(19): siRNA sense strand
gauguuaaagacucaguua

SEQ ID NO: 1999551 - RNA, 19 nt, Homo sapiens
  misc_RNA (1)...(19): siRNA sense strand
ggaggucagagcuucauua

SEQ ID NO: 1999552 - RNA, 19 nt, Homo sapiens
  misc_RNA (1)...(19): siRNA sense strand
gauaagcaaguauacauga

SEQ ID NO: 1999553 - RNA, 19 nt, Homo sapiens
  misc_RNA (1)...(19): siRNA sense strand
gacaugcauuuacuggaua

SEQ ID NO: 1999554 - RNA, 19 nt, Homo sapiens
  misc_RNA (1)...(19): siRNA sense strand
uaauggugaugaacaauug

SEQ ID NO: 1999555 - RNA, 19 nt, Homo sapiens
  misc_RNA (1)...(19): siRNA sense strand
acagagacuuucuucauga

SEQ ID NO: 1999556 - RNA, 19 nt, Homo sapiens
  misc_RNA (1)...(19): siRNA sense strand
gagaggaagguugugauua

SEQ ID NO: 1999557 - RNA, 19 nt, Homo sapiens
  misc_RNA (1)...(19): siRNA sense strand
uggaggagauggucaagaa

SEQ ID NO: 1999558 - RNA, 19 nt, Homo sapiens
  misc_RNA (1)...(19): siRNA sense strand
gguggagccuguucgcuuu

SEQ ID NO: 1999559 - RNA, 19 nt, Homo sapiens
  misc_RNA (1)...(19): siRNA sense strand
ggaagaauuucagauacau

SEQ ID NO: 1999560 - RNA, 19 nt, Homo sapiens
  misc_RNA (1)...(19): siRNA sense strand
guacauuucccgcacauga

SEQ ID NO: 1999561 - RNA, 19 nt, Homo sapiens
  misc_RNA (1)...(19): siRNA sense strand
ggugaugugucuaaggauu

SEQ ID NO: 1999562 - RNA, 19 nt, Homo sapiens
  misc_RNA (1)...(19): siRNA sense strand
gauaaugaacucucaagug

SEQ ID NO: 1999563 - RNA, 19 nt, Homo sapiens
  misc_RNA (1)...(19): siRNA sense strand
cugagaagauccuguauuc

SEQ ID NO: 1999564 - RNA, 19 nt, Homo sapiens
  misc_RNA (1)...(19): siRNA sense strand
caaccaagaagcugaagaa

SEQ ID NO: 1999565 - RNA, 19 nt, Homo sapiens
  misc_RNA (1)...(19): siRNA sense strand
gaauagagaggaagguugu

SEQ ID NO: 1999566 - RNA, 19 nt, Homo sapiens
  misc_RNA (1)...(19): siRNA sense strand
ugggagagcuuaugucauc

SEQ ID NO: 1999567 - RNA, 19 nt, Homo sapiens
  misc_RNA (1)...(19): siRNA sense strand
ugucaaaguuccagugaga

SEQ ID NO: 1999568 - RNA, 19 nt, Homo sapiens
  misc_RNA (1)...(19): siRNA sense strand
gaguucagcuuccaaagag

SEQ ID NO: 1999569 - RNA, 19 nt, Homo sapiens
  misc_RNA (1)...(19): siRNA sense strand
gaggaaaccccaaaagaua

SEQ ID NO: 1999570 - RNA, 19 nt, Homo sapiens
  misc_RNA (1)...(19): siRNA sense strand
ugacaugcauuuacuggau

SEQ ID NO: 1999571 - RNA, 19 nt, Homo sapiens
  misc_RNA (1)...(19): siRNA sense strand
acagagaguucccaugguu

SEQ ID NO: 1999572 - RNA, 19 nt, Homo sapiens
  misc_RNA (1)...(19): siRNA sense strand
gaccauucguuuggagaua

SEQ ID NO: 1999573 - RNA, 19 nt, Homo sapiens
  misc_RNA (1)...(19): siRNA sense strand
uuugagagauuccgagaaa

SEQ ID NO: 1999574 - RNA, 19 nt, Homo sapiens
  misc_RNA (1)...(19): siRNA sense strand
uaaagauacuggaggagau

SEQ ID NO: 1999575 - RNA, 19 nt, Homo sapiens
  misc_RNA (1)...(19): siRNA sense strand
ggaagguugugauuacagu

SEQ ID NO: 1999576 - RNA, 19 nt, Homo sapiens
  misc_RNA (1)...(19): siRNA sense strand
caauaccccuuuccuguua

SEQ ID NO: 1999577 - RNA, 19 nt, Homo sapiens
  misc_RNA (1)...(19): siRNA sense strand
ccagccagccaaacaaaua

SEQ ID NO: 1999578 - RNA, 19 nt, Homo sapiens
  misc_RNA (1)...(19): siRNA sense strand
gcagaagaggagagugaua

SEQ ID NO: 1999579 - RNA, 19 nt, Homo sapiens
  misc_RNA (1)...(19): siRNA sense strand
ugugaggguuugaacauaa

SEQ ID NO: 1999580 - RNA, 19 nt, Homo sapiens
  misc_RNA (1)...(19): siRNA sense strand
ccacaucauugacuuacug

SEQ ID NO: 1999581 - RNA, 19 nt, Homo sapiens
  misc_RNA (1)...(19): siRNA sense strand
aaugaacucucaaguggaa

SEQ ID NO: 1999582 - RNA, 19 nt, Homo sapiens
  misc_RNA (1)...(19): siRNA sense strand
caaacguucuuccagacaa

SEQ ID NO: 1999583 - RNA, 19 nt, Homo sapiens
  misc_RNA (1)...(19): siRNA sense strand
ggauagauaccgaauucuu

SEQ ID NO: 1999584 - RNA, 19 nt, Homo sapiens
  misc_RNA (1)...(19): siRNA sense strand
gggcagagguauggcaguu

SEQ ID NO: 1999585 - RNA, 19 nt, Homo sapiens
  misc_RNA (1)...(19): siRNA sense strand
gaagguuaguggaucaucu

SEQ ID NO: 1999586 - RNA, 19 nt, Homo sapiens
  misc_RNA (1)...(19): siRNA sense strand
cacagagacuuucuucaug

SEQ ID NO: 1999587 - RNA, 19 nt, Homo sapiens
  misc_RNA (1)...(19): siRNA sense strand
gaaacgugaagaacaguga

SEQ ID NO: 1999588 - RNA, 19 nt, Homo sapiens
  misc_RNA (1)...(19): siRNA sense strand
caggaagacccaauggaua

SEQ ID NO: 1999589 - RNA, 19 nt, Homo sapiens
  misc_RNA (1)...(19): siRNA sense strand
gaaggugcuuuaaaguucu

SEQ ID NO: 1999590 - RNA, 19 nt, Homo sapiens
  misc_RNA (1)...(19): siRNA sense strand
gaaccuggaagcucauaug

SEQ ID NO: 1999591 - RNA, 19 nt, Homo sapiens
  misc_RNA (1)...(19): siRNA sense strand
gaauucuuaucacaaagga

SEQ ID NO: 1999592 - RNA, 19 nt, Homo sapiens
  misc_RNA (1)...(19): siRNA sense strand
caggugaugugucuaagga

SEQ ID NO: 1999593 - RNA, 19 nt, Homo sapiens
  misc_RNA (1)...(19): siRNA sense strand
uauaugagguggugagucu

SEQ ID NO: 1999594 - RNA, 19 nt, Homo sapiens
  misc_RNA (1)...(19): siRNA sense strand
acaaauaagccaucucuuc

SEQ ID NO: 1999595 - RNA, 19 nt, Homo sapiens
  misc_RNA (1)...(19): siRNA sense strand
gaucuucauugcaaauucu

SEQ ID NO: 1999596 - RNA, 19 nt, Homo sapiens
  misc_RNA (1)...(19): siRNA sense strand
gucaagaaucgcucuauaa

SEQ ID NO: 1999597 - RNA, 19 nt, Homo sapiens
  misc_RNA (1)...(19): siRNA sense strand
cagaagaggagagugauaa

SEQ ID NO: 1999598 - RNA, 19 nt, Homo sapiens
  misc_RNA (1)...(19): siRNA sense strand
caguauuucuggcacuuaa

SEQ ID NO: 1999599 - RNA, 19 nt, Homo sapiens
  misc_RNA (1)...(19): siRNA sense strand
guaugcagaugauaauucu

SEQ ID NO: 1999600 - RNA, 19 nt, Homo sapiens
  misc_RNA (1)...(19): siRNA sense strand
agaaacaacuucgaagauc

SEQ ID NO: 1999601 - RNA, 19 nt, Homo sapiens
  misc_RNA (1)...(19): siRNA sense strand
gauuucagaccauucguuu

SEQ ID NO: 1999602 - RNA, 19 nt, Homo sapiens
  misc_RNA (1)...(19): siRNA sense strand
gaaucgcucuauaagaucu

SEQ ID NO: 1999603 - RNA, 19 nt, Homo sapiens
  misc_RNA (1)...(19): siRNA sense strand
caagaaucgcucuauaaga

SEQ ID NO: 1999604 - RNA, 19 nt, Homo sapiens
  misc_RNA (1)...(19): siRNA sense strand
gaagaggagagugauaaug

SEQ ID NO: 1999605 - RNA, 19 nt, Homo sapiens
  misc_RNA (1)...(19): siRNA sense strand
ccaggaugaugaagcagaa

SEQ ID NO: 1999606 - RNA, 19 nt, Homo sapiens
  misc_RNA (1)...(19): siRNA sense strand
gaaacagucugagggaaaa

SEQ ID NO: 1999607 - RNA, 19 nt, Homo sapiens
  misc_RNA (1)...(19): siRNA sense strand
gagacuuucuucaugagau

SEQ ID NO: 1999608 - RNA, 19 nt, Homo sapiens
  misc_RNA (1)...(19): siRNA sense strand
ugaaagauguuuuggaaug

SEQ ID NO: 1999609 - RNA, 19 nt, Homo sapiens
  misc_RNA (1)...(19): siRNA sense strand
agaggaagguugugauuac

SEQ ID NO: 1999610 - RNA, 19 nt, Homo sapiens
  misc_RNA (1)...(19): siRNA sense strand
ucacagagacuuucuucau

SEQ ID NO: 1999611 - RNA, 19 nt, Homo sapiens
  misc_RNA (1)...(19): siRNA sense strand
cuggauagauaccgaauuc

SEQ ID NO: 1999612 - RNA, 19 nt, Homo sapiens
  misc_RNA (1)...(19): siRNA sense strand
aagaggagagugauaauga

SEQ ID NO: 1999613 - RNA, 19 nt, Homo sapiens
  misc_RNA (1)...(19): siRNA sense strand
gccuaaggauagagauaaa

SEQ ID NO: 1999614 - RNA, 19 nt, Homo sapiens
  misc_RNA (1)...(19): siRNA sense strand
caaugaacagugaagaauu

SEQ ID NO: 1999615 - RNA, 19 nt, Homo sapiens
  misc_RNA (1)...(19): siRNA sense strand
gaugggagagcuuauguca

SEQ ID NO: 1999616 - RNA, 19 nt, Homo sapiens
  misc_RNA (1)...(19): siRNA sense strand
gaaggaagcuguaugugaa

SEQ ID NO: 1999617 - RNA, 19 nt, Homo sapiens
  misc_RNA (1)...(19): siRNA sense strand
gaaacaaggugcagagcua

SEQ ID NO: 1999618 - RNA, 19 nt, Homo sapiens
  misc_RNA (1)...(19): siRNA sense strand
caagaagacuuuaccauca

SEQ ID NO: 1999619 - RNA, 19 nt, Homo sapiens
  misc_RNA (1)...(19): siRNA sense strand
ggaaggaagcuguauguga

SEQ ID NO: 1999620 - RNA, 19 nt, Homo sapiens
  misc_RNA (1)...(19): siRNA sense strand
gaacaagaacauaugagaa

SEQ ID NO: 1999621 - RNA, 19 nt, Homo sapiens
  misc_RNA (1)...(19): siRNA sense strand
gaacuccaauguaucuugu

SEQ ID NO: 1999622 - RNA, 19 nt, Homo sapiens
  misc_RNA (1)...(19): siRNA sense strand
gcaugaacguuucgaaauc

SEQ ID NO: 1999623 - RNA, 19 nt, Homo sapiens
  misc_RNA (1)...(19): siRNA sense strand
gaagaacaagaacauauga

SEQ ID NO: 1999624 - RNA, 19 nt, Homo sapiens
  misc_RNA (1)...(19): siRNA sense strand
gugaacaccuggauauaug

SEQ ID NO: 1999625 - RNA, 19 nt, Homo sapiens
  misc_RNA (1)...(19): siRNA sense strand
agaaagagaugcgaaacaa

SEQ ID NO: 1999626 - RNA, 19 nt, Homo sapiens
  misc_RNA (1)...(19): siRNA sense strand
gauuguugcugacaucuug

SEQ ID NO: 1999627 - RNA, 19 nt, Homo sapiens
  misc_RNA (1)...(19): siRNA sense strand
gaagguacaagguauaauc

SEQ ID NO: 1999628 - RNA, 19 nt, Homo sapiens
  misc_RNA (1)...(19): siRNA sense strand
gaucuuaagugguuugacu

SEQ ID NO: 1999629 - RNA, 19 nt, Homo sapiens
  misc_RNA (1)...(19): siRNA sense strand
gugcuaacaccacgaauaa

SEQ ID NO: 1999630 - RNA, 19 nt, Homo sapiens
  misc_RNA (1)...(19): siRNA sense strand
aaagcgcagugccaaauuu

SEQ ID NO: 1999631 - RNA, 19 nt, Homo sapiens
  misc_RNA (1)...(19): siRNA sense strand
ggguuacuauuaaagcaua

SEQ ID NO: 1999632 - RNA, 19 nt, Homo sapiens
  misc_RNA (1)...(19): siRNA sense strand
gcauggugcucuucuucuu

SEQ ID NO: 1999633 - RNA, 19 nt, Homo sapiens
  misc_RNA (1)...(19): siRNA sense strand
cgcaggaacuccaauguau

SEQ ID NO: 1999634 - RNA, 19 nt, Homo sapiens
  misc_RNA (1)...(19): siRNA sense strand
caacguggccuugcaguau

SEQ ID NO: 1999635 - RNA, 19 nt, Homo sapiens
  misc_RNA (1)...(19): siRNA sense strand
gccuguggguuacuauuaa

SEQ ID NO: 1999636 - RNA, 19 nt, Homo sapiens
  misc_RNA (1)...(19): siRNA sense strand
cagaagaacaagaacauau

SEQ ID NO: 1999637 - RNA, 19 nt, Homo sapiens
  misc_RNA (1)...(19): siRNA sense strand
gacggaauuucucugcaaa

SEQ ID NO: 1999638 - RNA, 19 nt, Homo sapiens
  misc_RNA (1)...(19): siRNA sense strand
gcauggaggaaucuaugua

SEQ ID NO: 1999639 - RNA, 19 nt, Homo sapiens
  misc_RNA (1)...(19): siRNA sense strand
ugacggaauuucucugcaa

SEQ ID NO: 1999640 - RNA, 19 nt, Homo sapiens
  misc_RNA (1)...(19): siRNA sense strand
gcugacaucuuggccauca

SEQ ID NO: 1999641 - RNA, 19 nt, Homo sapiens
  misc_RNA (1)...(19): siRNA sense strand
ggaggaaucuauguaaagc

SEQ ID NO: 1999642 - RNA, 19 nt, Homo sapiens
  misc_RNA (1)...(19): siRNA sense strand
cgaaaucaaagauaagaug

SEQ ID NO: 1999643 - RNA, 19 nt, Homo sapiens
  misc_RNA (1)...(19): siRNA sense strand
gaaagaaggguuaaaaugg

SEQ ID NO: 1999644 - RNA, 19 nt, Homo sapiens
  misc_RNA (1)...(19): siRNA sense strand
aagaagacuuuaccaucaa

SEQ ID NO: 1999645 - RNA, 19 nt, Homo sapiens
  misc_RNA (1)...(19): siRNA sense strand
uccaauguaucuugugauu

SEQ ID NO: 1999646 - RNA, 19 nt, Homo sapiens
  misc_RNA (1)...(19): siRNA sense strand
ggaacuccaauguaucuug

SEQ ID NO: 1999647 - RNA, 19 nt, Homo sapiens
  misc_RNA (1)...(19): siRNA sense strand
caugaacguuucgaaauca

SEQ ID NO: 1999648 - RNA, 19 nt, Homo sapiens
  misc_RNA (1)...(19): siRNA sense strand
gcuaacaccacgaauaaag

SEQ ID NO: 1999649 - RNA, 19 nt, Homo sapiens
  misc_RNA (1)...(19): siRNA sense strand
guaaagcgcagugccaaau

SEQ ID NO: 1999650 - RNA, 19 nt, Homo sapiens
  misc_RNA (1)...(19): siRNA sense strand
gagaaagagaugcgaaaca

SEQ ID NO: 1999651 - RNA, 19 nt, Homo sapiens
  misc_RNA (1)...(19): siRNA sense strand
ccagaagguacaagguaua

SEQ ID NO: 1999652 - RNA, 19 nt, Homo sapiens
  misc_RNA (1)...(19): siRNA sense strand
cggaauuucucugcaaaga

SEQ ID NO: 1999653 - RNA, 19 nt, Homo sapiens
  misc_RNA (1)...(19): siRNA sense strand
gugccaaauuuaacgagaa

SEQ ID NO: 1999654 - RNA, 19 nt, Homo sapiens
  misc_RNA (1)...(19): siRNA sense strand
gaagagagucaccgaccau

SEQ ID NO: 1999655 - RNA, 19 nt, Homo sapiens
  misc_RNA (1)...(19): siRNA sense strand
ccaaauuuaacgagaaaga

SEQ ID NO: 1999656 - RNA, 19 nt, Homo sapiens
  misc_RNA (1)...(19): siRNA sense strand
cauggaggaaucuauguaa

SEQ ID NO: 1999657 - RNA, 19 nt, Homo sapiens
  misc_RNA (1)...(19): siRNA sense strand
gacuuuaccaucaauguug

SEQ ID NO: 1999658 - RNA, 19 nt, Homo sapiens
  misc_RNA (1)...(19): siRNA sense strand
acaagaacauaugagaaga

SEQ ID NO: 1999659 - RNA, 19 nt, Homo sapiens
  misc_RNA (1)...(19): siRNA sense strand
caccgaccaugacggaauu

SEQ ID NO: 1999660 - RNA, 19 nt, Homo sapiens
  misc_RNA (1)...(19): siRNA sense strand
gagaagauggcugcaugaa

SEQ ID NO: 1999661 - RNA, 19 nt, Homo sapiens
  misc_RNA (1)...(19): siRNA sense strand
gucaccagauccagaaaga

SEQ ID NO: 1999662 - RNA, 19 nt, Homo sapiens
  misc_RNA (1)...(19): siRNA sense strand
cagaagguacaagguauaa

SEQ ID NO: 1999663 - RNA, 19 nt, Homo sapiens
  misc_RNA (1)...(19): siRNA sense strand
gaacaccuggauauaugga

SEQ ID NO: 1999664 - RNA, 19 nt, Homo sapiens
  misc_RNA (1)...(19): siRNA sense strand
gaacguuucgaaaucaaag

SEQ ID NO: 1999665 - RNA, 19 nt, Homo sapiens
  misc_RNA (1)...(19): siRNA sense strand
ggugguuuaugaagggaaa

SEQ ID NO: 1999666 - RNA, 19 nt, Homo sapiens
  misc_RNA (1)...(19): siRNA sense strand
ggguccagauauugcuaua

SEQ ID NO: 1999667 - RNA, 19 nt, Homo sapiens
  misc_RNA (1)...(19): siRNA sense strand
ugccaaauuuaacgagaaa

SEQ ID NO: 1999668 - RNA, 19 nt, Homo sapiens
  misc_RNA (1)...(19): siRNA sense strand
aagaacauaugagaagaug

SEQ ID NO: 1999669 - RNA, 19 nt, Homo sapiens
  misc_RNA (1)...(19): siRNA sense strand
agaaugcgcuaggacaugu

SEQ ID NO: 1999670 - RNA, 19 nt, Homo sapiens
  misc_RNA (1)...(19): siRNA sense strand
ccagaagaacaagaacaua

SEQ ID NO: 1999671 - RNA, 19 nt, Homo sapiens
  misc_RNA (1)...(19): siRNA sense strand
ggacgcaggaacuccaaug

SEQ ID NO: 1999672 - RNA, 19 nt, Homo sapiens
  misc_RNA (1)...(19): siRNA sense strand
gaaagagaugcgaaacaag

SEQ ID NO: 1999673 - RNA, 19 nt, Homo sapiens
  misc_RNA (1)...(19): siRNA sense strand
uaaagcgcagugccaaauu

SEQ ID NO: 1999674 - RNA, 19 nt, Homo sapiens
  misc_RNA (1)...(19): siRNA sense strand
cauauucacauugaucgua

SEQ ID NO: 1999675 - RNA, 19 nt, Homo sapiens
  misc_RNA (1)...(19): siRNA sense strand
agaacaagaacauaugaga

SEQ ID NO: 1999676 - RNA, 19 nt, Homo sapiens
  misc_RNA (1)...(19): siRNA sense strand
agaagaacaagaacauaug

SEQ ID NO: 1999677 - RNA, 19 nt, Homo sapiens
  misc_RNA (1)...(19): siRNA sense strand
uaugugaacaccuggauau

SEQ ID NO: 1999678 - RNA, 19 nt, Homo sapiens
  misc_RNA (1)...(19): siRNA sense strand
aagcgcagugccaaauuua

SEQ ID NO: 1999679 - RNA, 19 nt, Homo sapiens
  misc_RNA (1)...(19): siRNA sense strand
ccuguggguuacuauuaaa

SEQ ID NO: 1999680 - RNA, 19 nt, Homo sapiens
  misc_RNA (1)...(19): siRNA sense strand
caagaacauaugagaagau

SEQ ID NO: 1999681 - RNA, 19 nt, Homo sapiens
  misc_RNA (1)...(19): siRNA sense strand
gcagaaugcgcuaggacau

SEQ ID NO: 1999682 - RNA, 19 nt, Homo sapiens
  misc_RNA (1)...(19): siRNA sense strand
gcaggaacuccaauguauc

SEQ ID NO: 1999683 - RNA, 19 nt, Homo sapiens
  misc_RNA (1)...(19): siRNA sense strand
gguauaauccagagcaaac

SEQ ID NO: 1999684 - RNA, 19 nt, Homo sapiens
  misc_RNA (1)...(19): siRNA sense strand
uccagaagguacaagguau

SEQ ID NO: 1999685 - RNA, 19 nt, Homo sapiens
  misc_RNA (1)...(19): siRNA sense strand
gauggcugcaugaacguuu

SEQ ID NO: 1999686 - RNA, 19 nt, Homo sapiens
  misc_RNA (1)...(19): siRNA sense strand
cagcauggaggaaucuaug

SEQ ID NO: 1999687 - RNA, 19 nt, Homo sapiens
  misc_RNA (1)...(19): siRNA sense strand
agaagacuuuaccaucaau

SEQ ID NO: 1999688 - RNA, 19 nt, Homo sapiens
  misc_RNA (1)...(19): siRNA sense strand
ccagauccagaaagaagaa

SEQ ID NO: 1999689 - RNA, 19 nt, Homo sapiens
  misc_RNA (1)...(19): siRNA sense strand
aauaaaggcaacucacguu

SEQ ID NO: 1999690 - RNA, 19 nt, Homo sapiens
  misc_RNA (1)...(19): siRNA sense strand
ccaacguggccuugcagua

SEQ ID NO: 1999691 - RNA, 19 nt, Homo sapiens
  misc_RNA (1)...(19): siRNA sense strand
acuccaauguaucuuguga

SEQ ID NO: 1999692 - RNA, 19 nt, Homo sapiens
  misc_RNA (1)...(19): siRNA sense strand
acguggccuugcaguauua

SEQ ID NO: 1999693 - RNA, 19 nt, Homo sapiens
  misc_RNA (1)...(19): siRNA sense strand
guaugugaacaccuggaua

SEQ ID NO: 1999694 - RNA, 19 nt, Homo sapiens
  misc_RNA (1)...(19): siRNA sense strand
aaucaucaaagcacaguug

SEQ ID NO: 1999695 - RNA, 19 nt, Homo sapiens
  misc_RNA (1)...(19): siRNA sense strand
auguugaucuuaagugguu

SEQ ID NO: 1999696 - RNA, 19 nt, Homo sapiens
  misc_RNA (1)...(19): siRNA sense strand
gaagacuuuaccaucaaug

SEQ ID NO: 1999697 - RNA, 19 nt, Homo sapiens
  misc_RNA (1)...(19): siRNA sense strand
caccagauccagaaagaag

SEQ ID NO: 1999698 - RNA, 19 nt, Homo sapiens
  misc_RNA (1)...(19): siRNA sense strand
ugugcuaacaccacgaaua

SEQ ID NO: 1999699 - RNA, 19 nt, Homo sapiens
  misc_RNA (1)...(19): siRNA sense strand
ugaaagaaggguuaaaaug

SEQ ID NO: 1999700 - RNA, 19 nt, Homo sapiens
  misc_RNA (1)...(19): siRNA sense strand
gauauauggaacccuacuu

SEQ ID NO: 1999701 - RNA, 19 nt, Homo sapiens
  misc_RNA (1)...(19): siRNA sense strand
ugagucaccagauccagaa

SEQ ID NO: 1999702 - RNA, 19 nt, Homo sapiens
  misc_RNA (1)...(19): siRNA sense strand
uuguauggguguuacuuug

SEQ ID NO: 1999703 - RNA, 19 nt, Homo sapiens
  misc_RNA (1)...(19): siRNA sense strand
ggagggcagcgaagagagu

SEQ ID NO: 1999704 - RNA, 19 nt, Homo sapiens
  misc_RNA (1)...(19): siRNA sense strand
auguuacggugguuuauga

SEQ ID NO: 1999705 - RNA, 19 nt, Homo sapiens
  misc_RNA (1)...(19): siRNA sense strand
aacguggccuugcaguauu

SEQ ID NO: 1999706 - RNA, 19 nt, Homo sapiens
  misc_RNA (1)...(19): siRNA sense strand
caggaacuccaauguaucu

SEQ ID NO: 1999707 - RNA, 19 nt, Homo sapiens
  misc_RNA (1)...(19): siRNA sense strand
acgcaggaacuccaaugua

SEQ ID NO: 1999708 - RNA, 19 nt, Homo sapiens
  misc_RNA (1)...(19): siRNA sense strand
ugccuguggguuacuauua

SEQ ID NO: 1999709 - RNA, 19 nt, Homo sapiens
  misc_RNA (1)...(19): siRNA sense strand
ugugaacaccuggauauau

SEQ ID NO: 1999710 - RNA, 19 nt, Homo sapiens
  misc_RNA (1)...(19): siRNA sense strand
gauguuacggugguuuaug

SEQ ID NO: 1999711 - RNA, 19 nt, Homo sapiens
  misc_RNA (1)...(19): siRNA sense strand
ccaauguaucuugugauuu

SEQ ID NO: 1999712 - RNA, 19 nt, Homo sapiens
  misc_RNA (1)...(19): siRNA sense strand
auggaggaaucuauguaaa

SEQ ID NO: 1999713 - RNA, 19 nt, Homo sapiens
  misc_RNA (1)...(19): siRNA sense strand
aacaagaacauaugagaag

SEQ ID NO: 1999714 - RNA, 19 nt, Homo sapiens
  misc_RNA (1)...(19): siRNA sense strand
gcagugccaaauuuaacga

SEQ ID NO: 1999715 - RNA, 19 nt, Homo sapiens
  misc_RNA (1)...(19): siRNA sense strand
gcgcagugccaaauuuaac

SEQ ID NO: 1999716 - RNA, 19 nt, Homo sapiens
  misc_RNA (1)...(19): siRNA sense strand
gaacugaggaagauuauaa

SEQ ID NO: 1999717 - RNA, 19 nt, Homo sapiens
  misc_RNA (1)...(19): siRNA sense strand
gaauggaacugaggaagau

SEQ ID NO: 1999718 - RNA, 19 nt, Homo sapiens
  misc_RNA (1)...(19): siRNA sense strand
uaaccaagcaccagaccua

SEQ ID NO: 1999719 - RNA, 19 nt, Homo sapiens
  misc_RNA (1)...(19): siRNA sense strand
gagacuguccugaaagaaa

SEQ ID NO: 1999720 - RNA, 19 nt, Homo sapiens
  misc_RNA (1)...(19): siRNA sense strand
ggaauggaacugaggaaga

SEQ ID NO: 1999721 - RNA, 19 nt, Homo sapiens
  misc_RNA (1)...(19): siRNA sense strand
gaggaagauuauaacuuug

SEQ ID NO: 1999722 - RNA, 19 nt, Homo sapiens
  misc_RNA (1)...(19): siRNA sense strand
gcccuggacucuaccaaug

SEQ ID NO: 1999723 - RNA, 19 nt, Homo sapiens
  misc_RNA (1)...(19): siRNA sense strand
gaccuuuccuugcccuuug

SEQ ID NO: 1999724 - RNA, 19 nt, Homo sapiens
  misc_RNA (1)...(19): siRNA sense strand
ggaagauuauaacuuuguc

SEQ ID NO: 1999725 - RNA, 19 nt, Homo sapiens
  misc_RNA (1)...(19): siRNA sense strand
agacuguccugaaagaaau

SEQ ID NO: 1999726 - RNA, 19 nt, Homo sapiens
  misc_RNA (1)...(19): siRNA sense strand
gggagaagagggccuguug

SEQ ID NO: 1999727 - RNA, 19 nt, Homo sapiens
  misc_RNA (1)...(19): siRNA sense strand
gcccuuugguuccagauau

SEQ ID NO: 1999728 - RNA, 19 nt, Homo sapiens
  misc_RNA (1)...(19): siRNA sense strand
gagaagagggccuguugca

SEQ ID NO: 1999729 - RNA, 19 nt, Homo sapiens
  misc_RNA (1)...(19): siRNA sense strand
aagagggccuguugcauca

SEQ ID NO: 1999730 - RNA, 19 nt, Homo sapiens
  misc_RNA (1)...(19): siRNA sense strand
ccucagcccuggacucuac

SEQ ID NO: 1999731 - RNA, 19 nt, Homo sapiens
  misc_RNA (1)...(19): siRNA sense strand
gaagguguccaagcagaga

SEQ ID NO: 1999732 - RNA, 19 nt, Homo sapiens
  misc_RNA (1)...(19): siRNA sense strand
ggaccaaugccaucacucu

SEQ ID NO: 1999733 - RNA, 19 nt, Homo sapiens
  misc_RNA (1)...(19): siRNA sense strand
ugaggaggcccgaauguuc

SEQ ID NO: 1999734 - RNA, 19 nt, Homo sapiens
  misc_RNA (1)...(19): siRNA sense strand
gggaagaccaaucuacucu

SEQ ID NO: 1999735 - RNA, 19 nt, Homo sapiens
  misc_RNA (1)...(19): siRNA sense strand
gaacagcauccggaccaau

SEQ ID NO: 1999736 - RNA, 19 nt, Homo sapiens
  misc_RNA (1)...(19): siRNA sense strand
ggaacugaggaagauuaua

SEQ ID NO: 1999737 - RNA, 19 nt, Homo sapiens
  misc_RNA (1)...(19): siRNA sense strand
ggaccuuuccuugcccuuu

SEQ ID NO: 1999738 - RNA, 19 nt, Homo sapiens
  misc_RNA (1)...(19): siRNA sense strand
ccuggacucuaccaauguu

SEQ ID NO: 1999739 - RNA, 19 nt, Homo sapiens
  misc_RNA (1)...(19): siRNA sense strand
uugagacuguccugaaaga

SEQ ID NO: 1999740 - RNA, 19 nt, Homo sapiens
  misc_RNA (1)...(19): siRNA sense strand
cuuugagacuguccugaaa

SEQ ID NO: 1999741 - RNA, 19 nt, Homo sapiens
  misc_RNA (1)...(19): siRNA sense strand
ccacugaggaggcccgaau

SEQ ID NO: 1999742 - RNA, 19 nt, Homo sapiens
  misc_RNA (1)...(19): siRNA sense strand
uugcgaagguguccaagca

SEQ ID NO: 1999743 - RNA, 19 nt, Homo sapiens
  misc_RNA (1)...(19): siRNA sense strand
ggcugaaggagcucuauga

SEQ ID NO: 1999744 - RNA, 19 nt, Homo sapiens
  misc_RNA (1)...(19): siRNA sense strand
gauucacgcgcaaugaguu

SEQ ID NO: 1999745 - RNA, 19 nt, Homo sapiens
  misc_RNA (1)...(19): siRNA sense strand
auguugagcuagccuuuga

SEQ ID NO: 1999746 - RNA, 19 nt, Homo sapiens
  misc_RNA (1)...(19): siRNA sense strand
caauguugagcuagccuuu

SEQ ID NO: 1999747 - RNA, 19 nt, Homo sapiens
  misc_RNA (1)...(19): siRNA sense strand
gaaggagcucuaugaccau

SEQ ID NO: 1999748 - RNA, 19 nt, Homo sapiens
  misc_RNA (1)...(19): siRNA sense strand
gcucuaugaccaugcugaa

SEQ ID NO: 1999749 - RNA, 19 nt, Homo sapiens
  misc_RNA (1)...(19): siRNA sense strand
cacccgcacugugauguug

SEQ ID NO: 1999750 - RNA, 19 nt, Homo sapiens
  misc_RNA (1)...(19): siRNA sense strand
ggagcucuaugaccaugcu

SEQ ID NO: 1999751 - RNA, 19 nt, Homo sapiens
  misc_RNA (1)...(19): siRNA sense strand
ccaagcaccagaccuaugc

SEQ ID NO: 1999752 - RNA, 19 nt, Homo sapiens
  misc_RNA (1)...(19): siRNA sense strand
ugagcuagccuuugagacu

SEQ ID NO: 1999753 - RNA, 19 nt, Homo sapiens
  misc_RNA (1)...(19): siRNA sense strand
acaauggacugcucuuccu

SEQ ID NO: 1999754 - RNA, 19 nt, Homo sapiens
  misc_RNA (1)...(19): siRNA sense strand
gcacaucucccacuucauu

SEQ ID NO: 1999755 - RNA, 19 nt, Homo sapiens
  misc_RNA (1)...(19): siRNA sense strand
gugauucgcugguguauga

SEQ ID NO: 1999756 - RNA, 19 nt, Homo sapiens
  misc_RNA (1)...(19): siRNA sense strand
caauaaggcuguguuggaa

SEQ ID NO: 1999757 - RNA, 19 nt, Homo sapiens
  misc_RNA (1)...(19): siRNA sense strand
guacaagucugccuuuaac

SEQ ID NO: 1999758 - RNA, 19 nt, Homo sapiens
  misc_RNA (1)...(19): siRNA sense strand
guacugcuaugauggauuc

SEQ ID NO: 1999759 - RNA, 19 nt, Homo sapiens
  misc_RNA (1)...(19): siRNA sense strand
gcuacgggcugaguuguuu

SEQ ID NO: 1999760 - RNA, 19 nt, Homo sapiens
  misc_RNA (1)...(19): siRNA sense strand
caguguaccugugcuauaa

SEQ ID NO: 1999761 - RNA, 19 nt, Homo sapiens
  misc_RNA (1)...(19): siRNA sense strand
gcgcacaucucccacuuca

SEQ ID NO: 1999762 - RNA, 19 nt, Homo sapiens
  misc_RNA (1)...(19): siRNA sense strand
gccacaaacuuuacucuca

SEQ ID NO: 1999763 - RNA, 19 nt, Homo sapiens
  misc_RNA (1)...(19): siRNA sense strand
guaccugcaucccuuaguu

SEQ ID NO: 1999764 - RNA, 19 nt, Homo sapiens
  misc_RNA (1)...(19): siRNA sense strand
gcagaugucucccuaugac

SEQ ID NO: 1999765 - RNA, 19 nt, Homo sapiens
  misc_RNA (1)...(19): siRNA sense strand
acacacagauguucucaca

SEQ ID NO: 1999766 - RNA, 19 nt, Homo sapiens
  misc_RNA (1)...(19): siRNA sense strand
gaacucaacccgucaucug

SEQ ID NO: 1999767 - RNA, 19 nt, Homo sapiens
  misc_RNA (1)...(19): siRNA sense strand
gaaguacaagucugccuuu

SEQ ID NO: 1999768 - RNA, 19 nt, Homo sapiens
  misc_RNA (1)...(19): siRNA sense strand
acacagauguucucacagu

SEQ ID NO: 1999769 - RNA, 19 nt, Homo sapiens
  misc_RNA (1)...(19): siRNA sense strand
gcaguguaccugugcuaua

SEQ ID NO: 1999770 - RNA, 19 nt, Homo sapiens
  misc_RNA (1)...(19): siRNA sense strand
gggccaagcuccggaaugu

SEQ ID NO: 1999771 - RNA, 19 nt, Homo sapiens
  misc_RNA (1)...(19): siRNA sense strand
gagauauuauuccugacaa

SEQ ID NO: 1999772 - RNA, 19 nt, Homo sapiens
  misc_RNA (1)...(19): siRNA sense strand
ggaacucagugcuggacuu

SEQ ID NO: 1999773 - RNA, 19 nt, Homo sapiens
  misc_RNA (1)...(19): siRNA sense strand
ccacuucauucacaacguu

SEQ ID NO: 1999774 - RNA, 19 nt, Homo sapiens
  misc_RNA (1)...(19): siRNA sense strand
guguagaccuugauaccaa

SEQ ID NO: 1999775 - RNA, 19 nt, Homo sapiens
  misc_RNA (1)...(19): siRNA sense strand
gugcagaugucucccuaug

SEQ ID NO: 1999776 - RNA, 19 nt, Homo sapiens
  misc_RNA (1)...(19): siRNA sense strand
uggagucgcugguagagaa

SEQ ID NO: 1999777 - RNA, 19 nt, Homo sapiens
  misc_RNA (1)...(19): siRNA sense strand
ggacauaguggccuucgau

SEQ ID NO: 1999778 - RNA, 19 nt, Homo sapiens
  misc_RNA (1)...(19): siRNA sense strand
cugcagggcuuccucaaau

SEQ ID NO: 1999779 - RNA, 19 nt, Homo sapiens
  misc_RNA (1)...(19): siRNA sense strand
ccucagagcgccucaguga

SEQ ID NO: 1999780 - RNA, 19 nt, Homo sapiens
  misc_RNA (1)...(19): siRNA sense strand
guaccaaacaggagaugaa

SEQ ID NO: 1999781 - RNA, 19 nt, Homo sapiens
  misc_RNA (1)...(19): siRNA sense strand
gcugguguaugaugaggaa

SEQ ID NO: 1999782 - RNA, 19 nt, Homo sapiens
  misc_RNA (1)...(19): siRNA sense strand
ggaacgcuccagccacaaa

SEQ ID NO: 1999783 - RNA, 19 nt, Homo sapiens
  misc_RNA (1)...(19): siRNA sense strand
gugcuggccuccugugaug

SEQ ID NO: 1999784 - RNA, 19 nt, Homo sapiens
  misc_RNA (1)...(19): siRNA sense strand
gccaagcuccggaauguug

SEQ ID NO: 1999785 - RNA, 19 nt, Homo sapiens
  misc_RNA (1)...(19): siRNA sense strand
aaacaggagaugaaaguug

SEQ ID NO: 1999786 - RNA, 19 nt, Homo sapiens
  misc_RNA (1)...(19): siRNA sense strand
ccaaacaggagaugaaagu

SEQ ID NO: 1999787 - RNA, 19 nt, Homo sapiens
  misc_RNA (1)...(19): siRNA sense strand
guacgaggcaguucuacga

SEQ ID NO: 1999788 - RNA, 19 nt, Homo sapiens
  misc_RNA (1)...(19): siRNA sense strand
caacagcugcucacuccuu

SEQ ID NO: 1999789 - RNA, 19 nt, Homo sapiens
  misc_RNA (1)...(19): siRNA sense strand
gcuccagccacaaacuuua

SEQ ID NO: 1999790 - RNA, 19 nt, Homo sapiens
  misc_RNA (1)...(19): siRNA sense strand
ggaagcaucccuggaguuc

SEQ ID NO: 1999791 - RNA, 19 nt, Homo sapiens
  misc_RNA (1)...(19): siRNA sense strand
ccgcagacccuacaagguu

SEQ ID NO: 1999792 - RNA, 19 nt, Homo sapiens
  misc_RNA (1)...(19): siRNA sense strand
gagcaggugucagcacauc

SEQ ID NO: 1999793 - RNA, 19 nt, Homo sapiens
  misc_RNA (1)...(19): siRNA sense strand
gaggagcugucaggaagug

SEQ ID NO: 1999794 - RNA, 19 nt, Homo sapiens
  misc_RNA (1)...(19): siRNA sense strand
gcaaggaccacguggacau

SEQ ID NO: 1999795 - RNA, 19 nt, Homo sapiens
  misc_RNA (1)...(19): siRNA sense strand
acaacuugcuccucuguca

SEQ ID NO: 1999796 - RNA, 19 nt, Homo sapiens
  misc_RNA (1)...(19): siRNA sense strand
acaauaaggcuguguugga

SEQ ID NO: 1999797 - RNA, 19 nt, Homo sapiens
  misc_RNA (1)...(19): siRNA sense strand
cagauguucucacaguuca

SEQ ID NO: 1999798 - RNA, 19 nt, Homo sapiens
  misc_RNA (1)...(19): siRNA sense strand
ugaauucuuugacucuugu

SEQ ID NO: 1999799 - RNA, 19 nt, Homo sapiens
  misc_RNA (1)...(19): siRNA sense strand
gcacagcggauggcacaga

SEQ ID NO: 1999800 - RNA, 19 nt, Homo sapiens
  misc_RNA (1)...(19): siRNA sense strand
gauauuauuccugacaaug

SEQ ID NO: 1999801 - RNA, 19 nt, Homo sapiens
  misc_RNA (1)...(19): siRNA sense strand
accuauggcuacuacaaua

SEQ ID NO: 1999802 - RNA, 19 nt, Homo sapiens
  misc_RNA (1)...(19): siRNA sense strand
gcacuccucauacuuacug

SEQ ID NO: 1999803 - RNA, 19 nt, Homo sapiens
  misc_RNA (1)...(19): siRNA sense strand
caaggaccacguggacaua

SEQ ID NO: 1999804 - RNA, 19 nt, Homo sapiens
  misc_RNA (1)...(19): siRNA sense strand
ugagcucacugucuuuauc

SEQ ID NO: 1999805 - RNA, 19 nt, Homo sapiens
  misc_RNA (1)...(19): siRNA sense strand
gcaggugucagcacaucaa

SEQ ID NO: 1999806 - RNA, 19 nt, Homo sapiens
  misc_RNA (1)...(19): siRNA sense strand
cauaguggccuucgauaag

SEQ ID NO: 1999807 - RNA, 19 nt, Homo sapiens
  misc_RNA (1)...(19): siRNA sense strand
ucagagcgccucagugaca

SEQ ID NO: 1999808 - RNA, 19 nt, Homo sapiens
  misc_RNA (1)...(19): siRNA sense strand
ugucaucuguguagaccuu

SEQ ID NO: 1999809 - RNA, 19 nt, Homo sapiens
  misc_RNA (1)...(19): siRNA sense strand
gacauaguggccuucgaua

SEQ ID NO: 1999810 - RNA, 19 nt, Homo sapiens
  misc_RNA (1)...(19): siRNA sense strand
aggcagagcccuauuugga

SEQ ID NO: 1999811 - RNA, 19 nt, Homo sapiens
  misc_RNA (1)...(19): siRNA sense strand
cgaggagccugccuuacca

SEQ ID NO: 1999812 - RNA, 19 nt, Homo sapiens
  misc_RNA (1)...(19): siRNA sense strand
gaacucagugcuggacuuc

SEQ ID NO: 1999813 - RNA, 19 nt, Homo sapiens
  misc_RNA (1)...(19): siRNA sense strand
gauguucucacaguucauu

SEQ ID NO: 1999814 - RNA, 19 nt, Homo sapiens
  misc_RNA (1)...(19): siRNA sense strand
gggcaccugaugacucuaa

SEQ ID NO: 1999815 - RNA, 19 nt, Homo sapiens
  misc_RNA (1)...(19): siRNA sense strand
caucaccuauggcuacuac

SEQ ID NO: 1999816 - RNA, 19 nt, Homo sapiens
  misc_RNA (1)...(19): siRNA sense strand
cagcucugcucacacuaug

SEQ ID NO: 1999817 - RNA, 19 nt, Homo sapiens
  misc_RNA (1)...(19): siRNA sense strand
gcccugagcuggcuaucac

SEQ ID NO: 1999818 - RNA, 19 nt, Homo sapiens
  misc_RNA (1)...(19): siRNA sense strand
gagcucacugucuuuauca

SEQ ID NO: 1999819 - RNA, 19 nt, Homo sapiens
  misc_RNA (1)...(19): siRNA sense strand
cagccucucugggcaguga

SEQ ID NO: 1999820 - RNA, 19 nt, Homo sapiens
  misc_RNA (1)...(19): siRNA sense strand
aaguacaagucugccuuua

SEQ ID NO: 1999821 - RNA, 19 nt, Homo sapiens
  misc_RNA (1)...(19): siRNA sense strand
acucuaaccucaacacaac

SEQ ID NO: 1999822 - RNA, 19 nt, Homo sapiens
  misc_RNA (1)...(19): siRNA sense strand
auaguggccuucgauaaga

SEQ ID NO: 1999823 - RNA, 19 nt, Homo sapiens
  misc_RNA (1)...(19): siRNA sense strand
gggcacuccucauacuuac

SEQ ID NO: 1999824 - RNA, 19 nt, Homo sapiens
  misc_RNA (1)...(19): siRNA sense strand
acaagucugccuuuaacaa

SEQ ID NO: 1999825 - RNA, 19 nt, Homo sapiens
  misc_RNA (1)...(19): siRNA sense strand
uccagccucuguucaggua

SEQ ID NO: 1999826 - RNA, 19 nt, Homo sapiens
  misc_RNA (1)...(19): siRNA sense strand
gguguaugaugaggaaauc

SEQ ID NO: 1999827 - RNA, 19 nt, Homo sapiens
  misc_RNA (1)...(19): siRNA sense strand
ccaggcagagcccuauuug

SEQ ID NO: 1999828 - RNA, 19 nt, Homo sapiens
  misc_RNA (1)...(19): siRNA sense strand
cacagcggauggcacagaa

SEQ ID NO: 1999829 - RNA, 19 nt, Homo sapiens
  misc_RNA (1)...(19): siRNA sense strand
gagugggaccucucagaau

SEQ ID NO: 1999830 - RNA, 19 nt, Homo sapiens
  misc_RNA (1)...(19): siRNA sense strand
caagucugccuuuaacaag

SEQ ID NO: 1999831 - RNA, 19 nt, Homo sapiens
  misc_RNA (1)...(19): siRNA sense strand
acauaguggccuucgauaa

SEQ ID NO: 1999832 - RNA, 19 nt, Homo sapiens
  misc_RNA (1)...(19): siRNA sense strand
ggaccacguggacauagug

SEQ ID NO: 1999833 - RNA, 19 nt, Homo sapiens
  misc_RNA (1)...(19): siRNA sense strand
ggcuacgccugcccaguau

SEQ ID NO: 1999834 - RNA, 19 nt, Homo sapiens
  misc_RNA (1)...(19): siRNA sense strand
ucuggaaccuuuuguggua

SEQ ID NO: 1999835 - RNA, 19 nt, Homo sapiens
  misc_RNA (1)...(19): siRNA sense strand
gcucugccuugcucuggau

SEQ ID NO: 1999836 - RNA, 19 nt, Homo sapiens
  misc_RNA (1)...(19): siRNA sense strand
agugggaccucucagaauc

SEQ ID NO: 1999837 - RNA, 19 nt, Homo sapiens
  misc_RNA (1)...(19): siRNA sense strand
gcuccucugucagccugua

SEQ ID NO: 1999838 - RNA, 19 nt, Homo sapiens
  misc_RNA (1)...(19): siRNA sense strand
gguguacgaggcaguucua

SEQ ID NO: 1999839 - RNA, 19 nt, Homo sapiens
  misc_RNA (1)...(19): siRNA sense strand
ccuauggcuacuacaauaa

SEQ ID NO: 1999840 - RNA, 19 nt, Homo sapiens
  misc_RNA (1)...(19): siRNA sense strand
gcccaacaccaucaccuau

SEQ ID NO: 1999841 - RNA, 19 nt, Homo sapiens
  misc_RNA (1)...(19): siRNA sense strand
ucccugaugagguguguua

SEQ ID NO: 1999842 - RNA, 19 nt, Homo sapiens
  misc_RNA (1)...(19): siRNA sense strand
gcccuugaauucuuugacu

SEQ ID NO: 1999843 - RNA, 19 nt, Homo sapiens
  misc_RNA (1)...(19): siRNA sense strand
gccaugcugcccuugaauu

SEQ ID NO: 1999844 - RNA, 19 nt, Homo sapiens
  misc_RNA (1)...(19): siRNA sense strand
cacagauguucucacaguu

SEQ ID NO: 1999845 - RNA, 19 nt, Homo sapiens
  misc_RNA (1)...(19): siRNA sense strand
gcacacacagauguucuca

SEQ ID NO: 1999846 - RNA, 19 nt, Homo sapiens
  misc_RNA (1)...(19): siRNA sense strand
uauccacuccagcuacuuu

SEQ ID NO: 1999847 - RNA, 19 nt, Homo sapiens
  misc_RNA (1)...(19): siRNA sense strand
gcccucgucucgaugaucu

SEQ ID NO: 1999848 - RNA, 19 nt, Homo sapiens
  misc_RNA (1)...(19): siRNA sense strand
gccauugacugccgaaaau

SEQ ID NO: 1999849 - RNA, 19 nt, Homo sapiens
  misc_RNA (1)...(19): siRNA sense strand
gcacgauggaagucucuca

SEQ ID NO: 1999850 - RNA, 19 nt, Homo sapiens
  misc_RNA (1)...(19): siRNA sense strand
cuuugacucuuguguugaa

SEQ ID NO: 1999851 - RNA, 19 nt, Homo sapiens
  misc_RNA (1)...(19): siRNA sense strand
ggagcgcgaaguccaagga

SEQ ID NO: 1999852 - RNA, 19 nt, Homo sapiens
  misc_RNA (1)...(19): siRNA sense strand
ucccuggaguuccuacuga

SEQ ID NO: 1999853 - RNA, 19 nt, Homo sapiens
  misc_RNA (1)...(19): siRNA sense strand
ccacacugacaaaccugua

SEQ ID NO: 1999854 - RNA, 19 nt, Homo sapiens
  misc_RNA (1)...(19): siRNA sense strand
caacuaagcugucuucaaa

SEQ ID NO: 1999855 - RNA, 19 nt, Homo sapiens
  misc_RNA (1)...(19): siRNA sense strand
gaacaaggaugcauacuau

SEQ ID NO: 1999856 - RNA, 19 nt, Homo sapiens
  misc_RNA (1)...(19): siRNA sense strand
ggacaaaccagcaacauuu

SEQ ID NO: 1999857 - RNA, 19 nt, Homo sapiens
  misc_RNA (1)...(19): siRNA sense strand
agacaugcaucaaauagua

SEQ ID NO: 1999858 - RNA, 19 nt, Homo sapiens
  misc_RNA (1)...(19): siRNA sense strand
cgacagacccuauuucaaa

SEQ ID NO: 1999859 - RNA, 19 nt, Homo sapiens
  misc_RNA (1)...(19): siRNA sense strand
ggaacuggcuaaucauuuc

SEQ ID NO: 1999860 - RNA, 19 nt, Homo sapiens
  misc_RNA (1)...(19): siRNA sense strand
ggaggacaccauuauguua

SEQ ID NO: 1999861 - RNA, 19 nt, Homo sapiens
  misc_RNA (1)...(19): siRNA sense strand
gaaaggaacaucuauugug

SEQ ID NO: 1999862 - RNA, 19 nt, Homo sapiens
  misc_RNA (1)...(19): siRNA sense strand
caaagaugguuacauuaga

SEQ ID NO: 1999863 - RNA, 19 nt, Homo sapiens
  misc_RNA (1)...(19): siRNA sense strand
cagccaagguucagaaauu

SEQ ID NO: 1999864 - RNA, 19 nt, Homo sapiens
  misc_RNA (1)...(19): siRNA sense strand
ggauauacucuucagaaua

SEQ ID NO: 1999865 - RNA, 19 nt, Homo sapiens
  misc_RNA (1)...(19): siRNA sense strand
gcugaagaccugcaaguua

SEQ ID NO: 1999866 - RNA, 19 nt, Homo sapiens
  misc_RNA (1)...(19): siRNA sense strand
ggaugcauacuauaacuua

SEQ ID NO: 1999867 - RNA, 19 nt, Homo sapiens
  misc_RNA (1)...(19): siRNA sense strand
gacgggaacuggcuaauca

SEQ ID NO: 1999868 - RNA, 19 nt, Homo sapiens
  misc_RNA (1)...(19): siRNA sense strand
gcccuuguguucagaauuu

SEQ ID NO: 1999869 - RNA, 19 nt, Homo sapiens
  misc_RNA (1)...(19): siRNA sense strand
ggaacaaggaugcauacua

SEQ ID NO: 1999870 - RNA, 19 nt, Homo sapiens
  misc_RNA (1)...(19): siRNA sense strand
ggaguugcauggaaugaga

SEQ ID NO: 1999871 - RNA, 19 nt, Homo sapiens
  misc_RNA (1)...(19): siRNA sense strand
gauucuagauccacauuau

SEQ ID NO: 1999872 - RNA, 19 nt, Homo sapiens
  misc_RNA (1)...(19): siRNA sense strand
uaucagacaugcaucaaau

SEQ ID NO: 1999873 - RNA, 19 nt, Homo sapiens
  misc_RNA (1)...(19): siRNA sense strand
guucagaaauugccucuca

SEQ ID NO: 1999874 - RNA, 19 nt, Homo sapiens
  misc_RNA (1)...(19): siRNA sense strand
gagauuacagggcagauaa

SEQ ID NO: 1999875 - RNA, 19 nt, Homo sapiens
  misc_RNA (1)...(19): siRNA sense strand
ccacauacuuaccuuaauc

SEQ ID NO: 1999876 - RNA, 19 nt, Homo sapiens
  misc_RNA (1)...(19): siRNA sense strand
cauggagacugguaugauu

SEQ ID NO: 1999877 - RNA, 19 nt, Homo sapiens
  misc_RNA (1)...(19): siRNA sense strand
gcuaaucauuuccaaagug

SEQ ID NO: 1999878 - RNA, 19 nt, Homo sapiens
  misc_RNA (1)...(19): siRNA sense strand
gaggacaccauuauguuaa

SEQ ID NO: 1999879 - RNA, 19 nt, Homo sapiens
  misc_RNA (1)...(19): siRNA sense strand
cagaugagccauacaaaga

SEQ ID NO: 1999880 - RNA, 19 nt, Homo sapiens
  misc_RNA (1)...(19): siRNA sense strand
gcuuaucacuuuccagaug

SEQ ID NO: 1999881 - RNA, 19 nt, Homo sapiens
  misc_RNA (1)...(19): siRNA sense strand
gggcauauauggcuaucau

SEQ ID NO: 1999882 - RNA, 19 nt, Homo sapiens
  misc_RNA (1)...(19): siRNA sense strand
acagagagguccauuccaa

SEQ ID NO: 1999883 - RNA, 19 nt, Homo sapiens
  misc_RNA (1)...(19): siRNA sense strand
agacugguaugauuuaugu

SEQ ID NO: 1999884 - RNA, 19 nt, Homo sapiens
  misc_RNA (1)...(19): siRNA sense strand
gauggaagggcccagauuu

SEQ ID NO: 1999885 - RNA, 19 nt, Homo sapiens
  misc_RNA (1)...(19): siRNA sense strand
cugaagaccugcaaguuau

SEQ ID NO: 1999886 - RNA, 19 nt, Homo sapiens
  misc_RNA (1)...(19): siRNA sense strand
gcucuugguucaaacauca

SEQ ID NO: 1999887 - RNA, 19 nt, Homo sapiens
  misc_RNA (1)...(19): siRNA sense strand
agaaggcacugaaacaugu

SEQ ID NO: 1999888 - RNA, 19 nt, Homo sapiens
  misc_RNA (1)...(19): siRNA sense strand
caucagggauacacagaga

SEQ ID NO: 1999889 - RNA, 19 nt, Homo sapiens
  misc_RNA (1)...(19): siRNA sense strand
gaugagccauacaaagaug

SEQ ID NO: 1999890 - RNA, 19 nt, Homo sapiens
  misc_RNA (1)...(19): siRNA sense strand
cuaaucauuuccaaaguga

SEQ ID NO: 1999891 - RNA, 19 nt, Homo sapiens
  misc_RNA (1)...(19): siRNA sense strand
acaaggaugcauacuauaa

SEQ ID NO: 1999892 - RNA, 19 nt, Homo sapiens
  misc_RNA (1)...(19): siRNA sense strand
gucuaaugcuuaucacuuu

SEQ ID NO: 1999893 - RNA, 19 nt, Homo sapiens
  misc_RNA (1)...(19): siRNA sense strand
gaagaccugcaaguuauuu

SEQ ID NO: 1999894 - RNA, 19 nt, Homo sapiens
  misc_RNA (1)...(19): siRNA sense strand
uuacagggcagauaaaguu

SEQ ID NO: 1999895 - RNA, 19 nt, Homo sapiens
  misc_RNA (1)...(19): siRNA sense strand
ccucagcgaccaaauauga

SEQ ID NO: 1999896 - RNA, 19 nt, Homo sapiens
  misc_RNA (1)...(19): siRNA sense strand
gcagugacauaaacaccau

SEQ ID NO: 1999897 - RNA, 19 nt, Homo sapiens
  misc_RNA (1)...(19): siRNA sense strand
uaucugcucuugguucaaa

SEQ ID NO: 1999898 - RNA, 19 nt, Homo sapiens
  misc_RNA (1)...(19): siRNA sense strand
gcauauauggcuaucauca

SEQ ID NO: 1999899 - RNA, 19 nt, Homo sapiens
  misc_RNA (1)...(19): siRNA sense strand
gaaagcggaggacaccauu

SEQ ID NO: 1999900 - RNA, 19 nt, Homo sapiens
  misc_RNA (1)...(19): siRNA sense strand
caaaaggucuaaugcuuau

SEQ ID NO: 1999901 - RNA, 19 nt, Homo sapiens
  misc_RNA (1)...(19): siRNA sense strand
gaucuuaugcuggaaaugu

SEQ ID NO: 1999902 - RNA, 19 nt, Homo sapiens
  misc_RNA (1)...(19): siRNA sense strand
uaagaggaggccuugauuu

SEQ ID NO: 1999903 - RNA, 19 nt, Homo sapiens
  misc_RNA (1)...(19): siRNA sense strand
gggcugugcuuaucgaucu

SEQ ID NO: 1999904 - RNA, 19 nt, Homo sapiens
  misc_RNA (1)...(19): siRNA sense strand
ggaguuacauggucuuuuc

SEQ ID NO: 1999905 - RNA, 19 nt, Homo sapiens
  misc_RNA (1)...(19): siRNA sense strand
gggaacuggcuaaucauuu

SEQ ID NO: 1999906 - RNA, 19 nt, Homo sapiens
  misc_RNA (1)...(19): siRNA sense strand
gcuagcuacuccuaaugaa

SEQ ID NO: 1999907 - RNA, 19 nt, Homo sapiens
  misc_RNA (1)...(19): siRNA sense strand
guucagaauuugccacagu

SEQ ID NO: 1999908 - RNA, 19 nt, Homo sapiens
  misc_RNA (1)...(19): siRNA sense strand
agaaauugccucucaagga

SEQ ID NO: 1999909 - RNA, 19 nt, Homo sapiens
  misc_RNA (1)...(19): siRNA sense strand
uaaaccaauugaucgguau

SEQ ID NO: 1999910 - RNA, 19 nt, Homo sapiens
  misc_RNA (1)...(19): siRNA sense strand
gaagaaacauggggaaaag

SEQ ID NO: 1999911 - RNA, 19 nt, Homo sapiens
  misc_RNA (1)...(19): siRNA sense strand
aaacaccauuccuggagaa

SEQ ID NO: 1999912 - RNA, 19 nt, Homo sapiens
  misc_RNA (1)...(19): siRNA sense strand
ccacaguucaguguauaua

SEQ ID NO: 1999913 - RNA, 19 nt, Homo sapiens
  misc_RNA (1)...(19): siRNA sense strand
ucagcuagcuacuccuaau

SEQ ID NO: 1999914 - RNA, 19 nt, Homo sapiens
  misc_RNA (1)...(19): siRNA sense strand
ggucuaaugcuuaucacuu

SEQ ID NO: 1999915 - RNA, 19 nt, Homo sapiens
  misc_RNA (1)...(19): siRNA sense strand
guaacgcccaucauugaaa

SEQ ID NO: 1999916 - RNA, 19 nt, Homo sapiens
  misc_RNA (1)...(19): siRNA sense strand
acaguucaguguauauaug

SEQ ID NO: 1999917 - RNA, 19 nt, Homo sapiens
  misc_RNA (1)...(19): siRNA sense strand
ggagacugguaugauuuau

SEQ ID NO: 1999918 - RNA, 19 nt, Homo sapiens
  misc_RNA (1)...(19): siRNA sense strand
gggacaaaccagcaacauu

SEQ ID NO: 1999919 - RNA, 19 nt, Homo sapiens
  misc_RNA (1)...(19): siRNA sense strand
auacugcgcuuuguucaau

SEQ ID NO: 1999920 - RNA, 19 nt, Homo sapiens
  misc_RNA (1)...(19): siRNA sense strand
ucaagaaggcacugaaaca

SEQ ID NO: 1999921 - RNA, 19 nt, Homo sapiens
  misc_RNA (1)...(19): siRNA sense strand
uaacgcccaucauugaaag

SEQ ID NO: 1999922 - RNA, 19 nt, Homo sapiens
  misc_RNA (1)...(19): siRNA sense strand
gcuguaacgcccaucauug

SEQ ID NO: 1999923 - RNA, 19 nt, Homo sapiens
  misc_RNA (1)...(19): siRNA sense strand
gacuuuaccugucgaugca

SEQ ID NO: 1999924 - RNA, 19 nt, Homo sapiens
  misc_RNA (1)...(19): siRNA sense strand
aagaggaggccuugauuug

SEQ ID NO: 1999925 - RNA, 19 nt, Homo sapiens
  misc_RNA (1)...(19): siRNA sense strand
caacacacagagaaauuca

SEQ ID NO: 1999926 - RNA, 19 nt, Homo sapiens
  misc_RNA (1)...(19): siRNA sense strand
guucaaacaucagggauac

SEQ ID NO: 1999927 - RNA, 19 nt, Homo sapiens
  misc_RNA (1)...(19): siRNA sense strand
acaaagaugguuacauuag

SEQ ID NO: 1999928 - RNA, 19 nt, Homo sapiens
  misc_RNA (1)...(19): siRNA sense strand
caaacgcccuuguguucag

SEQ ID NO: 1999929 - RNA, 19 nt, Homo sapiens
  misc_RNA (1)...(19): siRNA sense strand
ucagcaggcucuagucgau

SEQ ID NO: 1999930 - RNA, 19 nt, Homo sapiens
  misc_RNA (1)...(19): siRNA sense strand
ggaaagcggaggacaccau

SEQ ID NO: 1999931 - RNA, 19 nt, Homo sapiens
  misc_RNA (1)...(19): siRNA sense strand
guguauauauggccuagca

SEQ ID NO: 1999932 - RNA, 19 nt, Homo sapiens
  misc_RNA (1)...(19): siRNA sense strand
gacaugcaucaaauaguaa

SEQ ID NO: 1999933 - RNA, 19 nt, Homo sapiens
  misc_RNA (1)...(19): siRNA sense strand
ggauggaagggcccagauu

SEQ ID NO: 1999934 - RNA, 19 nt, Homo sapiens
  misc_RNA (1)...(19): siRNA sense strand
uagcuacuccuaaugaaau

SEQ ID NO: 1999935 - RNA, 19 nt, Homo sapiens
  misc_RNA (1)...(19): siRNA sense strand
gcggaggacaccauuaugu

SEQ ID NO: 1999936 - RNA, 19 nt, Homo sapiens
  misc_RNA (1)...(19): siRNA sense strand
gacagacccuauuucaaaa

SEQ ID NO: 1999937 - RNA, 19 nt, Homo sapiens
  misc_RNA (1)...(19): siRNA sense strand
uggauauacucuucagaau

SEQ ID NO: 1999938 - RNA, 19 nt, Homo sapiens
  misc_RNA (1)...(19): siRNA sense strand
cauuagaaauccacauacu

SEQ ID NO: 1999939 - RNA, 19 nt, Homo sapiens
  misc_RNA (1)...(19): siRNA sense strand
ucaaaaggucuaaugcuua

SEQ ID NO: 1999940 - RNA, 19 nt, Homo sapiens
  misc_RNA (1)...(19): siRNA sense strand
ugagccagaagaagauaua

SEQ ID NO: 1999941 - RNA, 19 nt, Homo sapiens
  misc_RNA (1)...(19): siRNA sense strand
caagaaggcacugaaacau

SEQ ID NO: 1999942 - RNA, 19 nt, Homo sapiens
  misc_RNA (1)...(19): siRNA sense strand
ucgaugcaguuauaucugu

SEQ ID NO: 1999943 - RNA, 19 nt, Homo sapiens
  misc_RNA (1)...(19): siRNA sense strand
caccauuccuggagaacug

SEQ ID NO: 1999944 - RNA, 19 nt, Homo sapiens
  misc_RNA (1)...(19): siRNA sense strand
gguacuaaaccaauugauc

SEQ ID NO: 1999945 - RNA, 19 nt, Homo sapiens
  misc_RNA (1)...(19): siRNA sense strand
gaaauucagcaggcucuag

SEQ ID NO: 1999946 - RNA, 19 nt, Homo sapiens
  misc_RNA (1)...(19): siRNA sense strand
uggagacugguaugauuua

SEQ ID NO: 1999947 - RNA, 19 nt, Homo sapiens
  misc_RNA (1)...(19): siRNA sense strand
uaacauggagacugguaug

SEQ ID NO: 1999948 - RNA, 19 nt, Homo sapiens
  misc_RNA (1)...(19): siRNA sense strand
ugaaaggaacaucuauugu

SEQ ID NO: 1999949 - RNA, 19 nt, Homo sapiens
  misc_RNA (1)...(19): siRNA sense strand
cuuaucacuuuccagauga

SEQ ID NO: 1999950 - RNA, 19 nt, Homo sapiens
  misc_RNA (1)...(19): siRNA sense strand
gguucaaacaucagggaua

SEQ ID NO: 1999951 - RNA, 19 nt, Homo sapiens
  misc_RNA (1)...(19): siRNA sense strand
gaaauccacauacuuaccu

SEQ ID NO: 1999952 - RNA, 19 nt, Homo sapiens
  misc_RNA (1)...(19): siRNA sense strand
gaugguuacauuagaaauc

SEQ ID NO: 1999953 - RNA, 19 nt, Homo sapiens
  misc_RNA (1)...(19): siRNA sense strand
ggacgggaacuggcuaauc

SEQ ID NO: 1999954 - RNA, 19 nt, Homo sapiens
  misc_RNA (1)...(19): siRNA sense strand
ccacccaacuuccuuauga

SEQ ID NO: 1999955 - RNA, 19 nt, Homo sapiens
  misc_RNA (1)...(19): siRNA sense strand
cggcacagaugagaacgua

SEQ ID NO: 1999956 - RNA, 19 nt, Homo sapiens
  misc_RNA (1)...(19): siRNA sense strand
gaagugagaagauuguuuu

SEQ ID NO: 1999957 - RNA, 19 nt, Homo sapiens
  misc_RNA (1)...(19): siRNA sense strand
caacugugguuuuggguuu

SEQ ID NO: 1999958 - RNA, 19 nt, Homo sapiens
  misc_RNA (1)...(19): siRNA sense strand
ccacggucaucgagucaga

SEQ ID NO: 1999959 - RNA, 19 nt, Homo sapiens
  misc_RNA (1)...(19): siRNA sense strand
ccaacuuccuuaugacgau

SEQ ID NO: 1999960 - RNA, 19 nt, Homo sapiens
  misc_RNA (1)...(19): siRNA sense strand
cgaagugagaagauuguuu

SEQ ID NO: 1999961 - RNA, 19 nt, Homo sapiens
  misc_RNA (1)...(19): siRNA sense strand
gcacgcucuuccucaacaa

SEQ ID NO: 1999962 - RNA, 19 nt, Homo sapiens
  misc_RNA (1)...(19): siRNA sense strand
aaauguggcgguuucguuu

SEQ ID NO: 1999963 - RNA, 19 nt, Homo sapiens
  misc_RNA (1)...(19): siRNA sense strand
gcacagaugagaacguacu

SEQ ID NO: 1999964 - RNA, 19 nt, Homo sapiens
  misc_RNA (1)...(19): siRNA sense strand
guuccuggcuccgaagaga

SEQ ID NO: 1999965 - RNA, 19 nt, Homo sapiens
  misc_RNA (1)...(19): siRNA sense strand
gguuaucgggugugugaaa

SEQ ID NO: 1999966 - RNA, 19 nt, Homo sapiens
  misc_RNA (1)...(19): siRNA sense strand
uuaugacgaugcuguuugu

SEQ ID NO: 1999967 - RNA, 19 nt, Homo sapiens
  misc_RNA (1)...(19): siRNA sense strand
ugaugagguuugcaacugu

SEQ ID NO: 1999968 - RNA, 19 nt, Homo sapiens
  misc_RNA (1)...(19): siRNA sense strand
ggucugaugagguuugcaa

SEQ ID NO: 1999969 - RNA, 19 nt, Homo sapiens
  misc_RNA (1)...(19): siRNA sense strand
cugaugagguuugcaacug

SEQ ID NO: 1999970 - RNA, 19 nt, Homo sapiens
  misc_RNA (1)...(19): siRNA sense strand
gagguuugcaacugugguu

SEQ ID NO: 1999971 - RNA, 19 nt, Homo sapiens
  misc_RNA (1)...(19): siRNA sense strand
ccgaagagaagccgaaagg

SEQ ID NO: 1999972 - RNA, 19 nt, Homo sapiens
  misc_RNA (1)...(19): siRNA sense strand
ccacgguuaucgggugugu

SEQ ID NO: 1999973 - RNA, 19 nt, Homo sapiens
  misc_RNA (1)...(19): siRNA sense strand
ggaggagcgggaagagcuu

SEQ ID NO: 1999974 - RNA, 19 nt, Homo sapiens
  misc_RNA (1)...(19): siRNA sense strand
ccacccaacuuccuuauga

SEQ ID NO: 1999975 - RNA, 19 nt, Homo sapiens
  misc_RNA (1)...(19): siRNA sense strand
cggcacagaugagaacgua

SEQ ID NO: 1999976 - RNA, 19 nt, Homo sapiens
  misc_RNA (1)...(19): siRNA sense strand
gaagugagaagauuguuuu

SEQ ID NO: 1999977 - RNA, 19 nt, Homo sapiens
  misc_RNA (1)...(19): siRNA sense strand
caacugugguuuuggguuu

SEQ ID NO: 1999978 - RNA, 19 nt, Homo sapiens
  misc_RNA (1)...(19): siRNA sense strand
ccacggucaucgagucaga

SEQ ID NO: 1999979 - RNA, 19 nt, Homo sapiens
  misc_RNA (1)...(19): siRNA sense strand
ccaacuuccuuaugacgau

SEQ ID NO: 1999980 - RNA, 19 nt, Homo sapiens
  misc_RNA (1)...(19): siRNA sense strand
cgaagugagaagauuguuu

SEQ ID NO: 1999981 - RNA, 19 nt, Homo sapiens
  misc_RNA (1)...(19): siRNA sense strand
gcacgcucuuccucaacaa

SEQ ID NO: 1999982 - RNA, 19 nt, Homo sapiens
  misc_RNA (1)...(19): siRNA sense strand
aaauguggcgguuucguuu

SEQ ID NO: 1999983 - RNA, 19 nt, Homo sapiens
  misc_RNA (1)...(19): siRNA sense strand
gcacagaugagaacguacu

SEQ ID NO: 1999984 - RNA, 19 nt, Homo sapiens
  misc_RNA (1)...(19): siRNA sense strand
guuccuggcuccgaagaga

SEQ ID NO: 1999985 - RNA, 19 nt, Homo sapiens
  misc_RNA (1)...(19): siRNA sense strand
gguuaucgggugugugaaa

SEQ ID NO: 1999986 - RNA, 19 nt, Homo sapiens
  misc_RNA (1)...(19): siRNA sense strand
uuaugacgaugcuguuugu

SEQ ID NO: 1999987 - RNA, 19 nt, Homo sapiens
  misc_RNA (1)...(19): siRNA sense strand
ugaugagguuugcaacugu

SEQ ID NO: 1999988 - RNA, 19 nt, Homo sapiens
  misc_RNA (1)...(19): siRNA sense strand
ggucugaugagguuugcaa

SEQ ID NO: 1999989 - RNA, 19 nt, Homo sapiens
  misc_RNA (1)...(19): siRNA sense strand
cugaugagguuugcaacug

SEQ ID NO: 1999990 - RNA, 19 nt, Homo sapiens
  misc_RNA (1)...(19): siRNA sense strand
gagguuugcaacugugguu

SEQ ID NO: 1999991 - RNA, 19 nt, Homo sapiens
  misc_RNA (1)...(19): siRNA sense strand
ccgaagagaagccgaaagg

SEQ ID NO: 1999992 - RNA, 19 nt, Homo sapiens
  misc_RNA (1)...(19): siRNA sense strand
ccacgguuaucgggugugu

SEQ ID NO: 1999993 - RNA, 19 nt, Homo sapiens
  misc_RNA (1)...(19): siRNA sense strand
ggaggagcgggaagagcuu

SEQ ID NO: 1999994 - RNA, 19 nt, Homo sapiens
  misc_RNA (1)...(19): siRNA sense strand
ggaugucccucuacuguua

SEQ ID NO: 1999995 - RNA, 19 nt, Homo sapiens
  misc_RNA (1)...(19): siRNA sense strand
gaagcagacugaccacauc

SEQ ID NO: 1999996 - RNA, 19 nt, Homo sapiens
  misc_RNA (1)...(19): siRNA sense strand
gcagaacauugccaucaug

SEQ ID NO: 1999997 - RNA, 19 nt, Homo sapiens
  misc_RNA (1)...(19): siRNA sense strand
gcagcaggaugucccucua

SEQ ID NO: 1999998 - RNA, 19 nt, Homo sapiens
  misc_RNA (1)...(19): siRNA sense strand
gagcugcgacgacuugaug

SEQ ID NO: 1999999 - RNA, 19 nt, Homo sapiens
  misc_RNA (1)...(19): siRNA sense strand
gcaugaagcagcugaucga

SEQ ID NO: 2000000 - RNA, 19 nt, Homo sapiens
  misc_RNA (1)...(19): siRNA sense strand
gaucaccagcgaugacuuc

SEQ ID NO: 2000001 - RNA, 19 nt, Homo sapiens
  misc_RNA (1)...(19): siRNA sense strand
acacuagccgcauugauga

SEQ ID NO: 2000002 - RNA, 19 nt, Homo sapiens
  misc_RNA (1)...(19): siRNA sense strand
ucaucccgcugcugaaaga

SEQ ID NO: 2000003 - RNA, 19 nt, Homo sapiens
  misc_RNA (1)...(19): siRNA sense strand
ucaucgaccugcucaccuu

SEQ ID NO: 2000004 - RNA, 19 nt, Homo sapiens
  misc_RNA (1)...(19): siRNA sense strand
caggaugucccucuacugu

SEQ ID NO: 2000005 - RNA, 19 nt, Homo sapiens
  misc_RNA (1)...(19): siRNA sense strand
uacacuagccgcauugaug

SEQ ID NO: 2000006 - RNA, 19 nt, Homo sapiens
  misc_RNA (1)...(19): siRNA sense strand
gcgaugacuucugcaccuu

SEQ ID NO: 2000007 - RNA, 19 nt, Homo sapiens
  misc_RNA (1)...(19): siRNA sense strand
cagaacauugccaucauga

SEQ ID NO: 2000008 - RNA, 19 nt, Homo sapiens
  misc_RNA (1)...(19): siRNA sense strand
cuucuacacuagccgcauu

SEQ ID NO: 2000009 - RNA, 19 nt, Homo sapiens
  misc_RNA (1)...(19): siRNA sense strand
caucaucccgcugcugaaa

SEQ ID NO: 2000010 - RNA, 19 nt, Homo sapiens
  misc_RNA (1)...(19): siRNA sense strand
ucaagcaggaugucacugu

SEQ ID NO: 2000011 - RNA, 19 nt, Homo sapiens
  misc_RNA (1)...(19): siRNA sense strand
ggacuuggugugcauuaac

SEQ ID NO: 2000012 - RNA, 19 nt, Homo sapiens
  misc_RNA (1)...(19): siRNA sense strand
gcagacugaccacaucaag

SEQ ID NO: 2000013 - RNA, 19 nt, Homo sapiens
  misc_RNA (1)...(19): siRNA sense strand
gcaccgucacccucaacuu

SEQ ID NO: 2000014 - RNA, 19 nt, Homo sapiens
  misc_RNA (1)...(19): siRNA sense strand
ugaagcagacugaccacau

SEQ ID NO: 2000015 - RNA, 19 nt, Homo sapiens
  misc_RNA (1)...(19): siRNA sense strand
gcgaguggcagaacauugc

SEQ ID NO: 2000016 - RNA, 19 nt, Homo sapiens
  misc_RNA (1)...(19): siRNA sense strand
caccgucacccucaacuuc

SEQ ID NO: 2000017 - RNA, 19 nt, Homo sapiens
  misc_RNA (1)...(19): siRNA sense strand
gagcuggccaaggagauga

SEQ ID NO: 2000018 - RNA, 19 nt, Homo sapiens
  misc_RNA (1)...(19): siRNA sense strand
ucaagggcauccgacagau

SEQ ID NO: 2000019 - RNA, 19 nt, Homo sapiens
  misc_RNA (1)...(19): siRNA sense strand
ggagcuggccaaggagaug

SEQ ID NO: 2000020 - RNA, 19 nt, Homo sapiens
  misc_RNA (1)...(19): siRNA sense strand
gcaucaggacguggacuug

SEQ ID NO: 2000021 - RNA, 19 nt, Homo sapiens
  misc_RNA (1)...(19): siRNA sense strand
uggacuuggugugcauuaa

SEQ ID NO: 2000022 - RNA, 19 nt, Homo sapiens
  misc_RNA (1)...(19): siRNA sense strand
ggagaucgcuucaagauug

SEQ ID NO: 2000023 - RNA, 19 nt, Homo sapiens
  misc_RNA (1)...(19): siRNA sense strand
ggacagacuuucuaaugaa

SEQ ID NO: 2000024 - RNA, 19 nt, Homo sapiens
  misc_RNA (1)...(19): siRNA sense strand
gaugaugguucuuccuuua

SEQ ID NO: 2000025 - RNA, 19 nt, Homo sapiens
  misc_RNA (1)...(19): siRNA sense strand
gagaagagcacgucgguuu

SEQ ID NO: 2000026 - RNA, 19 nt, Homo sapiens
  misc_RNA (1)...(19): siRNA sense strand
gagcaagauaugugaauua

SEQ ID NO: 2000027 - RNA, 19 nt, Homo sapiens
  misc_RNA (1)...(19): siRNA sense strand
gaaguuguaucuccagcuu

SEQ ID NO: 2000028 - RNA, 19 nt, Homo sapiens
  misc_RNA (1)...(19): siRNA sense strand
gaaauggagcagucaauga

SEQ ID NO: 2000029 - RNA, 19 nt, Homo sapiens
  misc_RNA (1)...(19): siRNA sense strand
gcacgucgguuuccuuaag

SEQ ID NO: 2000030 - RNA, 19 nt, Homo sapiens
  misc_RNA (1)...(19): siRNA sense strand
ggauaucacuucgaaagga

SEQ ID NO: 2000031 - RNA, 19 nt, Homo sapiens
  misc_RNA (1)...(19): siRNA sense strand
gauaucacuucgaaaggaa

SEQ ID NO: 2000032 - RNA, 19 nt, Homo sapiens
  misc_RNA (1)...(19): siRNA sense strand
gagcacgucgguuuccuua

SEQ ID NO: 2000033 - RNA, 19 nt, Homo sapiens
  misc_RNA (1)...(19): siRNA sense strand
gaucuuauguaguggaagu

SEQ ID NO: 2000034 - RNA, 19 nt, Homo sapiens
  misc_RNA (1)...(19): siRNA sense strand
cauaggagaucgcuucaag

SEQ ID NO: 2000035 - RNA, 19 nt, Homo sapiens
  misc_RNA (1)...(19): siRNA sense strand
ugauauaccuucuggaucu

SEQ ID NO: 2000036 - RNA, 19 nt, Homo sapiens
  misc_RNA (1)...(19): siRNA sense strand
ccaccuucuuacuuuauua

SEQ ID NO: 2000037 - RNA, 19 nt, Homo sapiens
  misc_RNA (1)...(19): siRNA sense strand
gguccaccuucuuacuuua

SEQ ID NO: 2000038 - RNA, 19 nt, Homo sapiens
  misc_RNA (1)...(19): siRNA sense strand
caucagagguugucagacu

SEQ ID NO: 2000039 - RNA, 19 nt, Homo sapiens
  misc_RNA (1)...(19): siRNA sense strand
uggacagacuuucuaauga

SEQ ID NO: 2000040 - RNA, 19 nt, Homo sapiens
  misc_RNA (1)...(19): siRNA sense strand
gaugguucuuccuuuauug

SEQ ID NO: 2000041 - RNA, 19 nt, Homo sapiens
  misc_RNA (1)...(19): siRNA sense strand
gguucuuccuuuauugaua

SEQ ID NO: 2000042 - RNA, 19 nt, Homo sapiens
  misc_RNA (1)...(19): siRNA sense strand
ggaaauggagcagucaaug

SEQ ID NO: 2000043 - RNA, 19 nt, Homo sapiens
  misc_RNA (1)...(19): siRNA sense strand
gcccuauccucuccaaaug

SEQ ID NO: 2000044 - RNA, 19 nt, Homo sapiens
  misc_RNA (1)...(19): siRNA sense strand
ugaugguucuuccuuuauu

SEQ ID NO: 2000045 - RNA, 19 nt, Homo sapiens
  misc_RNA (1)...(19): siRNA sense strand
uauuugugcuucugccuaa

SEQ ID NO: 2000046 - RNA, 19 nt, Homo sapiens
  misc_RNA (1)...(19): siRNA sense strand
cuaaaguggucaacacaag

SEQ ID NO: 2000047 - RNA, 19 nt, Homo sapiens
  misc_RNA (1)...(19): siRNA sense strand
ccuauccucuccaaaugaa

SEQ ID NO: 2000048 - RNA, 19 nt, Homo sapiens
  misc_RNA (1)...(19): siRNA sense strand
ugaguugccugauguuucu

SEQ ID NO: 2000049 - RNA, 19 nt, Homo sapiens
  misc_RNA (1)...(19): siRNA sense strand
ugaugaugguucuuccuuu

SEQ ID NO: 2000050 - RNA, 19 nt, Homo sapiens
  misc_RNA (1)...(19): siRNA sense strand
aaauggagcagucaaugaa

SEQ ID NO: 2000051 - RNA, 19 nt, Homo sapiens
  misc_RNA (1)...(19): siRNA sense strand
caagugauccugacaugag

SEQ ID NO: 2000052 - RNA, 19 nt, Homo sapiens
  misc_RNA (1)...(19): siRNA sense strand
cacaagugauccugacaug

SEQ ID NO: 2000053 - RNA, 19 nt, Homo sapiens
  misc_RNA (1)...(19): siRNA sense strand
auggagcagucaaugaaua

SEQ ID NO: 2000054 - RNA, 19 nt, Homo sapiens
  misc_RNA (1)...(19): siRNA sense strand
gauauaccuucuggaucuu

SEQ ID NO: 2000055 - RNA, 19 nt, Homo sapiens
  misc_RNA (1)...(19): siRNA sense strand
gggcuggacagacuuucua

SEQ ID NO: 2000056 - RNA, 19 nt, Homo sapiens
  misc_RNA (1)...(19): siRNA sense strand
gagagcaagauaugugaau

SEQ ID NO: 2000057 - RNA, 19 nt, Homo sapiens
  misc_RNA (1)...(19): siRNA sense strand
aaaaucaucuggcaaaucu

SEQ ID NO: 2000058 - RNA, 19 nt, Homo sapiens
  misc_RNA (1)...(19): siRNA sense strand
agagcaagauaugugaauu

SEQ ID NO: 2000059 - RNA, 19 nt, Homo sapiens
  misc_RNA (1)...(19): siRNA sense strand
uaagacagaugggaguuuu

SEQ ID NO: 2000060 - RNA, 19 nt, Homo sapiens
  misc_RNA (1)...(19): siRNA sense strand
ugccugauguuucugaguu

SEQ ID NO: 2000061 - RNA, 19 nt, Homo sapiens
  misc_RNA (1)...(19): siRNA sense strand
caugauauaccuucuggau

SEQ ID NO: 2000062 - RNA, 19 nt, Homo sapiens
  misc_RNA (1)...(19): siRNA sense strand
ggaguuuugugguucauga

SEQ ID NO: 2000063 - RNA, 19 nt, Homo sapiens
  misc_RNA (1)...(19): siRNA sense strand
uaggagaucgcuucaagau

SEQ ID NO: 2000064 - RNA, 19 nt, Homo sapiens
  misc_RNA (1)...(19): siRNA sense strand
gacagacuuucuaaugaac

SEQ ID NO: 2000065 - RNA, 19 nt, Homo sapiens
  misc_RNA (1)...(19): siRNA sense strand
aaccaugaguugccugaug

SEQ ID NO: 2000066 - RNA, 19 nt, Homo sapiens
  misc_RNA (1)...(19): siRNA sense strand
gacaugagacgggaaaugg

SEQ ID NO: 2000067 - RNA, 19 nt, Homo sapiens
  misc_RNA (1)...(19): siRNA sense strand
cagauuugaucccguucga

SEQ ID NO: 2000068 - RNA, 19 nt, Homo sapiens
  misc_RNA (1)...(19): siRNA sense strand
gcugguagacggagaagag

SEQ ID NO: 2000069 - RNA, 19 nt, Homo sapiens
  misc_RNA (1)...(19): siRNA sense strand
ucuagcagcggcagcagua

SEQ ID NO: 2000070 - RNA, 19 nt, Homo sapiens
  misc_RNA (1)...(19): siRNA sense strand
guggauaucacuucgaaag

SEQ ID NO: 2000071 - RNA, 19 nt, Homo sapiens
  misc_RNA (1)...(19): siRNA sense strand
ugaauuccaaccaugaguu

SEQ ID NO: 2000072 - RNA, 19 nt, Homo sapiens
  misc_RNA (1)...(19): siRNA sense strand
ucgguuuccuuaagacaga

SEQ ID NO: 2000073 - RNA, 19 nt, Homo sapiens
  misc_RNA (1)...(19): siRNA sense strand
uuucugaguucaugacaag

SEQ ID NO: 2000074 - RNA, 19 nt, Homo sapiens
  misc_RNA (1)...(19): siRNA sense strand
gggaaauggagcagucaau

SEQ ID NO: 2000075 - RNA, 19 nt, Homo sapiens
  misc_RNA (1)...(19): siRNA sense strand
cuggacagacuuucuaaug

SEQ ID NO: 2000076 - RNA, 19 nt, Homo sapiens
  misc_RNA (1)...(19): siRNA sense strand
cacgucgguuuccuuaaga

SEQ ID NO: 2000077 - RNA, 19 nt, Homo sapiens
  misc_RNA (1)...(19): siRNA sense strand
aaugagagcaagauaugug

SEQ ID NO: 2000078 - RNA, 19 nt, Homo sapiens
  misc_RNA (1)...(19): siRNA sense strand
uagcagcggcagcaguaaa

SEQ ID NO: 2000079 - RNA, 19 nt, Homo sapiens
  misc_RNA (1)...(19): siRNA sense strand
uaaaguggucaacacaagu

SEQ ID NO: 2000080 - RNA, 19 nt, Homo sapiens
  misc_RNA (1)...(19): siRNA sense strand
uauaccuucuggaucuuau

SEQ ID NO: 2000081 - RNA, 19 nt, Homo sapiens
  misc_RNA (1)...(19): siRNA sense strand
caaugguuaugaugauggu

SEQ ID NO: 2000082 - RNA, 19 nt, Homo sapiens
  misc_RNA (1)...(19): siRNA sense strand
caucaaaacaucagagguu

SEQ ID NO: 2000083 - RNA, 19 nt, Homo sapiens
  misc_RNA (1)...(19): siRNA sense strand
gcaagauaugugaauuaca

SEQ ID NO: 2000084 - RNA, 19 nt, Homo sapiens
  misc_RNA (1)...(19): siRNA sense strand
uuauguaguggaaguugua

SEQ ID NO: 2000085 - RNA, 19 nt, Homo sapiens
  misc_RNA (1)...(19): siRNA sense strand
ugauguuucugaguucaug

SEQ ID NO: 2000086 - RNA, 19 nt, Homo sapiens
  misc_RNA (1)...(19): siRNA sense strand
accaugaguugccugaugu

SEQ ID NO: 2000087 - RNA, 19 nt, Homo sapiens
  misc_RNA (1)...(19): siRNA sense strand
gagcagucaaugaauaugc

SEQ ID NO: 2000088 - RNA, 19 nt, Homo sapiens
  misc_RNA (1)...(19): siRNA sense strand
aaaaugagagcaagauaug

SEQ ID NO: 2000089 - RNA, 19 nt, Homo sapiens
  misc_RNA (1)...(19): siRNA sense strand
gucaaugaauaugcugaau

SEQ ID NO: 2000090 - RNA, 19 nt, Homo sapiens
  misc_RNA (1)...(19): siRNA sense strand
ugacaugagacgggaaaug

SEQ ID NO: 2000091 - RNA, 19 nt, Homo sapiens
  misc_RNA (1)...(19): siRNA sense strand
acucuucucuucaaaauca

SEQ ID NO: 2000092 - RNA, 19 nt, Homo sapiens
  misc_RNA (1)...(19): siRNA sense strand
ggacauggauuaccugaaa

SEQ ID NO: 2000093 - RNA, 19 nt, Homo sapiens
  misc_RNA (1)...(19): siRNA sense strand
gagcaaacaugcccagaaa

SEQ ID NO: 2000094 - RNA, 19 nt, Homo sapiens
  misc_RNA (1)...(19): siRNA sense strand
gagaaacgcucaugggaau

SEQ ID NO: 2000095 - RNA, 19 nt, Homo sapiens
  misc_RNA (1)...(19): siRNA sense strand
gcagacaacucuucagcaa

SEQ ID NO: 2000096 - RNA, 19 nt, Homo sapiens
  misc_RNA (1)...(19): siRNA sense strand
gaagagagccucccaggau

SEQ ID NO: 2000097 - RNA, 19 nt, Homo sapiens
  misc_RNA (1)...(19): siRNA sense strand
ggauguacucuguuuauua

SEQ ID NO: 2000098 - RNA, 19 nt, Homo sapiens
  misc_RNA (1)...(19): siRNA sense strand
gaaacaaguucccagaaag

SEQ ID NO: 2000099 - RNA, 19 nt, Homo sapiens
  misc_RNA (1)...(19): siRNA sense strand
gaaggaggauacagaguuc

SEQ ID NO: 2000100 - RNA, 19 nt, Homo sapiens
  misc_RNA (1)...(19): siRNA sense strand
gggaggaccuggaagaaga

SEQ ID NO: 2000101 - RNA, 19 nt, Homo sapiens
  misc_RNA (1)...(19): siRNA sense strand
ugaagaaucucccgaaugg

SEQ ID NO: 2000102 - RNA, 19 nt, Homo sapiens
  misc_RNA (1)...(19): siRNA sense strand
gaagcaagcucugaaaugc

SEQ ID NO: 2000103 - RNA, 19 nt, Homo sapiens
  misc_RNA (1)...(19): siRNA sense strand
ggauacaucuuuguggauu

SEQ ID NO: 2000104 - RNA, 19 nt, Homo sapiens
  misc_RNA (1)...(19): siRNA sense strand
agaaacaaguucccagaaa

SEQ ID NO: 2000105 - RNA, 19 nt, Homo sapiens
  misc_RNA (1)...(19): siRNA sense strand
gacauuggcucggaagaaa

SEQ ID NO: 2000106 - RNA, 19 nt, Homo sapiens
  misc_RNA (1)...(19): siRNA sense strand
caccaaagauggcaaguuc

SEQ ID NO: 2000107 - RNA, 19 nt, Homo sapiens
  misc_RNA (1)...(19): siRNA sense strand
ggaggaagaggaagaagaa

SEQ ID NO: 2000108 - RNA, 19 nt, Homo sapiens
  misc_RNA (1)...(19): siRNA sense strand
ggaagaggaagaagaagaa

SEQ ID NO: 2000109 - RNA, 19 nt, Homo sapiens
  misc_RNA (1)...(19): siRNA sense strand
uaagaaagaugagaagaag

SEQ ID NO: 2000110 - RNA, 19 nt, Homo sapiens
  misc_RNA (1)...(19): siRNA sense strand
gaaacgcucaugggaauaa

SEQ ID NO: 2000111 - RNA, 19 nt, Homo sapiens
  misc_RNA (1)...(19): siRNA sense strand
caaagaauaccaccaaauc

SEQ ID NO: 2000112 - RNA, 19 nt, Homo sapiens
  misc_RNA (1)...(19): siRNA sense strand
gaaagcagaccaccuccaa

SEQ ID NO: 2000113 - RNA, 19 nt, Homo sapiens
  misc_RNA (1)...(19): siRNA sense strand
gaaggaggcccaggacaaa

SEQ ID NO: 2000114 - RNA, 19 nt, Homo sapiens
  misc_RNA (1)...(19): siRNA sense strand
gcaggaugcuccacguguu

SEQ ID NO: 2000115 - RNA, 19 nt, Homo sapiens
  misc_RNA (1)...(19): siRNA sense strand
ggaaggagcagacaacucu

SEQ ID NO: 2000116 - RNA, 19 nt, Homo sapiens
  misc_RNA (1)...(19): siRNA sense strand
gagcgaagcaagacuguga

SEQ ID NO: 2000117 - RNA, 19 nt, Homo sapiens
  misc_RNA (1)...(19): siRNA sense strand
gaacuucgacuccgauucu

SEQ ID NO: 2000118 - RNA, 19 nt, Homo sapiens
  misc_RNA (1)...(19): siRNA sense strand
aagagaagcugaaggaagu

SEQ ID NO: 2000119 - RNA, 19 nt, Homo sapiens
  misc_RNA (1)...(19): siRNA sense strand
gaaggaagccagcgaggau

SEQ ID NO: 2000120 - RNA, 19 nt, Homo sapiens
  misc_RNA (1)...(19): siRNA sense strand
gcacagaagcauuucaaca

SEQ ID NO: 2000121 - RNA, 19 nt, Homo sapiens
  misc_RNA (1)...(19): siRNA sense strand
acacagaggcuucggcuuu

SEQ ID NO: 2000122 - RNA, 19 nt, Homo sapiens
  misc_RNA (1)...(19): siRNA sense strand
agacaacucuucagcaaag

SEQ ID NO: 2000123 - RNA, 19 nt, Homo sapiens
  misc_RNA (1)...(19): siRNA sense strand
ggagugaggccgaggaaga

SEQ ID NO: 2000124 - RNA, 19 nt, Homo sapiens
  misc_RNA (1)...(19): siRNA sense strand
auacagaguuccaggaguu

SEQ ID NO: 2000125 - RNA, 19 nt, Homo sapiens
  misc_RNA (1)...(19): siRNA sense strand
cagaagcauuucaacaaga

SEQ ID NO: 2000126 - RNA, 19 nt, Homo sapiens
  misc_RNA (1)...(19): siRNA sense strand
gauacaucuuuguggauuu

SEQ ID NO: 2000127 - RNA, 19 nt, Homo sapiens
  misc_RNA (1)...(19): siRNA sense strand
cuccagaaauuaagaaaga

SEQ ID NO: 2000128 - RNA, 19 nt, Homo sapiens
  misc_RNA (1)...(19): siRNA sense strand
caacagaagagaagcugaa

SEQ ID NO: 2000129 - RNA, 19 nt, Homo sapiens
  misc_RNA (1)...(19): siRNA sense strand
gaagcaagacugugauucu

SEQ ID NO: 2000130 - RNA, 19 nt, Homo sapiens
  misc_RNA (1)...(19): siRNA sense strand
agaggaaagugaagaugaa

SEQ ID NO: 2000131 - RNA, 19 nt, Homo sapiens
  misc_RNA (1)...(19): siRNA sense strand
gcaaugaagaggaagugaa

SEQ ID NO: 2000132 - RNA, 19 nt, Homo sapiens
  misc_RNA (1)...(19): siRNA sense strand
gaagcugaaggaaguguuu

SEQ ID NO: 2000133 - RNA, 19 nt, Homo sapiens
  misc_RNA (1)...(19): siRNA sense strand
caucuaccaucaagaagga

SEQ ID NO: 2000134 - RNA, 19 nt, Homo sapiens
  misc_RNA (1)...(19): siRNA sense strand
cuacuacuccagaaauuaa

SEQ ID NO: 2000135 - RNA, 19 nt, Homo sapiens
  misc_RNA (1)...(19): siRNA sense strand
gguuuggauuuguggaaua

SEQ ID NO: 2000136 - RNA, 19 nt, Homo sapiens
  misc_RNA (1)...(19): siRNA sense strand
gaucgucguccuacaagaa

SEQ ID NO: 2000137 - RNA, 19 nt, Homo sapiens
  misc_RNA (1)...(19): siRNA sense strand
ggaggaagaggaaagugaa

SEQ ID NO: 2000138 - RNA, 19 nt, Homo sapiens
  misc_RNA (1)...(19): siRNA sense strand
agaaagaugagaagaagaa

SEQ ID NO: 2000139 - RNA, 19 nt, Homo sapiens
  misc_RNA (1)...(19): siRNA sense strand
ggaugaaggaggagcguuu

SEQ ID NO: 2000140 - RNA, 19 nt, Homo sapiens
  misc_RNA (1)...(19): siRNA sense strand
gaagugaagcaagcucuga

SEQ ID NO: 2000141 - RNA, 19 nt, Homo sapiens
  misc_RNA (1)...(19): siRNA sense strand
cagaagagaagcugaagga

SEQ ID NO: 2000142 - RNA, 19 nt, Homo sapiens
  misc_RNA (1)...(19): siRNA sense strand
cacagaagcauuucaacaa

SEQ ID NO: 2000143 - RNA, 19 nt, Homo sapiens
  misc_RNA (1)...(19): siRNA sense strand
caacuggaacacacuauuc

SEQ ID NO: 2000144 - RNA, 19 nt, Homo sapiens
  misc_RNA (1)...(19): siRNA sense strand
ggagcaaacaugcccagaa

SEQ ID NO: 2000145 - RNA, 19 nt, Homo sapiens
  misc_RNA (1)...(19): siRNA sense strand
ugaaggaggauacagaguu

SEQ ID NO: 2000146 - RNA, 19 nt, Homo sapiens
  misc_RNA (1)...(19): siRNA sense strand
cgacugaucgugaagaauc

SEQ ID NO: 2000147 - RNA, 19 nt, Homo sapiens
  misc_RNA (1)...(19): siRNA sense strand
caaaggcagcugugcagaa

SEQ ID NO: 2000148 - RNA, 19 nt, Homo sapiens
  misc_RNA (1)...(19): siRNA sense strand
agaaggcacagaagcauuu

SEQ ID NO: 2000149 - RNA, 19 nt, Homo sapiens
  misc_RNA (1)...(19): siRNA sense strand
cagcagagccagaaacagu

SEQ ID NO: 2000150 - RNA, 19 nt, Homo sapiens
  misc_RNA (1)...(19): siRNA sense strand
gaaagaugagaagaagaaa

SEQ ID NO: 2000151 - RNA, 19 nt, Homo sapiens
  misc_RNA (1)...(19): siRNA sense strand
cccaggauguacucuguuu

SEQ ID NO: 2000152 - RNA, 19 nt, Homo sapiens
  misc_RNA (1)...(19): siRNA sense strand
guacggaaccugcccuaca

SEQ ID NO: 2000153 - RNA, 19 nt, Homo sapiens
  misc_RNA (1)...(19): siRNA sense strand
ccauucgaauugugagaaa

SEQ ID NO: 2000154 - RNA, 19 nt, Homo sapiens
  misc_RNA (1)...(19): siRNA sense strand
ccaguggccauucgaauug

SEQ ID NO: 2000155 - RNA, 19 nt, Homo sapiens
  misc_RNA (1)...(19): siRNA sense strand
gaaaccagcaaaccagaag

SEQ ID NO: 2000156 - RNA, 19 nt, Homo sapiens
  misc_RNA (1)...(19): siRNA sense strand
ggaagaggaaagugaagau

SEQ ID NO: 2000157 - RNA, 19 nt, Homo sapiens
  misc_RNA (1)...(19): siRNA sense strand
gugacuaccugaacuucga

SEQ ID NO: 2000158 - RNA, 19 nt, Homo sapiens
  misc_RNA (1)...(19): siRNA sense strand
gcagacccuucagcuguga

SEQ ID NO: 2000159 - RNA, 19 nt, Homo sapiens
  misc_RNA (1)...(19): siRNA sense strand
gcagaccaccuccaagauc

SEQ ID NO: 2000160 - RNA, 19 nt, Homo sapiens
  misc_RNA (1)...(19): siRNA sense strand
ggaggaggaggaagaggaa

SEQ ID NO: 2000161 - RNA, 19 nt, Homo sapiens
  misc_RNA (1)...(19): siRNA sense strand
ccaagacacaccuucagaa

SEQ ID NO: 2000162 - RNA, 19 nt, Homo sapiens
  misc_RNA (1)...(19): siRNA sense strand
gauggcaaguuccgcaagu

SEQ ID NO: 2000163 - RNA, 19 nt, Homo sapiens
  misc_RNA (1)...(19): siRNA sense strand
gaagaggaaagugaagaug

SEQ ID NO: 2000164 - RNA, 19 nt, Homo sapiens
  misc_RNA (1)...(19): siRNA sense strand
acagaagcauuucaacaag

SEQ ID NO: 2000165 - RNA, 19 nt, Homo sapiens
  misc_RNA (1)...(19): siRNA sense strand
caagcaggaugcgaagaga

SEQ ID NO: 2000166 - RNA, 19 nt, Homo sapiens
  misc_RNA (1)...(19): siRNA sense strand
gcugcuccaucuccaagaa

SEQ ID NO: 2000167 - RNA, 19 nt, Homo sapiens
  misc_RNA (1)...(19): siRNA sense strand
caggaugcuccacguguua

SEQ ID NO: 2000168 - RNA, 19 nt, Homo sapiens
  misc_RNA (1)...(19): siRNA sense strand
ccaaagaauaccaccaaau

SEQ ID NO: 2000169 - RNA, 19 nt, Homo sapiens
  misc_RNA (1)...(19): siRNA sense strand
ugaagcaagcucugaaaug

SEQ ID NO: 2000170 - RNA, 19 nt, Homo sapiens
  misc_RNA (1)...(19): siRNA sense strand
aaacaugcccagaaaccaa

SEQ ID NO: 2000171 - RNA, 19 nt, Homo sapiens
  misc_RNA (1)...(19): siRNA sense strand
gcgaggagcagacccuuca

SEQ ID NO: 2000172 - RNA, 19 nt, Homo sapiens
  misc_RNA (1)...(19): siRNA sense strand
caucuggccuauuccaagu

SEQ ID NO: 2000173 - RNA, 19 nt, Homo sapiens
  misc_RNA (1)...(19): siRNA sense strand
aaaggcagcugugcagaag

SEQ ID NO: 2000174 - RNA, 19 nt, Homo sapiens
  misc_RNA (1)...(19): siRNA sense strand
ucacagcacccacuuguac

SEQ ID NO: 2000175 - RNA, 19 nt, Homo sapiens
  misc_RNA (1)...(19): siRNA sense strand
cacagaggcuucggcuuug

SEQ ID NO: 2000176 - RNA, 19 nt, Homo sapiens
  misc_RNA (1)...(19): siRNA sense strand
ccagaaacagugccugaug

SEQ ID NO: 2000177 - RNA, 19 nt, Homo sapiens
  misc_RNA (1)...(19): siRNA sense strand
gcauucaucaccuucaugu

SEQ ID NO: 2000178 - RNA, 19 nt, Homo sapiens
  misc_RNA (1)...(19): siRNA sense strand
ucgacagccugaccaagaa

SEQ ID NO: 2000179 - RNA, 19 nt, Homo sapiens
  misc_RNA (1)...(19): siRNA sense strand
agacagagaaaccagcaaa

SEQ ID NO: 2000180 - RNA, 19 nt, Homo sapiens
  misc_RNA (1)...(19): siRNA sense strand
caggauguacucuguuuau

SEQ ID NO: 2000181 - RNA, 19 nt, Homo sapiens
  misc_RNA (1)...(19): siRNA sense strand
ccaaaagacucuacuacuc

SEQ ID NO: 2000182 - RNA, 19 nt, Homo sapiens
  misc_RNA (1)...(19): siRNA sense strand
aaagcggucugugguguug

SEQ ID NO: 2000183 - RNA, 19 nt, Homo sapiens
  misc_RNA (1)...(19): siRNA sense strand
ggaggaggaagaggaagaa

SEQ ID NO: 2000184 - RNA, 19 nt, Homo sapiens
  misc_RNA (1)...(19): siRNA sense strand
ggaagaggaggaggaggaa

SEQ ID NO: 2000185 - RNA, 19 nt, Homo sapiens
  misc_RNA (1)...(19): siRNA sense strand
gaauaaaacaggauacauc

SEQ ID NO: 2000186 - RNA, 19 nt, Homo sapiens
  misc_RNA (1)...(19): siRNA sense strand
gacauggauuaccugaaau

SEQ ID NO: 2000187 - RNA, 19 nt, Homo sapiens
  misc_RNA (1)...(19): siRNA sense strand
gaaaugcaaccgggaguac

SEQ ID NO: 2000188 - RNA, 19 nt, Homo sapiens
  misc_RNA (1)...(19): siRNA sense strand
ccaagaagaagaacaaagc

SEQ ID NO: 2000189 - RNA, 19 nt, Homo sapiens
  misc_RNA (1)...(19): siRNA sense strand
ugacacaacagaagagaag

SEQ ID NO: 2000190 - RNA, 19 nt, Homo sapiens
  misc_RNA (1)...(19): siRNA sense strand
gagagccucccaggaugua

SEQ ID NO: 2000191 - RNA, 19 nt, Homo sapiens
  misc_RNA (1)...(19): siRNA sense strand
aagcagaccaccuccaaga

SEQ ID NO: 2000192 - RNA, 19 nt, Homo sapiens
  misc_RNA (1)...(19): siRNA sense strand
ggacauggauuaccugaaa

SEQ ID NO: 2000193 - RNA, 19 nt, Homo sapiens
  misc_RNA (1)...(19): siRNA sense strand
gagcaaacaugcccagaaa

SEQ ID NO: 2000194 - RNA, 19 nt, Homo sapiens
  misc_RNA (1)...(19): siRNA sense strand
gagaaacgcucaugggaau

SEQ ID NO: 2000195 - RNA, 19 nt, Homo sapiens
  misc_RNA (1)...(19): siRNA sense strand
gcagacaacucuucagcaa

SEQ ID NO: 2000196 - RNA, 19 nt, Homo sapiens
  misc_RNA (1)...(19): siRNA sense strand
gaagagagccucccaggau

SEQ ID NO: 2000197 - RNA, 19 nt, Homo sapiens
  misc_RNA (1)...(19): siRNA sense strand
ggauguacucuguuuauua

SEQ ID NO: 2000198 - RNA, 19 nt, Homo sapiens
  misc_RNA (1)...(19): siRNA sense strand
gaaacaaguucccagaaag

SEQ ID NO: 2000199 - RNA, 19 nt, Homo sapiens
  misc_RNA (1)...(19): siRNA sense strand
gaaggaggauacagaguuc

SEQ ID NO: 2000200 - RNA, 19 nt, Homo sapiens
  misc_RNA (1)...(19): siRNA sense strand
gggaggaccuggaagaaga

SEQ ID NO: 2000201 - RNA, 19 nt, Homo sapiens
  misc_RNA (1)...(19): siRNA sense strand
ugaagaaucucccgaaugg

SEQ ID NO: 2000202 - RNA, 19 nt, Homo sapiens
  misc_RNA (1)...(19): siRNA sense strand
gaagcaagcucugaaaugc

SEQ ID NO: 2000203 - RNA, 19 nt, Homo sapiens
  misc_RNA (1)...(19): siRNA sense strand
ggauacaucuuuguggauu

SEQ ID NO: 2000204 - RNA, 19 nt, Homo sapiens
  misc_RNA (1)...(19): siRNA sense strand
agaaacaaguucccagaaa

SEQ ID NO: 2000205 - RNA, 19 nt, Homo sapiens
  misc_RNA (1)...(19): siRNA sense strand
gacauuggcucggaagaaa

SEQ ID NO: 2000206 - RNA, 19 nt, Homo sapiens
  misc_RNA (1)...(19): siRNA sense strand
caccaaagauggcaaguuc

SEQ ID NO: 2000207 - RNA, 19 nt, Homo sapiens
  misc_RNA (1)...(19): siRNA sense strand
ggaggaagaggaagaagaa

SEQ ID NO: 2000208 - RNA, 19 nt, Homo sapiens
  misc_RNA (1)...(19): siRNA sense strand
ggaagaggaagaagaagaa

SEQ ID NO: 2000209 - RNA, 19 nt, Homo sapiens
  misc_RNA (1)...(19): siRNA sense strand
uaagaaagaugagaagaag

SEQ ID NO: 2000210 - RNA, 19 nt, Homo sapiens
  misc_RNA (1)...(19): siRNA sense strand
gaaacgcucaugggaauaa

SEQ ID NO: 2000211 - RNA, 19 nt, Homo sapiens
  misc_RNA (1)...(19): siRNA sense strand
caaagaauaccaccaaauc

SEQ ID NO: 2000212 - RNA, 19 nt, Homo sapiens
  misc_RNA (1)...(19): siRNA sense strand
gaaagcagaccaccuccaa

SEQ ID NO: 2000213 - RNA, 19 nt, Homo sapiens
  misc_RNA (1)...(19): siRNA sense strand
gaaggaggcccaggacaaa

SEQ ID NO: 2000214 - RNA, 19 nt, Homo sapiens
  misc_RNA (1)...(19): siRNA sense strand
gcaggaugcuccacguguu

SEQ ID NO: 2000215 - RNA, 19 nt, Homo sapiens
  misc_RNA (1)...(19): siRNA sense strand
ggaaggagcagacaacucu

SEQ ID NO: 2000216 - RNA, 19 nt, Homo sapiens
  misc_RNA (1)...(19): siRNA sense strand
gagcgaagcaagacuguga

SEQ ID NO: 2000217 - RNA, 19 nt, Homo sapiens
  misc_RNA (1)...(19): siRNA sense strand
gaacuucgacuccgauucu

SEQ ID NO: 2000218 - RNA, 19 nt, Homo sapiens
  misc_RNA (1)...(19): siRNA sense strand
aagagaagcugaaggaagu

SEQ ID NO: 2000219 - RNA, 19 nt, Homo sapiens
  misc_RNA (1)...(19): siRNA sense strand
gaaggaagccagcgaggau

SEQ ID NO: 2000220 - RNA, 19 nt, Homo sapiens
  misc_RNA (1)...(19): siRNA sense strand
gcacagaagcauuucaaca

SEQ ID NO: 2000221 - RNA, 19 nt, Homo sapiens
  misc_RNA (1)...(19): siRNA sense strand
acacagaggcuucggcuuu

SEQ ID NO: 2000222 - RNA, 19 nt, Homo sapiens
  misc_RNA (1)...(19): siRNA sense strand
agacaacucuucagcaaag

SEQ ID NO: 2000223 - RNA, 19 nt, Homo sapiens
  misc_RNA (1)...(19): siRNA sense strand
ggagugaggccgaggaaga

SEQ ID NO: 2000224 - RNA, 19 nt, Homo sapiens
  misc_RNA (1)...(19): siRNA sense strand
auacagaguuccaggaguu

SEQ ID NO: 2000225 - RNA, 19 nt, Homo sapiens
  misc_RNA (1)...(19): siRNA sense strand
cagaagcauuucaacaaga

SEQ ID NO: 2000226 - RNA, 19 nt, Homo sapiens
  misc_RNA (1)...(19): siRNA sense strand
gauacaucuuuguggauuu

SEQ ID NO: 2000227 - RNA, 19 nt, Homo sapiens
  misc_RNA (1)...(19): siRNA sense strand
cuccagaaauuaagaaaga

SEQ ID NO: 2000228 - RNA, 19 nt, Homo sapiens
  misc_RNA (1)...(19): siRNA sense strand
caacagaagagaagcugaa

SEQ ID NO: 2000229 - RNA, 19 nt, Homo sapiens
  misc_RNA (1)...(19): siRNA sense strand
gaagcaagacugugauucu

SEQ ID NO: 2000230 - RNA, 19 nt, Homo sapiens
  misc_RNA (1)...(19): siRNA sense strand
agaggaaagugaagaugaa

SEQ ID NO: 2000231 - RNA, 19 nt, Homo sapiens
  misc_RNA (1)...(19): siRNA sense strand
gcaaugaagaggaagugaa

SEQ ID NO: 2000232 - RNA, 19 nt, Homo sapiens
  misc_RNA (1)...(19): siRNA sense strand
gaagcugaaggaaguguuu

SEQ ID NO: 2000233 - RNA, 19 nt, Homo sapiens
  misc_RNA (1)...(19): siRNA sense strand
caucuaccaucaagaagga

SEQ ID NO: 2000234 - RNA, 19 nt, Homo sapiens
  misc_RNA (1)...(19): siRNA sense strand
cuacuacuccagaaauuaa

SEQ ID NO: 2000235 - RNA, 19 nt, Homo sapiens
  misc_RNA (1)...(19): siRNA sense strand
gguuuggauuuguggaaua

SEQ ID NO: 2000236 - RNA, 19 nt, Homo sapiens
  misc_RNA (1)...(19): siRNA sense strand
gaucgucguccuacaagaa

SEQ ID NO: 2000237 - RNA, 19 nt, Homo sapiens
  misc_RNA (1)...(19): siRNA sense strand
ggaggaagaggaaagugaa

SEQ ID NO: 2000238 - RNA, 19 nt, Homo sapiens
  misc_RNA (1)...(19): siRNA sense strand
agaaagaugagaagaagaa

SEQ ID NO: 2000239 - RNA, 19 nt, Homo sapiens
  misc_RNA (1)...(19): siRNA sense strand
ggaugaaggaggagcguuu

SEQ ID NO: 2000240 - RNA, 19 nt, Homo sapiens
  misc_RNA (1)...(19): siRNA sense strand
gaagugaagcaagcucuga

SEQ ID NO: 2000241 - RNA, 19 nt, Homo sapiens
  misc_RNA (1)...(19): siRNA sense strand
cagaagagaagcugaagga

SEQ ID NO: 2000242 - RNA, 19 nt, Homo sapiens
  misc_RNA (1)...(19): siRNA sense strand
cacagaagcauuucaacaa

SEQ ID NO: 2000243 - RNA, 19 nt, Homo sapiens
  misc_RNA (1)...(19): siRNA sense strand
caacuggaacacacuauuc

SEQ ID NO: 2000244 - RNA, 19 nt, Homo sapiens
  misc_RNA (1)...(19): siRNA sense strand
ggagcaaacaugcccagaa

SEQ ID NO: 2000245 - RNA, 19 nt, Homo sapiens
  misc_RNA (1)...(19): siRNA sense strand
ugaaggaggauacagaguu

SEQ ID NO: 2000246 - RNA, 19 nt, Homo sapiens
  misc_RNA (1)...(19): siRNA sense strand
cgacugaucgugaagaauc

SEQ ID NO: 2000247 - RNA, 19 nt, Homo sapiens
  misc_RNA (1)...(19): siRNA sense strand
caaaggcagcugugcagaa

SEQ ID NO: 2000248 - RNA, 19 nt, Homo sapiens
  misc_RNA (1)...(19): siRNA sense strand
agaaggcacagaagcauuu

SEQ ID NO: 2000249 - RNA, 19 nt, Homo sapiens
  misc_RNA (1)...(19): siRNA sense strand
cagcagagccagaaacagu

SEQ ID NO: 2000250 - RNA, 19 nt, Homo sapiens
  misc_RNA (1)...(19): siRNA sense strand
gaaagaugagaagaagaaa

SEQ ID NO: 2000251 - RNA, 19 nt, Homo sapiens
  misc_RNA (1)...(19): siRNA sense strand
cccaggauguacucuguuu

SEQ ID NO: 2000252 - RNA, 19 nt, Homo sapiens
  misc_RNA (1)...(19): siRNA sense strand
guacggaaccugcccuaca

SEQ ID NO: 2000253 - RNA, 19 nt, Homo sapiens
  misc_RNA (1)...(19): siRNA sense strand
ccauucgaauugugagaaa

SEQ ID NO: 2000254 - RNA, 19 nt, Homo sapiens
  misc_RNA (1)...(19): siRNA sense strand
ccaguggccauucgaauug

SEQ ID NO: 2000255 - RNA, 19 nt, Homo sapiens
  misc_RNA (1)...(19): siRNA sense strand
gaaaccagcaaaccagaag

SEQ ID NO: 2000256 - RNA, 19 nt, Homo sapiens
  misc_RNA (1)...(19): siRNA sense strand
ggaagaggaaagugaagau

SEQ ID NO: 2000257 - RNA, 19 nt, Homo sapiens
  misc_RNA (1)...(19): siRNA sense strand
gugacuaccugaacuucga

SEQ ID NO: 2000258 - RNA, 19 nt, Homo sapiens
  misc_RNA (1)...(19): siRNA sense strand
gcagacccuucagcuguga

SEQ ID NO: 2000259 - RNA, 19 nt, Homo sapiens
  misc_RNA (1)...(19): siRNA sense strand
gcagaccaccuccaagauc

SEQ ID NO: 2000260 - RNA, 19 nt, Homo sapiens
  misc_RNA (1)...(19): siRNA sense strand
ggaggaggaggaagaggaa

SEQ ID NO: 2000261 - RNA, 19 nt, Homo sapiens
  misc_RNA (1)...(19): siRNA sense strand
ccaagacacaccuucagaa

SEQ ID NO: 2000262 - RNA, 19 nt, Homo sapiens
  misc_RNA (1)...(19): siRNA sense strand
gauggcaaguuccgcaagu

SEQ ID NO: 2000263 - RNA, 19 nt, Homo sapiens
  misc_RNA (1)...(19): siRNA sense strand
gaagaggaaagugaagaug

SEQ ID NO: 2000264 - RNA, 19 nt, Homo sapiens
  misc_RNA (1)...(19): siRNA sense strand
acagaagcauuucaacaag

SEQ ID NO: 2000265 - RNA, 19 nt, Homo sapiens
  misc_RNA (1)...(19): siRNA sense strand
caagcaggaugcgaagaga

SEQ ID NO: 2000266 - RNA, 19 nt, Homo sapiens
  misc_RNA (1)...(19): siRNA sense strand
gcugcuccaucuccaagaa

SEQ ID NO: 2000267 - RNA, 19 nt, Homo sapiens
  misc_RNA (1)...(19): siRNA sense strand
caggaugcuccacguguua

SEQ ID NO: 2000268 - RNA, 19 nt, Homo sapiens
  misc_RNA (1)...(19): siRNA sense strand
ccaaagaauaccaccaaau

SEQ ID NO: 2000269 - RNA, 19 nt, Homo sapiens
  misc_RNA (1)...(19): siRNA sense strand
ugaagcaagcucugaaaug

SEQ ID NO: 2000270 - RNA, 19 nt, Homo sapiens
  misc_RNA (1)...(19): siRNA sense strand
aaacaugcccagaaaccaa

SEQ ID NO: 2000271 - RNA, 19 nt, Homo sapiens
  misc_RNA (1)...(19): siRNA sense strand
gcgaggagcagacccuuca

SEQ ID NO: 2000272 - RNA, 19 nt, Homo sapiens
  misc_RNA (1)...(19): siRNA sense strand
caucuggccuauuccaagu

SEQ ID NO: 2000273 - RNA, 19 nt, Homo sapiens
  misc_RNA (1)...(19): siRNA sense strand
aaaggcagcugugcagaag

SEQ ID NO: 2000274 - RNA, 19 nt, Homo sapiens
  misc_RNA (1)...(19): siRNA sense strand
ucacagcacccacuuguac

SEQ ID NO: 2000275 - RNA, 19 nt, Homo sapiens
  misc_RNA (1)...(19): siRNA sense strand
cacagaggcuucggcuuug

SEQ ID NO: 2000276 - RNA, 19 nt, Homo sapiens
  misc_RNA (1)...(19): siRNA sense strand
ccagaaacagugccugaug

SEQ ID NO: 2000277 - RNA, 19 nt, Homo sapiens
  misc_RNA (1)...(19): siRNA sense strand
gcauucaucaccuucaugu

SEQ ID NO: 2000278 - RNA, 19 nt, Homo sapiens
  misc_RNA (1)...(19): siRNA sense strand
ucgacagccugaccaagaa

SEQ ID NO: 2000279 - RNA, 19 nt, Homo sapiens
  misc_RNA (1)...(19): siRNA sense strand
agacagagaaaccagcaaa

SEQ ID NO: 2000280 - RNA, 19 nt, Homo sapiens
  misc_RNA (1)...(19): siRNA sense strand
caggauguacucuguuuau

SEQ ID NO: 2000281 - RNA, 19 nt, Homo sapiens
  misc_RNA (1)...(19): siRNA sense strand
ccaaaagacucuacuacuc

SEQ ID NO: 2000282 - RNA, 19 nt, Homo sapiens
  misc_RNA (1)...(19): siRNA sense strand
aaagcggucugugguguug

SEQ ID NO: 2000283 - RNA, 19 nt, Homo sapiens
  misc_RNA (1)...(19): siRNA sense strand
ggaggaggaagaggaagaa

SEQ ID NO: 2000284 - RNA, 19 nt, Homo sapiens
  misc_RNA (1)...(19): siRNA sense strand
ggaagaggaggaggaggaa

SEQ ID NO: 2000285 - RNA, 19 nt, Homo sapiens
  misc_RNA (1)...(19): siRNA sense strand
gaauaaaacaggauacauc

SEQ ID NO: 2000286 - RNA, 19 nt, Homo sapiens
  misc_RNA (1)...(19): siRNA sense strand
gacauggauuaccugaaau

SEQ ID NO: 2000287 - RNA, 19 nt, Homo sapiens
  misc_RNA (1)...(19): siRNA sense strand
gaaaugcaaccgggaguac

SEQ ID NO: 2000288 - RNA, 19 nt, Homo sapiens
  misc_RNA (1)...(19): siRNA sense strand
ccaagaagaagaacaaagc

SEQ ID NO: 2000289 - RNA, 19 nt, Homo sapiens
  misc_RNA (1)...(19): siRNA sense strand
ugacacaacagaagagaag

SEQ ID NO: 2000290 - RNA, 19 nt, Homo sapiens
  misc_RNA (1)...(19): siRNA sense strand
gagagccucccaggaugua

SEQ ID NO: 2000291 - RNA, 19 nt, Homo sapiens
  misc_RNA (1)...(19): siRNA sense strand
aagcagaccaccuccaaga

SEQ ID NO: 2000292 - RNA, 19 nt, Homo sapiens
  misc_RNA (1)...(19): siRNA sense strand
gaacaguccucgacaguga

SEQ ID NO: 2000293 - RNA, 19 nt, Homo sapiens
  misc_RNA (1)...(19): siRNA sense strand
cagcaacccucuagucuua

SEQ ID NO: 2000294 - RNA, 19 nt, Homo sapiens
  misc_RNA (1)...(19): siRNA sense strand
gaaguucccugauggguuu

SEQ ID NO: 2000295 - RNA, 19 nt, Homo sapiens
  misc_RNA (1)...(19): siRNA sense strand
gaacaaauccuaugaugug

SEQ ID NO: 2000296 - RNA, 19 nt, Homo sapiens
  misc_RNA (1)...(19): siRNA sense strand
ccacaaagccagggaaaua

SEQ ID NO: 2000297 - RNA, 19 nt, Homo sapiens
  misc_RNA (1)...(19): siRNA sense strand
guaaugaaguucccugaug

SEQ ID NO: 2000298 - RNA, 19 nt, Homo sapiens
  misc_RNA (1)...(19): siRNA sense strand
caacagggccucucaagug

SEQ ID NO: 2000299 - RNA, 19 nt, Homo sapiens
  misc_RNA (1)...(19): siRNA sense strand
aaucagaggucguaaugaa

SEQ ID NO: 2000300 - RNA, 19 nt, Homo sapiens
  misc_RNA (1)...(19): siRNA sense strand
ggaaucaucuggcaagaac

SEQ ID NO: 2000301 - RNA, 19 nt, Homo sapiens
  misc_RNA (1)...(19): siRNA sense strand
ggagcucacugcccagauu

SEQ ID NO: 2000302 - RNA, 19 nt, Homo sapiens
  misc_RNA (1)...(19): siRNA sense strand
gcaagaacaaauccuauga

SEQ ID NO: 2000303 - RNA, 19 nt, Homo sapiens
  misc_RNA (1)...(19): siRNA sense strand
ucagguggcuggaggauga

SEQ ID NO: 2000304 - RNA, 19 nt, Homo sapiens
  misc_RNA (1)...(19): siRNA sense strand
gaccgcaacuucuugaaug

SEQ ID NO: 2000305 - RNA, 19 nt, Homo sapiens
  misc_RNA (1)...(19): siRNA sense strand
gccgugcccucaacaauuu

SEQ ID NO: 2000306 - RNA, 19 nt, Homo sapiens
  misc_RNA (1)...(19): siRNA sense strand
ggaaucagaggucguaaug

SEQ ID NO: 2000307 - RNA, 19 nt, Homo sapiens
  misc_RNA (1)...(19): siRNA sense strand
gaauugagaacuuugaugu

SEQ ID NO: 2000308 - RNA, 19 nt, Homo sapiens
  misc_RNA (1)...(19): siRNA sense strand
gaagacaacguuacugaag

SEQ ID NO: 2000309 - RNA, 19 nt, Homo sapiens
  misc_RNA (1)...(19): siRNA sense strand
caaaccaccuggacaugga

SEQ ID NO: 2000310 - RNA, 19 nt, Homo sapiens
  misc_RNA (1)...(19): siRNA sense strand
ugucaaagauaacggagaa

SEQ ID NO: 2000311 - RNA, 19 nt, Homo sapiens
  misc_RNA (1)...(19): siRNA sense strand
gccagcggcuagaugguua

SEQ ID NO: 2000312 - RNA, 19 nt, Homo sapiens
  misc_RNA (1)...(19): siRNA sense strand
gcagaaaucuaugccaaac

SEQ ID NO: 2000313 - RNA, 19 nt, Homo sapiens
  misc_RNA (1)...(19): siRNA sense strand
uccuguggcuggagaauua

SEQ ID NO: 2000314 - RNA, 19 nt, Homo sapiens
  misc_RNA (1)...(19): siRNA sense strand
gcuguuagaugaaccuaca

SEQ ID NO: 2000315 - RNA, 19 nt, Homo sapiens
  misc_RNA (1)...(19): siRNA sense strand
aaacgucagugcuguggaa

SEQ ID NO: 2000316 - RNA, 19 nt, Homo sapiens
  misc_RNA (1)...(19): siRNA sense strand
gggaagacaacguuacuga

SEQ ID NO: 2000317 - RNA, 19 nt, Homo sapiens
  misc_RNA (1)...(19): siRNA sense strand
gagaaggacacgcucaaga

SEQ ID NO: 2000318 - RNA, 19 nt, Homo sapiens
  misc_RNA (1)...(19): siRNA sense strand
agaaaucuaugccaaacug

SEQ ID NO: 2000319 - RNA, 19 nt, Homo sapiens
  misc_RNA (1)...(19): siRNA sense strand
aagaacaaauccuaugaug

SEQ ID NO: 2000320 - RNA, 19 nt, Homo sapiens
  misc_RNA (1)...(19): siRNA sense strand
caaagauaacggagaacua

SEQ ID NO: 2000321 - RNA, 19 nt, Homo sapiens
  misc_RNA (1)...(19): siRNA sense strand
ggaagacaacguuacugaa

SEQ ID NO: 2000322 - RNA, 19 nt, Homo sapiens
  misc_RNA (1)...(19): siRNA sense strand
gaaaggagagucgguugga

SEQ ID NO: 2000323 - RNA, 19 nt, Homo sapiens
  misc_RNA (1)...(19): siRNA sense strand
uggagcagcuggaccuaaa

SEQ ID NO: 2000324 - RNA, 19 nt, Homo sapiens
  misc_RNA (1)...(19): siRNA sense strand
agagugugcuggagaguga

SEQ ID NO: 2000325 - RNA, 19 nt, Homo sapiens
  misc_RNA (1)...(19): siRNA sense strand
gaacuuugaugugucuuuu

SEQ ID NO: 2000326 - RNA, 19 nt, Homo sapiens
  misc_RNA (1)...(19): siRNA sense strand
ugaaugccaucgccacaga

SEQ ID NO: 2000327 - RNA, 19 nt, Homo sapiens
  misc_RNA (1)...(19): siRNA sense strand
cuacgacuguggaaccaaa

SEQ ID NO: 2000328 - RNA, 19 nt, Homo sapiens
  misc_RNA (1)...(19): siRNA sense strand
ggaagucuaccaugcugaa

SEQ ID NO: 2000329 - RNA, 19 nt, Homo sapiens
  misc_RNA (1)...(19): siRNA sense strand
caaggaaucagaggucgua

SEQ ID NO: 2000330 - RNA, 19 nt, Homo sapiens
  misc_RNA (1)...(19): siRNA sense strand
gcagcuagaugagguggau

SEQ ID NO: 2000331 - RNA, 19 nt, Homo sapiens
  misc_RNA (1)...(19): siRNA sense strand
gacagugaaugcaaagaag

SEQ ID NO: 2000332 - RNA, 19 nt, Homo sapiens
  misc_RNA (1)...(19): siRNA sense strand
ccuaugaugugcgaauuga

SEQ ID NO: 2000333 - RNA, 19 nt, Homo sapiens
  misc_RNA (1)...(19): siRNA sense strand
cgacagugaaugcaaagaa

SEQ ID NO: 2000334 - RNA, 19 nt, Homo sapiens
  misc_RNA (1)...(19): siRNA sense strand
cagacacgcucacaggaau

SEQ ID NO: 2000335 - RNA, 19 nt, Homo sapiens
  misc_RNA (1)...(19): siRNA sense strand
ugagguggauuucuacuac

SEQ ID NO: 2000336 - RNA, 19 nt, Homo sapiens
  misc_RNA (1)...(19): siRNA sense strand
agacaacguuacugaagau

SEQ ID NO: 2000337 - RNA, 19 nt, Homo sapiens
  misc_RNA (1)...(19): siRNA sense strand
agaugaaccuacaaacaug

SEQ ID NO: 2000338 - RNA, 19 nt, Homo sapiens
  misc_RNA (1)...(19): siRNA sense strand
agaccuucaucaagaguaa

SEQ ID NO: 2000339 - RNA, 19 nt, Homo sapiens
  misc_RNA (1)...(19): siRNA sense strand
aagacaacguuacugaaga

SEQ ID NO: 2000340 - RNA, 19 nt, Homo sapiens
  misc_RNA (1)...(19): siRNA sense strand
cgaguggccuuugcucaga

SEQ ID NO: 2000341 - RNA, 19 nt, Homo sapiens
  misc_RNA (1)...(19): siRNA sense strand
caacguuacugaagaugcu

SEQ ID NO: 2000342 - RNA, 19 nt, Homo sapiens
  misc_RNA (1)...(19): siRNA sense strand
ccucgacagugaaugcaaa

SEQ ID NO: 2000343 - RNA, 19 nt, Homo sapiens
  misc_RNA (1)...(19): siRNA sense strand
uagaugaaccuacaaacau

SEQ ID NO: 2000344 - RNA, 19 nt, Homo sapiens
  misc_RNA (1)...(19): siRNA sense strand
ccuauccaguugucaaaga

SEQ ID NO: 2000345 - RNA, 19 nt, Homo sapiens
  misc_RNA (1)...(19): siRNA sense strand
aaggaggauuugaccagua

SEQ ID NO: 2000346 - RNA, 19 nt, Homo sapiens
  misc_RNA (1)...(19): siRNA sense strand
gaagagccgaguggccuuu

SEQ ID NO: 2000347 - RNA, 19 nt, Homo sapiens
  misc_RNA (1)...(19): siRNA sense strand
ucaagaugcuggagaagcu

SEQ ID NO: 2000348 - RNA, 19 nt, Homo sapiens
  misc_RNA (1)...(19): siRNA sense strand
gcacguugagcaagagguu

SEQ ID NO: 2000349 - RNA, 19 nt, Homo sapiens
  misc_RNA (1)...(19): siRNA sense strand
gagagucgguuggaaucau

SEQ ID NO: 2000350 - RNA, 19 nt, Homo sapiens
  misc_RNA (1)...(19): siRNA sense strand
ccacaaaccaccuggacau

SEQ ID NO: 2000351 - RNA, 19 nt, Homo sapiens
  misc_RNA (1)...(19): siRNA sense strand
ggagaagcgcucagagaag

SEQ ID NO: 2000352 - RNA, 19 nt, Homo sapiens
  misc_RNA (1)...(19): siRNA sense strand
gaacugcuggcacgcaagu

SEQ ID NO: 2000353 - RNA, 19 nt, Homo sapiens
  misc_RNA (1)...(19): siRNA sense strand
cugauggguuugagaaguu

SEQ ID NO: 2000354 - RNA, 19 nt, Homo sapiens
  misc_RNA (1)...(19): siRNA sense strand
caaccagcagcgugaauau

SEQ ID NO: 2000355 - RNA, 19 nt, Homo sapiens
  misc_RNA (1)...(19): siRNA sense strand
aaacuuccaggacugcuaa

SEQ ID NO: 2000356 - RNA, 19 nt, Homo sapiens
  misc_RNA (1)...(19): siRNA sense strand
ggccgugcccucaacaauu

SEQ ID NO: 2000357 - RNA, 19 nt, Homo sapiens
  misc_RNA (1)...(19): siRNA sense strand
acggacaggucuucgacua

SEQ ID NO: 2000358 - RNA, 19 nt, Homo sapiens
  misc_RNA (1)...(19): siRNA sense strand
cuacgugaccggcgucuug

SEQ ID NO: 2000359 - RNA, 19 nt, Homo sapiens
  misc_RNA (1)...(19): siRNA sense strand
caagaacaaauccuaugau

SEQ ID NO: 2000360 - RNA, 19 nt, Homo sapiens
  misc_RNA (1)...(19): siRNA sense strand
ucaaccagcagcgugaaua

SEQ ID NO: 2000361 - RNA, 19 nt, Homo sapiens
  misc_RNA (1)...(19): siRNA sense strand
ugagaacuuugaugugucu

SEQ ID NO: 2000362 - RNA, 19 nt, Homo sapiens
  misc_RNA (1)...(19): siRNA sense strand
cagaggucguaaugaaguu

SEQ ID NO: 2000363 - RNA, 19 nt, Homo sapiens
  misc_RNA (1)...(19): siRNA sense strand
gcucacaggaaucugaaga

SEQ ID NO: 2000364 - RNA, 19 nt, Homo sapiens
  misc_RNA (1)...(19): siRNA sense strand
caggagaagcgcucagaga

SEQ ID NO: 2000365 - RNA, 19 nt, Homo sapiens
  misc_RNA (1)...(19): siRNA sense strand
gcacauccagguuuucauu

SEQ ID NO: 2000366 - RNA, 19 nt, Homo sapiens
  misc_RNA (1)...(19): siRNA sense strand
caacuucuacauucuggau

SEQ ID NO: 2000367 - RNA, 19 nt, Homo sapiens
  misc_RNA (1)...(19): siRNA sense strand
caucuucagucgccucucu

SEQ ID NO: 2000368 - RNA, 19 nt, Homo sapiens
  misc_RNA (1)...(19): siRNA sense strand
gcugaggccuguggacaag

SEQ ID NO: 2000369 - RNA, 19 nt, Homo sapiens
  misc_RNA (1)...(19): siRNA sense strand
ugaaugcaaagaaguuaga

SEQ ID NO: 2000370 - RNA, 19 nt, Homo sapiens
  misc_RNA (1)...(19): siRNA sense strand
ggacgccccuauccaguug

SEQ ID NO: 2000371 - RNA, 19 nt, Homo sapiens
  misc_RNA (1)...(19): siRNA sense strand
ccaaacuggaggagauuga

SEQ ID NO: 2000372 - RNA, 19 nt, Homo sapiens
  misc_RNA (1)...(19): siRNA sense strand
ggcaagaacaaauccuaug

SEQ ID NO: 2000373 - RNA, 19 nt, Homo sapiens
  misc_RNA (1)...(19): siRNA sense strand
aaaggagagucgguuggaa

SEQ ID NO: 2000374 - RNA, 19 nt, Homo sapiens
  misc_RNA (1)...(19): siRNA sense strand
caaacuuccaggacugcua

SEQ ID NO: 2000375 - RNA, 19 nt, Homo sapiens
  misc_RNA (1)...(19): siRNA sense strand
ggagauugaggcugacaag

SEQ ID NO: 2000376 - RNA, 19 nt, Homo sapiens
  misc_RNA (1)...(19): siRNA sense strand
ucagacacgcucacaggaa

SEQ ID NO: 2000377 - RNA, 19 nt, Homo sapiens
  misc_RNA (1)...(19): siRNA sense strand
ccacgaccgcaacuucuug

SEQ ID NO: 2000378 - RNA, 19 nt, Homo sapiens
  misc_RNA (1)...(19): siRNA sense strand
aggcucgacuuaaggcaaa

SEQ ID NO: 2000379 - RNA, 19 nt, Homo sapiens
  misc_RNA (1)...(19): siRNA sense strand
ucugaagauuggcuauuuc

SEQ ID NO: 2000380 - RNA, 19 nt, Homo sapiens
  misc_RNA (1)...(19): siRNA sense strand
aaagauaacggagaacuac

SEQ ID NO: 2000381 - RNA, 19 nt, Homo sapiens
  misc_RNA (1)...(19): siRNA sense strand
caauucugcagcuagauga

SEQ ID NO: 2000382 - RNA, 19 nt, Homo sapiens
  misc_RNA (1)...(19): siRNA sense strand
ccaauucugcagcuagaug

SEQ ID NO: 2000383 - RNA, 19 nt, Homo sapiens
  misc_RNA (1)...(19): siRNA sense strand
gaaucagaggucguaauga

SEQ ID NO: 2000384 - RNA, 19 nt, Homo sapiens
  misc_RNA (1)...(19): siRNA sense strand
auugagaacuuugaugugu

SEQ ID NO: 2000385 - RNA, 19 nt, Homo sapiens
  misc_RNA (1)...(19): siRNA sense strand
uaugaugugcgaauugaga

SEQ ID NO: 2000386 - RNA, 19 nt, Homo sapiens
  misc_RNA (1)...(19): siRNA sense strand
gaccagcaacccucuaguc

SEQ ID NO: 2000387 - RNA, 19 nt, Homo sapiens
  misc_RNA (1)...(19): siRNA sense strand
ugaccgguuucgcuacaau

SEQ ID NO: 2000388 - RNA, 19 nt, Homo sapiens
  misc_RNA (1)...(19): siRNA sense strand
cgccaauucugcagcuaga

SEQ ID NO: 2000389 - RNA, 19 nt, Homo sapiens
  misc_RNA (1)...(19): siRNA sense strand
ucagaggucguaaugaagu

SEQ ID NO: 2000390 - RNA, 19 nt, Homo sapiens
  misc_RNA (1)...(19): siRNA sense strand
gggaacaguccucgacagu

SEQ ID NO: 2000391 - RNA, 19 nt, Homo sapiens
  misc_RNA (1)...(19): siRNA sense strand
ugaggccuguggacaagga

SEQ ID NO: 2000392 - RNA, 19 nt, Homo sapiens
  misc_RNA (1)...(19): siRNA sense strand
ggagguggccuauaacuua

SEQ ID NO: 2000393 - RNA, 19 nt, Homo sapiens
  misc_RNA (1)...(19): siRNA sense strand
gacaggagguggccuauaa

SEQ ID NO: 2000394 - RNA, 19 nt, Homo sapiens
  misc_RNA (1)...(19): siRNA sense strand
caacauagcaccuguagau

SEQ ID NO: 2000395 - RNA, 19 nt, Homo sapiens
  misc_RNA (1)...(19): siRNA sense strand
ggaaaugacacauacagaa

SEQ ID NO: 2000396 - RNA, 19 nt, Homo sapiens
  misc_RNA (1)...(19): siRNA sense strand
gauaaguaccguugaguuu

SEQ ID NO: 2000397 - RNA, 19 nt, Homo sapiens
  misc_RNA (1)...(19): siRNA sense strand
gaaaugacacauacagaau

SEQ ID NO: 2000398 - RNA, 19 nt, Homo sapiens
  misc_RNA (1)...(19): siRNA sense strand
ggucagaguuuguaauugg

SEQ ID NO: 2000399 - RNA, 19 nt, Homo sapiens
  misc_RNA (1)...(19): siRNA sense strand
ugaaggauguugugggaaa

SEQ ID NO: 2000400 - RNA, 19 nt, Homo sapiens
  misc_RNA (1)...(19): siRNA sense strand
caacaacugugaacauuuu

SEQ ID NO: 2000401 - RNA, 19 nt, Homo sapiens
  misc_RNA (1)...(19): siRNA sense strand
gccuauaacuuacuuguca

SEQ ID NO: 2000402 - RNA, 19 nt, Homo sapiens
  misc_RNA (1)...(19): siRNA sense strand
aaaugcagcucuugaagga

SEQ ID NO: 2000403 - RNA, 19 nt, Homo sapiens
  misc_RNA (1)...(19): siRNA sense strand
aaugauugcuucaguuuga

SEQ ID NO: 2000404 - RNA, 19 nt, Homo sapiens
  misc_RNA (1)...(19): siRNA sense strand
gcacugggcccuguacuug

SEQ ID NO: 2000405 - RNA, 19 nt, Homo sapiens
  misc_RNA (1)...(19): siRNA sense strand
guacuugggugaugguuac

SEQ ID NO: 2000406 - RNA, 19 nt, Homo sapiens
  misc_RNA (1)...(19): siRNA sense strand
gcaguaaggcccuggugaa

SEQ ID NO: 2000407 - RNA, 19 nt, Homo sapiens
  misc_RNA (1)...(19): siRNA sense strand
uaaguaccguugaguuugu

SEQ ID NO: 2000408 - RNA, 19 nt, Homo sapiens
  misc_RNA (1)...(19): siRNA sense strand
gucaacaacugugaacauu

SEQ ID NO: 2000409 - RNA, 19 nt, Homo sapiens
  misc_RNA (1)...(19): siRNA sense strand
ugacauugcuucgcuaugg

SEQ ID NO: 2000410 - RNA, 19 nt, Homo sapiens
  misc_RNA (1)...(19): siRNA sense strand
ucauaaagcggucagaguu

SEQ ID NO: 2000411 - RNA, 19 nt, Homo sapiens
  misc_RNA (1)...(19): siRNA sense strand
gaaggauguugugggaaau

SEQ ID NO: 2000412 - RNA, 19 nt, Homo sapiens
  misc_RNA (1)...(19): siRNA sense strand
guaaggcccuggugaaaau

SEQ ID NO: 2000413 - RNA, 19 nt, Homo sapiens
  misc_RNA (1)...(19): siRNA sense strand
cauaaagcggucagaguuu

SEQ ID NO: 2000414 - RNA, 19 nt, Homo sapiens
  misc_RNA (1)...(19): siRNA sense strand
gcggucagaguuuguaauu

SEQ ID NO: 2000415 - RNA, 19 nt, Homo sapiens
  misc_RNA (1)...(19): siRNA sense strand
ggacaggagguggccuaua

SEQ ID NO: 2000416 - RNA, 19 nt, Homo sapiens
  misc_RNA (1)...(19): siRNA sense strand
auaaagcggucagaguuug

SEQ ID NO: 2000417 - RNA, 19 nt, Homo sapiens
  misc_RNA (1)...(19): siRNA sense strand
gagguggccuauaacuuac

SEQ ID NO: 2000418 - RNA, 19 nt, Homo sapiens
  misc_RNA (1)...(19): siRNA sense strand
gccaaccgagcgauaagua

SEQ ID NO: 2000419 - RNA, 19 nt, Homo sapiens
  misc_RNA (1)...(19): siRNA sense strand
gacauugcuucgcuaugga

SEQ ID NO: 2000420 - RNA, 19 nt, Homo sapiens
  misc_RNA (1)...(19): siRNA sense strand
gcaggccaaccgagcgaua

SEQ ID NO: 2000421 - RNA, 19 nt, Homo sapiens
  misc_RNA (1)...(19): siRNA sense strand
caauaaauacgaugaaacg

SEQ ID NO: 2000422 - RNA, 19 nt, Homo sapiens
  misc_RNA (1)...(19): siRNA sense strand
ucaacaacugugaacauuu

SEQ ID NO: 2000423 - RNA, 19 nt, Homo sapiens
  misc_RNA (1)...(19): siRNA sense strand
gggaaaugacacauacaga

SEQ ID NO: 2000424 - RNA, 19 nt, Homo sapiens
  misc_RNA (1)...(19): siRNA sense strand
cgauaaguaccguugaguu

SEQ ID NO: 2000425 - RNA, 19 nt, Homo sapiens
  misc_RNA (1)...(19): siRNA sense strand
ugguuacguuaucaacaua

SEQ ID NO: 2000426 - RNA, 19 nt, Homo sapiens
  misc_RNA (1)...(19): siRNA sense strand
guuuaaugauugcuucagu

SEQ ID NO: 2000427 - RNA, 19 nt, Homo sapiens
  misc_RNA (1)...(19): siRNA sense strand
uggcauuccugcguccuuu

SEQ ID NO: 2000428 - RNA, 19 nt, Homo sapiens
  misc_RNA (1)...(19): siRNA sense strand
caguaaggcccuggugaaa

SEQ ID NO: 2000429 - RNA, 19 nt, Homo sapiens
  misc_RNA (1)...(19): siRNA sense strand
ggacaaagagcaaaauacu

SEQ ID NO: 2000430 - RNA, 19 nt, Homo sapiens
  misc_RNA (1)...(19): siRNA sense strand
gguggccuauaacuuacuu

SEQ ID NO: 2000431 - RNA, 19 nt, Homo sapiens
  misc_RNA (1)...(19): siRNA sense strand
ugacacauacagaauaaac

SEQ ID NO: 2000432 - RNA, 19 nt, Homo sapiens
  misc_RNA (1)...(19): siRNA sense strand
gugaacauuuugugacauu

SEQ ID NO: 2000433 - RNA, 19 nt, Homo sapiens
  misc_RNA (1)...(19): siRNA sense strand
ccuauaacuuacuugucaa

SEQ ID NO: 2000434 - RNA, 19 nt, Homo sapiens
  misc_RNA (1)...(19): siRNA sense strand
uuacaagcgccaagucugu

SEQ ID NO: 2000435 - RNA, 19 nt, Homo sapiens
  misc_RNA (1)...(19): siRNA sense strand
uuccugggcuuguuuccaa

SEQ ID NO: 2000436 - RNA, 19 nt, Homo sapiens
  misc_RNA (1)...(19): siRNA sense strand
gggugaugguuacguuauc

SEQ ID NO: 2000437 - RNA, 19 nt, Homo sapiens
  misc_RNA (1)...(19): siRNA sense strand
gaaaaugcagcucuugaag

SEQ ID NO: 2000438 - RNA, 19 nt, Homo sapiens
  misc_RNA (1)...(19): siRNA sense strand
ucucauuccugggcuuguu

SEQ ID NO: 2000439 - RNA, 19 nt, Homo sapiens
  misc_RNA (1)...(19): siRNA sense strand
gagcgauaaguaccguuga

SEQ ID NO: 2000440 - RNA, 19 nt, Homo sapiens
  misc_RNA (1)...(19): siRNA sense strand
gaugguuacguuaucaaca

SEQ ID NO: 2000441 - RNA, 19 nt, Homo sapiens
  misc_RNA (1)...(19): siRNA sense strand
gucagaguuuguaauugga

SEQ ID NO: 2000442 - RNA, 19 nt, Homo sapiens
  misc_RNA (1)...(19): siRNA sense strand
aagucuguauucagcagua

SEQ ID NO: 2000443 - RNA, 19 nt, Homo sapiens
  misc_RNA (1)...(19): siRNA sense strand
gcccuguacuugggugaug

SEQ ID NO: 2000444 - RNA, 19 nt, Homo sapiens
  misc_RNA (1)...(19): siRNA sense strand
gauguugugggaaaugaca

SEQ ID NO: 2000445 - RNA, 19 nt, Homo sapiens
  misc_RNA (1)...(19): siRNA sense strand
ggcauuccugcguccuuua

SEQ ID NO: 2000446 - RNA, 19 nt, Homo sapiens
  misc_RNA (1)...(19): siRNA sense strand
uaucaacauagcaccugua

SEQ ID NO: 2000447 - RNA, 19 nt, Homo sapiens
  misc_RNA (1)...(19): siRNA sense strand
gacaagaucccguccauga

SEQ ID NO: 2000448 - RNA, 19 nt, Homo sapiens
  misc_RNA (1)...(19): siRNA sense strand
uaaacggacucauguacuu

SEQ ID NO: 2000449 - RNA, 19 nt, Homo sapiens
  misc_RNA (1)...(19): siRNA sense strand
ggacucauguacuuuguca

SEQ ID NO: 2000450 - RNA, 19 nt, Homo sapiens
  misc_RNA (1)...(19): siRNA sense strand
ccaugaaucagguaaauuu

SEQ ID NO: 2000451 - RNA, 19 nt, Homo sapiens
  misc_RNA (1)...(19): siRNA sense strand
gaacgaaugggacaagauc

SEQ ID NO: 2000452 - RNA, 19 nt, Homo sapiens
  misc_RNA (1)...(19): siRNA sense strand
ccgcugagguggacgugua

SEQ ID NO: 2000453 - RNA, 19 nt, Homo sapiens
  misc_RNA (1)...(19): siRNA sense strand
gcuaugaccacaccacuga

SEQ ID NO: 2000454 - RNA, 19 nt, Homo sapiens
  misc_RNA (1)...(19): siRNA sense strand
gcaaggagaccauggugau

SEQ ID NO: 2000455 - RNA, 19 nt, Homo sapiens
  misc_RNA (1)...(19): siRNA sense strand
caagaucccguccaugaau

SEQ ID NO: 2000456 - RNA, 19 nt, Homo sapiens
  misc_RNA (1)...(19): siRNA sense strand
guacaacucaagcgugaau

SEQ ID NO: 2000457 - RNA, 19 nt, Homo sapiens
  misc_RNA (1)...(19): siRNA sense strand
ccaagacugcgacucuaaa

SEQ ID NO: 2000458 - RNA, 19 nt, Homo sapiens
  misc_RNA (1)...(19): siRNA sense strand
ccaacugccuggacaugca

SEQ ID NO: 2000459 - RNA, 19 nt, Homo sapiens
  misc_RNA (1)...(19): siRNA sense strand
ccauggugaugcagugcua

SEQ ID NO: 2000460 - RNA, 19 nt, Homo sapiens
  misc_RNA (1)...(19): siRNA sense strand
guccaugaaucagguaaau

SEQ ID NO: 2000461 - RNA, 19 nt, Homo sapiens
  misc_RNA (1)...(19): siRNA sense strand
gcugggcaaugacaucuac

SEQ ID NO: 2000462 - RNA, 19 nt, Homo sapiens
  misc_RNA (1)...(19): siRNA sense strand
ggaacgaaugggacaagau

SEQ ID NO: 2000463 - RNA, 19 nt, Homo sapiens
  misc_RNA (1)...(19): siRNA sense strand
cgacagcaccgagcgcuau

SEQ ID NO: 2000464 - RNA, 19 nt, Homo sapiens
  misc_RNA (1)...(19): siRNA sense strand
aaacggacucauguacuuu

SEQ ID NO: 2000465 - RNA, 19 nt, Homo sapiens
  misc_RNA (1)...(19): siRNA sense strand
gcugcgaccaggacuguga

SEQ ID NO: 2000466 - RNA, 19 nt, Homo sapiens
  misc_RNA (1)...(19): siRNA sense strand
ucguggcgcugggcaauga

SEQ ID NO: 2000467 - RNA, 19 nt, Homo sapiens
  misc_RNA (1)...(19): siRNA sense strand
acaacucaagcgugaauga

SEQ ID NO: 2000468 - RNA, 19 nt, Homo sapiens
  misc_RNA (1)...(19): siRNA sense strand
acaagaucccguccaugaa

SEQ ID NO: 2000469 - RNA, 19 nt, Homo sapiens
  misc_RNA (1)...(19): siRNA sense strand
caaggagaccauggugaug

SEQ ID NO: 2000470 - RNA, 19 nt, Homo sapiens
  misc_RNA (1)...(19): siRNA sense strand
uguacaacccgacgaggaa

SEQ ID NO: 2000471 - RNA, 19 nt, Homo sapiens
  misc_RNA (1)...(19): siRNA sense strand
cccaagacugcgacucuaa

SEQ ID NO: 2000472 - RNA, 19 nt, Homo sapiens
  misc_RNA (1)...(19): siRNA sense strand
guguggagguacaacucaa

SEQ ID NO: 2000473 - RNA, 19 nt, Homo sapiens
  misc_RNA (1)...(19): siRNA sense strand
ugggucucaucucaauuaa

SEQ ID NO: 2000474 - RNA, 19 nt, Homo sapiens
  misc_RNA (1)...(19): siRNA sense strand
gggauccacagccaugaug

SEQ ID NO: 2000475 - RNA, 19 nt, Homo sapiens
  misc_RNA (1)...(19): siRNA sense strand
ggacgaauauucccgaaga

SEQ ID NO: 2000476 - RNA, 19 nt, Homo sapiens
  misc_RNA (1)...(19): siRNA sense strand
gagaagaacuggcccaaca

SEQ ID NO: 2000477 - RNA, 19 nt, Homo sapiens
  misc_RNA (1)...(19): siRNA sense strand
ccaaagacauugcuaagga

SEQ ID NO: 2000478 - RNA, 19 nt, Homo sapiens
  misc_RNA (1)...(19): siRNA sense strand
ggaaugcgcuggacguguu

SEQ ID NO: 2000479 - RNA, 19 nt, Homo sapiens
  misc_RNA (1)...(19): siRNA sense strand
gagcgaguguucucaguaa

SEQ ID NO: 2000480 - RNA, 19 nt, Homo sapiens
  misc_RNA (1)...(19): siRNA sense strand
acacugaccuguucgagua

SEQ ID NO: 2000481 - RNA, 19 nt, Homo sapiens
  misc_RNA (1)...(19): siRNA sense strand
guacauuccugcacaacaa

SEQ ID NO: 2000482 - RNA, 19 nt, Homo sapiens
  misc_RNA (1)...(19): siRNA sense strand
gaaggugccuacaugguau

SEQ ID NO: 2000483 - RNA, 19 nt, Homo sapiens
  misc_RNA (1)...(19): siRNA sense strand
gaggaugaauugauugaga

SEQ ID NO: 2000484 - RNA, 19 nt, Homo sapiens
  misc_RNA (1)...(19): siRNA sense strand
gcacauucaucaacacugu

SEQ ID NO: 2000485 - RNA, 19 nt, Homo sapiens
  misc_RNA (1)...(19): siRNA sense strand
gugaacagccgucugauaa

SEQ ID NO: 2000486 - RNA, 19 nt, Homo sapiens
  misc_RNA (1)...(19): siRNA sense strand
gggcgaaggugccuacaug

SEQ ID NO: 2000487 - RNA, 19 nt, Homo sapiens
  misc_RNA (1)...(19): siRNA sense strand
caaagacauugcuaaggaa

SEQ ID NO: 2000488 - RNA, 19 nt, Homo sapiens
  misc_RNA (1)...(19): siRNA sense strand
gaacagccgucugauaaac

SEQ ID NO: 2000489 - RNA, 19 nt, Homo sapiens
  misc_RNA (1)...(19): siRNA sense strand
ucaggaggaugaauugauu

SEQ ID NO: 2000490 - RNA, 19 nt, Homo sapiens
  misc_RNA (1)...(19): siRNA sense strand
ggaggaggaugaugaugau

SEQ ID NO: 2000491 - RNA, 19 nt, Homo sapiens
  misc_RNA (1)...(19): siRNA sense strand
gcguagagcauguaacuuu

SEQ ID NO: 2000492 - RNA, 19 nt, Homo sapiens
  misc_RNA (1)...(19): siRNA sense strand
gagaagggacccaggauga

SEQ ID NO: 2000493 - RNA, 19 nt, Homo sapiens
  misc_RNA (1)...(19): siRNA sense strand
ggaauuuucucuccuguuu

SEQ ID NO: 2000494 - RNA, 19 nt, Homo sapiens
  misc_RNA (1)...(19): siRNA sense strand
gaaagaacgagaagaacug

SEQ ID NO: 2000495 - RNA, 19 nt, Homo sapiens
  misc_RNA (1)...(19): siRNA sense strand
ggaugaugaugaugacuuc

SEQ ID NO: 2000496 - RNA, 19 nt, Homo sapiens
  misc_RNA (1)...(19): siRNA sense strand
cgaaggugccuacauggua

SEQ ID NO: 2000497 - RNA, 19 nt, Homo sapiens
  misc_RNA (1)...(19): siRNA sense strand
gcauguaacuuuuaacuuc

SEQ ID NO: 2000498 - RNA, 19 nt, Homo sapiens
  misc_RNA (1)...(19): siRNA sense strand
gggcaguacuucaaugaca

SEQ ID NO: 2000499 - RNA, 19 nt, Homo sapiens
  misc_RNA (1)...(19): siRNA sense strand
ugacgaggaugaugagauc

SEQ ID NO: 2000500 - RNA, 19 nt, Homo sapiens
  misc_RNA (1)...(19): siRNA sense strand
gcacaacgacggaaagaac

SEQ ID NO: 2000501 - RNA, 19 nt, Homo sapiens
  misc_RNA (1)...(19): siRNA sense strand
gcagcucucuggcccugaa

SEQ ID NO: 2000502 - RNA, 19 nt, Homo sapiens
  misc_RNA (1)...(19): siRNA sense strand
uuacggcacuuuccucuuc

SEQ ID NO: 2000503 - RNA, 19 nt, Homo sapiens
  misc_RNA (1)...(19): siRNA sense strand
ugaagcagguccaugauac

SEQ ID NO: 2000504 - RNA, 19 nt, Homo sapiens
  misc_RNA (1)...(19): siRNA sense strand
ggaaagaacgagaagaacu

SEQ ID NO: 2000505 - RNA, 19 nt, Homo sapiens
  misc_RNA (1)...(19): siRNA sense strand
ucaguaacccacauuaaga

SEQ ID NO: 2000506 - RNA, 19 nt, Homo sapiens
  misc_RNA (1)...(19): siRNA sense strand
gaugauugguggcguguac

SEQ ID NO: 2000507 - RNA, 19 nt, Homo sapiens
  misc_RNA (1)...(19): siRNA sense strand
ugaagggccuggacagagu

SEQ ID NO: 2000508 - RNA, 19 nt, Homo sapiens
  misc_RNA (1)...(19): siRNA sense strand
gugccuacaugguauacuu

SEQ ID NO: 2000509 - RNA, 19 nt, Homo sapiens
  misc_RNA (1)...(19): siRNA sense strand
gagaauggaaagcaugaug

SEQ ID NO: 2000510 - RNA, 19 nt, Homo sapiens
  misc_RNA (1)...(19): siRNA sense strand
uaacccacauuaagacgau

SEQ ID NO: 2000511 - RNA, 19 nt, Homo sapiens
  misc_RNA (1)...(19): siRNA sense strand
ccauugucuucuccuauuu

SEQ ID NO: 2000512 - RNA, 19 nt, Homo sapiens
  misc_RNA (1)...(19): siRNA sense strand
caacaugcgagccaaagga

SEQ ID NO: 2000513 - RNA, 19 nt, Homo sapiens
  misc_RNA (1)...(19): siRNA sense strand
cccauugucuucuccuauu

SEQ ID NO: 2000514 - RNA, 19 nt, Homo sapiens
  misc_RNA (1)...(19): siRNA sense strand
ggcaguacuucaaugacaa

SEQ ID NO: 2000515 - RNA, 19 nt, Homo sapiens
  misc_RNA (1)...(19): siRNA sense strand
cgccuuuccuucuguguuu

SEQ ID NO: 2000516 - RNA, 19 nt, Homo sapiens
  misc_RNA (1)...(19): siRNA sense strand
acaagaggaccacagcuuu

SEQ ID NO: 2000517 - RNA, 19 nt, Homo sapiens
  misc_RNA (1)...(19): siRNA sense strand
gacaagaggaccacagcuu

SEQ ID NO: 2000518 - RNA, 19 nt, Homo sapiens
  misc_RNA (1)...(19): siRNA sense strand
aggauucccuguuugaaga

SEQ ID NO: 2000519 - RNA, 19 nt, Homo sapiens
  misc_RNA (1)...(19): siRNA sense strand
ucacauccuucgugggaau

SEQ ID NO: 2000520 - RNA, 19 nt, Homo sapiens
  misc_RNA (1)...(19): siRNA sense strand
cgaggaugaugagaucuau

SEQ ID NO: 2000521 - RNA, 19 nt, Homo sapiens
  misc_RNA (1)...(19): siRNA sense strand
gcucaagucaguguccuuu

SEQ ID NO: 2000522 - RNA, 19 nt, Homo sapiens
  misc_RNA (1)...(19): siRNA sense strand
ggaggaugaugaugaugac

SEQ ID NO: 2000523 - RNA, 19 nt, Homo sapiens
  misc_RNA (1)...(19): siRNA sense strand
ggaucagcaucuucacauc

SEQ ID NO: 2000524 - RNA, 19 nt, Homo sapiens
  misc_RNA (1)...(19): siRNA sense strand
uacaugguauacuuuguga

SEQ ID NO: 2000525 - RNA, 19 nt, Homo sapiens
  misc_RNA (1)...(19): siRNA sense strand
uaucggcgcaucacucuga

SEQ ID NO: 2000526 - RNA, 19 nt, Homo sapiens
  misc_RNA (1)...(19): siRNA sense strand
cgucuucgccuucuucuca

SEQ ID NO: 2000527 - RNA, 19 nt, Homo sapiens
  misc_RNA (1)...(19): siRNA sense strand
cuuugaggauucccuguuu

SEQ ID NO: 2000528 - RNA, 19 nt, Homo sapiens
  misc_RNA (1)...(19): siRNA sense strand
gggccaaagacauugcuaa

SEQ ID NO: 2000529 - RNA, 19 nt, Homo sapiens
  misc_RNA (1)...(19): siRNA sense strand
caacugcacauucaucaac

SEQ ID NO: 2000530 - RNA, 19 nt, Homo sapiens
  misc_RNA (1)...(19): siRNA sense strand
acauuaagacgauucauca

SEQ ID NO: 2000531 - RNA, 19 nt, Homo sapiens
  misc_RNA (1)...(19): siRNA sense strand
gaucguacucccgcuuuga

SEQ ID NO: 2000532 - RNA, 19 nt, Homo sapiens
  misc_RNA (1)...(19): siRNA sense strand
cuacgcaucccgcaccaaa

SEQ ID NO: 2000533 - RNA, 19 nt, Homo sapiens
  misc_RNA (1)...(19): siRNA sense strand
ugaacagccgucugauaaa

SEQ ID NO: 2000534 - RNA, 19 nt, Homo sapiens
  misc_RNA (1)...(19): siRNA sense strand
gacccaggaugaggaggaa

SEQ ID NO: 2000535 - RNA, 19 nt, Homo sapiens
  misc_RNA (1)...(19): siRNA sense strand
gaggauucccuguuugaag

SEQ ID NO: 2000536 - RNA, 19 nt, Homo sapiens
  misc_RNA (1)...(19): siRNA sense strand
agacauugcuaaggaaguc

SEQ ID NO: 2000537 - RNA, 19 nt, Homo sapiens
  misc_RNA (1)...(19): siRNA sense strand
gcccagcgcugagaaagac

SEQ ID NO: 2000538 - RNA, 19 nt, Homo sapiens
  misc_RNA (1)...(19): siRNA sense strand
gcuuugaggaggaggauga

SEQ ID NO: 2000539 - RNA, 19 nt, Homo sapiens
  misc_RNA (1)...(19): siRNA sense strand
gccaugacgaggaugauga

SEQ ID NO: 2000540 - RNA, 19 nt, Homo sapiens
  misc_RNA (1)...(19): siRNA sense strand
ugucugcccugcucaugga

SEQ ID NO: 2000541 - RNA, 19 nt, Homo sapiens
  misc_RNA (1)...(19): siRNA sense strand
ucacauccagcaacacguu

SEQ ID NO: 2000542 - RNA, 19 nt, Homo sapiens
  misc_RNA (1)...(19): siRNA sense strand
gaauggaaagcaugaugag

SEQ ID NO: 2000543 - RNA, 19 nt, Homo sapiens
  misc_RNA (1)...(19): siRNA sense strand
ggaggcacaacgacggaaa

SEQ ID NO: 2000544 - RNA, 19 nt, Homo sapiens
  misc_RNA (1)...(19): siRNA sense strand
gaugaugagaucuaugaag

SEQ ID NO: 2000545 - RNA, 19 nt, Homo sapiens
  misc_RNA (1)...(19): siRNA sense strand
ugugaacagccgucugaua

SEQ ID NO: 2000546 - RNA, 19 nt, Homo sapiens
  misc_RNA (1)...(19): siRNA sense strand
uaacuucacguuggagaau

SEQ ID NO: 2000547 - RNA, 19 nt, Homo sapiens
  misc_RNA (1)...(19): siRNA sense strand
gcgcguagagcauguaacu

SEQ ID NO: 2000548 - RNA, 19 nt, Homo sapiens
  misc_RNA (1)...(19): siRNA sense strand
agaauggaaagcaugauga

SEQ ID NO: 2000549 - RNA, 19 nt, Homo sapiens
  misc_RNA (1)...(19): siRNA sense strand
gacgaauauucccgaagau

SEQ ID NO: 2000550 - RNA, 19 nt, Homo sapiens
  misc_RNA (1)...(19): siRNA sense strand
ucaucucgcucucagucaa

SEQ ID NO: 2000551 - RNA, 19 nt, Homo sapiens
  misc_RNA (1)...(19): siRNA sense strand
gggaucagcaucuucacau

SEQ ID NO: 2000552 - RNA, 19 nt, Homo sapiens
  misc_RNA (1)...(19): siRNA sense strand
gaucggcaggcucagaaug

SEQ ID NO: 2000553 - RNA, 19 nt, Homo sapiens
  misc_RNA (1)...(19): siRNA sense strand
ccuguucgaguacaaguuu

SEQ ID NO: 2000554 - RNA, 19 nt, Homo sapiens
  misc_RNA (1)...(19): siRNA sense strand
gcaacugcacauucaucaa

SEQ ID NO: 2000555 - RNA, 19 nt, Homo sapiens
  misc_RNA (1)...(19): siRNA sense strand
gcgggcaguacuucaauga

SEQ ID NO: 2000556 - RNA, 19 nt, Homo sapiens
  misc_RNA (1)...(19): siRNA sense strand
ccaugucauucagcuacua

SEQ ID NO: 2000557 - RNA, 19 nt, Homo sapiens
  misc_RNA (1)...(19): siRNA sense strand
gaauauucccgaagaucgu

SEQ ID NO: 2000558 - RNA, 19 nt, Homo sapiens
  misc_RNA (1)...(19): siRNA sense strand
aggaugaugagaucuauga

SEQ ID NO: 2000559 - RNA, 19 nt, Homo sapiens
  misc_RNA (1)...(19): siRNA sense strand
ugaaugcccuguguaagcu

SEQ ID NO: 2000560 - RNA, 19 nt, Homo sapiens
  misc_RNA (1)...(19): siRNA sense strand
cguguugacuguugaacuc

SEQ ID NO: 2000561 - RNA, 19 nt, Homo sapiens
  misc_RNA (1)...(19): siRNA sense strand
ucucaguaacccacauuaa

SEQ ID NO: 2000562 - RNA, 19 nt, Homo sapiens
  misc_RNA (1)...(19): siRNA sense strand
acggaaagaacgagaagaa

SEQ ID NO: 2000563 - RNA, 19 nt, Homo sapiens
  misc_RNA (1)...(19): siRNA sense strand
gcccugaagcugccugaga

SEQ ID NO: 2000564 - RNA, 19 nt, Homo sapiens
  misc_RNA (1)...(19): siRNA sense strand
ccagcgugauguccugugu

SEQ ID NO: 2000565 - RNA, 19 nt, Homo sapiens
  misc_RNA (1)...(19): siRNA sense strand
guagagcauguaacuuuua

SEQ ID NO: 2000566 - RNA, 19 nt, Homo sapiens
  misc_RNA (1)...(19): siRNA sense strand
cgucugguuuccugacaug

SEQ ID NO: 2000567 - RNA, 19 nt, Homo sapiens
  misc_RNA (1)...(19): siRNA sense strand
uagagaauggaaagcauga

SEQ ID NO: 2000568 - RNA, 19 nt, Homo sapiens
  misc_RNA (1)...(19): siRNA sense strand
cugaagcagguccaugaua

SEQ ID NO: 2000569 - RNA, 19 nt, Homo sapiens
  misc_RNA (1)...(19): siRNA sense strand
gcuuuuggcuuccugaaug

SEQ ID NO: 2000570 - RNA, 19 nt, Homo sapiens
  misc_RNA (1)...(19): siRNA sense strand
ugagggccaugacgaggau

SEQ ID NO: 2000571 - RNA, 19 nt, Homo sapiens
  misc_RNA (1)...(19): siRNA sense strand
ggacguguugacuguugaa

SEQ ID NO: 2000572 - RNA, 19 nt, Homo sapiens
  misc_RNA (1)...(19): siRNA sense strand
caagaucggcaggcucaga

SEQ ID NO: 2000573 - RNA, 19 nt, Homo sapiens
  misc_RNA (1)...(19): siRNA sense strand
gagcgcguagagcauguaa

SEQ ID NO: 2000574 - RNA, 19 nt, Homo sapiens
  misc_RNA (1)...(19): siRNA sense strand
aggaugaauugauugagau

SEQ ID NO: 2000575 - RNA, 19 nt, Homo sapiens
  misc_RNA (1)...(19): siRNA sense strand
ggaaauaccucaaggagua

SEQ ID NO: 2000576 - RNA, 19 nt, Homo sapiens
  misc_RNA (1)...(19): siRNA sense strand
gagaaacccugcaaagaug

SEQ ID NO: 2000577 - RNA, 19 nt, Homo sapiens
  misc_RNA (1)...(19): siRNA sense strand
gaagagaaacccugcaaag

SEQ ID NO: 2000578 - RNA, 19 nt, Homo sapiens
  misc_RNA (1)...(19): siRNA sense strand
caagcgcucugucucaaug

SEQ ID NO: 2000579 - RNA, 19 nt, Homo sapiens
  misc_RNA (1)...(19): siRNA sense strand
cccaggagcugucugagaa

SEQ ID NO: 2000580 - RNA, 19 nt, Homo sapiens
  misc_RNA (1)...(19): siRNA sense strand
ggagaaacccucggaaugg

SEQ ID NO: 2000581 - RNA, 19 nt, Homo sapiens
  misc_RNA (1)...(19): siRNA sense strand
gggagaaacccucggaaug

SEQ ID NO: 2000582 - RNA, 19 nt, Homo sapiens
  misc_RNA (1)...(19): siRNA sense strand
ggaguaagccugggagcaa

SEQ ID NO: 2000583 - RNA, 19 nt, Homo sapiens
  misc_RNA (1)...(19): siRNA sense strand
ggaagaaggacccgacaca

SEQ ID NO: 2000584 - RNA, 19 nt, Homo sapiens
  misc_RNA (1)...(19): siRNA sense strand
gaaauaccucaaggaguaa

SEQ ID NO: 2000585 - RNA, 19 nt, Homo sapiens
  misc_RNA (1)...(19): siRNA sense strand
gucccucucucuucacuuu

SEQ ID NO: 2000586 - RNA, 19 nt, Homo sapiens
  misc_RNA (1)...(19): siRNA sense strand
ugucuccucuucccaauau

SEQ ID NO: 2000587 - RNA, 19 nt, Homo sapiens
  misc_RNA (1)...(19): siRNA sense strand
agagaaacccugcaaagau

SEQ ID NO: 2000588 - RNA, 19 nt, Homo sapiens
  misc_RNA (1)...(19): siRNA sense strand
gagaagagaaacccugcaa

SEQ ID NO: 2000589 - RNA, 19 nt, Homo sapiens
  misc_RNA (1)...(19): siRNA sense strand
gaaggacccgacacagguu

SEQ ID NO: 2000590 - RNA, 19 nt, Homo sapiens
  misc_RNA (1)...(19): siRNA sense strand
gggagagggagaagagaaa

SEQ ID NO: 2000591 - RNA, 19 nt, Homo sapiens
  misc_RNA (1)...(19): siRNA sense strand
gccaagcgcucugucucaa

SEQ ID NO: 2000592 - RNA, 19 nt, Homo sapiens
  misc_RNA (1)...(19): siRNA sense strand
ggacauggugguguggaaa

SEQ ID NO: 2000593 - RNA, 19 nt, Homo sapiens
  misc_RNA (1)...(19): siRNA sense strand
gggacauggugguguggaa

SEQ ID NO: 2000594 - RNA, 19 nt, Homo sapiens
  misc_RNA (1)...(19): siRNA sense strand
acauggugguguggaaaua

SEQ ID NO: 2000595 - RNA, 19 nt, Homo sapiens
  misc_RNA (1)...(19): siRNA sense strand
ggagcugucugagaaacca

SEQ ID NO: 2000596 - RNA, 19 nt, Homo sapiens
  misc_RNA (1)...(19): siRNA sense strand
aagagaaacccugcaaaga

SEQ ID NO: 2000597 - RNA, 19 nt, Homo sapiens
  misc_RNA (1)...(19): siRNA sense strand
gugggugcgugggaacuuu

SEQ ID NO: 2000598 - RNA, 19 nt, Homo sapiens
  misc_RNA (1)...(19): siRNA sense strand
gcgcucugucucaauguuu

SEQ ID NO: 2000599 - RNA, 19 nt, Homo sapiens
  misc_RNA (1)...(19): siRNA sense strand
ucaaugggagugagaacug

SEQ ID NO: 2000600 - RNA, 19 nt, Homo sapiens
  misc_RNA (1)...(19): siRNA sense strand
gcccaggagcugucugaga

SEQ ID NO: 2000601 - RNA, 19 nt, Homo sapiens
  misc_RNA (1)...(19): siRNA sense strand
ggugaguacccaggaagaa

SEQ ID NO: 2000602 - RNA, 19 nt, Homo sapiens
  misc_RNA (1)...(19): siRNA sense strand
ucacuuugcaucacggaau

SEQ ID NO: 2000603 - RNA, 19 nt, Homo sapiens
  misc_RNA (1)...(19): siRNA sense strand
gacauggugguguggaaau

SEQ ID NO: 2000604 - RNA, 19 nt, Homo sapiens
  misc_RNA (1)...(19): siRNA sense strand
gugcgugggaacuuuagaa

SEQ ID NO: 2000605 - RNA, 19 nt, Homo sapiens
  misc_RNA (1)...(19): siRNA sense strand
ccaaauggcuuuagucaga

SEQ ID NO: 2000606 - RNA, 19 nt, Homo sapiens
  misc_RNA (1)...(19): siRNA sense strand
gacaggagaugaacuugaa

SEQ ID NO: 2000607 - RNA, 19 nt, Homo sapiens
  misc_RNA (1)...(19): siRNA sense strand
guugagagcuugaggaaga

SEQ ID NO: 2000608 - RNA, 19 nt, Homo sapiens
  misc_RNA (1)...(19): siRNA sense strand
guagcaagcuugacaggaa

SEQ ID NO: 2000609 - RNA, 19 nt, Homo sapiens
  misc_RNA (1)...(19): siRNA sense strand
gaaaguccggcaaaugaua

SEQ ID NO: 2000610 - RNA, 19 nt, Homo sapiens
  misc_RNA (1)...(19): siRNA sense strand
gagaugaacuugaacacau

SEQ ID NO: 2000611 - RNA, 19 nt, Homo sapiens
  misc_RNA (1)...(19): siRNA sense strand
ggaagacggugcaggacuu

SEQ ID NO: 2000612 - RNA, 19 nt, Homo sapiens
  misc_RNA (1)...(19): siRNA sense strand
guggacaccuguauaaaug

SEQ ID NO: 2000613 - RNA, 19 nt, Homo sapiens
  misc_RNA (1)...(19): siRNA sense strand
gggagaagauccaccacuu

SEQ ID NO: 2000614 - RNA, 19 nt, Homo sapiens
  misc_RNA (1)...(19): siRNA sense strand
ccacucagcuggucauucu

SEQ ID NO: 2000615 - RNA, 19 nt, Homo sapiens
  misc_RNA (1)...(19): siRNA sense strand
gaacuucggagcaacaaug

SEQ ID NO: 2000616 - RNA, 19 nt, Homo sapiens
  misc_RNA (1)...(19): siRNA sense strand
ggauauaaguagcaagcuu

SEQ ID NO: 2000617 - RNA, 19 nt, Homo sapiens
  misc_RNA (1)...(19): siRNA sense strand
ucauuaagguguacuugaa

SEQ ID NO: 2000618 - RNA, 19 nt, Homo sapiens
  misc_RNA (1)...(19): siRNA sense strand
gccaggaacugccuacaga

SEQ ID NO: 2000619 - RNA, 19 nt, Homo sapiens
  misc_RNA (1)...(19): siRNA sense strand
uuaaccagcugaagaguga

SEQ ID NO: 2000620 - RNA, 19 nt, Homo sapiens
  misc_RNA (1)...(19): siRNA sense strand
ggagguggcccuagaggaa

SEQ ID NO: 2000621 - RNA, 19 nt, Homo sapiens
  misc_RNA (1)...(19): siRNA sense strand
gcagaaagaggcagaaguc

SEQ ID NO: 2000622 - RNA, 19 nt, Homo sapiens
  misc_RNA (1)...(19): siRNA sense strand
agaugaacuugaacacaua

SEQ ID NO: 2000623 - RNA, 19 nt, Homo sapiens
  misc_RNA (1)...(19): siRNA sense strand
ggacagaguggagcagaaa

SEQ ID NO: 2000624 - RNA, 19 nt, Homo sapiens
  misc_RNA (1)...(19): siRNA sense strand
gagggaagcagaacaaagu

SEQ ID NO: 2000625 - RNA, 19 nt, Homo sapiens
  misc_RNA (1)...(19): siRNA sense strand
uccaggagcucaaggagaa

SEQ ID NO: 2000626 - RNA, 19 nt, Homo sapiens
  misc_RNA (1)...(19): siRNA sense strand
caagaugauucacgagaag

SEQ ID NO: 2000627 - RNA, 19 nt, Homo sapiens
  misc_RNA (1)...(19): siRNA sense strand
aaaguaauguggcccuuca

SEQ ID NO: 2000628 - RNA, 19 nt, Homo sapiens
  misc_RNA (1)...(19): siRNA sense strand
acaagaugauucacgagaa

SEQ ID NO: 2000629 - RNA, 19 nt, Homo sapiens
  misc_RNA (1)...(19): siRNA sense strand
ggagaagauccaccacuug

SEQ ID NO: 2000630 - RNA, 19 nt, Homo sapiens
  misc_RNA (1)...(19): siRNA sense strand
ggaagcagaacaaaguaau

SEQ ID NO: 2000631 - RNA, 19 nt, Homo sapiens
  misc_RNA (1)...(19): siRNA sense strand
ggcagagaauuuagagaug

SEQ ID NO: 2000632 - RNA, 19 nt, Homo sapiens
  misc_RNA (1)...(19): siRNA sense strand
ggauggaacaccugauaga

SEQ ID NO: 2000633 - RNA, 19 nt, Homo sapiens
  misc_RNA (1)...(19): siRNA sense strand
gacaggaaccuaggagauu

SEQ ID NO: 2000634 - RNA, 19 nt, Homo sapiens
  misc_RNA (1)...(19): siRNA sense strand
ggacaccuguauaaaugag

SEQ ID NO: 2000635 - RNA, 19 nt, Homo sapiens
  misc_RNA (1)...(19): siRNA sense strand
gaagcagaacaaaguaaug

SEQ ID NO: 2000636 - RNA, 19 nt, Homo sapiens
  misc_RNA (1)...(19): siRNA sense strand
agagugagguccaguacau

SEQ ID NO: 2000637 - RNA, 19 nt, Homo sapiens
  misc_RNA (1)...(19): siRNA sense strand
guauaaaugaggauguuga

SEQ ID NO: 2000638 - RNA, 19 nt, Homo sapiens
  misc_RNA (1)...(19): siRNA sense strand
ggagauacagguggugcua

SEQ ID NO: 2000639 - RNA, 19 nt, Homo sapiens
  misc_RNA (1)...(19): siRNA sense strand
gacggagcaucaggccuua

SEQ ID NO: 2000640 - RNA, 19 nt, Homo sapiens
  misc_RNA (1)...(19): siRNA sense strand
uaauguggcccuucagaga

SEQ ID NO: 2000641 - RNA, 19 nt, Homo sapiens
  misc_RNA (1)...(19): siRNA sense strand
ggaacugccuacagaagcu

SEQ ID NO: 2000642 - RNA, 19 nt, Homo sapiens
  misc_RNA (1)...(19): siRNA sense strand
gauggaacaccugauagaa

SEQ ID NO: 2000643 - RNA, 19 nt, Homo sapiens
  misc_RNA (1)...(19): siRNA sense strand
aagcugugauccagucaaa

SEQ ID NO: 2000644 - RNA, 19 nt, Homo sapiens
  misc_RNA (1)...(19): siRNA sense strand
ggaaaguccggcaaaugau

SEQ ID NO: 2000645 - RNA, 19 nt, Homo sapiens
  misc_RNA (1)...(19): siRNA sense strand
uagaggaacuucggagcaa

SEQ ID NO: 2000646 - RNA, 19 nt, Homo sapiens
  misc_RNA (1)...(19): siRNA sense strand
gggaagcagaacaaaguaa

SEQ ID NO: 2000647 - RNA, 19 nt, Homo sapiens
  misc_RNA (1)...(19): siRNA sense strand
gaagagugagguccaguac

SEQ ID NO: 2000648 - RNA, 19 nt, Homo sapiens
  misc_RNA (1)...(19): siRNA sense strand
agauacagguggugcuaga

SEQ ID NO: 2000649 - RNA, 19 nt, Homo sapiens
  misc_RNA (1)...(19): siRNA sense strand
gggaggauauaaguagcaa

SEQ ID NO: 2000650 - RNA, 19 nt, Homo sapiens
  misc_RNA (1)...(19): siRNA sense strand
aauauuaaccagcugaaga

SEQ ID NO: 2000651 - RNA, 19 nt, Homo sapiens
  misc_RNA (1)...(19): siRNA sense strand
ccagagggaagcagaacaa

SEQ ID NO: 2000652 - RNA, 19 nt, Homo sapiens
  misc_RNA (1)...(19): siRNA sense strand
ugacaggagaugaacuuga

SEQ ID NO: 2000653 - RNA, 19 nt, Homo sapiens
  misc_RNA (1)...(19): siRNA sense strand
uggaacaccugauagaaaa

SEQ ID NO: 2000654 - RNA, 19 nt, Homo sapiens
  misc_RNA (1)...(19): siRNA sense strand
ccggauggaacaccugaua

SEQ ID NO: 2000655 - RNA, 19 nt, Homo sapiens
  misc_RNA (1)...(19): siRNA sense strand
ggagaugaacuugaacaca

SEQ ID NO: 2000656 - RNA, 19 nt, Homo sapiens
  misc_RNA (1)...(19): siRNA sense strand
ugaagagugagguccagua

SEQ ID NO: 2000657 - RNA, 19 nt, Homo sapiens
  misc_RNA (1)...(19): siRNA sense strand
aaucagucauggcaacuuc

SEQ ID NO: 2000658 - RNA, 19 nt, Homo sapiens
  misc_RNA (1)...(19): siRNA sense strand
acaggaaccuaggagauuc

SEQ ID NO: 2000659 - RNA, 19 nt, Homo sapiens
  misc_RNA (1)...(19): siRNA sense strand
ggagaucauuaagguguac

SEQ ID NO: 2000660 - RNA, 19 nt, Homo sapiens
  misc_RNA (1)...(19): siRNA sense strand
uggaugacaugcucaagag

SEQ ID NO: 2000661 - RNA, 19 nt, Homo sapiens
  misc_RNA (1)...(19): siRNA sense strand
gaacugacaggagaugaac

SEQ ID NO: 2000662 - RNA, 19 nt, Homo sapiens
  misc_RNA (1)...(19): siRNA sense strand
gaucauuaagguguacuug

SEQ ID NO: 2000663 - RNA, 19 nt, Homo sapiens
  misc_RNA (1)...(19): siRNA sense strand
aaaggcugcuacccuggaa

SEQ ID NO: 2000664 - RNA, 19 nt, Homo sapiens
  misc_RNA (1)...(19): siRNA sense strand
gaagacggugcaggacuug

SEQ ID NO: 2000665 - RNA, 19 nt, Homo sapiens
  misc_RNA (1)...(19): siRNA sense strand
ugacaggaaccuaggagau

SEQ ID NO: 2000666 - RNA, 19 nt, Homo sapiens
  misc_RNA (1)...(19): siRNA sense strand
cagagaauuuagagaugca

SEQ ID NO: 2000667 - RNA, 19 nt, Homo sapiens
  misc_RNA (1)...(19): siRNA sense strand
caaaggacgccaccaucca

SEQ ID NO: 2000668 - RNA, 19 nt, Homo sapiens
  misc_RNA (1)...(19): siRNA sense strand
ucagagagaggaggacaga

SEQ ID NO: 2000669 - RNA, 19 nt, Homo sapiens
  misc_RNA (1)...(19): siRNA sense strand
ggaggcagagaauuuagag

SEQ ID NO: 2000670 - RNA, 19 nt, Homo sapiens
  misc_RNA (1)...(19): siRNA sense strand
ugaacugacaggagaugaa

SEQ ID NO: 2000671 - RNA, 19 nt, Homo sapiens
  misc_RNA (1)...(19): siRNA sense strand
gcugugauccagucaaagg

SEQ ID NO: 2000672 - RNA, 19 nt, Homo sapiens
  misc_RNA (1)...(19): siRNA sense strand
gcaguauuaggauauccaa

SEQ ID NO: 2000673 - RNA, 19 nt, Homo sapiens
  misc_RNA (1)...(19): siRNA sense strand
auacagguggugcuagaaa

SEQ ID NO: 2000674 - RNA, 19 nt, Homo sapiens
  misc_RNA (1)...(19): siRNA sense strand
aggagaucauuaaggugua

SEQ ID NO: 2000675 - RNA, 19 nt, Homo sapiens
  misc_RNA (1)...(19): siRNA sense strand
auaaguagcaagcuugaca

SEQ ID NO: 2000676 - RNA, 19 nt, Homo sapiens
  misc_RNA (1)...(19): siRNA sense strand
gaggaacuucggagcaaca

SEQ ID NO: 2000677 - RNA, 19 nt, Homo sapiens
  misc_RNA (1)...(19): siRNA sense strand
aagcagaacaaaguaaugu

SEQ ID NO: 2000678 - RNA, 19 nt, Homo sapiens
  misc_RNA (1)...(19): siRNA sense strand
uugaacacauagcccagaa

SEQ ID NO: 2000679 - RNA, 19 nt, Homo sapiens
  misc_RNA (1)...(19): siRNA sense strand
cuguauaaaugaggauguu

SEQ ID NO: 2000680 - RNA, 19 nt, Homo sapiens
  misc_RNA (1)...(19): siRNA sense strand
agagagaggaggacagagu

SEQ ID NO: 2000681 - RNA, 19 nt, Homo sapiens
  misc_RNA (1)...(19): siRNA sense strand
guaccagagggaagcagaa

SEQ ID NO: 2000682 - RNA, 19 nt, Homo sapiens
  misc_RNA (1)...(19): siRNA sense strand
ccaggaacugccuacagaa

SEQ ID NO: 2000683 - RNA, 19 nt, Homo sapiens
  misc_RNA (1)...(19): siRNA sense strand
agaauuuagagaugcauga

SEQ ID NO: 2000684 - RNA, 19 nt, Homo sapiens
  misc_RNA (1)...(19): siRNA sense strand
aggcagagaauuuagagau

SEQ ID NO: 2000685 - RNA, 19 nt, Homo sapiens
  misc_RNA (1)...(19): siRNA sense strand
gaauauuaaccagcugaag

SEQ ID NO: 2000686 - RNA, 19 nt, Homo sapiens
  misc_RNA (1)...(19): siRNA sense strand
ugauggacaugaggagauc

SEQ ID NO: 2000687 - RNA, 19 nt, Homo sapiens
  misc_RNA (1)...(19): siRNA sense strand
augaggauguugagagcuu

SEQ ID NO: 2000688 - RNA, 19 nt, Homo sapiens
  misc_RNA (1)...(19): siRNA sense strand
gauaaugacuuccugauuu

SEQ ID NO: 2000689 - RNA, 19 nt, Homo sapiens
  misc_RNA (1)...(19): siRNA sense strand
ggaaacuugugaaugauaa

SEQ ID NO: 2000690 - RNA, 19 nt, Homo sapiens
  misc_RNA (1)...(19): siRNA sense strand
gagaaaguguucacgguuu

SEQ ID NO: 2000691 - RNA, 19 nt, Homo sapiens
  misc_RNA (1)...(19): siRNA sense strand
gacguaacaucaacagaua

SEQ ID NO: 2000692 - RNA, 19 nt, Homo sapiens
  misc_RNA (1)...(19): siRNA sense strand
acaaguaucaggacaauua

SEQ ID NO: 2000693 - RNA, 19 nt, Homo sapiens
  misc_RNA (1)...(19): siRNA sense strand
gaugaagccuggaugauuc

SEQ ID NO: 2000694 - RNA, 19 nt, Homo sapiens
  misc_RNA (1)...(19): siRNA sense strand
ccaagcaaauggaugaauu

SEQ ID NO: 2000695 - RNA, 19 nt, Homo sapiens
  misc_RNA (1)...(19): siRNA sense strand
ggagcaagauaaugacuuc

SEQ ID NO: 2000696 - RNA, 19 nt, Homo sapiens
  misc_RNA (1)...(19): siRNA sense strand
ggaaugcucuggaugugau

SEQ ID NO: 2000697 - RNA, 19 nt, Homo sapiens
  misc_RNA (1)...(19): siRNA sense strand
caacagauaccuacuucaa

SEQ ID NO: 2000698 - RNA, 19 nt, Homo sapiens
  misc_RNA (1)...(19): siRNA sense strand
cagaaugaauacacugauu

SEQ ID NO: 2000699 - RNA, 19 nt, Homo sapiens
  misc_RNA (1)...(19): siRNA sense strand
ucaagcaggucugggauaa

SEQ ID NO: 2000700 - RNA, 19 nt, Homo sapiens
  misc_RNA (1)...(19): siRNA sense strand
ggaaacaccaucuuugcuu

SEQ ID NO: 2000701 - RNA, 19 nt, Homo sapiens
  misc_RNA (1)...(19): siRNA sense strand
gaugaagaauacaagucua

SEQ ID NO: 2000702 - RNA, 19 nt, Homo sapiens
  misc_RNA (1)...(19): siRNA sense strand
gcucauggauagaauugga

SEQ ID NO: 2000703 - RNA, 19 nt, Homo sapiens
  misc_RNA (1)...(19): siRNA sense strand
ucauugagauccaaaguuc

SEQ ID NO: 2000704 - RNA, 19 nt, Homo sapiens
  misc_RNA (1)...(19): siRNA sense strand
agaagaagaugcacagagu

SEQ ID NO: 2000705 - RNA, 19 nt, Homo sapiens
  misc_RNA (1)...(19): siRNA sense strand
acaguuugguuuccugaua

SEQ ID NO: 2000706 - RNA, 19 nt, Homo sapiens
  misc_RNA (1)...(19): siRNA sense strand
cgaaggccaugaugaggaa

SEQ ID NO: 2000707 - RNA, 19 nt, Homo sapiens
  misc_RNA (1)...(19): siRNA sense strand
caacaugggaaacuuguga

SEQ ID NO: 2000708 - RNA, 19 nt, Homo sapiens
  misc_RNA (1)...(19): siRNA sense strand
ccagagagcccaagguuuc

SEQ ID NO: 2000709 - RNA, 19 nt, Homo sapiens
  misc_RNA (1)...(19): siRNA sense strand
cugagaggcuggaagauga

SEQ ID NO: 2000710 - RNA, 19 nt, Homo sapiens
  misc_RNA (1)...(19): siRNA sense strand
gcaacagccuucggcauuc

SEQ ID NO: 2000711 - RNA, 19 nt, Homo sapiens
  misc_RNA (1)...(19): siRNA sense strand
gaaggagggcugccacaug

SEQ ID NO: 2000712 - RNA, 19 nt, Homo sapiens
  misc_RNA (1)...(19): siRNA sense strand
gauaaguucacaagaaugu

SEQ ID NO: 2000713 - RNA, 19 nt, Homo sapiens
  misc_RNA (1)...(19): siRNA sense strand
ggaaggcucaagaugauug

SEQ ID NO: 2000714 - RNA, 19 nt, Homo sapiens
  misc_RNA (1)...(19): siRNA sense strand
gaagaugcacagagugaug

SEQ ID NO: 2000715 - RNA, 19 nt, Homo sapiens
  misc_RNA (1)...(19): siRNA sense strand
ugggaggccuggcugauaa

SEQ ID NO: 2000716 - RNA, 19 nt, Homo sapiens
  misc_RNA (1)...(19): siRNA sense strand
ccaauuaccacuuccauag

SEQ ID NO: 2000717 - RNA, 19 nt, Homo sapiens
  misc_RNA (1)...(19): siRNA sense strand
uaacaucaacagauaccua

SEQ ID NO: 2000718 - RNA, 19 nt, Homo sapiens
  misc_RNA (1)...(19): siRNA sense strand
caagguuucugcuagagau

SEQ ID NO: 2000719 - RNA, 19 nt, Homo sapiens
  misc_RNA (1)...(19): siRNA sense strand
ugauuuaccucgucagcuu

SEQ ID NO: 2000720 - RNA, 19 nt, Homo sapiens
  misc_RNA (1)...(19): siRNA sense strand
gggaaacuugugaaugaua

SEQ ID NO: 2000721 - RNA, 19 nt, Homo sapiens
  misc_RNA (1)...(19): siRNA sense strand
augggaaacuugugaauga

SEQ ID NO: 2000722 - RNA, 19 nt, Homo sapiens
  misc_RNA (1)...(19): siRNA sense strand
gcaguuggcccaccaguac

SEQ ID NO: 2000723 - RNA, 19 nt, Homo sapiens
  misc_RNA (1)...(19): siRNA sense strand
ggaugauucucaagcaagu

SEQ ID NO: 2000724 - RNA, 19 nt, Homo sapiens
  misc_RNA (1)...(19): siRNA sense strand
gcaugucucuggccgucaa

SEQ ID NO: 2000725 - RNA, 19 nt, Homo sapiens
  misc_RNA (1)...(19): siRNA sense strand
cugauaagcugggaaggaa

SEQ ID NO: 2000726 - RNA, 19 nt, Homo sapiens
  misc_RNA (1)...(19): siRNA sense strand
uucaucaacugucgguuua

SEQ ID NO: 2000727 - RNA, 19 nt, Homo sapiens
  misc_RNA (1)...(19): siRNA sense strand
aagcaggucugggauaaug

SEQ ID NO: 2000728 - RNA, 19 nt, Homo sapiens
  misc_RNA (1)...(19): siRNA sense strand
gagcaucaucccacacuau

SEQ ID NO: 2000729 - RNA, 19 nt, Homo sapiens
  misc_RNA (1)...(19): siRNA sense strand
gccauggccuggagcauca

SEQ ID NO: 2000730 - RNA, 19 nt, Homo sapiens
  misc_RNA (1)...(19): siRNA sense strand
gagaugggcaaacaugaug

SEQ ID NO: 2000731 - RNA, 19 nt, Homo sapiens
  misc_RNA (1)...(19): siRNA sense strand
gggcagccugucugucuua

SEQ ID NO: 2000732 - RNA, 19 nt, Homo sapiens
  misc_RNA (1)...(19): siRNA sense strand
auaaugcccuguacugugu

SEQ ID NO: 2000733 - RNA, 19 nt, Homo sapiens
  misc_RNA (1)...(19): siRNA sense strand
ggagcaucaucccacacua

SEQ ID NO: 2000734 - RNA, 19 nt, Homo sapiens
  misc_RNA (1)...(19): siRNA sense strand
caacagugagucugcaaug

SEQ ID NO: 2000735 - RNA, 19 nt, Homo sapiens
  misc_RNA (1)...(19): siRNA sense strand
caucaaaacucccaagcaa

SEQ ID NO: 2000736 - RNA, 19 nt, Homo sapiens
  misc_RNA (1)...(19): siRNA sense strand
gcccaagguuucugcuaga

SEQ ID NO: 2000737 - RNA, 19 nt, Homo sapiens
  misc_RNA (1)...(19): siRNA sense strand
ggaaugcuagggaugauag

SEQ ID NO: 2000738 - RNA, 19 nt, Homo sapiens
  misc_RNA (1)...(19): siRNA sense strand
guucaucaacugucgguuu

SEQ ID NO: 2000739 - RNA, 19 nt, Homo sapiens
  misc_RNA (1)...(19): siRNA sense strand
ccaccaacaugggaaacuu

SEQ ID NO: 2000740 - RNA, 19 nt, Homo sapiens
  misc_RNA (1)...(19): siRNA sense strand
cuacaaguaucaggacaau

SEQ ID NO: 2000741 - RNA, 19 nt, Homo sapiens
  misc_RNA (1)...(19): siRNA sense strand
acaccaacaugagagcuaa

SEQ ID NO: 2000742 - RNA, 19 nt, Homo sapiens
  misc_RNA (1)...(19): siRNA sense strand
ccaccuuccuggagcagaa

SEQ ID NO: 2000743 - RNA, 19 nt, Homo sapiens
  misc_RNA (1)...(19): siRNA sense strand
acagauaccuacuucaaaa

SEQ ID NO: 2000744 - RNA, 19 nt, Homo sapiens
  misc_RNA (1)...(19): siRNA sense strand
ggcauucaguuacuaugga

SEQ ID NO: 2000745 - RNA, 19 nt, Homo sapiens
  misc_RNA (1)...(19): siRNA sense strand
cucaauggauuaugcaaau

SEQ ID NO: 2000746 - RNA, 19 nt, Homo sapiens
  misc_RNA (1)...(19): siRNA sense strand
ucacccagaugaugucaag

SEQ ID NO: 2000747 - RNA, 19 nt, Homo sapiens
  misc_RNA (1)...(19): siRNA sense strand
gggcuaugcucccagugau

SEQ ID NO: 2000748 - RNA, 19 nt, Homo sapiens
  misc_RNA (1)...(19): siRNA sense strand
gauaugauccgcuauuuuc

SEQ ID NO: 2000749 - RNA, 19 nt, Homo sapiens
  misc_RNA (1)...(19): siRNA sense strand
ggaagcgaguccucagcau

SEQ ID NO: 2000750 - RNA, 19 nt, Homo sapiens
  misc_RNA (1)...(19): siRNA sense strand
ugaugaagccuggaugauu

SEQ ID NO: 2000751 - RNA, 19 nt, Homo sapiens
  misc_RNA (1)...(19): siRNA sense strand
caguuugguuuccugauau

SEQ ID NO: 2000752 - RNA, 19 nt, Homo sapiens
  misc_RNA (1)...(19): siRNA sense strand
acaugugucuguccaguuc

SEQ ID NO: 2000753 - RNA, 19 nt, Homo sapiens
  misc_RNA (1)...(19): siRNA sense strand
aaucagauccaccaacaug

SEQ ID NO: 2000754 - RNA, 19 nt, Homo sapiens
  misc_RNA (1)...(19): siRNA sense strand
ucaguuggcugggcaucuu

SEQ ID NO: 2000755 - RNA, 19 nt, Homo sapiens
  misc_RNA (1)...(19): siRNA sense strand
ggagaguguuugucaucgu

SEQ ID NO: 2000756 - RNA, 19 nt, Homo sapiens
  misc_RNA (1)...(19): siRNA sense strand
caucaacugucgguuuauc

SEQ ID NO: 2000757 - RNA, 19 nt, Homo sapiens
  misc_RNA (1)...(19): siRNA sense strand
cugauaugauccgcuauuu

SEQ ID NO: 2000758 - RNA, 19 nt, Homo sapiens
  misc_RNA (1)...(19): siRNA sense strand
gggauaaugcccuguacug

SEQ ID NO: 2000759 - RNA, 19 nt, Homo sapiens
  misc_RNA (1)...(19): siRNA sense strand
auugguggcuccaugcuaa

SEQ ID NO: 2000760 - RNA, 19 nt, Homo sapiens
  misc_RNA (1)...(19): siRNA sense strand
caaucaacuucacgaugga

SEQ ID NO: 2000761 - RNA, 19 nt, Homo sapiens
  misc_RNA (1)...(19): siRNA sense strand
aagaagaugcacagaguga

SEQ ID NO: 2000762 - RNA, 19 nt, Homo sapiens
  misc_RNA (1)...(19): siRNA sense strand
caacagccuucggcauucu

SEQ ID NO: 2000763 - RNA, 19 nt, Homo sapiens
  misc_RNA (1)...(19): siRNA sense strand
ugaggaagacgagaucuau

SEQ ID NO: 2000764 - RNA, 19 nt, Homo sapiens
  misc_RNA (1)...(19): siRNA sense strand
gaauuggaaggcucaagau

SEQ ID NO: 2000765 - RNA, 19 nt, Homo sapiens
  misc_RNA (1)...(19): siRNA sense strand
gcugagaggcuggaagaug

SEQ ID NO: 2000766 - RNA, 19 nt, Homo sapiens
  misc_RNA (1)...(19): siRNA sense strand
ggauaaugcccuguacugu

SEQ ID NO: 2000767 - RNA, 19 nt, Homo sapiens
  misc_RNA (1)...(19): siRNA sense strand
guucacgguuuccaacauc

SEQ ID NO: 2000768 - RNA, 19 nt, Homo sapiens
  misc_RNA (1)...(19): siRNA sense strand
aggaagacgagaucuauga

SEQ ID NO: 2000769 - RNA, 19 nt, Homo sapiens
  misc_RNA (1)...(19): siRNA sense strand
caucuuugcuucuuuuguu

SEQ ID NO: 2000770 - RNA, 19 nt, Homo sapiens
  misc_RNA (1)...(19): siRNA sense strand
cagugagucugcaaugauc

SEQ ID NO: 2000771 - RNA, 19 nt, Homo sapiens
  misc_RNA (1)...(19): siRNA sense strand
uuggaaggcucaagaugau

SEQ ID NO: 2000772 - RNA, 19 nt, Homo sapiens
  misc_RNA (1)...(19): siRNA sense strand
agacguaacaucaacagau

SEQ ID NO: 2000773 - RNA, 19 nt, Homo sapiens
  misc_RNA (1)...(19): siRNA sense strand
gaaugauaaguucacaaga

SEQ ID NO: 2000774 - RNA, 19 nt, Homo sapiens
  misc_RNA (1)...(19): siRNA sense strand
caagcaaauggaugaauuc

SEQ ID NO: 2000775 - RNA, 19 nt, Homo sapiens
  misc_RNA (1)...(19): siRNA sense strand
gugcagagaaggacaugug

SEQ ID NO: 2000776 - RNA, 19 nt, Homo sapiens
  misc_RNA (1)...(19): siRNA sense strand
gccagagacucgagaacag

SEQ ID NO: 2000777 - RNA, 19 nt, Homo sapiens
  misc_RNA (1)...(19): siRNA sense strand
acaccaucuuugcuucuuu

SEQ ID NO: 2000778 - RNA, 19 nt, Homo sapiens
  misc_RNA (1)...(19): siRNA sense strand
ccacauggacuuggagcaa

SEQ ID NO: 2000779 - RNA, 19 nt, Homo sapiens
  misc_RNA (1)...(19): siRNA sense strand
caucaacagauaccuacuu

SEQ ID NO: 2000780 - RNA, 19 nt, Homo sapiens
  misc_RNA (1)...(19): siRNA sense strand
ggaagaugaggagcaguug

SEQ ID NO: 2000781 - RNA, 19 nt, Homo sapiens
  misc_RNA (1)...(19): siRNA sense strand
gauagucuacuugggaaug

SEQ ID NO: 2000782 - RNA, 19 nt, Homo sapiens
  misc_RNA (1)...(19): siRNA sense strand
aaaggaaugcuagggauga

SEQ ID NO: 2000783 - RNA, 19 nt, Homo sapiens
  misc_RNA (1)...(19): siRNA sense strand
ggugcucuaccgauuguuu

SEQ ID NO: 2000784 - RNA, 19 nt, Homo sapiens
  misc_RNA (1)...(19): siRNA sense strand
gaaguguucguggugaguu

SEQ ID NO: 2000785 - RNA, 19 nt, Homo sapiens
  misc_RNA (1)...(19): siRNA sense strand
caaugaguccaacccagaa

SEQ ID NO: 2000786 - RNA, 19 nt, Homo sapiens
  misc_RNA (1)...(19): siRNA sense strand
auccaaaguucaacaggaa

SEQ ID NO: 2000787 - RNA, 19 nt, Homo sapiens
  misc_RNA (1)...(19): siRNA sense strand
ugaauucauugagauccaa

SEQ ID NO: 2000788 - RNA, 19 nt, Homo sapiens
  misc_RNA (1)...(19): siRNA sense strand
uaagagaacuccagauuug

SEQ ID NO: 2000789 - RNA, 19 nt, Homo sapiens
  misc_RNA (1)...(19): siRNA sense strand
ggaaagcgauggagaagag

SEQ ID NO: 2000790 - RNA, 19 nt, Homo sapiens
  misc_RNA (1)...(19): siRNA sense strand
gaugagagcccuccugauu

SEQ ID NO: 2000791 - RNA, 19 nt, Homo sapiens
  misc_RNA (1)...(19): siRNA sense strand
gaaugaagaagcagucaaa

SEQ ID NO: 2000792 - RNA, 19 nt, Homo sapiens
  misc_RNA (1)...(19): siRNA sense strand
gaagaaauccaggagaaug

SEQ ID NO: 2000793 - RNA, 19 nt, Homo sapiens
  misc_RNA (1)...(19): siRNA sense strand
gcagcuccauguccuucua

SEQ ID NO: 2000794 - RNA, 19 nt, Homo sapiens
  misc_RNA (1)...(19): siRNA sense strand
aagaguaugugaaggaaga

SEQ ID NO: 2000795 - RNA, 19 nt, Homo sapiens
  misc_RNA (1)...(19): siRNA sense strand
gguaacgccuuguggaaag

SEQ ID NO: 2000796 - RNA, 19 nt, Homo sapiens
  misc_RNA (1)...(19): siRNA sense strand
aauaagagaacuccagauu

SEQ ID NO: 2000797 - RNA, 19 nt, Homo sapiens
  misc_RNA (1)...(19): siRNA sense strand
aggaagaaauccaggagaa

SEQ ID NO: 2000798 - RNA, 19 nt, Homo sapiens
  misc_RNA (1)...(19): siRNA sense strand
cagaaacacagccugauga

SEQ ID NO: 2000799 - RNA, 19 nt, Homo sapiens
  misc_RNA (1)...(19): siRNA sense strand
ggaagccacccgggaguuu

SEQ ID NO: 2000800 - RNA, 19 nt, Homo sapiens
  misc_RNA (1)...(19): siRNA sense strand
ugagagcccuccugauuuu

SEQ ID NO: 2000801 - RNA, 19 nt, Homo sapiens
  misc_RNA (1)...(19): siRNA sense strand
ccagcuccgucacagguaa

SEQ ID NO: 2000802 - RNA, 19 nt, Homo sapiens
  misc_RNA (1)...(19): siRNA sense strand
ccaggagaaugaagaagca

SEQ ID NO: 2000803 - RNA, 19 nt, Homo sapiens
  misc_RNA (1)...(19): siRNA sense strand
cagauuugccugaagaaga

SEQ ID NO: 2000804 - RNA, 19 nt, Homo sapiens
  misc_RNA (1)...(19): siRNA sense strand
gaaccacagaauaagagaa

SEQ ID NO: 2000805 - RNA, 19 nt, Homo sapiens
  misc_RNA (1)...(19): siRNA sense strand
ggaagaaauccaggagaau

SEQ ID NO: 2000806 - RNA, 19 nt, Homo sapiens
  misc_RNA (1)...(19): siRNA sense strand
ugaagaagaguaugugaag

SEQ ID NO: 2000807 - RNA, 19 nt, Homo sapiens
  misc_RNA (1)...(19): siRNA sense strand
gaaggaccgcuaccucaag

SEQ ID NO: 2000808 - RNA, 19 nt, Homo sapiens
  misc_RNA (1)...(19): siRNA sense strand
agaagaguaugugaaggaa

SEQ ID NO: 2000809 - RNA, 19 nt, Homo sapiens
  misc_RNA (1)...(19): siRNA sense strand
auaagagaacuccagauuu

SEQ ID NO: 2000810 - RNA, 19 nt, Homo sapiens
  misc_RNA (1)...(19): siRNA sense strand
uaacuaugugugaugauga

SEQ ID NO: 2000811 - RNA, 19 nt, Homo sapiens
  misc_RNA (1)...(19): siRNA sense strand
gaggaagacucagaaacac

SEQ ID NO: 2000812 - RNA, 19 nt, Homo sapiens
  misc_RNA (1)...(19): siRNA sense strand
aagaaauccaggagaauga

SEQ ID NO: 2000813 - RNA, 19 nt, Homo sapiens
  misc_RNA (1)...(19): siRNA sense strand
ggacgacguagccauccuu

SEQ ID NO: 2000814 - RNA, 19 nt, Homo sapiens
  misc_RNA (1)...(19): siRNA sense strand
gaagccacccgggaguuug

SEQ ID NO: 2000815 - RNA, 19 nt, Homo sapiens
  misc_RNA (1)...(19): siRNA sense strand
aagaagaguaugugaagga

SEQ ID NO: 2000816 - RNA, 19 nt, Homo sapiens
  misc_RNA (1)...(19): siRNA sense strand
gacgacguagccauccuua

SEQ ID NO: 2000817 - RNA, 19 nt, Homo sapiens
  misc_RNA (1)...(19): siRNA sense strand
ggccucgggugauuucauc

SEQ ID NO: 2000818 - RNA, 19 nt, Homo sapiens
  misc_RNA (1)...(19): siRNA sense strand
agauuugccugaagaagag

SEQ ID NO: 2000819 - RNA, 19 nt, Homo sapiens
  misc_RNA (1)...(19): siRNA sense strand
ggaaccacagaauaagaga

SEQ ID NO: 2000820 - RNA, 19 nt, Homo sapiens
  misc_RNA (1)...(19): siRNA sense strand
cagguaacgccuuguggaa

SEQ ID NO: 2000821 - RNA, 19 nt, Homo sapiens
  misc_RNA (1)...(19): siRNA sense strand
auaacuaugugugaugaug

SEQ ID NO: 2000822 - RNA, 19 nt, Homo sapiens
  misc_RNA (1)...(19): siRNA sense strand
cuccagauuugccugaaga

SEQ ID NO: 2000823 - RNA, 19 nt, Homo sapiens
  misc_RNA (1)...(19): siRNA sense strand
gaauaagagaacuccagau

SEQ ID NO: 2000824 - RNA, 19 nt, Homo sapiens
  misc_RNA (1)...(19): siRNA sense strand
ugaaggaccgcuaccucaa

SEQ ID NO: 2000825 - RNA, 19 nt, Homo sapiens
  misc_RNA (1)...(19): siRNA sense strand
gaaauccaggagaaugaag

SEQ ID NO: 2000826 - RNA, 19 nt, Homo sapiens
  misc_RNA (1)...(19): siRNA sense strand
gcggggaaccacagaauaa

SEQ ID NO: 2000827 - RNA, 19 nt, Homo sapiens
  misc_RNA (1)...(19): siRNA sense strand
gggaaccacagaauaagag

SEQ ID NO: 2000828 - RNA, 19 nt, Homo sapiens
  misc_RNA (1)...(19): siRNA sense strand
gacaccggcucggaagcaa

SEQ ID NO: 2000829 - RNA, 19 nt, Homo sapiens
  misc_RNA (1)...(19): siRNA sense strand
uuaccuacgugaaggaaaa

SEQ ID NO: 2000830 - RNA, 19 nt, Homo sapiens
  misc_RNA (1)...(19): siRNA sense strand
gacgacggcagcuccaugu

SEQ ID NO: 2000831 - RNA, 19 nt, Homo sapiens
  misc_RNA (1)...(19): siRNA sense strand
guaugugaaggaagaaauc

SEQ ID NO: 2000832 - RNA, 19 nt, Homo sapiens
  misc_RNA (1)...(19): siRNA sense strand
gagaaugaagaagcaguca

SEQ ID NO: 2000833 - RNA, 19 nt, Homo sapiens
  misc_RNA (1)...(19): siRNA sense strand
gaacaacacuggccacuuu

SEQ ID NO: 2000834 - RNA, 19 nt, Homo sapiens
  misc_RNA (1)...(19): siRNA sense strand
gaacagagauccacacaga

SEQ ID NO: 2000835 - RNA, 19 nt, Homo sapiens
  misc_RNA (1)...(19): siRNA sense strand
gcagauaucucagggcuaa

SEQ ID NO: 2000836 - RNA, 19 nt, Homo sapiens
  misc_RNA (1)...(19): siRNA sense strand
gaugauaacuauggcaaua

SEQ ID NO: 2000837 - RNA, 19 nt, Homo sapiens
  misc_RNA (1)...(19): siRNA sense strand
gaaucauccucuacaauuu

SEQ ID NO: 2000838 - RNA, 19 nt, Homo sapiens
  misc_RNA (1)...(19): siRNA sense strand
caauggagaugucaacaga

SEQ ID NO: 2000839 - RNA, 19 nt, Homo sapiens
  misc_RNA (1)...(19): siRNA sense strand
gaaaggauuuggugauguc

SEQ ID NO: 2000840 - RNA, 19 nt, Homo sapiens
  misc_RNA (1)...(19): siRNA sense strand
ggaaugaagaucuuucuga

SEQ ID NO: 2000841 - RNA, 19 nt, Homo sapiens
  misc_RNA (1)...(19): siRNA sense strand
gaauugaccuugcuguucu

SEQ ID NO: 2000842 - RNA, 19 nt, Homo sapiens
  misc_RNA (1)...(19): siRNA sense strand
caacaagucugccuacaac

SEQ ID NO: 2000843 - RNA, 19 nt, Homo sapiens
  misc_RNA (1)...(19): siRNA sense strand
caucuacaauggagaauga

SEQ ID NO: 2000844 - RNA, 19 nt, Homo sapiens
  misc_RNA (1)...(19): siRNA sense strand
gaagacaccaucuacaaug

SEQ ID NO: 2000845 - RNA, 19 nt, Homo sapiens
  misc_RNA (1)...(19): siRNA sense strand
gcaagaaccaggaugaaug

SEQ ID NO: 2000846 - RNA, 19 nt, Homo sapiens
  misc_RNA (1)...(19): siRNA sense strand
gaucuucacugccucuaau

SEQ ID NO: 2000847 - RNA, 19 nt, Homo sapiens
  misc_RNA (1)...(19): siRNA sense strand
ugacaucggugggcacuaa

SEQ ID NO: 2000848 - RNA, 19 nt, Homo sapiens
  misc_RNA (1)...(19): siRNA sense strand
ccauaaugaugcugacuuu

SEQ ID NO: 2000849 - RNA, 19 nt, Homo sapiens
  misc_RNA (1)...(19): siRNA sense strand
gcuaaaggcggcaguacua

SEQ ID NO: 2000850 - RNA, 19 nt, Homo sapiens
  misc_RNA (1)...(19): siRNA sense strand
gcucugcagugaaaucuga

SEQ ID NO: 2000851 - RNA, 19 nt, Homo sapiens
  misc_RNA (1)...(19): siRNA sense strand
ccucuacaauuucaucuaa

SEQ ID NO: 2000852 - RNA, 19 nt, Homo sapiens
  misc_RNA (1)...(19): siRNA sense strand
gugaggagauuccaaauac

SEQ ID NO: 2000853 - RNA, 19 nt, Homo sapiens
  misc_RNA (1)...(19): siRNA sense strand
ggauaugggucucauggau

SEQ ID NO: 2000854 - RNA, 19 nt, Homo sapiens
  misc_RNA (1)...(19): siRNA sense strand
caacacagcagcacguuau

SEQ ID NO: 2000855 - RNA, 19 nt, Homo sapiens
  misc_RNA (1)...(19): siRNA sense strand
ggucagagccuguccuuuc

SEQ ID NO: 2000856 - RNA, 19 nt, Homo sapiens
  misc_RNA (1)...(19): siRNA sense strand
gaggagauuccaaauacua

SEQ ID NO: 2000857 - RNA, 19 nt, Homo sapiens
  misc_RNA (1)...(19): siRNA sense strand
gaaggugaaacaauugauu

SEQ ID NO: 2000858 - RNA, 19 nt, Homo sapiens
  misc_RNA (1)...(19): siRNA sense strand
ccacagaugucgccuggau

SEQ ID NO: 2000859 - RNA, 19 nt, Homo sapiens
  misc_RNA (1)...(19): siRNA sense strand
caaauuagacuugcacaga

SEQ ID NO: 2000860 - RNA, 19 nt, Homo sapiens
  misc_RNA (1)...(19): siRNA sense strand
gcagaacaaauuagacuug

SEQ ID NO: 2000861 - RNA, 19 nt, Homo sapiens
  misc_RNA (1)...(19): siRNA sense strand
gauaugggucucauggaua

SEQ ID NO: 2000862 - RNA, 19 nt, Homo sapiens
  misc_RNA (1)...(19): siRNA sense strand
gcaaagaauggcuucaguu

SEQ ID NO: 2000863 - RNA, 19 nt, Homo sapiens
  misc_RNA (1)...(19): siRNA sense strand
ugaaucauccucuacaauu

SEQ ID NO: 2000864 - RNA, 19 nt, Homo sapiens
  misc_RNA (1)...(19): siRNA sense strand
ggaaaggauuuggugaugu

SEQ ID NO: 2000865 - RNA, 19 nt, Homo sapiens
  misc_RNA (1)...(19): siRNA sense strand
gggaaaggauuuggugaug

SEQ ID NO: 2000866 - RNA, 19 nt, Homo sapiens
  misc_RNA (1)...(19): siRNA sense strand
ggacugaagauuggaauga

SEQ ID NO: 2000867 - RNA, 19 nt, Homo sapiens
  misc_RNA (1)...(19): siRNA sense strand
aggagaaggugaaacaauu

SEQ ID NO: 2000868 - RNA, 19 nt, Homo sapiens
  misc_RNA (1)...(19): siRNA sense strand
uaacccagcugauuaugca

SEQ ID NO: 2000869 - RNA, 19 nt, Homo sapiens
  misc_RNA (1)...(19): siRNA sense strand
gaauacccuuucaucauca

SEQ ID NO: 2000870 - RNA, 19 nt, Homo sapiens
  misc_RNA (1)...(19): siRNA sense strand
gcucagggcccucuuuaug

SEQ ID NO: 2000871 - RNA, 19 nt, Homo sapiens
  misc_RNA (1)...(19): siRNA sense strand
ggcaauagcagcggcaaua

SEQ ID NO: 2000872 - RNA, 19 nt, Homo sapiens
  misc_RNA (1)...(19): siRNA sense strand
agaauacccuuucaucauc

SEQ ID NO: 2000873 - RNA, 19 nt, Homo sapiens
  misc_RNA (1)...(19): siRNA sense strand
gcagaauacccuuucauca

SEQ ID NO: 2000874 - RNA, 19 nt, Homo sapiens
  misc_RNA (1)...(19): siRNA sense strand
gaagaacccaagugauuca

SEQ ID NO: 2000875 - RNA, 19 nt, Homo sapiens
  misc_RNA (1)...(19): siRNA sense strand
ccucugguguucaguaauu

SEQ ID NO: 2000876 - RNA, 19 nt, Homo sapiens
  misc_RNA (1)...(19): siRNA sense strand
ggcaauacguggaacaaca

SEQ ID NO: 2000877 - RNA, 19 nt, Homo sapiens
  misc_RNA (1)...(19): siRNA sense strand
gggaagacaccaucuacaa

SEQ ID NO: 2000878 - RNA, 19 nt, Homo sapiens
  misc_RNA (1)...(19): siRNA sense strand
ucagggcccucuuuaugaa

SEQ ID NO: 2000879 - RNA, 19 nt, Homo sapiens
  misc_RNA (1)...(19): siRNA sense strand
ccaaguagccuguauacca

SEQ ID NO: 2000880 - RNA, 19 nt, Homo sapiens
  misc_RNA (1)...(19): siRNA sense strand
ggaagacaccaucuacaau

SEQ ID NO: 2000881 - RNA, 19 nt, Homo sapiens
  misc_RNA (1)...(19): siRNA sense strand
gaagaagaagggagucuca

SEQ ID NO: 2000882 - RNA, 19 nt, Homo sapiens
  misc_RNA (1)...(19): siRNA sense strand
acaccagccugccauacua

SEQ ID NO: 2000883 - RNA, 19 nt, Homo sapiens
  misc_RNA (1)...(19): siRNA sense strand
gcuacaggcucugcaguga

SEQ ID NO: 2000884 - RNA, 19 nt, Homo sapiens
  misc_RNA (1)...(19): siRNA sense strand
ggagaaggugaaacaauug

SEQ ID NO: 2000885 - RNA, 19 nt, Homo sapiens
  misc_RNA (1)...(19): siRNA sense strand
ucagucaccuccaguaaca

SEQ ID NO: 2000886 - RNA, 19 nt, Homo sapiens
  misc_RNA (1)...(19): siRNA sense strand
caaagaauggcuucaguuc

SEQ ID NO: 2000887 - RNA, 19 nt, Homo sapiens
  misc_RNA (1)...(19): siRNA sense strand
ggaacaaccucaaaaccaa

SEQ ID NO: 2000888 - RNA, 19 nt, Homo sapiens
  misc_RNA (1)...(19): siRNA sense strand
gcagaugcuucagacaaga

SEQ ID NO: 2000889 - RNA, 19 nt, Homo sapiens
  misc_RNA (1)...(19): siRNA sense strand
gagccuguccuuucugauu

SEQ ID NO: 2000890 - RNA, 19 nt, Homo sapiens
  misc_RNA (1)...(19): siRNA sense strand
ggagaugucaacagagcua

SEQ ID NO: 2000891 - RNA, 19 nt, Homo sapiens
  misc_RNA (1)...(19): siRNA sense strand
cagacaagauuuccauugg

SEQ ID NO: 2000892 - RNA, 19 nt, Homo sapiens
  misc_RNA (1)...(19): siRNA sense strand
gaaacgguaucugcagcuu

SEQ ID NO: 2000893 - RNA, 19 nt, Homo sapiens
  misc_RNA (1)...(19): siRNA sense strand
cagccaauacugaugauaa

SEQ ID NO: 2000894 - RNA, 19 nt, Homo sapiens
  misc_RNA (1)...(19): siRNA sense strand
guaugggccugcuguguuc

SEQ ID NO: 2000895 - RNA, 19 nt, Homo sapiens
  misc_RNA (1)...(19): siRNA sense strand
cgccacaaguauaugguua

SEQ ID NO: 2000896 - RNA, 19 nt, Homo sapiens
  misc_RNA (1)...(19): siRNA sense strand
ggcagcaacuccacuguca

SEQ ID NO: 2000897 - RNA, 19 nt, Homo sapiens
  misc_RNA (1)...(19): siRNA sense strand
uacaggcucugcagugaaa

SEQ ID NO: 2000898 - RNA, 19 nt, Homo sapiens
  misc_RNA (1)...(19): siRNA sense strand
cagaugauuucggaccaua

SEQ ID NO: 2000899 - RNA, 19 nt, Homo sapiens
  misc_RNA (1)...(19): siRNA sense strand
ccaauacugaugauaacua

SEQ ID NO: 2000900 - RNA, 19 nt, Homo sapiens
  misc_RNA (1)...(19): siRNA sense strand
uaucaauguucuucuggaa

SEQ ID NO: 2000901 - RNA, 19 nt, Homo sapiens
  misc_RNA (1)...(19): siRNA sense strand
ccacaaguauaugguuaug

SEQ ID NO: 2000902 - RNA, 19 nt, Homo sapiens
  misc_RNA (1)...(19): siRNA sense strand
acucgaagcucaguugcua

SEQ ID NO: 2000903 - RNA, 19 nt, Homo sapiens
  misc_RNA (1)...(19): siRNA sense strand
gagaaggugaaacaauuga

SEQ ID NO: 2000904 - RNA, 19 nt, Homo sapiens
  misc_RNA (1)...(19): siRNA sense strand
cagaauacccuuucaucau

SEQ ID NO: 2000905 - RNA, 19 nt, Homo sapiens
  misc_RNA (1)...(19): siRNA sense strand
gacugaagauuggaaugaa

SEQ ID NO: 2000906 - RNA, 19 nt, Homo sapiens
  misc_RNA (1)...(19): siRNA sense strand
caagaaccaggaugaaugu

SEQ ID NO: 2000907 - RNA, 19 nt, Homo sapiens
  misc_RNA (1)...(19): siRNA sense strand
caaccaaucagcauucauc

SEQ ID NO: 2000908 - RNA, 19 nt, Homo sapiens
  misc_RNA (1)...(19): siRNA sense strand
gaugucgccuggaucuuca

SEQ ID NO: 2000909 - RNA, 19 nt, Homo sapiens
  misc_RNA (1)...(19): siRNA sense strand
aaauuagacuugcacagau

SEQ ID NO: 2000910 - RNA, 19 nt, Homo sapiens
  misc_RNA (1)...(19): siRNA sense strand
ugaugucggugaagcuaaa

SEQ ID NO: 2000911 - RNA, 19 nt, Homo sapiens
  misc_RNA (1)...(19): siRNA sense strand
gagaauugaccuugcuguu

SEQ ID NO: 2000912 - RNA, 19 nt, Homo sapiens
  misc_RNA (1)...(19): siRNA sense strand
gaggagaaggugaaacaau

SEQ ID NO: 2000913 - RNA, 19 nt, Homo sapiens
  misc_RNA (1)...(19): siRNA sense strand
gagauggucgggaagaaga

SEQ ID NO: 2000914 - RNA, 19 nt, Homo sapiens
  misc_RNA (1)...(19): siRNA sense strand
caggaugaaugugugauug

SEQ ID NO: 2000915 - RNA, 19 nt, Homo sapiens
  misc_RNA (1)...(19): siRNA sense strand
caagcagcauggugugaau

SEQ ID NO: 2000916 - RNA, 19 nt, Homo sapiens
  misc_RNA (1)...(19): siRNA sense strand
ucagccggcucaccagaaa

SEQ ID NO: 2000917 - RNA, 19 nt, Homo sapiens
  misc_RNA (1)...(19): siRNA sense strand
ugauggagguguuccuuca

SEQ ID NO: 2000918 - RNA, 19 nt, Homo sapiens
  misc_RNA (1)...(19): siRNA sense strand
uugaagaacccaagugauu

SEQ ID NO: 2000919 - RNA, 19 nt, Homo sapiens
  misc_RNA (1)...(19): siRNA sense strand
ccucuaaugugucuucagu

SEQ ID NO: 2000920 - RNA, 19 nt, Homo sapiens
  misc_RNA (1)...(19): siRNA sense strand
gcagcagaauacccuuuca

SEQ ID NO: 2000921 - RNA, 19 nt, Homo sapiens
  misc_RNA (1)...(19): siRNA sense strand
gguaucugcagcuuccuua

SEQ ID NO: 2000922 - RNA, 19 nt, Homo sapiens
  misc_RNA (1)...(19): siRNA sense strand
ggcaaagaauggcuucagu

SEQ ID NO: 2000923 - RNA, 19 nt, Homo sapiens
  misc_RNA (1)...(19): siRNA sense strand
agccuguccuuucugauua

SEQ ID NO: 2000924 - RNA, 19 nt, Homo sapiens
  misc_RNA (1)...(19): siRNA sense strand
caacacuggccacuuugaa

SEQ ID NO: 2000925 - RNA, 19 nt, Homo sapiens
  misc_RNA (1)...(19): siRNA sense strand
aaacccagcaguccuuuga

SEQ ID NO: 2000926 - RNA, 19 nt, Homo sapiens
  misc_RNA (1)...(19): siRNA sense strand
caaauacuaccaccacaca

SEQ ID NO: 2000927 - RNA, 19 nt, Homo sapiens
  misc_RNA (1)...(19): siRNA sense strand
gagccacagugaggagauu

SEQ ID NO: 2000928 - RNA, 19 nt, Homo sapiens
  misc_RNA (1)...(19): siRNA sense strand
cacacaaucuguugaaggu

SEQ ID NO: 2000929 - RNA, 19 nt, Homo sapiens
  misc_RNA (1)...(19): siRNA sense strand
gccagugaaucauccucua

SEQ ID NO: 2000930 - RNA, 19 nt, Homo sapiens
  misc_RNA (1)...(19): siRNA sense strand
cuccuugacuucuaagauu

SEQ ID NO: 2000931 - RNA, 19 nt, Homo sapiens
  misc_RNA (1)...(19): siRNA sense strand
gcaccaccaccuccucuug

SEQ ID NO: 2000932 - RNA, 19 nt, Homo sapiens
  misc_RNA (1)...(19): siRNA sense strand
aaucacugcuggucagaga

SEQ ID NO: 2000933 - RNA, 19 nt, Homo sapiens
  misc_RNA (1)...(19): siRNA sense strand
ggacauacacaauuacugu

SEQ ID NO: 2000934 - RNA, 19 nt, Homo sapiens
  misc_RNA (1)...(19): siRNA sense strand
caggagagauuugguauuc

SEQ ID NO: 2000935 - RNA, 19 nt, Homo sapiens
  misc_RNA (1)...(19): siRNA sense strand
gaaaguggcccagguagau

SEQ ID NO: 2000936 - RNA, 19 nt, Homo sapiens
  misc_RNA (1)...(19): siRNA sense strand
ccagguagauuccuugaag

SEQ ID NO: 2000937 - RNA, 19 nt, Homo sapiens
  misc_RNA (1)...(19): siRNA sense strand
ggagaucacccgcgacuuc

SEQ ID NO: 2000938 - RNA, 19 nt, Homo sapiens
  misc_RNA (1)...(19): siRNA sense strand
ugacugcaaugccuuggaa

SEQ ID NO: 2000939 - RNA, 19 nt, Homo sapiens
  misc_RNA (1)...(19): siRNA sense strand
gagauuugguauuccuguu

SEQ ID NO: 2000940 - RNA, 19 nt, Homo sapiens
  misc_RNA (1)...(19): siRNA sense strand
ggaaaguggcccagguaga

SEQ ID NO: 2000941 - RNA, 19 nt, Homo sapiens
  misc_RNA (1)...(19): siRNA sense strand
ggagagauuugguauuccu

SEQ ID NO: 2000942 - RNA, 19 nt, Homo sapiens
  misc_RNA (1)...(19): siRNA sense strand
acaaagcacggaagcugua

SEQ ID NO: 2000943 - RNA, 19 nt, Homo sapiens
  misc_RNA (1)...(19): siRNA sense strand
gaauacccaaucccaguga

SEQ ID NO: 2000944 - RNA, 19 nt, Homo sapiens
  misc_RNA (1)...(19): siRNA sense strand
cacggaagcuguacaccau

SEQ ID NO: 2000945 - RNA, 19 nt, Homo sapiens
  misc_RNA (1)...(19): siRNA sense strand
gcaggagagauuugguauu

SEQ ID NO: 2000946 - RNA, 19 nt, Homo sapiens
  misc_RNA (1)...(19): siRNA sense strand
ggacaagcugcgggacuuu

SEQ ID NO: 2000947 - RNA, 19 nt, Homo sapiens
  misc_RNA (1)...(19): siRNA sense strand
accuggacauacacaauua

SEQ ID NO: 2000948 - RNA, 19 nt, Homo sapiens
  misc_RNA (1)...(19): siRNA sense strand
cggaagcuguacaccauca

SEQ ID NO: 2000949 - RNA, 19 nt, Homo sapiens
  misc_RNA (1)...(19): siRNA sense strand
gaagcuguacaccaucaug

SEQ ID NO: 2000950 - RNA, 19 nt, Homo sapiens
  misc_RNA (1)...(19): siRNA sense strand
ugguauuccuguuggauga

SEQ ID NO: 2000951 - RNA, 19 nt, Homo sapiens
  misc_RNA (1)...(19): siRNA sense strand
guaccuggacauacacaau

SEQ ID NO: 2000952 - RNA, 19 nt, Homo sapiens
  misc_RNA (1)...(19): siRNA sense strand
ccuguuggaugacugcaau

SEQ ID NO: 2000953 - RNA, 19 nt, Homo sapiens
  misc_RNA (1)...(19): siRNA sense strand
ggagccaugugugagauac

SEQ ID NO: 2000954 - RNA, 19 nt, Homo sapiens
  misc_RNA (1)...(19): siRNA sense strand
gagaucacccgcgacuuca

SEQ ID NO: 2000955 - RNA, 19 nt, Homo sapiens
  misc_RNA (1)...(19): siRNA sense strand
uggacaagcugcgggacuu

SEQ ID NO: 2000956 - RNA, 19 nt, Homo sapiens
  misc_RNA (1)...(19): siRNA sense strand
acaccaucaugaacucguu

SEQ ID NO: 2000957 - RNA, 19 nt, Homo sapiens
  misc_RNA (1)...(19): siRNA sense strand
uaccuggacauacacaauu

SEQ ID NO: 2000958 - RNA, 19 nt, Homo sapiens
  misc_RNA (1)...(19): siRNA sense strand
gacaagcugcgggacuuug

SEQ ID NO: 2000959 - RNA, 19 nt, Homo sapiens
  misc_RNA (1)...(19): siRNA sense strand
gaacgaagauucaagauug

SEQ ID NO: 2000960 - RNA, 19 nt, Homo sapiens
  misc_RNA (1)...(19): siRNA sense strand
gaagaaguaucucguauca

SEQ ID NO: 2000961 - RNA, 19 nt, Homo sapiens
  misc_RNA (1)...(19): siRNA sense strand
agaaguaucucguaucaua

SEQ ID NO: 2000962 - RNA, 19 nt, Homo sapiens
  misc_RNA (1)...(19): siRNA sense strand
gaaaacaacuucuauguga

SEQ ID NO: 2000963 - RNA, 19 nt, Homo sapiens
  misc_RNA (1)...(19): siRNA sense strand
gaucacaguuaaucuagua

SEQ ID NO: 2000964 - RNA, 19 nt, Homo sapiens
  misc_RNA (1)...(19): siRNA sense strand
caacagaaauauggagaua

SEQ ID NO: 2000965 - RNA, 19 nt, Homo sapiens
  misc_RNA (1)...(19): siRNA sense strand
gugaagcacuguacuuaua

SEQ ID NO: 2000966 - RNA, 19 nt, Homo sapiens
  misc_RNA (1)...(19): siRNA sense strand
gcaagaguguaauaacuuu

SEQ ID NO: 2000967 - RNA, 19 nt, Homo sapiens
  misc_RNA (1)...(19): siRNA sense strand
cgacugagaucugaugaua

SEQ ID NO: 2000968 - RNA, 19 nt, Homo sapiens
  misc_RNA (1)...(19): siRNA sense strand
gagagauaguggauaaaua

SEQ ID NO: 2000969 - RNA, 19 nt, Homo sapiens
  misc_RNA (1)...(19): siRNA sense strand
ggaagagguucaagaauuc

SEQ ID NO: 2000970 - RNA, 19 nt, Homo sapiens
  misc_RNA (1)...(19): siRNA sense strand
caagaaagcauaaggguaa

SEQ ID NO: 2000971 - RNA, 19 nt, Homo sapiens
  misc_RNA (1)...(19): siRNA sense strand
aaacugugcuucucaauga

SEQ ID NO: 2000972 - RNA, 19 nt, Homo sapiens
  misc_RNA (1)...(19): siRNA sense strand
guacuuauauggaguuaug

SEQ ID NO: 2000973 - RNA, 19 nt, Homo sapiens
  misc_RNA (1)...(19): siRNA sense strand
ugagagagauaguggauaa

SEQ ID NO: 2000974 - RNA, 19 nt, Homo sapiens
  misc_RNA (1)...(19): siRNA sense strand
ugacugagcuugcugaugu

SEQ ID NO: 2000975 - RNA, 19 nt, Homo sapiens
  misc_RNA (1)...(19): siRNA sense strand
gaucagaaccauuaacauu

SEQ ID NO: 2000976 - RNA, 19 nt, Homo sapiens
  misc_RNA (1)...(19): siRNA sense strand
caaagaagauaacacacuu

SEQ ID NO: 2000977 - RNA, 19 nt, Homo sapiens
  misc_RNA (1)...(19): siRNA sense strand
ucaaagagauguucaagca

SEQ ID NO: 2000978 - RNA, 19 nt, Homo sapiens
  misc_RNA (1)...(19): siRNA sense strand
ggaugagucuguaacguuu

SEQ ID NO: 2000979 - RNA, 19 nt, Homo sapiens
  misc_RNA (1)...(19): siRNA sense strand
gagcugaucaacagaaaua

SEQ ID NO: 2000980 - RNA, 19 nt, Homo sapiens
  misc_RNA (1)...(19): siRNA sense strand
gaagauaccugaaauuccu

SEQ ID NO: 2000981 - RNA, 19 nt, Homo sapiens
  misc_RNA (1)...(19): siRNA sense strand
acaaagcgcuuacccuauu

SEQ ID NO: 2000982 - RNA, 19 nt, Homo sapiens
  misc_RNA (1)...(19): siRNA sense strand
aaagagauguucaagcaaa

SEQ ID NO: 2000983 - RNA, 19 nt, Homo sapiens
  misc_RNA (1)...(19): siRNA sense strand
agaggaugcugguuucuua

SEQ ID NO: 2000984 - RNA, 19 nt, Homo sapiens
  misc_RNA (1)...(19): siRNA sense strand
uggaagagguucaagaauu

SEQ ID NO: 2000985 - RNA, 19 nt, Homo sapiens
  misc_RNA (1)...(19): siRNA sense strand
guacgugauucucuacuuu

SEQ ID NO: 2000986 - RNA, 19 nt, Homo sapiens
  misc_RNA (1)...(19): siRNA sense strand
guacuauucuggagaguug

SEQ ID NO: 2000987 - RNA, 19 nt, Homo sapiens
  misc_RNA (1)...(19): siRNA sense strand
ggaauccaaucugcaagua

SEQ ID NO: 2000988 - RNA, 19 nt, Homo sapiens
  misc_RNA (1)...(19): siRNA sense strand
uuacagaauuuccucagua

SEQ ID NO: 2000989 - RNA, 19 nt, Homo sapiens
  misc_RNA (1)...(19): siRNA sense strand
gcacagcccuggcaaacca

SEQ ID NO: 2000990 - RNA, 19 nt, Homo sapiens
  misc_RNA (1)...(19): siRNA sense strand
caauaaggcucuccuagca

SEQ ID NO: 2000991 - RNA, 19 nt, Homo sapiens
  misc_RNA (1)...(19): siRNA sense strand
gcaaguaugucaguuucuu

SEQ ID NO: 2000992 - RNA, 19 nt, Homo sapiens
  misc_RNA (1)...(19): siRNA sense strand
agacagagcugaucaacag

SEQ ID NO: 2000993 - RNA, 19 nt, Homo sapiens
  misc_RNA (1)...(19): siRNA sense strand
gagagugccuaucaacgaa

SEQ ID NO: 2000994 - RNA, 19 nt, Homo sapiens
  misc_RNA (1)...(19): siRNA sense strand
gagcaagaguguaauaacu

SEQ ID NO: 2000995 - RNA, 19 nt, Homo sapiens
  misc_RNA (1)...(19): siRNA sense strand
ucacauccaucaugcaaga

SEQ ID NO: 2000996 - RNA, 19 nt, Homo sapiens
  misc_RNA (1)...(19): siRNA sense strand
ugaaauuccugcagauguu

SEQ ID NO: 2000997 - RNA, 19 nt, Homo sapiens
  misc_RNA (1)...(19): siRNA sense strand
gagagaggaugcugguuuc

SEQ ID NO: 2000998 - RNA, 19 nt, Homo sapiens
  misc_RNA (1)...(19): siRNA sense strand
gauacaagcuuuggaagag

SEQ ID NO: 2000999 - RNA, 19 nt, Homo sapiens
  misc_RNA (1)...(19): siRNA sense strand
acugagaucugaugauauu

SEQ ID NO: 2001000 - RNA, 19 nt, Homo sapiens
  misc_RNA (1)...(19): siRNA sense strand
caacgaauccuucaucagu

SEQ ID NO: 2001001 - RNA, 19 nt, Homo sapiens
  misc_RNA (1)...(19): siRNA sense strand
gcuacaggauuuagaugaa

SEQ ID NO: 2001002 - RNA, 19 nt, Homo sapiens
  misc_RNA (1)...(19): siRNA sense strand
guuggauacugcacaauuu

SEQ ID NO: 2001003 - RNA, 19 nt, Homo sapiens
  misc_RNA (1)...(19): siRNA sense strand
gaacaggcaagcagauaug

SEQ ID NO: 2001004 - RNA, 19 nt, Homo sapiens
  misc_RNA (1)...(19): siRNA sense strand
cagcaaaccuuagaaacug

SEQ ID NO: 2001005 - RNA, 19 nt, Homo sapiens
  misc_RNA (1)...(19): siRNA sense strand
caaagcgcuuacccuauuu

SEQ ID NO: 2001006 - RNA, 19 nt, Homo sapiens
  misc_RNA (1)...(19): siRNA sense strand
acucagagcuaccuuccua

SEQ ID NO: 2001007 - RNA, 19 nt, Homo sapiens
  misc_RNA (1)...(19): siRNA sense strand
cgagagcuauuuccagaga

SEQ ID NO: 2001008 - RNA, 19 nt, Homo sapiens
  misc_RNA (1)...(19): siRNA sense strand
agccagagcuacaggauuu

SEQ ID NO: 2001009 - RNA, 19 nt, Homo sapiens
  misc_RNA (1)...(19): siRNA sense strand
uagaccagcugaacacuug

SEQ ID NO: 2001010 - RNA, 19 nt, Homo sapiens
  misc_RNA (1)...(19): siRNA sense strand
caacauuuauggucugaag

SEQ ID NO: 2001011 - RNA, 19 nt, Homo sapiens
  misc_RNA (1)...(19): siRNA sense strand
gaagauggaauaaggaaag

SEQ ID NO: 2001012 - RNA, 19 nt, Homo sapiens
  misc_RNA (1)...(19): siRNA sense strand
ggcaguugauugacaguuu

SEQ ID NO: 2001013 - RNA, 19 nt, Homo sapiens
  misc_RNA (1)...(19): siRNA sense strand
ggucauuggucgacugaga

SEQ ID NO: 2001014 - RNA, 19 nt, Homo sapiens
  misc_RNA (1)...(19): siRNA sense strand
gaagcacuguacuuauaug

SEQ ID NO: 2001015 - RNA, 19 nt, Homo sapiens
  misc_RNA (1)...(19): siRNA sense strand
gaucuucugcugauucaaa

SEQ ID NO: 2001016 - RNA, 19 nt, Homo sapiens
  misc_RNA (1)...(19): siRNA sense strand
ugagcuugcugaugucuuu

SEQ ID NO: 2001017 - RNA, 19 nt, Homo sapiens
  misc_RNA (1)...(19): siRNA sense strand
gagaguugguauccuaugu

SEQ ID NO: 2001018 - RNA, 19 nt, Homo sapiens
  misc_RNA (1)...(19): siRNA sense strand
gaaguaucucguaucauaa

SEQ ID NO: 2001019 - RNA, 19 nt, Homo sapiens
  misc_RNA (1)...(19): siRNA sense strand
gcuggaagauggaauaagg

SEQ ID NO: 2001020 - RNA, 19 nt, Homo sapiens
  misc_RNA (1)...(19): siRNA sense strand
gagggacuaugcucagcua

SEQ ID NO: 2001021 - RNA, 19 nt, Homo sapiens
  misc_RNA (1)...(19): siRNA sense strand
gaguugguauccuauguga

SEQ ID NO: 2001022 - RNA, 19 nt, Homo sapiens
  misc_RNA (1)...(19): siRNA sense strand
gaaacugugcuucucaaug

SEQ ID NO: 2001023 - RNA, 19 nt, Homo sapiens
  misc_RNA (1)...(19): siRNA sense strand
ggagaugguucuggacaau

SEQ ID NO: 2001024 - RNA, 19 nt, Homo sapiens
  misc_RNA (1)...(19): siRNA sense strand
ggaugcugguuucuuacua

SEQ ID NO: 2001025 - RNA, 19 nt, Homo sapiens
  misc_RNA (1)...(19): siRNA sense strand
gagaacaggcaagcagaua

SEQ ID NO: 2001026 - RNA, 19 nt, Homo sapiens
  misc_RNA (1)...(19): siRNA sense strand
ucccaaagcuucugaacug

SEQ ID NO: 2001027 - RNA, 19 nt, Homo sapiens
  misc_RNA (1)...(19): siRNA sense strand
ggauaaauacuuuccagau

SEQ ID NO: 2001028 - RNA, 19 nt, Homo sapiens
  misc_RNA (1)...(19): siRNA sense strand
gccagaagauaccugaaau

SEQ ID NO: 2001029 - RNA, 19 nt, Homo sapiens
  misc_RNA (1)...(19): siRNA sense strand
uagaaauugugaccagauu

SEQ ID NO: 2001030 - RNA, 19 nt, Homo sapiens
  misc_RNA (1)...(19): siRNA sense strand
caagcuuacucaugcuauu

SEQ ID NO: 2001031 - RNA, 19 nt, Homo sapiens
  misc_RNA (1)...(19): siRNA sense strand
gcaguugauugacaguuuc

SEQ ID NO: 2001032 - RNA, 19 nt, Homo sapiens
  misc_RNA (1)...(19): siRNA sense strand
caacaaacgccuucgucaa

SEQ ID NO: 2001033 - RNA, 19 nt, Homo sapiens
  misc_RNA (1)...(19): siRNA sense strand
ccaacuaucccgagagcua

SEQ ID NO: 2001034 - RNA, 19 nt, Homo sapiens
  misc_RNA (1)...(19): siRNA sense strand
cugaacacuugguaugaua

SEQ ID NO: 2001035 - RNA, 19 nt, Homo sapiens
  misc_RNA (1)...(19): siRNA sense strand
caagccaagugaauugaug

SEQ ID NO: 2001036 - RNA, 19 nt, Homo sapiens
  misc_RNA (1)...(19): siRNA sense strand
cgaaguacagguuauucua

SEQ ID NO: 2001037 - RNA, 19 nt, Homo sapiens
  misc_RNA (1)...(19): siRNA sense strand
cagcugcucuggagaaucu

SEQ ID NO: 2001038 - RNA, 19 nt, Homo sapiens
  misc_RNA (1)...(19): siRNA sense strand
cuucugugcuuuaugauug

SEQ ID NO: 2001039 - RNA, 19 nt, Homo sapiens
  misc_RNA (1)...(19): siRNA sense strand
uaagaacgaagauucaaga

SEQ ID NO: 2001040 - RNA, 19 nt, Homo sapiens
  misc_RNA (1)...(19): siRNA sense strand
gauacgagguugccaagcu

SEQ ID NO: 2001041 - RNA, 19 nt, Homo sapiens
  misc_RNA (1)...(19): siRNA sense strand
gguccagaauuaugggaaa

SEQ ID NO: 2001042 - RNA, 19 nt, Homo sapiens
  misc_RNA (1)...(19): siRNA sense strand
gggaaccuuuggucuaaau

SEQ ID NO: 2001043 - RNA, 19 nt, Homo sapiens
  misc_RNA (1)...(19): siRNA sense strand
guucggagcggaugacuga

SEQ ID NO: 2001044 - RNA, 19 nt, Homo sapiens
  misc_RNA (1)...(19): siRNA sense strand
caagugcagcaauuucuaa

SEQ ID NO: 2001045 - RNA, 19 nt, Homo sapiens
  misc_RNA (1)...(19): siRNA sense strand
gaaguacagguuauucuag

SEQ ID NO: 2001046 - RNA, 19 nt, Homo sapiens
  misc_RNA (1)...(19): siRNA sense strand
gagaucugaugauauuuac

SEQ ID NO: 2001047 - RNA, 19 nt, Homo sapiens
  misc_RNA (1)...(19): siRNA sense strand
aaaguauugucgcaaauuc

SEQ ID NO: 2001048 - RNA, 19 nt, Homo sapiens
  misc_RNA (1)...(19): siRNA sense strand
gcagccgccucuucucaga

SEQ ID NO: 2001049 - RNA, 19 nt, Homo sapiens
  misc_RNA (1)...(19): siRNA sense strand
uuuauggucugaagauuug

SEQ ID NO: 2001050 - RNA, 19 nt, Homo sapiens
  misc_RNA (1)...(19): siRNA sense strand
gaaggagaagucagagaga

SEQ ID NO: 2001051 - RNA, 19 nt, Homo sapiens
  misc_RNA (1)...(19): siRNA sense strand
gaauuuccucaguauguuu

SEQ ID NO: 2001052 - RNA, 19 nt, Homo sapiens
  misc_RNA (1)...(19): siRNA sense strand
cugagagacugcaauguug

SEQ ID NO: 2001053 - RNA, 19 nt, Homo sapiens
  misc_RNA (1)...(19): siRNA sense strand
caaaagaccauccaacuau

SEQ ID NO: 2001054 - RNA, 19 nt, Homo sapiens
  misc_RNA (1)...(19): siRNA sense strand
caucauugcugaacuuuug

SEQ ID NO: 2001055 - RNA, 19 nt, Homo sapiens
  misc_RNA (1)...(19): siRNA sense strand
gagccaagccaagugaauu

SEQ ID NO: 2001056 - RNA, 19 nt, Homo sapiens
  misc_RNA (1)...(19): siRNA sense strand
ucaucaagguggauccaaa

SEQ ID NO: 2001057 - RNA, 19 nt, Homo sapiens
  misc_RNA (1)...(19): siRNA sense strand
caagcuugguucagagaga

SEQ ID NO: 2001058 - RNA, 19 nt, Homo sapiens
  misc_RNA (1)...(19): siRNA sense strand
caaacgccuucgucaaauc

SEQ ID NO: 2001059 - RNA, 19 nt, Homo sapiens
  misc_RNA (1)...(19): siRNA sense strand
ggucaagucuggaugauua

SEQ ID NO: 2001060 - RNA, 19 nt, Homo sapiens
  misc_RNA (1)...(19): siRNA sense strand
caagagcuguaccaauuua

SEQ ID NO: 2001061 - RNA, 19 nt, Homo sapiens
  misc_RNA (1)...(19): siRNA sense strand
ucaaagaaauguucacuca

SEQ ID NO: 2001062 - RNA, 19 nt, Homo sapiens
  misc_RNA (1)...(19): siRNA sense strand
ggaauggaaucacuaguuc

SEQ ID NO: 2001063 - RNA, 19 nt, Homo sapiens
  misc_RNA (1)...(19): siRNA sense strand
gauuaugccugcaguuuau

SEQ ID NO: 2001064 - RNA, 19 nt, Homo sapiens
  misc_RNA (1)...(19): siRNA sense strand
gaaacacucuuuggagaau

SEQ ID NO: 2001065 - RNA, 19 nt, Homo sapiens
  misc_RNA (1)...(19): siRNA sense strand
gcacagaacaagaaauaga

SEQ ID NO: 2001066 - RNA, 19 nt, Homo sapiens
  misc_RNA (1)...(19): siRNA sense strand
aagaaucccuucaaagaaa

SEQ ID NO: 2001067 - RNA, 19 nt, Homo sapiens
  misc_RNA (1)...(19): siRNA sense strand
ggaaguaccagacuaugaa

SEQ ID NO: 2001068 - RNA, 19 nt, Homo sapiens
  misc_RNA (1)...(19): siRNA sense strand
guacagagaugggcuucaa

SEQ ID NO: 2001069 - RNA, 19 nt, Homo sapiens
  misc_RNA (1)...(19): siRNA sense strand
ucaagaaucccuucaaaga

SEQ ID NO: 2001070 - RNA, 19 nt, Homo sapiens
  misc_RNA (1)...(19): siRNA sense strand
cagcacagaacaagaaaua

SEQ ID NO: 2001071 - RNA, 19 nt, Homo sapiens
  misc_RNA (1)...(19): siRNA sense strand
gaagaaagggaaggcauuu

SEQ ID NO: 2001072 - RNA, 19 nt, Homo sapiens
  misc_RNA (1)...(19): siRNA sense strand
ggauuaugccugcaguuua

SEQ ID NO: 2001073 - RNA, 19 nt, Homo sapiens
  misc_RNA (1)...(19): siRNA sense strand
gaggaagauuugguagaua

SEQ ID NO: 2001074 - RNA, 19 nt, Homo sapiens
  misc_RNA (1)...(19): siRNA sense strand
uauaagcucuguaacaauc

SEQ ID NO: 2001075 - RNA, 19 nt, Homo sapiens
  misc_RNA (1)...(19): siRNA sense strand
ggacacagcaacacagaga

SEQ ID NO: 2001076 - RNA, 19 nt, Homo sapiens
  misc_RNA (1)...(19): siRNA sense strand
gaucauuauuuccuaagug

SEQ ID NO: 2001077 - RNA, 19 nt, Homo sapiens
  misc_RNA (1)...(19): siRNA sense strand
ggauggaaguaccagacua

SEQ ID NO: 2001078 - RNA, 19 nt, Homo sapiens
  misc_RNA (1)...(19): siRNA sense strand
caagaaucccuucaaagaa

SEQ ID NO: 2001079 - RNA, 19 nt, Homo sapiens
  misc_RNA (1)...(19): siRNA sense strand
ugaccagacuugccuagaa

SEQ ID NO: 2001080 - RNA, 19 nt, Homo sapiens
  misc_RNA (1)...(19): siRNA sense strand
ggaaacacucuuuggagaa

SEQ ID NO: 2001081 - RNA, 19 nt, Homo sapiens
  misc_RNA (1)...(19): siRNA sense strand
gaagaaacgguacagagau

SEQ ID NO: 2001082 - RNA, 19 nt, Homo sapiens
  misc_RNA (1)...(19): siRNA sense strand
gaaagggaaggcauuuguu

SEQ ID NO: 2001083 - RNA, 19 nt, Homo sapiens
  misc_RNA (1)...(19): siRNA sense strand
ugaccaaguugacacuauu

SEQ ID NO: 2001084 - RNA, 19 nt, Homo sapiens
  misc_RNA (1)...(19): siRNA sense strand
cuuauaagcucuguaacaa

SEQ ID NO: 2001085 - RNA, 19 nt, Homo sapiens
  misc_RNA (1)...(19): siRNA sense strand
uagagugucuuauucaauc

SEQ ID NO: 2001086 - RNA, 19 nt, Homo sapiens
  misc_RNA (1)...(19): siRNA sense strand
cauguaauaugguuucauc

SEQ ID NO: 2001087 - RNA, 19 nt, Homo sapiens
  misc_RNA (1)...(19): siRNA sense strand
ccuaagugauggucuguau

SEQ ID NO: 2001088 - RNA, 19 nt, Homo sapiens
  misc_RNA (1)...(19): siRNA sense strand
gaugauuacuguccuucug

SEQ ID NO: 2001089 - RNA, 19 nt, Homo sapiens
  misc_RNA (1)...(19): siRNA sense strand
gaacuuccucaccauauca

SEQ ID NO: 2001090 - RNA, 19 nt, Homo sapiens
  misc_RNA (1)...(19): siRNA sense strand
gagguucuacccuuuauau

SEQ ID NO: 2001091 - RNA, 19 nt, Homo sapiens
  misc_RNA (1)...(19): siRNA sense strand
acaaucaggguuacaagua

SEQ ID NO: 2001092 - RNA, 19 nt, Homo sapiens
  misc_RNA (1)...(19): siRNA sense strand
aagaaaagguccucaauau

SEQ ID NO: 2001093 - RNA, 19 nt, Homo sapiens
  misc_RNA (1)...(19): siRNA sense strand
gaagauuugguagauauug

SEQ ID NO: 2001094 - RNA, 19 nt, Homo sapiens
  misc_RNA (1)...(19): siRNA sense strand
ucaggagguucuacccuuu

SEQ ID NO: 2001095 - RNA, 19 nt, Homo sapiens
  misc_RNA (1)...(19): siRNA sense strand
gauaaggaaacacucuuug

SEQ ID NO: 2001096 - RNA, 19 nt, Homo sapiens
  misc_RNA (1)...(19): siRNA sense strand
gaaguaccagacuaugaaa

SEQ ID NO: 2001097 - RNA, 19 nt, Homo sapiens
  misc_RNA (1)...(19): siRNA sense strand
ugaagaaacgguacagaga

SEQ ID NO: 2001098 - RNA, 19 nt, Homo sapiens
  misc_RNA (1)...(19): siRNA sense strand
agucaagaaucccuucaaa

SEQ ID NO: 2001099 - RNA, 19 nt, Homo sapiens
  misc_RNA (1)...(19): siRNA sense strand
aggaagauuugguagauau

SEQ ID NO: 2001100 - RNA, 19 nt, Homo sapiens
  misc_RNA (1)...(19): siRNA sense strand
aaagggaaggcauuuguuu

SEQ ID NO: 2001101 - RNA, 19 nt, Homo sapiens
  misc_RNA (1)...(19): siRNA sense strand
gagcuguaccaauuuaaga

SEQ ID NO: 2001102 - RNA, 19 nt, Homo sapiens
  misc_RNA (1)...(19): siRNA sense strand
gaagccacuuucgcugauu

SEQ ID NO: 2001103 - RNA, 19 nt, Homo sapiens
  misc_RNA (1)...(19): siRNA sense strand
aacacucuuuggagaauua

SEQ ID NO: 2001104 - RNA, 19 nt, Homo sapiens
  misc_RNA (1)...(19): siRNA sense strand
uaucagcacagaacaagaa

SEQ ID NO: 2001105 - RNA, 19 nt, Homo sapiens
  misc_RNA (1)...(19): siRNA sense strand
aagaaacgguacagagaug

SEQ ID NO: 2001106 - RNA, 19 nt, Homo sapiens
  misc_RNA (1)...(19): siRNA sense strand
uaaggaaacacucuuugga

SEQ ID NO: 2001107 - RNA, 19 nt, Homo sapiens
  misc_RNA (1)...(19): siRNA sense strand
cagagucuccuccaucuug

SEQ ID NO: 2001108 - RNA, 19 nt, Homo sapiens
  misc_RNA (1)...(19): siRNA sense strand
gaaaagguccucaauaugc

SEQ ID NO: 2001109 - RNA, 19 nt, Homo sapiens
  misc_RNA (1)...(19): siRNA sense strand
agaggaagauuugguagau

SEQ ID NO: 2001110 - RNA, 19 nt, Homo sapiens
  misc_RNA (1)...(19): siRNA sense strand
aaagacacuucuaccacaa

SEQ ID NO: 2001111 - RNA, 19 nt, Homo sapiens
  misc_RNA (1)...(19): siRNA sense strand
uaagugauggucuguaugu

SEQ ID NO: 2001112 - RNA, 19 nt, Homo sapiens
  misc_RNA (1)...(19): siRNA sense strand
gauggaaguaccagacuau

SEQ ID NO: 2001113 - RNA, 19 nt, Homo sapiens
  misc_RNA (1)...(19): siRNA sense strand
ugauggugaugaugaagaa

SEQ ID NO: 2001114 - RNA, 19 nt, Homo sapiens
  misc_RNA (1)...(19): siRNA sense strand
aaaccuggcaccaaccuaa

SEQ ID NO: 2001115 - RNA, 19 nt, Homo sapiens
  misc_RNA (1)...(19): siRNA sense strand
gggcucagcagaucagaga

SEQ ID NO: 2001116 - RNA, 19 nt, Homo sapiens
  misc_RNA (1)...(19): siRNA sense strand
caagaaaagguccucaaua

SEQ ID NO: 2001117 - RNA, 19 nt, Homo sapiens
  misc_RNA (1)...(19): siRNA sense strand
ggauuuagaagccacuuuc

SEQ ID NO: 2001118 - RNA, 19 nt, Homo sapiens
  misc_RNA (1)...(19): siRNA sense strand
gaccagacuugccuagaac

SEQ ID NO: 2001119 - RNA, 19 nt, Homo sapiens
  misc_RNA (1)...(19): siRNA sense strand
aaccugcgauuauucagaa

SEQ ID NO: 2001120 - RNA, 19 nt, Homo sapiens
  misc_RNA (1)...(19): siRNA sense strand
caaucaggguuacaaguac

SEQ ID NO: 2001121 - RNA, 19 nt, Homo sapiens
  misc_RNA (1)...(19): siRNA sense strand
ccaaauccuacucuuguga

SEQ ID NO: 2001122 - RNA, 19 nt, Homo sapiens
  misc_RNA (1)...(19): siRNA sense strand
ucacauccagaccuccuua

SEQ ID NO: 2001123 - RNA, 19 nt, Homo sapiens
  misc_RNA (1)...(19): siRNA sense strand
cacuuucgcugauuugugu

SEQ ID NO: 2001124 - RNA, 19 nt, Homo sapiens
  misc_RNA (1)...(19): siRNA sense strand
ggaaggcauuuguuuuaga

SEQ ID NO: 2001125 - RNA, 19 nt, Homo sapiens
  misc_RNA (1)...(19): siRNA sense strand
guacagaucauuauuuccu

SEQ ID NO: 2001126 - RNA, 19 nt, Homo sapiens
  misc_RNA (1)...(19): siRNA sense strand
caaggucaagucuggauga

SEQ ID NO: 2001127 - RNA, 19 nt, Homo sapiens
  misc_RNA (1)...(19): siRNA sense strand
guaccagacuaugaaaugg

SEQ ID NO: 2001128 - RNA, 19 nt, Homo sapiens
  misc_RNA (1)...(19): siRNA sense strand
gauacucgaauucaucaau

SEQ ID NO: 2001129 - RNA, 19 nt, Homo sapiens
  misc_RNA (1)...(19): siRNA sense strand
ggaagauuugguagauauu

SEQ ID NO: 2001130 - RNA, 19 nt, Homo sapiens
  misc_RNA (1)...(19): siRNA sense strand
ccuaacagaggaagauuug

SEQ ID NO: 2001131 - RNA, 19 nt, Homo sapiens
  misc_RNA (1)...(19): siRNA sense strand
gaaggcauuuguuuuagau

SEQ ID NO: 2001132 - RNA, 19 nt, Homo sapiens
  misc_RNA (1)...(19): siRNA sense strand
cagaaggacuggaaaagga

SEQ ID NO: 2001133 - RNA, 19 nt, Homo sapiens
  misc_RNA (1)...(19): siRNA sense strand
ugaagaaagggaaggcauu

SEQ ID NO: 2001134 - RNA, 19 nt, Homo sapiens
  misc_RNA (1)...(19): siRNA sense strand
cuacgugcccucuauggaa

SEQ ID NO: 2001135 - RNA, 19 nt, Homo sapiens
  misc_RNA (1)...(19): siRNA sense strand
uaccaaauccuacucuugu

SEQ ID NO: 2001136 - RNA, 19 nt, Homo sapiens
  misc_RNA (1)...(19): siRNA sense strand
ucagaacuuccucaccaua

SEQ ID NO: 2001137 - RNA, 19 nt, Homo sapiens
  misc_RNA (1)...(19): siRNA sense strand
uaacagaggaagauuuggu

SEQ ID NO: 2001138 - RNA, 19 nt, Homo sapiens
  misc_RNA (1)...(19): siRNA sense strand
caggagguucuacccuuua

SEQ ID NO: 2001139 - RNA, 19 nt, Homo sapiens
  misc_RNA (1)...(19): siRNA sense strand
ggaaaacacugccucuacu

SEQ ID NO: 2001140 - RNA, 19 nt, Homo sapiens
  misc_RNA (1)...(19): siRNA sense strand
cauccagaccuccuuauuc

SEQ ID NO: 2001141 - RNA, 19 nt, Homo sapiens
  misc_RNA (1)...(19): siRNA sense strand
uaugcuacgugcccucuau

SEQ ID NO: 2001142 - RNA, 19 nt, Homo sapiens
  misc_RNA (1)...(19): siRNA sense strand
uuacuguccuucugaccaa

SEQ ID NO: 2001143 - RNA, 19 nt, Homo sapiens
  misc_RNA (1)...(19): siRNA sense strand
ggaggaucaucaggagguu

SEQ ID NO: 2001144 - RNA, 19 nt, Homo sapiens
  misc_RNA (1)...(19): siRNA sense strand
acagagaagugaccagacu

SEQ ID NO: 2001145 - RNA, 19 nt, Homo sapiens
  misc_RNA (1)...(19): siRNA sense strand
gaaaacacugccucuacua

SEQ ID NO: 2001146 - RNA, 19 nt, Homo sapiens
  misc_RNA (1)...(19): siRNA sense strand
ccacaacaaucaggguuac

SEQ ID NO: 2001147 - RNA, 19 nt, Homo sapiens
  misc_RNA (1)...(19): siRNA sense strand
uacgugcccucuauggaaa

SEQ ID NO: 2001148 - RNA, 19 nt, Homo sapiens
  misc_RNA (1)...(19): siRNA sense strand
uucaaacccuggaauggaa

SEQ ID NO: 2001149 - RNA, 19 nt, Homo sapiens
  misc_RNA (1)...(19): siRNA sense strand
gcuguaccaauuuaagaaa

SEQ ID NO: 2001150 - RNA, 19 nt, Homo sapiens
  misc_RNA (1)...(19): siRNA sense strand
cuguaacaaucaagaagaa

SEQ ID NO: 2001151 - RNA, 19 nt, Homo sapiens
  misc_RNA (1)...(19): siRNA sense strand
ggagguucuacccuuuaua

SEQ ID NO: 2001152 - RNA, 19 nt, Homo sapiens
  misc_RNA (1)...(19): siRNA sense strand
acaagagcuguaccaauuu

SEQ ID NO: 2001153 - RNA, 19 nt, Homo sapiens
  misc_RNA (1)...(19): siRNA sense strand
uggaauggaaucacuaguu

SEQ ID NO: 2001154 - RNA, 19 nt, Homo sapiens
  misc_RNA (1)...(19): siRNA sense strand
ugauaaggaaacacucuuu

SEQ ID NO: 2001155 - RNA, 19 nt, Homo sapiens
  misc_RNA (1)...(19): siRNA sense strand
caaccuaacagaggaagau

SEQ ID NO: 2001156 - RNA, 19 nt, Homo sapiens
  misc_RNA (1)...(19): siRNA sense strand
caccguguuugauaaggaa

SEQ ID NO: 2001157 - RNA, 19 nt, Homo sapiens
  misc_RNA (1)...(19): siRNA sense strand
ggccauaggcucaaagcau

SEQ ID NO: 2001158 - RNA, 19 nt, Homo sapiens
  misc_RNA (1)...(19): siRNA sense strand
gcaucuuccugccaguaau

SEQ ID NO: 2001159 - RNA, 19 nt, Homo sapiens
  misc_RNA (1)...(19): siRNA sense strand
ggaacaaggagaucaugua

SEQ ID NO: 2001160 - RNA, 19 nt, Homo sapiens
  misc_RNA (1)...(19): siRNA sense strand
gaaggcggcugcagaacug

SEQ ID NO: 2001161 - RNA, 19 nt, Homo sapiens
  misc_RNA (1)...(19): siRNA sense strand
gcauuggagugaccuugua

SEQ ID NO: 2001162 - RNA, 19 nt, Homo sapiens
  misc_RNA (1)...(19): siRNA sense strand
gaacaucgucaagcucuuu

SEQ ID NO: 2001163 - RNA, 19 nt, Homo sapiens
  misc_RNA (1)...(19): siRNA sense strand
gaacaucaugcgccucgua

SEQ ID NO: 2001164 - RNA, 19 nt, Homo sapiens
  misc_RNA (1)...(19): siRNA sense strand
ucagcaagcuccuggaaga

SEQ ID NO: 2001165 - RNA, 19 nt, Homo sapiens
  misc_RNA (1)...(19): siRNA sense strand
ggacaucccuccucuaccu

SEQ ID NO: 2001166 - RNA, 19 nt, Homo sapiens
  misc_RNA (1)...(19): siRNA sense strand
caucugaccuccuggacaa

SEQ ID NO: 2001167 - RNA, 19 nt, Homo sapiens
  misc_RNA (1)...(19): siRNA sense strand
guggaucucuggagcauug

SEQ ID NO: 2001168 - RNA, 19 nt, Homo sapiens
  misc_RNA (1)...(19): siRNA sense strand
gaagagccgggaucaggua

SEQ ID NO: 2001169 - RNA, 19 nt, Homo sapiens
  misc_RNA (1)...(19): siRNA sense strand
gaacaaggagaucauguac

SEQ ID NO: 2001170 - RNA, 19 nt, Homo sapiens
  misc_RNA (1)...(19): siRNA sense strand
ugaagcugcuggcaucuga

SEQ ID NO: 2001171 - RNA, 19 nt, Homo sapiens
  misc_RNA (1)...(19): siRNA sense strand
acaaacaguucaagaaguc

SEQ ID NO: 2001172 - RNA, 19 nt, Homo sapiens
  misc_RNA (1)...(19): siRNA sense strand
ggacaacaaccgcaucauc

SEQ ID NO: 2001173 - RNA, 19 nt, Homo sapiens
  misc_RNA (1)...(19): siRNA sense strand
cccgggagcuggaugauga

SEQ ID NO: 2001174 - RNA, 19 nt, Homo sapiens
  misc_RNA (1)...(19): siRNA sense strand
uaucaagcguccuuaguca

SEQ ID NO: 2001175 - RNA, 19 nt, Homo sapiens
  misc_RNA (1)...(19): siRNA sense strand
gcagcagccugggaacuga

SEQ ID NO: 2001176 - RNA, 19 nt, Homo sapiens
  misc_RNA (1)...(19): siRNA sense strand
ucuacaagcugacagacuu

SEQ ID NO: 2001177 - RNA, 19 nt, Homo sapiens
  misc_RNA (1)...(19): siRNA sense strand
ggaccugcuucuccacaug

SEQ ID NO: 2001178 - RNA, 19 nt, Homo sapiens
  misc_RNA (1)...(19): siRNA sense strand
guaccugcaucccgacaug

SEQ ID NO: 2001179 - RNA, 19 nt, Homo sapiens
  misc_RNA (1)...(19): siRNA sense strand
caacaaccgcaucaucgaa

SEQ ID NO: 2001180 - RNA, 19 nt, Homo sapiens
  misc_RNA (1)...(19): siRNA sense strand
ggagcuggaugaugaugag

SEQ ID NO: 2001181 - RNA, 19 nt, Homo sapiens
  misc_RNA (1)...(19): siRNA sense strand
uucaagaagucuaggauga

SEQ ID NO: 2001182 - RNA, 19 nt, Homo sapiens
  misc_RNA (1)...(19): siRNA sense strand
gaaguucgucucggucuau

SEQ ID NO: 2001183 - RNA, 19 nt, Homo sapiens
  misc_RNA (1)...(19): siRNA sense strand
ggcaggagcuaauguuucg

SEQ ID NO: 2001184 - RNA, 19 nt, Homo sapiens
  misc_RNA (1)...(19): siRNA sense strand
gcagcgaguugucguccau

SEQ ID NO: 2001185 - RNA, 19 nt, Homo sapiens
  misc_RNA (1)...(19): siRNA sense strand
gaacuucaucuacaaacag

SEQ ID NO: 2001186 - RNA, 19 nt, Homo sapiens
  misc_RNA (1)...(19): siRNA sense strand
gcagagcacagccaauuac

SEQ ID NO: 2001187 - RNA, 19 nt, Homo sapiens
  misc_RNA (1)...(19): siRNA sense strand
gcaggcggauuacaacacu

SEQ ID NO: 2001188 - RNA, 19 nt, Homo sapiens
  misc_RNA (1)...(19): siRNA sense strand
ggaugaugaugagaaguuc

SEQ ID NO: 2001189 - RNA, 19 nt, Homo sapiens
  misc_RNA (1)...(19): siRNA sense strand
gagagcugguugcugugaa

SEQ ID NO: 2001190 - RNA, 19 nt, Homo sapiens
  misc_RNA (1)...(19): siRNA sense strand
aggagugcgugcagaagua

SEQ ID NO: 2001191 - RNA, 19 nt, Homo sapiens
  misc_RNA (1)...(19): siRNA sense strand
gggcuucgaccaguucuuu

SEQ ID NO: 2001192 - RNA, 19 nt, Homo sapiens
  misc_RNA (1)...(19): siRNA sense strand
ccacaacacgauagccauu

SEQ ID NO: 2001193 - RNA, 19 nt, Homo sapiens
  misc_RNA (1)...(19): siRNA sense strand
gaaguaucaagcguccuua

SEQ ID NO: 2001194 - RNA, 19 nt, Homo sapiens
  misc_RNA (1)...(19): siRNA sense strand
ucagguacaugaggacaga

SEQ ID NO: 2001195 - RNA, 19 nt, Homo sapiens
  misc_RNA (1)...(19): siRNA sense strand
agaagguacuggugaugga

SEQ ID NO: 2001196 - RNA, 19 nt, Homo sapiens
  misc_RNA (1)...(19): siRNA sense strand
uacaaacaguucaagaagu

SEQ ID NO: 2001197 - RNA, 19 nt, Homo sapiens
  misc_RNA (1)...(19): siRNA sense strand
cagauucagugcuguuugg

SEQ ID NO: 2001198 - RNA, 19 nt, Homo sapiens
  misc_RNA (1)...(19): siRNA sense strand
gugggagccugcugagugu

SEQ ID NO: 2001199 - RNA, 19 nt, Homo sapiens
  misc_RNA (1)...(19): siRNA sense strand
aaagacuccugcagguguu

SEQ ID NO: 2001200 - RNA, 19 nt, Homo sapiens
  misc_RNA (1)...(19): siRNA sense strand
cagauucacaagcuggaua

SEQ ID NO: 2001201 - RNA, 19 nt, Homo sapiens
  misc_RNA (1)...(19): siRNA sense strand
acagaagcauccagcagau

SEQ ID NO: 2001202 - RNA, 19 nt, Homo sapiens
  misc_RNA (1)...(19): siRNA sense strand
gaaauccggagagcugguu

SEQ ID NO: 2001203 - RNA, 19 nt, Homo sapiens
  misc_RNA (1)...(19): siRNA sense strand
ggagagcugguugcuguga

SEQ ID NO: 2001204 - RNA, 19 nt, Homo sapiens
  misc_RNA (1)...(19): siRNA sense strand
ucgaacggcuaaauagagu

SEQ ID NO: 2001205 - RNA, 19 nt, Homo sapiens
  misc_RNA (1)...(19): siRNA sense strand
caucgaacggcuaaauaga

SEQ ID NO: 2001206 - RNA, 19 nt, Homo sapiens
  misc_RNA (1)...(19): siRNA sense strand
ggcagaagguacuggugau

SEQ ID NO: 2001207 - RNA, 19 nt, Homo sapiens
  misc_RNA (1)...(19): siRNA sense strand
cuacaaacaguucaagaag

SEQ ID NO: 2001208 - RNA, 19 nt, Homo sapiens
  misc_RNA (1)...(19): siRNA sense strand
gcagauucagugcuguuug

SEQ ID NO: 2001209 - RNA, 19 nt, Homo sapiens
  misc_RNA (1)...(19): siRNA sense strand
gggcaggagcuaauguuuc

SEQ ID NO: 2001210 - RNA, 19 nt, Homo sapiens
  misc_RNA (1)...(19): siRNA sense strand
ucuaugggacugaggagua

SEQ ID NO: 2001211 - RNA, 19 nt, Homo sapiens
  misc_RNA (1)...(19): siRNA sense strand
gcuggaugaugaugagaag

SEQ ID NO: 2001212 - RNA, 19 nt, Homo sapiens
  misc_RNA (1)...(19): siRNA sense strand
ugaaccaccugcgggagaa

SEQ ID NO: 2001213 - RNA, 19 nt, Homo sapiens
  misc_RNA (1)...(19): siRNA sense strand
guucuguggcugccuguaa

SEQ ID NO: 2001214 - RNA, 19 nt, Homo sapiens
  misc_RNA (1)...(19): siRNA sense strand
caccaggaguaccucuuug

SEQ ID NO: 2001215 - RNA, 19 nt, Homo sapiens
  misc_RNA (1)...(19): siRNA sense strand
ggagaacggcauugugcau

SEQ ID NO: 2001216 - RNA, 19 nt, Homo sapiens
  misc_RNA (1)...(19): siRNA sense strand
gccgggaucagguacauga

SEQ ID NO: 2001217 - RNA, 19 nt, Homo sapiens
  misc_RNA (1)...(19): siRNA sense strand
caagcuggauaaggugaau

SEQ ID NO: 2001218 - RNA, 19 nt, Homo sapiens
  misc_RNA (1)...(19): siRNA sense strand
ucuacaaacaguucaagaa

SEQ ID NO: 2001219 - RNA, 19 nt, Homo sapiens
  misc_RNA (1)...(19): siRNA sense strand
gaagcauccagcagauuca

SEQ ID NO: 2001220 - RNA, 19 nt, Homo sapiens
  misc_RNA (1)...(19): siRNA sense strand
gagccgggaucagguacau

SEQ ID NO: 2001221 - RNA, 19 nt, Homo sapiens
  misc_RNA (1)...(19): siRNA sense strand
ggaagcugaaccaccagaa

SEQ ID NO: 2001222 - RNA, 19 nt, Homo sapiens
  misc_RNA (1)...(19): siRNA sense strand
acacacggcaagaggauga

SEQ ID NO: 2001223 - RNA, 19 nt, Homo sapiens
  misc_RNA (1)...(19): siRNA sense strand
guaucaagcguccuuaguc

SEQ ID NO: 2001224 - RNA, 19 nt, Homo sapiens
  misc_RNA (1)...(19): siRNA sense strand
acaccaggaguaccucuuu

SEQ ID NO: 2001225 - RNA, 19 nt, Homo sapiens
  misc_RNA (1)...(19): siRNA sense strand
agaaguucgucucggucua

SEQ ID NO: 2001226 - RNA, 19 nt, Homo sapiens
  misc_RNA (1)...(19): siRNA sense strand
cuacaacgaggagcagauu

SEQ ID NO: 2001227 - RNA, 19 nt, Homo sapiens
  misc_RNA (1)...(19): siRNA sense strand
gcaucuacaagcugacaga

SEQ ID NO: 2001228 - RNA, 19 nt, Homo sapiens
  misc_RNA (1)...(19): siRNA sense strand
caucaucgaacggcuaaau

SEQ ID NO: 2001229 - RNA, 19 nt, Homo sapiens
  misc_RNA (1)...(19): siRNA sense strand
gaggagugcgugcagaagu

SEQ ID NO: 2001230 - RNA, 19 nt, Homo sapiens
  misc_RNA (1)...(19): siRNA sense strand
gcagaagguacuggugaug

SEQ ID NO: 2001231 - RNA, 19 nt, Homo sapiens
  misc_RNA (1)...(19): siRNA sense strand
uuucagucauuuagccaaa

SEQ ID NO: 2001232 - RNA, 19 nt, Homo sapiens
  misc_RNA (1)...(19): siRNA sense strand
aaacaguucaagaagucua

SEQ ID NO: 2001233 - RNA, 19 nt, Homo sapiens
  misc_RNA (1)...(19): siRNA sense strand
uggaugaugaugagaaguu

SEQ ID NO: 2001234 - RNA, 19 nt, Homo sapiens
  misc_RNA (1)...(19): siRNA sense strand
agaagcauccagcagauuc

SEQ ID NO: 2001235 - RNA, 19 nt, Homo sapiens
  misc_RNA (1)...(19): siRNA sense strand
uccagaugcucccaaaaua

SEQ ID NO: 2001236 - RNA, 19 nt, Homo sapiens
  misc_RNA (1)...(19): siRNA sense strand
guccugcaccacaucuaua

SEQ ID NO: 2001237 - RNA, 19 nt, Homo sapiens
  misc_RNA (1)...(19): siRNA sense strand
guacaugaggacagaagca

SEQ ID NO: 2001238 - RNA, 19 nt, Homo sapiens
  misc_RNA (1)...(19): siRNA sense strand
ucaagcguccuuagucaca

SEQ ID NO: 2001239 - RNA, 19 nt, Homo sapiens
  misc_RNA (1)...(19): siRNA sense strand
uucacaagcuggauaaggu

SEQ ID NO: 2001240 - RNA, 19 nt, Homo sapiens
  misc_RNA (1)...(19): siRNA sense strand
cagcacagccaucccuaag

SEQ ID NO: 2001241 - RNA, 19 nt, Homo sapiens
  misc_RNA (1)...(19): siRNA sense strand
agaaguaucaagcguccuu

SEQ ID NO: 2001242 - RNA, 19 nt, Homo sapiens
  misc_RNA (1)...(19): siRNA sense strand
ggagugcgugcagaaguau

SEQ ID NO: 2001243 - RNA, 19 nt, Homo sapiens
  misc_RNA (1)...(19): siRNA sense strand
acaacgaggagcagauuca

SEQ ID NO: 2001244 - RNA, 19 nt, Homo sapiens
  misc_RNA (1)...(19): siRNA sense strand
gaagcugaaccaccagaac

SEQ ID NO: 2001245 - RNA, 19 nt, Homo sapiens
  misc_RNA (1)...(19): siRNA sense strand
ggcagagcaucuacaagcu

SEQ ID NO: 2001246 - RNA, 19 nt, Homo sapiens
  misc_RNA (1)...(19): siRNA sense strand
ucaucgaacggcuaaauag

SEQ ID NO: 2001247 - RNA, 19 nt, Homo sapiens
  misc_RNA (1)...(19): siRNA sense strand
acgaggagcagauucacaa

SEQ ID NO: 2001248 - RNA, 19 nt, Homo sapiens
  misc_RNA (1)...(19): siRNA sense strand
acaacacgauagccauuuu

SEQ ID NO: 2001249 - RNA, 19 nt, Homo sapiens
  misc_RNA (1)...(19): siRNA sense strand
cgccucccauagcuccuua

SEQ ID NO: 2001250 - RNA, 19 nt, Homo sapiens
  misc_RNA (1)...(19): siRNA sense strand
gaacuacucuuaagcuuua

SEQ ID NO: 2001251 - RNA, 19 nt, Homo sapiens
  misc_RNA (1)...(19): siRNA sense strand
gaagaaagccagaaaguuu

SEQ ID NO: 2001252 - RNA, 19 nt, Homo sapiens
  misc_RNA (1)...(19): siRNA sense strand
ggacacgguuccuauaaua

SEQ ID NO: 2001253 - RNA, 19 nt, Homo sapiens
  misc_RNA (1)...(19): siRNA sense strand
gcaaauaucucugggaaga

SEQ ID NO: 2001254 - RNA, 19 nt, Homo sapiens
  misc_RNA (1)...(19): siRNA sense strand
ggugacauguuucauaaua

SEQ ID NO: 2001255 - RNA, 19 nt, Homo sapiens
  misc_RNA (1)...(19): siRNA sense strand
gaacuggaaaucauucuua

SEQ ID NO: 2001256 - RNA, 19 nt, Homo sapiens
  misc_RNA (1)...(19): siRNA sense strand
gaagcaaacuuuccacaau

SEQ ID NO: 2001257 - RNA, 19 nt, Homo sapiens
  misc_RNA (1)...(19): siRNA sense strand
gcaaauggccuaaaucaau

SEQ ID NO: 2001258 - RNA, 19 nt, Homo sapiens
  misc_RNA (1)...(19): siRNA sense strand
caaauggccuaaaucaauu

SEQ ID NO: 2001259 - RNA, 19 nt, Homo sapiens
  misc_RNA (1)...(19): siRNA sense strand
cgucugaucucacuguuua

SEQ ID NO: 2001260 - RNA, 19 nt, Homo sapiens
  misc_RNA (1)...(19): siRNA sense strand
gagaagacaucaccaauac

SEQ ID NO: 2001261 - RNA, 19 nt, Homo sapiens
  misc_RNA (1)...(19): siRNA sense strand
agaggaagcugaaauuuau

SEQ ID NO: 2001262 - RNA, 19 nt, Homo sapiens
  misc_RNA (1)...(19): siRNA sense strand
aaccaaaucuucucuguuu

SEQ ID NO: 2001263 - RNA, 19 nt, Homo sapiens
  misc_RNA (1)...(19): siRNA sense strand
ugaauucacuccagacauu

SEQ ID NO: 2001264 - RNA, 19 nt, Homo sapiens
  misc_RNA (1)...(19): siRNA sense strand
gcaaacaucuucaguucuc

SEQ ID NO: 2001265 - RNA, 19 nt, Homo sapiens
  misc_RNA (1)...(19): siRNA sense strand
gauaagcaguucucugaau

SEQ ID NO: 2001266 - RNA, 19 nt, Homo sapiens
  misc_RNA (1)...(19): siRNA sense strand
caagaaaucccuagaggaa

SEQ ID NO: 2001267 - RNA, 19 nt, Homo sapiens
  misc_RNA (1)...(19): siRNA sense strand
gaagaaugcuccuggacau

SEQ ID NO: 2001268 - RNA, 19 nt, Homo sapiens
  misc_RNA (1)...(19): siRNA sense strand
gaacugcucuccucauugc

SEQ ID NO: 2001269 - RNA, 19 nt, Homo sapiens
  misc_RNA (1)...(19): siRNA sense strand
gcucaucgaacuacucuua

SEQ ID NO: 2001270 - RNA, 19 nt, Homo sapiens
  misc_RNA (1)...(19): siRNA sense strand
uauuugggcucaucaauuu

SEQ ID NO: 2001271 - RNA, 19 nt, Homo sapiens
  misc_RNA (1)...(19): siRNA sense strand
gcagaggcuuuauuugcua

SEQ ID NO: 2001272 - RNA, 19 nt, Homo sapiens
  misc_RNA (1)...(19): siRNA sense strand
gaacaaaguggaaaugauc

SEQ ID NO: 2001273 - RNA, 19 nt, Homo sapiens
  misc_RNA (1)...(19): siRNA sense strand
uguuggagaugcucuauua

SEQ ID NO: 2001274 - RNA, 19 nt, Homo sapiens
  misc_RNA (1)...(19): siRNA sense strand
gaaagagaguguguccauu

SEQ ID NO: 2001275 - RNA, 19 nt, Homo sapiens
  misc_RNA (1)...(19): siRNA sense strand
aagcaaacuuuccacaaua

SEQ ID NO: 2001276 - RNA, 19 nt, Homo sapiens
  misc_RNA (1)...(19): siRNA sense strand
gaacuaaagcaagacauuu

SEQ ID NO: 2001277 - RNA, 19 nt, Homo sapiens
  misc_RNA (1)...(19): siRNA sense strand
ccacacagccuccuauuug

SEQ ID NO: 2001278 - RNA, 19 nt, Homo sapiens
  misc_RNA (1)...(19): siRNA sense strand
ucucacagccuuucaguua

SEQ ID NO: 2001279 - RNA, 19 nt, Homo sapiens
  misc_RNA (1)...(19): siRNA sense strand
gcaaaggcauaagauguga

SEQ ID NO: 2001280 - RNA, 19 nt, Homo sapiens
  misc_RNA (1)...(19): siRNA sense strand
gcaugaauuuacugaguuu

SEQ ID NO: 2001281 - RNA, 19 nt, Homo sapiens
  misc_RNA (1)...(19): siRNA sense strand
ugaagauggugacauguuu

SEQ ID NO: 2001282 - RNA, 19 nt, Homo sapiens
  misc_RNA (1)...(19): siRNA sense strand
gcaacaaucuccuugaaaa

SEQ ID NO: 2001283 - RNA, 19 nt, Homo sapiens
  misc_RNA (1)...(19): siRNA sense strand
cuaauggacuuuguaauga

SEQ ID NO: 2001284 - RNA, 19 nt, Homo sapiens
  misc_RNA (1)...(19): siRNA sense strand
gacauuacaccaaucauuu

SEQ ID NO: 2001285 - RNA, 19 nt, Homo sapiens
  misc_RNA (1)...(19): siRNA sense strand
ggagaaacaugcaaaagaa

SEQ ID NO: 2001286 - RNA, 19 nt, Homo sapiens
  misc_RNA (1)...(19): siRNA sense strand
gaccauagagaaaggaaua

SEQ ID NO: 2001287 - RNA, 19 nt, Homo sapiens
  misc_RNA (1)...(19): siRNA sense strand
gaauggaaauuugcacgaa

SEQ ID NO: 2001288 - RNA, 19 nt, Homo sapiens
  misc_RNA (1)...(19): siRNA sense strand
gaagccauuuaucaaguuu

SEQ ID NO: 2001289 - RNA, 19 nt, Homo sapiens
  misc_RNA (1)...(19): siRNA sense strand
ggaagccauuuaucaaguu

SEQ ID NO: 2001290 - RNA, 19 nt, Homo sapiens
  misc_RNA (1)...(19): siRNA sense strand
acaauagucucauagaaga

SEQ ID NO: 2001291 - RNA, 19 nt, Homo sapiens
  misc_RNA (1)...(19): siRNA sense strand
gcucaucaauuuauaugug

SEQ ID NO: 2001292 - RNA, 19 nt, Homo sapiens
  misc_RNA (1)...(19): siRNA sense strand
uagaggaagcugaaauuua

SEQ ID NO: 2001293 - RNA, 19 nt, Homo sapiens
  misc_RNA (1)...(19): siRNA sense strand
caaagcacagcaugaauuu

SEQ ID NO: 2001294 - RNA, 19 nt, Homo sapiens
  misc_RNA (1)...(19): siRNA sense strand
gacgagaaguuccagagaa

SEQ ID NO: 2001295 - RNA, 19 nt, Homo sapiens
  misc_RNA (1)...(19): siRNA sense strand
gaacuuggagcucaucgaa

SEQ ID NO: 2001296 - RNA, 19 nt, Homo sapiens
  misc_RNA (1)...(19): siRNA sense strand
ugacaauagucucauagaa

SEQ ID NO: 2001297 - RNA, 19 nt, Homo sapiens
  misc_RNA (1)...(19): siRNA sense strand
gcaagacauuucuaguuuc

SEQ ID NO: 2001298 - RNA, 19 nt, Homo sapiens
  misc_RNA (1)...(19): siRNA sense strand
gcugauaacuugagaagac

SEQ ID NO: 2001299 - RNA, 19 nt, Homo sapiens
  misc_RNA (1)...(19): siRNA sense strand
gauggugacauguuucaua

SEQ ID NO: 2001300 - RNA, 19 nt, Homo sapiens
  misc_RNA (1)...(19): siRNA sense strand
cagcagcaauugccucuga

SEQ ID NO: 2001301 - RNA, 19 nt, Homo sapiens
  misc_RNA (1)...(19): siRNA sense strand
uuaaggaacuaaagcaaga

SEQ ID NO: 2001302 - RNA, 19 nt, Homo sapiens
  misc_RNA (1)...(19): siRNA sense strand
gcaguucucugaauucacu

SEQ ID NO: 2001303 - RNA, 19 nt, Homo sapiens
  misc_RNA (1)...(19): siRNA sense strand
gagaaauauucaacuggaa

SEQ ID NO: 2001304 - RNA, 19 nt, Homo sapiens
  misc_RNA (1)...(19): siRNA sense strand
gaacugagcaagguggaaa

SEQ ID NO: 2001305 - RNA, 19 nt, Homo sapiens
  misc_RNA (1)...(19): siRNA sense strand
gcuccagacucaacaucua

SEQ ID NO: 2001306 - RNA, 19 nt, Homo sapiens
  misc_RNA (1)...(19): siRNA sense strand
caaaccaaaucuucucugu

SEQ ID NO: 2001307 - RNA, 19 nt, Homo sapiens
  misc_RNA (1)...(19): siRNA sense strand
ugaagaaacgaaaggguua

SEQ ID NO: 2001308 - RNA, 19 nt, Homo sapiens
  misc_RNA (1)...(19): siRNA sense strand
ccugggaccucugcaaaua

SEQ ID NO: 2001309 - RNA, 19 nt, Homo sapiens
  misc_RNA (1)...(19): siRNA sense strand
ggaaccuggugaagcgaua

SEQ ID NO: 2001310 - RNA, 19 nt, Homo sapiens
  misc_RNA (1)...(19): siRNA sense strand
ggaacuaaagcaagacauu

SEQ ID NO: 2001311 - RNA, 19 nt, Homo sapiens
  misc_RNA (1)...(19): siRNA sense strand
gccagucccucucucauug

SEQ ID NO: 2001312 - RNA, 19 nt, Homo sapiens
  misc_RNA (1)...(19): siRNA sense strand
gaucuaaaccucccagaca

SEQ ID NO: 2001313 - RNA, 19 nt, Homo sapiens
  misc_RNA (1)...(19): siRNA sense strand
agcaagacauuucuaguuu

SEQ ID NO: 2001314 - RNA, 19 nt, Homo sapiens
  misc_RNA (1)...(19): siRNA sense strand
ugagaagacaucaccaaua

SEQ ID NO: 2001315 - RNA, 19 nt, Homo sapiens
  misc_RNA (1)...(19): siRNA sense strand
gcgagcugcugauaacuug

SEQ ID NO: 2001316 - RNA, 19 nt, Homo sapiens
  misc_RNA (1)...(19): siRNA sense strand
cuaaggaccuacuggauca

SEQ ID NO: 2001317 - RNA, 19 nt, Homo sapiens
  misc_RNA (1)...(19): siRNA sense strand
gauaguaagagcagaauca

SEQ ID NO: 2001318 - RNA, 19 nt, Homo sapiens
  misc_RNA (1)...(19): siRNA sense strand
ggaaagagaguguguccau

SEQ ID NO: 2001319 - RNA, 19 nt, Homo sapiens
  misc_RNA (1)...(19): siRNA sense strand
caacuggaaucucgaggau

SEQ ID NO: 2001320 - RNA, 19 nt, Homo sapiens
  misc_RNA (1)...(19): siRNA sense strand
caggaccacuugagagaaa

SEQ ID NO: 2001321 - RNA, 19 nt, Homo sapiens
  misc_RNA (1)...(19): siRNA sense strand
gaugcucuauuacaugcua

SEQ ID NO: 2001322 - RNA, 19 nt, Homo sapiens
  misc_RNA (1)...(19): siRNA sense strand
agacauaacauaagcaaug

SEQ ID NO: 2001323 - RNA, 19 nt, Homo sapiens
  misc_RNA (1)...(19): siRNA sense strand
ucugguaccugaucaaaug

SEQ ID NO: 2001324 - RNA, 19 nt, Homo sapiens
  misc_RNA (1)...(19): siRNA sense strand
uaaaguacagugcccuuaa

SEQ ID NO: 2001325 - RNA, 19 nt, Homo sapiens
  misc_RNA (1)...(19): siRNA sense strand
uagcaacaaucuccuugaa

SEQ ID NO: 2001326 - RNA, 19 nt, Homo sapiens
  misc_RNA (1)...(19): siRNA sense strand
gccauuaaguaccgucaaa

SEQ ID NO: 2001327 - RNA, 19 nt, Homo sapiens
  misc_RNA (1)...(19): siRNA sense strand
gguggaaucuaauggacuu

SEQ ID NO: 2001328 - RNA, 19 nt, Homo sapiens
  misc_RNA (1)...(19): siRNA sense strand
caaaggagaaacaugcaaa

SEQ ID NO: 2001329 - RNA, 19 nt, Homo sapiens
  misc_RNA (1)...(19): siRNA sense strand
ucaaagcacagcaugaauu

SEQ ID NO: 2001330 - RNA, 19 nt, Homo sapiens
  misc_RNA (1)...(19): siRNA sense strand
ucuauuacaugcuaucaga

SEQ ID NO: 2001331 - RNA, 19 nt, Homo sapiens
  misc_RNA (1)...(19): siRNA sense strand
gagaguguguccauucaag

SEQ ID NO: 2001332 - RNA, 19 nt, Homo sapiens
  misc_RNA (1)...(19): siRNA sense strand
ugagagaaauauucaacug

SEQ ID NO: 2001333 - RNA, 19 nt, Homo sapiens
  misc_RNA (1)...(19): siRNA sense strand
gcaauugccucugaaagac

SEQ ID NO: 2001334 - RNA, 19 nt, Homo sapiens
  misc_RNA (1)...(19): siRNA sense strand
gaaguccugggauuacuaa

SEQ ID NO: 2001335 - RNA, 19 nt, Homo sapiens
  misc_RNA (1)...(19): siRNA sense strand
gagaagaaagccagaaagu

SEQ ID NO: 2001336 - RNA, 19 nt, Homo sapiens
  misc_RNA (1)...(19): siRNA sense strand
ggaaucuaauggacuuugu

SEQ ID NO: 2001337 - RNA, 19 nt, Homo sapiens
  misc_RNA (1)...(19): siRNA sense strand
gggagaaauuaaacagaug

SEQ ID NO: 2001338 - RNA, 19 nt, Homo sapiens
  misc_RNA (1)...(19): siRNA sense strand
aagaaggccugaccgaaga

SEQ ID NO: 2001339 - RNA, 19 nt, Homo sapiens
  misc_RNA (1)...(19): siRNA sense strand
gaagacaucaccaauacca

SEQ ID NO: 2001340 - RNA, 19 nt, Homo sapiens
  misc_RNA (1)...(19): siRNA sense strand
cagcaugaauuuacugagu

SEQ ID NO: 2001341 - RNA, 19 nt, Homo sapiens
  misc_RNA (1)...(19): siRNA sense strand
gaagaaacgaaaggguuaa

SEQ ID NO: 2001342 - RNA, 19 nt, Homo sapiens
  misc_RNA (1)...(19): siRNA sense strand
gaauucacuccagacauua

SEQ ID NO: 2001343 - RNA, 19 nt, Homo sapiens
  misc_RNA (1)...(19): siRNA sense strand
guuaguagaccauagagaa

SEQ ID NO: 2001344 - RNA, 19 nt, Homo sapiens
  misc_RNA (1)...(19): siRNA sense strand
ugaaagacauaacauaagc

SEQ ID NO: 2001345 - RNA, 19 nt, Homo sapiens
  misc_RNA (1)...(19): siRNA sense strand
gaggcgagcugcugauaac

SEQ ID NO: 2001346 - RNA, 19 nt, Homo sapiens
  misc_RNA (1)...(19): siRNA sense strand
gcagauauagaauggaaau

SEQ ID NO: 2001347 - RNA, 19 nt, Homo sapiens
  misc_RNA (1)...(19): siRNA sense strand
cuacuugaaugcuguggaa

SEQ ID NO: 2001348 - RNA, 19 nt, Homo sapiens
  misc_RNA (1)...(19): siRNA sense strand
gaugugggauggcggacuu

SEQ ID NO: 2001349 - RNA, 19 nt, Homo sapiens
  misc_RNA (1)...(19): siRNA sense strand
gaagaacaaaguggaaaug

SEQ ID NO: 2001350 - RNA, 19 nt, Homo sapiens
  misc_RNA (1)...(19): siRNA sense strand
gagaagauauagugauuac

SEQ ID NO: 2001351 - RNA, 19 nt, Homo sapiens
  misc_RNA (1)...(19): siRNA sense strand
gaccaaggcucgcaauuuu

SEQ ID NO: 2001352 - RNA, 19 nt, Homo sapiens
  misc_RNA (1)...(19): siRNA sense strand
gaaaguagaagaagagcau

SEQ ID NO: 2001353 - RNA, 19 nt, Homo sapiens
  misc_RNA (1)...(19): siRNA sense strand
caugucaccugcaaaauua

SEQ ID NO: 2001354 - RNA, 19 nt, Homo sapiens
  misc_RNA (1)...(19): siRNA sense strand
gaagauauagugauuacag

SEQ ID NO: 2001355 - RNA, 19 nt, Homo sapiens
  misc_RNA (1)...(19): siRNA sense strand
gcacaaggaagacacacaa

SEQ ID NO: 2001356 - RNA, 19 nt, Homo sapiens
  misc_RNA (1)...(19): siRNA sense strand
gaagaagagcauaccaaug

SEQ ID NO: 2001357 - RNA, 19 nt, Homo sapiens
  misc_RNA (1)...(19): siRNA sense strand
ggagaagauauagugauua

SEQ ID NO: 2001358 - RNA, 19 nt, Homo sapiens
  misc_RNA (1)...(19): siRNA sense strand
gcucugcuaugcacggaaa

SEQ ID NO: 2001359 - RNA, 19 nt, Homo sapiens
  misc_RNA (1)...(19): siRNA sense strand
aggagaagauauagugauu

SEQ ID NO: 2001360 - RNA, 19 nt, Homo sapiens
  misc_RNA (1)...(19): siRNA sense strand
gaaaugaaaguagaagaag

SEQ ID NO: 2001361 - RNA, 19 nt, Homo sapiens
  misc_RNA (1)...(19): siRNA sense strand
gggaaagugauuugugaaa

SEQ ID NO: 2001362 - RNA, 19 nt, Homo sapiens
  misc_RNA (1)...(19): siRNA sense strand
cagcacauguucugaagca

SEQ ID NO: 2001363 - RNA, 19 nt, Homo sapiens
  misc_RNA (1)...(19): siRNA sense strand
ugaccaaggcucgcaauuu

SEQ ID NO: 2001364 - RNA, 19 nt, Homo sapiens
  misc_RNA (1)...(19): siRNA sense strand
ccaacaaggccacaggaaa

SEQ ID NO: 2001365 - RNA, 19 nt, Homo sapiens
  misc_RNA (1)...(19): siRNA sense strand
cagccacguuaguagauaa

SEQ ID NO: 2001366 - RNA, 19 nt, Homo sapiens
  misc_RNA (1)...(19): siRNA sense strand
caacaauggcucugcuaug

SEQ ID NO: 2001367 - RNA, 19 nt, Homo sapiens
  misc_RNA (1)...(19): siRNA sense strand
cugggaaagugauuuguga

SEQ ID NO: 2001368 - RNA, 19 nt, Homo sapiens
  misc_RNA (1)...(19): siRNA sense strand
caacaaggccacaggaaaa

SEQ ID NO: 2001369 - RNA, 19 nt, Homo sapiens
  misc_RNA (1)...(19): siRNA sense strand
ugauaaaggccaugaccaa

SEQ ID NO: 2001370 - RNA, 19 nt, Homo sapiens
  misc_RNA (1)...(19): siRNA sense strand
gagucagugucgauaugaa

SEQ ID NO: 2001371 - RNA, 19 nt, Homo sapiens
  misc_RNA (1)...(19): siRNA sense strand
ggagucagugucgauauga

SEQ ID NO: 2001372 - RNA, 19 nt, Homo sapiens
  misc_RNA (1)...(19): siRNA sense strand
cggagucagugucgauaug

SEQ ID NO: 2001373 - RNA, 19 nt, Homo sapiens
  misc_RNA (1)...(19): siRNA sense strand
auuaauagcacaaggaaga

SEQ ID NO: 2001374 - RNA, 19 nt, Homo sapiens
  misc_RNA (1)...(19): siRNA sense strand
ugacagccacguuaguaga

SEQ ID NO: 2001375 - RNA, 19 nt, Homo sapiens
  misc_RNA (1)...(19): siRNA sense strand
caaaacaccugggaaacug

SEQ ID NO: 2001376 - RNA, 19 nt, Homo sapiens
  misc_RNA (1)...(19): siRNA sense strand
caaggccacaggaaaauua

SEQ ID NO: 2001377 - RNA, 19 nt, Homo sapiens
  misc_RNA (1)...(19): siRNA sense strand
gauuacagcacauguucug

SEQ ID NO: 2001378 - RNA, 19 nt, Homo sapiens
  misc_RNA (1)...(19): siRNA sense strand
agaagaagagcauaccaau

SEQ ID NO: 2001379 - RNA, 19 nt, Homo sapiens
  misc_RNA (1)...(19): siRNA sense strand
guacaugucaccugcaaaa

SEQ ID NO: 2001380 - RNA, 19 nt, Homo sapiens
  misc_RNA (1)...(19): siRNA sense strand
acagccacguuaguagaua

SEQ ID NO: 2001381 - RNA, 19 nt, Homo sapiens
  misc_RNA (1)...(19): siRNA sense strand
cuguggaucugaccaacaa

SEQ ID NO: 2001382 - RNA, 19 nt, Homo sapiens
  misc_RNA (1)...(19): siRNA sense strand
uagaagaagagcauaccaa

SEQ ID NO: 2001383 - RNA, 19 nt, Homo sapiens
  misc_RNA (1)...(19): siRNA sense strand
uuacagcacauguucugaa

SEQ ID NO: 2001384 - RNA, 19 nt, Homo sapiens
  misc_RNA (1)...(19): siRNA sense strand
gugauuacagcacauguuc

SEQ ID NO: 2001385 - RNA, 19 nt, Homo sapiens
  misc_RNA (1)...(19): siRNA sense strand
aacaauggcucugcuaugc

SEQ ID NO: 2001386 - RNA, 19 nt, Homo sapiens
  misc_RNA (1)...(19): siRNA sense strand
ucaacaauggcucugcuau

SEQ ID NO: 2001387 - RNA, 19 nt, Homo sapiens
  misc_RNA (1)...(19): siRNA sense strand
uacagcacauguucugaag

SEQ ID NO: 2001388 - RNA, 19 nt, Homo sapiens
  misc_RNA (1)...(19): siRNA sense strand
gcaaaauuaggagaagaua

SEQ ID NO: 2001389 - RNA, 19 nt, Homo sapiens
  misc_RNA (1)...(19): siRNA sense strand
gacagccacguuaguagau

SEQ ID NO: 2001390 - RNA, 19 nt, Homo sapiens
  misc_RNA (1)...(19): siRNA sense strand
ggccacaggaaaauuaaua

SEQ ID NO: 2001391 - RNA, 19 nt, Homo sapiens
  misc_RNA (1)...(19): siRNA sense strand
ccaaugcaauaggcacucu

SEQ ID NO: 2001392 - RNA, 19 nt, Homo sapiens
  misc_RNA (1)...(19): siRNA sense strand
gaagugaucuugauucauc

SEQ ID NO: 2001393 - RNA, 19 nt, Homo sapiens
  misc_RNA (1)...(19): siRNA sense strand
caaaugaacuaacaaaugg

SEQ ID NO: 2001394 - RNA, 19 nt, Homo sapiens
  misc_RNA (1)...(19): siRNA sense strand
gcaaagcccuuggaaguga

SEQ ID NO: 2001395 - RNA, 19 nt, Homo sapiens
  misc_RNA (1)...(19): siRNA sense strand
gaagaaaggacaauguaaa

SEQ ID NO: 2001396 - RNA, 19 nt, Homo sapiens
  misc_RNA (1)...(19): siRNA sense strand
aaagaaaccuggaaacaau

SEQ ID NO: 2001397 - RNA, 19 nt, Homo sapiens
  misc_RNA (1)...(19): siRNA sense strand
ggacaacgccuucaacuuc

SEQ ID NO: 2001398 - RNA, 19 nt, Homo sapiens
  misc_RNA (1)...(19): siRNA sense strand
gcauagaccuguuuaguac

SEQ ID NO: 2001399 - RNA, 19 nt, Homo sapiens
  misc_RNA (1)...(19): siRNA sense strand
caagaaaccuccagcaaag

SEQ ID NO: 2001400 - RNA, 19 nt, Homo sapiens
  misc_RNA (1)...(19): siRNA sense strand
gcaaguugguauugauaaa

SEQ ID NO: 2001401 - RNA, 19 nt, Homo sapiens
  misc_RNA (1)...(19): siRNA sense strand
cagcaaagguggauucuuc

SEQ ID NO: 2001402 - RNA, 19 nt, Homo sapiens
  misc_RNA (1)...(19): siRNA sense strand
gaaagaaaccuggaaacaa

SEQ ID NO: 2001403 - RNA, 19 nt, Homo sapiens
  misc_RNA (1)...(19): siRNA sense strand
gcaaagccacuacucauga

SEQ ID NO: 2001404 - RNA, 19 nt, Homo sapiens
  misc_RNA (1)...(19): siRNA sense strand
cuagauaucuuuggugauu

SEQ ID NO: 2001405 - RNA, 19 nt, Homo sapiens
  misc_RNA (1)...(19): siRNA sense strand
gaaaggacaauguaaagau

SEQ ID NO: 2001406 - RNA, 19 nt, Homo sapiens
  misc_RNA (1)...(19): siRNA sense strand
gaucuugauucaucucuug

SEQ ID NO: 2001407 - RNA, 19 nt, Homo sapiens
  misc_RNA (1)...(19): siRNA sense strand
cuacaaugaugguguuauu

SEQ ID NO: 2001408 - RNA, 19 nt, Homo sapiens
  misc_RNA (1)...(19): siRNA sense strand
guaaagaugcucuagaaau

SEQ ID NO: 2001409 - RNA, 19 nt, Homo sapiens
  misc_RNA (1)...(19): siRNA sense strand
gaucuuaacaucaaggauu

SEQ ID NO: 2001410 - RNA, 19 nt, Homo sapiens
  misc_RNA (1)...(19): siRNA sense strand
gacaacacaucaucucaug

SEQ ID NO: 2001411 - RNA, 19 nt, Homo sapiens
  misc_RNA (1)...(19): siRNA sense strand
ucucacugcugaccucuua

SEQ ID NO: 2001412 - RNA, 19 nt, Homo sapiens
  misc_RNA (1)...(19): siRNA sense strand
cgagaccaauguuaauauu

SEQ ID NO: 2001413 - RNA, 19 nt, Homo sapiens
  misc_RNA (1)...(19): siRNA sense strand
gcaaugaagccaccugaga

SEQ ID NO: 2001414 - RNA, 19 nt, Homo sapiens
  misc_RNA (1)...(19): siRNA sense strand
caaauggugucauaaaugc

SEQ ID NO: 2001415 - RNA, 19 nt, Homo sapiens
  misc_RNA (1)...(19): siRNA sense strand
ccaaaugaacuaacaaaug

SEQ ID NO: 2001416 - RNA, 19 nt, Homo sapiens
  misc_RNA (1)...(19): siRNA sense strand
gcuaaagaguaugccaaua

SEQ ID NO: 2001417 - RNA, 19 nt, Homo sapiens
  misc_RNA (1)...(19): siRNA sense strand
acagacagauggccuuuga

SEQ ID NO: 2001418 - RNA, 19 nt, Homo sapiens
  misc_RNA (1)...(19): siRNA sense strand
uagcggaucuuaacaucaa

SEQ ID NO: 2001419 - RNA, 19 nt, Homo sapiens
  misc_RNA (1)...(19): siRNA sense strand
ccaagaaaccuccagcaaa

SEQ ID NO: 2001420 - RNA, 19 nt, Homo sapiens
  misc_RNA (1)...(19): siRNA sense strand
acuaacaaauggugucaua

SEQ ID NO: 2001421 - RNA, 19 nt, Homo sapiens
  misc_RNA (1)...(19): siRNA sense strand
caaagccacuacucaugaa

SEQ ID NO: 2001422 - RNA, 19 nt, Homo sapiens
  misc_RNA (1)...(19): siRNA sense strand
ggagaugccuuugcagcuu

SEQ ID NO: 2001423 - RNA, 19 nt, Homo sapiens
  misc_RNA (1)...(19): siRNA sense strand
aaaagcaccuggacuauuu

SEQ ID NO: 2001424 - RNA, 19 nt, Homo sapiens
  misc_RNA (1)...(19): siRNA sense strand
guggaaugcuggagagaaa

SEQ ID NO: 2001425 - RNA, 19 nt, Homo sapiens
  misc_RNA (1)...(19): siRNA sense strand
ggaaagaaaccuggaaaca

SEQ ID NO: 2001426 - RNA, 19 nt, Homo sapiens
  misc_RNA (1)...(19): siRNA sense strand
gaacagcaucuaaauacau

SEQ ID NO: 2001427 - RNA, 19 nt, Homo sapiens
  misc_RNA (1)...(19): siRNA sense strand
ccaacgagaccaauguuaa

SEQ ID NO: 2001428 - RNA, 19 nt, Homo sapiens
  misc_RNA (1)...(19): siRNA sense strand
ggugcucccucuccauuaa

SEQ ID NO: 2001429 - RNA, 19 nt, Homo sapiens
  misc_RNA (1)...(19): siRNA sense strand
gagcaaguugguauugaua

SEQ ID NO: 2001430 - RNA, 19 nt, Homo sapiens
  misc_RNA (1)...(19): siRNA sense strand
gcugggugguuguguuuaa

SEQ ID NO: 2001431 - RNA, 19 nt, Homo sapiens
  misc_RNA (1)...(19): siRNA sense strand
ugaaguggaucucuuugga

SEQ ID NO: 2001432 - RNA, 19 nt, Homo sapiens
  misc_RNA (1)...(19): siRNA sense strand
gaaaagcugcuaaagagua

SEQ ID NO: 2001433 - RNA, 19 nt, Homo sapiens
  misc_RNA (1)...(19): siRNA sense strand
guuaugauaugucuaccuu

SEQ ID NO: 2001434 - RNA, 19 nt, Homo sapiens
  misc_RNA (1)...(19): siRNA sense strand
caacuggcagccuaaagua

SEQ ID NO: 2001435 - RNA, 19 nt, Homo sapiens
  misc_RNA (1)...(19): siRNA sense strand
gaccaguguuccuguaguu

SEQ ID NO: 2001436 - RNA, 19 nt, Homo sapiens
  misc_RNA (1)...(19): siRNA sense strand
aaaggacaauguaaagaug

SEQ ID NO: 2001437 - RNA, 19 nt, Homo sapiens
  misc_RNA (1)...(19): siRNA sense strand
cagcaaagcccuuggaagu

SEQ ID NO: 2001438 - RNA, 19 nt, Homo sapiens
  misc_RNA (1)...(19): siRNA sense strand
gcacagauuucagauccau

SEQ ID NO: 2001439 - RNA, 19 nt, Homo sapiens
  misc_RNA (1)...(19): siRNA sense strand
uacuacaacugcugaaauu

SEQ ID NO: 2001440 - RNA, 19 nt, Homo sapiens
  misc_RNA (1)...(19): siRNA sense strand
guuuaaggcuuuagugaca

SEQ ID NO: 2001441 - RNA, 19 nt, Homo sapiens
  misc_RNA (1)...(19): siRNA sense strand
uaugauaugucuaccuuca

SEQ ID NO: 2001442 - RNA, 19 nt, Homo sapiens
  misc_RNA (1)...(19): siRNA sense strand
ugacauuccugaccucaca

SEQ ID NO: 2001443 - RNA, 19 nt, Homo sapiens
  misc_RNA (1)...(19): siRNA sense strand
gaaccuaccccuccuacua

SEQ ID NO: 2001444 - RNA, 19 nt, Homo sapiens
  misc_RNA (1)...(19): siRNA sense strand
acaaauugaugcacugcuu

SEQ ID NO: 2001445 - RNA, 19 nt, Homo sapiens
  misc_RNA (1)...(19): siRNA sense strand
caacgagaccaauguuaau

SEQ ID NO: 2001446 - RNA, 19 nt, Homo sapiens
  misc_RNA (1)...(19): siRNA sense strand
agggagaucuucaguggaa

SEQ ID NO: 2001447 - RNA, 19 nt, Homo sapiens
  misc_RNA (1)...(19): siRNA sense strand
gaaggaaagaaaccuggaa

SEQ ID NO: 2001448 - RNA, 19 nt, Homo sapiens
  misc_RNA (1)...(19): siRNA sense strand
gcauccaaaugaacuaaca

SEQ ID NO: 2001449 - RNA, 19 nt, Homo sapiens
  misc_RNA (1)...(19): siRNA sense strand
caccugagcuggaccucuu

SEQ ID NO: 2001450 - RNA, 19 nt, Homo sapiens
  misc_RNA (1)...(19): siRNA sense strand
gacagauggccuuugauuu

SEQ ID NO: 2001451 - RNA, 19 nt, Homo sapiens
  misc_RNA (1)...(19): siRNA sense strand
cugcugaccucuuaucugu

SEQ ID NO: 2001452 - RNA, 19 nt, Homo sapiens
  misc_RNA (1)...(19): siRNA sense strand
acuguuacgucuccuaauu

SEQ ID NO: 2001453 - RNA, 19 nt, Homo sapiens
  misc_RNA (1)...(19): siRNA sense strand
ugaagaaaggacaauguaa

SEQ ID NO: 2001454 - RNA, 19 nt, Homo sapiens
  misc_RNA (1)...(19): siRNA sense strand
auaaggcgcuauaguagau

SEQ ID NO: 2001455 - RNA, 19 nt, Homo sapiens
  misc_RNA (1)...(19): siRNA sense strand
gcaccuggacuauuugauc

SEQ ID NO: 2001456 - RNA, 19 nt, Homo sapiens
  misc_RNA (1)...(19): siRNA sense strand
gagcuggaccucuuugcaa

SEQ ID NO: 2001457 - RNA, 19 nt, Homo sapiens
  misc_RNA (1)...(19): siRNA sense strand
caacuguuacgucuccuaa

SEQ ID NO: 2001458 - RNA, 19 nt, Homo sapiens
  misc_RNA (1)...(19): siRNA sense strand
gcgcuauaguagauauuug

SEQ ID NO: 2001459 - RNA, 19 nt, Homo sapiens
  misc_RNA (1)...(19): siRNA sense strand
guaccuggcacgcagcuuu

SEQ ID NO: 2001460 - RNA, 19 nt, Homo sapiens
  misc_RNA (1)...(19): siRNA sense strand
ugacuccagcucagaauaa

SEQ ID NO: 2001461 - RNA, 19 nt, Homo sapiens
  misc_RNA (1)...(19): siRNA sense strand
ugagaccaguguuccugua

SEQ ID NO: 2001462 - RNA, 19 nt, Homo sapiens
  misc_RNA (1)...(19): siRNA sense strand
gcuucugccuccacuacua

SEQ ID NO: 2001463 - RNA, 19 nt, Homo sapiens
  misc_RNA (1)...(19): siRNA sense strand
gauuucagauccauuugca

SEQ ID NO: 2001464 - RNA, 19 nt, Homo sapiens
  misc_RNA (1)...(19): siRNA sense strand
gcagagcaaguugguauug

SEQ ID NO: 2001465 - RNA, 19 nt, Homo sapiens
  misc_RNA (1)...(19): siRNA sense strand
uugaugcacugcuugaauu

SEQ ID NO: 2001466 - RNA, 19 nt, Homo sapiens
  misc_RNA (1)...(19): siRNA sense strand
agacagauggccuuugauu

SEQ ID NO: 2001467 - RNA, 19 nt, Homo sapiens
  misc_RNA (1)...(19): siRNA sense strand
gacaauggcucccgaaaag

SEQ ID NO: 2001468 - RNA, 19 nt, Homo sapiens
  misc_RNA (1)...(19): siRNA sense strand
ggaccucuuugcaaugaag

SEQ ID NO: 2001469 - RNA, 19 nt, Homo sapiens
  misc_RNA (1)...(19): siRNA sense strand
cagagcaaguugguauuga

SEQ ID NO: 2001470 - RNA, 19 nt, Homo sapiens
  misc_RNA (1)...(19): siRNA sense strand
gaaaugaagaaaggacaau

SEQ ID NO: 2001471 - RNA, 19 nt, Homo sapiens
  misc_RNA (1)...(19): siRNA sense strand
gaacuaacaaaugguguca

SEQ ID NO: 2001472 - RNA, 19 nt, Homo sapiens
  misc_RNA (1)...(19): siRNA sense strand
caacacaucaucucauggu

SEQ ID NO: 2001473 - RNA, 19 nt, Homo sapiens
  misc_RNA (1)...(19): siRNA sense strand
guagcugggugguuguguu

SEQ ID NO: 2001474 - RNA, 19 nt, Homo sapiens
  misc_RNA (1)...(19): siRNA sense strand
ggaccuccagccagacuuu

SEQ ID NO: 2001475 - RNA, 19 nt, Homo sapiens
  misc_RNA (1)...(19): siRNA sense strand
gagcgggcaacaaacagua

SEQ ID NO: 2001476 - RNA, 19 nt, Homo sapiens
  misc_RNA (1)...(19): siRNA sense strand
uggaagugaucuugauuca

SEQ ID NO: 2001477 - RNA, 19 nt, Homo sapiens
  misc_RNA (1)...(19): siRNA sense strand
acaaauggugucauaaaug

SEQ ID NO: 2001478 - RNA, 19 nt, Homo sapiens
  misc_RNA (1)...(19): siRNA sense strand
ugaacagcaucuaaauaca

SEQ ID NO: 2001479 - RNA, 19 nt, Homo sapiens
  misc_RNA (1)...(19): siRNA sense strand
auguaaagaugcucuagaa

SEQ ID NO: 2001480 - RNA, 19 nt, Homo sapiens
  misc_RNA (1)...(19): siRNA sense strand
acaaacgauuucuaacuag

SEQ ID NO: 2001481 - RNA, 19 nt, Homo sapiens
  misc_RNA (1)...(19): siRNA sense strand
gcaacugccucagcuucug

SEQ ID NO: 2001482 - RNA, 19 nt, Homo sapiens
  misc_RNA (1)...(19): siRNA sense strand
ucuaaaccaucuagugauc

SEQ ID NO: 2001483 - RNA, 19 nt, Homo sapiens
  misc_RNA (1)...(19): siRNA sense strand
aguaggcaaucuuggaauu

SEQ ID NO: 2001484 - RNA, 19 nt, Homo sapiens
  misc_RNA (1)...(19): siRNA sense strand
cuuuggagcugccgcugua

SEQ ID NO: 2001485 - RNA, 19 nt, Homo sapiens
  misc_RNA (1)...(19): siRNA sense strand
aaaguggaucccaugguua

SEQ ID NO: 2001486 - RNA, 19 nt, Homo sapiens
  misc_RNA (1)...(19): siRNA sense strand
caagagcggucugcaaagc

SEQ ID NO: 2001487 - RNA, 19 nt, Homo sapiens
  misc_RNA (1)...(19): siRNA sense strand
acagauuucagauccauuu

SEQ ID NO: 2001488 - RNA, 19 nt, Homo sapiens
  misc_RNA (1)...(19): siRNA sense strand
uggcugcacuuuccucugu

SEQ ID NO: 2001489 - RNA, 19 nt, Homo sapiens
  misc_RNA (1)...(19): siRNA sense strand
cuacagggacaaauugaug

SEQ ID NO: 2001490 - RNA, 19 nt, Homo sapiens
  misc_RNA (1)...(19): siRNA sense strand
ccgaaaagcugcuaaagag

SEQ ID NO: 2001491 - RNA, 19 nt, Homo sapiens
  misc_RNA (1)...(19): siRNA sense strand
ggagcaggauuuggaaugc

SEQ ID NO: 2001492 - RNA, 19 nt, Homo sapiens
  misc_RNA (1)...(19): siRNA sense strand
gaagaaacuugcugaagaa

SEQ ID NO: 2001493 - RNA, 19 nt, Homo sapiens
  misc_RNA (1)...(19): siRNA sense strand
gaacucaacuggagaagug

SEQ ID NO: 2001494 - RNA, 19 nt, Homo sapiens
  misc_RNA (1)...(19): siRNA sense strand
gaaacugaauugcaaagaa

SEQ ID NO: 2001495 - RNA, 19 nt, Homo sapiens
  misc_RNA (1)...(19): siRNA sense strand
gaaagaacacccagguuaa

SEQ ID NO: 2001496 - RNA, 19 nt, Homo sapiens
  misc_RNA (1)...(19): siRNA sense strand
guuaaugccugauaaagaa

SEQ ID NO: 2001497 - RNA, 19 nt, Homo sapiens
  misc_RNA (1)...(19): siRNA sense strand
ugaagaaacuugcugaaga

SEQ ID NO: 2001498 - RNA, 19 nt, Homo sapiens
  misc_RNA (1)...(19): siRNA sense strand
ugaaagaacacccagguua

SEQ ID NO: 2001499 - RNA, 19 nt, Homo sapiens
  misc_RNA (1)...(19): siRNA sense strand
ggacaugucaacaauauau

SEQ ID NO: 2001500 - RNA, 19 nt, Homo sapiens
  misc_RNA (1)...(19): siRNA sense strand
gcaaagaagaaaugaagaa

SEQ ID NO: 2001501 - RNA, 19 nt, Homo sapiens
  misc_RNA (1)...(19): siRNA sense strand
aaacccagauuuacaagaa

SEQ ID NO: 2001502 - RNA, 19 nt, Homo sapiens
  misc_RNA (1)...(19): siRNA sense strand
gcacuuagacccagaccaa

SEQ ID NO: 2001503 - RNA, 19 nt, Homo sapiens
  misc_RNA (1)...(19): siRNA sense strand
gaaacgacuuaaaucaaag

SEQ ID NO: 2001504 - RNA, 19 nt, Homo sapiens
  misc_RNA (1)...(19): siRNA sense strand
gaaagagacuuggcagcau

SEQ ID NO: 2001505 - RNA, 19 nt, Homo sapiens
  misc_RNA (1)...(19): siRNA sense strand
gcaacuacaaggauucgua

SEQ ID NO: 2001506 - RNA, 19 nt, Homo sapiens
  misc_RNA (1)...(19): siRNA sense strand
uaggacaugucaacaauau

SEQ ID NO: 2001507 - RNA, 19 nt, Homo sapiens
  misc_RNA (1)...(19): siRNA sense strand
gaagagggccagcaaccuu

SEQ ID NO: 2001508 - RNA, 19 nt, Homo sapiens
  misc_RNA (1)...(19): siRNA sense strand
gcacaaugagccuugguuu

SEQ ID NO: 2001509 - RNA, 19 nt, Homo sapiens
  misc_RNA (1)...(19): siRNA sense strand
gguugaaacugaauugcaa

SEQ ID NO: 2001510 - RNA, 19 nt, Homo sapiens
  misc_RNA (1)...(19): siRNA sense strand
gagaagugccuguccuuau

SEQ ID NO: 2001511 - RNA, 19 nt, Homo sapiens
  misc_RNA (1)...(19): siRNA sense strand
caagaagcauacauugcaa

SEQ ID NO: 2001512 - RNA, 19 nt, Homo sapiens
  misc_RNA (1)...(19): siRNA sense strand
ggagaagugccuguccuua

SEQ ID NO: 2001513 - RNA, 19 nt, Homo sapiens
  misc_RNA (1)...(19): siRNA sense strand
gaaaauucuugaugaguug

SEQ ID NO: 2001514 - RNA, 19 nt, Homo sapiens
  misc_RNA (1)...(19): siRNA sense strand
caaacuuggaaaccuauua

SEQ ID NO: 2001515 - RNA, 19 nt, Homo sapiens
  misc_RNA (1)...(19): siRNA sense strand
gccaauggaugccuauaca

SEQ ID NO: 2001516 - RNA, 19 nt, Homo sapiens
  misc_RNA (1)...(19): siRNA sense strand
aaacugaauugcaaagaag

SEQ ID NO: 2001517 - RNA, 19 nt, Homo sapiens
  misc_RNA (1)...(19): siRNA sense strand
gagagcugcuugacuccuu

SEQ ID NO: 2001518 - RNA, 19 nt, Homo sapiens
  misc_RNA (1)...(19): siRNA sense strand
acaaugagccuugguuuau

SEQ ID NO: 2001519 - RNA, 19 nt, Homo sapiens
  misc_RNA (1)...(19): siRNA sense strand
gaauugcaaagaagaaaug

SEQ ID NO: 2001520 - RNA, 19 nt, Homo sapiens
  misc_RNA (1)...(19): siRNA sense strand
gggaaaacauaauuuguga

SEQ ID NO: 2001521 - RNA, 19 nt, Homo sapiens
  misc_RNA (1)...(19): siRNA sense strand
agguuaagcucauucugua

SEQ ID NO: 2001522 - RNA, 19 nt, Homo sapiens
  misc_RNA (1)...(19): siRNA sense strand
agaagugccuguccuuauc

SEQ ID NO: 2001523 - RNA, 19 nt, Homo sapiens
  misc_RNA (1)...(19): siRNA sense strand
gaaagucuuggaucagguu

SEQ ID NO: 2001524 - RNA, 19 nt, Homo sapiens
  misc_RNA (1)...(19): siRNA sense strand
cagaaacgacuuaaaucaa

SEQ ID NO: 2001525 - RNA, 19 nt, Homo sapiens
  misc_RNA (1)...(19): siRNA sense strand
gauguaagucugcccuuga

SEQ ID NO: 2001526 - RNA, 19 nt, Homo sapiens
  misc_RNA (1)...(19): siRNA sense strand
agucugagcugaagaaacu

SEQ ID NO: 2001527 - RNA, 19 nt, Homo sapiens
  misc_RNA (1)...(19): siRNA sense strand
gguuaaugccugauaaaga

SEQ ID NO: 2001528 - RNA, 19 nt, Homo sapiens
  misc_RNA (1)...(19): siRNA sense strand
caaugagccuugguuuaug

SEQ ID NO: 2001529 - RNA, 19 nt, Homo sapiens
  misc_RNA (1)...(19): siRNA sense strand
cacaaugagccuugguuua

SEQ ID NO: 2001530 - RNA, 19 nt, Homo sapiens
  misc_RNA (1)...(19): siRNA sense strand
aaggugcgcuugguaauug

SEQ ID NO: 2001531 - RNA, 19 nt, Homo sapiens
  misc_RNA (1)...(19): siRNA sense strand
agcaugauauuagcacuua

SEQ ID NO: 2001532 - RNA, 19 nt, Homo sapiens
  misc_RNA (1)...(19): siRNA sense strand
gagguuaagcucauucugu

SEQ ID NO: 2001533 - RNA, 19 nt, Homo sapiens
  misc_RNA (1)...(19): siRNA sense strand
ugaacagacuuuccuggau

SEQ ID NO: 2001534 - RNA, 19 nt, Homo sapiens
  misc_RNA (1)...(19): siRNA sense strand
uggagaaagucuuggauca

SEQ ID NO: 2001535 - RNA, 19 nt, Homo sapiens
  misc_RNA (1)...(19): siRNA sense strand
gaaacuugcugaagaaaac

SEQ ID NO: 2001536 - RNA, 19 nt, Homo sapiens
  misc_RNA (1)...(19): siRNA sense strand
ugaagaaaacccagauuua

SEQ ID NO: 2001537 - RNA, 19 nt, Homo sapiens
  misc_RNA (1)...(19): siRNA sense strand
cauuuuacauccugaguua

SEQ ID NO: 2001538 - RNA, 19 nt, Homo sapiens
  misc_RNA (1)...(19): siRNA sense strand
agacuuggcagcaugauau

SEQ ID NO: 2001539 - RNA, 19 nt, Homo sapiens
  misc_RNA (1)...(19): siRNA sense strand
gcaaaacagaaacgacuua

SEQ ID NO: 2001540 - RNA, 19 nt, Homo sapiens
  misc_RNA (1)...(19): siRNA sense strand
gaagugcgagggacaugau

SEQ ID NO: 2001541 - RNA, 19 nt, Homo sapiens
  misc_RNA (1)...(19): siRNA sense strand
acagaaacgacuuaaauca

SEQ ID NO: 2001542 - RNA, 19 nt, Homo sapiens
  misc_RNA (1)...(19): siRNA sense strand
gaucccggcuuaugcaacu

SEQ ID NO: 2001543 - RNA, 19 nt, Homo sapiens
  misc_RNA (1)...(19): siRNA sense strand
cuauacacauggcugcauu

SEQ ID NO: 2001544 - RNA, 19 nt, Homo sapiens
  misc_RNA (1)...(19): siRNA sense strand
uaagucugcccuugaguga

SEQ ID NO: 2001545 - RNA, 19 nt, Homo sapiens
  misc_RNA (1)...(19): siRNA sense strand
gagacuuggcagcaugaua

SEQ ID NO: 2001546 - RNA, 19 nt, Homo sapiens
  misc_RNA (1)...(19): siRNA sense strand
uugcaggagugggauauuu

SEQ ID NO: 2001547 - RNA, 19 nt, Homo sapiens
  misc_RNA (1)...(19): siRNA sense strand
acaagaagcauacauugca

SEQ ID NO: 2001548 - RNA, 19 nt, Homo sapiens
  misc_RNA (1)...(19): siRNA sense strand
uuacaagaagcauacauug

SEQ ID NO: 2001549 - RNA, 19 nt, Homo sapiens
  misc_RNA (1)...(19): siRNA sense strand
uuuaggacaugucaacaau

SEQ ID NO: 2001550 - RNA, 19 nt, Homo sapiens
  misc_RNA (1)...(19): siRNA sense strand
aagaagaaaugaagaaacc

SEQ ID NO: 2001551 - RNA, 19 nt, Homo sapiens
  misc_RNA (1)...(19): siRNA sense strand
agacccagaccaaauuauu

SEQ ID NO: 2001552 - RNA, 19 nt, Homo sapiens
  misc_RNA (1)...(19): siRNA sense strand
acacauggcugcauuuuac

SEQ ID NO: 2001553 - RNA, 19 nt, Homo sapiens
  misc_RNA (1)...(19): siRNA sense strand
caauggaugccuauacaca

SEQ ID NO: 2001554 - RNA, 19 nt, Homo sapiens
  misc_RNA (1)...(19): siRNA sense strand
uugaugaguuggagaaagu

SEQ ID NO: 2001555 - RNA, 19 nt, Homo sapiens
  misc_RNA (1)...(19): siRNA sense strand
gaagaaaacccagauuuac

SEQ ID NO: 2001556 - RNA, 19 nt, Homo sapiens
  misc_RNA (1)...(19): siRNA sense strand
caaaaggugcgcuugguaa

SEQ ID NO: 2001557 - RNA, 19 nt, Homo sapiens
  misc_RNA (1)...(19): siRNA sense strand
ggaaacggaaagcgaccaa

SEQ ID NO: 2001558 - RNA, 19 nt, Homo sapiens
  misc_RNA (1)...(19): siRNA sense strand
cucacucgcugucacauug

SEQ ID NO: 2001559 - RNA, 19 nt, Homo sapiens
  misc_RNA (1)...(19): siRNA sense strand
gcugcuugaucaugacaau

SEQ ID NO: 2001560 - RNA, 19 nt, Homo sapiens
  misc_RNA (1)...(19): siRNA sense strand
caaauuggaaacacagagu

SEQ ID NO: 2001561 - RNA, 19 nt, Homo sapiens
  misc_RNA (1)...(19): siRNA sense strand
aaagaacacccagguuaau

SEQ ID NO: 2001562 - RNA, 19 nt, Homo sapiens
  misc_RNA (1)...(19): siRNA sense strand
uuaugcaacuacaaggauu

SEQ ID NO: 2001563 - RNA, 19 nt, Homo sapiens
  misc_RNA (1)...(19): siRNA sense strand
aaagaaagcauguauuacc

SEQ ID NO: 2001564 - RNA, 19 nt, Homo sapiens
  misc_RNA (1)...(19): siRNA sense strand
aaggauucguagccaaauu

SEQ ID NO: 2001565 - RNA, 19 nt, Homo sapiens
  misc_RNA (1)...(19): siRNA sense strand
acaaggauucguagccaaa

SEQ ID NO: 2001566 - RNA, 19 nt, Homo sapiens
  misc_RNA (1)...(19): siRNA sense strand
aagcauacauugcaaaaca

SEQ ID NO: 2001567 - RNA, 19 nt, Homo sapiens
  misc_RNA (1)...(19): siRNA sense strand
caugauauuagcacuuaga

SEQ ID NO: 2001568 - RNA, 19 nt, Homo sapiens
  misc_RNA (1)...(19): siRNA sense strand
ggagugggauauuuugcuu

SEQ ID NO: 2001569 - RNA, 19 nt, Homo sapiens
  misc_RNA (1)...(19): siRNA sense strand
cgacccuugugguugguuu

SEQ ID NO: 2001570 - RNA, 19 nt, Homo sapiens
  misc_RNA (1)...(19): siRNA sense strand
uuacgagcgugucuugaag

SEQ ID NO: 2001571 - RNA, 19 nt, Homo sapiens
  misc_RNA (1)...(19): siRNA sense strand
gaaacggaaagcgaccaaa

SEQ ID NO: 2001572 - RNA, 19 nt, Homo sapiens
  misc_RNA (1)...(19): siRNA sense strand
acuccaugaucccggcuua

SEQ ID NO: 2001573 - RNA, 19 nt, Homo sapiens
  misc_RNA (1)...(19): siRNA sense strand
uuagacccagaccaaauua

SEQ ID NO: 2001574 - RNA, 19 nt, Homo sapiens
  misc_RNA (1)...(19): siRNA sense strand
uaacaagguuuuaggacau

SEQ ID NO: 2001575 - RNA, 19 nt, Homo sapiens
  misc_RNA (1)...(19): siRNA sense strand
cagauuuacaagaagcaua

SEQ ID NO: 2001576 - RNA, 19 nt, Homo sapiens
  misc_RNA (1)...(19): siRNA sense strand
cacauugcaucgacugaag

SEQ ID NO: 2001577 - RNA, 19 nt, Homo sapiens
  misc_RNA (1)...(19): siRNA sense strand
aacagacuuuccuggauga

SEQ ID NO: 2001578 - RNA, 19 nt, Homo sapiens
  misc_RNA (1)...(19): siRNA sense strand
cuuagacccagaccaaauu

SEQ ID NO: 2001579 - RNA, 19 nt, Homo sapiens
  misc_RNA (1)...(19): siRNA sense strand
agccuugguuuaugcguuu

SEQ ID NO: 2001580 - RNA, 19 nt, Homo sapiens
  misc_RNA (1)...(19): siRNA sense strand
aaaggugcgcuugguaauu

SEQ ID NO: 2001581 - RNA, 19 nt, Homo sapiens
  misc_RNA (1)...(19): siRNA sense strand
ggagaaagucuuggaucag

SEQ ID NO: 2001582 - RNA, 19 nt, Homo sapiens
  misc_RNA (1)...(19): siRNA sense strand
ugaguuggagaaagucuug

SEQ ID NO: 2001583 - RNA, 19 nt, Homo sapiens
  misc_RNA (1)...(19): siRNA sense strand
guuuaugcguuugaacuca

SEQ ID NO: 2001584 - RNA, 19 nt, Homo sapiens
  misc_RNA (1)...(19): siRNA sense strand
agucuuggaucagguugaa

SEQ ID NO: 2001585 - RNA, 19 nt, Homo sapiens
  misc_RNA (1)...(19): siRNA sense strand
gcccuugagugagcacaau

SEQ ID NO: 2001586 - RNA, 19 nt, Homo sapiens
  misc_RNA (1)...(19): siRNA sense strand
cggaaagcgaccaaacuug

SEQ ID NO: 2001587 - RNA, 19 nt, Homo sapiens
  misc_RNA (1)...(19): siRNA sense strand
gcugaagaaacuugcugaa

SEQ ID NO: 2001588 - RNA, 19 nt, Homo sapiens
  misc_RNA (1)...(19): siRNA sense strand
ucacauugcaucgacugaa

SEQ ID NO: 2001589 - RNA, 19 nt, Homo sapiens
  misc_RNA (1)...(19): siRNA sense strand
uuaggacaugucaacaaua

SEQ ID NO: 2001590 - RNA, 19 nt, Homo sapiens
  misc_RNA (1)...(19): siRNA sense strand
aaacuuggaaaccuauuac

SEQ ID NO: 2001591 - RNA, 19 nt, Homo sapiens
  misc_RNA (1)...(19): siRNA sense strand
gaugacaacugcaauauua

SEQ ID NO: 2001592 - RNA, 19 nt, Homo sapiens
  misc_RNA (1)...(19): siRNA sense strand
ucacagcacuggcuucauu

SEQ ID NO: 2001593 - RNA, 19 nt, Homo sapiens
  misc_RNA (1)...(19): siRNA sense strand
gaaagcccauccaaguuga

SEQ ID NO: 2001594 - RNA, 19 nt, Homo sapiens
  misc_RNA (1)...(19): siRNA sense strand
ggacaguaaugaugugaug

SEQ ID NO: 2001595 - RNA, 19 nt, Homo sapiens
  misc_RNA (1)...(19): siRNA sense strand
ggaagggcaucuugaaaca

SEQ ID NO: 2001596 - RNA, 19 nt, Homo sapiens
  misc_RNA (1)...(19): siRNA sense strand
ccucauaucaucaguauuu

SEQ ID NO: 2001597 - RNA, 19 nt, Homo sapiens
  misc_RNA (1)...(19): siRNA sense strand
gagaaugacuuugcucagu

SEQ ID NO: 2001598 - RNA, 19 nt, Homo sapiens
  misc_RNA (1)...(19): siRNA sense strand
gcuuuacacucuuguuuau

SEQ ID NO: 2001599 - RNA, 19 nt, Homo sapiens
  misc_RNA (1)...(19): siRNA sense strand
agacaugguucacaucaga

SEQ ID NO: 2001600 - RNA, 19 nt, Homo sapiens
  misc_RNA (1)...(19): siRNA sense strand
gacgagagauugagaucau

SEQ ID NO: 2001601 - RNA, 19 nt, Homo sapiens
  misc_RNA (1)...(19): siRNA sense strand
caaaggcaccuacggcaaa

SEQ ID NO: 2001602 - RNA, 19 nt, Homo sapiens
  misc_RNA (1)...(19): siRNA sense strand
gcuauaaaauccauucgua

SEQ ID NO: 2001603 - RNA, 19 nt, Homo sapiens
  misc_RNA (1)...(19): siRNA sense strand
gaagaaauccaagaaagag

SEQ ID NO: 2001604 - RNA, 19 nt, Homo sapiens
  misc_RNA (1)...(19): siRNA sense strand
cauggaauaugccagcaaa

SEQ ID NO: 2001605 - RNA, 19 nt, Homo sapiens
  misc_RNA (1)...(19): siRNA sense strand
gaaaugcccacacuggaau

SEQ ID NO: 2001606 - RNA, 19 nt, Homo sapiens
  misc_RNA (1)...(19): siRNA sense strand
ggaggaagggcaucuugaa

SEQ ID NO: 2001607 - RNA, 19 nt, Homo sapiens
  misc_RNA (1)...(19): siRNA sense strand
cauccaaguugaguucuaa

SEQ ID NO: 2001608 - RNA, 19 nt, Homo sapiens
  misc_RNA (1)...(19): siRNA sense strand
ugacucaggucuacaagca

SEQ ID NO: 2001609 - RNA, 19 nt, Homo sapiens
  misc_RNA (1)...(19): siRNA sense strand
caaccauccucauaucauc

SEQ ID NO: 2001610 - RNA, 19 nt, Homo sapiens
  misc_RNA (1)...(19): siRNA sense strand
aaggggagcuguacgauua

SEQ ID NO: 2001611 - RNA, 19 nt, Homo sapiens
  misc_RNA (1)...(19): siRNA sense strand
gagaacaaagauaagauug

SEQ ID NO: 2001612 - RNA, 19 nt, Homo sapiens
  misc_RNA (1)...(19): siRNA sense strand
gaggaagggcaucuugaaa

SEQ ID NO: 2001613 - RNA, 19 nt, Homo sapiens
  misc_RNA (1)...(19): siRNA sense strand
ugaagaaauccaagaaaga

SEQ ID NO: 2001614 - RNA, 19 nt, Homo sapiens
  misc_RNA (1)...(19): siRNA sense strand
gagagaaucagguuacuac

SEQ ID NO: 2001615 - RNA, 19 nt, Homo sapiens
  misc_RNA (1)...(19): siRNA sense strand
ugaaagcccauccaaguug

SEQ ID NO: 2001616 - RNA, 19 nt, Homo sapiens
  misc_RNA (1)...(19): siRNA sense strand
gccgagugguugcuauaaa

SEQ ID NO: 2001617 - RNA, 19 nt, Homo sapiens
  misc_RNA (1)...(19): siRNA sense strand
agaaucagguuacuacucu

SEQ ID NO: 2001618 - RNA, 19 nt, Homo sapiens
  misc_RNA (1)...(19): siRNA sense strand
uguaguugguccugccuua

SEQ ID NO: 2001619 - RNA, 19 nt, Homo sapiens
  misc_RNA (1)...(19): siRNA sense strand
gguccugccuuacccucua

SEQ ID NO: 2001620 - RNA, 19 nt, Homo sapiens
  misc_RNA (1)...(19): siRNA sense strand
ugaaacacagcagcaaaua

SEQ ID NO: 2001621 - RNA, 19 nt, Homo sapiens
  misc_RNA (1)...(19): siRNA sense strand
gaagcggcaucaccacaag

SEQ ID NO: 2001622 - RNA, 19 nt, Homo sapiens
  misc_RNA (1)...(19): siRNA sense strand
gcagagagaaucagguuac

SEQ ID NO: 2001623 - RNA, 19 nt, Homo sapiens
  misc_RNA (1)...(19): siRNA sense strand
ucucugcugugcacuauug

SEQ ID NO: 2001624 - RNA, 19 nt, Homo sapiens
  misc_RNA (1)...(19): siRNA sense strand
gguggaugcugauggugaa

SEQ ID NO: 2001625 - RNA, 19 nt, Homo sapiens
  misc_RNA (1)...(19): siRNA sense strand
agauugagaucaugucauc

SEQ ID NO: 2001626 - RNA, 19 nt, Homo sapiens
  misc_RNA (1)...(19): siRNA sense strand
caucaguauuuaugaagug

SEQ ID NO: 2001627 - RNA, 19 nt, Homo sapiens
  misc_RNA (1)...(19): siRNA sense strand
cugaagaaauccaagaaag

SEQ ID NO: 2001628 - RNA, 19 nt, Homo sapiens
  misc_RNA (1)...(19): siRNA sense strand
acaaugcccuucgaugguu

SEQ ID NO: 2001629 - RNA, 19 nt, Homo sapiens
  misc_RNA (1)...(19): siRNA sense strand
ugaaaugcccacacuggaa

SEQ ID NO: 2001630 - RNA, 19 nt, Homo sapiens
  misc_RNA (1)...(19): siRNA sense strand
caagacaugguucacauca

SEQ ID NO: 2001631 - RNA, 19 nt, Homo sapiens
  misc_RNA (1)...(19): siRNA sense strand
gaaacacagcagcaaauac

SEQ ID NO: 2001632 - RNA, 19 nt, Homo sapiens
  misc_RNA (1)...(19): siRNA sense strand
ccaaggggauccugaagaa

SEQ ID NO: 2001633 - RNA, 19 nt, Homo sapiens
  misc_RNA (1)...(19): siRNA sense strand
ggaugaacaagacaugguu

SEQ ID NO: 2001634 - RNA, 19 nt, Homo sapiens
  misc_RNA (1)...(19): siRNA sense strand
gcugaagaaauccaagaaa

SEQ ID NO: 2001635 - RNA, 19 nt, Homo sapiens
  misc_RNA (1)...(19): siRNA sense strand
gaucaugucaucucucaac

SEQ ID NO: 2001636 - RNA, 19 nt, Homo sapiens
  misc_RNA (1)...(19): siRNA sense strand
ucacaucagacgagagauu

SEQ ID NO: 2001637 - RNA, 19 nt, Homo sapiens
  misc_RNA (1)...(19): siRNA sense strand
aaaauauacugcucgauga

SEQ ID NO: 2001638 - RNA, 19 nt, Homo sapiens
  misc_RNA (1)...(19): siRNA sense strand
aaacacagcagcaaauacu

SEQ ID NO: 2001639 - RNA, 19 nt, Homo sapiens
  misc_RNA (1)...(19): siRNA sense strand
ccaagaaagagaaugacuu

SEQ ID NO: 2001640 - RNA, 19 nt, Homo sapiens
  misc_RNA (1)...(19): siRNA sense strand
gaaauccaagaaagagaau

SEQ ID NO: 2001641 - RNA, 19 nt, Homo sapiens
  misc_RNA (1)...(19): siRNA sense strand
ccaaacccacgaccucuga

SEQ ID NO: 2001642 - RNA, 19 nt, Homo sapiens
  misc_RNA (1)...(19): siRNA sense strand
ccugaaagcccauccaagu

SEQ ID NO: 2001643 - RNA, 19 nt, Homo sapiens
  misc_RNA (1)...(19): siRNA sense strand
cagcagagagaaucagguu

SEQ ID NO: 2001644 - RNA, 19 nt, Homo sapiens
  misc_RNA (1)...(19): siRNA sense strand
caugucaucucucaaccau

SEQ ID NO: 2001645 - RNA, 19 nt, Homo sapiens
  misc_RNA (1)...(19): siRNA sense strand
ggacaaaauuaaggaugaa

SEQ ID NO: 2001646 - RNA, 19 nt, Homo sapiens
  misc_RNA (1)...(19): siRNA sense strand
cggccacgaugcccaagaa

SEQ ID NO: 2001647 - RNA, 19 nt, Homo sapiens
  misc_RNA (1)...(19): siRNA sense strand
uuuccaaccuguaccagaa

SEQ ID NO: 2001648 - RNA, 19 nt, Homo sapiens
  misc_RNA (1)...(19): siRNA sense strand
gacaacugcaauauuaaga

SEQ ID NO: 2001649 - RNA, 19 nt, Homo sapiens
  misc_RNA (1)...(19): siRNA sense strand
guucacaucagacgagaga

SEQ ID NO: 2001650 - RNA, 19 nt, Homo sapiens
  misc_RNA (1)...(19): siRNA sense strand
cagcgacucuuuugacuug

SEQ ID NO: 2001651 - RNA, 19 nt, Homo sapiens
  misc_RNA (1)...(19): siRNA sense strand
gccuuacccucuacuuuca

SEQ ID NO: 2001652 - RNA, 19 nt, Homo sapiens
  misc_RNA (1)...(19): siRNA sense strand
ccauccaaguugaguucua

SEQ ID NO: 2001653 - RNA, 19 nt, Homo sapiens
  misc_RNA (1)...(19): siRNA sense strand
caaugcccuucgaugguuu

SEQ ID NO: 2001654 - RNA, 19 nt, Homo sapiens
  misc_RNA (1)...(19): siRNA sense strand
ucucaaccauccucauauc

SEQ ID NO: 2001655 - RNA, 19 nt, Homo sapiens
  misc_RNA (1)...(19): siRNA sense strand
ucucucaaccauccucaua

SEQ ID NO: 2001656 - RNA, 19 nt, Homo sapiens
  misc_RNA (1)...(19): siRNA sense strand
gaaucagguuacuacucuu

SEQ ID NO: 2001657 - RNA, 19 nt, Homo sapiens
  misc_RNA (1)...(19): siRNA sense strand
cauugaagguguaguuggu

SEQ ID NO: 2001658 - RNA, 19 nt, Homo sapiens
  misc_RNA (1)...(19): siRNA sense strand
agaaauccaagaaagagaa

SEQ ID NO: 2001659 - RNA, 19 nt, Homo sapiens
  misc_RNA (1)...(19): siRNA sense strand
gagcagcgugugugacugu

SEQ ID NO: 2001660 - RNA, 19 nt, Homo sapiens
  misc_RNA (1)...(19): siRNA sense strand
uaaaauccauucguaagga

SEQ ID NO: 2001661 - RNA, 19 nt, Homo sapiens
  misc_RNA (1)...(19): siRNA sense strand
gcuucucccuccucacaga

SEQ ID NO: 2001662 - RNA, 19 nt, Homo sapiens
  misc_RNA (1)...(19): siRNA sense strand
aagggcaucuugaaacaca

SEQ ID NO: 2001663 - RNA, 19 nt, Homo sapiens
  misc_RNA (1)...(19): siRNA sense strand
gagaaucagguuacuacuc

SEQ ID NO: 2001664 - RNA, 19 nt, Homo sapiens
  misc_RNA (1)...(19): siRNA sense strand
cgaugacaacugcaauauu

SEQ ID NO: 2001665 - RNA, 19 nt, Homo sapiens
  misc_RNA (1)...(19): siRNA sense strand
aacaagacaugguucacau

SEQ ID NO: 2001666 - RNA, 19 nt, Homo sapiens
  misc_RNA (1)...(19): siRNA sense strand
caaaucagcagcggagagu

SEQ ID NO: 2001667 - RNA, 19 nt, Homo sapiens
  misc_RNA (1)...(19): siRNA sense strand
ccacgaugcccaagaaagg

SEQ ID NO: 2001668 - RNA, 19 nt, Homo sapiens
  misc_RNA (1)...(19): siRNA sense strand
gcaccuacggcaaagucaa

SEQ ID NO: 2001669 - RNA, 19 nt, Homo sapiens
  misc_RNA (1)...(19): siRNA sense strand
gcccugaaaugcccacacu

SEQ ID NO: 2001670 - RNA, 19 nt, Homo sapiens
  misc_RNA (1)...(19): siRNA sense strand
uuuacacucuuguuuaugg

SEQ ID NO: 2001671 - RNA, 19 nt, Homo sapiens
  misc_RNA (1)...(19): siRNA sense strand
aauccaagaaagagaauga

SEQ ID NO: 2001672 - RNA, 19 nt, Homo sapiens
  misc_RNA (1)...(19): siRNA sense strand
ugacaacugcaauauuaag

SEQ ID NO: 2001673 - RNA, 19 nt, Homo sapiens
  misc_RNA (1)...(19): siRNA sense strand
ccucuacuuucaagaugga

SEQ ID NO: 2001674 - RNA, 19 nt, Homo sapiens
  misc_RNA (1)...(19): siRNA sense strand
ugacugugaugcccuccau

SEQ ID NO: 2001675 - RNA, 19 nt, Homo sapiens
  misc_RNA (1)...(19): siRNA sense strand
cagcgugugugacugugau

SEQ ID NO: 2001676 - RNA, 19 nt, Homo sapiens
  misc_RNA (1)...(19): siRNA sense strand
guaccagaaggauaaguuc

SEQ ID NO: 2001677 - RNA, 19 nt, Homo sapiens
  misc_RNA (1)...(19): siRNA sense strand
ggagacccggcacuucuuc

SEQ ID NO: 2001678 - RNA, 19 nt, Homo sapiens
  misc_RNA (1)...(19): siRNA sense strand
acuugaagcuggaaaauau

SEQ ID NO: 2001679 - RNA, 19 nt, Homo sapiens
  misc_RNA (1)...(19): siRNA sense strand
uaaggaugaacaagacaug

SEQ ID NO: 2001680 - RNA, 19 nt, Homo sapiens
  misc_RNA (1)...(19): siRNA sense strand
cagcuucucccuccucaca

SEQ ID NO: 2001681 - RNA, 19 nt, Homo sapiens
  misc_RNA (1)...(19): siRNA sense strand
acacagcagcaaauacuca

SEQ ID NO: 2001682 - RNA, 19 nt, Homo sapiens
  misc_RNA (1)...(19): siRNA sense strand
ccgagugguugcuauaaaa

SEQ ID NO: 2001683 - RNA, 19 nt, Homo sapiens
  misc_RNA (1)...(19): siRNA sense strand
aauuaaggaugaacaagac

SEQ ID NO: 2001684 - RNA, 19 nt, Homo sapiens
  misc_RNA (1)...(19): siRNA sense strand
acuccuggcucggaucauu

SEQ ID NO: 2001685 - RNA, 19 nt, Homo sapiens
  misc_RNA (1)...(19): siRNA sense strand
cccuggguguguugcuuua

SEQ ID NO: 2001686 - RNA, 19 nt, Homo sapiens
  misc_RNA (1)...(19): siRNA sense strand
gggccacuauugaggacau

SEQ ID NO: 2001687 - RNA, 19 nt, Homo sapiens
  misc_RNA (1)...(19): siRNA sense strand
agcaagcgcuggagaucug

SEQ ID NO: 2001688 - RNA, 19 nt, Homo sapiens
  misc_RNA (1)...(19): siRNA sense strand
cugaaagcccauccaaguu

SEQ ID NO: 2001689 - RNA, 19 nt, Homo sapiens
  misc_RNA (1)...(19): siRNA sense strand
ugaagcggcaucaccacaa

SEQ ID NO: 2001690 - RNA, 19 nt, Homo sapiens
  misc_RNA (1)...(19): siRNA sense strand
caagcaagcgcuggagauc

SEQ ID NO: 2001691 - RNA, 19 nt, Homo sapiens
  misc_RNA (1)...(19): siRNA sense strand
gaaaggcauugguuuauga

SEQ ID NO: 2001692 - RNA, 19 nt, Homo sapiens
  misc_RNA (1)...(19): siRNA sense strand
gagaagaggcugugcaaga

SEQ ID NO: 2001693 - RNA, 19 nt, Homo sapiens
  misc_RNA (1)...(19): siRNA sense strand
ccugaaaggcauugguuua

SEQ ID NO: 2001694 - RNA, 19 nt, Homo sapiens
  misc_RNA (1)...(19): siRNA sense strand
ugaaaggcauugguuuaug

SEQ ID NO: 2001695 - RNA, 19 nt, Homo sapiens
  misc_RNA (1)...(19): siRNA sense strand
agaagaggcugugcaagau

SEQ ID NO: 2001696 - RNA, 19 nt, Homo sapiens
  misc_RNA (1)...(19): siRNA sense strand
gaagaggcugugcaagaug

SEQ ID NO: 2001697 - RNA, 19 nt, Homo sapiens
  misc_RNA (1)...(19): siRNA sense strand
gaccugaaaggcauugguu

SEQ ID NO: 2001698 - RNA, 19 nt, Homo sapiens
  misc_RNA (1)...(19): siRNA sense strand
ccacgcaccucgucuaccu

SEQ ID NO: 2001699 - RNA, 19 nt, Homo sapiens
  misc_RNA (1)...(19): siRNA sense strand
aagaggcugugcaagaugu

SEQ ID NO: 2001700 - RNA, 19 nt, Homo sapiens
  misc_RNA (1)...(19): siRNA sense strand
gagcugagggacugcuuca

SEQ ID NO: 2001701 - RNA, 19 nt, Homo sapiens
  misc_RNA (1)...(19): siRNA sense strand
gcgcaccaccgcuucuaug

SEQ ID NO: 2001702 - RNA, 19 nt, Homo sapiens
  misc_RNA (1)...(19): siRNA sense strand
gcaagcugcucgccuuccu

SEQ ID NO: 2001703 - RNA, 19 nt, Homo sapiens
  misc_RNA (1)...(19): siRNA sense strand
gaauucaagacggagaaga

SEQ ID NO: 2001704 - RNA, 19 nt, Homo sapiens
  misc_RNA (1)...(19): siRNA sense strand
gucgugugcuuccucuuca

SEQ ID NO: 2001705 - RNA, 19 nt, Homo sapiens
  misc_RNA (1)...(19): siRNA sense strand
cugaaaggcauugguuuau

SEQ ID NO: 2001706 - RNA, 19 nt, Homo sapiens
  misc_RNA (1)...(19): siRNA sense strand
gcaccaccgcuucuaugca

SEQ ID NO: 2001707 - RNA, 19 nt, Homo sapiens
  misc_RNA (1)...(19): siRNA sense strand
gaaagugaaucuucccuua

SEQ ID NO: 2001708 - RNA, 19 nt, Homo sapiens
  misc_RNA (1)...(19): siRNA sense strand
caaguuauguuuccuguua

SEQ ID NO: 2001709 - RNA, 19 nt, Homo sapiens
  misc_RNA (1)...(19): siRNA sense strand
gaagaaaucuccucugaca

SEQ ID NO: 2001710 - RNA, 19 nt, Homo sapiens
  misc_RNA (1)...(19): siRNA sense strand
gaagaaagacccaagagaa

SEQ ID NO: 2001711 - RNA, 19 nt, Homo sapiens
  misc_RNA (1)...(19): siRNA sense strand
ggaagaagccgacuaacuu

SEQ ID NO: 2001712 - RNA, 19 nt, Homo sapiens
  misc_RNA (1)...(19): siRNA sense strand
ggaagaugaugauggaauu

SEQ ID NO: 2001713 - RNA, 19 nt, Homo sapiens
  misc_RNA (1)...(19): siRNA sense strand
gaaaguuccucuuccaaau

SEQ ID NO: 2001714 - RNA, 19 nt, Homo sapiens
  misc_RNA (1)...(19): siRNA sense strand
gagaugggcugauggaaga

SEQ ID NO: 2001715 - RNA, 19 nt, Homo sapiens
  misc_RNA (1)...(19): siRNA sense strand
agacagcacuaaagcaaua

SEQ ID NO: 2001716 - RNA, 19 nt, Homo sapiens
  misc_RNA (1)...(19): siRNA sense strand
ggacagcuaucccagguau

SEQ ID NO: 2001717 - RNA, 19 nt, Homo sapiens
  misc_RNA (1)...(19): siRNA sense strand
uuaacaggcugcuugaaua

SEQ ID NO: 2001718 - RNA, 19 nt, Homo sapiens
  misc_RNA (1)...(19): siRNA sense strand
auaauuaugucccaccuua

SEQ ID NO: 2001719 - RNA, 19 nt, Homo sapiens
  misc_RNA (1)...(19): siRNA sense strand
gagaaagacuugaguacca

SEQ ID NO: 2001720 - RNA, 19 nt, Homo sapiens
  misc_RNA (1)...(19): siRNA sense strand
gguaccagcugucuucuga

SEQ ID NO: 2001721 - RNA, 19 nt, Homo sapiens
  misc_RNA (1)...(19): siRNA sense strand
caucaaacuuguccagaaa

SEQ ID NO: 2001722 - RNA, 19 nt, Homo sapiens
  misc_RNA (1)...(19): siRNA sense strand
gugcagugcuucagccaua

SEQ ID NO: 2001723 - RNA, 19 nt, Homo sapiens
  misc_RNA (1)...(19): siRNA sense strand
gaaaguggcgucuaagauc

SEQ ID NO: 2001724 - RNA, 19 nt, Homo sapiens
  misc_RNA (1)...(19): siRNA sense strand
uacaaggccucccuguuua

SEQ ID NO: 2001725 - RNA, 19 nt, Homo sapiens
  misc_RNA (1)...(19): siRNA sense strand
cuacaaggccucccuguuu

SEQ ID NO: 2001726 - RNA, 19 nt, Homo sapiens
  misc_RNA (1)...(19): siRNA sense strand
gagaaccuguggucacuug

SEQ ID NO: 2001727 - RNA, 19 nt, Homo sapiens
  misc_RNA (1)...(19): siRNA sense strand
gaauuccuccugauaguuu

SEQ ID NO: 2001728 - RNA, 19 nt, Homo sapiens
  misc_RNA (1)...(19): siRNA sense strand
gaacucgaacucaugaauu

SEQ ID NO: 2001729 - RNA, 19 nt, Homo sapiens
  misc_RNA (1)...(19): siRNA sense strand
guacuugucugcagagagu

SEQ ID NO: 2001730 - RNA, 19 nt, Homo sapiens
  misc_RNA (1)...(19): siRNA sense strand
gaagaagccgacuaacuug

SEQ ID NO: 2001731 - RNA, 19 nt, Homo sapiens
  misc_RNA (1)...(19): siRNA sense strand
gcagaaaguuccucuucca

SEQ ID NO: 2001732 - RNA, 19 nt, Homo sapiens
  misc_RNA (1)...(19): siRNA sense strand
gcugaguccuagauuguuu

SEQ ID NO: 2001733 - RNA, 19 nt, Homo sapiens
  misc_RNA (1)...(19): siRNA sense strand
caauaugcauguacugugu

SEQ ID NO: 2001734 - RNA, 19 nt, Homo sapiens
  misc_RNA (1)...(19): siRNA sense strand
gagaugagcacgcagaugu

SEQ ID NO: 2001735 - RNA, 19 nt, Homo sapiens
  misc_RNA (1)...(19): siRNA sense strand
ccacuucacgucuggaaua

SEQ ID NO: 2001736 - RNA, 19 nt, Homo sapiens
  misc_RNA (1)...(19): siRNA sense strand
cugaagaaaucuccucuga

SEQ ID NO: 2001737 - RNA, 19 nt, Homo sapiens
  misc_RNA (1)...(19): siRNA sense strand
ccucgaagcuguggaauca

SEQ ID NO: 2001738 - RNA, 19 nt, Homo sapiens
  misc_RNA (1)...(19): siRNA sense strand
gauggaauuccuccugaua

SEQ ID NO: 2001739 - RNA, 19 nt, Homo sapiens
  misc_RNA (1)...(19): siRNA sense strand
gaagaagaaagacccaaga

SEQ ID NO: 2001740 - RNA, 19 nt, Homo sapiens
  misc_RNA (1)...(19): siRNA sense strand
gaauauggaugaguaacca

SEQ ID NO: 2001741 - RNA, 19 nt, Homo sapiens
  misc_RNA (1)...(19): siRNA sense strand
cuccaaagcugucugcauu

SEQ ID NO: 2001742 - RNA, 19 nt, Homo sapiens
  misc_RNA (1)...(19): siRNA sense strand
gaagugcggcagagaagaa

SEQ ID NO: 2001743 - RNA, 19 nt, Homo sapiens
  misc_RNA (1)...(19): siRNA sense strand
ggacggugauuucguuucu

SEQ ID NO: 2001744 - RNA, 19 nt, Homo sapiens
  misc_RNA (1)...(19): siRNA sense strand
aacaugagcuccaggaaga

SEQ ID NO: 2001745 - RNA, 19 nt, Homo sapiens
  misc_RNA (1)...(19): siRNA sense strand
gauaaugugaagcagauaa

SEQ ID NO: 2001746 - RNA, 19 nt, Homo sapiens
  misc_RNA (1)...(19): siRNA sense strand
ccaaagaggacggugauuu

SEQ ID NO: 2001747 - RNA, 19 nt, Homo sapiens
  misc_RNA (1)...(19): siRNA sense strand
gaaaucuccucugacaugu

SEQ ID NO: 2001748 - RNA, 19 nt, Homo sapiens
  misc_RNA (1)...(19): siRNA sense strand
caaagaggacggugauuuc

SEQ ID NO: 2001749 - RNA, 19 nt, Homo sapiens
  misc_RNA (1)...(19): siRNA sense strand
gugauuucguuucugauaa

SEQ ID NO: 2001750 - RNA, 19 nt, Homo sapiens
  misc_RNA (1)...(19): siRNA sense strand
gcaacagcauucagaagca

SEQ ID NO: 2001751 - RNA, 19 nt, Homo sapiens
  misc_RNA (1)...(19): siRNA sense strand
ccaucaaacuuguccagaa

SEQ ID NO: 2001752 - RNA, 19 nt, Homo sapiens
  misc_RNA (1)...(19): siRNA sense strand
ugacaccaaugagaaguuu

SEQ ID NO: 2001753 - RNA, 19 nt, Homo sapiens
  misc_RNA (1)...(19): siRNA sense strand
agaggaagaugaugaugga

SEQ ID NO: 2001754 - RNA, 19 nt, Homo sapiens
  misc_RNA (1)...(19): siRNA sense strand
guagacaacguuggcuuua

SEQ ID NO: 2001755 - RNA, 19 nt, Homo sapiens
  misc_RNA (1)...(19): siRNA sense strand
gcaguacaaacaggauuua

SEQ ID NO: 2001756 - RNA, 19 nt, Homo sapiens
  misc_RNA (1)...(19): siRNA sense strand
ucuggaauauggaugagua

SEQ ID NO: 2001757 - RNA, 19 nt, Homo sapiens
  misc_RNA (1)...(19): siRNA sense strand
ucccagguauguaugauaa

SEQ ID NO: 2001758 - RNA, 19 nt, Homo sapiens
  misc_RNA (1)...(19): siRNA sense strand
cuaaagcaauaugcaugua

SEQ ID NO: 2001759 - RNA, 19 nt, Homo sapiens
  misc_RNA (1)...(19): siRNA sense strand
ggugauuucguuucugaua

SEQ ID NO: 2001760 - RNA, 19 nt, Homo sapiens
  misc_RNA (1)...(19): siRNA sense strand
ucgaagcuguggaaucauu

SEQ ID NO: 2001761 - RNA, 19 nt, Homo sapiens
  misc_RNA (1)...(19): siRNA sense strand
ccaaagcugucugcauuca

SEQ ID NO: 2001762 - RNA, 19 nt, Homo sapiens
  misc_RNA (1)...(19): siRNA sense strand
ggagaagugcggcagagaa

SEQ ID NO: 2001763 - RNA, 19 nt, Homo sapiens
  misc_RNA (1)...(19): siRNA sense strand
uggccaaggugaagaagaa

SEQ ID NO: 2001764 - RNA, 19 nt, Homo sapiens
  misc_RNA (1)...(19): siRNA sense strand
ccugauaguuuggaaagaa

SEQ ID NO: 2001765 - RNA, 19 nt, Homo sapiens
  misc_RNA (1)...(19): siRNA sense strand
cacuugaccuccagccaua

SEQ ID NO: 2001766 - RNA, 19 nt, Homo sapiens
  misc_RNA (1)...(19): siRNA sense strand
gcaacgugcugaaaacuga

SEQ ID NO: 2001767 - RNA, 19 nt, Homo sapiens
  misc_RNA (1)...(19): siRNA sense strand
uuacagcgguuccauagca

SEQ ID NO: 2001768 - RNA, 19 nt, Homo sapiens
  misc_RNA (1)...(19): siRNA sense strand
gaagguccgcugucuggaa

SEQ ID NO: 2001769 - RNA, 19 nt, Homo sapiens
  misc_RNA (1)...(19): siRNA sense strand
agaaaucuccucugacaug

SEQ ID NO: 2001770 - RNA, 19 nt, Homo sapiens
  misc_RNA (1)...(19): siRNA sense strand
aagaaagacccaagagaaa

SEQ ID NO: 2001771 - RNA, 19 nt, Homo sapiens
  misc_RNA (1)...(19): siRNA sense strand
ccagguauguaugauaaug

SEQ ID NO: 2001772 - RNA, 19 nt, Homo sapiens
  misc_RNA (1)...(19): siRNA sense strand
uccagaaaguggcgucuaa

SEQ ID NO: 2001773 - RNA, 19 nt, Homo sapiens
  misc_RNA (1)...(19): siRNA sense strand
gugcaagucuggcaaacuc

SEQ ID NO: 2001774 - RNA, 19 nt, Homo sapiens
  misc_RNA (1)...(19): siRNA sense strand
agaggacggugauuucguu

SEQ ID NO: 2001775 - RNA, 19 nt, Homo sapiens
  misc_RNA (1)...(19): siRNA sense strand
uagacaacguuggcuuuaa

SEQ ID NO: 2001776 - RNA, 19 nt, Homo sapiens
  misc_RNA (1)...(19): siRNA sense strand
ugaagcagauaauuauguc

SEQ ID NO: 2001777 - RNA, 19 nt, Homo sapiens
  misc_RNA (1)...(19): siRNA sense strand
cgagacagcacuaaagcaa

SEQ ID NO: 2001778 - RNA, 19 nt, Homo sapiens
  misc_RNA (1)...(19): siRNA sense strand
uagaagaggaagaugauga

SEQ ID NO: 2001779 - RNA, 19 nt, Homo sapiens
  misc_RNA (1)...(19): siRNA sense strand
gcacuaaagcaauaugcau

SEQ ID NO: 2001780 - RNA, 19 nt, Homo sapiens
  misc_RNA (1)...(19): siRNA sense strand
aaagugaaucuucccuuaa

SEQ ID NO: 2001781 - RNA, 19 nt, Homo sapiens
  misc_RNA (1)...(19): siRNA sense strand
ggaacucgaacucaugaau

SEQ ID NO: 2001782 - RNA, 19 nt, Homo sapiens
  misc_RNA (1)...(19): siRNA sense strand
uaucaggcgcuuccucuuu

SEQ ID NO: 2001783 - RNA, 19 nt, Homo sapiens
  misc_RNA (1)...(19): siRNA sense strand
gcugaugggcugaguccua

SEQ ID NO: 2001784 - RNA, 19 nt, Homo sapiens
  misc_RNA (1)...(19): siRNA sense strand
ccacucugcugccuuccuu

SEQ ID NO: 2001785 - RNA, 19 nt, Homo sapiens
  misc_RNA (1)...(19): siRNA sense strand
gaguaccaguugucucaug

SEQ ID NO: 2001786 - RNA, 19 nt, Homo sapiens
  misc_RNA (1)...(19): siRNA sense strand
aaauagaagaggaagauga

SEQ ID NO: 2001787 - RNA, 19 nt, Homo sapiens
  misc_RNA (1)...(19): siRNA sense strand
gugaaucuucccuuaauau

SEQ ID NO: 2001788 - RNA, 19 nt, Homo sapiens
  misc_RNA (1)...(19): siRNA sense strand
aagugaaucuucccuuaau

SEQ ID NO: 2001789 - RNA, 19 nt, Homo sapiens
  misc_RNA (1)...(19): siRNA sense strand
uuacgauucucacccaguu

SEQ ID NO: 2001790 - RNA, 19 nt, Homo sapiens
  misc_RNA (1)...(19): siRNA sense strand
cgaugaaccugcagagaac

SEQ ID NO: 2001791 - RNA, 19 nt, Homo sapiens
  misc_RNA (1)...(19): siRNA sense strand
agauguccgucgaguguaa

SEQ ID NO: 2001792 - RNA, 19 nt, Homo sapiens
  misc_RNA (1)...(19): siRNA sense strand
cgagauguccgucgagugu

SEQ ID NO: 2001793 - RNA, 19 nt, Homo sapiens
  misc_RNA (1)...(19): siRNA sense strand
cugaaaugauugcacuuga

SEQ ID NO: 2001794 - RNA, 19 nt, Homo sapiens
  misc_RNA (1)...(19): siRNA sense strand
aguccuagauuguuugaau

SEQ ID NO: 2001795 - RNA, 19 nt, Homo sapiens
  misc_RNA (1)...(19): siRNA sense strand
ccucugacauguccguuuc

SEQ ID NO: 2001796 - RNA, 19 nt, Homo sapiens
  misc_RNA (1)...(19): siRNA sense strand
ucagggaacucgaacucau

SEQ ID NO: 2001797 - RNA, 19 nt, Homo sapiens
  misc_RNA (1)...(19): siRNA sense strand
uaccagcugucuucugaga

SEQ ID NO: 2001798 - RNA, 19 nt, Homo sapiens
  misc_RNA (1)...(19): siRNA sense strand
agaaaguuccucuuccaaa

SEQ ID NO: 2001799 - RNA, 19 nt, Homo sapiens
  misc_RNA (1)...(19): siRNA sense strand
ggaauuccuccugauaguu

SEQ ID NO: 2001800 - RNA, 19 nt, Homo sapiens
  misc_RNA (1)...(19): siRNA sense strand
cagagaacuuagcggagaa

SEQ ID NO: 2001801 - RNA, 19 nt, Homo sapiens
  misc_RNA (1)...(19): siRNA sense strand
gggcugaguccuagauugu

SEQ ID NO: 2001802 - RNA, 19 nt, Homo sapiens
  misc_RNA (1)...(19): siRNA sense strand
ccauggugcuugcguaucu

SEQ ID NO: 2001803 - RNA, 19 nt, Homo sapiens
  misc_RNA (1)...(19): siRNA sense strand
gagcacuuccuuccacaug

SEQ ID NO: 2001804 - RNA, 19 nt, Homo sapiens
  misc_RNA (1)...(19): siRNA sense strand
gaaucuucccuuaauauac

SEQ ID NO: 2001805 - RNA, 19 nt, Homo sapiens
  misc_RNA (1)...(19): siRNA sense strand
agugaaucuucccuuaaua

SEQ ID NO: 2001806 - RNA, 19 nt, Homo sapiens
  misc_RNA (1)...(19): siRNA sense strand
aaagggccauuaacgagau

SEQ ID NO: 2001807 - RNA, 19 nt, Homo sapiens
  misc_RNA (1)...(19): siRNA sense strand
ucugugaggugcuauuuaa

SEQ ID NO: 2001808 - RNA, 19 nt, Homo sapiens
  misc_RNA (1)...(19): siRNA sense strand
gaggugcuauuuaaaguuc

SEQ ID NO: 2001809 - RNA, 19 nt, Homo sapiens
  misc_RNA (1)...(19): siRNA sense strand
gagcagaaaggaccuauca

SEQ ID NO: 2001810 - RNA, 19 nt, Homo sapiens
  misc_RNA (1)...(19): siRNA sense strand
gaagauggcgaacaaaugc

SEQ ID NO: 2001811 - RNA, 19 nt, Homo sapiens
  misc_RNA (1)...(19): siRNA sense strand
ccaaagagccacguucaug

SEQ ID NO: 2001812 - RNA, 19 nt, Homo sapiens
  misc_RNA (1)...(19): siRNA sense strand
acaugaagauggcgaacaa

SEQ ID NO: 2001813 - RNA, 19 nt, Homo sapiens
  misc_RNA (1)...(19): siRNA sense strand
gugaggugcuauuuaaagu

SEQ ID NO: 2001814 - RNA, 19 nt, Homo sapiens
  misc_RNA (1)...(19): siRNA sense strand
ccaaguuccuagcacugaa

SEQ ID NO: 2001815 - RNA, 19 nt, Homo sapiens
  misc_RNA (1)...(19): siRNA sense strand
gagccacguucauggaagu

SEQ ID NO: 2001816 - RNA, 19 nt, Homo sapiens
  misc_RNA (1)...(19): siRNA sense strand
ccgaccagguugugcauau

SEQ ID NO: 2001817 - RNA, 19 nt, Homo sapiens
  misc_RNA (1)...(19): siRNA sense strand
ugaagauggcgaacaaaug

SEQ ID NO: 2001818 - RNA, 19 nt, Homo sapiens
  misc_RNA (1)...(19): siRNA sense strand
ccacguucauggaaguuca

SEQ ID NO: 2001819 - RNA, 19 nt, Homo sapiens
  misc_RNA (1)...(19): siRNA sense strand
cagaggcccuauugcuuca

SEQ ID NO: 2001820 - RNA, 19 nt, Homo sapiens
  misc_RNA (1)...(19): siRNA sense strand
aacaaaugcugcucuccuu

SEQ ID NO: 2001821 - RNA, 19 nt, Homo sapiens
  misc_RNA (1)...(19): siRNA sense strand
guucauggaaguucagaga

SEQ ID NO: 2001822 - RNA, 19 nt, Homo sapiens
  misc_RNA (1)...(19): siRNA sense strand
gaagagccauguuuucaac

SEQ ID NO: 2001823 - RNA, 19 nt, Homo sapiens
  misc_RNA (1)...(19): siRNA sense strand
ggcccguccuucuacguuu

SEQ ID NO: 2001824 - RNA, 19 nt, Homo sapiens
  misc_RNA (1)...(19): siRNA sense strand
ucacagaggacugcugguu

SEQ ID NO: 2001825 - RNA, 19 nt, Homo sapiens
  misc_RNA (1)...(19): siRNA sense strand
ccggugagcacauucgauu

SEQ ID NO: 2001826 - RNA, 19 nt, Homo sapiens
  misc_RNA (1)...(19): siRNA sense strand
aaacuuguaucugggucuu

SEQ ID NO: 2001827 - RNA, 19 nt, Homo sapiens
  misc_RNA (1)...(19): siRNA sense strand
cgaccagguugugcauaug

SEQ ID NO: 2001828 - RNA, 19 nt, Homo sapiens
  misc_RNA (1)...(19): siRNA sense strand
gaccagaggcccuauugcu

SEQ ID NO: 2001829 - RNA, 19 nt, Homo sapiens
  misc_RNA (1)...(19): siRNA sense strand
aaagagccacguucaugga

SEQ ID NO: 2001830 - RNA, 19 nt, Homo sapiens
  misc_RNA (1)...(19): siRNA sense strand
gagcugacuccucucaaac

SEQ ID NO: 2001831 - RNA, 19 nt, Homo sapiens
  misc_RNA (1)...(19): siRNA sense strand
ggugagcacauucgauugg

SEQ ID NO: 2001832 - RNA, 19 nt, Homo sapiens
  misc_RNA (1)...(19): siRNA sense strand
gguaaaugagaaacuccaa

SEQ ID NO: 2001833 - RNA, 19 nt, Homo sapiens
  misc_RNA (1)...(19): siRNA sense strand
aaggaccuaucaccucugu

SEQ ID NO: 2001834 - RNA, 19 nt, Homo sapiens
  misc_RNA (1)...(19): siRNA sense strand
ggaagagccauguuuucaa

SEQ ID NO: 2001835 - RNA, 19 nt, Homo sapiens
  misc_RNA (1)...(19): siRNA sense strand
ucugugaggugcuauuuaa

SEQ ID NO: 2001836 - RNA, 19 nt, Homo sapiens
  misc_RNA (1)...(19): siRNA sense strand
gaggugcuauuuaaaguuc

SEQ ID NO: 2001837 - RNA, 19 nt, Homo sapiens
  misc_RNA (1)...(19): siRNA sense strand
gagcagaaaggaccuauca

SEQ ID NO: 2001838 - RNA, 19 nt, Homo sapiens
  misc_RNA (1)...(19): siRNA sense strand
gaagauggcgaacaaaugc

SEQ ID NO: 2001839 - RNA, 19 nt, Homo sapiens
  misc_RNA (1)...(19): siRNA sense strand
ccaaagagccacguucaug

SEQ ID NO: 2001840 - RNA, 19 nt, Homo sapiens
  misc_RNA (1)...(19): siRNA sense strand
acaugaagauggcgaacaa

SEQ ID NO: 2001841 - RNA, 19 nt, Homo sapiens
  misc_RNA (1)...(19): siRNA sense strand
gugaggugcuauuuaaagu

SEQ ID NO: 2001842 - RNA, 19 nt, Homo sapiens
  misc_RNA (1)...(19): siRNA sense strand
ccaaguuccuagcacugaa

SEQ ID NO: 2001843 - RNA, 19 nt, Homo sapiens
  misc_RNA (1)...(19): siRNA sense strand
gagccacguucauggaagu

SEQ ID NO: 2001844 - RNA, 19 nt, Homo sapiens
  misc_RNA (1)...(19): siRNA sense strand
ccgaccagguugugcauau

SEQ ID NO: 2001845 - RNA, 19 nt, Homo sapiens
  misc_RNA (1)...(19): siRNA sense strand
ugaagauggcgaacaaaug

SEQ ID NO: 2001846 - RNA, 19 nt, Homo sapiens
  misc_RNA (1)...(19): siRNA sense strand
ccacguucauggaaguuca

SEQ ID NO: 2001847 - RNA, 19 nt, Homo sapiens
  misc_RNA (1)...(19): siRNA sense strand
cagaggcccuauugcuuca

SEQ ID NO: 2001848 - RNA, 19 nt, Homo sapiens
  misc_RNA (1)...(19): siRNA sense strand
aacaaaugcugcucuccuu

SEQ ID NO: 2001849 - RNA, 19 nt, Homo sapiens
  misc_RNA (1)...(19): siRNA sense strand
guucauggaaguucagaga

SEQ ID NO: 2001850 - RNA, 19 nt, Homo sapiens
  misc_RNA (1)...(19): siRNA sense strand
gaagagccauguuuucaac

SEQ ID NO: 2001851 - RNA, 19 nt, Homo sapiens
  misc_RNA (1)...(19): siRNA sense strand
ggcccguccuucuacguuu

SEQ ID NO: 2001852 - RNA, 19 nt, Homo sapiens
  misc_RNA (1)...(19): siRNA sense strand
ucacagaggacugcugguu

SEQ ID NO: 2001853 - RNA, 19 nt, Homo sapiens
  misc_RNA (1)...(19): siRNA sense strand
ccggugagcacauucgauu

SEQ ID NO: 2001854 - RNA, 19 nt, Homo sapiens
  misc_RNA (1)...(19): siRNA sense strand
aaacuuguaucugggucuu

SEQ ID NO: 2001855 - RNA, 19 nt, Homo sapiens
  misc_RNA (1)...(19): siRNA sense strand
cgaccagguugugcauaug

SEQ ID NO: 2001856 - RNA, 19 nt, Homo sapiens
  misc_RNA (1)...(19): siRNA sense strand
gaccagaggcccuauugcu

SEQ ID NO: 2001857 - RNA, 19 nt, Homo sapiens
  misc_RNA (1)...(19): siRNA sense strand
aaagagccacguucaugga

SEQ ID NO: 2001858 - RNA, 19 nt, Homo sapiens
  misc_RNA (1)...(19): siRNA sense strand
gagcugacuccucucaaac

SEQ ID NO: 2001859 - RNA, 19 nt, Homo sapiens
  misc_RNA (1)...(19): siRNA sense strand
ggugagcacauucgauugg

SEQ ID NO: 2001860 - RNA, 19 nt, Homo sapiens
  misc_RNA (1)...(19): siRNA sense strand
gguaaaugagaaacuccaa

SEQ ID NO: 2001861 - RNA, 19 nt, Homo sapiens
  misc_RNA (1)...(19): siRNA sense strand
aaggaccuaucaccucugu

SEQ ID NO: 2001862 - RNA, 19 nt, Homo sapiens
  misc_RNA (1)...(19): siRNA sense strand
ggaagagccauguuuucaa

SEQ ID NO: 2001863 - RNA, 19 nt, Homo sapiens
  misc_RNA (1)...(19): siRNA sense strand
agaagaagcuggaccuuua

SEQ ID NO: 2001864 - RNA, 19 nt, Homo sapiens
  misc_RNA (1)...(19): siRNA sense strand
ccaucaaacucaucauuua

SEQ ID NO: 2001865 - RNA, 19 nt, Homo sapiens
  misc_RNA (1)...(19): siRNA sense strand
gaagaggacuauaguuucu

SEQ ID NO: 2001866 - RNA, 19 nt, Homo sapiens
  misc_RNA (1)...(19): siRNA sense strand
ugacagagguugaacuuuc

SEQ ID NO: 2001867 - RNA, 19 nt, Homo sapiens
  misc_RNA (1)...(19): siRNA sense strand
caacucagccuccuaagaa

SEQ ID NO: 2001868 - RNA, 19 nt, Homo sapiens
  misc_RNA (1)...(19): siRNA sense strand
gaaacagacuuugcagaau

SEQ ID NO: 2001869 - RNA, 19 nt, Homo sapiens
  misc_RNA (1)...(19): siRNA sense strand
gagauguugucauguauug

SEQ ID NO: 2001870 - RNA, 19 nt, Homo sapiens
  misc_RNA (1)...(19): siRNA sense strand
caacauaugugagcucugu

SEQ ID NO: 2001871 - RNA, 19 nt, Homo sapiens
  misc_RNA (1)...(19): siRNA sense strand
aaacagacuuugcagaaug

SEQ ID NO: 2001872 - RNA, 19 nt, Homo sapiens
  misc_RNA (1)...(19): siRNA sense strand
ggacuauaguuucuccaaa

SEQ ID NO: 2001873 - RNA, 19 nt, Homo sapiens
  misc_RNA (1)...(19): siRNA sense strand
gaauauuccaguacagaua

SEQ ID NO: 2001874 - RNA, 19 nt, Homo sapiens
  misc_RNA (1)...(19): siRNA sense strand
gugaggaucaagcuuauua

SEQ ID NO: 2001875 - RNA, 19 nt, Homo sapiens
  misc_RNA (1)...(19): siRNA sense strand
gagcuuaccauaacuacaa

SEQ ID NO: 2001876 - RNA, 19 nt, Homo sapiens
  misc_RNA (1)...(19): siRNA sense strand
gagccacaguucaaccuuu

SEQ ID NO: 2001877 - RNA, 19 nt, Homo sapiens
  misc_RNA (1)...(19): siRNA sense strand
ggugggaacuucucuaguc

SEQ ID NO: 2001878 - RNA, 19 nt, Homo sapiens
  misc_RNA (1)...(19): siRNA sense strand
ggaaucgacugaaaauuug

SEQ ID NO: 2001879 - RNA, 19 nt, Homo sapiens
  misc_RNA (1)...(19): siRNA sense strand
gagccuugcugagauuauu

SEQ ID NO: 2001880 - RNA, 19 nt, Homo sapiens
  misc_RNA (1)...(19): siRNA sense strand
ccgaagaggacuauaguuu

SEQ ID NO: 2001881 - RNA, 19 nt, Homo sapiens
  misc_RNA (1)...(19): siRNA sense strand
gagcaugaacuuuccauca

SEQ ID NO: 2001882 - RNA, 19 nt, Homo sapiens
  misc_RNA (1)...(19): siRNA sense strand
gaaaguuacacccaaaaua

SEQ ID NO: 2001883 - RNA, 19 nt, Homo sapiens
  misc_RNA (1)...(19): siRNA sense strand
caacuauuguggcuacuag

SEQ ID NO: 2001884 - RNA, 19 nt, Homo sapiens
  misc_RNA (1)...(19): siRNA sense strand
gcacuagcgugugucaugu

SEQ ID NO: 2001885 - RNA, 19 nt, Homo sapiens
  misc_RNA (1)...(19): siRNA sense strand
ggaccuggagcuuaccaua

SEQ ID NO: 2001886 - RNA, 19 nt, Homo sapiens
  misc_RNA (1)...(19): siRNA sense strand
cuacagcccugaugacuac

SEQ ID NO: 2001887 - RNA, 19 nt, Homo sapiens
  misc_RNA (1)...(19): siRNA sense strand
gaacuuucuccaaccauga

SEQ ID NO: 2001888 - RNA, 19 nt, Homo sapiens
  misc_RNA (1)...(19): siRNA sense strand
agacuuugcagaaugaaua

SEQ ID NO: 2001889 - RNA, 19 nt, Homo sapiens
  misc_RNA (1)...(19): siRNA sense strand
caggagacuucauuucaau

SEQ ID NO: 2001890 - RNA, 19 nt, Homo sapiens
  misc_RNA (1)...(19): siRNA sense strand
gugcagaggugggaacuuc

SEQ ID NO: 2001891 - RNA, 19 nt, Homo sapiens
  misc_RNA (1)...(19): siRNA sense strand
ccaaugagacagaaucuuc

SEQ ID NO: 2001892 - RNA, 19 nt, Homo sapiens
  misc_RNA (1)...(19): siRNA sense strand
cuucagaggcuaccaauga

SEQ ID NO: 2001893 - RNA, 19 nt, Homo sapiens
  misc_RNA (1)...(19): siRNA sense strand
agaaacagacuuugcagaa

SEQ ID NO: 2001894 - RNA, 19 nt, Homo sapiens
  misc_RNA (1)...(19): siRNA sense strand
ggaucaagcuuauuaucac

SEQ ID NO: 2001895 - RNA, 19 nt, Homo sapiens
  misc_RNA (1)...(19): siRNA sense strand
caggugaggaucaagcuua

SEQ ID NO: 2001896 - RNA, 19 nt, Homo sapiens
  misc_RNA (1)...(19): siRNA sense strand
gacuauaguuucuccaaag

SEQ ID NO: 2001897 - RNA, 19 nt, Homo sapiens
  misc_RNA (1)...(19): siRNA sense strand
cuacggagguuggacauuc

SEQ ID NO: 2001898 - RNA, 19 nt, Homo sapiens
  misc_RNA (1)...(19): siRNA sense strand
gcaugaacuuuccaucagu

SEQ ID NO: 2001899 - RNA, 19 nt, Homo sapiens
  misc_RNA (1)...(19): siRNA sense strand
caucaugaagucacaguuu

SEQ ID NO: 2001900 - RNA, 19 nt, Homo sapiens
  misc_RNA (1)...(19): siRNA sense strand
gaccuggagcuuaccauaa

SEQ ID NO: 2001901 - RNA, 19 nt, Homo sapiens
  misc_RNA (1)...(19): siRNA sense strand
caacaggagacuucauuuc

SEQ ID NO: 2001902 - RNA, 19 nt, Homo sapiens
  misc_RNA (1)...(19): siRNA sense strand
caaguuggaccuucucaau

SEQ ID NO: 2001903 - RNA, 19 nt, Homo sapiens
  misc_RNA (1)...(19): siRNA sense strand
uaauguaguuguagcucaa

SEQ ID NO: 2001904 - RNA, 19 nt, Homo sapiens
  misc_RNA (1)...(19): siRNA sense strand
cuccggaaccuauuaauaa

SEQ ID NO: 2001905 - RNA, 19 nt, Homo sapiens
  misc_RNA (1)...(19): siRNA sense strand
acaggagacuucauuucaa

SEQ ID NO: 2001906 - RNA, 19 nt, Homo sapiens
  misc_RNA (1)...(19): siRNA sense strand
caagcugaguccacaggaa

SEQ ID NO: 2001907 - RNA, 19 nt, Homo sapiens
  misc_RNA (1)...(19): siRNA sense strand
ccacaagcaccaacauaug

SEQ ID NO: 2001908 - RNA, 19 nt, Homo sapiens
  misc_RNA (1)...(19): siRNA sense strand
caucgaagccugacugaag

SEQ ID NO: 2001909 - RNA, 19 nt, Homo sapiens
  misc_RNA (1)...(19): siRNA sense strand
gcccaacauuacaguuaaa

SEQ ID NO: 2001910 - RNA, 19 nt, Homo sapiens
  misc_RNA (1)...(19): siRNA sense strand
gauguggagguuaccauaa

SEQ ID NO: 2001911 - RNA, 19 nt, Homo sapiens
  misc_RNA (1)...(19): siRNA sense strand
cgaagaggacuauaguuuc

SEQ ID NO: 2001912 - RNA, 19 nt, Homo sapiens
  misc_RNA (1)...(19): siRNA sense strand
uaacucuaccgaaucauga

SEQ ID NO: 2001913 - RNA, 19 nt, Homo sapiens
  misc_RNA (1)...(19): siRNA sense strand
cuacagcccuggagaagac

SEQ ID NO: 2001914 - RNA, 19 nt, Homo sapiens
  misc_RNA (1)...(19): siRNA sense strand
cagaccagguucagacuca

SEQ ID NO: 2001915 - RNA, 19 nt, Homo sapiens
  misc_RNA (1)...(19): siRNA sense strand
gacagagguugaacuuucu

SEQ ID NO: 2001916 - RNA, 19 nt, Homo sapiens
  misc_RNA (1)...(19): siRNA sense strand
cagagacccuugaagacau

SEQ ID NO: 2001917 - RNA, 19 nt, Homo sapiens
  misc_RNA (1)...(19): siRNA sense strand
gcaccuucaccaucuugua

SEQ ID NO: 2001918 - RNA, 19 nt, Homo sapiens
  misc_RNA (1)...(19): siRNA sense strand
gaucaagcuuauuaucacu

SEQ ID NO: 2001919 - RNA, 19 nt, Homo sapiens
  misc_RNA (1)...(19): siRNA sense strand
cuucacagcaggauuuaaa

SEQ ID NO: 2001920 - RNA, 19 nt, Homo sapiens
  misc_RNA (1)...(19): siRNA sense strand
gguuuaccaucacuccaaa

SEQ ID NO: 2001921 - RNA, 19 nt, Homo sapiens
  misc_RNA (1)...(19): siRNA sense strand
gaucugggguuuaccauca

SEQ ID NO: 2001922 - RNA, 19 nt, Homo sapiens
  misc_RNA (1)...(19): siRNA sense strand
gaagaagcuggaccuuuag

SEQ ID NO: 2001923 - RNA, 19 nt, Homo sapiens
  misc_RNA (1)...(19): siRNA sense strand
ggucagguaaugauauaga

SEQ ID NO: 2001924 - RNA, 19 nt, Homo sapiens
  misc_RNA (1)...(19): siRNA sense strand
uugcugagauuauuggaau

SEQ ID NO: 2001925 - RNA, 19 nt, Homo sapiens
  misc_RNA (1)...(19): siRNA sense strand
ucugaaaguuacacccaaa

SEQ ID NO: 2001926 - RNA, 19 nt, Homo sapiens
  misc_RNA (1)...(19): siRNA sense strand
cagaagaagcuggaccuuu

SEQ ID NO: 2001927 - RNA, 19 nt, Homo sapiens
  misc_RNA (1)...(19): siRNA sense strand
agggucagguaaugauaua

SEQ ID NO: 2001928 - RNA, 19 nt, Homo sapiens
  misc_RNA (1)...(19): siRNA sense strand
gcagacccgugggacuuug

SEQ ID NO: 2001929 - RNA, 19 nt, Homo sapiens
  misc_RNA (1)...(19): siRNA sense strand
uauuaucacuugcccaaca

SEQ ID NO: 2001930 - RNA, 19 nt, Homo sapiens
  misc_RNA (1)...(19): siRNA sense strand
aguuggaccuucucaauuc

SEQ ID NO: 2001931 - RNA, 19 nt, Homo sapiens
  misc_RNA (1)...(19): siRNA sense strand
ccagaacccacuacagaga

SEQ ID NO: 2001932 - RNA, 19 nt, Homo sapiens
  misc_RNA (1)...(19): siRNA sense strand
gaccugggacuuaccauca

SEQ ID NO: 2001933 - RNA, 19 nt, Homo sapiens
  misc_RNA (1)...(19): siRNA sense strand
uaucacuugcccaacauua

SEQ ID NO: 2001934 - RNA, 19 nt, Homo sapiens
  misc_RNA (1)...(19): siRNA sense strand
cugcggagaugagauguug

SEQ ID NO: 2001935 - RNA, 19 nt, Homo sapiens
  misc_RNA (1)...(19): siRNA sense strand
gucagguaaugauauagaa

SEQ ID NO: 2001936 - RNA, 19 nt, Homo sapiens
  misc_RNA (1)...(19): siRNA sense strand
guuaaaccgucuccaacca

SEQ ID NO: 2001937 - RNA, 19 nt, Homo sapiens
  misc_RNA (1)...(19): siRNA sense strand
caccuucaccaucuuguaa

SEQ ID NO: 2001938 - RNA, 19 nt, Homo sapiens
  misc_RNA (1)...(19): siRNA sense strand
aacagacuuugcagaauga

SEQ ID NO: 2001939 - RNA, 19 nt, Homo sapiens
  misc_RNA (1)...(19): siRNA sense strand
gauguugucauguauugau

SEQ ID NO: 2001940 - RNA, 19 nt, Homo sapiens
  misc_RNA (1)...(19): siRNA sense strand
ccugggacuugccaucauu

SEQ ID NO: 2001941 - RNA, 19 nt, Homo sapiens
  misc_RNA (1)...(19): siRNA sense strand
gcaacuauuguggcuacua

SEQ ID NO: 2001942 - RNA, 19 nt, Homo sapiens
  misc_RNA (1)...(19): siRNA sense strand
gaggugacacuuccacauc

SEQ ID NO: 2001943 - RNA, 19 nt, Homo sapiens
  misc_RNA (1)...(19): siRNA sense strand
ccaauugagccuccaguuc

SEQ ID NO: 2001944 - RNA, 19 nt, Homo sapiens
  misc_RNA (1)...(19): siRNA sense strand
ugcccaacauuacaguuaa

SEQ ID NO: 2001945 - RNA, 19 nt, Homo sapiens
  misc_RNA (1)...(19): siRNA sense strand
ccagagacccuugaagaca

SEQ ID NO: 2001946 - RNA, 19 nt, Homo sapiens
  misc_RNA (1)...(19): siRNA sense strand
gaggaucaagcuuauuauc

SEQ ID NO: 2001947 - RNA, 19 nt, Homo sapiens
  misc_RNA (1)...(19): siRNA sense strand
cacaagcaccaacauaugu

SEQ ID NO: 2001948 - RNA, 19 nt, Homo sapiens
  misc_RNA (1)...(19): siRNA sense strand
cuacaaaaccuacuacaga

SEQ ID NO: 2001949 - RNA, 19 nt, Homo sapiens
  misc_RNA (1)...(19): siRNA sense strand
guuggagccuugcugagau

SEQ ID NO: 2001950 - RNA, 19 nt, Homo sapiens
  misc_RNA (1)...(19): siRNA sense strand
caaucuccggaaccuauua

SEQ ID NO: 2001951 - RNA, 19 nt, Homo sapiens
  misc_RNA (1)...(19): siRNA sense strand
ggagacuucauuucaaucu

SEQ ID NO: 2001952 - RNA, 19 nt, Homo sapiens
  misc_RNA (1)...(19): siRNA sense strand
aguuaaaccugcagaugug

SEQ ID NO: 2001953 - RNA, 19 nt, Homo sapiens
  misc_RNA (1)...(19): siRNA sense strand
gucuaacucuaccgaauca

SEQ ID NO: 2001954 - RNA, 19 nt, Homo sapiens
  misc_RNA (1)...(19): siRNA sense strand
uaacugcaccagaggaaca

SEQ ID NO: 2001955 - RNA, 19 nt, Homo sapiens
  misc_RNA (1)...(19): siRNA sense strand
caacaccaggucaggauca

SEQ ID NO: 2001956 - RNA, 19 nt, Homo sapiens
  misc_RNA (1)...(19): siRNA sense strand
ccaacucagccuccuaaga

SEQ ID NO: 2001957 - RNA, 19 nt, Homo sapiens
  misc_RNA (1)...(19): siRNA sense strand
gagguugaacuuucuccaa

SEQ ID NO: 2001958 - RNA, 19 nt, Homo sapiens
  misc_RNA (1)...(19): siRNA sense strand
ucuccggaaccuauuaaua

SEQ ID NO: 2001959 - RNA, 19 nt, Homo sapiens
  misc_RNA (1)...(19): siRNA sense strand
caucaaacucaucauuuag

SEQ ID NO: 2001960 - RNA, 19 nt, Homo sapiens
  misc_RNA (1)...(19): siRNA sense strand
gagcagcagcagccaguuc

SEQ ID NO: 2001961 - RNA, 19 nt, Homo sapiens
  misc_RNA (1)...(19): siRNA sense strand
ggcacuagcgugugucaug

SEQ ID NO: 2001962 - RNA, 19 nt, Homo sapiens
  misc_RNA (1)...(19): siRNA sense strand
uauaguuucuccaaagcau

SEQ ID NO: 2001963 - RNA, 19 nt, Homo sapiens
  misc_RNA (1)...(19): siRNA sense strand
ggcaagggcuccaggaaga

SEQ ID NO: 2001964 - RNA, 19 nt, Homo sapiens
  misc_RNA (1)...(19): siRNA sense strand
uggaacgacuggagaugua

SEQ ID NO: 2001965 - RNA, 19 nt, Homo sapiens
  misc_RNA (1)...(19): siRNA sense strand
gaagaccuacggcuccauu

SEQ ID NO: 2001966 - RNA, 19 nt, Homo sapiens
  misc_RNA (1)...(19): siRNA sense strand
ugaagacacugagcaaugg

SEQ ID NO: 2001967 - RNA, 19 nt, Homo sapiens
  misc_RNA (1)...(19): siRNA sense strand
gguggauuauggcuuuguu

SEQ ID NO: 2001968 - RNA, 19 nt, Homo sapiens
  misc_RNA (1)...(19): siRNA sense strand
gggaggguguggagaaugc

SEQ ID NO: 2001969 - RNA, 19 nt, Homo sapiens
  misc_RNA (1)...(19): siRNA sense strand
cccgguggauuauggcuuu

SEQ ID NO: 2001970 - RNA, 19 nt, Homo sapiens
  misc_RNA (1)...(19): siRNA sense strand
ccagggaggguguggagaa

SEQ ID NO: 2001971 - RNA, 19 nt, Homo sapiens
  misc_RNA (1)...(19): siRNA sense strand
gcacagggguaugaguuug

SEQ ID NO: 2001972 - RNA, 19 nt, Homo sapiens
  misc_RNA (1)...(19): siRNA sense strand
gguggagaaugaaguuguc

SEQ ID NO: 2001973 - RNA, 19 nt, Homo sapiens
  misc_RNA (1)...(19): siRNA sense strand
uccauuaaccugcgcauga

SEQ ID NO: 2001974 - RNA, 19 nt, Homo sapiens
  misc_RNA (1)...(19): siRNA sense strand
ccgugaggcucgagucaau

SEQ ID NO: 2001975 - RNA, 19 nt, Homo sapiens
  misc_RNA (1)...(19): siRNA sense strand
agaccuacggcuccauuaa

SEQ ID NO: 2001976 - RNA, 19 nt, Homo sapiens
  misc_RNA (1)...(19): siRNA sense strand
cugaagacacugagcaaug

SEQ ID NO: 2001977 - RNA, 19 nt, Homo sapiens
  misc_RNA (1)...(19): siRNA sense strand
ccauuaaccugcgcaugag

SEQ ID NO: 2001978 - RNA, 19 nt, Homo sapiens
  misc_RNA (1)...(19): siRNA sense strand
cagggaggguguggagaau

SEQ ID NO: 2001979 - RNA, 19 nt, Homo sapiens
  misc_RNA (1)...(19): siRNA sense strand
ugagacccauuuccagaac

SEQ ID NO: 2001980 - RNA, 19 nt, Homo sapiens
  misc_RNA (1)...(19): siRNA sense strand
gagucaauccggacacagu

SEQ ID NO: 2001981 - RNA, 19 nt, Homo sapiens
  misc_RNA (1)...(19): siRNA sense strand
gaccuacggcuccauuaac

SEQ ID NO: 2001982 - RNA, 19 nt, Homo sapiens
  misc_RNA (1)...(19): siRNA sense strand
ggacuuagccaguauauuu

SEQ ID NO: 2001983 - RNA, 19 nt, Homo sapiens
  misc_RNA (1)...(19): siRNA sense strand
agacacagauugccuaaua

SEQ ID NO: 2001984 - RNA, 19 nt, Homo sapiens
  misc_RNA (1)...(19): siRNA sense strand
guacagaccugacaugaug

SEQ ID NO: 2001985 - RNA, 19 nt, Homo sapiens
  misc_RNA (1)...(19): siRNA sense strand
gaacagugcagcaaucuuu

SEQ ID NO: 2001986 - RNA, 19 nt, Homo sapiens
  misc_RNA (1)...(19): siRNA sense strand
gcgaaucucugguugauga

SEQ ID NO: 2001987 - RNA, 19 nt, Homo sapiens
  misc_RNA (1)...(19): siRNA sense strand
ugagcaagcugacaucuuu

SEQ ID NO: 2001988 - RNA, 19 nt, Homo sapiens
  misc_RNA (1)...(19): siRNA sense strand
gaauaccucugaaauggaa

SEQ ID NO: 2001989 - RNA, 19 nt, Homo sapiens
  misc_RNA (1)...(19): siRNA sense strand
gcacaugagugaagagcaa

SEQ ID NO: 2001990 - RNA, 19 nt, Homo sapiens
  misc_RNA (1)...(19): siRNA sense strand
acagguagcucauacuaaa

SEQ ID NO: 2001991 - RNA, 19 nt, Homo sapiens
  misc_RNA (1)...(19): siRNA sense strand
ucucaucacugacagauaa

SEQ ID NO: 2001992 - RNA, 19 nt, Homo sapiens
  misc_RNA (1)...(19): siRNA sense strand
gauaggaaauaagccauaa

SEQ ID NO: 2001993 - RNA, 19 nt, Homo sapiens
  misc_RNA (1)...(19): siRNA sense strand
gagaggaccuggcugacuu

SEQ ID NO: 2001994 - RNA, 19 nt, Homo sapiens
  misc_RNA (1)...(19): siRNA sense strand
gagccaagcuggugauaca

SEQ ID NO: 2001995 - RNA, 19 nt, Homo sapiens
  misc_RNA (1)...(19): siRNA sense strand
ccuaugagguggaauauca

SEQ ID NO: 2001996 - RNA, 19 nt, Homo sapiens
  misc_RNA (1)...(19): siRNA sense strand
cagcauaucucgcgcuuca

SEQ ID NO: 2001997 - RNA, 19 nt, Homo sapiens
  misc_RNA (1)...(19): siRNA sense strand
gcagcaaucuuucgucagu

SEQ ID NO: 2001998 - RNA, 19 nt, Homo sapiens
  misc_RNA (1)...(19): siRNA sense strand
agagaaagcugaauuugca

SEQ ID NO: 2001999 - RNA, 19 nt, Homo sapiens
  misc_RNA (1)...(19): siRNA sense strand
caaagagaaagcugaauuu

SEQ ID NO: 2002000 - RNA, 19 nt, Homo sapiens
  misc_RNA (1)...(19): siRNA sense strand
gaacagcagcgccugaaga

SEQ ID NO: 2002001 - RNA, 19 nt, Homo sapiens
  misc_RNA (1)...(19): siRNA sense strand
caacaaagccaagauagga

SEQ ID NO: 2002002 - RNA, 19 nt, Homo sapiens
  misc_RNA (1)...(19): siRNA sense strand
uaacaacaaagccaagaua

SEQ ID NO: 2002003 - RNA, 19 nt, Homo sapiens
  misc_RNA (1)...(19): siRNA sense strand
gaaaucagccccagucuuu

SEQ ID NO: 2002004 - RNA, 19 nt, Homo sapiens
  misc_RNA (1)...(19): siRNA sense strand
gaaggucucuacccaccaa

SEQ ID NO: 2002005 - RNA, 19 nt, Homo sapiens
  misc_RNA (1)...(19): siRNA sense strand
ggaagauucuggcuuugau

SEQ ID NO: 2002006 - RNA, 19 nt, Homo sapiens
  misc_RNA (1)...(19): siRNA sense strand
gguggaauaucaugugcua

SEQ ID NO: 2002007 - RNA, 19 nt, Homo sapiens
  misc_RNA (1)...(19): siRNA sense strand
gaagagcaagccuuugaaa

SEQ ID NO: 2002008 - RNA, 19 nt, Homo sapiens
  misc_RNA (1)...(19): siRNA sense strand
uuaacuagcucccuggaaa

SEQ ID NO: 2002009 - RNA, 19 nt, Homo sapiens
  misc_RNA (1)...(19): siRNA sense strand
acaacagccuccugacaua

SEQ ID NO: 2002010 - RNA, 19 nt, Homo sapiens
  misc_RNA (1)...(19): siRNA sense strand
gaggagaaauuuggcaguu

SEQ ID NO: 2002011 - RNA, 19 nt, Homo sapiens
  misc_RNA (1)...(19): siRNA sense strand
uaaaucaguugugcuagaa

SEQ ID NO: 2002012 - RNA, 19 nt, Homo sapiens
  misc_RNA (1)...(19): siRNA sense strand
aaacauggaccuccuagaa

SEQ ID NO: 2002013 - RNA, 19 nt, Homo sapiens
  misc_RNA (1)...(19): siRNA sense strand
gggauaagaaguuguuaaa

SEQ ID NO: 2002014 - RNA, 19 nt, Homo sapiens
  misc_RNA (1)...(19): siRNA sense strand
ugaagaaguuggugcaugu

SEQ ID NO: 2002015 - RNA, 19 nt, Homo sapiens
  misc_RNA (1)...(19): siRNA sense strand
gagaaaagcuauacaccaa

SEQ ID NO: 2002016 - RNA, 19 nt, Homo sapiens
  misc_RNA (1)...(19): siRNA sense strand
gcaaugagucccuaagugu

SEQ ID NO: 2002017 - RNA, 19 nt, Homo sapiens
  misc_RNA (1)...(19): siRNA sense strand
guggaucacuuuggcuuua

SEQ ID NO: 2002018 - RNA, 19 nt, Homo sapiens
  misc_RNA (1)...(19): siRNA sense strand
ccaacagucuugcuucaga

SEQ ID NO: 2002019 - RNA, 19 nt, Homo sapiens
  misc_RNA (1)...(19): siRNA sense strand
caagagacacuuauaaugg

SEQ ID NO: 2002020 - RNA, 19 nt, Homo sapiens
  misc_RNA (1)...(19): siRNA sense strand
gacacagauugccuaauaa

SEQ ID NO: 2002021 - RNA, 19 nt, Homo sapiens
  misc_RNA (1)...(19): siRNA sense strand
acaagacacugcuucagaa

SEQ ID NO: 2002022 - RNA, 19 nt, Homo sapiens
  misc_RNA (1)...(19): siRNA sense strand
gcacaaagagaaagcugaa

SEQ ID NO: 2002023 - RNA, 19 nt, Homo sapiens
  misc_RNA (1)...(19): siRNA sense strand
guauaaagcauguggauca

SEQ ID NO: 2002024 - RNA, 19 nt, Homo sapiens
  misc_RNA (1)...(19): siRNA sense strand
ugagagaccuaaacugcaa

SEQ ID NO: 2002025 - RNA, 19 nt, Homo sapiens
  misc_RNA (1)...(19): siRNA sense strand
agacacugcuucagaauca

SEQ ID NO: 2002026 - RNA, 19 nt, Homo sapiens
  misc_RNA (1)...(19): siRNA sense strand
guugggcgauuugagauua

SEQ ID NO: 2002027 - RNA, 19 nt, Homo sapiens
  misc_RNA (1)...(19): siRNA sense strand
gagcaagccuuugaaaugc

SEQ ID NO: 2002028 - RNA, 19 nt, Homo sapiens
  misc_RNA (1)...(19): siRNA sense strand
cagauugccuaauaaacaa

SEQ ID NO: 2002029 - RNA, 19 nt, Homo sapiens
  misc_RNA (1)...(19): siRNA sense strand
uaaagcauguggaucacuu

SEQ ID NO: 2002030 - RNA, 19 nt, Homo sapiens
  misc_RNA (1)...(19): siRNA sense strand
cauaagcucugugaaagga

SEQ ID NO: 2002031 - RNA, 19 nt, Homo sapiens
  misc_RNA (1)...(19): siRNA sense strand
uaaagaaggaguucccaaa

SEQ ID NO: 2002032 - RNA, 19 nt, Homo sapiens
  misc_RNA (1)...(19): siRNA sense strand
cugaggagcuuguggagaa

SEQ ID NO: 2002033 - RNA, 19 nt, Homo sapiens
  misc_RNA (1)...(19): siRNA sense strand
cuaaaucaguugugcuaga

SEQ ID NO: 2002034 - RNA, 19 nt, Homo sapiens
  misc_RNA (1)...(19): siRNA sense strand
gaaguccuguacuguggaa

SEQ ID NO: 2002035 - RNA, 19 nt, Homo sapiens
  misc_RNA (1)...(19): siRNA sense strand
caaaucuuguuacuucgaa

SEQ ID NO: 2002036 - RNA, 19 nt, Homo sapiens
  misc_RNA (1)...(19): siRNA sense strand
gcauguacaaggagaguaa

SEQ ID NO: 2002037 - RNA, 19 nt, Homo sapiens
  misc_RNA (1)...(19): siRNA sense strand
aggcaucucucaucacuga

SEQ ID NO: 2002038 - RNA, 19 nt, Homo sapiens
  misc_RNA (1)...(19): siRNA sense strand
gagguaaugcugacucuga

SEQ ID NO: 2002039 - RNA, 19 nt, Homo sapiens
  misc_RNA (1)...(19): siRNA sense strand
gaacaggaccaugcucuuc

SEQ ID NO: 2002040 - RNA, 19 nt, Homo sapiens
  misc_RNA (1)...(19): siRNA sense strand
gccaaacccagcaaagaua

SEQ ID NO: 2002041 - RNA, 19 nt, Homo sapiens
  misc_RNA (1)...(19): siRNA sense strand
ccaagagacacuuauaaug

SEQ ID NO: 2002042 - RNA, 19 nt, Homo sapiens
  misc_RNA (1)...(19): siRNA sense strand
ccuuugaaaugcugaaauu

SEQ ID NO: 2002043 - RNA, 19 nt, Homo sapiens
  misc_RNA (1)...(19): siRNA sense strand
gacaagacacugcuucaga

SEQ ID NO: 2002044 - RNA, 19 nt, Homo sapiens
  misc_RNA (1)...(19): siRNA sense strand
gccaguauauuuguuaugu

SEQ ID NO: 2002045 - RNA, 19 nt, Homo sapiens
  misc_RNA (1)...(19): siRNA sense strand
cuaaagcggccaugaaaga

SEQ ID NO: 2002046 - RNA, 19 nt, Homo sapiens
  misc_RNA (1)...(19): siRNA sense strand
gauaugaauaccucugaaa

SEQ ID NO: 2002047 - RNA, 19 nt, Homo sapiens
  misc_RNA (1)...(19): siRNA sense strand
ggaagaaaaugaacuugug

SEQ ID NO: 2002048 - RNA, 19 nt, Homo sapiens
  misc_RNA (1)...(19): siRNA sense strand
ggcaaacguuucccgaaga

SEQ ID NO: 2002049 - RNA, 19 nt, Homo sapiens
  misc_RNA (1)...(19): siRNA sense strand
cggaugcucuagccaauug

SEQ ID NO: 2002050 - RNA, 19 nt, Homo sapiens
  misc_RNA (1)...(19): siRNA sense strand
cuucaggaaucuucauauu

SEQ ID NO: 2002051 - RNA, 19 nt, Homo sapiens
  misc_RNA (1)...(19): siRNA sense strand
ggauauuucuaagcaguug

SEQ ID NO: 2002052 - RNA, 19 nt, Homo sapiens
  misc_RNA (1)...(19): siRNA sense strand
ugugagagcuuugaaaaua

SEQ ID NO: 2002053 - RNA, 19 nt, Homo sapiens
  misc_RNA (1)...(19): siRNA sense strand
ugaugucgcugcagauuca

SEQ ID NO: 2002054 - RNA, 19 nt, Homo sapiens
  misc_RNA (1)...(19): siRNA sense strand
gugaagagcaagccuuuga

SEQ ID NO: 2002055 - RNA, 19 nt, Homo sapiens
  misc_RNA (1)...(19): siRNA sense strand
aggaugagcuucaggaauc

SEQ ID NO: 2002056 - RNA, 19 nt, Homo sapiens
  misc_RNA (1)...(19): siRNA sense strand
gagcacaaggcgcagcaua

SEQ ID NO: 2002057 - RNA, 19 nt, Homo sapiens
  misc_RNA (1)...(19): siRNA sense strand
aagccaagauaggaaauaa

SEQ ID NO: 2002058 - RNA, 19 nt, Homo sapiens
  misc_RNA (1)...(19): siRNA sense strand
aagagacacuuauaaugga

SEQ ID NO: 2002059 - RNA, 19 nt, Homo sapiens
  misc_RNA (1)...(19): siRNA sense strand
ucacauuguuugccucuca

SEQ ID NO: 2002060 - RNA, 19 nt, Homo sapiens
  misc_RNA (1)...(19): siRNA sense strand
caaagaagugggauacugu

SEQ ID NO: 2002061 - RNA, 19 nt, Homo sapiens
  misc_RNA (1)...(19): siRNA sense strand
gccacgaccucaccuacuu

SEQ ID NO: 2002062 - RNA, 19 nt, Homo sapiens
  misc_RNA (1)...(19): siRNA sense strand
acaaagagaaagcugaauu

SEQ ID NO: 2002063 - RNA, 19 nt, Homo sapiens
  misc_RNA (1)...(19): siRNA sense strand
gcaaacguuucccgaagag

SEQ ID NO: 2002064 - RNA, 19 nt, Homo sapiens
  misc_RNA (1)...(19): siRNA sense strand
cgacacccaccuuggcuua

SEQ ID NO: 2002065 - RNA, 19 nt, Homo sapiens
  misc_RNA (1)...(19): siRNA sense strand
aguggaagguucaaacuug

SEQ ID NO: 2002066 - RNA, 19 nt, Homo sapiens
  misc_RNA (1)...(19): siRNA sense strand
cugcaacccuaacaacaaa

SEQ ID NO: 2002067 - RNA, 19 nt, Homo sapiens
  misc_RNA (1)...(19): siRNA sense strand
ggaccacgcugccuaugcu

SEQ ID NO: 2002068 - RNA, 19 nt, Homo sapiens
  misc_RNA (1)...(19): siRNA sense strand
gaaugugagagcuuugaaa

SEQ ID NO: 2002069 - RNA, 19 nt, Homo sapiens
  misc_RNA (1)...(19): siRNA sense strand
uguccaggcuccuucauga

SEQ ID NO: 2002070 - RNA, 19 nt, Homo sapiens
  misc_RNA (1)...(19): siRNA sense strand
ggacaaagaagugggauac

SEQ ID NO: 2002071 - RNA, 19 nt, Homo sapiens
  misc_RNA (1)...(19): siRNA sense strand
uggaagauauucauacucu

SEQ ID NO: 2002072 - RNA, 19 nt, Homo sapiens
  misc_RNA (1)...(19): siRNA sense strand
gugccaagacgcagauuaa

SEQ ID NO: 2002073 - RNA, 19 nt, Homo sapiens
  misc_RNA (1)...(19): siRNA sense strand
cuacugagcagccaagaga

SEQ ID NO: 2002074 - RNA, 19 nt, Homo sapiens
  misc_RNA (1)...(19): siRNA sense strand
agagcaagccuuugaaaug

SEQ ID NO: 2002075 - RNA, 19 nt, Homo sapiens
  misc_RNA (1)...(19): siRNA sense strand
gaaguuggugcaugucaga

SEQ ID NO: 2002076 - RNA, 19 nt, Homo sapiens
  misc_RNA (1)...(19): siRNA sense strand
gaaaagcuauacaccaaca

SEQ ID NO: 2002077 - RNA, 19 nt, Homo sapiens
  misc_RNA (1)...(19): siRNA sense strand
caaaagaacugaggagcuu

SEQ ID NO: 2002078 - RNA, 19 nt, Homo sapiens
  misc_RNA (1)...(19): siRNA sense strand
aaaugaagccagucaguga

SEQ ID NO: 2002079 - RNA, 19 nt, Homo sapiens
  misc_RNA (1)...(19): siRNA sense strand
uaagcucugugaaaggauu

SEQ ID NO: 2002080 - RNA, 19 nt, Homo sapiens
  misc_RNA (1)...(19): siRNA sense strand
gugaggauagugaaacuuu

SEQ ID NO: 2002081 - RNA, 19 nt, Homo sapiens
  misc_RNA (1)...(19): siRNA sense strand
ccaaacccagcaaagauaa

SEQ ID NO: 2002082 - RNA, 19 nt, Homo sapiens
  misc_RNA (1)...(19): siRNA sense strand
gaacauaacauuccaguug

SEQ ID NO: 2002083 - RNA, 19 nt, Homo sapiens
  misc_RNA (1)...(19): siRNA sense strand
ggauuuggauuaagcauaa

SEQ ID NO: 2002084 - RNA, 19 nt, Homo sapiens
  misc_RNA (1)...(19): siRNA sense strand
gaaugaagauugugcaugu

SEQ ID NO: 2002085 - RNA, 19 nt, Homo sapiens
  misc_RNA (1)...(19): siRNA sense strand
gcucaugucucuacaaguu

SEQ ID NO: 2002086 - RNA, 19 nt, Homo sapiens
  misc_RNA (1)...(19): siRNA sense strand
ggauuuaucugcuuugaug

SEQ ID NO: 2002087 - RNA, 19 nt, Homo sapiens
  misc_RNA (1)...(19): siRNA sense strand
caacaauacagacacauua

SEQ ID NO: 2002088 - RNA, 19 nt, Homo sapiens
  misc_RNA (1)...(19): siRNA sense strand
cuaaacagauugaagcaaa

SEQ ID NO: 2002089 - RNA, 19 nt, Homo sapiens
  misc_RNA (1)...(19): siRNA sense strand
gacaguggcuuacaucuca

SEQ ID NO: 2002090 - RNA, 19 nt, Homo sapiens
  misc_RNA (1)...(19): siRNA sense strand
gcaccuagccaaagacauu

SEQ ID NO: 2002091 - RNA, 19 nt, Homo sapiens
  misc_RNA (1)...(19): siRNA sense strand
cagaaugccuuucaaguca

SEQ ID NO: 2002092 - RNA, 19 nt, Homo sapiens
  misc_RNA (1)...(19): siRNA sense strand
guaggaggauuuggauuaa

SEQ ID NO: 2002093 - RNA, 19 nt, Homo sapiens
  misc_RNA (1)...(19): siRNA sense strand
gcacaggauuuaucugcuu

SEQ ID NO: 2002094 - RNA, 19 nt, Homo sapiens
  misc_RNA (1)...(19): siRNA sense strand
gcaauagcaacuaacauuu

SEQ ID NO: 2002095 - RNA, 19 nt, Homo sapiens
  misc_RNA (1)...(19): siRNA sense strand
guucuucacugcauucauu

SEQ ID NO: 2002096 - RNA, 19 nt, Homo sapiens
  misc_RNA (1)...(19): siRNA sense strand
caacuaccaucccaacaau

SEQ ID NO: 2002097 - RNA, 19 nt, Homo sapiens
  misc_RNA (1)...(19): siRNA sense strand
uaaugggacucacaauuga

SEQ ID NO: 2002098 - RNA, 19 nt, Homo sapiens
  misc_RNA (1)...(19): siRNA sense strand
caguggagcuggaaaguga

SEQ ID NO: 2002099 - RNA, 19 nt, Homo sapiens
  misc_RNA (1)...(19): siRNA sense strand
ggaacaggaugugauaugu

SEQ ID NO: 2002100 - RNA, 19 nt, Homo sapiens
  misc_RNA (1)...(19): siRNA sense strand
gaaagaacggugaccauca

SEQ ID NO: 2002101 - RNA, 19 nt, Homo sapiens
  misc_RNA (1)...(19): siRNA sense strand
gaacggauacagugcaaga

SEQ ID NO: 2002102 - RNA, 19 nt, Homo sapiens
  misc_RNA (1)...(19): siRNA sense strand
ggagaagaagugacucuaa

SEQ ID NO: 2002103 - RNA, 19 nt, Homo sapiens
  misc_RNA (1)...(19): siRNA sense strand
gaacuuucaggacuacuuu

SEQ ID NO: 2002104 - RNA, 19 nt, Homo sapiens
  misc_RNA (1)...(19): siRNA sense strand
gagaagaagugacucuaac

SEQ ID NO: 2002105 - RNA, 19 nt, Homo sapiens
  misc_RNA (1)...(19): siRNA sense strand
gcuuaaagguucuucagau

SEQ ID NO: 2002106 - RNA, 19 nt, Homo sapiens
  misc_RNA (1)...(19): siRNA sense strand
gagaugcaauucuacagau

SEQ ID NO: 2002107 - RNA, 19 nt, Homo sapiens
  misc_RNA (1)...(19): siRNA sense strand
gcaauucuacagauaaaug

SEQ ID NO: 2002108 - RNA, 19 nt, Homo sapiens
  misc_RNA (1)...(19): siRNA sense strand
ggucugcacugggauuauu

SEQ ID NO: 2002109 - RNA, 19 nt, Homo sapiens
  misc_RNA (1)...(19): siRNA sense strand
uaaagguucuucagaugau

SEQ ID NO: 2002110 - RNA, 19 nt, Homo sapiens
  misc_RNA (1)...(19): siRNA sense strand
caucagaagacaaacagua

SEQ ID NO: 2002111 - RNA, 19 nt, Homo sapiens
  misc_RNA (1)...(19): siRNA sense strand
gcaaaggaguuggaauuuu

SEQ ID NO: 2002112 - RNA, 19 nt, Homo sapiens
  misc_RNA (1)...(19): siRNA sense strand
gacagcaaccuuucuagaa

SEQ ID NO: 2002113 - RNA, 19 nt, Homo sapiens
  misc_RNA (1)...(19): siRNA sense strand
gcagaaugccuuucaaguc

SEQ ID NO: 2002114 - RNA, 19 nt, Homo sapiens
  misc_RNA (1)...(19): siRNA sense strand
gaagugacucuaacagugu

SEQ ID NO: 2002115 - RNA, 19 nt, Homo sapiens
  misc_RNA (1)...(19): siRNA sense strand
cuaaugggacucacaauug

SEQ ID NO: 2002116 - RNA, 19 nt, Homo sapiens
  misc_RNA (1)...(19): siRNA sense strand
uacaagcaauagcaacuaa

SEQ ID NO: 2002117 - RNA, 19 nt, Homo sapiens
  misc_RNA (1)...(19): siRNA sense strand
gauuucagcacaggauuua

SEQ ID NO: 2002118 - RNA, 19 nt, Homo sapiens
  misc_RNA (1)...(19): siRNA sense strand
uuucaaaucucacaaagca

SEQ ID NO: 2002119 - RNA, 19 nt, Homo sapiens
  misc_RNA (1)...(19): siRNA sense strand
caaaggaguuggaauuuuc

SEQ ID NO: 2002120 - RNA, 19 nt, Homo sapiens
  misc_RNA (1)...(19): siRNA sense strand
gaugcaauucuacagauaa

SEQ ID NO: 2002121 - RNA, 19 nt, Homo sapiens
  misc_RNA (1)...(19): siRNA sense strand
ccaggaacaggaugugaua

SEQ ID NO: 2002122 - RNA, 19 nt, Homo sapiens
  misc_RNA (1)...(19): siRNA sense strand
caauacagacacauuauca

SEQ ID NO: 2002123 - RNA, 19 nt, Homo sapiens
  misc_RNA (1)...(19): siRNA sense strand
ggagaugcaauucuacaga

SEQ ID NO: 2002124 - RNA, 19 nt, Homo sapiens
  misc_RNA (1)...(19): siRNA sense strand
gggaggaccuguacuucuc

SEQ ID NO: 2002125 - RNA, 19 nt, Homo sapiens
  misc_RNA (1)...(19): siRNA sense strand
gaacaggaugugauaugug

SEQ ID NO: 2002126 - RNA, 19 nt, Homo sapiens
  misc_RNA (1)...(19): siRNA sense strand
aguaggaggauuuggauua

SEQ ID NO: 2002127 - RNA, 19 nt, Homo sapiens
  misc_RNA (1)...(19): siRNA sense strand
cuucuuugcugccaaggua

SEQ ID NO: 2002128 - RNA, 19 nt, Homo sapiens
  misc_RNA (1)...(19): siRNA sense strand
ucggaaugcuggagaagaa

SEQ ID NO: 2002129 - RNA, 19 nt, Homo sapiens
  misc_RNA (1)...(19): siRNA sense strand
agacugaucccucuacuuc

SEQ ID NO: 2002130 - RNA, 19 nt, Homo sapiens
  misc_RNA (1)...(19): siRNA sense strand
gaaguagaacggauacagu

SEQ ID NO: 2002131 - RNA, 19 nt, Homo sapiens
  misc_RNA (1)...(19): siRNA sense strand
gaacggugaccaucagaag

SEQ ID NO: 2002132 - RNA, 19 nt, Homo sapiens
  misc_RNA (1)...(19): siRNA sense strand
gagcaaagcaaaguauaca

SEQ ID NO: 2002133 - RNA, 19 nt, Homo sapiens
  misc_RNA (1)...(19): siRNA sense strand
aagcaaaggaguuggaauu

SEQ ID NO: 2002134 - RNA, 19 nt, Homo sapiens
  misc_RNA (1)...(19): siRNA sense strand
gagacaaagacaggaauuu

SEQ ID NO: 2002135 - RNA, 19 nt, Homo sapiens
  misc_RNA (1)...(19): siRNA sense strand
caauagcaacuaacauuuc

SEQ ID NO: 2002136 - RNA, 19 nt, Homo sapiens
  misc_RNA (1)...(19): siRNA sense strand
ggagacaaagacaggaauu

SEQ ID NO: 2002137 - RNA, 19 nt, Homo sapiens
  misc_RNA (1)...(19): siRNA sense strand
acaaacaguaggaggauuu

SEQ ID NO: 2002138 - RNA, 19 nt, Homo sapiens
  misc_RNA (1)...(19): siRNA sense strand
cugcauucauuccuucuuu

SEQ ID NO: 2002139 - RNA, 19 nt, Homo sapiens
  misc_RNA (1)...(19): siRNA sense strand
uaaaccagcagauugucua

SEQ ID NO: 2002140 - RNA, 19 nt, Homo sapiens
  misc_RNA (1)...(19): siRNA sense strand
gcuuacaucucaacuacca

SEQ ID NO: 2002141 - RNA, 19 nt, Homo sapiens
  misc_RNA (1)...(19): siRNA sense strand
agaugcaauucuacagaua

SEQ ID NO: 2002142 - RNA, 19 nt, Homo sapiens
  misc_RNA (1)...(19): siRNA sense strand
uaacauuccaguugucguu

SEQ ID NO: 2002143 - RNA, 19 nt, Homo sapiens
  misc_RNA (1)...(19): siRNA sense strand
ccagacagcaaccuuucua

SEQ ID NO: 2002144 - RNA, 19 nt, Homo sapiens
  misc_RNA (1)...(19): siRNA sense strand
cuuaaagguucuucagaug

SEQ ID NO: 2002145 - RNA, 19 nt, Homo sapiens
  misc_RNA (1)...(19): siRNA sense strand
gcgcuucucucaguaugug

SEQ ID NO: 2002146 - RNA, 19 nt, Homo sapiens
  misc_RNA (1)...(19): siRNA sense strand
gcaaagcaaaguauacaac

SEQ ID NO: 2002147 - RNA, 19 nt, Homo sapiens
  misc_RNA (1)...(19): siRNA sense strand
ggagguauaaauucucuca

SEQ ID NO: 2002148 - RNA, 19 nt, Homo sapiens
  misc_RNA (1)...(19): siRNA sense strand
cacaggauuuaucugcuuu

SEQ ID NO: 2002149 - RNA, 19 nt, Homo sapiens
  misc_RNA (1)...(19): siRNA sense strand
gggcucaugucucuacaag

SEQ ID NO: 2002150 - RNA, 19 nt, Homo sapiens
  misc_RNA (1)...(19): siRNA sense strand
gagcagaacauaacauucc

SEQ ID NO: 2002151 - RNA, 19 nt, Homo sapiens
  misc_RNA (1)...(19): siRNA sense strand
gaauccagauacuaaacag

SEQ ID NO: 2002152 - RNA, 19 nt, Homo sapiens
  misc_RNA (1)...(19): siRNA sense strand
acagcaaccuuucuagaag

SEQ ID NO: 2002153 - RNA, 19 nt, Homo sapiens
  misc_RNA (1)...(19): siRNA sense strand
ccaacaauacagacacauu

SEQ ID NO: 2002154 - RNA, 19 nt, Homo sapiens
  misc_RNA (1)...(19): siRNA sense strand
uaaccaggagccuuucaaa

SEQ ID NO: 2002155 - RNA, 19 nt, Homo sapiens
  misc_RNA (1)...(19): siRNA sense strand
gacaaacaguaggaggauu

SEQ ID NO: 2002156 - RNA, 19 nt, Homo sapiens
  misc_RNA (1)...(19): siRNA sense strand
caugugugcuagaaaguca

SEQ ID NO: 2002157 - RNA, 19 nt, Homo sapiens
  misc_RNA (1)...(19): siRNA sense strand
ggauacagugcaagaccua

SEQ ID NO: 2002158 - RNA, 19 nt, Homo sapiens
  misc_RNA (1)...(19): siRNA sense strand
cagcaaccuuucuagaagu

SEQ ID NO: 2002159 - RNA, 19 nt, Homo sapiens
  misc_RNA (1)...(19): siRNA sense strand
gaagaagugacucuaacag

SEQ ID NO: 2002160 - RNA, 19 nt, Homo sapiens
  misc_RNA (1)...(19): siRNA sense strand
uaaacagauugaagcaaag

SEQ ID NO: 2002161 - RNA, 19 nt, Homo sapiens
  misc_RNA (1)...(19): siRNA sense strand
cauaaagggaggagcagaa

SEQ ID NO: 2002162 - RNA, 19 nt, Homo sapiens
  misc_RNA (1)...(19): siRNA sense strand
cuggugagccuuucuauuc

SEQ ID NO: 2002163 - RNA, 19 nt, Homo sapiens
  misc_RNA (1)...(19): siRNA sense strand
aaagaacggugaccaucag

SEQ ID NO: 2002164 - RNA, 19 nt, Homo sapiens
  misc_RNA (1)...(19): siRNA sense strand
gcuguccuuuggagguaua

SEQ ID NO: 2002165 - RNA, 19 nt, Homo sapiens
  misc_RNA (1)...(19): siRNA sense strand
uacaugggcuggugugaag

SEQ ID NO: 2002166 - RNA, 19 nt, Homo sapiens
  misc_RNA (1)...(19): siRNA sense strand
gugcaugugcuccaaguga

SEQ ID NO: 2002167 - RNA, 19 nt, Homo sapiens
  misc_RNA (1)...(19): siRNA sense strand
aacaggaugugauaugugu

SEQ ID NO: 2002168 - RNA, 19 nt, Homo sapiens
  misc_RNA (1)...(19): siRNA sense strand
ucaacuaccaucccaacaa

SEQ ID NO: 2002169 - RNA, 19 nt, Homo sapiens
  misc_RNA (1)...(19): siRNA sense strand
ccacgagcaaagcaaagua

SEQ ID NO: 2002170 - RNA, 19 nt, Homo sapiens
  misc_RNA (1)...(19): siRNA sense strand
uuaaagguucuucagauga

SEQ ID NO: 2002171 - RNA, 19 nt, Homo sapiens
  misc_RNA (1)...(19): siRNA sense strand
gaccuaugcaugugugcua

SEQ ID NO: 2002172 - RNA, 19 nt, Homo sapiens
  misc_RNA (1)...(19): siRNA sense strand
ggaacuuucaggacuacuu

SEQ ID NO: 2002173 - RNA, 19 nt, Homo sapiens
  misc_RNA (1)...(19): siRNA sense strand
gaggagacaaagacaggaa

SEQ ID NO: 2002174 - RNA, 19 nt, Homo sapiens
  misc_RNA (1)...(19): siRNA sense strand
guauaaauucucucagcuu

SEQ ID NO: 2002175 - RNA, 19 nt, Homo sapiens
  misc_RNA (1)...(19): siRNA sense strand
gauuugagucggcagaaug

SEQ ID NO: 2002176 - RNA, 19 nt, Homo sapiens
  misc_RNA (1)...(19): siRNA sense strand
uggcuuacaucucaacuac

SEQ ID NO: 2002177 - RNA, 19 nt, Homo sapiens
  misc_RNA (1)...(19): siRNA sense strand
gggaggagcagaacauaac

SEQ ID NO: 2002178 - RNA, 19 nt, Homo sapiens
  misc_RNA (1)...(19): siRNA sense strand
caagcaauagcaacuaaca

SEQ ID NO: 2002179 - RNA, 19 nt, Homo sapiens
  misc_RNA (1)...(19): siRNA sense strand
caggauuuaucugcuuuga

SEQ ID NO: 2002180 - RNA, 19 nt, Homo sapiens
  misc_RNA (1)...(19): siRNA sense strand
ggacucacaauugauuuca

SEQ ID NO: 2002181 - RNA, 19 nt, Homo sapiens
  misc_RNA (1)...(19): siRNA sense strand
uagaacggauacagugcaa

SEQ ID NO: 2002182 - RNA, 19 nt, Homo sapiens
  misc_RNA (1)...(19): siRNA sense strand
ucacagaccugaucaaugu

SEQ ID NO: 2002183 - RNA, 19 nt, Homo sapiens
  misc_RNA (1)...(19): siRNA sense strand
cagaaccucuuccugaaua

SEQ ID NO: 2002184 - RNA, 19 nt, Homo sapiens
  misc_RNA (1)...(19): siRNA sense strand
gagcagaccuucauguaca

SEQ ID NO: 2002185 - RNA, 19 nt, Homo sapiens
  misc_RNA (1)...(19): siRNA sense strand
gaugaugacuugcaguuug

SEQ ID NO: 2002186 - RNA, 19 nt, Homo sapiens
  misc_RNA (1)...(19): siRNA sense strand
gaccgaaacucccggguaa

SEQ ID NO: 2002187 - RNA, 19 nt, Homo sapiens
  misc_RNA (1)...(19): siRNA sense strand
ugaaggaacucaacaagug

SEQ ID NO: 2002188 - RNA, 19 nt, Homo sapiens
  misc_RNA (1)...(19): siRNA sense strand
gagaagccauaccaaugua

SEQ ID NO: 2002189 - RNA, 19 nt, Homo sapiens
  misc_RNA (1)...(19): siRNA sense strand
ccaaagaggcggauaagaa

SEQ ID NO: 2002190 - RNA, 19 nt, Homo sapiens
  misc_RNA (1)...(19): siRNA sense strand
ggaaaguauuggccaaaga

SEQ ID NO: 2002191 - RNA, 19 nt, Homo sapiens
  misc_RNA (1)...(19): siRNA sense strand
ccaacaaccugcugaagga

SEQ ID NO: 2002192 - RNA, 19 nt, Homo sapiens
  misc_RNA (1)...(19): siRNA sense strand
agaagaauguugccaguga

SEQ ID NO: 2002193 - RNA, 19 nt, Homo sapiens
  misc_RNA (1)...(19): siRNA sense strand
ggccaaagauuuccaugug

SEQ ID NO: 2002194 - RNA, 19 nt, Homo sapiens
  misc_RNA (1)...(19): siRNA sense strand
caacugaggaggugauuga

SEQ ID NO: 2002195 - RNA, 19 nt, Homo sapiens
  misc_RNA (1)...(19): siRNA sense strand
gcacccagcucuccagaag

SEQ ID NO: 2002196 - RNA, 19 nt, Homo sapiens
  misc_RNA (1)...(19): siRNA sense strand
ggaccuaugugguggacuu

SEQ ID NO: 2002197 - RNA, 19 nt, Homo sapiens
  misc_RNA (1)...(19): siRNA sense strand
ucaaagcaauggagacuuc

SEQ ID NO: 2002198 - RNA, 19 nt, Homo sapiens
  misc_RNA (1)...(19): siRNA sense strand
gcaauggagacuucaguaa

SEQ ID NO: 2002199 - RNA, 19 nt, Homo sapiens
  misc_RNA (1)...(19): siRNA sense strand
cgagguagcugagcguuug

SEQ ID NO: 2002200 - RNA, 19 nt, Homo sapiens
  misc_RNA (1)...(19): siRNA sense strand
ggacuggcaucuucuagag

SEQ ID NO: 2002201 - RNA, 19 nt, Homo sapiens
  misc_RNA (1)...(19): siRNA sense strand
ccacauccuugaccaucua

SEQ ID NO: 2002202 - RNA, 19 nt, Homo sapiens
  misc_RNA (1)...(19): siRNA sense strand
ugauugagcugagugauga

SEQ ID NO: 2002203 - RNA, 19 nt, Homo sapiens
  misc_RNA (1)...(19): siRNA sense strand
ggagaagccauaccaaugu

SEQ ID NO: 2002204 - RNA, 19 nt, Homo sapiens
  misc_RNA (1)...(19): siRNA sense strand
gauaagaacccggacaguu

SEQ ID NO: 2002205 - RNA, 19 nt, Homo sapiens
  misc_RNA (1)...(19): siRNA sense strand
gggaccaacuccugucuga

SEQ ID NO: 2002206 - RNA, 19 nt, Homo sapiens
  misc_RNA (1)...(19): siRNA sense strand
ccgacgggauggaauauuu

SEQ ID NO: 2002207 - RNA, 19 nt, Homo sapiens
  misc_RNA (1)...(19): siRNA sense strand
gaaaguauuggccaaagau

SEQ ID NO: 2002208 - RNA, 19 nt, Homo sapiens
  misc_RNA (1)...(19): siRNA sense strand
caauggagacuucaguaaa

SEQ ID NO: 2002209 - RNA, 19 nt, Homo sapiens
  misc_RNA (1)...(19): siRNA sense strand
gggagaagccauaccaaug

SEQ ID NO: 2002210 - RNA, 19 nt, Homo sapiens
  misc_RNA (1)...(19): siRNA sense strand
cgacaugugugaaacuaag

SEQ ID NO: 2002211 - RNA, 19 nt, Homo sapiens
  misc_RNA (1)...(19): siRNA sense strand
gauggaauauuugagaaca

SEQ ID NO: 2002212 - RNA, 19 nt, Homo sapiens
  misc_RNA (1)...(19): siRNA sense strand
gggauggaauauuugagaa

SEQ ID NO: 2002213 - RNA, 19 nt, Homo sapiens
  misc_RNA (1)...(19): siRNA sense strand
cauacaaaguucaaagcaa

SEQ ID NO: 2002214 - RNA, 19 nt, Homo sapiens
  misc_RNA (1)...(19): siRNA sense strand
gaaacucccggguaacuca

SEQ ID NO: 2002215 - RNA, 19 nt, Homo sapiens
  misc_RNA (1)...(19): siRNA sense strand
ugaagacccugcugaggau

SEQ ID NO: 2002216 - RNA, 19 nt, Homo sapiens
  misc_RNA (1)...(19): siRNA sense strand
caucauccauuccaaagag

SEQ ID NO: 2002217 - RNA, 19 nt, Homo sapiens
  misc_RNA (1)...(19): siRNA sense strand
guacaucauccauuccaaa

SEQ ID NO: 2002218 - RNA, 19 nt, Homo sapiens
  misc_RNA (1)...(19): siRNA sense strand
ucauguacaucauccauuc

SEQ ID NO: 2002219 - RNA, 19 nt, Homo sapiens
  misc_RNA (1)...(19): siRNA sense strand
guucugagcuuugucuaca

SEQ ID NO: 2002220 - RNA, 19 nt, Homo sapiens
  misc_RNA (1)...(19): siRNA sense strand
gaaugacaaucgggagaau

SEQ ID NO: 2002221 - RNA, 19 nt, Homo sapiens
  misc_RNA (1)...(19): siRNA sense strand
cacuacaguuccacccuua

SEQ ID NO: 2002222 - RNA, 19 nt, Homo sapiens
  misc_RNA (1)...(19): siRNA sense strand
ggacuaccuuggugcugau

SEQ ID NO: 2002223 - RNA, 19 nt, Homo sapiens
  misc_RNA (1)...(19): siRNA sense strand
uaagaacccggacaguuga

SEQ ID NO: 2002224 - RNA, 19 nt, Homo sapiens
  misc_RNA (1)...(19): siRNA sense strand
gagcccaacauucaacuga

SEQ ID NO: 2002225 - RNA, 19 nt, Homo sapiens
  misc_RNA (1)...(19): siRNA sense strand
gcuauaaagaggaagagaa

SEQ ID NO: 2002226 - RNA, 19 nt, Homo sapiens
  misc_RNA (1)...(19): siRNA sense strand
auaagaacccggacaguug

SEQ ID NO: 2002227 - RNA, 19 nt, Homo sapiens
  misc_RNA (1)...(19): siRNA sense strand
caaagaggcggauaagaac

SEQ ID NO: 2002228 - RNA, 19 nt, Homo sapiens
  misc_RNA (1)...(19): siRNA sense strand
uagcugagcguuuggguau

SEQ ID NO: 2002229 - RNA, 19 nt, Homo sapiens
  misc_RNA (1)...(19): siRNA sense strand
gaagcugggucucuuuuca

SEQ ID NO: 2002230 - RNA, 19 nt, Homo sapiens
  misc_RNA (1)...(19): siRNA sense strand
auaaagaggaagagaagaa

SEQ ID NO: 2002231 - RNA, 19 nt, Homo sapiens
  misc_RNA (1)...(19): siRNA sense strand
gcgaccagcgucaccuuaa

SEQ ID NO: 2002232 - RNA, 19 nt, Homo sapiens
  misc_RNA (1)...(19): siRNA sense strand
gggaaaguauuggccaaag

SEQ ID NO: 2002233 - RNA, 19 nt, Homo sapiens
  misc_RNA (1)...(19): siRNA sense strand
gaggauauaggcacaacug

SEQ ID NO: 2002234 - RNA, 19 nt, Homo sapiens
  misc_RNA (1)...(19): siRNA sense strand
caaagacagaagaccauga

SEQ ID NO: 2002235 - RNA, 19 nt, Homo sapiens
  misc_RNA (1)...(19): siRNA sense strand
ucaccgacgggauggaaua

SEQ ID NO: 2002236 - RNA, 19 nt, Homo sapiens
  misc_RNA (1)...(19): siRNA sense strand
uccagaaccucuuccugaa

SEQ ID NO: 2002237 - RNA, 19 nt, Homo sapiens
  misc_RNA (1)...(19): siRNA sense strand
caucaccccugccaacuuu

SEQ ID NO: 2002238 - RNA, 19 nt, Homo sapiens
  misc_RNA (1)...(19): siRNA sense strand
caagcgaauucaacuacca

SEQ ID NO: 2002239 - RNA, 19 nt, Homo sapiens
  misc_RNA (1)...(19): siRNA sense strand
gcccaacauucaacugauc

SEQ ID NO: 2002240 - RNA, 19 nt, Homo sapiens
  misc_RNA (1)...(19): siRNA sense strand
gggaugaugacuugcaguu

SEQ ID NO: 2002241 - RNA, 19 nt, Homo sapiens
  misc_RNA (1)...(19): siRNA sense strand
gccagugacgcuaaccaua

SEQ ID NO: 2002242 - RNA, 19 nt, Homo sapiens
  misc_RNA (1)...(19): siRNA sense strand
ugacagugaggaugaguug

SEQ ID NO: 2002243 - RNA, 19 nt, Homo sapiens
  misc_RNA (1)...(19): siRNA sense strand
cagggaagcugggucucuu

SEQ ID NO: 2002244 - RNA, 19 nt, Homo sapiens
  misc_RNA (1)...(19): siRNA sense strand
gaggaagagaagaauguug

SEQ ID NO: 2002245 - RNA, 19 nt, Homo sapiens
  misc_RNA (1)...(19): siRNA sense strand
gaccaucaagugccaccua

SEQ ID NO: 2002246 - RNA, 19 nt, Homo sapiens
  misc_RNA (1)...(19): siRNA sense strand
caaggucuguggcaaaaga

SEQ ID NO: 2002247 - RNA, 19 nt, Homo sapiens
  misc_RNA (1)...(19): siRNA sense strand
ccugggaacagcaaguaua

SEQ ID NO: 2002248 - RNA, 19 nt, Homo sapiens
  misc_RNA (1)...(19): siRNA sense strand
gugaugacagugaggauga

SEQ ID NO: 2002249 - RNA, 19 nt, Homo sapiens
  misc_RNA (1)...(19): siRNA sense strand
agacccugcugaggauaua

SEQ ID NO: 2002250 - RNA, 19 nt, Homo sapiens
  misc_RNA (1)...(19): siRNA sense strand
ggaugaugacuugcaguuu

SEQ ID NO: 2002251 - RNA, 19 nt, Homo sapiens
  misc_RNA (1)...(19): siRNA sense strand
ccagugacgcuaaccauag

SEQ ID NO: 2002252 - RNA, 19 nt, Homo sapiens
  misc_RNA (1)...(19): siRNA sense strand
cuaccuuggugcugauaga

SEQ ID NO: 2002253 - RNA, 19 nt, Homo sapiens
  misc_RNA (1)...(19): siRNA sense strand
caacaguggccuugaugca

SEQ ID NO: 2002254 - RNA, 19 nt, Homo sapiens
  misc_RNA (1)...(19): siRNA sense strand
gccagagcuucaagucaga

SEQ ID NO: 2002255 - RNA, 19 nt, Homo sapiens
  misc_RNA (1)...(19): siRNA sense strand
ggcacacgcugucccaucu

SEQ ID NO: 2002256 - RNA, 19 nt, Homo sapiens
  misc_RNA (1)...(19): siRNA sense strand
gcuuugggcagauggauga

SEQ ID NO: 2002257 - RNA, 19 nt, Homo sapiens
  misc_RNA (1)...(19): siRNA sense strand
caacaagugccggcucuca

SEQ ID NO: 2002258 - RNA, 19 nt, Homo sapiens
  misc_RNA (1)...(19): siRNA sense strand
ucacguccauuccuagcau

SEQ ID NO: 2002259 - RNA, 19 nt, Homo sapiens
  misc_RNA (1)...(19): siRNA sense strand
gaugcuggagggagcuaua

SEQ ID NO: 2002260 - RNA, 19 nt, Homo sapiens
  misc_RNA (1)...(19): siRNA sense strand
gcacaacugaggaggugau

SEQ ID NO: 2002261 - RNA, 19 nt, Homo sapiens
  misc_RNA (1)...(19): siRNA sense strand
ucgagcagaccuucaugua

SEQ ID NO: 2002262 - RNA, 19 nt, Homo sapiens
  misc_RNA (1)...(19): siRNA sense strand
caucaagugccaccuaaag

SEQ ID NO: 2002263 - RNA, 19 nt, Homo sapiens
  misc_RNA (1)...(19): siRNA sense strand
gugaggaugaguuggcuuu

SEQ ID NO: 2002264 - RNA, 19 nt, Homo sapiens
  misc_RNA (1)...(19): siRNA sense strand
gcugagcguuuggguaugg

SEQ ID NO: 2002265 - RNA, 19 nt, Homo sapiens
  misc_RNA (1)...(19): siRNA sense strand
gcaaguauagcugcaaggu

SEQ ID NO: 2002266 - RNA, 19 nt, Homo sapiens
  misc_RNA (1)...(19): siRNA sense strand
ccuugaccaucuaaacuug

SEQ ID NO: 2002267 - RNA, 19 nt, Homo sapiens
  misc_RNA (1)...(19): siRNA sense strand
caacuccugucugagcaau

SEQ ID NO: 2002268 - RNA, 19 nt, Homo sapiens
  misc_RNA (1)...(19): siRNA sense strand
ggagcuauaaagaggaaga

SEQ ID NO: 2002269 - RNA, 19 nt, Homo sapiens
  misc_RNA (1)...(19): siRNA sense strand
caagugccaccuaaagaca

SEQ ID NO: 2002270 - RNA, 19 nt, Homo sapiens
  misc_RNA (1)...(19): siRNA sense strand
acacaagcgaauucaacua

SEQ ID NO: 2002271 - RNA, 19 nt, Homo sapiens
  misc_RNA (1)...(19): siRNA sense strand
guccauuccuagcaugaug

SEQ ID NO: 2002272 - RNA, 19 nt, Homo sapiens
  misc_RNA (1)...(19): siRNA sense strand
uaaagaggaagagaagaau

SEQ ID NO: 2002273 - RNA, 19 nt, Homo sapiens
  misc_RNA (1)...(19): siRNA sense strand
aauggagacuucaguaaaa

SEQ ID NO: 2002274 - RNA, 19 nt, Homo sapiens
  misc_RNA (1)...(19): siRNA sense strand
gaagccauaccaauguaag

SEQ ID NO: 2002275 - RNA, 19 nt, Homo sapiens
  misc_RNA (1)...(19): siRNA sense strand
ccacacaagcgaauucaac

SEQ ID NO: 2002276 - RNA, 19 nt, Homo sapiens
  misc_RNA (1)...(19): siRNA sense strand
augaugacuugcaguuuga

SEQ ID NO: 2002277 - RNA, 19 nt, Homo sapiens
  misc_RNA (1)...(19): siRNA sense strand
cuccaggccugucacucua

SEQ ID NO: 2002278 - RNA, 19 nt, Homo sapiens
  misc_RNA (1)...(19): siRNA sense strand
ggaggugauugagcugagu

SEQ ID NO: 2002279 - RNA, 19 nt, Homo sapiens
  misc_RNA (1)...(19): siRNA sense strand
gaagacccugcugaggaua

SEQ ID NO: 2002280 - RNA, 19 nt, Homo sapiens
  misc_RNA (1)...(19): siRNA sense strand
cgacgggauggaauauuug

SEQ ID NO: 2002281 - RNA, 19 nt, Homo sapiens
  misc_RNA (1)...(19): siRNA sense strand
gacgggauggaauauuuga

SEQ ID NO: 2002282 - RNA, 19 nt, Homo sapiens
  misc_RNA (1)...(19): siRNA sense strand
gaaagaugcuugugaacua

SEQ ID NO: 2002283 - RNA, 19 nt, Homo sapiens
  misc_RNA (1)...(19): siRNA sense strand
gaaagguacuuaaaucgau

SEQ ID NO: 2002284 - RNA, 19 nt, Homo sapiens
  misc_RNA (1)...(19): siRNA sense strand
gcagugagcuggagcagau

SEQ ID NO: 2002285 - RNA, 19 nt, Homo sapiens
  misc_RNA (1)...(19): siRNA sense strand
aaagaaagaugcuugugaa

SEQ ID NO: 2002286 - RNA, 19 nt, Homo sapiens
  misc_RNA (1)...(19): siRNA sense strand
gaaugggacuuugaucuga

SEQ ID NO: 2002287 - RNA, 19 nt, Homo sapiens
  misc_RNA (1)...(19): siRNA sense strand
ggacuuugaucugaagaaa

SEQ ID NO: 2002288 - RNA, 19 nt, Homo sapiens
  misc_RNA (1)...(19): siRNA sense strand
gaaaaggccuugcgucuca

SEQ ID NO: 2002289 - RNA, 19 nt, Homo sapiens
  misc_RNA (1)...(19): siRNA sense strand
ggaacuaaacgaugaauca

SEQ ID NO: 2002290 - RNA, 19 nt, Homo sapiens
  misc_RNA (1)...(19): siRNA sense strand
gacagcaguuugagggaua

SEQ ID NO: 2002291 - RNA, 19 nt, Homo sapiens
  misc_RNA (1)...(19): siRNA sense strand
caaagaaagaugcuuguga

SEQ ID NO: 2002292 - RNA, 19 nt, Homo sapiens
  misc_RNA (1)...(19): siRNA sense strand
gagagaggcccacaaacaa

SEQ ID NO: 2002293 - RNA, 19 nt, Homo sapiens
  misc_RNA (1)...(19): siRNA sense strand
gagcagauugaguuacaua

SEQ ID NO: 2002294 - RNA, 19 nt, Homo sapiens
  misc_RNA (1)...(19): siRNA sense strand
cugaagaaauuaccaaaca

SEQ ID NO: 2002295 - RNA, 19 nt, Homo sapiens
  misc_RNA (1)...(19): siRNA sense strand
aaagaugcuugugaacuaa

SEQ ID NO: 2002296 - RNA, 19 nt, Homo sapiens
  misc_RNA (1)...(19): siRNA sense strand
gaacuaaacgaugaaucaa

SEQ ID NO: 2002297 - RNA, 19 nt, Homo sapiens
  misc_RNA (1)...(19): siRNA sense strand
cagcucaaauuacgagaga

SEQ ID NO: 2002298 - RNA, 19 nt, Homo sapiens
  misc_RNA (1)...(19): siRNA sense strand
aaagucauccauccauaua

SEQ ID NO: 2002299 - RNA, 19 nt, Homo sapiens
  misc_RNA (1)...(19): siRNA sense strand
cgagagaggcccacaaaca

SEQ ID NO: 2002300 - RNA, 19 nt, Homo sapiens
  misc_RNA (1)...(19): siRNA sense strand
ggaauuggaacuaaacgau

SEQ ID NO: 2002301 - RNA, 19 nt, Homo sapiens
  misc_RNA (1)...(19): siRNA sense strand
ggauauggccuugagauuc

SEQ ID NO: 2002302 - RNA, 19 nt, Homo sapiens
  misc_RNA (1)...(19): siRNA sense strand
gugaacuaauugaaaggua

SEQ ID NO: 2002303 - RNA, 19 nt, Homo sapiens
  misc_RNA (1)...(19): siRNA sense strand
ccaaagcaccaaagggaaa

SEQ ID NO: 2002304 - RNA, 19 nt, Homo sapiens
  misc_RNA (1)...(19): siRNA sense strand
ggaaugggacuuugaucug

SEQ ID NO: 2002305 - RNA, 19 nt, Homo sapiens
  misc_RNA (1)...(19): siRNA sense strand
gauauggccuugagauucc

SEQ ID NO: 2002306 - RNA, 19 nt, Homo sapiens
  misc_RNA (1)...(19): siRNA sense strand
gagauuccagacauucuaa

SEQ ID NO: 2002307 - RNA, 19 nt, Homo sapiens
  misc_RNA (1)...(19): siRNA sense strand
aauuggaacuaaacgauga

SEQ ID NO: 2002308 - RNA, 19 nt, Homo sapiens
  misc_RNA (1)...(19): siRNA sense strand
gagaggcccacaaacaaga

SEQ ID NO: 2002309 - RNA, 19 nt, Homo sapiens
  misc_RNA (1)...(19): siRNA sense strand
cuaaaugcaaguaaucuga

SEQ ID NO: 2002310 - RNA, 19 nt, Homo sapiens
  misc_RNA (1)...(19): siRNA sense strand
acuaaacgaugaaucaagu

SEQ ID NO: 2002311 - RNA, 19 nt, Homo sapiens
  misc_RNA (1)...(19): siRNA sense strand
uagaaaagcagcucaaauu

SEQ ID NO: 2002312 - RNA, 19 nt, Homo sapiens
  misc_RNA (1)...(19): siRNA sense strand
gggagaccgucaucaagca

SEQ ID NO: 2002313 - RNA, 19 nt, Homo sapiens
  misc_RNA (1)...(19): siRNA sense strand
uaacuguagaccaagauuu

SEQ ID NO: 2002314 - RNA, 19 nt, Homo sapiens
  misc_RNA (1)...(19): siRNA sense strand
uaaaucgauucagcaguga

SEQ ID NO: 2002315 - RNA, 19 nt, Homo sapiens
  misc_RNA (1)...(19): siRNA sense strand
ugauucagaugaggaaaug

SEQ ID NO: 2002316 - RNA, 19 nt, Homo sapiens
  misc_RNA (1)...(19): siRNA sense strand
gggauauggccuugagauu

SEQ ID NO: 2002317 - RNA, 19 nt, Homo sapiens
  misc_RNA (1)...(19): siRNA sense strand
gaucugaagaaauuaccaa

SEQ ID NO: 2002318 - RNA, 19 nt, Homo sapiens
  misc_RNA (1)...(19): siRNA sense strand
uaaacgaugaaucaaguga

SEQ ID NO: 2002319 - RNA, 19 nt, Homo sapiens
  misc_RNA (1)...(19): siRNA sense strand
ugaaagguacuuaaaucga

SEQ ID NO: 2002320 - RNA, 19 nt, Homo sapiens
  misc_RNA (1)...(19): siRNA sense strand
uggagcagauugaguuaca

SEQ ID NO: 2002321 - RNA, 19 nt, Homo sapiens
  misc_RNA (1)...(19): siRNA sense strand
gaaaagcagcucaaauuac

SEQ ID NO: 2002322 - RNA, 19 nt, Homo sapiens
  misc_RNA (1)...(19): siRNA sense strand
agaaaagcagcucaaauua

SEQ ID NO: 2002323 - RNA, 19 nt, Homo sapiens
  misc_RNA (1)...(19): siRNA sense strand
gcuugugaacuaauugaaa

SEQ ID NO: 2002324 - RNA, 19 nt, Homo sapiens
  misc_RNA (1)...(19): siRNA sense strand
gcuggagcagauugaguua

SEQ ID NO: 2002325 - RNA, 19 nt, Homo sapiens
  misc_RNA (1)...(19): siRNA sense strand
ugagggauauggccuugag

SEQ ID NO: 2002326 - RNA, 19 nt, Homo sapiens
  misc_RNA (1)...(19): siRNA sense strand
ggccuugcgucucaaccuu

SEQ ID NO: 2002327 - RNA, 19 nt, Homo sapiens
  misc_RNA (1)...(19): siRNA sense strand
gggaaugggacuuugaucu

SEQ ID NO: 2002328 - RNA, 19 nt, Homo sapiens
  misc_RNA (1)...(19): siRNA sense strand
cuugugaacuaauugaaag

SEQ ID NO: 2002329 - RNA, 19 nt, Homo sapiens
  misc_RNA (1)...(19): siRNA sense strand
ugagauuccagacauucua

SEQ ID NO: 2002330 - RNA, 19 nt, Homo sapiens
  misc_RNA (1)...(19): siRNA sense strand
agucauccauccauauagu

SEQ ID NO: 2002331 - RNA, 19 nt, Homo sapiens
  misc_RNA (1)...(19): siRNA sense strand
gggagcgacagcaguuuga

SEQ ID NO: 2002332 - RNA, 19 nt, Homo sapiens
  misc_RNA (1)...(19): siRNA sense strand
ccaagacgugcaagaggaa

SEQ ID NO: 2002333 - RNA, 19 nt, Homo sapiens
  misc_RNA (1)...(19): siRNA sense strand
gccuugagauuccagacau

SEQ ID NO: 2002334 - RNA, 19 nt, Homo sapiens
  misc_RNA (1)...(19): siRNA sense strand
gaacuaauugaaagguacu

SEQ ID NO: 2002335 - RNA, 19 nt, Homo sapiens
  misc_RNA (1)...(19): siRNA sense strand
aaugggacuuugaucugaa

SEQ ID NO: 2002336 - RNA, 19 nt, Homo sapiens
  misc_RNA (1)...(19): siRNA sense strand
uacgagagaggcccacaaa

SEQ ID NO: 2002337 - RNA, 19 nt, Homo sapiens
  misc_RNA (1)...(19): siRNA sense strand
agaugcuugugaacuaauu

SEQ ID NO: 2002338 - RNA, 19 nt, Homo sapiens
  misc_RNA (1)...(19): siRNA sense strand
gauuccagacauucuaaau

SEQ ID NO: 2002339 - RNA, 19 nt, Homo sapiens
  misc_RNA (1)...(19): siRNA sense strand
gcaaugguuucaaaaucau

SEQ ID NO: 2002340 - RNA, 19 nt, Homo sapiens
  misc_RNA (1)...(19): siRNA sense strand
ggagcagauugaguuacau

SEQ ID NO: 2002341 - RNA, 19 nt, Homo sapiens
  misc_RNA (1)...(19): siRNA sense strand
aaaagcagcucaaauuacg

SEQ ID NO: 2002342 - RNA, 19 nt, Homo sapiens
  misc_RNA (1)...(19): siRNA sense strand
gcaaguaaucugaaaacau

SEQ ID NO: 2002343 - RNA, 19 nt, Homo sapiens
  misc_RNA (1)...(19): siRNA sense strand
ccuugagauuccagacauu

SEQ ID NO: 2002344 - RNA, 19 nt, Homo sapiens
  misc_RNA (1)...(19): siRNA sense strand
gaacuggcuuuacagauua

SEQ ID NO: 2002345 - RNA, 19 nt, Homo sapiens
  misc_RNA (1)...(19): siRNA sense strand
cgaagaagaucucgaagua

SEQ ID NO: 2002346 - RNA, 19 nt, Homo sapiens
  misc_RNA (1)...(19): siRNA sense strand
gaaaagaggugcugaaauu

SEQ ID NO: 2002347 - RNA, 19 nt, Homo sapiens
  misc_RNA (1)...(19): siRNA sense strand
ugacagagauagcaucaua

SEQ ID NO: 2002348 - RNA, 19 nt, Homo sapiens
  misc_RNA (1)...(19): siRNA sense strand
gaaacaaggguuaugcuua

SEQ ID NO: 2002349 - RNA, 19 nt, Homo sapiens
  misc_RNA (1)...(19): siRNA sense strand
ggaguuagauccauuagau

SEQ ID NO: 2002350 - RNA, 19 nt, Homo sapiens
  misc_RNA (1)...(19): siRNA sense strand
gaagaaaggugagcugaug

SEQ ID NO: 2002351 - RNA, 19 nt, Homo sapiens
  misc_RNA (1)...(19): siRNA sense strand
gccaauagcugucaucaug

SEQ ID NO: 2002352 - RNA, 19 nt, Homo sapiens
  misc_RNA (1)...(19): siRNA sense strand
agaauaagcuggaagaaga

SEQ ID NO: 2002353 - RNA, 19 nt, Homo sapiens
  misc_RNA (1)...(19): siRNA sense strand
gaaaucaccaggcucauaa

SEQ ID NO: 2002354 - RNA, 19 nt, Homo sapiens
  misc_RNA (1)...(19): siRNA sense strand
gagaaacuguggagugauu

SEQ ID NO: 2002355 - RNA, 19 nt, Homo sapiens
  misc_RNA (1)...(19): siRNA sense strand
gucaggaucugucauuaua

SEQ ID NO: 2002356 - RNA, 19 nt, Homo sapiens
  misc_RNA (1)...(19): siRNA sense strand
gaauagaucuagguccaaa

SEQ ID NO: 2002357 - RNA, 19 nt, Homo sapiens
  misc_RNA (1)...(19): siRNA sense strand
gaagaagaauuagagauca

SEQ ID NO: 2002358 - RNA, 19 nt, Homo sapiens
  misc_RNA (1)...(19): siRNA sense strand
gaacaagcuuuggcuaaug

SEQ ID NO: 2002359 - RNA, 19 nt, Homo sapiens
  misc_RNA (1)...(19): siRNA sense strand
gguaagggauucaaguuug

SEQ ID NO: 2002360 - RNA, 19 nt, Homo sapiens
  misc_RNA (1)...(19): siRNA sense strand
aaacaaggguuaugcuuau

SEQ ID NO: 2002361 - RNA, 19 nt, Homo sapiens
  misc_RNA (1)...(19): siRNA sense strand
caguaaaccuauugaagua

SEQ ID NO: 2002362 - RNA, 19 nt, Homo sapiens
  misc_RNA (1)...(19): siRNA sense strand
ccaugaagaucuuaaauuc

SEQ ID NO: 2002363 - RNA, 19 nt, Homo sapiens
  misc_RNA (1)...(19): siRNA sense strand
gguggaaaguuaccucuaa

SEQ ID NO: 2002364 - RNA, 19 nt, Homo sapiens
  misc_RNA (1)...(19): siRNA sense strand
gcagauugcugagcugaaa

SEQ ID NO: 2002365 - RNA, 19 nt, Homo sapiens
  misc_RNA (1)...(19): siRNA sense strand
ggaagucggucuagaaguc

SEQ ID NO: 2002366 - RNA, 19 nt, Homo sapiens
  misc_RNA (1)...(19): siRNA sense strand
ggacgaugaugaugacgaa

SEQ ID NO: 2002367 - RNA, 19 nt, Homo sapiens
  misc_RNA (1)...(19): siRNA sense strand
ugcaguaccuccugauuua

SEQ ID NO: 2002368 - RNA, 19 nt, Homo sapiens
  misc_RNA (1)...(19): siRNA sense strand
gaucuuaaauucccucaag

SEQ ID NO: 2002369 - RNA, 19 nt, Homo sapiens
  misc_RNA (1)...(19): siRNA sense strand
gaaacaagaagaagagaga

SEQ ID NO: 2002370 - RNA, 19 nt, Homo sapiens
  misc_RNA (1)...(19): siRNA sense strand
ugaaacaucugauucuugu

SEQ ID NO: 2002371 - RNA, 19 nt, Homo sapiens
  misc_RNA (1)...(19): siRNA sense strand
caagaagcauggcuaugaa

SEQ ID NO: 2002372 - RNA, 19 nt, Homo sapiens
  misc_RNA (1)...(19): siRNA sense strand
aaacauaggagaacugaaa

SEQ ID NO: 2002373 - RNA, 19 nt, Homo sapiens
  misc_RNA (1)...(19): siRNA sense strand
gaaaguuaccucuaaggaa

SEQ ID NO: 2002374 - RNA, 19 nt, Homo sapiens
  misc_RNA (1)...(19): siRNA sense strand
aggaaaugcugagaaauua

SEQ ID NO: 2002375 - RNA, 19 nt, Homo sapiens
  misc_RNA (1)...(19): siRNA sense strand
uaaauucccucaagaagca

SEQ ID NO: 2002376 - RNA, 19 nt, Homo sapiens
  misc_RNA (1)...(19): siRNA sense strand
agaacuggcuuuacagauu

SEQ ID NO: 2002377 - RNA, 19 nt, Homo sapiens
  misc_RNA (1)...(19): siRNA sense strand
ucaauuaugugccguuaga

SEQ ID NO: 2002378 - RNA, 19 nt, Homo sapiens
  misc_RNA (1)...(19): siRNA sense strand
guaaauguguuucgauugg

SEQ ID NO: 2002379 - RNA, 19 nt, Homo sapiens
  misc_RNA (1)...(19): siRNA sense strand
gcauuacaguuaaaggaaa

SEQ ID NO: 2002380 - RNA, 19 nt, Homo sapiens
  misc_RNA (1)...(19): siRNA sense strand
gagaaucagugaauacucu

SEQ ID NO: 2002381 - RNA, 19 nt, Homo sapiens
  misc_RNA (1)...(19): siRNA sense strand
ucgaaugauugacauguua

SEQ ID NO: 2002382 - RNA, 19 nt, Homo sapiens
  misc_RNA (1)...(19): siRNA sense strand
aagaagaucucgaaguaga

SEQ ID NO: 2002383 - RNA, 19 nt, Homo sapiens
  misc_RNA (1)...(19): siRNA sense strand
gaaguaaacguggagauga

SEQ ID NO: 2002384 - RNA, 19 nt, Homo sapiens
  misc_RNA (1)...(19): siRNA sense strand
gaauuuccaugaagaucuu

SEQ ID NO: 2002385 - RNA, 19 nt, Homo sapiens
  misc_RNA (1)...(19): siRNA sense strand
gugcugaaauuauuguuug

SEQ ID NO: 2002386 - RNA, 19 nt, Homo sapiens
  misc_RNA (1)...(19): siRNA sense strand
ccagagcuauggaggcuuu

SEQ ID NO: 2002387 - RNA, 19 nt, Homo sapiens
  misc_RNA (1)...(19): siRNA sense strand
gcaauuacaaucagaggaa

SEQ ID NO: 2002388 - RNA, 19 nt, Homo sapiens
  misc_RNA (1)...(19): siRNA sense strand
gaaaugcugagaaauuaga

SEQ ID NO: 2002389 - RNA, 19 nt, Homo sapiens
  misc_RNA (1)...(19): siRNA sense strand
gcaaauugaaagcauguuu

SEQ ID NO: 2002390 - RNA, 19 nt, Homo sapiens
  misc_RNA (1)...(19): siRNA sense strand
guaguggguucucugguaa

SEQ ID NO: 2002391 - RNA, 19 nt, Homo sapiens
  misc_RNA (1)...(19): siRNA sense strand
agagauagcaucauaaaug

SEQ ID NO: 2002392 - RNA, 19 nt, Homo sapiens
  misc_RNA (1)...(19): siRNA sense strand
caggaucugucauuauauu

SEQ ID NO: 2002393 - RNA, 19 nt, Homo sapiens
  misc_RNA (1)...(19): siRNA sense strand
ggaaaucgaagagaugaaa

SEQ ID NO: 2002394 - RNA, 19 nt, Homo sapiens
  misc_RNA (1)...(19): siRNA sense strand
gagcaggaaacaaggguua

SEQ ID NO: 2002395 - RNA, 19 nt, Homo sapiens
  misc_RNA (1)...(19): siRNA sense strand
gagcugauccggcugcaaa

SEQ ID NO: 2002396 - RNA, 19 nt, Homo sapiens
  misc_RNA (1)...(19): siRNA sense strand
uagagaaacuguggaguga

SEQ ID NO: 2002397 - RNA, 19 nt, Homo sapiens
  misc_RNA (1)...(19): siRNA sense strand
ucaaugccaagcucaauua

SEQ ID NO: 2002398 - RNA, 19 nt, Homo sapiens
  misc_RNA (1)...(19): siRNA sense strand
ucaaugcccagaagaauuu

SEQ ID NO: 2002399 - RNA, 19 nt, Homo sapiens
  misc_RNA (1)...(19): siRNA sense strand
aaggugagcugauggagaa

SEQ ID NO: 2002400 - RNA, 19 nt, Homo sapiens
  misc_RNA (1)...(19): siRNA sense strand
gcucaauuaugugccguua

SEQ ID NO: 2002401 - RNA, 19 nt, Homo sapiens
  misc_RNA (1)...(19): siRNA sense strand
aagaggugcugaaauuauu

SEQ ID NO: 2002402 - RNA, 19 nt, Homo sapiens
  misc_RNA (1)...(19): siRNA sense strand
caggaaaugcugagaaauu

SEQ ID NO: 2002403 - RNA, 19 nt, Homo sapiens
  misc_RNA (1)...(19): siRNA sense strand
gcagaaagcugaggggaaa

SEQ ID NO: 2002404 - RNA, 19 nt, Homo sapiens
  misc_RNA (1)...(19): siRNA sense strand
ggaacaugcugauggucuu

SEQ ID NO: 2002405 - RNA, 19 nt, Homo sapiens
  misc_RNA (1)...(19): siRNA sense strand
gagucaggaucugucauua

SEQ ID NO: 2002406 - RNA, 19 nt, Homo sapiens
  misc_RNA (1)...(19): siRNA sense strand
cgaagaugauccugcagaa

SEQ ID NO: 2002407 - RNA, 19 nt, Homo sapiens
  misc_RNA (1)...(19): siRNA sense strand
gaaagcaaaggcagaaauc

SEQ ID NO: 2002408 - RNA, 19 nt, Homo sapiens
  misc_RNA (1)...(19): siRNA sense strand
cuacuucccuccuggcaaa

SEQ ID NO: 2002409 - RNA, 19 nt, Homo sapiens
  misc_RNA (1)...(19): siRNA sense strand
uauaaugucuggacgagau

SEQ ID NO: 2002410 - RNA, 19 nt, Homo sapiens
  misc_RNA (1)...(19): siRNA sense strand
ucaagaagcauggcuauga

SEQ ID NO: 2002411 - RNA, 19 nt, Homo sapiens
  misc_RNA (1)...(19): siRNA sense strand
gagcgaagaagaucucgaa

SEQ ID NO: 2002412 - RNA, 19 nt, Homo sapiens
  misc_RNA (1)...(19): siRNA sense strand
acugcuagguggaaaguua

SEQ ID NO: 2002413 - RNA, 19 nt, Homo sapiens
  misc_RNA (1)...(19): siRNA sense strand
aagaagagaguaaaggaua

SEQ ID NO: 2002414 - RNA, 19 nt, Homo sapiens
  misc_RNA (1)...(19): siRNA sense strand
caaagaagagaguaaagga

SEQ ID NO: 2002415 - RNA, 19 nt, Homo sapiens
  misc_RNA (1)...(19): siRNA sense strand
gcaggaacaugcugauggu

SEQ ID NO: 2002416 - RNA, 19 nt, Homo sapiens
  misc_RNA (1)...(19): siRNA sense strand
ggagggcauuacaguuaaa

SEQ ID NO: 2002417 - RNA, 19 nt, Homo sapiens
  misc_RNA (1)...(19): siRNA sense strand
aggagacgcucaaggagua

SEQ ID NO: 2002418 - RNA, 19 nt, Homo sapiens
  misc_RNA (1)...(19): siRNA sense strand
aagaagagguaaauguguu

SEQ ID NO: 2002419 - RNA, 19 nt, Homo sapiens
  misc_RNA (1)...(19): siRNA sense strand
ugaacuggcugugcagaaa

SEQ ID NO: 2002420 - RNA, 19 nt, Homo sapiens
  misc_RNA (1)...(19): siRNA sense strand
gaaggcgagcggaagauuu

SEQ ID NO: 2002421 - RNA, 19 nt, Homo sapiens
  misc_RNA (1)...(19): siRNA sense strand
ggaaaguuaccucuaagga

SEQ ID NO: 2002422 - RNA, 19 nt, Homo sapiens
  misc_RNA (1)...(19): siRNA sense strand
gaaucaaugcccagaagaa

SEQ ID NO: 2002423 - RNA, 19 nt, Homo sapiens
  misc_RNA (1)...(19): siRNA sense strand
uuaaagcucuugaauuguc

SEQ ID NO: 2002424 - RNA, 19 nt, Homo sapiens
  misc_RNA (1)...(19): siRNA sense strand
gaaugggaccugcaaacuu

SEQ ID NO: 2002425 - RNA, 19 nt, Homo sapiens
  misc_RNA (1)...(19): siRNA sense strand
guaaaccuauugaaguaca

SEQ ID NO: 2002426 - RNA, 19 nt, Homo sapiens
  misc_RNA (1)...(19): siRNA sense strand
cuaaagaguguaagaaguu

SEQ ID NO: 2002427 - RNA, 19 nt, Homo sapiens
  misc_RNA (1)...(19): siRNA sense strand
agaaguagagauagagaua

SEQ ID NO: 2002428 - RNA, 19 nt, Homo sapiens
  misc_RNA (1)...(19): siRNA sense strand
agaaauugcuaagagauug

SEQ ID NO: 2002429 - RNA, 19 nt, Homo sapiens
  misc_RNA (1)...(19): siRNA sense strand
caagaaaacugagaauaga

SEQ ID NO: 2002430 - RNA, 19 nt, Homo sapiens
  misc_RNA (1)...(19): siRNA sense strand
gcagaaagcaaaggcagaa

SEQ ID NO: 2002431 - RNA, 19 nt, Homo sapiens
  misc_RNA (1)...(19): siRNA sense strand
gauugugauugaagaagaa

SEQ ID NO: 2002432 - RNA, 19 nt, Homo sapiens
  misc_RNA (1)...(19): siRNA sense strand
gaagugaaagaggaaguaa

SEQ ID NO: 2002433 - RNA, 19 nt, Homo sapiens
  misc_RNA (1)...(19): siRNA sense strand
ggaaguggaaagaccauug

SEQ ID NO: 2002434 - RNA, 19 nt, Homo sapiens
  misc_RNA (1)...(19): siRNA sense strand
aaaggaagauacaaagucu

SEQ ID NO: 2002435 - RNA, 19 nt, Homo sapiens
  misc_RNA (1)...(19): siRNA sense strand
gaagauuuacuuggcaauu

SEQ ID NO: 2002436 - RNA, 19 nt, Homo sapiens
  misc_RNA (1)...(19): siRNA sense strand
cuaaugagaggaagaaguu

SEQ ID NO: 2002437 - RNA, 19 nt, Homo sapiens
  misc_RNA (1)...(19): siRNA sense strand
ggaagaagugaaagaggaa

SEQ ID NO: 2002438 - RNA, 19 nt, Homo sapiens
  misc_RNA (1)...(19): siRNA sense strand
cagaacaacuugcugaaaa

SEQ ID NO: 2002439 - RNA, 19 nt, Homo sapiens
  misc_RNA (1)...(19): siRNA sense strand
gcagaacaacuugcugaaa

SEQ ID NO: 2002440 - RNA, 19 nt, Homo sapiens
  misc_RNA (1)...(19): siRNA sense strand
gggcaucgagucucaggua

SEQ ID NO: 2002441 - RNA, 19 nt, Homo sapiens
  misc_RNA (1)...(19): siRNA sense strand
ggaaacaaggguuaugcuu

SEQ ID NO: 2002442 - RNA, 19 nt, Homo sapiens
  misc_RNA (1)...(19): siRNA sense strand
ugaagcagacagaauguuu

SEQ ID NO: 2002443 - RNA, 19 nt, Homo sapiens
  misc_RNA (1)...(19): siRNA sense strand
cauaccaaccaacaaauaa

SEQ ID NO: 2002444 - RNA, 19 nt, Homo sapiens
  misc_RNA (1)...(19): siRNA sense strand
ggacacauccacccaguga

SEQ ID NO: 2002445 - RNA, 19 nt, Homo sapiens
  misc_RNA (1)...(19): siRNA sense strand
gguaucagcuccaaacucu

SEQ ID NO: 2002446 - RNA, 19 nt, Homo sapiens
  misc_RNA (1)...(19): siRNA sense strand
ggucagcacgcacaacuug

SEQ ID NO: 2002447 - RNA, 19 nt, Homo sapiens
  misc_RNA (1)...(19): siRNA sense strand
cugcucaucuuacucuuug

SEQ ID NO: 2002448 - RNA, 19 nt, Homo sapiens
  misc_RNA (1)...(19): siRNA sense strand
ccuccuggccugcaucuuu

SEQ ID NO: 2002449 - RNA, 19 nt, Homo sapiens
  misc_RNA (1)...(19): siRNA sense strand
gcaggugucuugccccuau

SEQ ID NO: 2002450 - RNA, 19 nt, Homo sapiens
  misc_RNA (1)...(19): siRNA sense strand
gccugcaucuuucucauca

SEQ ID NO: 2002451 - RNA, 19 nt, Homo sapiens
  misc_RNA (1)...(19): siRNA sense strand
ucaccgggaugcuggagau

SEQ ID NO: 2002452 - RNA, 19 nt, Homo sapiens
  misc_RNA (1)...(19): siRNA sense strand
ggagcacagccaucacaga

SEQ ID NO: 2002453 - RNA, 19 nt, Homo sapiens
  misc_RNA (1)...(19): siRNA sense strand
caucuuacucuuugucaca

SEQ ID NO: 2002454 - RNA, 19 nt, Homo sapiens
  misc_RNA (1)...(19): siRNA sense strand
gacagaagccagggacaca

SEQ ID NO: 2002455 - RNA, 19 nt, Homo sapiens
  misc_RNA (1)...(19): siRNA sense strand
gcugcucaucuuacucuuu

SEQ ID NO: 2002456 - RNA, 19 nt, Homo sapiens
  misc_RNA (1)...(19): siRNA sense strand
cuucgaggaugcccaugug

SEQ ID NO: 2002457 - RNA, 19 nt, Homo sapiens
  misc_RNA (1)...(19): siRNA sense strand
ucagauggauguugaauug

SEQ ID NO: 2002458 - RNA, 19 nt, Homo sapiens
  misc_RNA (1)...(19): siRNA sense strand
ugaaggcacuggcugcuua

SEQ ID NO: 2002459 - RNA, 19 nt, Homo sapiens
  misc_RNA (1)...(19): siRNA sense strand
caacccaccuguuacaauu

SEQ ID NO: 2002460 - RNA, 19 nt, Homo sapiens
  misc_RNA (1)...(19): siRNA sense strand
ggacuuggaccacucuaua

SEQ ID NO: 2002461 - RNA, 19 nt, Homo sapiens
  misc_RNA (1)...(19): siRNA sense strand
ggagggaugguuacuguua

SEQ ID NO: 2002462 - RNA, 19 nt, Homo sapiens
  misc_RNA (1)...(19): siRNA sense strand
ccaccuaucuccuuggauu

SEQ ID NO: 2002463 - RNA, 19 nt, Homo sapiens
  misc_RNA (1)...(19): siRNA sense strand
caacuaggccaaaccagua

SEQ ID NO: 2002464 - RNA, 19 nt, Homo sapiens
  misc_RNA (1)...(19): siRNA sense strand
ucagaaaguucgaaucaau

SEQ ID NO: 2002465 - RNA, 19 nt, Homo sapiens
  misc_RNA (1)...(19): siRNA sense strand
gcuuuauucuuucgugaua

SEQ ID NO: 2002466 - RNA, 19 nt, Homo sapiens
  misc_RNA (1)...(19): siRNA sense strand
aaacugaggcugccaagaa

SEQ ID NO: 2002467 - RNA, 19 nt, Homo sapiens
  misc_RNA (1)...(19): siRNA sense strand
ccaaguugauuauuaccaa

SEQ ID NO: 2002468 - RNA, 19 nt, Homo sapiens
  misc_RNA (1)...(19): siRNA sense strand
gaugaucacagauguaguu

SEQ ID NO: 2002469 - RNA, 19 nt, Homo sapiens
  misc_RNA (1)...(19): siRNA sense strand
gcauaugcuuuauucuuuc

SEQ ID NO: 2002470 - RNA, 19 nt, Homo sapiens
  misc_RNA (1)...(19): siRNA sense strand
caagaaagaguaucugaag

SEQ ID NO: 2002471 - RNA, 19 nt, Homo sapiens
  misc_RNA (1)...(19): siRNA sense strand
cugcagggauguauucuug

SEQ ID NO: 2002472 - RNA, 19 nt, Homo sapiens
  misc_RNA (1)...(19): siRNA sense strand
ugagaacccucccauugug

SEQ ID NO: 2002473 - RNA, 19 nt, Homo sapiens
  misc_RNA (1)...(19): siRNA sense strand
gagggaugguuacuguuau

SEQ ID NO: 2002474 - RNA, 19 nt, Homo sapiens
  misc_RNA (1)...(19): siRNA sense strand
uggguagccucuagaaauu

SEQ ID NO: 2002475 - RNA, 19 nt, Homo sapiens
  misc_RNA (1)...(19): siRNA sense strand
gacaugacaucuggcuuga

SEQ ID NO: 2002476 - RNA, 19 nt, Homo sapiens
  misc_RNA (1)...(19): siRNA sense strand
gcaaugaguguguggugaa

SEQ ID NO: 2002477 - RNA, 19 nt, Homo sapiens
  misc_RNA (1)...(19): siRNA sense strand
guaaggacugggacaauga

SEQ ID NO: 2002478 - RNA, 19 nt, Homo sapiens
  misc_RNA (1)...(19): siRNA sense strand
gaucacagauguaguuccu

SEQ ID NO: 2002479 - RNA, 19 nt, Homo sapiens
  misc_RNA (1)...(19): siRNA sense strand
gaaagauccuaaugaaccu

SEQ ID NO: 2002480 - RNA, 19 nt, Homo sapiens
  misc_RNA (1)...(19): siRNA sense strand
ucaccaaguugauuauuac

SEQ ID NO: 2002481 - RNA, 19 nt, Homo sapiens
  misc_RNA (1)...(19): siRNA sense strand
gcacugcagggauguauuc

SEQ ID NO: 2002482 - RNA, 19 nt, Homo sapiens
  misc_RNA (1)...(19): siRNA sense strand
ggacugggacaaugaauac

SEQ ID NO: 2002483 - RNA, 19 nt, Homo sapiens
  misc_RNA (1)...(19): siRNA sense strand
ggaaacaguggaauuggau

SEQ ID NO: 2002484 - RNA, 19 nt, Homo sapiens
  misc_RNA (1)...(19): siRNA sense strand
cagugguguuugugaaaua

SEQ ID NO: 2002485 - RNA, 19 nt, Homo sapiens
  misc_RNA (1)...(19): siRNA sense strand
gguagccucuagaaauuca

SEQ ID NO: 2002486 - RNA, 19 nt, Homo sapiens
  misc_RNA (1)...(19): siRNA sense strand
ggccaaaccaguacagcua

SEQ ID NO: 2002487 - RNA, 19 nt, Homo sapiens
  misc_RNA (1)...(19): siRNA sense strand
gaagacagucgugguggaa

SEQ ID NO: 2002488 - RNA, 19 nt, Homo sapiens
  misc_RNA (1)...(19): siRNA sense strand
gaaaaugcagacuaccuua

SEQ ID NO: 2002489 - RNA, 19 nt, Homo sapiens
  misc_RNA (1)...(19): siRNA sense strand
gcaccaccaucacaaacuc

SEQ ID NO: 2002490 - RNA, 19 nt, Homo sapiens
  misc_RNA (1)...(19): siRNA sense strand
ggaccacucuauaggaacu

SEQ ID NO: 2002491 - RNA, 19 nt, Homo sapiens
  misc_RNA (1)...(19): siRNA sense strand
gaaucaauuuacagcaaca

SEQ ID NO: 2002492 - RNA, 19 nt, Homo sapiens
  misc_RNA (1)...(19): siRNA sense strand
aagcuugggugaugaggaa

SEQ ID NO: 2002493 - RNA, 19 nt, Homo sapiens
  misc_RNA (1)...(19): siRNA sense strand
auguugcccucuucuauua

SEQ ID NO: 2002494 - RNA, 19 nt, Homo sapiens
  misc_RNA (1)...(19): siRNA sense strand
ucaagggacagaauccuaa

SEQ ID NO: 2002495 - RNA, 19 nt, Homo sapiens
  misc_RNA (1)...(19): siRNA sense strand
ccggaggaaaugacaauua

SEQ ID NO: 2002496 - RNA, 19 nt, Homo sapiens
  misc_RNA (1)...(19): siRNA sense strand
ucgaaucaauuuacagcaa

SEQ ID NO: 2002497 - RNA, 19 nt, Homo sapiens
  misc_RNA (1)...(19): siRNA sense strand
aggaugguguugaggauuu

SEQ ID NO: 2002498 - RNA, 19 nt, Homo sapiens
  misc_RNA (1)...(19): siRNA sense strand
caccaacuguggaaaguag

SEQ ID NO: 2002499 - RNA, 19 nt, Homo sapiens
  misc_RNA (1)...(19): siRNA sense strand
cagaaaguucgaaucaauu

SEQ ID NO: 2002500 - RNA, 19 nt, Homo sapiens
  misc_RNA (1)...(19): siRNA sense strand
gacaauuaccugacgauca

SEQ ID NO: 2002501 - RNA, 19 nt, Homo sapiens
  misc_RNA (1)...(19): siRNA sense strand
ggcagacccuuccucuuca

SEQ ID NO: 2002502 - RNA, 19 nt, Homo sapiens
  misc_RNA (1)...(19): siRNA sense strand
cuucucagauggauguuga

SEQ ID NO: 2002503 - RNA, 19 nt, Homo sapiens
  misc_RNA (1)...(19): siRNA sense strand
gagaugaucacagauguag

SEQ ID NO: 2002504 - RNA, 19 nt, Homo sapiens
  misc_RNA (1)...(19): siRNA sense strand
cggaggaaaugacaauuac

SEQ ID NO: 2002505 - RNA, 19 nt, Homo sapiens
  misc_RNA (1)...(19): siRNA sense strand
gaccaccauugaucaguca

SEQ ID NO: 2002506 - RNA, 19 nt, Homo sapiens
  misc_RNA (1)...(19): siRNA sense strand
caacagccuccaccucaga

SEQ ID NO: 2002507 - RNA, 19 nt, Homo sapiens
  misc_RNA (1)...(19): siRNA sense strand
gcagcaaguuaccauucug

SEQ ID NO: 2002508 - RNA, 19 nt, Homo sapiens
  misc_RNA (1)...(19): siRNA sense strand
aaggagggaugguuacugu

SEQ ID NO: 2002509 - RNA, 19 nt, Homo sapiens
  misc_RNA (1)...(19): siRNA sense strand
ucucaaggagggaugguua

SEQ ID NO: 2002510 - RNA, 19 nt, Homo sapiens
  misc_RNA (1)...(19): siRNA sense strand
caaauguugcccucuucua

SEQ ID NO: 2002511 - RNA, 19 nt, Homo sapiens
  misc_RNA (1)...(19): siRNA sense strand
ucacgaggaugguguugag

SEQ ID NO: 2002512 - RNA, 19 nt, Homo sapiens
  misc_RNA (1)...(19): siRNA sense strand
aaugaauacugcagcaaug

SEQ ID NO: 2002513 - RNA, 19 nt, Homo sapiens
  misc_RNA (1)...(19): siRNA sense strand
agauguaguuccugagguu

SEQ ID NO: 2002514 - RNA, 19 nt, Homo sapiens
  misc_RNA (1)...(19): siRNA sense strand
ccaagaaagaguaucugaa

SEQ ID NO: 2002515 - RNA, 19 nt, Homo sapiens
  misc_RNA (1)...(19): siRNA sense strand
uaaugaaccucagaaacca

SEQ ID NO: 2002516 - RNA, 19 nt, Homo sapiens
  misc_RNA (1)...(19): siRNA sense strand
gugagaacccucccauugu

SEQ ID NO: 2002517 - RNA, 19 nt, Homo sapiens
  misc_RNA (1)...(19): siRNA sense strand
ugugagaacccucccauug

SEQ ID NO: 2002518 - RNA, 19 nt, Homo sapiens
  misc_RNA (1)...(19): siRNA sense strand
ccucagaaaguucgaauca

SEQ ID NO: 2002519 - RNA, 19 nt, Homo sapiens
  misc_RNA (1)...(19): siRNA sense strand
acaauuaccugacgaucac

SEQ ID NO: 2002520 - RNA, 19 nt, Homo sapiens
  misc_RNA (1)...(19): siRNA sense strand
gagaacccucccauuguga

SEQ ID NO: 2002521 - RNA, 19 nt, Homo sapiens
  misc_RNA (1)...(19): siRNA sense strand
uggaaacaguggaauugga

SEQ ID NO: 2002522 - RNA, 19 nt, Homo sapiens
  misc_RNA (1)...(19): siRNA sense strand
gccaagaaagaguaucuga

SEQ ID NO: 2002523 - RNA, 19 nt, Homo sapiens
  misc_RNA (1)...(19): siRNA sense strand
uggcagacccuuccucuuc

SEQ ID NO: 2002524 - RNA, 19 nt, Homo sapiens
  misc_RNA (1)...(19): siRNA sense strand
cccaauaucaccaaguuga

SEQ ID NO: 2002525 - RNA, 19 nt, Homo sapiens
  misc_RNA (1)...(19): siRNA sense strand
caaugaauacugcagcaau

SEQ ID NO: 2002526 - RNA, 19 nt, Homo sapiens
  misc_RNA (1)...(19): siRNA sense strand
ccagucaccugaagaucgu

SEQ ID NO: 2002527 - RNA, 19 nt, Homo sapiens
  misc_RNA (1)...(19): siRNA sense strand
gaauacugcagcaaugagu

SEQ ID NO: 2002528 - RNA, 19 nt, Homo sapiens
  misc_RNA (1)...(19): siRNA sense strand
aacugaggcugccaagaaa

SEQ ID NO: 2002529 - RNA, 19 nt, Homo sapiens
  misc_RNA (1)...(19): siRNA sense strand
cgaggaugguguugaggau

SEQ ID NO: 2002530 - RNA, 19 nt, Homo sapiens
  misc_RNA (1)...(19): siRNA sense strand
caccauugaucagucagaa

SEQ ID NO: 2002531 - RNA, 19 nt, Homo sapiens
  misc_RNA (1)...(19): siRNA sense strand
aaauguugcccucuucuau

SEQ ID NO: 2002532 - RNA, 19 nt, Homo sapiens
  misc_RNA (1)...(19): siRNA sense strand
cauccuauguggcaaacca

SEQ ID NO: 2002533 - RNA, 19 nt, Homo sapiens
  misc_RNA (1)...(19): siRNA sense strand
acagguauauaagaggaaa

SEQ ID NO: 2002534 - RNA, 19 nt, Homo sapiens
  misc_RNA (1)...(19): siRNA sense strand
caugugggauagucuugga

SEQ ID NO: 2002535 - RNA, 19 nt, Homo sapiens
  misc_RNA (1)...(19): siRNA sense strand
ccucuucuauuacuauguc

SEQ ID NO: 2002536 - RNA, 19 nt, Homo sapiens
  misc_RNA (1)...(19): siRNA sense strand
aguaaggacugggacaaug

SEQ ID NO: 2002537 - RNA, 19 nt, Homo sapiens
  misc_RNA (1)...(19): siRNA sense strand
guaccaaugacagacauga

SEQ ID NO: 2002538 - RNA, 19 nt, Homo sapiens
  misc_RNA (1)...(19): siRNA sense strand
ggugaugaggaauuugaaa

SEQ ID NO: 2002539 - RNA, 19 nt, Homo sapiens
  misc_RNA (1)...(19): siRNA sense strand
gagguugagucuccuucuc

SEQ ID NO: 2002540 - RNA, 19 nt, Homo sapiens
  misc_RNA (1)...(19): siRNA sense strand
guccugagcggccuaugaa

SEQ ID NO: 2002541 - RNA, 19 nt, Homo sapiens
  misc_RNA (1)...(19): siRNA sense strand
uggcaaaccaggcaucuuc

SEQ ID NO: 2002542 - RNA, 19 nt, Homo sapiens
  misc_RNA (1)...(19): siRNA sense strand
ggauccagcaccaccauca

SEQ ID NO: 2002543 - RNA, 19 nt, Homo sapiens
  misc_RNA (1)...(19): siRNA sense strand
cgacucagcagcaaguuac

SEQ ID NO: 2002544 - RNA, 19 nt, Homo sapiens
  misc_RNA (1)...(19): siRNA sense strand
cagcagcaaguuaccauuc

SEQ ID NO: 2002545 - RNA, 19 nt, Homo sapiens
  misc_RNA (1)...(19): siRNA sense strand
ugagaugaucacagaugua

SEQ ID NO: 2002546 - RNA, 19 nt, Homo sapiens
  misc_RNA (1)...(19): siRNA sense strand
cucauuggcugucucagau

SEQ ID NO: 2002547 - RNA, 19 nt, Homo sapiens
  misc_RNA (1)...(19): siRNA sense strand
ggaugguguugaggauuuc

SEQ ID NO: 2002548 - RNA, 19 nt, Homo sapiens
  misc_RNA (1)...(19): siRNA sense strand
cuggguagccucuagaaau

SEQ ID NO: 2002549 - RNA, 19 nt, Homo sapiens
  misc_RNA (1)...(19): siRNA sense strand
gccgagacauuccauacac

SEQ ID NO: 2002550 - RNA, 19 nt, Homo sapiens
  misc_RNA (1)...(19): siRNA sense strand
uacacaggcugccaucaag

SEQ ID NO: 2002551 - RNA, 19 nt, Homo sapiens
  misc_RNA (1)...(19): siRNA sense strand
gcuugaccauggacuugga

SEQ ID NO: 2002552 - RNA, 19 nt, Homo sapiens
  misc_RNA (1)...(19): siRNA sense strand
gcagaaggccccaaagaag

SEQ ID NO: 2002553 - RNA, 19 nt, Homo sapiens
  misc_RNA (1)...(19): siRNA sense strand
gugugccucuacccacuuu

SEQ ID NO: 2002554 - RNA, 19 nt, Homo sapiens
  misc_RNA (1)...(19): siRNA sense strand
gaagcacugcagggaugua

SEQ ID NO: 2002555 - RNA, 19 nt, Homo sapiens
  misc_RNA (1)...(19): siRNA sense strand
uaaggacugggacaaugaa

SEQ ID NO: 2002556 - RNA, 19 nt, Homo sapiens
  misc_RNA (1)...(19): siRNA sense strand
cuccugagacuaucuguga

SEQ ID NO: 2002557 - RNA, 19 nt, Homo sapiens
  misc_RNA (1)...(19): siRNA sense strand
gcagagaagugauugugaa

SEQ ID NO: 2002558 - RNA, 19 nt, Homo sapiens
  misc_RNA (1)...(19): siRNA sense strand
gagaagugauugugaaggu

SEQ ID NO: 2002559 - RNA, 19 nt, Homo sapiens
  misc_RNA (1)...(19): siRNA sense strand
gccagugccuucugacaaa

SEQ ID NO: 2002560 - RNA, 19 nt, Homo sapiens
  misc_RNA (1)...(19): siRNA sense strand
ggagagggacacucacaaa

SEQ ID NO: 2002561 - RNA, 19 nt, Homo sapiens
  misc_RNA (1)...(19): siRNA sense strand
cgacauccauuucuuucuc

SEQ ID NO: 2002562 - RNA, 19 nt, Homo sapiens
  misc_RNA (1)...(19): siRNA sense strand
cccagaggguuacugcuaa

SEQ ID NO: 2002563 - RNA, 19 nt, Homo sapiens
  misc_RNA (1)...(19): siRNA sense strand
gcccagaggguuacugcua

SEQ ID NO: 2002564 - RNA, 19 nt, Homo sapiens
  misc_RNA (1)...(19): siRNA sense strand
ccucaggucucagggaguu

SEQ ID NO: 2002565 - RNA, 19 nt, Homo sapiens
  misc_RNA (1)...(19): siRNA sense strand
caaggccucuucuacaaaa

SEQ ID NO: 2002566 - RNA, 19 nt, Homo sapiens
  misc_RNA (1)...(19): siRNA sense strand
cucaaggccucuucuacaa

SEQ ID NO: 2002567 - RNA, 19 nt, Homo sapiens
  misc_RNA (1)...(19): siRNA sense strand
ucaaggccucuucuacaaa

SEQ ID NO: 2002568 - RNA, 19 nt, Homo sapiens
  misc_RNA (1)...(19): siRNA sense strand
aaucgacauccauuucuuu

SEQ ID NO: 2002569 - RNA, 19 nt, Homo sapiens
  misc_RNA (1)...(19): siRNA sense strand
gacauccauuucuuucucu

SEQ ID NO: 2002570 - RNA, 19 nt, Homo sapiens
  misc_RNA (1)...(19): siRNA sense strand
ggcccacacugcagagaag

SEQ ID NO: 2002571 - RNA, 19 nt, Homo sapiens
  misc_RNA (1)...(19): siRNA sense strand
ucucaaggccucuucuaca

SEQ ID NO: 2002572 - RNA, 19 nt, Homo sapiens
  misc_RNA (1)...(19): siRNA sense strand
gacugccugucuguucuuu

SEQ ID NO: 2002573 - RNA, 19 nt, Homo sapiens
  misc_RNA (1)...(19): siRNA sense strand
gggagagggacacucacaa

SEQ ID NO: 2002574 - RNA, 19 nt, Homo sapiens
  misc_RNA (1)...(19): siRNA sense strand
gagagggacacucacaaaa

SEQ ID NO: 2002575 - RNA, 19 nt, Homo sapiens
  misc_RNA (1)...(19): siRNA sense strand
ucagggaguuuuccucuuc

SEQ ID NO: 2002576 - RNA, 19 nt, Homo sapiens
  misc_RNA (1)...(19): siRNA sense strand
cacaaaagcaugucaaauc

SEQ ID NO: 2002577 - RNA, 19 nt, Homo sapiens
  misc_RNA (1)...(19): siRNA sense strand
gcagugaaauuccuuguua

SEQ ID NO: 2002578 - RNA, 19 nt, Homo sapiens
  misc_RNA (1)...(19): siRNA sense strand
gcaagaagcuccuccacua

SEQ ID NO: 2002579 - RNA, 19 nt, Homo sapiens
  misc_RNA (1)...(19): siRNA sense strand
gaacagggaugaaagaaga

SEQ ID NO: 2002580 - RNA, 19 nt, Homo sapiens
  misc_RNA (1)...(19): siRNA sense strand
gaaaugaaguugauucuca

SEQ ID NO: 2002581 - RNA, 19 nt, Homo sapiens
  misc_RNA (1)...(19): siRNA sense strand
gauguagccucuugcaaua

SEQ ID NO: 2002582 - RNA, 19 nt, Homo sapiens
  misc_RNA (1)...(19): siRNA sense strand
aaacuaaacucaagacaga

SEQ ID NO: 2002583 - RNA, 19 nt, Homo sapiens
  misc_RNA (1)...(19): siRNA sense strand
ugacagugauccuccauua

SEQ ID NO: 2002584 - RNA, 19 nt, Homo sapiens
  misc_RNA (1)...(19): siRNA sense strand
ggaaggaaaugaaguugau

SEQ ID NO: 2002585 - RNA, 19 nt, Homo sapiens
  misc_RNA (1)...(19): siRNA sense strand
ucagaaacguggagaauug

SEQ ID NO: 2002586 - RNA, 19 nt, Homo sapiens
  misc_RNA (1)...(19): siRNA sense strand
guagaaaccucagggauug

SEQ ID NO: 2002587 - RNA, 19 nt, Homo sapiens
  misc_RNA (1)...(19): siRNA sense strand
ggaaggugaugaaaccaaa

SEQ ID NO: 2002588 - RNA, 19 nt, Homo sapiens
  misc_RNA (1)...(19): siRNA sense strand
caaggugaauguuugaauu

SEQ ID NO: 2002589 - RNA, 19 nt, Homo sapiens
  misc_RNA (1)...(19): siRNA sense strand
ugaaagagccagucagaaa

SEQ ID NO: 2002590 - RNA, 19 nt, Homo sapiens
  misc_RNA (1)...(19): siRNA sense strand
ucaagacgcuggaagaaau

SEQ ID NO: 2002591 - RNA, 19 nt, Homo sapiens
  misc_RNA (1)...(19): siRNA sense strand
gaagccaucugugguuaaa

SEQ ID NO: 2002592 - RNA, 19 nt, Homo sapiens
  misc_RNA (1)...(19): siRNA sense strand
ccaaagaaagcucaaguuu

SEQ ID NO: 2002593 - RNA, 19 nt, Homo sapiens
  misc_RNA (1)...(19): siRNA sense strand
gaugcacgcugcugucauu

SEQ ID NO: 2002594 - RNA, 19 nt, Homo sapiens
  misc_RNA (1)...(19): siRNA sense strand
cacaauggauuacgaguga

SEQ ID NO: 2002595 - RNA, 19 nt, Homo sapiens
  misc_RNA (1)...(19): siRNA sense strand
gagagaagcacaugcagaa

SEQ ID NO: 2002596 - RNA, 19 nt, Homo sapiens
  misc_RNA (1)...(19): siRNA sense strand
uugguuagauugagucuua

SEQ ID NO: 2002597 - RNA, 19 nt, Homo sapiens
  misc_RNA (1)...(19): siRNA sense strand
gcacauggagauugauaaa

SEQ ID NO: 2002598 - RNA, 19 nt, Homo sapiens
  misc_RNA (1)...(19): siRNA sense strand
guggagaauugcaaacuaa

SEQ ID NO: 2002599 - RNA, 19 nt, Homo sapiens
  misc_RNA (1)...(19): siRNA sense strand
gugaagacauuagaagaaa

SEQ ID NO: 2002600 - RNA, 19 nt, Homo sapiens
  misc_RNA (1)...(19): siRNA sense strand
gauuggagacucauuauug

SEQ ID NO: 2002601 - RNA, 19 nt, Homo sapiens
  misc_RNA (1)...(19): siRNA sense strand
gaaaccugcagucaauaua

SEQ ID NO: 2002602 - RNA, 19 nt, Homo sapiens
  misc_RNA (1)...(19): siRNA sense strand
gcacagaggcuagggaaga

SEQ ID NO: 2002603 - RNA, 19 nt, Homo sapiens
  misc_RNA (1)...(19): siRNA sense strand
uaauaaaguuggugagauc

SEQ ID NO: 2002604 - RNA, 19 nt, Homo sapiens
  misc_RNA (1)...(19): siRNA sense strand
cagaggagccugcagguaa

SEQ ID NO: 2002605 - RNA, 19 nt, Homo sapiens
  misc_RNA (1)...(19): siRNA sense strand
aaagcaaggugaauguuug

SEQ ID NO: 2002606 - RNA, 19 nt, Homo sapiens
  misc_RNA (1)...(19): siRNA sense strand
aagaugaccuucugcuuga

SEQ ID NO: 2002607 - RNA, 19 nt, Homo sapiens
  misc_RNA (1)...(19): siRNA sense strand
caaauuggaagcugagauu

SEQ ID NO: 2002608 - RNA, 19 nt, Homo sapiens
  misc_RNA (1)...(19): siRNA sense strand
ugaaauuccuuguuauugg

SEQ ID NO: 2002609 - RNA, 19 nt, Homo sapiens
  misc_RNA (1)...(19): siRNA sense strand
gguagaaaccucagggauu

SEQ ID NO: 2002610 - RNA, 19 nt, Homo sapiens
  misc_RNA (1)...(19): siRNA sense strand
gcuaaagauugauagugaa

SEQ ID NO: 2002611 - RNA, 19 nt, Homo sapiens
  misc_RNA (1)...(19): siRNA sense strand
cagcugauccagauaauga

SEQ ID NO: 2002612 - RNA, 19 nt, Homo sapiens
  misc_RNA (1)...(19): siRNA sense strand
ucucagagcaguauuagaa

SEQ ID NO: 2002613 - RNA, 19 nt, Homo sapiens
  misc_RNA (1)...(19): siRNA sense strand
gugaagccaucugugguua

SEQ ID NO: 2002614 - RNA, 19 nt, Homo sapiens
  misc_RNA (1)...(19): siRNA sense strand
gaugugagaccaugagaga

SEQ ID NO: 2002615 - RNA, 19 nt, Homo sapiens
  misc_RNA (1)...(19): siRNA sense strand
ccggaaaccugcagucaau

SEQ ID NO: 2002616 - RNA, 19 nt, Homo sapiens
  misc_RNA (1)...(19): siRNA sense strand
gaaaguugaagcuccagaa

SEQ ID NO: 2002617 - RNA, 19 nt, Homo sapiens
  misc_RNA (1)...(19): siRNA sense strand
uaaagcaaggugaauguuu

SEQ ID NO: 2002618 - RNA, 19 nt, Homo sapiens
  misc_RNA (1)...(19): siRNA sense strand
ggaaaccugcagucaauau

SEQ ID NO: 2002619 - RNA, 19 nt, Homo sapiens
  misc_RNA (1)...(19): siRNA sense strand
cgacaggugugcagguuuc

SEQ ID NO: 2002620 - RNA, 19 nt, Homo sapiens
  misc_RNA (1)...(19): siRNA sense strand
caauagaggacgauauguu

SEQ ID NO: 2002621 - RNA, 19 nt, Homo sapiens
  misc_RNA (1)...(19): siRNA sense strand
acagugauccuccauuaaa

SEQ ID NO: 2002622 - RNA, 19 nt, Homo sapiens
  misc_RNA (1)...(19): siRNA sense strand
gaugcaacagauaaaguua

SEQ ID NO: 2002623 - RNA, 19 nt, Homo sapiens
  misc_RNA (1)...(19): siRNA sense strand
ugaugaagaugaugaugau

SEQ ID NO: 2002624 - RNA, 19 nt, Homo sapiens
  misc_RNA (1)...(19): siRNA sense strand
ggaugcaacagauaaaguu

SEQ ID NO: 2002625 - RNA, 19 nt, Homo sapiens
  misc_RNA (1)...(19): siRNA sense strand
caugucagcugauccagau

SEQ ID NO: 2002626 - RNA, 19 nt, Homo sapiens
  misc_RNA (1)...(19): siRNA sense strand
ucaggaguuuccagucuuu

SEQ ID NO: 2002627 - RNA, 19 nt, Homo sapiens
  misc_RNA (1)...(19): siRNA sense strand
uaauuaaugcugcagauga

SEQ ID NO: 2002628 - RNA, 19 nt, Homo sapiens
  misc_RNA (1)...(19): siRNA sense strand
gaaagaugaagaugaccuu

SEQ ID NO: 2002629 - RNA, 19 nt, Homo sapiens
  misc_RNA (1)...(19): siRNA sense strand
caaggcggcugcugcgaau

SEQ ID NO: 2002630 - RNA, 19 nt, Homo sapiens
  misc_RNA (1)...(19): siRNA sense strand
caaguuuccaagucucuua

SEQ ID NO: 2002631 - RNA, 19 nt, Homo sapiens
  misc_RNA (1)...(19): siRNA sense strand
gcggagcguuaugaaagua

SEQ ID NO: 2002632 - RNA, 19 nt, Homo sapiens
  misc_RNA (1)...(19): siRNA sense strand
ugaccuggauccugggaaa

SEQ ID NO: 2002633 - RNA, 19 nt, Homo sapiens
  misc_RNA (1)...(19): siRNA sense strand
ccacaaagucaucccagaa

SEQ ID NO: 2002634 - RNA, 19 nt, Homo sapiens
  misc_RNA (1)...(19): siRNA sense strand
gaaagaagagaagaaccuu

SEQ ID NO: 2002635 - RNA, 19 nt, Homo sapiens
  misc_RNA (1)...(19): siRNA sense strand
gaaagagccagucagaaac

SEQ ID NO: 2002636 - RNA, 19 nt, Homo sapiens
  misc_RNA (1)...(19): siRNA sense strand
gagcaguauuagaacagaa

SEQ ID NO: 2002637 - RNA, 19 nt, Homo sapiens
  misc_RNA (1)...(19): siRNA sense strand
gaagcaaggugaggguucu

SEQ ID NO: 2002638 - RNA, 19 nt, Homo sapiens
  misc_RNA (1)...(19): siRNA sense strand
agaagcacaugcagaaaca

SEQ ID NO: 2002639 - RNA, 19 nt, Homo sapiens
  misc_RNA (1)...(19): siRNA sense strand
uaaugaggaugcaacagau

SEQ ID NO: 2002640 - RNA, 19 nt, Homo sapiens
  misc_RNA (1)...(19): siRNA sense strand
guaacucucuccaccaaac

SEQ ID NO: 2002641 - RNA, 19 nt, Homo sapiens
  misc_RNA (1)...(19): siRNA sense strand
aaaccugcagucaauauaa

SEQ ID NO: 2002642 - RNA, 19 nt, Homo sapiens
  misc_RNA (1)...(19): siRNA sense strand
ggagauuucaggaggcaaa

SEQ ID NO: 2002643 - RNA, 19 nt, Homo sapiens
  misc_RNA (1)...(19): siRNA sense strand
gaaacuaauaugggagauu

SEQ ID NO: 2002644 - RNA, 19 nt, Homo sapiens
  misc_RNA (1)...(19): siRNA sense strand
ggaggaugauuuugagaaa

SEQ ID NO: 2002645 - RNA, 19 nt, Homo sapiens
  misc_RNA (1)...(19): siRNA sense strand
cgacucagcucugccucaa

SEQ ID NO: 2002646 - RNA, 19 nt, Homo sapiens
  misc_RNA (1)...(19): siRNA sense strand
agaggagccugcagguaaa

SEQ ID NO: 2002647 - RNA, 19 nt, Homo sapiens
  misc_RNA (1)...(19): siRNA sense strand
cguggagaauugcaaacua

SEQ ID NO: 2002648 - RNA, 19 nt, Homo sapiens
  misc_RNA (1)...(19): siRNA sense strand
cagaugaugaugaagauga

SEQ ID NO: 2002649 - RNA, 19 nt, Homo sapiens
  misc_RNA (1)...(19): siRNA sense strand
guaaggcaguggagaugca

SEQ ID NO: 2002650 - RNA, 19 nt, Homo sapiens
  misc_RNA (1)...(19): siRNA sense strand
aaauucaagucaagagaug

SEQ ID NO: 2002651 - RNA, 19 nt, Homo sapiens
  misc_RNA (1)...(19): siRNA sense strand
gcaggaagcagagagacaa

SEQ ID NO: 2002652 - RNA, 19 nt, Homo sapiens
  misc_RNA (1)...(19): siRNA sense strand
aaacugaugauucuacuuc

SEQ ID NO: 2002653 - RNA, 19 nt, Homo sapiens
  misc_RNA (1)...(19): siRNA sense strand
gcaaggugaauguuugaau

SEQ ID NO: 2002654 - RNA, 19 nt, Homo sapiens
  misc_RNA (1)...(19): siRNA sense strand
gcauccaccaguuguaauu

SEQ ID NO: 2002655 - RNA, 19 nt, Homo sapiens
  misc_RNA (1)...(19): siRNA sense strand
gauucucagagcaguauua

SEQ ID NO: 2002656 - RNA, 19 nt, Homo sapiens
  misc_RNA (1)...(19): siRNA sense strand
agcuaaagauugauaguga

SEQ ID NO: 2002657 - RNA, 19 nt, Homo sapiens
  misc_RNA (1)...(19): siRNA sense strand
gaauugcaaacuaaacuca

SEQ ID NO: 2002658 - RNA, 19 nt, Homo sapiens
  misc_RNA (1)...(19): siRNA sense strand
caguaacucucuccaccaa

SEQ ID NO: 2002659 - RNA, 19 nt, Homo sapiens
  misc_RNA (1)...(19): siRNA sense strand
gauuacgagugacuucugu

SEQ ID NO: 2002660 - RNA, 19 nt, Homo sapiens
  misc_RNA (1)...(19): siRNA sense strand
cugugaagcugcaauagga

SEQ ID NO: 2002661 - RNA, 19 nt, Homo sapiens
  misc_RNA (1)...(19): siRNA sense strand
ucaaggagaagacugcuau

SEQ ID NO: 2002662 - RNA, 19 nt, Homo sapiens
  misc_RNA (1)...(19): siRNA sense strand
ugaggguucuucaggaguu

SEQ ID NO: 2002663 - RNA, 19 nt, Homo sapiens
  misc_RNA (1)...(19): siRNA sense strand
caauauaaagcaaggugaa

SEQ ID NO: 2002664 - RNA, 19 nt, Homo sapiens
  misc_RNA (1)...(19): siRNA sense strand
gacagugauccuccauuaa

SEQ ID NO: 2002665 - RNA, 19 nt, Homo sapiens
  misc_RNA (1)...(19): siRNA sense strand
caucugugguuaaaguugu

SEQ ID NO: 2002666 - RNA, 19 nt, Homo sapiens
  misc_RNA (1)...(19): siRNA sense strand
caagaagcuccuccacuau

SEQ ID NO: 2002667 - RNA, 19 nt, Homo sapiens
  misc_RNA (1)...(19): siRNA sense strand
ggagcguuaugaaaguaga

SEQ ID NO: 2002668 - RNA, 19 nt, Homo sapiens
  misc_RNA (1)...(19): siRNA sense strand
aaagcuaaacccaaaguga

SEQ ID NO: 2002669 - RNA, 19 nt, Homo sapiens
  misc_RNA (1)...(19): siRNA sense strand
ggaugaaagaagagaagaa

SEQ ID NO: 2002670 - RNA, 19 nt, Homo sapiens
  misc_RNA (1)...(19): siRNA sense strand
gugaaauuccuuguuauug

SEQ ID NO: 2002671 - RNA, 19 nt, Homo sapiens
  misc_RNA (1)...(19): siRNA sense strand
aaccugcagucaauauaaa

SEQ ID NO: 2002672 - RNA, 19 nt, Homo sapiens
  misc_RNA (1)...(19): siRNA sense strand
cacaauagaggacgauaug

SEQ ID NO: 2002673 - RNA, 19 nt, Homo sapiens
  misc_RNA (1)...(19): siRNA sense strand
guagaaaguuccgaaaaug

SEQ ID NO: 2002674 - RNA, 19 nt, Homo sapiens
  misc_RNA (1)...(19): siRNA sense strand
caaaacaccuacccugcaa

SEQ ID NO: 2002675 - RNA, 19 nt, Homo sapiens
  misc_RNA (1)...(19): siRNA sense strand
ucagagcaguauuagaaca

SEQ ID NO: 2002676 - RNA, 19 nt, Homo sapiens
  misc_RNA (1)...(19): siRNA sense strand
aaagaacagggaugaaaga

SEQ ID NO: 2002677 - RNA, 19 nt, Homo sapiens
  misc_RNA (1)...(19): siRNA sense strand
gcugagaagucaccugaug

SEQ ID NO: 2002678 - RNA, 19 nt, Homo sapiens
  misc_RNA (1)...(19): siRNA sense strand
ugacacgccuccuccuuga

SEQ ID NO: 2002679 - RNA, 19 nt, Homo sapiens
  misc_RNA (1)...(19): siRNA sense strand
gcagguagagucaaugugu

SEQ ID NO: 2002680 - RNA, 19 nt, Homo sapiens
  misc_RNA (1)...(19): siRNA sense strand
gguccacgccuuccucauu

SEQ ID NO: 2002681 - RNA, 19 nt, Homo sapiens
  misc_RNA (1)...(19): siRNA sense strand
ccaggcagguagagucaau

SEQ ID NO: 2002682 - RNA, 19 nt, Homo sapiens
  misc_RNA (1)...(19): siRNA sense strand
ccacauggucagcugcuuu

SEQ ID NO: 2002683 - RNA, 19 nt, Homo sapiens
  misc_RNA (1)...(19): siRNA sense strand
guccacgccuuccucauuc

SEQ ID NO: 2002684 - RNA, 19 nt, Homo sapiens
  misc_RNA (1)...(19): siRNA sense strand
gcuguacuccugcgucuuc

SEQ ID NO: 2002685 - RNA, 19 nt, Homo sapiens
  misc_RNA (1)...(19): siRNA sense strand
caacgaccaguuuguccaa

SEQ ID NO: 2002686 - RNA, 19 nt, Homo sapiens
  misc_RNA (1)...(19): siRNA sense strand
cagccgcaauccucagaug

SEQ ID NO: 2002687 - RNA, 19 nt, Homo sapiens
  misc_RNA (1)...(19): siRNA sense strand
gcugggcgugcucucguua

SEQ ID NO: 2002688 - RNA, 19 nt, Homo sapiens
  misc_RNA (1)...(19): siRNA sense strand
cagcagagaacccuuucca

SEQ ID NO: 2002689 - RNA, 19 nt, Homo sapiens
  misc_RNA (1)...(19): siRNA sense strand
gaaggcaaguguaaaguua

SEQ ID NO: 2002690 - RNA, 19 nt, Homo sapiens
  misc_RNA (1)...(19): siRNA sense strand
gguaaaggcucgaaauaaa

SEQ ID NO: 2002691 - RNA, 19 nt, Homo sapiens
  misc_RNA (1)...(19): siRNA sense strand
ccagacagaugaugaguua

SEQ ID NO: 2002692 - RNA, 19 nt, Homo sapiens
  misc_RNA (1)...(19): siRNA sense strand
ggacugagcuagaaacaug

SEQ ID NO: 2002693 - RNA, 19 nt, Homo sapiens
  misc_RNA (1)...(19): siRNA sense strand
gcgaagaguuugaagauaa

SEQ ID NO: 2002694 - RNA, 19 nt, Homo sapiens
  misc_RNA (1)...(19): siRNA sense strand
ugacaaagauccaaacuga

SEQ ID NO: 2002695 - RNA, 19 nt, Homo sapiens
  misc_RNA (1)...(19): siRNA sense strand
gagcagagcuagaacagaa

SEQ ID NO: 2002696 - RNA, 19 nt, Homo sapiens
  misc_RNA (1)...(19): siRNA sense strand
caacggagaugccagugua

SEQ ID NO: 2002697 - RNA, 19 nt, Homo sapiens
  misc_RNA (1)...(19): siRNA sense strand
uaaaugaucuggaguguca

SEQ ID NO: 2002698 - RNA, 19 nt, Homo sapiens
  misc_RNA (1)...(19): siRNA sense strand
gauccaaacugaauuacaa

SEQ ID NO: 2002699 - RNA, 19 nt, Homo sapiens
  misc_RNA (1)...(19): siRNA sense strand
gaaguuggcuagucaauac

SEQ ID NO: 2002700 - RNA, 19 nt, Homo sapiens
  misc_RNA (1)...(19): siRNA sense strand
gcaauaauccguaucuuga

SEQ ID NO: 2002701 - RNA, 19 nt, Homo sapiens
  misc_RNA (1)...(19): siRNA sense strand
gcaaaguuguuuauuccua

SEQ ID NO: 2002702 - RNA, 19 nt, Homo sapiens
  misc_RNA (1)...(19): siRNA sense strand
gaaaauagaugaagcuaga

SEQ ID NO: 2002703 - RNA, 19 nt, Homo sapiens
  misc_RNA (1)...(19): siRNA sense strand
acagauggcucaugcagua

SEQ ID NO: 2002704 - RNA, 19 nt, Homo sapiens
  misc_RNA (1)...(19): siRNA sense strand
ccacucaccugcaaaguug

SEQ ID NO: 2002705 - RNA, 19 nt, Homo sapiens
  misc_RNA (1)...(19): siRNA sense strand
gaaauaaaguuggccaagu

SEQ ID NO: 2002706 - RNA, 19 nt, Homo sapiens
  misc_RNA (1)...(19): siRNA sense strand
gcagaacacauuccaguuu

SEQ ID NO: 2002707 - RNA, 19 nt, Homo sapiens
  misc_RNA (1)...(19): siRNA sense strand
gaggagcacagucuaaaua

SEQ ID NO: 2002708 - RNA, 19 nt, Homo sapiens
  misc_RNA (1)...(19): siRNA sense strand
agaaauacuuugagacuga

SEQ ID NO: 2002709 - RNA, 19 nt, Homo sapiens
  misc_RNA (1)...(19): siRNA sense strand
ucacaggcaucaaggcaua

SEQ ID NO: 2002710 - RNA, 19 nt, Homo sapiens
  misc_RNA (1)...(19): siRNA sense strand
cagagaagauugaagaugu

SEQ ID NO: 2002711 - RNA, 19 nt, Homo sapiens
  misc_RNA (1)...(19): siRNA sense strand
gaccaguaauggcacuuua

SEQ ID NO: 2002712 - RNA, 19 nt, Homo sapiens
  misc_RNA (1)...(19): siRNA sense strand
gauugaagauggagauaug

SEQ ID NO: 2002713 - RNA, 19 nt, Homo sapiens
  misc_RNA (1)...(19): siRNA sense strand
caggaucgcuacuaucaaa

SEQ ID NO: 2002714 - RNA, 19 nt, Homo sapiens
  misc_RNA (1)...(19): siRNA sense strand
cagaugaguugaccauuga

SEQ ID NO: 2002715 - RNA, 19 nt, Homo sapiens
  misc_RNA (1)...(19): siRNA sense strand
ucauggagcugcuguauca

SEQ ID NO: 2002716 - RNA, 19 nt, Homo sapiens
  misc_RNA (1)...(19): siRNA sense strand
gucaauaccugaagagaga

SEQ ID NO: 2002717 - RNA, 19 nt, Homo sapiens
  misc_RNA (1)...(19): siRNA sense strand
caaacugaauuacaagaga

SEQ ID NO: 2002718 - RNA, 19 nt, Homo sapiens
  misc_RNA (1)...(19): siRNA sense strand
ugaaggcucuugauggaaa

SEQ ID NO: 2002719 - RNA, 19 nt, Homo sapiens
  misc_RNA (1)...(19): siRNA sense strand
caacaacggguucuaaaug

SEQ ID NO: 2002720 - RNA, 19 nt, Homo sapiens
  misc_RNA (1)...(19): siRNA sense strand
ucacacacguccagcaauu

SEQ ID NO: 2002721 - RNA, 19 nt, Homo sapiens
  misc_RNA (1)...(19): siRNA sense strand
ccagaugaguugaccauug

SEQ ID NO: 2002722 - RNA, 19 nt, Homo sapiens
  misc_RNA (1)...(19): siRNA sense strand
caagagacagugaaagauu

SEQ ID NO: 2002723 - RNA, 19 nt, Homo sapiens
  misc_RNA (1)...(19): siRNA sense strand
ggaauucaaugggcguauu

SEQ ID NO: 2002724 - RNA, 19 nt, Homo sapiens
  misc_RNA (1)...(19): siRNA sense strand
agaagaaggcgaagaguuu

SEQ ID NO: 2002725 - RNA, 19 nt, Homo sapiens
  misc_RNA (1)...(19): siRNA sense strand
gaaauacuuugagacugaa

SEQ ID NO: 2002726 - RNA, 19 nt, Homo sapiens
  misc_RNA (1)...(19): siRNA sense strand
augaucaucucaaggauua

SEQ ID NO: 2002727 - RNA, 19 nt, Homo sapiens
  misc_RNA (1)...(19): siRNA sense strand
cuacaaggcuucucaacca

SEQ ID NO: 2002728 - RNA, 19 nt, Homo sapiens
  misc_RNA (1)...(19): siRNA sense strand
gcaagaaaacgcuguauuu

SEQ ID NO: 2002729 - RNA, 19 nt, Homo sapiens
  misc_RNA (1)...(19): siRNA sense strand
aaauaaaguuggccaagug

SEQ ID NO: 2002730 - RNA, 19 nt, Homo sapiens
  misc_RNA (1)...(19): siRNA sense strand
gcauguaucccguuuggaa

SEQ ID NO: 2002731 - RNA, 19 nt, Homo sapiens
  misc_RNA (1)...(19): siRNA sense strand
uaugaaggcucuugaugga

SEQ ID NO: 2002732 - RNA, 19 nt, Homo sapiens
  misc_RNA (1)...(19): siRNA sense strand
gagcauguaucccguuugg

SEQ ID NO: 2002733 - RNA, 19 nt, Homo sapiens
  misc_RNA (1)...(19): siRNA sense strand
gaggcaaaaucuaaacuua

SEQ ID NO: 2002734 - RNA, 19 nt, Homo sapiens
  misc_RNA (1)...(19): siRNA sense strand
aagagacagugaaagauuu

SEQ ID NO: 2002735 - RNA, 19 nt, Homo sapiens
  misc_RNA (1)...(19): siRNA sense strand
gaagauugaagauguggaa

SEQ ID NO: 2002736 - RNA, 19 nt, Homo sapiens
  misc_RNA (1)...(19): siRNA sense strand
gaguguaauuccaaagcua

SEQ ID NO: 2002737 - RNA, 19 nt, Homo sapiens
  misc_RNA (1)...(19): siRNA sense strand
ggaaauguguaugaucauc

SEQ ID NO: 2002738 - RNA, 19 nt, Homo sapiens
  misc_RNA (1)...(19): siRNA sense strand
ucaagaaucaguuuacaga

SEQ ID NO: 2002739 - RNA, 19 nt, Homo sapiens
  misc_RNA (1)...(19): siRNA sense strand
ggguaaaggcucgaaauaa

SEQ ID NO: 2002740 - RNA, 19 nt, Homo sapiens
  misc_RNA (1)...(19): siRNA sense strand
ucuggcaccuuaagaaauu

SEQ ID NO: 2002741 - RNA, 19 nt, Homo sapiens
  misc_RNA (1)...(19): siRNA sense strand
gagaagaaggcgaagaguu

SEQ ID NO: 2002742 - RNA, 19 nt, Homo sapiens
  misc_RNA (1)...(19): siRNA sense strand
gcacuuuacacucgcuuaa

SEQ ID NO: 2002743 - RNA, 19 nt, Homo sapiens
  misc_RNA (1)...(19): siRNA sense strand
gauacuagccgacaguuag

SEQ ID NO: 2002744 - RNA, 19 nt, Homo sapiens
  misc_RNA (1)...(19): siRNA sense strand
uaaagcagauugguguuuc

SEQ ID NO: 2002745 - RNA, 19 nt, Homo sapiens
  misc_RNA (1)...(19): siRNA sense strand
cugaugaucggaaugauua

SEQ ID NO: 2002746 - RNA, 19 nt, Homo sapiens
  misc_RNA (1)...(19): siRNA sense strand
uaaugcagauaccgaaaga

SEQ ID NO: 2002747 - RNA, 19 nt, Homo sapiens
  misc_RNA (1)...(19): siRNA sense strand
aacaacggguucuaaauga

SEQ ID NO: 2002748 - RNA, 19 nt, Homo sapiens
  misc_RNA (1)...(19): siRNA sense strand
gagaugccaguguauguuu

SEQ ID NO: 2002749 - RNA, 19 nt, Homo sapiens
  misc_RNA (1)...(19): siRNA sense strand
ggaagcagaacucguuuca

SEQ ID NO: 2002750 - RNA, 19 nt, Homo sapiens
  misc_RNA (1)...(19): siRNA sense strand
uggaagaacuggaaaauga

SEQ ID NO: 2002751 - RNA, 19 nt, Homo sapiens
  misc_RNA (1)...(19): siRNA sense strand
uaaggaagcucgaaaaugg

SEQ ID NO: 2002752 - RNA, 19 nt, Homo sapiens
  misc_RNA (1)...(19): siRNA sense strand
cagcagagaagauugaaga

SEQ ID NO: 2002753 - RNA, 19 nt, Homo sapiens
  misc_RNA (1)...(19): siRNA sense strand
gaggagcucccuguacuuu

SEQ ID NO: 2002754 - RNA, 19 nt, Homo sapiens
  misc_RNA (1)...(19): siRNA sense strand
ggcgaagaguuugaagaua

SEQ ID NO: 2002755 - RNA, 19 nt, Homo sapiens
  misc_RNA (1)...(19): siRNA sense strand
guggacacauggcuaaaga

SEQ ID NO: 2002756 - RNA, 19 nt, Homo sapiens
  misc_RNA (1)...(19): siRNA sense strand
acaaagauccaaacugaau

SEQ ID NO: 2002757 - RNA, 19 nt, Homo sapiens
  misc_RNA (1)...(19): siRNA sense strand
gaagaaggcgaagaguuug

SEQ ID NO: 2002758 - RNA, 19 nt, Homo sapiens
  misc_RNA (1)...(19): siRNA sense strand
cguaaagcagagauaauua

SEQ ID NO: 2002759 - RNA, 19 nt, Homo sapiens
  misc_RNA (1)...(19): siRNA sense strand
uaaauaaggaagcucgaaa

SEQ ID NO: 2002760 - RNA, 19 nt, Homo sapiens
  misc_RNA (1)...(19): siRNA sense strand
gagauuggccuggaguaaa

SEQ ID NO: 2002761 - RNA, 19 nt, Homo sapiens
  misc_RNA (1)...(19): siRNA sense strand
gcuacuaucaaacagauuu

SEQ ID NO: 2002762 - RNA, 19 nt, Homo sapiens
  misc_RNA (1)...(19): siRNA sense strand
gcuagucaauaccugaaga

SEQ ID NO: 2002763 - RNA, 19 nt, Homo sapiens
  misc_RNA (1)...(19): siRNA sense strand
ggagcacagucuaaauaag

SEQ ID NO: 2002764 - RNA, 19 nt, Homo sapiens
  misc_RNA (1)...(19): siRNA sense strand
gcagauaccgaaagagaag

SEQ ID NO: 2002765 - RNA, 19 nt, Homo sapiens
  misc_RNA (1)...(19): siRNA sense strand
aagcugacaucgaggcaaa

SEQ ID NO: 2002766 - RNA, 19 nt, Homo sapiens
  misc_RNA (1)...(19): siRNA sense strand
gaccucauauggcaaacug

SEQ ID NO: 2002767 - RNA, 19 nt, Homo sapiens
  misc_RNA (1)...(19): siRNA sense strand
gcuaaagagugccaugaac

SEQ ID NO: 2002768 - RNA, 19 nt, Homo sapiens
  misc_RNA (1)...(19): siRNA sense strand
gaucugaguguaauuccaa

SEQ ID NO: 2002769 - RNA, 19 nt, Homo sapiens
  misc_RNA (1)...(19): siRNA sense strand
aaagguguguggaccaguu

SEQ ID NO: 2002770 - RNA, 19 nt, Homo sapiens
  misc_RNA (1)...(19): siRNA sense strand
gaacaaagaaaaccaagau

SEQ ID NO: 2002771 - RNA, 19 nt, Homo sapiens
  misc_RNA (1)...(19): siRNA sense strand
caugagguguuagaaguga

SEQ ID NO: 2002772 - RNA, 19 nt, Homo sapiens
  misc_RNA (1)...(19): siRNA sense strand
gagcugcuguaucagaaca

SEQ ID NO: 2002773 - RNA, 19 nt, Homo sapiens
  misc_RNA (1)...(19): siRNA sense strand
gagcacagucuaaauaagg

SEQ ID NO: 2002774 - RNA, 19 nt, Homo sapiens
  misc_RNA (1)...(19): siRNA sense strand
gaucaucucaaggauuauu

SEQ ID NO: 2002775 - RNA, 19 nt, Homo sapiens
  misc_RNA (1)...(19): siRNA sense strand
gcagagaagauugaagaug

SEQ ID NO: 2002776 - RNA, 19 nt, Homo sapiens
  misc_RNA (1)...(19): siRNA sense strand
caucggugcuaguggaaga

SEQ ID NO: 2002777 - RNA, 19 nt, Homo sapiens
  misc_RNA (1)...(19): siRNA sense strand
guaaaggcucgaaauaaag

SEQ ID NO: 2002778 - RNA, 19 nt, Homo sapiens
  misc_RNA (1)...(19): siRNA sense strand
ccugcaaaguuguuuauuc

SEQ ID NO: 2002779 - RNA, 19 nt, Homo sapiens
  misc_RNA (1)...(19): siRNA sense strand
ggacacauggcuaaagagu

SEQ ID NO: 2002780 - RNA, 19 nt, Homo sapiens
  misc_RNA (1)...(19): siRNA sense strand
gcaaggaaugauuaucuuc

SEQ ID NO: 2002781 - RNA, 19 nt, Homo sapiens
  misc_RNA (1)...(19): siRNA sense strand
gagcaauaauccguaucuu

SEQ ID NO: 2002782 - RNA, 19 nt, Homo sapiens
  misc_RNA (1)...(19): siRNA sense strand
uguuagaagugauugaaga

SEQ ID NO: 2002783 - RNA, 19 nt, Homo sapiens
  misc_RNA (1)...(19): siRNA sense strand
caaagauccaaacugaauu

SEQ ID NO: 2002784 - RNA, 19 nt, Homo sapiens
  misc_RNA (1)...(19): siRNA sense strand
gaaccaaguaauggaagaa

SEQ ID NO: 2002785 - RNA, 19 nt, Homo sapiens
  misc_RNA (1)...(19): siRNA sense strand
aagaaucaguuuacagaag

SEQ ID NO: 2002786 - RNA, 19 nt, Homo sapiens
  misc_RNA (1)...(19): siRNA sense strand
uacaagagacagugaaaga

SEQ ID NO: 2002787 - RNA, 19 nt, Homo sapiens
  misc_RNA (1)...(19): siRNA sense strand
gaugaugaguuaucuuuuc

SEQ ID NO: 2002788 - RNA, 19 nt, Homo sapiens
  misc_RNA (1)...(19): siRNA sense strand
gaugagagagauucagauc

SEQ ID NO: 2002789 - RNA, 19 nt, Homo sapiens
  misc_RNA (1)...(19): siRNA sense strand
guuaacagguugucuauag

SEQ ID NO: 2002790 - RNA, 19 nt, Homo sapiens
  misc_RNA (1)...(19): siRNA sense strand
gagaagcgcugcaguuacu

SEQ ID NO: 2002791 - RNA, 19 nt, Homo sapiens
  misc_RNA (1)...(19): siRNA sense strand
ugaaggaggugaugcuguu

SEQ ID NO: 2002792 - RNA, 19 nt, Homo sapiens
  misc_RNA (1)...(19): siRNA sense strand
gcgagaagcgcugcaguua

SEQ ID NO: 2002793 - RNA, 19 nt, Homo sapiens
  misc_RNA (1)...(19): siRNA sense strand
gguggagucuguguucuuu

SEQ ID NO: 2002794 - RNA, 19 nt, Homo sapiens
  misc_RNA (1)...(19): siRNA sense strand
uaugaggucuccaacuuug

SEQ ID NO: 2002795 - RNA, 19 nt, Homo sapiens
  misc_RNA (1)...(19): siRNA sense strand
acacugagcuccggcuguu

SEQ ID NO: 2002796 - RNA, 19 nt, Homo sapiens
  misc_RNA (1)...(19): siRNA sense strand
aguaugaggucuccaacuu

SEQ ID NO: 2002797 - RNA, 19 nt, Homo sapiens
  misc_RNA (1)...(19): siRNA sense strand
gcucgcagcugagauguac

SEQ ID NO: 2002798 - RNA, 19 nt, Homo sapiens
  misc_RNA (1)...(19): siRNA sense strand
guaugaggucuccaacuuu

SEQ ID NO: 2002799 - RNA, 19 nt, Homo sapiens
  misc_RNA (1)...(19): siRNA sense strand
gcaguguggucaguaccuu

SEQ ID NO: 2002800 - RNA, 19 nt, Homo sapiens
  misc_RNA (1)...(19): siRNA sense strand
guacccacaauuggacuua

SEQ ID NO: 2002801 - RNA, 19 nt, Homo sapiens
  misc_RNA (1)...(19): siRNA sense strand
ggaggcuaauccuacuuca

SEQ ID NO: 2002802 - RNA, 19 nt, Homo sapiens
  misc_RNA (1)...(19): siRNA sense strand
gaaggaggugaugcuguuu

SEQ ID NO: 2002803 - RNA, 19 nt, Homo sapiens
  misc_RNA (1)...(19): siRNA sense strand
cagcagggguuaacagguu

SEQ ID NO: 2002804 - RNA, 19 nt, Homo sapiens
  misc_RNA (1)...(19): siRNA sense strand
gagccugacaacuggauga

SEQ ID NO: 2002805 - RNA, 19 nt, Homo sapiens
  misc_RNA (1)...(19): siRNA sense strand
gcgcucaguacccacaauu

SEQ ID NO: 2002806 - RNA, 19 nt, Homo sapiens
  misc_RNA (1)...(19): siRNA sense strand
gcccauggacgauuuaugc

SEQ ID NO: 2002807 - RNA, 19 nt, Homo sapiens
  misc_RNA (1)...(19): siRNA sense strand
gcucaguacccacaauugg

SEQ ID NO: 2002808 - RNA, 19 nt, Homo sapiens
  misc_RNA (1)...(19): siRNA sense strand
ggguuaacagguugucuau

SEQ ID NO: 2002809 - RNA, 19 nt, Homo sapiens
  misc_RNA (1)...(19): siRNA sense strand
gacccugugggauguguuu

SEQ ID NO: 2002810 - RNA, 19 nt, Homo sapiens
  misc_RNA (1)...(19): siRNA sense strand
ggccuccagucccuagaug

SEQ ID NO: 2002811 - RNA, 19 nt, Homo sapiens
  misc_RNA (1)...(19): siRNA sense strand
uggagucuguguucuuugg

SEQ ID NO: 2002812 - RNA, 19 nt, Homo sapiens
  misc_RNA (1)...(19): siRNA sense strand
uggcugugcuggacucucu

SEQ ID NO: 2002813 - RNA, 19 nt, Homo sapiens
  misc_RNA (1)...(19): siRNA sense strand
gagcugcuggaggaaguuu

SEQ ID NO: 2002814 - RNA, 19 nt, Homo sapiens
  misc_RNA (1)...(19): siRNA sense strand
uaaauuugcuggcccaaua

SEQ ID NO: 2002815 - RNA, 19 nt, Homo sapiens
  misc_RNA (1)...(19): siRNA sense strand
gcauucuucuucacaauua

SEQ ID NO: 2002816 - RNA, 19 nt, Homo sapiens
  misc_RNA (1)...(19): siRNA sense strand
gcacacccuucaaauagua

SEQ ID NO: 2002817 - RNA, 19 nt, Homo sapiens
  misc_RNA (1)...(19): siRNA sense strand
cgaagaagguguacugcua

SEQ ID NO: 2002818 - RNA, 19 nt, Homo sapiens
  misc_RNA (1)...(19): siRNA sense strand
gcauuuacuuugaggcuua

SEQ ID NO: 2002819 - RNA, 19 nt, Homo sapiens
  misc_RNA (1)...(19): siRNA sense strand
gaauggugguuccuucuaa

SEQ ID NO: 2002820 - RNA, 19 nt, Homo sapiens
  misc_RNA (1)...(19): siRNA sense strand
ccaaagcaauucucaguga

SEQ ID NO: 2002821 - RNA, 19 nt, Homo sapiens
  misc_RNA (1)...(19): siRNA sense strand
gauuaaauguggcauauag

SEQ ID NO: 2002822 - RNA, 19 nt, Homo sapiens
  misc_RNA (1)...(19): siRNA sense strand
caauuaaguuccucuuuga

SEQ ID NO: 2002823 - RNA, 19 nt, Homo sapiens
  misc_RNA (1)...(19): siRNA sense strand
guacuggugucucauuuga

SEQ ID NO: 2002824 - RNA, 19 nt, Homo sapiens
  misc_RNA (1)...(19): siRNA sense strand
ugaaacagaugacccagaa

SEQ ID NO: 2002825 - RNA, 19 nt, Homo sapiens
  misc_RNA (1)...(19): siRNA sense strand
cagcagacaugccuuguug

SEQ ID NO: 2002826 - RNA, 19 nt, Homo sapiens
  misc_RNA (1)...(19): siRNA sense strand
aagaggagguggaacauuu

SEQ ID NO: 2002827 - RNA, 19 nt, Homo sapiens
  misc_RNA (1)...(19): siRNA sense strand
ugacaacaaccaagcauua

SEQ ID NO: 2002828 - RNA, 19 nt, Homo sapiens
  misc_RNA (1)...(19): siRNA sense strand
ugagagaugagcacaauua

SEQ ID NO: 2002829 - RNA, 19 nt, Homo sapiens
  misc_RNA (1)...(19): siRNA sense strand
gaagcuugguggauuaaau

SEQ ID NO: 2002830 - RNA, 19 nt, Homo sapiens
  misc_RNA (1)...(19): siRNA sense strand
gcucggcccucaagaagaa

SEQ ID NO: 2002831 - RNA, 19 nt, Homo sapiens
  misc_RNA (1)...(19): siRNA sense strand
uaaaucaggucaauuggau

SEQ ID NO: 2002832 - RNA, 19 nt, Homo sapiens
  misc_RNA (1)...(19): siRNA sense strand
gcaagaacuuugagguugu

SEQ ID NO: 2002833 - RNA, 19 nt, Homo sapiens
  misc_RNA (1)...(19): siRNA sense strand
gauaaucccaccaacaauu

SEQ ID NO: 2002834 - RNA, 19 nt, Homo sapiens
  misc_RNA (1)...(19): siRNA sense strand
acaauuaaguuccucuuug

SEQ ID NO: 2002835 - RNA, 19 nt, Homo sapiens
  misc_RNA (1)...(19): siRNA sense strand
ggaguuggcucggcuacuu

SEQ ID NO: 2002836 - RNA, 19 nt, Homo sapiens
  misc_RNA (1)...(19): siRNA sense strand
uaaaaggccugaaugaauu

SEQ ID NO: 2002837 - RNA, 19 nt, Homo sapiens
  misc_RNA (1)...(19): siRNA sense strand
caaagcccaugcaguaguu

SEQ ID NO: 2002838 - RNA, 19 nt, Homo sapiens
  misc_RNA (1)...(19): siRNA sense strand
cgagugcauuuauucuaua

SEQ ID NO: 2002839 - RNA, 19 nt, Homo sapiens
  misc_RNA (1)...(19): siRNA sense strand
gaaaagaccacauuccaaa

SEQ ID NO: 2002840 - RNA, 19 nt, Homo sapiens
  misc_RNA (1)...(19): siRNA sense strand
cuucaaagcccaugcagua

SEQ ID NO: 2002841 - RNA, 19 nt, Homo sapiens
  misc_RNA (1)...(19): siRNA sense strand
ccagaauucuacaaaucua

SEQ ID NO: 2002842 - RNA, 19 nt, Homo sapiens
  misc_RNA (1)...(19): siRNA sense strand
ugaaggaguucuaccugaa

SEQ ID NO: 2002843 - RNA, 19 nt, Homo sapiens
  misc_RNA (1)...(19): siRNA sense strand
caaagcaauucucagugaa

SEQ ID NO: 2002844 - RNA, 19 nt, Homo sapiens
  misc_RNA (1)...(19): siRNA sense strand
gcuaccaccuggaggcuuu

SEQ ID NO: 2002845 - RNA, 19 nt, Homo sapiens
  misc_RNA (1)...(19): siRNA sense strand
agacaugccuuguuggaau

SEQ ID NO: 2002846 - RNA, 19 nt, Homo sapiens
  misc_RNA (1)...(19): siRNA sense strand
ggacuaagaguucacaucu

SEQ ID NO: 2002847 - RNA, 19 nt, Homo sapiens
  misc_RNA (1)...(19): siRNA sense strand
gcucauggcauuucagaga

SEQ ID NO: 2002848 - RNA, 19 nt, Homo sapiens
  misc_RNA (1)...(19): siRNA sense strand
acaaguacuuugaaacaga

SEQ ID NO: 2002849 - RNA, 19 nt, Homo sapiens
  misc_RNA (1)...(19): siRNA sense strand
gaguacuggugucucauuu

SEQ ID NO: 2002850 - RNA, 19 nt, Homo sapiens
  misc_RNA (1)...(19): siRNA sense strand
gcgcaaggcugggcguuau

SEQ ID NO: 2002851 - RNA, 19 nt, Homo sapiens
  misc_RNA (1)...(19): siRNA sense strand
uaagugaggaugagaagaa

SEQ ID NO: 2002852 - RNA, 19 nt, Homo sapiens
  misc_RNA (1)...(19): siRNA sense strand
ucaauuggauaagguugua

SEQ ID NO: 2002853 - RNA, 19 nt, Homo sapiens
  misc_RNA (1)...(19): siRNA sense strand
aaacagaugacccagaauu

SEQ ID NO: 2002854 - RNA, 19 nt, Homo sapiens
  misc_RNA (1)...(19): siRNA sense strand
gggaaugguuugagcuaau

SEQ ID NO: 2002855 - RNA, 19 nt, Homo sapiens
  misc_RNA (1)...(19): siRNA sense strand
gagcaagaacuuugagguu

SEQ ID NO: 2002856 - RNA, 19 nt, Homo sapiens
  misc_RNA (1)...(19): siRNA sense strand
gaagaagguguacugcuau

SEQ ID NO: 2002857 - RNA, 19 nt, Homo sapiens
  misc_RNA (1)...(19): siRNA sense strand
gguuugagcuaaucugcaa

SEQ ID NO: 2002858 - RNA, 19 nt, Homo sapiens
  misc_RNA (1)...(19): siRNA sense strand
ggagcccaauuccaacgua

SEQ ID NO: 2002859 - RNA, 19 nt, Homo sapiens
  misc_RNA (1)...(19): siRNA sense strand
guugguggcucauggcauu

SEQ ID NO: 2002860 - RNA, 19 nt, Homo sapiens
  misc_RNA (1)...(19): siRNA sense strand
ggugguggaugauggcauu

SEQ ID NO: 2002861 - RNA, 19 nt, Homo sapiens
  misc_RNA (1)...(19): siRNA sense strand
ggaaugguuugagcuaauc

SEQ ID NO: 2002862 - RNA, 19 nt, Homo sapiens
  misc_RNA (1)...(19): siRNA sense strand
ggauaagguuguagaacuc

SEQ ID NO: 2002863 - RNA, 19 nt, Homo sapiens
  misc_RNA (1)...(19): siRNA sense strand
caaaaucagccaaucaaua

SEQ ID NO: 2002864 - RNA, 19 nt, Homo sapiens
  misc_RNA (1)...(19): siRNA sense strand
cagugugucugacuucaaa

SEQ ID NO: 2002865 - RNA, 19 nt, Homo sapiens
  misc_RNA (1)...(19): siRNA sense strand
ucacacuggugguggauga

SEQ ID NO: 2002866 - RNA, 19 nt, Homo sapiens
  misc_RNA (1)...(19): siRNA sense strand
ccgagugcauuuauucuau

SEQ ID NO: 2002867 - RNA, 19 nt, Homo sapiens
  misc_RNA (1)...(19): siRNA sense strand
caacaaccaagcauuagug

SEQ ID NO: 2002868 - RNA, 19 nt, Homo sapiens
  misc_RNA (1)...(19): siRNA sense strand
ugagaagaauaucgucgaa

SEQ ID NO: 2002869 - RNA, 19 nt, Homo sapiens
  misc_RNA (1)...(19): siRNA sense strand
caaguacuuugaaacagau

SEQ ID NO: 2002870 - RNA, 19 nt, Homo sapiens
  misc_RNA (1)...(19): siRNA sense strand
caagaacuuugagguuguu

SEQ ID NO: 2002871 - RNA, 19 nt, Homo sapiens
  misc_RNA (1)...(19): siRNA sense strand
ugaaagccacucggaauuu

SEQ ID NO: 2002872 - RNA, 19 nt, Homo sapiens
  misc_RNA (1)...(19): siRNA sense strand
gcgugagcauuuacuuuga

SEQ ID NO: 2002873 - RNA, 19 nt, Homo sapiens
  misc_RNA (1)...(19): siRNA sense strand
gagcuggucuuugcagaag

SEQ ID NO: 2002874 - RNA, 19 nt, Homo sapiens
  misc_RNA (1)...(19): siRNA sense strand
gcucuuuccuggcccaaau

SEQ ID NO: 2002875 - RNA, 19 nt, Homo sapiens
  misc_RNA (1)...(19): siRNA sense strand
guccugacccuguccauaa

SEQ ID NO: 2002876 - RNA, 19 nt, Homo sapiens
  misc_RNA (1)...(19): siRNA sense strand
gaagguguacugcuaugug

SEQ ID NO: 2002877 - RNA, 19 nt, Homo sapiens
  misc_RNA (1)...(19): siRNA sense strand
cagugaagcuugguggauu

SEQ ID NO: 2002878 - RNA, 19 nt, Homo sapiens
  misc_RNA (1)...(19): siRNA sense strand
cuacugcacacacauguuu

SEQ ID NO: 2002879 - RNA, 19 nt, Homo sapiens
  misc_RNA (1)...(19): siRNA sense strand
cagaugacccagaauucua

SEQ ID NO: 2002880 - RNA, 19 nt, Homo sapiens
  misc_RNA (1)...(19): siRNA sense strand
ucagcuuccuccagaauga

SEQ ID NO: 2002881 - RNA, 19 nt, Homo sapiens
  misc_RNA (1)...(19): siRNA sense strand
ugaagaaaccgaagaaggu

SEQ ID NO: 2002882 - RNA, 19 nt, Homo sapiens
  misc_RNA (1)...(19): siRNA sense strand
cuucaggcgugagcauuua

SEQ ID NO: 2002883 - RNA, 19 nt, Homo sapiens
  misc_RNA (1)...(19): siRNA sense strand
agaaaucaguaacauccaa

SEQ ID NO: 2002884 - RNA, 19 nt, Homo sapiens
  misc_RNA (1)...(19): siRNA sense strand
agugaagcuugguggauua

SEQ ID NO: 2002885 - RNA, 19 nt, Homo sapiens
  misc_RNA (1)...(19): siRNA sense strand
gacccagaauucuacaaau

SEQ ID NO: 2002886 - RNA, 19 nt, Homo sapiens
  misc_RNA (1)...(19): siRNA sense strand
gcagacaugccuuguugga

SEQ ID NO: 2002887 - RNA, 19 nt, Homo sapiens
  misc_RNA (1)...(19): siRNA sense strand
gaauaucgucgaacgcaau

SEQ ID NO: 2002888 - RNA, 19 nt, Homo sapiens
  misc_RNA (1)...(19): siRNA sense strand
gagaugagcacaauuacac

SEQ ID NO: 2002889 - RNA, 19 nt, Homo sapiens
  misc_RNA (1)...(19): siRNA sense strand
caaccaagcauuagugcau

SEQ ID NO: 2002890 - RNA, 19 nt, Homo sapiens
  misc_RNA (1)...(19): siRNA sense strand
guaaggagaggaacauucu

SEQ ID NO: 2002891 - RNA, 19 nt, Homo sapiens
  misc_RNA (1)...(19): siRNA sense strand
gccaaucaauaauggugaa

SEQ ID NO: 2002892 - RNA, 19 nt, Homo sapiens
  misc_RNA (1)...(19): siRNA sense strand
gggcaagugucucuaugag

SEQ ID NO: 2002893 - RNA, 19 nt, Homo sapiens
  misc_RNA (1)...(19): siRNA sense strand
gagcuucggcagguacaua

SEQ ID NO: 2002894 - RNA, 19 nt, Homo sapiens
  misc_RNA (1)...(19): siRNA sense strand
uuuauccgcucccugcaua

SEQ ID NO: 2002895 - RNA, 19 nt, Homo sapiens
  misc_RNA (1)...(19): siRNA sense strand
aauuacaccuuguccauuc

SEQ ID NO: 2002896 - RNA, 19 nt, Homo sapiens
  misc_RNA (1)...(19): siRNA sense strand
ugaaagaggagguggaaca

SEQ ID NO: 2002897 - RNA, 19 nt, Homo sapiens
  misc_RNA (1)...(19): siRNA sense strand
cuuugaggcuuaucuuuau

SEQ ID NO: 2002898 - RNA, 19 nt, Homo sapiens
  misc_RNA (1)...(19): siRNA sense strand
ugcaaagucuccugggauu

SEQ ID NO: 2002899 - RNA, 19 nt, Homo sapiens
  misc_RNA (1)...(19): siRNA sense strand
uggauuaaauguggcauau

SEQ ID NO: 2002900 - RNA, 19 nt, Homo sapiens
  misc_RNA (1)...(19): siRNA sense strand
gcuggccagucaagugaaa

SEQ ID NO: 2002901 - RNA, 19 nt, Homo sapiens
  misc_RNA (1)...(19): siRNA sense strand
aauaucggcuggccaguca

SEQ ID NO: 2002902 - RNA, 19 nt, Homo sapiens
  misc_RNA (1)...(19): siRNA sense strand
caugacagguggagcucaa

SEQ ID NO: 2002903 - RNA, 19 nt, Homo sapiens
  misc_RNA (1)...(19): siRNA sense strand
gcuaaucugcaaagcacua

SEQ ID NO: 2002904 - RNA, 19 nt, Homo sapiens
  misc_RNA (1)...(19): siRNA sense strand
gugaggaugagaagaauau

SEQ ID NO: 2002905 - RNA, 19 nt, Homo sapiens
  misc_RNA (1)...(19): siRNA sense strand
cgagcuagcaguggaaauu

SEQ ID NO: 2002906 - RNA, 19 nt, Homo sapiens
  misc_RNA (1)...(19): siRNA sense strand
gauuggagcaagaacuuug

SEQ ID NO: 2002907 - RNA, 19 nt, Homo sapiens
  misc_RNA (1)...(19): siRNA sense strand
guuggaaucgucucugaaa

SEQ ID NO: 2002908 - RNA, 19 nt, Homo sapiens
  misc_RNA (1)...(19): siRNA sense strand
ggaccggacuauuuaugac

SEQ ID NO: 2002909 - RNA, 19 nt, Homo sapiens
  misc_RNA (1)...(19): siRNA sense strand
ccgcacacccuucaaauag

SEQ ID NO: 2002910 - RNA, 19 nt, Homo sapiens
  misc_RNA (1)...(19): siRNA sense strand
ggauuaaauguggcauaua

SEQ ID NO: 2002911 - RNA, 19 nt, Homo sapiens
  misc_RNA (1)...(19): siRNA sense strand
gcaaggcugggcguuauga

SEQ ID NO: 2002912 - RNA, 19 nt, Homo sapiens
  misc_RNA (1)...(19): siRNA sense strand
gcccaauuccaacguagua

SEQ ID NO: 2002913 - RNA, 19 nt, Homo sapiens
  misc_RNA (1)...(19): siRNA sense strand
gggaccggacuauuuauga

SEQ ID NO: 2002914 - RNA, 19 nt, Homo sapiens
  misc_RNA (1)...(19): siRNA sense strand
ggagaagacugauauagaa

SEQ ID NO: 2002915 - RNA, 19 nt, Homo sapiens
  misc_RNA (1)...(19): siRNA sense strand
gagaaagccuuccauuauu

SEQ ID NO: 2002916 - RNA, 19 nt, Homo sapiens
  misc_RNA (1)...(19): siRNA sense strand
gcacucagcucuccaaucu

SEQ ID NO: 2002917 - RNA, 19 nt, Homo sapiens
  misc_RNA (1)...(19): siRNA sense strand
agaaagagcccaauucauu

SEQ ID NO: 2002918 - RNA, 19 nt, Homo sapiens
  misc_RNA (1)...(19): siRNA sense strand
gcaagcuugucgauauaua

SEQ ID NO: 2002919 - RNA, 19 nt, Homo sapiens
  misc_RNA (1)...(19): siRNA sense strand
gcuccaggauacauuaaua

SEQ ID NO: 2002920 - RNA, 19 nt, Homo sapiens
  misc_RNA (1)...(19): siRNA sense strand
guagaagaguuauuuggaa

SEQ ID NO: 2002921 - RNA, 19 nt, Homo sapiens
  misc_RNA (1)...(19): siRNA sense strand
cagaagaaauggagagguu

SEQ ID NO: 2002922 - RNA, 19 nt, Homo sapiens
  misc_RNA (1)...(19): siRNA sense strand
acucauggcugauguggua

SEQ ID NO: 2002923 - RNA, 19 nt, Homo sapiens
  misc_RNA (1)...(19): siRNA sense strand
gauuccagcuuccucagua

SEQ ID NO: 2002924 - RNA, 19 nt, Homo sapiens
  misc_RNA (1)...(19): siRNA sense strand
cagagaaagccuuccauua

SEQ ID NO: 2002925 - RNA, 19 nt, Homo sapiens
  misc_RNA (1)...(19): siRNA sense strand
gaaagagcccaauucauuc

SEQ ID NO: 2002926 - RNA, 19 nt, Homo sapiens
  misc_RNA (1)...(19): siRNA sense strand
gaacaaagacaaccacaac

SEQ ID NO: 2002927 - RNA, 19 nt, Homo sapiens
  misc_RNA (1)...(19): siRNA sense strand
agagaaagccuuccauuau

SEQ ID NO: 2002928 - RNA, 19 nt, Homo sapiens
  misc_RNA (1)...(19): siRNA sense strand
ugggaaaggugcaauggua

SEQ ID NO: 2002929 - RNA, 19 nt, Homo sapiens
  misc_RNA (1)...(19): siRNA sense strand
ggauaagucugcuccaucu

SEQ ID NO: 2002930 - RNA, 19 nt, Homo sapiens
  misc_RNA (1)...(19): siRNA sense strand
gcaccgagacucuagaaga

SEQ ID NO: 2002931 - RNA, 19 nt, Homo sapiens
  misc_RNA (1)...(19): siRNA sense strand
caggauacauuaauacauc

SEQ ID NO: 2002932 - RNA, 19 nt, Homo sapiens
  misc_RNA (1)...(19): siRNA sense strand
ucagaugggugacucaaau

SEQ ID NO: 2002933 - RNA, 19 nt, Homo sapiens
  misc_RNA (1)...(19): siRNA sense strand
gggagaagacugauauaga

SEQ ID NO: 2002934 - RNA, 19 nt, Homo sapiens
  misc_RNA (1)...(19): siRNA sense strand
gagccaaggaugaguauga

SEQ ID NO: 2002935 - RNA, 19 nt, Homo sapiens
  misc_RNA (1)...(19): siRNA sense strand
gcaagcugcucgggacaaa

SEQ ID NO: 2002936 - RNA, 19 nt, Homo sapiens
  misc_RNA (1)...(19): siRNA sense strand
gacuaaauaugcacaaucu

SEQ ID NO: 2002937 - RNA, 19 nt, Homo sapiens
  misc_RNA (1)...(19): siRNA sense strand
agaaagccuuccauuauuc

SEQ ID NO: 2002938 - RNA, 19 nt, Homo sapiens
  misc_RNA (1)...(19): siRNA sense strand
caccgagacucuagaagaa

SEQ ID NO: 2002939 - RNA, 19 nt, Homo sapiens
  misc_RNA (1)...(19): siRNA sense strand
aaugcaagcuugucgauau

SEQ ID NO: 2002940 - RNA, 19 nt, Homo sapiens
  misc_RNA (1)...(19): siRNA sense strand
ccaauucauuccuaccauu

SEQ ID NO: 2002941 - RNA, 19 nt, Homo sapiens
  misc_RNA (1)...(19): siRNA sense strand
gcagacaguuacaagaucu

SEQ ID NO: 2002942 - RNA, 19 nt, Homo sapiens
  misc_RNA (1)...(19): siRNA sense strand
caaagacaaccacaaccua

SEQ ID NO: 2002943 - RNA, 19 nt, Homo sapiens
  misc_RNA (1)...(19): siRNA sense strand
gcagagccaaggaugagua

SEQ ID NO: 2002944 - RNA, 19 nt, Homo sapiens
  misc_RNA (1)...(19): siRNA sense strand
uaagacagcagcagcaaga

SEQ ID NO: 2002945 - RNA, 19 nt, Homo sapiens
  misc_RNA (1)...(19): siRNA sense strand
caugaaccauuucuucugu

SEQ ID NO: 2002946 - RNA, 19 nt, Homo sapiens
  misc_RNA (1)...(19): siRNA sense strand
gaaccauuucuucuguaua

SEQ ID NO: 2002947 - RNA, 19 nt, Homo sapiens
  misc_RNA (1)...(19): siRNA sense strand
acaagcaucugacgguaga

SEQ ID NO: 2002948 - RNA, 19 nt, Homo sapiens
  misc_RNA (1)...(19): siRNA sense strand
ucagcuccaugaaccauuu

SEQ ID NO: 2002949 - RNA, 19 nt, Homo sapiens
  misc_RNA (1)...(19): siRNA sense strand
gaaccagugaauaaagauu

SEQ ID NO: 2002950 - RNA, 19 nt, Homo sapiens
  misc_RNA (1)...(19): siRNA sense strand
cuucggaccuugagaggaa

SEQ ID NO: 2002951 - RNA, 19 nt, Homo sapiens
  misc_RNA (1)...(19): siRNA sense strand
ccagaaagagcccaauuca

SEQ ID NO: 2002952 - RNA, 19 nt, Homo sapiens
  misc_RNA (1)...(19): siRNA sense strand
gcuugucgauauauaguau

SEQ ID NO: 2002953 - RNA, 19 nt, Homo sapiens
  misc_RNA (1)...(19): siRNA sense strand
gaaaugcaagcuugucgau

SEQ ID NO: 2002954 - RNA, 19 nt, Homo sapiens
  misc_RNA (1)...(19): siRNA sense strand
gguagaagaguuauuugga

SEQ ID NO: 2002955 - RNA, 19 nt, Homo sapiens
  misc_RNA (1)...(19): siRNA sense strand
gacgguagaagaguuauuu

SEQ ID NO: 2002956 - RNA, 19 nt, Homo sapiens
  misc_RNA (1)...(19): siRNA sense strand
uaguugaaccagugaauaa

SEQ ID NO: 2002957 - RNA, 19 nt, Homo sapiens
  misc_RNA (1)...(19): siRNA sense strand
uggcugaugugguagaaga

SEQ ID NO: 2002958 - RNA, 19 nt, Homo sapiens
  misc_RNA (1)...(19): siRNA sense strand
aaccauuucuucuguauag

SEQ ID NO: 2002959 - RNA, 19 nt, Homo sapiens
  misc_RNA (1)...(19): siRNA sense strand
ugaaccauuucuucuguau

SEQ ID NO: 2002960 - RNA, 19 nt, Homo sapiens
  misc_RNA (1)...(19): siRNA sense strand
cccacagcaugaccaaaua

SEQ ID NO: 2002961 - RNA, 19 nt, Homo sapiens
  misc_RNA (1)...(19): siRNA sense strand
cuaaauaugcacaaucuag

SEQ ID NO: 2002962 - RNA, 19 nt, Homo sapiens
  misc_RNA (1)...(19): siRNA sense strand
uacaagaucuucggaccuu

SEQ ID NO: 2002963 - RNA, 19 nt, Homo sapiens
  misc_RNA (1)...(19): siRNA sense strand
cagcaugaccaaauacaga

SEQ ID NO: 2002964 - RNA, 19 nt, Homo sapiens
  misc_RNA (1)...(19): siRNA sense strand
caauucauuccuaccauuu

SEQ ID NO: 2002965 - RNA, 19 nt, Homo sapiens
  misc_RNA (1)...(19): siRNA sense strand
cauugugaaucgacuaaau

SEQ ID NO: 2002966 - RNA, 19 nt, Homo sapiens
  misc_RNA (1)...(19): siRNA sense strand
agacaaccacaaccuauga

SEQ ID NO: 2002967 - RNA, 19 nt, Homo sapiens
  misc_RNA (1)...(19): siRNA sense strand
ccgagacucuagaagaaau

SEQ ID NO: 2002968 - RNA, 19 nt, Homo sapiens
  misc_RNA (1)...(19): siRNA sense strand
gagaugccucccagaaaga

SEQ ID NO: 2002969 - RNA, 19 nt, Homo sapiens
  misc_RNA (1)...(19): siRNA sense strand
ggaagcaccgagacucuag

SEQ ID NO: 2002970 - RNA, 19 nt, Homo sapiens
  misc_RNA (1)...(19): siRNA sense strand
aaagacaaccacaaccuau

SEQ ID NO: 2002971 - RNA, 19 nt, Homo sapiens
  misc_RNA (1)...(19): siRNA sense strand
cagcagacaguuacaagau

SEQ ID NO: 2002972 - RNA, 19 nt, Homo sapiens
  misc_RNA (1)...(19): siRNA sense strand
gugaaucgacuaaauaugc

SEQ ID NO: 2002973 - RNA, 19 nt, Homo sapiens
  misc_RNA (1)...(19): siRNA sense strand
ccucgaaacagcaccauga

SEQ ID NO: 2002974 - RNA, 19 nt, Homo sapiens
  misc_RNA (1)...(19): siRNA sense strand
augcaagcuugucgauaua

SEQ ID NO: 2002975 - RNA, 19 nt, Homo sapiens
  misc_RNA (1)...(19): siRNA sense strand
ucagagaaagccuuccauu

SEQ ID NO: 2002976 - RNA, 19 nt, Homo sapiens
  misc_RNA (1)...(19): siRNA sense strand
gacacaaccacuugggaaa

SEQ ID NO: 2002977 - RNA, 19 nt, Homo sapiens
  misc_RNA (1)...(19): siRNA sense strand
gaaacagcaccaugaugca

SEQ ID NO: 2002978 - RNA, 19 nt, Homo sapiens
  misc_RNA (1)...(19): siRNA sense strand
cagaugggugacucaaaua

SEQ ID NO: 2002979 - RNA, 19 nt, Homo sapiens
  misc_RNA (1)...(19): siRNA sense strand
uugaaccagugaauaaaga

SEQ ID NO: 2002980 - RNA, 19 nt, Homo sapiens
  misc_RNA (1)...(19): siRNA sense strand
ugaaucgacuaaauaugca

SEQ ID NO: 2002981 - RNA, 19 nt, Homo sapiens
  misc_RNA (1)...(19): siRNA sense strand
gaaagccuuccauuauucu

SEQ ID NO: 2002982 - RNA, 19 nt, Homo sapiens
  misc_RNA (1)...(19): siRNA sense strand
gagcagagccaaggaugag

SEQ ID NO: 2002983 - RNA, 19 nt, Homo sapiens
  misc_RNA (1)...(19): siRNA sense strand
ggucuccacuccugaacca

SEQ ID NO: 2002984 - RNA, 19 nt, Homo sapiens
  misc_RNA (1)...(19): siRNA sense strand
gcaguugugggucuggauu

SEQ ID NO: 2002985 - RNA, 19 nt, Homo sapiens
  misc_RNA (1)...(19): siRNA sense strand
gaagaguuauuuggaaccu

SEQ ID NO: 2002986 - RNA, 19 nt, Homo sapiens
  misc_RNA (1)...(19): siRNA sense strand
ggaugaguaugagaggaau

SEQ ID NO: 2002987 - RNA, 19 nt, Homo sapiens
  misc_RNA (1)...(19): siRNA sense strand
agucucagcuccaggauac

SEQ ID NO: 2002988 - RNA, 19 nt, Homo sapiens
  misc_RNA (1)...(19): siRNA sense strand
gcuccaaccuacacaaucc

SEQ ID NO: 2002989 - RNA, 19 nt, Homo sapiens
  misc_RNA (1)...(19): siRNA sense strand
ggaccuuauucguauaucg

SEQ ID NO: 2002990 - RNA, 19 nt, Homo sapiens
  misc_RNA (1)...(19): siRNA sense strand
ucagcuccaggauacauua

SEQ ID NO: 2002991 - RNA, 19 nt, Homo sapiens
  misc_RNA (1)...(19): siRNA sense strand
auacagacacaaccacuug

SEQ ID NO: 2002992 - RNA, 19 nt, Homo sapiens
  misc_RNA (1)...(19): siRNA sense strand
ccacaggcccaucgacauc

SEQ ID NO: 2002993 - RNA, 19 nt, Homo sapiens
  misc_RNA (1)...(19): siRNA sense strand
ugaccaagaacaaagacaa

SEQ ID NO: 2002994 - RNA, 19 nt, Homo sapiens
  misc_RNA (1)...(19): siRNA sense strand
caucacacaguccaaugaa

SEQ ID NO: 2002995 - RNA, 19 nt, Homo sapiens
  misc_RNA (1)...(19): siRNA sense strand
uaugcacaaucuaguugaa

SEQ ID NO: 2002996 - RNA, 19 nt, Homo sapiens
  misc_RNA (1)...(19): siRNA sense strand
gggaagcaccgagacucua

SEQ ID NO: 2002997 - RNA, 19 nt, Homo sapiens
  misc_RNA (1)...(19): siRNA sense strand
gagaagacugauauagaag

SEQ ID NO: 2002998 - RNA, 19 nt, Homo sapiens
  misc_RNA (1)...(19): siRNA sense strand
caacacgaccccuauauca

SEQ ID NO: 2002999 - RNA, 19 nt, Homo sapiens
  misc_RNA (1)...(19): siRNA sense strand
gccagaaagucagagaaag

SEQ ID NO: 2003000 - RNA, 19 nt, Homo sapiens
  misc_RNA (1)...(19): siRNA sense strand
aaaggaacaaccagcaguu

SEQ ID NO: 2003001 - RNA, 19 nt, Homo sapiens
  misc_RNA (1)...(19): siRNA sense strand
caccugagagcuucauaga

SEQ ID NO: 2003002 - RNA, 19 nt, Homo sapiens
  misc_RNA (1)...(19): siRNA sense strand
cgacuaaauaugcacaauc

SEQ ID NO: 2003003 - RNA, 19 nt, Homo sapiens
  misc_RNA (1)...(19): siRNA sense strand
guauaucgaaggucagcuu

SEQ ID NO: 2003004 - RNA, 19 nt, Homo sapiens
  misc_RNA (1)...(19): siRNA sense strand
cuaguugaaccagugaaua

SEQ ID NO: 2003005 - RNA, 19 nt, Homo sapiens
  misc_RNA (1)...(19): siRNA sense strand
gugcaaugguagccagcuu

SEQ ID NO: 2003006 - RNA, 19 nt, Homo sapiens
  misc_RNA (1)...(19): siRNA sense strand
gagcugggcaggagaugag

SEQ ID NO: 2003007 - RNA, 19 nt, Homo sapiens
  misc_RNA (1)...(19): siRNA sense strand
gaguaugagaggaaucaga

SEQ ID NO: 2003008 - RNA, 19 nt, Homo sapiens
  misc_RNA (1)...(19): siRNA sense strand
gaugggugacucaaauauc

SEQ ID NO: 2003009 - RNA, 19 nt, Homo sapiens
  misc_RNA (1)...(19): siRNA sense strand
cgccagaaagucagagaaa

SEQ ID NO: 2003010 - RNA, 19 nt, Homo sapiens
  misc_RNA (1)...(19): siRNA sense strand
gaccuuauucguauaucga

SEQ ID NO: 2003011 - RNA, 19 nt, Homo sapiens
  misc_RNA (1)...(19): siRNA sense strand
gaccaaauacagacacaac

SEQ ID NO: 2003012 - RNA, 19 nt, Homo sapiens
  misc_RNA (1)...(19): siRNA sense strand
ccaaauacagacacaacca

SEQ ID NO: 2003013 - RNA, 19 nt, Homo sapiens
  misc_RNA (1)...(19): siRNA sense strand
aaguauuugugcagccuaa

SEQ ID NO: 2003014 - RNA, 19 nt, Homo sapiens
  misc_RNA (1)...(19): siRNA sense strand
ggaaacaacucuucacaaa

SEQ ID NO: 2003015 - RNA, 19 nt, Homo sapiens
  misc_RNA (1)...(19): siRNA sense strand
aaacagagcugcugccuuu

SEQ ID NO: 2003016 - RNA, 19 nt, Homo sapiens
  misc_RNA (1)...(19): siRNA sense strand
gacaugaacucucuugaua

SEQ ID NO: 2003017 - RNA, 19 nt, Homo sapiens
  misc_RNA (1)...(19): siRNA sense strand
gaaagaagcuaaugugaag

SEQ ID NO: 2003018 - RNA, 19 nt, Homo sapiens
  misc_RNA (1)...(19): siRNA sense strand
ggaaagaaguggcacaaga

SEQ ID NO: 2003019 - RNA, 19 nt, Homo sapiens
  misc_RNA (1)...(19): siRNA sense strand
gaaggaauguuuagaagau

SEQ ID NO: 2003020 - RNA, 19 nt, Homo sapiens
  misc_RNA (1)...(19): siRNA sense strand
gcaaggcuauugaaauuga

SEQ ID NO: 2003021 - RNA, 19 nt, Homo sapiens
  misc_RNA (1)...(19): siRNA sense strand
cagcaaggcuauugaaauu

SEQ ID NO: 2003022 - RNA, 19 nt, Homo sapiens
  misc_RNA (1)...(19): siRNA sense strand
uaacauggcugcugacauc

SEQ ID NO: 2003023 - RNA, 19 nt, Homo sapiens
  misc_RNA (1)...(19): siRNA sense strand
aaacaacucuucacaaauc

SEQ ID NO: 2003024 - RNA, 19 nt, Homo sapiens
  misc_RNA (1)...(19): siRNA sense strand
gauagagguuuggaacuua

SEQ ID NO: 2003025 - RNA, 19 nt, Homo sapiens
  misc_RNA (1)...(19): siRNA sense strand
agacagaaguugcaaagaa

SEQ ID NO: 2003026 - RNA, 19 nt, Homo sapiens
  misc_RNA (1)...(19): siRNA sense strand
gacagaaguugcaaagaaa

SEQ ID NO: 2003027 - RNA, 19 nt, Homo sapiens
  misc_RNA (1)...(19): siRNA sense strand
caugggaacuauugaagua

SEQ ID NO: 2003028 - RNA, 19 nt, Homo sapiens
  misc_RNA (1)...(19): siRNA sense strand
ggagaaagccauugacaug

SEQ ID NO: 2003029 - RNA, 19 nt, Homo sapiens
  misc_RNA (1)...(19): siRNA sense strand
gaacuuaaucccaaauaug

SEQ ID NO: 2003030 - RNA, 19 nt, Homo sapiens
  misc_RNA (1)...(19): siRNA sense strand
gaagcaagaucuggauaga

SEQ ID NO: 2003031 - RNA, 19 nt, Homo sapiens
  misc_RNA (1)...(19): siRNA sense strand
gauaaagucaucaguuuga

SEQ ID NO: 2003032 - RNA, 19 nt, Homo sapiens
  misc_RNA (1)...(19): siRNA sense strand
ggauagagguuuggaacuu

SEQ ID NO: 2003033 - RNA, 19 nt, Homo sapiens
  misc_RNA (1)...(19): siRNA sense strand
gaagaggucauaaagaaau

SEQ ID NO: 2003034 - RNA, 19 nt, Homo sapiens
  misc_RNA (1)...(19): siRNA sense strand
gcuguuagccgauaaaguu

SEQ ID NO: 2003035 - RNA, 19 nt, Homo sapiens
  misc_RNA (1)...(19): siRNA sense strand
ugacaucgauccucagaau

SEQ ID NO: 2003036 - RNA, 19 nt, Homo sapiens
  misc_RNA (1)...(19): siRNA sense strand
augagaagcuagacaauaa

SEQ ID NO: 2003037 - RNA, 19 nt, Homo sapiens
  misc_RNA (1)...(19): siRNA sense strand
gaaagccauugacauguuc

SEQ ID NO: 2003038 - RNA, 19 nt, Homo sapiens
  misc_RNA (1)...(19): siRNA sense strand
cagauaaugcuacaacaua

SEQ ID NO: 2003039 - RNA, 19 nt, Homo sapiens
  misc_RNA (1)...(19): siRNA sense strand
ugguaaagcugaugaaaug

SEQ ID NO: 2003040 - RNA, 19 nt, Homo sapiens
  misc_RNA (1)...(19): siRNA sense strand
caugaacucucuugauaga

SEQ ID NO: 2003041 - RNA, 19 nt, Homo sapiens
  misc_RNA (1)...(19): siRNA sense strand
uugaagaggucauaaagaa

SEQ ID NO: 2003042 - RNA, 19 nt, Homo sapiens
  misc_RNA (1)...(19): siRNA sense strand
ggagagaaaucugaugaag

SEQ ID NO: 2003043 - RNA, 19 nt, Homo sapiens
  misc_RNA (1)...(19): siRNA sense strand
caacaacaguuugguaaag

SEQ ID NO: 2003044 - RNA, 19 nt, Homo sapiens
  misc_RNA (1)...(19): siRNA sense strand
gcacaagacuguacaaaag

SEQ ID NO: 2003045 - RNA, 19 nt, Homo sapiens
  misc_RNA (1)...(19): siRNA sense strand
guaaagcugaugaaaugua

SEQ ID NO: 2003046 - RNA, 19 nt, Homo sapiens
  misc_RNA (1)...(19): siRNA sense strand
caaaagcuguugaacuuaa

SEQ ID NO: 2003047 - RNA, 19 nt, Homo sapiens
  misc_RNA (1)...(19): siRNA sense strand
gaaaccaugggaacuauug

SEQ ID NO: 2003048 - RNA, 19 nt, Homo sapiens
  misc_RNA (1)...(19): siRNA sense strand
aagaagcaguggcagauuu

SEQ ID NO: 2003049 - RNA, 19 nt, Homo sapiens
  misc_RNA (1)...(19): siRNA sense strand
gcccaucuguauucacuuu

SEQ ID NO: 2003050 - RNA, 19 nt, Homo sapiens
  misc_RNA (1)...(19): siRNA sense strand
gaucaacaacaguuuggua

SEQ ID NO: 2003051 - RNA, 19 nt, Homo sapiens
  misc_RNA (1)...(19): siRNA sense strand
uaacagaucaacaacaguu

SEQ ID NO: 2003052 - RNA, 19 nt, Homo sapiens
  misc_RNA (1)...(19): siRNA sense strand
gaaacaacucuucacaaau

SEQ ID NO: 2003053 - RNA, 19 nt, Homo sapiens
  misc_RNA (1)...(19): siRNA sense strand
agaaagccauugacauguu

SEQ ID NO: 2003054 - RNA, 19 nt, Homo sapiens
  misc_RNA (1)...(19): siRNA sense strand
aagcagcuaugaaagguuu

SEQ ID NO: 2003055 - RNA, 19 nt, Homo sapiens
  misc_RNA (1)...(19): siRNA sense strand
gaggaaacauggagaaagc

SEQ ID NO: 2003056 - RNA, 19 nt, Homo sapiens
  misc_RNA (1)...(19): siRNA sense strand
agaagaauguugaccuuuc

SEQ ID NO: 2003057 - RNA, 19 nt, Homo sapiens
  misc_RNA (1)...(19): siRNA sense strand
cgaaggcuaugcacuauac

SEQ ID NO: 2003058 - RNA, 19 nt, Homo sapiens
  misc_RNA (1)...(19): siRNA sense strand
gcacaagcacagaaauguu

SEQ ID NO: 2003059 - RNA, 19 nt, Homo sapiens
  misc_RNA (1)...(19): siRNA sense strand
ggacaugaacucucuugau

SEQ ID NO: 2003060 - RNA, 19 nt, Homo sapiens
  misc_RNA (1)...(19): siRNA sense strand
cuacagagaagaauguuga

SEQ ID NO: 2003061 - RNA, 19 nt, Homo sapiens
  misc_RNA (1)...(19): siRNA sense strand
gcugaugaaauguaugaua

SEQ ID NO: 2003062 - RNA, 19 nt, Homo sapiens
  misc_RNA (1)...(19): siRNA sense strand
ugaaagaagcuaaugugaa

SEQ ID NO: 2003063 - RNA, 19 nt, Homo sapiens
  misc_RNA (1)...(19): siRNA sense strand
gaaaagagaaagccaaaga

SEQ ID NO: 2003064 - RNA, 19 nt, Homo sapiens
  misc_RNA (1)...(19): siRNA sense strand
aaagagaaagccaaagaaa

SEQ ID NO: 2003065 - RNA, 19 nt, Homo sapiens
  misc_RNA (1)...(19): siRNA sense strand
cuauuaaccuggccaaauc

SEQ ID NO: 2003066 - RNA, 19 nt, Homo sapiens
  misc_RNA (1)...(19): siRNA sense strand
gagagaaaucugaugaaga

SEQ ID NO: 2003067 - RNA, 19 nt, Homo sapiens
  misc_RNA (1)...(19): siRNA sense strand
ccaaaccagauuuagauaa

SEQ ID NO: 2003068 - RNA, 19 nt, Homo sapiens
  misc_RNA (1)...(19): siRNA sense strand
aauagaugcugaaggcaaa

SEQ ID NO: 2003069 - RNA, 19 nt, Homo sapiens
  misc_RNA (1)...(19): siRNA sense strand
ggaaccagauaaugcuaca

SEQ ID NO: 2003070 - RNA, 19 nt, Homo sapiens
  misc_RNA (1)...(19): siRNA sense strand
gcacagaaauguuuugcau

SEQ ID NO: 2003071 - RNA, 19 nt, Homo sapiens
  misc_RNA (1)...(19): siRNA sense strand
gaagcuagacaauaagaag

SEQ ID NO: 2003072 - RNA, 19 nt, Homo sapiens
  misc_RNA (1)...(19): siRNA sense strand
caaaugcucucaucaaaag

SEQ ID NO: 2003073 - RNA, 19 nt, Homo sapiens
  misc_RNA (1)...(19): siRNA sense strand
caugagaagcuagacaaua

SEQ ID NO: 2003074 - RNA, 19 nt, Homo sapiens
  misc_RNA (1)...(19): siRNA sense strand
cacaagcacagaaauguuu

SEQ ID NO: 2003075 - RNA, 19 nt, Homo sapiens
  misc_RNA (1)...(19): siRNA sense strand
caaacaguauauggaagaa

SEQ ID NO: 2003076 - RNA, 19 nt, Homo sapiens
  misc_RNA (1)...(19): siRNA sense strand
ucacugcuguguguauauu

SEQ ID NO: 2003077 - RNA, 19 nt, Homo sapiens
  misc_RNA (1)...(19): siRNA sense strand
gaaagaaguggcacaagac

SEQ ID NO: 2003078 - RNA, 19 nt, Homo sapiens
  misc_RNA (1)...(19): siRNA sense strand
cagaaguugcaaagaaaua

SEQ ID NO: 2003079 - RNA, 19 nt, Homo sapiens
  misc_RNA (1)...(19): siRNA sense strand
guuuggaacuuaucagcaa

SEQ ID NO: 2003080 - RNA, 19 nt, Homo sapiens
  misc_RNA (1)...(19): siRNA sense strand
gaaugcagauguuuaucac

SEQ ID NO: 2003081 - RNA, 19 nt, Homo sapiens
  misc_RNA (1)...(19): siRNA sense strand
gaagaugucacugcugugu

SEQ ID NO: 2003082 - RNA, 19 nt, Homo sapiens
  misc_RNA (1)...(19): siRNA sense strand
gagaagcuagacaauaaga

SEQ ID NO: 2003083 - RNA, 19 nt, Homo sapiens
  misc_RNA (1)...(19): siRNA sense strand
uacaaaagcuguugaacuu

SEQ ID NO: 2003084 - RNA, 19 nt, Homo sapiens
  misc_RNA (1)...(19): siRNA sense strand
gaagaagcaguggcagauu

SEQ ID NO: 2003085 - RNA, 19 nt, Homo sapiens
  misc_RNA (1)...(19): siRNA sense strand
ucaguucuuucacggauga

SEQ ID NO: 2003086 - RNA, 19 nt, Homo sapiens
  misc_RNA (1)...(19): siRNA sense strand
ccaagaauaaaggcaauaa

SEQ ID NO: 2003087 - RNA, 19 nt, Homo sapiens
  misc_RNA (1)...(19): siRNA sense strand
aacaguauauggaagaaga

SEQ ID NO: 2003088 - RNA, 19 nt, Homo sapiens
  misc_RNA (1)...(19): siRNA sense strand
ccaaacaguauauggaaga

SEQ ID NO: 2003089 - RNA, 19 nt, Homo sapiens
  misc_RNA (1)...(19): siRNA sense strand
gagaagaauguugaccuuu

SEQ ID NO: 2003090 - RNA, 19 nt, Homo sapiens
  misc_RNA (1)...(19): siRNA sense strand
ccaagcagccaagaauaaa

SEQ ID NO: 2003091 - RNA, 19 nt, Homo sapiens
  misc_RNA (1)...(19): siRNA sense strand
ggcauuaacagaucaacaa

SEQ ID NO: 2003092 - RNA, 19 nt, Homo sapiens
  misc_RNA (1)...(19): siRNA sense strand
ccaagcagcuaugaaaggu

SEQ ID NO: 2003093 - RNA, 19 nt, Homo sapiens
  misc_RNA (1)...(19): siRNA sense strand
ucacaaauccaagcagcua

SEQ ID NO: 2003094 - RNA, 19 nt, Homo sapiens
  misc_RNA (1)...(19): siRNA sense strand
auacauggcagaagcauug

SEQ ID NO: 2003095 - RNA, 19 nt, Homo sapiens
  misc_RNA (1)...(19): siRNA sense strand
agagaagaauguugaccuu

SEQ ID NO: 2003096 - RNA, 19 nt, Homo sapiens
  misc_RNA (1)...(19): siRNA sense strand
gaaaauacuccuugaucaa

SEQ ID NO: 2003097 - RNA, 19 nt, Homo sapiens
  misc_RNA (1)...(19): siRNA sense strand
cagagcugcugccuuugaa

SEQ ID NO: 2003098 - RNA, 19 nt, Homo sapiens
  misc_RNA (1)...(19): siRNA sense strand
gcccaggcauuaacagauc

SEQ ID NO: 2003099 - RNA, 19 nt, Homo sapiens
  misc_RNA (1)...(19): siRNA sense strand
aacaagcuauucagugcua

SEQ ID NO: 2003100 - RNA, 19 nt, Homo sapiens
  misc_RNA (1)...(19): siRNA sense strand
aagaaggaauguuuagaag

SEQ ID NO: 2003101 - RNA, 19 nt, Homo sapiens
  misc_RNA (1)...(19): siRNA sense strand
gcuauuaaccuggccaaau

SEQ ID NO: 2003102 - RNA, 19 nt, Homo sapiens
  misc_RNA (1)...(19): siRNA sense strand
ggaagcaagaucuggauag

SEQ ID NO: 2003103 - RNA, 19 nt, Homo sapiens
  misc_RNA (1)...(19): siRNA sense strand
gauaaugcuacaacauaug

SEQ ID NO: 2003104 - RNA, 19 nt, Homo sapiens
  misc_RNA (1)...(19): siRNA sense strand
ucagaaugcagauguuuau

SEQ ID NO: 2003105 - RNA, 19 nt, Homo sapiens
  misc_RNA (1)...(19): siRNA sense strand
gcuaccuucuaccugcuua

SEQ ID NO: 2003106 - RNA, 19 nt, Homo sapiens
  misc_RNA (1)...(19): siRNA sense strand
guucuuaaacuccuuggaa

SEQ ID NO: 2003107 - RNA, 19 nt, Homo sapiens
  misc_RNA (1)...(19): siRNA sense strand
ugaugaagauaaagacaag

SEQ ID NO: 2003108 - RNA, 19 nt, Homo sapiens
  misc_RNA (1)...(19): siRNA sense strand
gccgaaggcuaugcacuau

SEQ ID NO: 2003109 - RNA, 19 nt, Homo sapiens
  misc_RNA (1)...(19): siRNA sense strand
gggaaacaacucuucacaa

SEQ ID NO: 2003110 - RNA, 19 nt, Homo sapiens
  misc_RNA (1)...(19): siRNA sense strand
gcauugcuacuacgagcua

SEQ ID NO: 2003111 - RNA, 19 nt, Homo sapiens
  misc_RNA (1)...(19): siRNA sense strand
gagaaagccauugacaugu

SEQ ID NO: 2003112 - RNA, 19 nt, Homo sapiens
  misc_RNA (1)...(19): siRNA sense strand
gcccaagcagccaagaaua

SEQ ID NO: 2003113 - RNA, 19 nt, Homo sapiens
  misc_RNA (1)...(19): siRNA sense strand
aauccaagcagcuaugaaa

SEQ ID NO: 2003114 - RNA, 19 nt, Homo sapiens
  misc_RNA (1)...(19): siRNA sense strand
ugucaaagcgucaagaaua

SEQ ID NO: 2003115 - RNA, 19 nt, Homo sapiens
  misc_RNA (1)...(19): siRNA sense strand
caagugcuccucauccaaa

SEQ ID NO: 2003116 - RNA, 19 nt, Homo sapiens
  misc_RNA (1)...(19): siRNA sense strand
aagaauaccugcggaguuc

SEQ ID NO: 2003117 - RNA, 19 nt, Homo sapiens
  misc_RNA (1)...(19): siRNA sense strand
gaacuggaaggccgcuuga

SEQ ID NO: 2003118 - RNA, 19 nt, Homo sapiens
  misc_RNA (1)...(19): siRNA sense strand
gggcugaccaacacacuuu

SEQ ID NO: 2003119 - RNA, 19 nt, Homo sapiens
  misc_RNA (1)...(19): siRNA sense strand
caagaauaccugcggaguu

SEQ ID NO: 2003120 - RNA, 19 nt, Homo sapiens
  misc_RNA (1)...(19): siRNA sense strand
gacgaugagucuacugagu

SEQ ID NO: 2003121 - RNA, 19 nt, Homo sapiens
  misc_RNA (1)...(19): siRNA sense strand
gucaaagcgucaagaauac

SEQ ID NO: 2003122 - RNA, 19 nt, Homo sapiens
  misc_RNA (1)...(19): siRNA sense strand
aagccacgauugacuucua

SEQ ID NO: 2003123 - RNA, 19 nt, Homo sapiens
  misc_RNA (1)...(19): siRNA sense strand
gcagagaccagggcaucaa

SEQ ID NO: 2003124 - RNA, 19 nt, Homo sapiens
  misc_RNA (1)...(19): siRNA sense strand
ggaaggccgcuugaaccua

SEQ ID NO: 2003125 - RNA, 19 nt, Homo sapiens
  misc_RNA (1)...(19): siRNA sense strand
gcaagugcuccucauccaa

SEQ ID NO: 2003126 - RNA, 19 nt, Homo sapiens
  misc_RNA (1)...(19): siRNA sense strand
gcaagccacgauugacuuc

SEQ ID NO: 2003127 - RNA, 19 nt, Homo sapiens
  misc_RNA (1)...(19): siRNA sense strand
ggcaagugcuccucaucca

SEQ ID NO: 2003128 - RNA, 19 nt, Homo sapiens
  misc_RNA (1)...(19): siRNA sense strand
ucuauuuacccaugucaaa

SEQ ID NO: 2003129 - RNA, 19 nt, Homo sapiens
  misc_RNA (1)...(19): siRNA sense strand
cgaugagucuacugagucu

SEQ ID NO: 2003130 - RNA, 19 nt, Homo sapiens
  misc_RNA (1)...(19): siRNA sense strand
guuucagcauccuguaaga

SEQ ID NO: 2003131 - RNA, 19 nt, Homo sapiens
  misc_RNA (1)...(19): siRNA sense strand
augcugagcugaccagaac

SEQ ID NO: 2003132 - RNA, 19 nt, Homo sapiens
  misc_RNA (1)...(19): siRNA sense strand
gaugcugagcugaccagaa

SEQ ID NO: 2003133 - RNA, 19 nt, Homo sapiens
  misc_RNA (1)...(19): siRNA sense strand
ccagugcaagccacgauug

SEQ ID NO: 2003134 - RNA, 19 nt, Homo sapiens
  misc_RNA (1)...(19): siRNA sense strand
caugucaaagcgucaagaa

SEQ ID NO: 2003135 - RNA, 19 nt, Homo sapiens
  misc_RNA (1)...(19): siRNA sense strand
ggguuucagcauccuguaa

SEQ ID NO: 2003136 - RNA, 19 nt, Homo sapiens
  misc_RNA (1)...(19): siRNA sense strand
gaaaugaaccugccaauga

SEQ ID NO: 2003137 - RNA, 19 nt, Homo sapiens
  misc_RNA (1)...(19): siRNA sense strand
gaacaaugcuguccaaucu

SEQ ID NO: 2003138 - RNA, 19 nt, Homo sapiens
  misc_RNA (1)...(19): siRNA sense strand
aaacagaaauucccacuug

SEQ ID NO: 2003139 - RNA, 19 nt, Homo sapiens
  misc_RNA (1)...(19): siRNA sense strand
ggaauggucugcuucuuug

SEQ ID NO: 2003140 - RNA, 19 nt, Homo sapiens
  misc_RNA (1)...(19): siRNA sense strand
cagaugaccucuuaauaaa

SEQ ID NO: 2003141 - RNA, 19 nt, Homo sapiens
  misc_RNA (1)...(19): siRNA sense strand
ggaauugcauugguucaua

SEQ ID NO: 2003142 - RNA, 19 nt, Homo sapiens
  misc_RNA (1)...(19): siRNA sense strand
gagaugaguuugaagaguu

SEQ ID NO: 2003143 - RNA, 19 nt, Homo sapiens
  misc_RNA (1)...(19): siRNA sense strand
gaggaugacuccaguguga

SEQ ID NO: 2003144 - RNA, 19 nt, Homo sapiens
  misc_RNA (1)...(19): siRNA sense strand
acaaagaaguguucaaaga

SEQ ID NO: 2003145 - RNA, 19 nt, Homo sapiens
  misc_RNA (1)...(19): siRNA sense strand
gggagaaauuccuugguua

SEQ ID NO: 2003146 - RNA, 19 nt, Homo sapiens
  misc_RNA (1)...(19): siRNA sense strand
acaauaaccuggaggauga

SEQ ID NO: 2003147 - RNA, 19 nt, Homo sapiens
  misc_RNA (1)...(19): siRNA sense strand
guuagauucuguaccauua

SEQ ID NO: 2003148 - RNA, 19 nt, Homo sapiens
  misc_RNA (1)...(19): siRNA sense strand
agaauuaucucuucaggaa

SEQ ID NO: 2003149 - RNA, 19 nt, Homo sapiens
  misc_RNA (1)...(19): siRNA sense strand
ugacaaagaugaagauagu

SEQ ID NO: 2003150 - RNA, 19 nt, Homo sapiens
  misc_RNA (1)...(19): siRNA sense strand
gagagaggcuuuggaaguu

SEQ ID NO: 2003151 - RNA, 19 nt, Homo sapiens
  misc_RNA (1)...(19): siRNA sense strand
gaaugaaccugagcuacaa

SEQ ID NO: 2003152 - RNA, 19 nt, Homo sapiens
  misc_RNA (1)...(19): siRNA sense strand
ucagaugaccucuuaauaa

SEQ ID NO: 2003153 - RNA, 19 nt, Homo sapiens
  misc_RNA (1)...(19): siRNA sense strand
gugaguauauuaaggauga

SEQ ID NO: 2003154 - RNA, 19 nt, Homo sapiens
  misc_RNA (1)...(19): siRNA sense strand
caaaugacaucagaaagug

SEQ ID NO: 2003155 - RNA, 19 nt, Homo sapiens
  misc_RNA (1)...(19): siRNA sense strand
gaaauuccuugguuacagu

SEQ ID NO: 2003156 - RNA, 19 nt, Homo sapiens
  misc_RNA (1)...(19): siRNA sense strand
gaagauaguucugaaugca

SEQ ID NO: 2003157 - RNA, 19 nt, Homo sapiens
  misc_RNA (1)...(19): siRNA sense strand
gaauggcuguggagauuau

SEQ ID NO: 2003158 - RNA, 19 nt, Homo sapiens
  misc_RNA (1)...(19): siRNA sense strand
guagauaccaggaaucauu

SEQ ID NO: 2003159 - RNA, 19 nt, Homo sapiens
  misc_RNA (1)...(19): siRNA sense strand
uggcucagaugaccucuua

SEQ ID NO: 2003160 - RNA, 19 nt, Homo sapiens
  misc_RNA (1)...(19): siRNA sense strand
gaagaucacacugcuauug

SEQ ID NO: 2003161 - RNA, 19 nt, Homo sapiens
  misc_RNA (1)...(19): siRNA sense strand
agacugcucuggcccauuu

SEQ ID NO: 2003162 - RNA, 19 nt, Homo sapiens
  misc_RNA (1)...(19): siRNA sense strand
gagcaugacuguauguucu

SEQ ID NO: 2003163 - RNA, 19 nt, Homo sapiens
  misc_RNA (1)...(19): siRNA sense strand
ccagugaaccuauauuuga

SEQ ID NO: 2003164 - RNA, 19 nt, Homo sapiens
  misc_RNA (1)...(19): siRNA sense strand
gcaaacauggagaagauaa

SEQ ID NO: 2003165 - RNA, 19 nt, Homo sapiens
  misc_RNA (1)...(19): siRNA sense strand
caggagauauggaagaaga

SEQ ID NO: 2003166 - RNA, 19 nt, Homo sapiens
  misc_RNA (1)...(19): siRNA sense strand
aaaugaaccugccaaugaa

SEQ ID NO: 2003167 - RNA, 19 nt, Homo sapiens
  misc_RNA (1)...(19): siRNA sense strand
aaagaaguguucaaagaug

SEQ ID NO: 2003168 - RNA, 19 nt, Homo sapiens
  misc_RNA (1)...(19): siRNA sense strand
ugagagcagucaauccuuu

SEQ ID NO: 2003169 - RNA, 19 nt, Homo sapiens
  misc_RNA (1)...(19): siRNA sense strand
ggaaagcauugauggucuu

SEQ ID NO: 2003170 - RNA, 19 nt, Homo sapiens
  misc_RNA (1)...(19): siRNA sense strand
gggagacucugccaggaaa

SEQ ID NO: 2003171 - RNA, 19 nt, Homo sapiens
  misc_RNA (1)...(19): siRNA sense strand
gcaguacaaaucuucauaa

SEQ ID NO: 2003172 - RNA, 19 nt, Homo sapiens
  misc_RNA (1)...(19): siRNA sense strand
cagagacccuuguucuuga

SEQ ID NO: 2003173 - RNA, 19 nt, Homo sapiens
  misc_RNA (1)...(19): siRNA sense strand
ggagagaggcuuuggaagu

SEQ ID NO: 2003174 - RNA, 19 nt, Homo sapiens
  misc_RNA (1)...(19): siRNA sense strand
ugaaaugguuaguacgaaa

SEQ ID NO: 2003175 - RNA, 19 nt, Homo sapiens
  misc_RNA (1)...(19): siRNA sense strand
gauuggagccuauuugaug

SEQ ID NO: 2003176 - RNA, 19 nt, Homo sapiens
  misc_RNA (1)...(19): siRNA sense strand
aaagaucaauccucaagug

SEQ ID NO: 2003177 - RNA, 19 nt, Homo sapiens
  misc_RNA (1)...(19): siRNA sense strand
uagaugauguuccaaagga

SEQ ID NO: 2003178 - RNA, 19 nt, Homo sapiens
  misc_RNA (1)...(19): siRNA sense strand
gauaacaccuuuuggaaug

SEQ ID NO: 2003179 - RNA, 19 nt, Homo sapiens
  misc_RNA (1)...(19): siRNA sense strand
agaaguggauaacaccuuu

SEQ ID NO: 2003180 - RNA, 19 nt, Homo sapiens
  misc_RNA (1)...(19): siRNA sense strand
cuacauggcacuagaagaa

SEQ ID NO: 2003181 - RNA, 19 nt, Homo sapiens
  misc_RNA (1)...(19): siRNA sense strand
cagugugagugaagacuua

SEQ ID NO: 2003182 - RNA, 19 nt, Homo sapiens
  misc_RNA (1)...(19): siRNA sense strand
gggaauggucugcuucuuu

SEQ ID NO: 2003183 - RNA, 19 nt, Homo sapiens
  misc_RNA (1)...(19): siRNA sense strand
aaccugagcuacaaaguga

SEQ ID NO: 2003184 - RNA, 19 nt, Homo sapiens
  misc_RNA (1)...(19): siRNA sense strand
ugaaguaagagaugaguuu

SEQ ID NO: 2003185 - RNA, 19 nt, Homo sapiens
  misc_RNA (1)...(19): siRNA sense strand
gcaggaggguaucagacaa

SEQ ID NO: 2003186 - RNA, 19 nt, Homo sapiens
  misc_RNA (1)...(19): siRNA sense strand
gagaggcuuuggaaguuga

SEQ ID NO: 2003187 - RNA, 19 nt, Homo sapiens
  misc_RNA (1)...(19): siRNA sense strand
ggcauacacuggucuuuca

SEQ ID NO: 2003188 - RNA, 19 nt, Homo sapiens
  misc_RNA (1)...(19): siRNA sense strand
gcagugaguauauuaagga

SEQ ID NO: 2003189 - RNA, 19 nt, Homo sapiens
  misc_RNA (1)...(19): siRNA sense strand
cagcagcaauggaccaaga

SEQ ID NO: 2003190 - RNA, 19 nt, Homo sapiens
  misc_RNA (1)...(19): siRNA sense strand
acagccagcuuucauguug

SEQ ID NO: 2003191 - RNA, 19 nt, Homo sapiens
  misc_RNA (1)...(19): siRNA sense strand
acaaugaagucaaugaaag

SEQ ID NO: 2003192 - RNA, 19 nt, Homo sapiens
  misc_RNA (1)...(19): siRNA sense strand
caaagaaguguucaaagau

SEQ ID NO: 2003193 - RNA, 19 nt, Homo sapiens
  misc_RNA (1)...(19): siRNA sense strand
caagaguuauuacacaaag

SEQ ID NO: 2003194 - RNA, 19 nt, Homo sapiens
  misc_RNA (1)...(19): siRNA sense strand
gaguugcccugucaccauu

SEQ ID NO: 2003195 - RNA, 19 nt, Homo sapiens
  misc_RNA (1)...(19): siRNA sense strand
gcagauggacuaggaguug

SEQ ID NO: 2003196 - RNA, 19 nt, Homo sapiens
  misc_RNA (1)...(19): siRNA sense strand
uggaauggcuguggagauu

SEQ ID NO: 2003197 - RNA, 19 nt, Homo sapiens
  misc_RNA (1)...(19): siRNA sense strand
caagccagguggaccaaga

SEQ ID NO: 2003198 - RNA, 19 nt, Homo sapiens
  misc_RNA (1)...(19): siRNA sense strand
gcaguggcccugaagaaga

SEQ ID NO: 2003199 - RNA, 19 nt, Homo sapiens
  misc_RNA (1)...(19): siRNA sense strand
gaaccugagcuacaaagug

SEQ ID NO: 2003200 - RNA, 19 nt, Homo sapiens
  misc_RNA (1)...(19): siRNA sense strand
gaaggcaagaaguggauaa

SEQ ID NO: 2003201 - RNA, 19 nt, Homo sapiens
  misc_RNA (1)...(19): siRNA sense strand
gcagaagucguggaaggua

SEQ ID NO: 2003202 - RNA, 19 nt, Homo sapiens
  misc_RNA (1)...(19): siRNA sense strand
ccaaaugacaucagaaagu

SEQ ID NO: 2003203 - RNA, 19 nt, Homo sapiens
  misc_RNA (1)...(19): siRNA sense strand
ggaagaagacaugcuuaug

SEQ ID NO: 2003204 - RNA, 19 nt, Homo sapiens
  misc_RNA (1)...(19): siRNA sense strand
guagugaggccaaaaguua

SEQ ID NO: 2003205 - RNA, 19 nt, Homo sapiens
  misc_RNA (1)...(19): siRNA sense strand
gaaagacagacagaacauu

SEQ ID NO: 2003206 - RNA, 19 nt, Homo sapiens
  misc_RNA (1)...(19): siRNA sense strand
agaugaguuugaagaguua

SEQ ID NO: 2003207 - RNA, 19 nt, Homo sapiens
  misc_RNA (1)...(19): siRNA sense strand
uaagagaugaguuugaaga

SEQ ID NO: 2003208 - RNA, 19 nt, Homo sapiens
  misc_RNA (1)...(19): siRNA sense strand
cagugaaccuauauuugaa

SEQ ID NO: 2003209 - RNA, 19 nt, Homo sapiens
  misc_RNA (1)...(19): siRNA sense strand
ccagagacccuuguucuug

SEQ ID NO: 2003210 - RNA, 19 nt, Homo sapiens
  misc_RNA (1)...(19): siRNA sense strand
ccaacucuaugacaaagau

SEQ ID NO: 2003211 - RNA, 19 nt, Homo sapiens
  misc_RNA (1)...(19): siRNA sense strand
gggcauauuuguagugaac

SEQ ID NO: 2003212 - RNA, 19 nt, Homo sapiens
  misc_RNA (1)...(19): siRNA sense strand
caagaugaaaugguuagua

SEQ ID NO: 2003213 - RNA, 19 nt, Homo sapiens
  misc_RNA (1)...(19): siRNA sense strand
gaguuuguccaucagaaua

SEQ ID NO: 2003214 - RNA, 19 nt, Homo sapiens
  misc_RNA (1)...(19): siRNA sense strand
uggcaaacauggagaagau

SEQ ID NO: 2003215 - RNA, 19 nt, Homo sapiens
  misc_RNA (1)...(19): siRNA sense strand
gaauugcauugguucauac

SEQ ID NO: 2003216 - RNA, 19 nt, Homo sapiens
  misc_RNA (1)...(19): siRNA sense strand
ucaauccuuuguugcagua

SEQ ID NO: 2003217 - RNA, 19 nt, Homo sapiens
  misc_RNA (1)...(19): siRNA sense strand
gaagagggagaaauuccuu

SEQ ID NO: 2003218 - RNA, 19 nt, Homo sapiens
  misc_RNA (1)...(19): siRNA sense strand
gaaaagaaccauggaaguu

SEQ ID NO: 2003219 - RNA, 19 nt, Homo sapiens
  misc_RNA (1)...(19): siRNA sense strand
auacugaguuuguccauca

SEQ ID NO: 2003220 - RNA, 19 nt, Homo sapiens
  misc_RNA (1)...(19): siRNA sense strand
aguaagagaugaguuugaa

SEQ ID NO: 2003221 - RNA, 19 nt, Homo sapiens
  misc_RNA (1)...(19): siRNA sense strand
uaaugaccaucuucaacuu

SEQ ID NO: 2003222 - RNA, 19 nt, Homo sapiens
  misc_RNA (1)...(19): siRNA sense strand
ggaggguaucagacaauua

SEQ ID NO: 2003223 - RNA, 19 nt, Homo sapiens
  misc_RNA (1)...(19): siRNA sense strand
gcacagccagcuuucaugu

SEQ ID NO: 2003224 - RNA, 19 nt, Homo sapiens
  misc_RNA (1)...(19): siRNA sense strand
ggaaaugaaccugccaaug

SEQ ID NO: 2003225 - RNA, 19 nt, Homo sapiens
  misc_RNA (1)...(19): siRNA sense strand
guacaaugaagucaaugaa

SEQ ID NO: 2003226 - RNA, 19 nt, Homo sapiens
  misc_RNA (1)...(19): siRNA sense strand
acacaaagggaaacagaaa

SEQ ID NO: 2003227 - RNA, 19 nt, Homo sapiens
  misc_RNA (1)...(19): siRNA sense strand
caaguugauucuucuuuac

SEQ ID NO: 2003228 - RNA, 19 nt, Homo sapiens
  misc_RNA (1)...(19): siRNA sense strand
ggaacaaugcuguccaauc

SEQ ID NO: 2003229 - RNA, 19 nt, Homo sapiens
  misc_RNA (1)...(19): siRNA sense strand
ggcaggagauauggaagaa

SEQ ID NO: 2003230 - RNA, 19 nt, Homo sapiens
  misc_RNA (1)...(19): siRNA sense strand
gcagugaugagggaaauga

SEQ ID NO: 2003231 - RNA, 19 nt, Homo sapiens
  misc_RNA (1)...(19): siRNA sense strand
ggaacagacauccuuggaa

SEQ ID NO: 2003232 - RNA, 19 nt, Homo sapiens
  misc_RNA (1)...(19): siRNA sense strand
ggaauggcuguggagauua

SEQ ID NO: 2003233 - RNA, 19 nt, Homo sapiens
  misc_RNA (1)...(19): siRNA sense strand
agaguuagauucuguacca

SEQ ID NO: 2003234 - RNA, 19 nt, Homo sapiens
  misc_RNA (1)...(19): siRNA sense strand
gaaguaagagaugaguuug

SEQ ID NO: 2003235 - RNA, 19 nt, Homo sapiens
  misc_RNA (1)...(19): siRNA sense strand
uagauaccaggaaucauua

SEQ ID NO: 2003236 - RNA, 19 nt, Homo sapiens
  misc_RNA (1)...(19): siRNA sense strand
ggaagcaucucucuuagca

SEQ ID NO: 2003237 - RNA, 19 nt, Homo sapiens
  misc_RNA (1)...(19): siRNA sense strand
gcaaugacccuucccuaga

SEQ ID NO: 2003238 - RNA, 19 nt, Homo sapiens
  misc_RNA (1)...(19): siRNA sense strand
caagaguucuggagagaga

SEQ ID NO: 2003239 - RNA, 19 nt, Homo sapiens
  misc_RNA (1)...(19): siRNA sense strand
ugagagcccuauuccagua

SEQ ID NO: 2003240 - RNA, 19 nt, Homo sapiens
  misc_RNA (1)...(19): siRNA sense strand
gaccugaacuccagaaagg

SEQ ID NO: 2003241 - RNA, 19 nt, Homo sapiens
  misc_RNA (1)...(19): siRNA sense strand
ggacagugguaucagaauc

SEQ ID NO: 2003242 - RNA, 19 nt, Homo sapiens
  misc_RNA (1)...(19): siRNA sense strand
gcaaagaacagagcucaug

SEQ ID NO: 2003243 - RNA, 19 nt, Homo sapiens
  misc_RNA (1)...(19): siRNA sense strand
gcauuuaacuggaggaacu

SEQ ID NO: 2003244 - RNA, 19 nt, Homo sapiens
  misc_RNA (1)...(19): siRNA sense strand
gaggcaaauuucaacauug

SEQ ID NO: 2003245 - RNA, 19 nt, Homo sapiens
  misc_RNA (1)...(19): siRNA sense strand
cacggaagcaucucucuua

SEQ ID NO: 2003246 - RNA, 19 nt, Homo sapiens
  misc_RNA (1)...(19): siRNA sense strand
aguggaaccuggaaucuuu

SEQ ID NO: 2003247 - RNA, 19 nt, Homo sapiens
  misc_RNA (1)...(19): siRNA sense strand
gcugagcaauuuaacuaga

SEQ ID NO: 2003248 - RNA, 19 nt, Homo sapiens
  misc_RNA (1)...(19): siRNA sense strand
agaaucagcucuguguuug

SEQ ID NO: 2003249 - RNA, 19 nt, Homo sapiens
  misc_RNA (1)...(19): siRNA sense strand
gaaccuggaaucuuugaau

SEQ ID NO: 2003250 - RNA, 19 nt, Homo sapiens
  misc_RNA (1)...(19): siRNA sense strand
caaacggcaaggagucuua

SEQ ID NO: 2003251 - RNA, 19 nt, Homo sapiens
  misc_RNA (1)...(19): siRNA sense strand
agaggcaaauuucaacauu

SEQ ID NO: 2003252 - RNA, 19 nt, Homo sapiens
  misc_RNA (1)...(19): siRNA sense strand
caaagaacagagcucauga

SEQ ID NO: 2003253 - RNA, 19 nt, Homo sapiens
  misc_RNA (1)...(19): siRNA sense strand
ggugucauccuaauuguga

SEQ ID NO: 2003254 - RNA, 19 nt, Homo sapiens
  misc_RNA (1)...(19): siRNA sense strand
gcucuccacuccuccauca

SEQ ID NO: 2003255 - RNA, 19 nt, Homo sapiens
  misc_RNA (1)...(19): siRNA sense strand
aggcauggcugcagcaaug

SEQ ID NO: 2003256 - RNA, 19 nt, Homo sapiens
  misc_RNA (1)...(19): siRNA sense strand
cgugaagccuugcaccaaa

SEQ ID NO: 2003257 - RNA, 19 nt, Homo sapiens
  misc_RNA (1)...(19): siRNA sense strand
gcacucuacucccgagaca

SEQ ID NO: 2003258 - RNA, 19 nt, Homo sapiens
  misc_RNA (1)...(19): siRNA sense strand
caaggagucuuagcagcuu

SEQ ID NO: 2003259 - RNA, 19 nt, Homo sapiens
  misc_RNA (1)...(19): siRNA sense strand
gauguacaccuucagucua

SEQ ID NO: 2003260 - RNA, 19 nt, Homo sapiens
  misc_RNA (1)...(19): siRNA sense strand
gggcgaacgcagcauuuaa

SEQ ID NO: 2003261 - RNA, 19 nt, Homo sapiens
  misc_RNA (1)...(19): siRNA sense strand
ccaaacucauccuggaaga

SEQ ID NO: 2003262 - RNA, 19 nt, Homo sapiens
  misc_RNA (1)...(19): siRNA sense strand
gacacucugugacuucuuc

SEQ ID NO: 2003263 - RNA, 19 nt, Homo sapiens
  misc_RNA (1)...(19): siRNA sense strand
uggaugagcugacgcuaag

SEQ ID NO: 2003264 - RNA, 19 nt, Homo sapiens
  misc_RNA (1)...(19): siRNA sense strand
gggagagaguggaucagau

SEQ ID NO: 2003265 - RNA, 19 nt, Homo sapiens
  misc_RNA (1)...(19): siRNA sense strand
gaagguggaaugccuguac

SEQ ID NO: 2003266 - RNA, 19 nt, Homo sapiens
  misc_RNA (1)...(19): siRNA sense strand
gcccaacucgugagaaaga

SEQ ID NO: 2003267 - RNA, 19 nt, Homo sapiens
  misc_RNA (1)...(19): siRNA sense strand
gcagacggccaaacucauc

SEQ ID NO: 2003268 - RNA, 19 nt, Homo sapiens
  misc_RNA (1)...(19): siRNA sense strand
gcaccaaacagcugcaucu

SEQ ID NO: 2003269 - RNA, 19 nt, Homo sapiens
  misc_RNA (1)...(19): siRNA sense strand
guuucccgcuucuggauuu

SEQ ID NO: 2003270 - RNA, 19 nt, Homo sapiens
  misc_RNA (1)...(19): siRNA sense strand
caaugacccuucccuagac

SEQ ID NO: 2003271 - RNA, 19 nt, Homo sapiens
  misc_RNA (1)...(19): siRNA sense strand
gagcugaaagaggcaaauu

SEQ ID NO: 2003272 - RNA, 19 nt, Homo sapiens
  misc_RNA (1)...(19): siRNA sense strand
gaaaaugggaguuggugaa

SEQ ID NO: 2003273 - RNA, 19 nt, Homo sapiens
  misc_RNA (1)...(19): siRNA sense strand
caacauugacacugauuac

SEQ ID NO: 2003274 - RNA, 19 nt, Homo sapiens
  misc_RNA (1)...(19): siRNA sense strand
guacgaggcgcugaagaga

SEQ ID NO: 2003275 - RNA, 19 nt, Homo sapiens
  misc_RNA (1)...(19): siRNA sense strand
ccuggaaucuuugaaugga

SEQ ID NO: 2003276 - RNA, 19 nt, Homo sapiens
  misc_RNA (1)...(19): siRNA sense strand
uggccuggcugcaugauca

SEQ ID NO: 2003277 - RNA, 19 nt, Homo sapiens
  misc_RNA (1)...(19): siRNA sense strand
aggcugagcaauuuaacua

SEQ ID NO: 2003278 - RNA, 19 nt, Homo sapiens
  misc_RNA (1)...(19): siRNA sense strand
gggcaugugcuucugugaa

SEQ ID NO: 2003279 - RNA, 19 nt, Homo sapiens
  misc_RNA (1)...(19): siRNA sense strand
gcaaugcuccacuccugau

SEQ ID NO: 2003280 - RNA, 19 nt, Homo sapiens
  misc_RNA (1)...(19): siRNA sense strand
ggauguacaccuucagucu

SEQ ID NO: 2003281 - RNA, 19 nt, Homo sapiens
  misc_RNA (1)...(19): siRNA sense strand
gaagagcgugcuggugguu

SEQ ID NO: 2003282 - RNA, 19 nt, Homo sapiens
  misc_RNA (1)...(19): siRNA sense strand
gaagccagcagcagaugca

SEQ ID NO: 2003283 - RNA, 19 nt, Homo sapiens
  misc_RNA (1)...(19): siRNA sense strand
acgccaaggucuccaacaa

SEQ ID NO: 2003284 - RNA, 19 nt, Homo sapiens
  misc_RNA (1)...(19): siRNA sense strand
gacagugguaucagaauca

SEQ ID NO: 2003285 - RNA, 19 nt, Homo sapiens
  misc_RNA (1)...(19): siRNA sense strand
ccuggugacuacaucuuug

SEQ ID NO: 2003286 - RNA, 19 nt, Homo sapiens
  misc_RNA (1)...(19): siRNA sense strand
gggugaagcacaggaugua

SEQ ID NO: 2003287 - RNA, 19 nt, Homo sapiens
  misc_RNA (1)...(19): siRNA sense strand
ggagucgugggaucaaaga

SEQ ID NO: 2003288 - RNA, 19 nt, Homo sapiens
  misc_RNA (1)...(19): siRNA sense strand
aaccugaggcugagcaauu

SEQ ID NO: 2003289 - RNA, 19 nt, Homo sapiens
  misc_RNA (1)...(19): siRNA sense strand
aaccuggaaucuuugaaug

SEQ ID NO: 2003290 - RNA, 19 nt, Homo sapiens
  misc_RNA (1)...(19): siRNA sense strand
gaacucaaacuggagaaaa

SEQ ID NO: 2003291 - RNA, 19 nt, Homo sapiens
  misc_RNA (1)...(19): siRNA sense strand
acacggaucgagccaguga

SEQ ID NO: 2003292 - RNA, 19 nt, Homo sapiens
  misc_RNA (1)...(19): siRNA sense strand
gcacuaccagacccugaga

SEQ ID NO: 2003293 - RNA, 19 nt, Homo sapiens
  misc_RNA (1)...(19): siRNA sense strand
gcagacgucauccgggaau

SEQ ID NO: 2003294 - RNA, 19 nt, Homo sapiens
  misc_RNA (1)...(19): siRNA sense strand
uugcccaacucgugagaaa

SEQ ID NO: 2003295 - RNA, 19 nt, Homo sapiens
  misc_RNA (1)...(19): siRNA sense strand
cggcgagcauggugcaaau

SEQ ID NO: 2003296 - RNA, 19 nt, Homo sapiens
  misc_RNA (1)...(19): siRNA sense strand
cacaggauguacaccuuca

SEQ ID NO: 2003297 - RNA, 19 nt, Homo sapiens
  misc_RNA (1)...(19): siRNA sense strand
guggaugagcugacgcuaa

SEQ ID NO: 2003298 - RNA, 19 nt, Homo sapiens
  misc_RNA (1)...(19): siRNA sense strand
ucagcuaccucggcuucuu

SEQ ID NO: 2003299 - RNA, 19 nt, Homo sapiens
  misc_RNA (1)...(19): siRNA sense strand
cauccuggaagaacucaaa

SEQ ID NO: 2003300 - RNA, 19 nt, Homo sapiens
  misc_RNA (1)...(19): siRNA sense strand
ccacuccugaugggaaaua

SEQ ID NO: 2003301 - RNA, 19 nt, Homo sapiens
  misc_RNA (1)...(19): siRNA sense strand
ggaucgagccagugagucu

SEQ ID NO: 2003302 - RNA, 19 nt, Homo sapiens
  misc_RNA (1)...(19): siRNA sense strand
gaaaauaaagaggaaggaa

SEQ ID NO: 2003303 - RNA, 19 nt, Homo sapiens
  misc_RNA (1)...(19): siRNA sense strand
gugcagacggccaaacuca

SEQ ID NO: 2003304 - RNA, 19 nt, Homo sapiens
  misc_RNA (1)...(19): siRNA sense strand
gucgugggaucaaagacuu

SEQ ID NO: 2003305 - RNA, 19 nt, Homo sapiens
  misc_RNA (1)...(19): siRNA sense strand
gcaagcgccagugugcaaa

SEQ ID NO: 2003306 - RNA, 19 nt, Homo sapiens
  misc_RNA (1)...(19): siRNA sense strand
gccacuacauccuucaaaa

SEQ ID NO: 2003307 - RNA, 19 nt, Homo sapiens
  misc_RNA (1)...(19): siRNA sense strand
gaguggaaccuggaaucuu

SEQ ID NO: 2003308 - RNA, 19 nt, Homo sapiens
  misc_RNA (1)...(19): siRNA sense strand
aggcuaccguugcaaggaa

SEQ ID NO: 2003309 - RNA, 19 nt, Homo sapiens
  misc_RNA (1)...(19): siRNA sense strand
aaggagucuuagcagcuua

SEQ ID NO: 2003310 - RNA, 19 nt, Homo sapiens
  misc_RNA (1)...(19): siRNA sense strand
gaugagcugacgcuaaguc

SEQ ID NO: 2003311 - RNA, 19 nt, Homo sapiens
  misc_RNA (1)...(19): siRNA sense strand
accugaggcugagcaauuu

SEQ ID NO: 2003312 - RNA, 19 nt, Homo sapiens
  misc_RNA (1)...(19): siRNA sense strand
gagccuggaagagcugaaa

SEQ ID NO: 2003313 - RNA, 19 nt, Homo sapiens
  misc_RNA (1)...(19): siRNA sense strand
caaacucauccuggaagaa

SEQ ID NO: 2003314 - RNA, 19 nt, Homo sapiens
  misc_RNA (1)...(19): siRNA sense strand
ggucuucccacacgugaca

SEQ ID NO: 2003315 - RNA, 19 nt, Homo sapiens
  misc_RNA (1)...(19): siRNA sense strand
gugaagccuugcaccaaac

SEQ ID NO: 2003316 - RNA, 19 nt, Homo sapiens
  misc_RNA (1)...(19): siRNA sense strand
ggccaaacucauccuggaa

SEQ ID NO: 2003317 - RNA, 19 nt, Homo sapiens
  misc_RNA (1)...(19): siRNA sense strand
gggaauucgccaugaccuu

SEQ ID NO: 2003318 - RNA, 19 nt, Homo sapiens
  misc_RNA (1)...(19): siRNA sense strand
gcgccagugugcaaagaac

SEQ ID NO: 2003319 - RNA, 19 nt, Homo sapiens
  misc_RNA (1)...(19): siRNA sense strand
ggugaagccagcagcagau

SEQ ID NO: 2003320 - RNA, 19 nt, Homo sapiens
  misc_RNA (1)...(19): siRNA sense strand
gagcccuauuccaguacaa

SEQ ID NO: 2003321 - RNA, 19 nt, Homo sapiens
  misc_RNA (1)...(19): siRNA sense strand
ccacggaagcaucucucuu

SEQ ID NO: 2003322 - RNA, 19 nt, Homo sapiens
  misc_RNA (1)...(19): siRNA sense strand
gcaaauaccuggauuaccu

SEQ ID NO: 2003323 - RNA, 19 nt, Homo sapiens
  misc_RNA (1)...(19): siRNA sense strand
aggcggaccucaucgaauu

SEQ ID NO: 2003324 - RNA, 19 nt, Homo sapiens
  misc_RNA (1)...(19): siRNA sense strand
gagcucagccugcgcaaca

SEQ ID NO: 2003325 - RNA, 19 nt, Homo sapiens
  misc_RNA (1)...(19): siRNA sense strand
gcagcgauuugccgacuag

SEQ ID NO: 2003326 - RNA, 19 nt, Homo sapiens
  misc_RNA (1)...(19): siRNA sense strand
gaggcaaauaccuggauua

SEQ ID NO: 2003327 - RNA, 19 nt, Homo sapiens
  misc_RNA (1)...(19): siRNA sense strand
cccuagaccugcacaagaa

SEQ ID NO: 2003328 - RNA, 19 nt, Homo sapiens
  misc_RNA (1)...(19): siRNA sense strand
gcaaccugcucuaccuaca

SEQ ID NO: 2003329 - RNA, 19 nt, Homo sapiens
  misc_RNA (1)...(19): siRNA sense strand
ggcuggaccugcaguacaa

SEQ ID NO: 2003330 - RNA, 19 nt, Homo sapiens
  misc_RNA (1)...(19): siRNA sense strand
caucacggccuucgacuuc

SEQ ID NO: 2003331 - RNA, 19 nt, Homo sapiens
  misc_RNA (1)...(19): siRNA sense strand
cgaggcaaauaccuggauu

SEQ ID NO: 2003332 - RNA, 19 nt, Homo sapiens
  misc_RNA (1)...(19): siRNA sense strand
gaacgccuucgcccagcua

SEQ ID NO: 2003333 - RNA, 19 nt, Homo sapiens
  misc_RNA (1)...(19): siRNA sense strand
gcaacuucauaaccaacau

SEQ ID NO: 2003334 - RNA, 19 nt, Homo sapiens
  misc_RNA (1)...(19): siRNA sense strand
gcaagcugcgcauccucua

SEQ ID NO: 2003335 - RNA, 19 nt, Homo sapiens
  misc_RNA (1)...(19): siRNA sense strand
acaaguucauucugugcaa

SEQ ID NO: 2003336 - RNA, 19 nt, Homo sapiens
  misc_RNA (1)...(19): siRNA sense strand
gcggcaacuucauaaccaa

SEQ ID NO: 2003337 - RNA, 19 nt, Homo sapiens
  misc_RNA (1)...(19): siRNA sense strand
ggcggcaacuucauaacca

SEQ ID NO: 2003338 - RNA, 19 nt, Homo sapiens
  misc_RNA (1)...(19): siRNA sense strand
uuuaucggcuggaucuaga

SEQ ID NO: 2003339 - RNA, 19 nt, Homo sapiens
  misc_RNA (1)...(19): siRNA sense strand
gcuuccgccugcucuuuga

SEQ ID NO: 2003340 - RNA, 19 nt, Homo sapiens
  misc_RNA (1)...(19): siRNA sense strand
caucuccugugcaccaaca

SEQ ID NO: 2003341 - RNA, 19 nt, Homo sapiens
  misc_RNA (1)...(19): siRNA sense strand
auaccuggauuaccuggau

SEQ ID NO: 2003342 - RNA, 19 nt, Homo sapiens
  misc_RNA (1)...(19): siRNA sense strand
gcgcuuccgccugcucuuu

SEQ ID NO: 2003343 - RNA, 19 nt, Homo sapiens
  misc_RNA (1)...(19): siRNA sense strand
uucaacaaguucauucugu

SEQ ID NO: 2003344 - RNA, 19 nt, Homo sapiens
  misc_RNA (1)...(19): siRNA sense strand
ggcaaccgcagcgcucuaa

SEQ ID NO: 2003345 - RNA, 19 nt, Homo sapiens
  misc_RNA (1)...(19): siRNA sense strand
gaagcucucgcggcuggaa

SEQ ID NO: 2003346 - RNA, 19 nt, Homo sapiens
  misc_RNA (1)...(19): siRNA sense strand
gggcaaccugcucuaccua

SEQ ID NO: 2003347 - RNA, 19 nt, Homo sapiens
  misc_RNA (1)...(19): siRNA sense strand
aacgagaucagccgccuaa

SEQ ID NO: 2003348 - RNA, 19 nt, Homo sapiens
  misc_RNA (1)...(19): siRNA sense strand
ucgagggccuggagagucu

SEQ ID NO: 2003349 - RNA, 19 nt, Homo sapiens
  misc_RNA (1)...(19): siRNA sense strand
gguccacguucggcacaug

SEQ ID NO: 2003350 - RNA, 19 nt, Homo sapiens
  misc_RNA (1)...(19): siRNA sense strand
gaagagauguuucacaaga

SEQ ID NO: 2003351 - RNA, 19 nt, Homo sapiens
  misc_RNA (1)...(19): siRNA sense strand
gaauuacccuuuaugacua

SEQ ID NO: 2003352 - RNA, 19 nt, Homo sapiens
  misc_RNA (1)...(19): siRNA sense strand
caaacagucucauccauuu

SEQ ID NO: 2003353 - RNA, 19 nt, Homo sapiens
  misc_RNA (1)...(19): siRNA sense strand
gaaggaaaccuaacuauag

SEQ ID NO: 2003354 - RNA, 19 nt, Homo sapiens
  misc_RNA (1)...(19): siRNA sense strand
caacaaagacccugcaauu

SEQ ID NO: 2003355 - RNA, 19 nt, Homo sapiens
  misc_RNA (1)...(19): siRNA sense strand
gagaugacguguugagaaa

SEQ ID NO: 2003356 - RNA, 19 nt, Homo sapiens
  misc_RNA (1)...(19): siRNA sense strand
caacgaacauguacaacaa

SEQ ID NO: 2003357 - RNA, 19 nt, Homo sapiens
  misc_RNA (1)...(19): siRNA sense strand
gcacagaugucccagugaa

SEQ ID NO: 2003358 - RNA, 19 nt, Homo sapiens
  misc_RNA (1)...(19): siRNA sense strand
ugaauuugaugcagacuua

SEQ ID NO: 2003359 - RNA, 19 nt, Homo sapiens
  misc_RNA (1)...(19): siRNA sense strand
caaaggaauuggaauguug

SEQ ID NO: 2003360 - RNA, 19 nt, Homo sapiens
  misc_RNA (1)...(19): siRNA sense strand
gagcugugaugaacaaauu

SEQ ID NO: 2003361 - RNA, 19 nt, Homo sapiens
  misc_RNA (1)...(19): siRNA sense strand
ggaaaggaauucaucuuag

SEQ ID NO: 2003362 - RNA, 19 nt, Homo sapiens
  misc_RNA (1)...(19): siRNA sense strand
cgauuaagcucuaccuaaa

SEQ ID NO: 2003363 - RNA, 19 nt, Homo sapiens
  misc_RNA (1)...(19): siRNA sense strand
gaugacuucuucaacauaa

SEQ ID NO: 2003364 - RNA, 19 nt, Homo sapiens
  misc_RNA (1)...(19): siRNA sense strand
gaugacaaaugacuacuau

SEQ ID NO: 2003365 - RNA, 19 nt, Homo sapiens
  misc_RNA (1)...(19): siRNA sense strand
gaauuggaauguuggauau

SEQ ID NO: 2003366 - RNA, 19 nt, Homo sapiens
  misc_RNA (1)...(19): siRNA sense strand
gggaaaggaauucaucuua

SEQ ID NO: 2003367 - RNA, 19 nt, Homo sapiens
  misc_RNA (1)...(19): siRNA sense strand
gaugaugacuucuucaaca

SEQ ID NO: 2003368 - RNA, 19 nt, Homo sapiens
  misc_RNA (1)...(19): siRNA sense strand
gaaaugcuauggugaaucg

SEQ ID NO: 2003369 - RNA, 19 nt, Homo sapiens
  misc_RNA (1)...(19): siRNA sense strand
ggaauuggaauguuggaua

SEQ ID NO: 2003370 - RNA, 19 nt, Homo sapiens
  misc_RNA (1)...(19): siRNA sense strand
gaauuuaaccucugcaguu

SEQ ID NO: 2003371 - RNA, 19 nt, Homo sapiens
  misc_RNA (1)...(19): siRNA sense strand
gcacgggccucuccagaau

SEQ ID NO: 2003372 - RNA, 19 nt, Homo sapiens
  misc_RNA (1)...(19): siRNA sense strand
gaauguaaccaucgaagaa

SEQ ID NO: 2003373 - RNA, 19 nt, Homo sapiens
  misc_RNA (1)...(19): siRNA sense strand
gaauauugcuugugaagac

SEQ ID NO: 2003374 - RNA, 19 nt, Homo sapiens
  misc_RNA (1)...(19): siRNA sense strand
gguggaggcugcagaagaa

SEQ ID NO: 2003375 - RNA, 19 nt, Homo sapiens
  misc_RNA (1)...(19): siRNA sense strand
gaauggaacuuuggugcaa

SEQ ID NO: 2003376 - RNA, 19 nt, Homo sapiens
  misc_RNA (1)...(19): siRNA sense strand
gcccagaaauugaaacaga

SEQ ID NO: 2003377 - RNA, 19 nt, Homo sapiens
  misc_RNA (1)...(19): siRNA sense strand
ggacaccuaugauacaauc

SEQ ID NO: 2003378 - RNA, 19 nt, Homo sapiens
  misc_RNA (1)...(19): siRNA sense strand
gcaggagaaugucauggaa

SEQ ID NO: 2003379 - RNA, 19 nt, Homo sapiens
  misc_RNA (1)...(19): siRNA sense strand
gcaaacagucucauccauu

SEQ ID NO: 2003380 - RNA, 19 nt, Homo sapiens
  misc_RNA (1)...(19): siRNA sense strand
ccauugaaaucagguauaa

SEQ ID NO: 2003381 - RNA, 19 nt, Homo sapiens
  misc_RNA (1)...(19): siRNA sense strand
aagcacaccugaaacauga

SEQ ID NO: 2003382 - RNA, 19 nt, Homo sapiens
  misc_RNA (1)...(19): siRNA sense strand
cgaaggaaaccuaacuaua

SEQ ID NO: 2003383 - RNA, 19 nt, Homo sapiens
  misc_RNA (1)...(19): siRNA sense strand
ggauauagcucugaaugag

SEQ ID NO: 2003384 - RNA, 19 nt, Homo sapiens
  misc_RNA (1)...(19): siRNA sense strand
gaaaggaauucaucuuagc

SEQ ID NO: 2003385 - RNA, 19 nt, Homo sapiens
  misc_RNA (1)...(19): siRNA sense strand
ucaaugcugugcugauaaa

SEQ ID NO: 2003386 - RNA, 19 nt, Homo sapiens
  misc_RNA (1)...(19): siRNA sense strand
caaagacccugcaauuguc

SEQ ID NO: 2003387 - RNA, 19 nt, Homo sapiens
  misc_RNA (1)...(19): siRNA sense strand
gaugacguguugagaaaug

SEQ ID NO: 2003388 - RNA, 19 nt, Homo sapiens
  misc_RNA (1)...(19): siRNA sense strand
cgaaagacguggucauuuu

SEQ ID NO: 2003389 - RNA, 19 nt, Homo sapiens
  misc_RNA (1)...(19): siRNA sense strand
cagggaauauugcuuguga

SEQ ID NO: 2003390 - RNA, 19 nt, Homo sapiens
  misc_RNA (1)...(19): siRNA sense strand
gguggcagcuguaggcauu

SEQ ID NO: 2003391 - RNA, 19 nt, Homo sapiens
  misc_RNA (1)...(19): siRNA sense strand
ggaccgaagcuuacauuga

SEQ ID NO: 2003392 - RNA, 19 nt, Homo sapiens
  misc_RNA (1)...(19): siRNA sense strand
gaaccuugccugaauggaa

SEQ ID NO: 2003393 - RNA, 19 nt, Homo sapiens
  misc_RNA (1)...(19): siRNA sense strand
aggagaaugucauggaaua

SEQ ID NO: 2003394 - RNA, 19 nt, Homo sapiens
  misc_RNA (1)...(19): siRNA sense strand
gaagaaggccugcaugacu

SEQ ID NO: 2003395 - RNA, 19 nt, Homo sapiens
  misc_RNA (1)...(19): siRNA sense strand
gaagaagacaguggacaaa

SEQ ID NO: 2003396 - RNA, 19 nt, Homo sapiens
  misc_RNA (1)...(19): siRNA sense strand
gaccgaagcuuacauugac

SEQ ID NO: 2003397 - RNA, 19 nt, Homo sapiens
  misc_RNA (1)...(19): siRNA sense strand
gcaguaaaauggaucauga

SEQ ID NO: 2003398 - RNA, 19 nt, Homo sapiens
  misc_RNA (1)...(19): siRNA sense strand
uaaaugaaagggacaaaga

SEQ ID NO: 2003399 - RNA, 19 nt, Homo sapiens
  misc_RNA (1)...(19): siRNA sense strand
agaccgagaugacguguug

SEQ ID NO: 2003400 - RNA, 19 nt, Homo sapiens
  misc_RNA (1)...(19): siRNA sense strand
agaagaagcacaccugaaa

SEQ ID NO: 2003401 - RNA, 19 nt, Homo sapiens
  misc_RNA (1)...(19): siRNA sense strand
ccugaaagcuggugacaag

SEQ ID NO: 2003402 - RNA, 19 nt, Homo sapiens
  misc_RNA (1)...(19): siRNA sense strand
gcgauuaagcucuaccuaa

SEQ ID NO: 2003403 - RNA, 19 nt, Homo sapiens
  misc_RNA (1)...(19): siRNA sense strand
gagaaaugcuauggugaau

SEQ ID NO: 2003404 - RNA, 19 nt, Homo sapiens
  misc_RNA (1)...(19): siRNA sense strand
cacaaaagcugacugauga

SEQ ID NO: 2003405 - RNA, 19 nt, Homo sapiens
  misc_RNA (1)...(19): siRNA sense strand
ggaauaccuucacgugcuu

SEQ ID NO: 2003406 - RNA, 19 nt, Homo sapiens
  misc_RNA (1)...(19): siRNA sense strand
ggacaaacuuuucgccaaa

SEQ ID NO: 2003407 - RNA, 19 nt, Homo sapiens
  misc_RNA (1)...(19): siRNA sense strand
gcagcaaccuguucauggu

SEQ ID NO: 2003408 - RNA, 19 nt, Homo sapiens
  misc_RNA (1)...(19): siRNA sense strand
uaaaauggaucaugacaga

SEQ ID NO: 2003409 - RNA, 19 nt, Homo sapiens
  misc_RNA (1)...(19): siRNA sense strand
uaacaaugggcuccuuuaa

SEQ ID NO: 2003410 - RNA, 19 nt, Homo sapiens
  misc_RNA (1)...(19): siRNA sense strand
ccagugugauaaagaauug

SEQ ID NO: 2003411 - RNA, 19 nt, Homo sapiens
  misc_RNA (1)...(19): siRNA sense strand
gaagcacaccugaaacaug

SEQ ID NO: 2003412 - RNA, 19 nt, Homo sapiens
  misc_RNA (1)...(19): siRNA sense strand
gcuaaagcccagaaauuga

SEQ ID NO: 2003413 - RNA, 19 nt, Homo sapiens
  misc_RNA (1)...(19): siRNA sense strand
gcuccagugugauaaagaa

SEQ ID NO: 2003414 - RNA, 19 nt, Homo sapiens
  misc_RNA (1)...(19): siRNA sense strand
ggcagcaacuucuccgaaa

SEQ ID NO: 2003415 - RNA, 19 nt, Homo sapiens
  misc_RNA (1)...(19): siRNA sense strand
cagcuaaagcccagaaauu

SEQ ID NO: 2003416 - RNA, 19 nt, Homo sapiens
  misc_RNA (1)...(19): siRNA sense strand
acaaugggcuccuuuaaaa

SEQ ID NO: 2003417 - RNA, 19 nt, Homo sapiens
  misc_RNA (1)...(19): siRNA sense strand
ggguacuccuuucaguuua

SEQ ID NO: 2003418 - RNA, 19 nt, Homo sapiens
  misc_RNA (1)...(19): siRNA sense strand
gauucacgguuaugccuuu

SEQ ID NO: 2003419 - RNA, 19 nt, Homo sapiens
  misc_RNA (1)...(19): siRNA sense strand
gucugaaucucuaaacaaa

SEQ ID NO: 2003420 - RNA, 19 nt, Homo sapiens
  misc_RNA (1)...(19): siRNA sense strand
gaggucaugggaaauauuu

SEQ ID NO: 2003421 - RNA, 19 nt, Homo sapiens
  misc_RNA (1)...(19): siRNA sense strand
gaaagacguggucauuuua

SEQ ID NO: 2003422 - RNA, 19 nt, Homo sapiens
  misc_RNA (1)...(19): siRNA sense strand
ggaaccagaugagaaugga

SEQ ID NO: 2003423 - RNA, 19 nt, Homo sapiens
  misc_RNA (1)...(19): siRNA sense strand
gaugcagacuuacaguaug

SEQ ID NO: 2003424 - RNA, 19 nt, Homo sapiens
  misc_RNA (1)...(19): siRNA sense strand
gagacuacagggaauauug

SEQ ID NO: 2003425 - RNA, 19 nt, Homo sapiens
  misc_RNA (1)...(19): siRNA sense strand
cacacagacuggagacuuu

SEQ ID NO: 2003426 - RNA, 19 nt, Homo sapiens
  misc_RNA (1)...(19): siRNA sense strand
gcuccuggaugaacggaaa

SEQ ID NO: 2003427 - RNA, 19 nt, Homo sapiens
  misc_RNA (1)...(19): siRNA sense strand
ggacaaagacgggaauuuu

SEQ ID NO: 2003428 - RNA, 19 nt, Homo sapiens
  misc_RNA (1)...(19): siRNA sense strand
augaggagcuucacuaugu

SEQ ID NO: 2003429 - RNA, 19 nt, Homo sapiens
  misc_RNA (1)...(19): siRNA sense strand
cuucaaugcugugcugaua

SEQ ID NO: 2003430 - RNA, 19 nt, Homo sapiens
  misc_RNA (1)...(19): siRNA sense strand
gggagcaucuggacaaacu

SEQ ID NO: 2003431 - RNA, 19 nt, Homo sapiens
  misc_RNA (1)...(19): siRNA sense strand
ccagaggucaugggaaaua

SEQ ID NO: 2003432 - RNA, 19 nt, Homo sapiens
  misc_RNA (1)...(19): siRNA sense strand
gguuaugccuuugcaauca

SEQ ID NO: 2003433 - RNA, 19 nt, Homo sapiens
  misc_RNA (1)...(19): siRNA sense strand
gagcaucuggacaaacuuu

SEQ ID NO: 2003434 - RNA, 19 nt, Homo sapiens
  misc_RNA (1)...(19): siRNA sense strand
gaacauguacaacaaagac

SEQ ID NO: 2003435 - RNA, 19 nt, Homo sapiens
  misc_RNA (1)...(19): siRNA sense strand
augaaucccuuaaguguga

SEQ ID NO: 2003436 - RNA, 19 nt, Homo sapiens
  misc_RNA (1)...(19): siRNA sense strand
uaaugaaucccuuaagugu

SEQ ID NO: 2003437 - RNA, 19 nt, Homo sapiens
  misc_RNA (1)...(19): siRNA sense strand
caaggagacuacagggaau

SEQ ID NO: 2003438 - RNA, 19 nt, Homo sapiens
  misc_RNA (1)...(19): siRNA sense strand
augagacugugaauuguua

SEQ ID NO: 2003439 - RNA, 19 nt, Homo sapiens
  misc_RNA (1)...(19): siRNA sense strand
ccaucaugcucauaacuga

SEQ ID NO: 2003440 - RNA, 19 nt, Homo sapiens
  misc_RNA (1)...(19): siRNA sense strand
ggacaaacaaagagcacuu

SEQ ID NO: 2003441 - RNA, 19 nt, Homo sapiens
  misc_RNA (1)...(19): siRNA sense strand
ucaacauucugagugauuu

SEQ ID NO: 2003442 - RNA, 19 nt, Homo sapiens
  misc_RNA (1)...(19): siRNA sense strand
caaauacaaguuagggauu

SEQ ID NO: 2003443 - RNA, 19 nt, Homo sapiens
  misc_RNA (1)...(19): siRNA sense strand
ccugaaacaugaauuugau

SEQ ID NO: 2003444 - RNA, 19 nt, Homo sapiens
  misc_RNA (1)...(19): siRNA sense strand
ugaagaccauccccaaaua

SEQ ID NO: 2003445 - RNA, 19 nt, Homo sapiens
  misc_RNA (1)...(19): siRNA sense strand
ugugaauuguuaccucaua

SEQ ID NO: 2003446 - RNA, 19 nt, Homo sapiens
  misc_RNA (1)...(19): siRNA sense strand
gcuguaggcauucagauga

SEQ ID NO: 2003447 - RNA, 19 nt, Homo sapiens
  misc_RNA (1)...(19): siRNA sense strand
gcagaugaaugguccuacu

SEQ ID NO: 2003448 - RNA, 19 nt, Homo sapiens
  misc_RNA (1)...(19): siRNA sense strand
aagaaggccugcaugacuu

SEQ ID NO: 2003449 - RNA, 19 nt, Homo sapiens
  misc_RNA (1)...(19): siRNA sense strand
aguuagggauucacgguua

SEQ ID NO: 2003450 - RNA, 19 nt, Homo sapiens
  misc_RNA (1)...(19): siRNA sense strand
gcgaagacauugaggauua

SEQ ID NO: 2003451 - RNA, 19 nt, Homo sapiens
  misc_RNA (1)...(19): siRNA sense strand
gcaacaaccugauuaagga

SEQ ID NO: 2003452 - RNA, 19 nt, Homo sapiens
  misc_RNA (1)...(19): siRNA sense strand
ggaaggagcgcuggaguua

SEQ ID NO: 2003453 - RNA, 19 nt, Homo sapiens
  misc_RNA (1)...(19): siRNA sense strand
ucaacaaccuuauggcuaa

SEQ ID NO: 2003454 - RNA, 19 nt, Homo sapiens
  misc_RNA (1)...(19): siRNA sense strand
uuaaggagcugcugaagga

SEQ ID NO: 2003455 - RNA, 19 nt, Homo sapiens
  misc_RNA (1)...(19): siRNA sense strand
gagcugaggugcccuucuu

SEQ ID NO: 2003456 - RNA, 19 nt, Homo sapiens
  misc_RNA (1)...(19): siRNA sense strand
ggacugccaucgagcauuc

SEQ ID NO: 2003457 - RNA, 19 nt, Homo sapiens
  misc_RNA (1)...(19): siRNA sense strand
ggagagauccugaccaauc

SEQ ID NO: 2003458 - RNA, 19 nt, Homo sapiens
  misc_RNA (1)...(19): siRNA sense strand
caaccuggcagaugcguua

SEQ ID NO: 2003459 - RNA, 19 nt, Homo sapiens
  misc_RNA (1)...(19): siRNA sense strand
gcagaaaucgggagagaau

SEQ ID NO: 2003460 - RNA, 19 nt, Homo sapiens
  misc_RNA (1)...(19): siRNA sense strand
gcaaucaacaugaagaaau

SEQ ID NO: 2003461 - RNA, 19 nt, Homo sapiens
  misc_RNA (1)...(19): siRNA sense strand
gcacaucgccaaacuagag

SEQ ID NO: 2003462 - RNA, 19 nt, Homo sapiens
  misc_RNA (1)...(19): siRNA sense strand
gaagaaguacucucaugga

SEQ ID NO: 2003463 - RNA, 19 nt, Homo sapiens
  misc_RNA (1)...(19): siRNA sense strand
guggacagcuuucacuuuc

SEQ ID NO: 2003464 - RNA, 19 nt, Homo sapiens
  misc_RNA (1)...(19): siRNA sense strand
caaacuuccugcuccaaga

SEQ ID NO: 2003465 - RNA, 19 nt, Homo sapiens
  misc_RNA (1)...(19): siRNA sense strand
caucgagcauucucucuug

SEQ ID NO: 2003466 - RNA, 19 nt, Homo sapiens
  misc_RNA (1)...(19): siRNA sense strand
cuggaaagcugaaauccuu

SEQ ID NO: 2003467 - RNA, 19 nt, Homo sapiens
  misc_RNA (1)...(19): siRNA sense strand
ucacaaacauccucaagac

SEQ ID NO: 2003468 - RNA, 19 nt, Homo sapiens
  misc_RNA (1)...(19): siRNA sense strand
ucacagccaucaguaaguu

SEQ ID NO: 2003469 - RNA, 19 nt, Homo sapiens
  misc_RNA (1)...(19): siRNA sense strand
agaagucgcugcagaugau

SEQ ID NO: 2003470 - RNA, 19 nt, Homo sapiens
  misc_RNA (1)...(19): siRNA sense strand
ggacuucacugaggauguc

SEQ ID NO: 2003471 - RNA, 19 nt, Homo sapiens
  misc_RNA (1)...(19): siRNA sense strand
ggagccaccugggauauuc

SEQ ID NO: 2003472 - RNA, 19 nt, Homo sapiens
  misc_RNA (1)...(19): siRNA sense strand
gagacaaggacuucacuga

SEQ ID NO: 2003473 - RNA, 19 nt, Homo sapiens
  misc_RNA (1)...(19): siRNA sense strand
ugacaucuccuuccucaug

SEQ ID NO: 2003474 - RNA, 19 nt, Homo sapiens
  misc_RNA (1)...(19): siRNA sense strand
cagcagaaaucgggagaga

SEQ ID NO: 2003475 - RNA, 19 nt, Homo sapiens
  misc_RNA (1)...(19): siRNA sense strand
caucucagccgccaucuug

SEQ ID NO: 2003476 - RNA, 19 nt, Homo sapiens
  misc_RNA (1)...(19): siRNA sense strand
cgagcauucucucuugaaa

SEQ ID NO: 2003477 - RNA, 19 nt, Homo sapiens
  misc_RNA (1)...(19): siRNA sense strand
gaagagacaccgcgaagac

SEQ ID NO: 2003478 - RNA, 19 nt, Homo sapiens
  misc_RNA (1)...(19): siRNA sense strand
ugaaguaugccauuaguuc

SEQ ID NO: 2003479 - RNA, 19 nt, Homo sapiens
  misc_RNA (1)...(19): siRNA sense strand
caaacauccucaagacgau

SEQ ID NO: 2003480 - RNA, 19 nt, Homo sapiens
  misc_RNA (1)...(19): siRNA sense strand
uggugaaguugaagaagua

SEQ ID NO: 2003481 - RNA, 19 nt, Homo sapiens
  misc_RNA (1)...(19): siRNA sense strand
uaccugaaguaugccauua

SEQ ID NO: 2003482 - RNA, 19 nt, Homo sapiens
  misc_RNA (1)...(19): siRNA sense strand
guacggaggagcucaagug

SEQ ID NO: 2003483 - RNA, 19 nt, Homo sapiens
  misc_RNA (1)...(19): siRNA sense strand
gcgcuggaguuacuaccaa

SEQ ID NO: 2003484 - RNA, 19 nt, Homo sapiens
  misc_RNA (1)...(19): siRNA sense strand
gaagacauugaggauuaua

SEQ ID NO: 2003485 - RNA, 19 nt, Homo sapiens
  misc_RNA (1)...(19): siRNA sense strand
ccaauccucucaucuuguc

SEQ ID NO: 2003486 - RNA, 19 nt, Homo sapiens
  misc_RNA (1)...(19): siRNA sense strand
gagaagucgcugcagauga

SEQ ID NO: 2003487 - RNA, 19 nt, Homo sapiens
  misc_RNA (1)...(19): siRNA sense strand
gggagagaaugccaacauc

SEQ ID NO: 2003488 - RNA, 19 nt, Homo sapiens
  misc_RNA (1)...(19): siRNA sense strand
guucccagaugguguccua

SEQ ID NO: 2003489 - RNA, 19 nt, Homo sapiens
  misc_RNA (1)...(19): siRNA sense strand
uaccuggccugcucacuga

SEQ ID NO: 2003490 - RNA, 19 nt, Homo sapiens
  misc_RNA (1)...(19): siRNA sense strand
cauucucucuugaaacuug

SEQ ID NO: 2003491 - RNA, 19 nt, Homo sapiens
  misc_RNA (1)...(19): siRNA sense strand
caguguggcacccucauua

SEQ ID NO: 2003492 - RNA, 19 nt, Homo sapiens
  misc_RNA (1)...(19): siRNA sense strand
cgaagacauugaggauuau

SEQ ID NO: 2003493 - RNA, 19 nt, Homo sapiens
  misc_RNA (1)...(19): siRNA sense strand
acacaaugcccuacuggaa

SEQ ID NO: 2003494 - RNA, 19 nt, Homo sapiens
  misc_RNA (1)...(19): siRNA sense strand
cuggagaucuggaaagcuu

SEQ ID NO: 2003495 - RNA, 19 nt, Homo sapiens
  misc_RNA (1)...(19): siRNA sense strand
uaacaucaaagggaaggua

SEQ ID NO: 2003496 - RNA, 19 nt, Homo sapiens
  misc_RNA (1)...(19): siRNA sense strand
ggugugcccucaguuccua

SEQ ID NO: 2003497 - RNA, 19 nt, Homo sapiens
  misc_RNA (1)...(19): siRNA sense strand
gagaggguggugaucauga

SEQ ID NO: 2003498 - RNA, 19 nt, Homo sapiens
  misc_RNA (1)...(19): siRNA sense strand
ugucggaacuggugaaggu

SEQ ID NO: 2003499 - RNA, 19 nt, Homo sapiens
  misc_RNA (1)...(19): siRNA sense strand
gugcagccuucgaaguuga

SEQ ID NO: 2003500 - RNA, 19 nt, Homo sapiens
  misc_RNA (1)...(19): siRNA sense strand
ccaaugggcaaucaacaug

SEQ ID NO: 2003501 - RNA, 19 nt, Homo sapiens
  misc_RNA (1)...(19): siRNA sense strand
agaugaagcuagugcagau

SEQ ID NO: 2003502 - RNA, 19 nt, Homo sapiens
  misc_RNA (1)...(19): siRNA sense strand
ggacagcuuucacuuuccu

SEQ ID NO: 2003503 - RNA, 19 nt, Homo sapiens
  misc_RNA (1)...(19): siRNA sense strand
ccucggagaugaagcuagu

SEQ ID NO: 2003504 - RNA, 19 nt, Homo sapiens
  misc_RNA (1)...(19): siRNA sense strand
ccucaagauuccacagguu

SEQ ID NO: 2003505 - RNA, 19 nt, Homo sapiens
  misc_RNA (1)...(19): siRNA sense strand
ccacgcagaucaaguuucc

SEQ ID NO: 2003506 - RNA, 19 nt, Homo sapiens
  misc_RNA (1)...(19): siRNA sense strand
agccauugcugcacucuga

SEQ ID NO: 2003507 - RNA, 19 nt, Homo sapiens
  misc_RNA (1)...(19): siRNA sense strand
caacauccagcccaacauc

SEQ ID NO: 2003508 - RNA, 19 nt, Homo sapiens
  misc_RNA (1)...(19): siRNA sense strand
gagacaccgcgaagacauu

SEQ ID NO: 2003509 - RNA, 19 nt, Homo sapiens
  misc_RNA (1)...(19): siRNA sense strand
gcaaagcagaggaaugcau

SEQ ID NO: 2003510 - RNA, 19 nt, Homo sapiens
  misc_RNA (1)...(19): siRNA sense strand
aaaggagccaccugggaua

SEQ ID NO: 2003511 - RNA, 19 nt, Homo sapiens
  misc_RNA (1)...(19): siRNA sense strand
uugaagaaguacucucaug

SEQ ID NO: 2003512 - RNA, 19 nt, Homo sapiens
  misc_RNA (1)...(19): siRNA sense strand
ucacugaggaugucaacug

SEQ ID NO: 2003513 - RNA, 19 nt, Homo sapiens
  misc_RNA (1)...(19): siRNA sense strand
uguccuaccugaaguaugc

SEQ ID NO: 2003514 - RNA, 19 nt, Homo sapiens
  misc_RNA (1)...(19): siRNA sense strand
ccuggcagaugcguuacua

SEQ ID NO: 2003515 - RNA, 19 nt, Homo sapiens
  misc_RNA (1)...(19): siRNA sense strand
gcagacagccacgcagauc

SEQ ID NO: 2003516 - RNA, 19 nt, Homo sapiens
  misc_RNA (1)...(19): siRNA sense strand
agaggguggugaucaugaa

SEQ ID NO: 2003517 - RNA, 19 nt, Homo sapiens
  misc_RNA (1)...(19): siRNA sense strand
cagaugguguccuacucuu

SEQ ID NO: 2003518 - RNA, 19 nt, Homo sapiens
  misc_RNA (1)...(19): siRNA sense strand
gggcaaucaacaugaagaa

SEQ ID NO: 2003519 - RNA, 19 nt, Homo sapiens
  misc_RNA (1)...(19): siRNA sense strand
cgacugcugagcucuaaug

SEQ ID NO: 2003520 - RNA, 19 nt, Homo sapiens
  misc_RNA (1)...(19): siRNA sense strand
cagccacgcagaucaaguu

SEQ ID NO: 2003521 - RNA, 19 nt, Homo sapiens
  misc_RNA (1)...(19): siRNA sense strand
ggagcccacugucacaaac

SEQ ID NO: 2003522 - RNA, 19 nt, Homo sapiens
  misc_RNA (1)...(19): siRNA sense strand
gcaguguggcacccucauu

SEQ ID NO: 2003523 - RNA, 19 nt, Homo sapiens
  misc_RNA (1)...(19): siRNA sense strand
aaugggcaaucaacaugaa

SEQ ID NO: 2003524 - RNA, 19 nt, Homo sapiens
  misc_RNA (1)...(19): siRNA sense strand
aaggagcgcuggaguuacu

SEQ ID NO: 2003525 - RNA, 19 nt, Homo sapiens
  misc_RNA (1)...(19): siRNA sense strand
gugaaggugucagccaugu

SEQ ID NO: 2003526 - RNA, 19 nt, Homo sapiens
  misc_RNA (1)...(19): siRNA sense strand
ccugaaguaugccauuagu

SEQ ID NO: 2003527 - RNA, 19 nt, Homo sapiens
  misc_RNA (1)...(19): siRNA sense strand
ugaaggagacgcggaagga

SEQ ID NO: 2003528 - RNA, 19 nt, Homo sapiens
  misc_RNA (1)...(19): siRNA sense strand
gugagaacacccugcaguu

SEQ ID NO: 2003529 - RNA, 19 nt, Homo sapiens
  misc_RNA (1)...(19): siRNA sense strand
ugaagcuagugcagaugaa

SEQ ID NO: 2003530 - RNA, 19 nt, Homo sapiens
  misc_RNA (1)...(19): siRNA sense strand
gagagaaugccaacaucca

SEQ ID NO: 2003531 - RNA, 19 nt, Homo sapiens
  misc_RNA (1)...(19): siRNA sense strand
gcuuucacuuuccucaaga

SEQ ID NO: 2003532 - RNA, 19 nt, Homo sapiens
  misc_RNA (1)...(19): siRNA sense strand
ucugagcugucacggcaaa

SEQ ID NO: 2003533 - RNA, 19 nt, Homo sapiens
  misc_RNA (1)...(19): siRNA sense strand
caaugggcaaucaacauga

SEQ ID NO: 2003534 - RNA, 19 nt, Homo sapiens
  misc_RNA (1)...(19): siRNA sense strand
cagccgccaucuuggaaau

SEQ ID NO: 2003535 - RNA, 19 nt, Homo sapiens
  misc_RNA (1)...(19): siRNA sense strand
gcaacugugacuguacaaa

SEQ ID NO: 2003536 - RNA, 19 nt, Homo sapiens
  misc_RNA (1)...(19): siRNA sense strand
gaugucaacugugcuuuug

SEQ ID NO: 2003537 - RNA, 19 nt, Homo sapiens
  misc_RNA (1)...(19): siRNA sense strand
uggagcagcugacgauggu

SEQ ID NO: 2003538 - RNA, 19 nt, Homo sapiens
  misc_RNA (1)...(19): siRNA sense strand
gacauugaggauuauauca

SEQ ID NO: 2003539 - RNA, 19 nt, Homo sapiens
  misc_RNA (1)...(19): siRNA sense strand
caucuuguccuaccugaag

SEQ ID NO: 2003540 - RNA, 19 nt, Homo sapiens
  misc_RNA (1)...(19): siRNA sense strand
cugcaguucuacaaugaga

SEQ ID NO: 2003541 - RNA, 19 nt, Homo sapiens
  misc_RNA (1)...(19): siRNA sense strand
cagcgaagaaagcaccaaa

SEQ ID NO: 2003542 - RNA, 19 nt, Homo sapiens
  misc_RNA (1)...(19): siRNA sense strand
caacugugacuguacaaac

SEQ ID NO: 2003543 - RNA, 19 nt, Homo sapiens
  misc_RNA (1)...(19): siRNA sense strand
gaggaugucaacugugcuu

SEQ ID NO: 2003544 - RNA, 19 nt, Homo sapiens
  misc_RNA (1)...(19): siRNA sense strand
caaccugaagcaagccauu

SEQ ID NO: 2003545 - RNA, 19 nt, Homo sapiens
  misc_RNA (1)...(19): siRNA sense strand
uugccaaggugcuggagaa

SEQ ID NO: 2003546 - RNA, 19 nt, Homo sapiens
  misc_RNA (1)...(19): siRNA sense strand
ccacuggaaagcugaaauc

SEQ ID NO: 2003547 - RNA, 19 nt, Homo sapiens
  misc_RNA (1)...(19): siRNA sense strand
gaugguguccuacucuucu

SEQ ID NO: 2003548 - RNA, 19 nt, Homo sapiens
  misc_RNA (1)...(19): siRNA sense strand
cuacucuucuguccucaca

SEQ ID NO: 2003549 - RNA, 19 nt, Homo sapiens
  misc_RNA (1)...(19): siRNA sense strand
ccacagaccgauccaugag

SEQ ID NO: 2003550 - RNA, 19 nt, Homo sapiens
  misc_RNA (1)...(19): siRNA sense strand
gaaagaggaugccugauga

SEQ ID NO: 2003551 - RNA, 19 nt, Homo sapiens
  misc_RNA (1)...(19): siRNA sense strand
gcaaagacuucuggauuua

SEQ ID NO: 2003552 - RNA, 19 nt, Homo sapiens
  misc_RNA (1)...(19): siRNA sense strand
gaagagcccugaguauaaa

SEQ ID NO: 2003553 - RNA, 19 nt, Homo sapiens
  misc_RNA (1)...(19): siRNA sense strand
aaaggaggcucuuauaauu

SEQ ID NO: 2003554 - RNA, 19 nt, Homo sapiens
  misc_RNA (1)...(19): siRNA sense strand
gaaaggaggcucuuauaau

SEQ ID NO: 2003555 - RNA, 19 nt, Homo sapiens
  misc_RNA (1)...(19): siRNA sense strand
gaguuaacaucaccauaua

SEQ ID NO: 2003556 - RNA, 19 nt, Homo sapiens
  misc_RNA (1)...(19): siRNA sense strand
gagaagagcccugaguaua

SEQ ID NO: 2003557 - RNA, 19 nt, Homo sapiens
  misc_RNA (1)...(19): siRNA sense strand
ggaaaugucuaccacaagu

SEQ ID NO: 2003558 - RNA, 19 nt, Homo sapiens
  misc_RNA (1)...(19): siRNA sense strand
aaacagagaccaugacaaa

SEQ ID NO: 2003559 - RNA, 19 nt, Homo sapiens
  misc_RNA (1)...(19): siRNA sense strand
gaaguuggcugcggaagug

SEQ ID NO: 2003560 - RNA, 19 nt, Homo sapiens
  misc_RNA (1)...(19): siRNA sense strand
caacauuccuguauuugga

SEQ ID NO: 2003561 - RNA, 19 nt, Homo sapiens
  misc_RNA (1)...(19): siRNA sense strand
gagaaaggaggcucuuaua

SEQ ID NO: 2003562 - RNA, 19 nt, Homo sapiens
  misc_RNA (1)...(19): siRNA sense strand
gguagacccugaaguaguu

SEQ ID NO: 2003563 - RNA, 19 nt, Homo sapiens
  misc_RNA (1)...(19): siRNA sense strand
ggaaagaggaugccugaug

SEQ ID NO: 2003564 - RNA, 19 nt, Homo sapiens
  misc_RNA (1)...(19): siRNA sense strand
gcagaaucuuggaggauaa

SEQ ID NO: 2003565 - RNA, 19 nt, Homo sapiens
  misc_RNA (1)...(19): siRNA sense strand
gcauugggcacaccuguua

SEQ ID NO: 2003566 - RNA, 19 nt, Homo sapiens
  misc_RNA (1)...(19): siRNA sense strand
ccacuacuauggacaagaa

SEQ ID NO: 2003567 - RNA, 19 nt, Homo sapiens
  misc_RNA (1)...(19): siRNA sense strand
uagcaacauuccuguauuu

SEQ ID NO: 2003568 - RNA, 19 nt, Homo sapiens
  misc_RNA (1)...(19): siRNA sense strand
aaacgcaucugcccaccua

SEQ ID NO: 2003569 - RNA, 19 nt, Homo sapiens
  misc_RNA (1)...(19): siRNA sense strand
agaaguaccucccauuuua

SEQ ID NO: 2003570 - RNA, 19 nt, Homo sapiens
  misc_RNA (1)...(19): siRNA sense strand
gaaaauagcauucacaauc

SEQ ID NO: 2003571 - RNA, 19 nt, Homo sapiens
  misc_RNA (1)...(19): siRNA sense strand
caagaaguaccucccauuu

SEQ ID NO: 2003572 - RNA, 19 nt, Homo sapiens
  misc_RNA (1)...(19): siRNA sense strand
gagcagcgccucucacuuc

SEQ ID NO: 2003573 - RNA, 19 nt, Homo sapiens
  misc_RNA (1)...(19): siRNA sense strand
ccagacaccuccacuuuag

SEQ ID NO: 2003574 - RNA, 19 nt, Homo sapiens
  misc_RNA (1)...(19): siRNA sense strand
ccagacaccuccacuuuag

SEQ ID NO: 2003575 - RNA, 19 nt, Homo sapiens
  misc_RNA (1)...(19): siRNA sense strand
gaagagugaagaaggauga

SEQ ID NO: 2003576 - RNA, 19 nt, Homo sapiens
  misc_RNA (1)...(19): siRNA sense strand
gaggaugccugaugagaag

SEQ ID NO: 2003577 - RNA, 19 nt, Homo sapiens
  misc_RNA (1)...(19): siRNA sense strand
agaagagcccugaguauaa

SEQ ID NO: 2003578 - RNA, 19 nt, Homo sapiens
  misc_RNA (1)...(19): siRNA sense strand
ccagaagagugaagaagga

SEQ ID NO: 2003579 - RNA, 19 nt, Homo sapiens
  misc_RNA (1)...(19): siRNA sense strand
caggagaacucaacauugg

SEQ ID NO: 2003580 - RNA, 19 nt, Homo sapiens
  misc_RNA (1)...(19): siRNA sense strand
cagcaaagacuucuggauu

SEQ ID NO: 2003581 - RNA, 19 nt, Homo sapiens
  misc_RNA (1)...(19): siRNA sense strand
ggugaucagucuaaugaga

SEQ ID NO: 2003582 - RNA, 19 nt, Homo sapiens
  misc_RNA (1)...(19): siRNA sense strand
gaagggcccagaagaguga

SEQ ID NO: 2003583 - RNA, 19 nt, Homo sapiens
  misc_RNA (1)...(19): siRNA sense strand
cagaauucaugcaguggua

SEQ ID NO: 2003584 - RNA, 19 nt, Homo sapiens
  misc_RNA (1)...(19): siRNA sense strand
gcccaagucuccaccaguu

SEQ ID NO: 2003585 - RNA, 19 nt, Homo sapiens
  misc_RNA (1)...(19): siRNA sense strand
ucccuaagcuccagaguga

SEQ ID NO: 2003586 - RNA, 19 nt, Homo sapiens
  misc_RNA (1)...(19): siRNA sense strand
ccagcaagccuaugaauuc

SEQ ID NO: 2003587 - RNA, 19 nt, Homo sapiens
  misc_RNA (1)...(19): siRNA sense strand
gauaggagaccaaccacaa

SEQ ID NO: 2003588 - RNA, 19 nt, Homo sapiens
  misc_RNA (1)...(19): siRNA sense strand
guccaaggcuccaccaguu

SEQ ID NO: 2003589 - RNA, 19 nt, Homo sapiens
  misc_RNA (1)...(19): siRNA sense strand
gaaaacagcaugagugaga

SEQ ID NO: 2003590 - RNA, 19 nt, Homo sapiens
  misc_RNA (1)...(19): siRNA sense strand
guaccuuacugguuggaaa

SEQ ID NO: 2003591 - RNA, 19 nt, Homo sapiens
  misc_RNA (1)...(19): siRNA sense strand
agcaaagacuucuggauuu

SEQ ID NO: 2003592 - RNA, 19 nt, Homo sapiens
  misc_RNA (1)...(19): siRNA sense strand
caaauucccaaauacauug

SEQ ID NO: 2003593 - RNA, 19 nt, Homo sapiens
  misc_RNA (1)...(19): siRNA sense strand
ggagaagagcccugaguau

SEQ ID NO: 2003594 - RNA, 19 nt, Homo sapiens
  misc_RNA (1)...(19): siRNA sense strand
cagcacacauggacagaga

SEQ ID NO: 2003595 - RNA, 19 nt, Homo sapiens
  misc_RNA (1)...(19): siRNA sense strand
ggagaagcaucguccacau

SEQ ID NO: 2003596 - RNA, 19 nt, Homo sapiens
  misc_RNA (1)...(19): siRNA sense strand
cuacacaccuuggagaaga

SEQ ID NO: 2003597 - RNA, 19 nt, Homo sapiens
  misc_RNA (1)...(19): siRNA sense strand
agaaaggaggcucuuauaa

SEQ ID NO: 2003598 - RNA, 19 nt, Homo sapiens
  misc_RNA (1)...(19): siRNA sense strand
ucucccaaauucccaaaua

SEQ ID NO: 2003599 - RNA, 19 nt, Homo sapiens
  misc_RNA (1)...(19): siRNA sense strand
cagcgccucucacuucuga

SEQ ID NO: 2003600 - RNA, 19 nt, Homo sapiens
  misc_RNA (1)...(19): siRNA sense strand
aaagacuucuggauuuaga

SEQ ID NO: 2003601 - RNA, 19 nt, Homo sapiens
  misc_RNA (1)...(19): siRNA sense strand
ccaaauucccaaauacauu

SEQ ID NO: 2003602 - RNA, 19 nt, Homo sapiens
  misc_RNA (1)...(19): siRNA sense strand
ugagcucucucccaaauuc

SEQ ID NO: 2003603 - RNA, 19 nt, Homo sapiens
  misc_RNA (1)...(19): siRNA sense strand
uauccaagccugccauuga

SEQ ID NO: 2003604 - RNA, 19 nt, Homo sapiens
  misc_RNA (1)...(19): siRNA sense strand
gcccuuguguuccugcuuu

SEQ ID NO: 2003605 - RNA, 19 nt, Homo sapiens
  misc_RNA (1)...(19): siRNA sense strand
ggaggaguacauccgauuu

SEQ ID NO: 2003606 - RNA, 19 nt, Homo sapiens
  misc_RNA (1)...(19): siRNA sense strand
caucucagguuguuauuuu

SEQ ID NO: 2003607 - RNA, 19 nt, Homo sapiens
  misc_RNA (1)...(19): siRNA sense strand
ggcaccagauccauaguug

SEQ ID NO: 2003608 - RNA, 19 nt, Homo sapiens
  misc_RNA (1)...(19): siRNA sense strand
caggauccaucucucauuc

SEQ ID NO: 2003609 - RNA, 19 nt, Homo sapiens
  misc_RNA (1)...(19): siRNA sense strand
ugacaccagugacaugaau

SEQ ID NO: 2003610 - RNA, 19 nt, Homo sapiens
  misc_RNA (1)...(19): siRNA sense strand
cauccaaaccucccauuga

SEQ ID NO: 2003611 - RNA, 19 nt, Homo sapiens
  misc_RNA (1)...(19): siRNA sense strand
gaauuccacgucagucauu

SEQ ID NO: 2003612 - RNA, 19 nt, Homo sapiens
  misc_RNA (1)...(19): siRNA sense strand
caacuuccagccauccuuu

SEQ ID NO: 2003613 - RNA, 19 nt, Homo sapiens
  misc_RNA (1)...(19): siRNA sense strand
gcagauaggagaccaacca

SEQ ID NO: 2003614 - RNA, 19 nt, Homo sapiens
  misc_RNA (1)...(19): siRNA sense strand
gggcacaccuguuaaugcu

SEQ ID NO: 2003615 - RNA, 19 nt, Homo sapiens
  misc_RNA (1)...(19): siRNA sense strand
ccaagaagggcccagaaga

SEQ ID NO: 2003616 - RNA, 19 nt, Homo sapiens
  misc_RNA (1)...(19): siRNA sense strand
gaaaugucuaccacaaguu

SEQ ID NO: 2003617 - RNA, 19 nt, Homo sapiens
  misc_RNA (1)...(19): siRNA sense strand
ccgccuacauuccugguuu

SEQ ID NO: 2003618 - RNA, 19 nt, Homo sapiens
  misc_RNA (1)...(19): siRNA sense strand
cuagcaacauuccuguauu

SEQ ID NO: 2003619 - RNA, 19 nt, Homo sapiens
  misc_RNA (1)...(19): siRNA sense strand
gcuagcaacauuccuguau

SEQ ID NO: 2003620 - RNA, 19 nt, Homo sapiens
  misc_RNA (1)...(19): siRNA sense strand
gcauaauuccaccagguuu

SEQ ID NO: 2003621 - RNA, 19 nt, Homo sapiens
  misc_RNA (1)...(19): siRNA sense strand
acacauggacagagagaaa

SEQ ID NO: 2003622 - RNA, 19 nt, Homo sapiens
  misc_RNA (1)...(19): siRNA sense strand
gaacucaacauuggacaag

SEQ ID NO: 2003623 - RNA, 19 nt, Homo sapiens
  misc_RNA (1)...(19): siRNA sense strand
aggaggcucuuauaauuca

SEQ ID NO: 2003624 - RNA, 19 nt, Homo sapiens
  misc_RNA (1)...(19): siRNA sense strand
gcacacauggacagagaga

SEQ ID NO: 2003625 - RNA, 19 nt, Homo sapiens
  misc_RNA (1)...(19): siRNA sense strand
agaguuaacaucaccauau

SEQ ID NO: 2003626 - RNA, 19 nt, Homo sapiens
  misc_RNA (1)...(19): siRNA sense strand
gagccuuccuaucaugguu

SEQ ID NO: 2003627 - RNA, 19 nt, Homo sapiens
  misc_RNA (1)...(19): siRNA sense strand
ugagaaaggaggcucuuau

SEQ ID NO: 2003628 - RNA, 19 nt, Homo sapiens
  misc_RNA (1)...(19): siRNA sense strand
agacguggccuccuucaga

SEQ ID NO: 2003629 - RNA, 19 nt, Homo sapiens
  misc_RNA (1)...(19): siRNA sense strand
ggagaccaaccacaacuuc

SEQ ID NO: 2003630 - RNA, 19 nt, Homo sapiens
  misc_RNA (1)...(19): siRNA sense strand
ugaucagucuaaugagaaa

SEQ ID NO: 2003631 - RNA, 19 nt, Homo sapiens
  misc_RNA (1)...(19): siRNA sense strand
cuacauuccugguuuagac

SEQ ID NO: 2003632 - RNA, 19 nt, Homo sapiens
  misc_RNA (1)...(19): siRNA sense strand
gacguggccuccuucagau

SEQ ID NO: 2003633 - RNA, 19 nt, Homo sapiens
  misc_RNA (1)...(19): siRNA sense strand
caagaagggcccagaagag

SEQ ID NO: 2003634 - RNA, 19 nt, Homo sapiens
  misc_RNA (1)...(19): siRNA sense strand
gaguacauccgauuuuaua

SEQ ID NO: 2003635 - RNA, 19 nt, Homo sapiens
  misc_RNA (1)...(19): siRNA sense strand
ccaagaaguaccucccauu

SEQ ID NO: 2003636 - RNA, 19 nt, Homo sapiens
  misc_RNA (1)...(19): siRNA sense strand
acagagaccaugacaaaca

SEQ ID NO: 2003637 - RNA, 19 nt, Homo sapiens
  misc_RNA (1)...(19): siRNA sense strand
caaccauccuuuaaaucca

SEQ ID NO: 2003638 - RNA, 19 nt, Homo sapiens
  misc_RNA (1)...(19): siRNA sense strand
agcagaaucuuggaggaua

SEQ ID NO: 2003639 - RNA, 19 nt, Homo sapiens
  misc_RNA (1)...(19): siRNA sense strand
cgccuacauuccugguuua

SEQ ID NO: 2003640 - RNA, 19 nt, Homo sapiens
  misc_RNA (1)...(19): siRNA sense strand
auccaaaccucccauugaa

SEQ ID NO: 2003641 - RNA, 19 nt, Homo sapiens
  misc_RNA (1)...(19): siRNA sense strand
ccacuuccauuuauauucc

SEQ ID NO: 2003642 - RNA, 19 nt, Homo sapiens
  misc_RNA (1)...(19): siRNA sense strand
ucccuaggcuugccgauuc

SEQ ID NO: 2003643 - RNA, 19 nt, Homo sapiens
  misc_RNA (1)...(19): siRNA sense strand
caguuugccugcacaguca

SEQ ID NO: 2003644 - RNA, 19 nt, Homo sapiens
  misc_RNA (1)...(19): siRNA sense strand
ccgcugauguccggaaaga

SEQ ID NO: 2003645 - RNA, 19 nt, Homo sapiens
  misc_RNA (1)...(19): siRNA sense strand
ccacugaugggcagcagaa

SEQ ID NO: 2003646 - RNA, 19 nt, Homo sapiens
  misc_RNA (1)...(19): siRNA sense strand
gcaacauuccuguauuugg

SEQ ID NO: 2003647 - RNA, 19 nt, Homo sapiens
  misc_RNA (1)...(19): siRNA sense strand
ugggugaucagucuaauga

SEQ ID NO: 2003648 - RNA, 19 nt, Homo sapiens
  misc_RNA (1)...(19): siRNA sense strand
ggacacccagcaccacuuc

SEQ ID NO: 2003649 - RNA, 19 nt, Homo sapiens
  misc_RNA (1)...(19): siRNA sense strand
acccugaaguaguuaauau

SEQ ID NO: 2003650 - RNA, 19 nt, Homo sapiens
  misc_RNA (1)...(19): siRNA sense strand
caacauggcuccuuacuau

SEQ ID NO: 2003651 - RNA, 19 nt, Homo sapiens
  misc_RNA (1)...(19): siRNA sense strand
gaaaggagaucugcuacua

SEQ ID NO: 2003652 - RNA, 19 nt, Homo sapiens
  misc_RNA (1)...(19): siRNA sense strand
ccaagaaacuaucaagaaa

SEQ ID NO: 2003653 - RNA, 19 nt, Homo sapiens
  misc_RNA (1)...(19): siRNA sense strand
gagcagagauucuugaagu

SEQ ID NO: 2003654 - RNA, 19 nt, Homo sapiens
  misc_RNA (1)...(19): siRNA sense strand
ggaaucauauaggucauua

SEQ ID NO: 2003655 - RNA, 19 nt, Homo sapiens
  misc_RNA (1)...(19): siRNA sense strand
gaaaccaacagaccugaua

SEQ ID NO: 2003656 - RNA, 19 nt, Homo sapiens
  misc_RNA (1)...(19): siRNA sense strand
ggaauucauugaucaggaa

SEQ ID NO: 2003657 - RNA, 19 nt, Homo sapiens
  misc_RNA (1)...(19): siRNA sense strand
cagcugaacucuuccuuga

SEQ ID NO: 2003658 - RNA, 19 nt, Homo sapiens
  misc_RNA (1)...(19): siRNA sense strand
gaacuguccagguuuauug

SEQ ID NO: 2003659 - RNA, 19 nt, Homo sapiens
  misc_RNA (1)...(19): siRNA sense strand
gaaauucgcgaugcaauga

SEQ ID NO: 2003660 - RNA, 19 nt, Homo sapiens
  misc_RNA (1)...(19): siRNA sense strand
gaagaaggcaaaugaagau

SEQ ID NO: 2003661 - RNA, 19 nt, Homo sapiens
  misc_RNA (1)...(19): siRNA sense strand
caggaacuguccagguuua

SEQ ID NO: 2003662 - RNA, 19 nt, Homo sapiens
  misc_RNA (1)...(19): siRNA sense strand
caagaaaggagaucugcua

SEQ ID NO: 2003663 - RNA, 19 nt, Homo sapiens
  misc_RNA (1)...(19): siRNA sense strand
gcagaagcguuugguguug

SEQ ID NO: 2003664 - RNA, 19 nt, Homo sapiens
  misc_RNA (1)...(19): siRNA sense strand
aaggagaucugcuacuaaa

SEQ ID NO: 2003665 - RNA, 19 nt, Homo sapiens
  misc_RNA (1)...(19): siRNA sense strand
ggucaccgauuggauauug

SEQ ID NO: 2003666 - RNA, 19 nt, Homo sapiens
  misc_RNA (1)...(19): siRNA sense strand
gcagauagacguggaccua

SEQ ID NO: 2003667 - RNA, 19 nt, Homo sapiens
  misc_RNA (1)...(19): siRNA sense strand
gaaggcaaaugaagaugag

SEQ ID NO: 2003668 - RNA, 19 nt, Homo sapiens
  misc_RNA (1)...(19): siRNA sense strand
gaaugccguuacucuguuu

SEQ ID NO: 2003669 - RNA, 19 nt, Homo sapiens
  misc_RNA (1)...(19): siRNA sense strand
aagaugaguugaagcguuu

SEQ ID NO: 2003670 - RNA, 19 nt, Homo sapiens
  misc_RNA (1)...(19): siRNA sense strand
auaacaacauggcuccuua

SEQ ID NO: 2003671 - RNA, 19 nt, Homo sapiens
  misc_RNA (1)...(19): siRNA sense strand
gcugaacucuuccuugaca

SEQ ID NO: 2003672 - RNA, 19 nt, Homo sapiens
  misc_RNA (1)...(19): siRNA sense strand
caaaugaagaugaguugaa

SEQ ID NO: 2003673 - RNA, 19 nt, Homo sapiens
  misc_RNA (1)...(19): siRNA sense strand
gcacagucuuccagcaguu

SEQ ID NO: 2003674 - RNA, 19 nt, Homo sapiens
  misc_RNA (1)...(19): siRNA sense strand
gcgaugcaaugauggcaaa

SEQ ID NO: 2003675 - RNA, 19 nt, Homo sapiens
  misc_RNA (1)...(19): siRNA sense strand
caacauuuacauccuauga

SEQ ID NO: 2003676 - RNA, 19 nt, Homo sapiens
  misc_RNA (1)...(19): siRNA sense strand
gagaauucaugcauacagu

SEQ ID NO: 2003677 - RNA, 19 nt, Homo sapiens
  misc_RNA (1)...(19): siRNA sense strand
ggagaucugcuacuaaaca

SEQ ID NO: 2003678 - RNA, 19 nt, Homo sapiens
  misc_RNA (1)...(19): siRNA sense strand
gacguggaccuacucaaua

SEQ ID NO: 2003679 - RNA, 19 nt, Homo sapiens
  misc_RNA (1)...(19): siRNA sense strand
uaugaagccuugugcaaau

SEQ ID NO: 2003680 - RNA, 19 nt, Homo sapiens
  misc_RNA (1)...(19): siRNA sense strand
ugacuuauacugucuaugu

SEQ ID NO: 2003681 - RNA, 19 nt, Homo sapiens
  misc_RNA (1)...(19): siRNA sense strand
acaggcagcugaacucuuc

SEQ ID NO: 2003682 - RNA, 19 nt, Homo sapiens
  misc_RNA (1)...(19): siRNA sense strand
gcuggaagaugcagagaag

SEQ ID NO: 2003683 - RNA, 19 nt, Homo sapiens
  misc_RNA (1)...(19): siRNA sense strand
ccgauuggauauuguauuc

SEQ ID NO: 2003684 - RNA, 19 nt, Homo sapiens
  misc_RNA (1)...(19): siRNA sense strand
cauuaacccuuggcuauau

SEQ ID NO: 2003685 - RNA, 19 nt, Homo sapiens
  misc_RNA (1)...(19): siRNA sense strand
aaaugaagaaggcaaauga

SEQ ID NO: 2003686 - RNA, 19 nt, Homo sapiens
  misc_RNA (1)...(19): siRNA sense strand
guaagagaaaugagaauuc

SEQ ID NO: 2003687 - RNA, 19 nt, Homo sapiens
  misc_RNA (1)...(19): siRNA sense strand
gccaaaagcuuaauagaag

SEQ ID NO: 2003688 - RNA, 19 nt, Homo sapiens
  misc_RNA (1)...(19): siRNA sense strand
ugaagaaggcaaaugaaga

SEQ ID NO: 2003689 - RNA, 19 nt, Homo sapiens
  misc_RNA (1)...(19): siRNA sense strand
gaucucaucacacgaaaca

SEQ ID NO: 2003690 - RNA, 19 nt, Homo sapiens
  misc_RNA (1)...(19): siRNA sense strand
ugaaugccguuacucuguu

SEQ ID NO: 2003691 - RNA, 19 nt, Homo sapiens
  misc_RNA (1)...(19): siRNA sense strand
ccggauaggugacaaagag

SEQ ID NO: 2003692 - RNA, 19 nt, Homo sapiens
  misc_RNA (1)...(19): siRNA sense strand
cagagauucuugaaguguu

SEQ ID NO: 2003693 - RNA, 19 nt, Homo sapiens
  misc_RNA (1)...(19): siRNA sense strand
uaugauugccuuagaaaga

SEQ ID NO: 2003694 - RNA, 19 nt, Homo sapiens
  misc_RNA (1)...(19): siRNA sense strand
ucaguaugauugccuuaga

SEQ ID NO: 2003695 - RNA, 19 nt, Homo sapiens
  misc_RNA (1)...(19): siRNA sense strand
ccuuaggauuggcuuauuu

SEQ ID NO: 2003696 - RNA, 19 nt, Homo sapiens
  misc_RNA (1)...(19): siRNA sense strand
gaguaccucugccggauag

SEQ ID NO: 2003697 - RNA, 19 nt, Homo sapiens
  misc_RNA (1)...(19): siRNA sense strand
gaaauaguagaaaccaaca

SEQ ID NO: 2003698 - RNA, 19 nt, Homo sapiens
  misc_RNA (1)...(19): siRNA sense strand
uaaaggagcagagauucuu

SEQ ID NO: 2003699 - RNA, 19 nt, Homo sapiens
  misc_RNA (1)...(19): siRNA sense strand
gggaaaaggucauuaaagg

SEQ ID NO: 2003700 - RNA, 19 nt, Homo sapiens
  misc_RNA (1)...(19): siRNA sense strand
gaccagaucucagggaaaa

SEQ ID NO: 2003701 - RNA, 19 nt, Homo sapiens
  misc_RNA (1)...(19): siRNA sense strand
guaucagggucuuuauugu

SEQ ID NO: 2003702 - RNA, 19 nt, Homo sapiens
  misc_RNA (1)...(19): siRNA sense strand
gaaaaggccaaaagcuuaa

SEQ ID NO: 2003703 - RNA, 19 nt, Homo sapiens
  misc_RNA (1)...(19): siRNA sense strand
gagaagaaucuaggagaga

SEQ ID NO: 2003704 - RNA, 19 nt, Homo sapiens
  misc_RNA (1)...(19): siRNA sense strand
gagacuacacugcaaaaua

SEQ ID NO: 2003705 - RNA, 19 nt, Homo sapiens
  misc_RNA (1)...(19): siRNA sense strand
gguguggaauucauugauc

SEQ ID NO: 2003706 - RNA, 19 nt, Homo sapiens
  misc_RNA (1)...(19): siRNA sense strand
ucgauacuauguaagagaa

SEQ ID NO: 2003707 - RNA, 19 nt, Homo sapiens
  misc_RNA (1)...(19): siRNA sense strand
acguggaccuacucaauaa

SEQ ID NO: 2003708 - RNA, 19 nt, Homo sapiens
  misc_RNA (1)...(19): siRNA sense strand
caguaugauugccuuagaa

SEQ ID NO: 2003709 - RNA, 19 nt, Homo sapiens
  misc_RNA (1)...(19): siRNA sense strand
cuacuaaacagaguucaaa

SEQ ID NO: 2003710 - RNA, 19 nt, Homo sapiens
  misc_RNA (1)...(19): siRNA sense strand
aagaaacuaucaagaaagg

SEQ ID NO: 2003711 - RNA, 19 nt, Homo sapiens
  misc_RNA (1)...(19): siRNA sense strand
cauuaaaggagcagagauu

SEQ ID NO: 2003712 - RNA, 19 nt, Homo sapiens
  misc_RNA (1)...(19): siRNA sense strand
gcagagauucuugaagugu

SEQ ID NO: 2003713 - RNA, 19 nt, Homo sapiens
  misc_RNA (1)...(19): siRNA sense strand
gaagaugcagagaagaauc

SEQ ID NO: 2003714 - RNA, 19 nt, Homo sapiens
  misc_RNA (1)...(19): siRNA sense strand
gacaggagaaaccgccuaa

SEQ ID NO: 2003715 - RNA, 19 nt, Homo sapiens
  misc_RNA (1)...(19): siRNA sense strand
aggagggucugcccaagaa

SEQ ID NO: 2003716 - RNA, 19 nt, Homo sapiens
  misc_RNA (1)...(19): siRNA sense strand
ggaacuguccagguuuauu

SEQ ID NO: 2003717 - RNA, 19 nt, Homo sapiens
  misc_RNA (1)...(19): siRNA sense strand
cuauauggcagaagcguuu

SEQ ID NO: 2003718 - RNA, 19 nt, Homo sapiens
  misc_RNA (1)...(19): siRNA sense strand
gaauucaugcauacaguca

SEQ ID NO: 2003719 - RNA, 19 nt, Homo sapiens
  misc_RNA (1)...(19): siRNA sense strand
cauuagcgguuguggaaca

SEQ ID NO: 2003720 - RNA, 19 nt, Homo sapiens
  misc_RNA (1)...(19): siRNA sense strand
gcaguucggcaguaucugu

SEQ ID NO: 2003721 - RNA, 19 nt, Homo sapiens
  misc_RNA (1)...(19): siRNA sense strand
aaaugaagaugaguugaag

SEQ ID NO: 2003722 - RNA, 19 nt, Homo sapiens
  misc_RNA (1)...(19): siRNA sense strand
gaaaccgccuaaaagugua

SEQ ID NO: 2003723 - RNA, 19 nt, Homo sapiens
  misc_RNA (1)...(19): siRNA sense strand
ggaagaugcagagaagaau

SEQ ID NO: 2003724 - RNA, 19 nt, Homo sapiens
  misc_RNA (1)...(19): siRNA sense strand
caagaaacuaucaagaaag

SEQ ID NO: 2003725 - RNA, 19 nt, Homo sapiens
  misc_RNA (1)...(19): siRNA sense strand
ggcagaagcguuugguguu

SEQ ID NO: 2003726 - RNA, 19 nt, Homo sapiens
  misc_RNA (1)...(19): siRNA sense strand
agaaaaggccaaaagcuua

SEQ ID NO: 2003727 - RNA, 19 nt, Homo sapiens
  misc_RNA (1)...(19): siRNA sense strand
ucgcaagacauaugacaaa

SEQ ID NO: 2003728 - RNA, 19 nt, Homo sapiens
  misc_RNA (1)...(19): siRNA sense strand
gagaucugcuacuaaacag

SEQ ID NO: 2003729 - RNA, 19 nt, Homo sapiens
  misc_RNA (1)...(19): siRNA sense strand
aaaggagaucugcuacuaa

SEQ ID NO: 2003730 - RNA, 19 nt, Homo sapiens
  misc_RNA (1)...(19): siRNA sense strand
ucauuaacccuuggcuaua

SEQ ID NO: 2003731 - RNA, 19 nt, Homo sapiens
  misc_RNA (1)...(19): siRNA sense strand
agagauucuugaaguguug

SEQ ID NO: 2003732 - RNA, 19 nt, Homo sapiens
  misc_RNA (1)...(19): siRNA sense strand
gcaaaugaagaugaguuga

SEQ ID NO: 2003733 - RNA, 19 nt, Homo sapiens
  misc_RNA (1)...(19): siRNA sense strand
ggcuauucgugauuucaaa

SEQ ID NO: 2003734 - RNA, 19 nt, Homo sapiens
  misc_RNA (1)...(19): siRNA sense strand
gauaacaacauggcuccuu

SEQ ID NO: 2003735 - RNA, 19 nt, Homo sapiens
  misc_RNA (1)...(19): siRNA sense strand
acauggcuccuuacuauga

SEQ ID NO: 2003736 - RNA, 19 nt, Homo sapiens
  misc_RNA (1)...(19): siRNA sense strand
gucauuaacccuuggcuau

SEQ ID NO: 2003737 - RNA, 19 nt, Homo sapiens
  misc_RNA (1)...(19): siRNA sense strand
gaggagggucugcccaaga

SEQ ID NO: 2003738 - RNA, 19 nt, Homo sapiens
  misc_RNA (1)...(19): siRNA sense strand
agacuacacugcaaaauag

SEQ ID NO: 2003739 - RNA, 19 nt, Homo sapiens
  misc_RNA (1)...(19): siRNA sense strand
uguaucagggucuuuauug

SEQ ID NO: 2003740 - RNA, 19 nt, Homo sapiens
  misc_RNA (1)...(19): siRNA sense strand
ggcaguaccaagaaacuau

SEQ ID NO: 2003741 - RNA, 19 nt, Homo sapiens
  misc_RNA (1)...(19): siRNA sense strand
ccaacagaccugauagcaa

SEQ ID NO: 2003742 - RNA, 19 nt, Homo sapiens
  misc_RNA (1)...(19): siRNA sense strand
ggagaaaccgccuaaaagu

SEQ ID NO: 2003743 - RNA, 19 nt, Homo sapiens
  misc_RNA (1)...(19): siRNA sense strand
caagacauaugacaaaacu

SEQ ID NO: 2003744 - RNA, 19 nt, Homo sapiens
  misc_RNA (1)...(19): siRNA sense strand
ggcaaaugaagaugaguug

SEQ ID NO: 2003745 - RNA, 19 nt, Homo sapiens
  misc_RNA (1)...(19): siRNA sense strand
accaagaaacuaucaagaa

SEQ ID NO: 2003746 - RNA, 19 nt, Homo sapiens
  misc_RNA (1)...(19): siRNA sense strand
guguggaauucauugauca

SEQ ID NO: 2003747 - RNA, 19 nt, Homo sapiens
  misc_RNA (1)...(19): siRNA sense strand
uggaagaugcagagaagaa

SEQ ID NO: 2003748 - RNA, 19 nt, Homo sapiens
  misc_RNA (1)...(19): siRNA sense strand
cauggcuccuuacuaugaa

SEQ ID NO: 2003749 - RNA, 19 nt, Homo sapiens
  misc_RNA (1)...(19): siRNA sense strand
agaaggcaaaugaagauga

SEQ ID NO: 2003750 - RNA, 19 nt, Homo sapiens
  misc_RNA (1)...(19): siRNA sense strand
gaaagaagcuaccacauau

SEQ ID NO: 2003751 - RNA, 19 nt, Homo sapiens
  misc_RNA (1)...(19): siRNA sense strand
ggaaagaugugaucaguug

SEQ ID NO: 2003752 - RNA, 19 nt, Homo sapiens
  misc_RNA (1)...(19): siRNA sense strand
aaacauaucugcuagagaa

SEQ ID NO: 2003753 - RNA, 19 nt, Homo sapiens
  misc_RNA (1)...(19): siRNA sense strand
ugagagagcuugaaaguga

SEQ ID NO: 2003754 - RNA, 19 nt, Homo sapiens
  misc_RNA (1)...(19): siRNA sense strand
ucaaugaccuugcuaguaa

SEQ ID NO: 2003755 - RNA, 19 nt, Homo sapiens
  misc_RNA (1)...(19): siRNA sense strand
guucagagcucaagaaaga

SEQ ID NO: 2003756 - RNA, 19 nt, Homo sapiens
  misc_RNA (1)...(19): siRNA sense strand
gcacugagcuguucaaggu

SEQ ID NO: 2003757 - RNA, 19 nt, Homo sapiens
  misc_RNA (1)...(19): siRNA sense strand
cagcaacgcuuaauaaaug

SEQ ID NO: 2003758 - RNA, 19 nt, Homo sapiens
  misc_RNA (1)...(19): siRNA sense strand
ggagggagaucuuaaugaa

SEQ ID NO: 2003759 - RNA, 19 nt, Homo sapiens
  misc_RNA (1)...(19): siRNA sense strand
gcucaaaucucucugcuau

SEQ ID NO: 2003760 - RNA, 19 nt, Homo sapiens
  misc_RNA (1)...(19): siRNA sense strand
gcauagcucucgauaagaa

SEQ ID NO: 2003761 - RNA, 19 nt, Homo sapiens
  misc_RNA (1)...(19): siRNA sense strand
cuagagaagucccgaguua

SEQ ID NO: 2003762 - RNA, 19 nt, Homo sapiens
  misc_RNA (1)...(19): siRNA sense strand
agaaacaacuugaucauga

SEQ ID NO: 2003763 - RNA, 19 nt, Homo sapiens
  misc_RNA (1)...(19): siRNA sense strand
ugaauaagcugaugaccaa

SEQ ID NO: 2003764 - RNA, 19 nt, Homo sapiens
  misc_RNA (1)...(19): siRNA sense strand
gaccaagucuucuccauga

SEQ ID NO: 2003765 - RNA, 19 nt, Homo sapiens
  misc_RNA (1)...(19): siRNA sense strand
aaaccaaagucaaagcuua

SEQ ID NO: 2003766 - RNA, 19 nt, Homo sapiens
  misc_RNA (1)...(19): siRNA sense strand
caaaugugcuucucuugaa

SEQ ID NO: 2003767 - RNA, 19 nt, Homo sapiens
  misc_RNA (1)...(19): siRNA sense strand
gaaggaagaauuugagaaa

SEQ ID NO: 2003768 - RNA, 19 nt, Homo sapiens
  misc_RNA (1)...(19): siRNA sense strand
gcaaugaguucguaaccaa

SEQ ID NO: 2003769 - RNA, 19 nt, Homo sapiens
  misc_RNA (1)...(19): siRNA sense strand
agaagaagcuggaaacaga

SEQ ID NO: 2003770 - RNA, 19 nt, Homo sapiens
  misc_RNA (1)...(19): siRNA sense strand
gcuuugagaucuuugauuu

SEQ ID NO: 2003771 - RNA, 19 nt, Homo sapiens
  misc_RNA (1)...(19): siRNA sense strand
ggaaagaacuagaagaaaa

SEQ ID NO: 2003772 - RNA, 19 nt, Homo sapiens
  misc_RNA (1)...(19): siRNA sense strand
uaucaaauccuguccaaua

SEQ ID NO: 2003773 - RNA, 19 nt, Homo sapiens
  misc_RNA (1)...(19): siRNA sense strand
gcgcagagcuaaccugaug

SEQ ID NO: 2003774 - RNA, 19 nt, Homo sapiens
  misc_RNA (1)...(19): siRNA sense strand
ggaagaagcagauccagaa

SEQ ID NO: 2003775 - RNA, 19 nt, Homo sapiens
  misc_RNA (1)...(19): siRNA sense strand
gcugggaacucuagaagaa

SEQ ID NO: 2003776 - RNA, 19 nt, Homo sapiens
  misc_RNA (1)...(19): siRNA sense strand
aaagugagguggaaaguga

SEQ ID NO: 2003777 - RNA, 19 nt, Homo sapiens
  misc_RNA (1)...(19): siRNA sense strand
gagcagcaacgcuuaauaa

SEQ ID NO: 2003778 - RNA, 19 nt, Homo sapiens
  misc_RNA (1)...(19): siRNA sense strand
caacaugaaggaagaauuu

SEQ ID NO: 2003779 - RNA, 19 nt, Homo sapiens
  misc_RNA (1)...(19): siRNA sense strand
ggaagacugugaacacgaa

SEQ ID NO: 2003780 - RNA, 19 nt, Homo sapiens
  misc_RNA (1)...(19): siRNA sense strand
caacauccgugcuuucaug

SEQ ID NO: 2003781 - RNA, 19 nt, Homo sapiens
  misc_RNA (1)...(19): siRNA sense strand
gcacggaaguugcugacaa

SEQ ID NO: 2003782 - RNA, 19 nt, Homo sapiens
  misc_RNA (1)...(19): siRNA sense strand
gaucaaaucaucagugcua

SEQ ID NO: 2003783 - RNA, 19 nt, Homo sapiens
  misc_RNA (1)...(19): siRNA sense strand
cugcagauauugaaacaua

SEQ ID NO: 2003784 - RNA, 19 nt, Homo sapiens
  misc_RNA (1)...(19): siRNA sense strand
ugaaagaagcuaccacaua

SEQ ID NO: 2003785 - RNA, 19 nt, Homo sapiens
  misc_RNA (1)...(19): siRNA sense strand
agucaaagcuuacaagaga

SEQ ID NO: 2003786 - RNA, 19 nt, Homo sapiens
  misc_RNA (1)...(19): siRNA sense strand
caugaacccucccaaauau

SEQ ID NO: 2003787 - RNA, 19 nt, Homo sapiens
  misc_RNA (1)...(19): siRNA sense strand
gaagaaugccuacgaggaa

SEQ ID NO: 2003788 - RNA, 19 nt, Homo sapiens
  misc_RNA (1)...(19): siRNA sense strand
gaaagacauugaugaccuu

SEQ ID NO: 2003789 - RNA, 19 nt, Homo sapiens
  misc_RNA (1)...(19): siRNA sense strand
gaagaaaugcgagaugaaa

SEQ ID NO: 2003790 - RNA, 19 nt, Homo sapiens
  misc_RNA (1)...(19): siRNA sense strand
ggaccagcuuagugaaaua

SEQ ID NO: 2003791 - RNA, 19 nt, Homo sapiens
  misc_RNA (1)...(19): siRNA sense strand
cacaacagauugaagaauu

SEQ ID NO: 2003792 - RNA, 19 nt, Homo sapiens
  misc_RNA (1)...(19): siRNA sense strand
caaauccuguccaauaaga

SEQ ID NO: 2003793 - RNA, 19 nt, Homo sapiens
  misc_RNA (1)...(19): siRNA sense strand
gaggaggaccgcaagaaua

SEQ ID NO: 2003794 - RNA, 19 nt, Homo sapiens
  misc_RNA (1)...(19): siRNA sense strand
ggaagaagcacgcagauag

SEQ ID NO: 2003795 - RNA, 19 nt, Homo sapiens
  misc_RNA (1)...(19): siRNA sense strand
ggacauugcuggcuuugag

SEQ ID NO: 2003796 - RNA, 19 nt, Homo sapiens
  misc_RNA (1)...(19): siRNA sense strand
gauacaagguucuaaaugc

SEQ ID NO: 2003797 - RNA, 19 nt, Homo sapiens
  misc_RNA (1)...(19): siRNA sense strand
agucauaagugaagaguaa

SEQ ID NO: 2003798 - RNA, 19 nt, Homo sapiens
  misc_RNA (1)...(19): siRNA sense strand
gaaagcauauccaugaacu

SEQ ID NO: 2003799 - RNA, 19 nt, Homo sapiens
  misc_RNA (1)...(19): siRNA sense strand
ccaaagccaucuacgagaa

SEQ ID NO: 2003800 - RNA, 19 nt, Homo sapiens
  misc_RNA (1)...(19): siRNA sense strand
caaacuggcuucugcagau

SEQ ID NO: 2003801 - RNA, 19 nt, Homo sapiens
  misc_RNA (1)...(19): siRNA sense strand
gaagaacucgaucagcuaa

SEQ ID NO: 2003802 - RNA, 19 nt, Homo sapiens
  misc_RNA (1)...(19): siRNA sense strand
agaggaaacuggaggauga

SEQ ID NO: 2003803 - RNA, 19 nt, Homo sapiens
  misc_RNA (1)...(19): siRNA sense strand
ccaugaacccucccaaaua

SEQ ID NO: 2003804 - RNA, 19 nt, Homo sapiens
  misc_RNA (1)...(19): siRNA sense strand
gaggaacaauccaauguca

SEQ ID NO: 2003805 - RNA, 19 nt, Homo sapiens
  misc_RNA (1)...(19): siRNA sense strand
gaugcaggcugaaguugaa

SEQ ID NO: 2003806 - RNA, 19 nt, Homo sapiens
  misc_RNA (1)...(19): siRNA sense strand
gaaaugaugcucugaggau

SEQ ID NO: 2003807 - RNA, 19 nt, Homo sapiens
  misc_RNA (1)...(19): siRNA sense strand
gaaggcacguuuacacaca

SEQ ID NO: 2003808 - RNA, 19 nt, Homo sapiens
  misc_RNA (1)...(19): siRNA sense strand
aaccagagcucauugaaau

SEQ ID NO: 2003809 - RNA, 19 nt, Homo sapiens
  misc_RNA (1)...(19): siRNA sense strand
gcagaugccuuggcugaug

SEQ ID NO: 2003810 - RNA, 19 nt, Homo sapiens
  misc_RNA (1)...(19): siRNA sense strand
ggagauuucugaccugaca

SEQ ID NO: 2003811 - RNA, 19 nt, Homo sapiens
  misc_RNA (1)...(19): siRNA sense strand
ucaaagagguaacugaaag

SEQ ID NO: 2003812 - RNA, 19 nt, Homo sapiens
  misc_RNA (1)...(19): siRNA sense strand
acaaguggcugccggugua

SEQ ID NO: 2003813 - RNA, 19 nt, Homo sapiens
  misc_RNA (1)...(19): siRNA sense strand
ccaagaaggccaucacuga

SEQ ID NO: 2003814 - RNA, 19 nt, Homo sapiens
  misc_RNA (1)...(19): siRNA sense strand
gaggaaccaucucagaguu

SEQ ID NO: 2003815 - RNA, 19 nt, Homo sapiens
  misc_RNA (1)...(19): siRNA sense strand
ucagggagaauuugaauaa

SEQ ID NO: 2003816 - RNA, 19 nt, Homo sapiens
  misc_RNA (1)...(19): siRNA sense strand
agaacaagcuguaugaaca

SEQ ID NO: 2003817 - RNA, 19 nt, Homo sapiens
  misc_RNA (1)...(19): siRNA sense strand
ggaaguugcugacaaagcu

SEQ ID NO: 2003818 - RNA, 19 nt, Homo sapiens
  misc_RNA (1)...(19): siRNA sense strand
ggacaaauugcaaaccaaa

SEQ ID NO: 2003819 - RNA, 19 nt, Homo sapiens
  misc_RNA (1)...(19): siRNA sense strand
gaagcuguauuucaagauc

SEQ ID NO: 2003820 - RNA, 19 nt, Homo sapiens
  misc_RNA (1)...(19): siRNA sense strand
aaagcuagcucaacucauc

SEQ ID NO: 2003821 - RNA, 19 nt, Homo sapiens
  misc_RNA (1)...(19): siRNA sense strand
gaaacaacuugaucaugag

SEQ ID NO: 2003822 - RNA, 19 nt, Homo sapiens
  misc_RNA (1)...(19): siRNA sense strand
gaacuuacaacaggagauu

SEQ ID NO: 2003823 - RNA, 19 nt, Homo sapiens
  misc_RNA (1)...(19): siRNA sense strand
caaacaagcauuuacacaa

SEQ ID NO: 2003824 - RNA, 19 nt, Homo sapiens
  misc_RNA (1)...(19): siRNA sense strand
agagugagcugaagaugga

SEQ ID NO: 2003825 - RNA, 19 nt, Homo sapiens
  misc_RNA (1)...(19): siRNA sense strand
ugaaggaucucuggaacaa

SEQ ID NO: 2003826 - RNA, 19 nt, Homo sapiens
  misc_RNA (1)...(19): siRNA sense strand
gaggaaagaugugaucagu

SEQ ID NO: 2003827 - RNA, 19 nt, Homo sapiens
  misc_RNA (1)...(19): siRNA sense strand
gagcugauggccacagaua

SEQ ID NO: 2003828 - RNA, 19 nt, Homo sapiens
  misc_RNA (1)...(19): siRNA sense strand
ugaaggaacucacuuacca

SEQ ID NO: 2003829 - RNA, 19 nt, Homo sapiens
  misc_RNA (1)...(19): siRNA sense strand
gaauugaagcucagaacaa

SEQ ID NO: 2003830 - RNA, 19 nt, Homo sapiens
  misc_RNA (1)...(19): siRNA sense strand
gaacaagcuguaugaacaa

SEQ ID NO: 2003831 - RNA, 19 nt, Homo sapiens
  misc_RNA (1)...(19): siRNA sense strand
ggacuugguggacaaauug

SEQ ID NO: 2003832 - RNA, 19 nt, Homo sapiens
  misc_RNA (1)...(19): siRNA sense strand
gaaggacacucagcuacau

SEQ ID NO: 2003833 - RNA, 19 nt, Homo sapiens
  misc_RNA (1)...(19): siRNA sense strand
gaagagcagcaacgcuuaa

SEQ ID NO: 2003834 - RNA, 19 nt, Homo sapiens
  misc_RNA (1)...(19): siRNA sense strand
gaaacuggaggaugaaugu

SEQ ID NO: 2003835 - RNA, 19 nt, Homo sapiens
  misc_RNA (1)...(19): siRNA sense strand
uagaagaaaugcgagauga

SEQ ID NO: 2003836 - RNA, 19 nt, Homo sapiens
  misc_RNA (1)...(19): siRNA sense strand
ugacaacuccucucgcuuu

SEQ ID NO: 2003837 - RNA, 19 nt, Homo sapiens
  misc_RNA (1)...(19): siRNA sense strand
uagaaacacacaaggaaua

SEQ ID NO: 2003838 - RNA, 19 nt, Homo sapiens
  misc_RNA (1)...(19): siRNA sense strand
acaaacagcaacuuaauga

SEQ ID NO: 2003839 - RNA, 19 nt, Homo sapiens
  misc_RNA (1)...(19): siRNA sense strand
ugaaagagcugaggaugag

SEQ ID NO: 2003840 - RNA, 19 nt, Homo sapiens
  misc_RNA (1)...(19): siRNA sense strand
caaugaagacucuggcuuu

SEQ ID NO: 2003841 - RNA, 19 nt, Homo sapiens
  misc_RNA (1)...(19): siRNA sense strand
caacagacaccuccuucaa

SEQ ID NO: 2003842 - RNA, 19 nt, Homo sapiens
  misc_RNA (1)...(19): siRNA sense strand
caacuucaccaacgagaaa

SEQ ID NO: 2003843 - RNA, 19 nt, Homo sapiens
  misc_RNA (1)...(19): siRNA sense strand
gaagcuaccacauauuuua

SEQ ID NO: 2003844 - RNA, 19 nt, Homo sapiens
  misc_RNA (1)...(19): siRNA sense strand
gacaaugccuaucaguuca

SEQ ID NO: 2003845 - RNA, 19 nt, Homo sapiens
  misc_RNA (1)...(19): siRNA sense strand
ugaagaggcugaggaacaa

SEQ ID NO: 2003846 - RNA, 19 nt, Homo sapiens
  misc_RNA (1)...(19): siRNA sense strand
cugaggagcugaagaagga

SEQ ID NO: 2003847 - RNA, 19 nt, Homo sapiens
  misc_RNA (1)...(19): siRNA sense strand
aaacagaaguaugaggaaa

SEQ ID NO: 2003848 - RNA, 19 nt, Homo sapiens
  misc_RNA (1)...(19): siRNA sense strand
gaucaaugcugagcugaca

SEQ ID NO: 2003849 - RNA, 19 nt, Homo sapiens
  misc_RNA (1)...(19): siRNA sense strand
acagacaccuccuucaaga

SEQ ID NO: 2003850 - RNA, 19 nt, Homo sapiens
  misc_RNA (1)...(19): siRNA sense strand
gagacacccucauuuauua

SEQ ID NO: 2003851 - RNA, 19 nt, Homo sapiens
  misc_RNA (1)...(19): siRNA sense strand
gaccucagcucaaauauaa

SEQ ID NO: 2003852 - RNA, 19 nt, Homo sapiens
  misc_RNA (1)...(19): siRNA sense strand
gaacuugauuuguccuaua

SEQ ID NO: 2003853 - RNA, 19 nt, Homo sapiens
  misc_RNA (1)...(19): siRNA sense strand
gaacauaaacagagaacua

SEQ ID NO: 2003854 - RNA, 19 nt, Homo sapiens
  misc_RNA (1)...(19): siRNA sense strand
gaaaccagauuaagucaau

SEQ ID NO: 2003855 - RNA, 19 nt, Homo sapiens
  misc_RNA (1)...(19): siRNA sense strand
gaugacgucuucuuuauug

SEQ ID NO: 2003856 - RNA, 19 nt, Homo sapiens
  misc_RNA (1)...(19): siRNA sense strand
gagaagcucuggaauauac

SEQ ID NO: 2003857 - RNA, 19 nt, Homo sapiens
  misc_RNA (1)...(19): siRNA sense strand
gaugagcggugaaacauug

SEQ ID NO: 2003858 - RNA, 19 nt, Homo sapiens
  misc_RNA (1)...(19): siRNA sense strand
gcuagaagaugcugggaaa

SEQ ID NO: 2003859 - RNA, 19 nt, Homo sapiens
  misc_RNA (1)...(19): siRNA sense strand
gaggauaagugagaagaaa

SEQ ID NO: 2003860 - RNA, 19 nt, Homo sapiens
  misc_RNA (1)...(19): siRNA sense strand
gcagugagcagcagugauu

SEQ ID NO: 2003861 - RNA, 19 nt, Homo sapiens
  misc_RNA (1)...(19): siRNA sense strand
caacaaccuuacacgagua

SEQ ID NO: 2003862 - RNA, 19 nt, Homo sapiens
  misc_RNA (1)...(19): siRNA sense strand
gaaauauaccugcauuaug

SEQ ID NO: 2003863 - RNA, 19 nt, Homo sapiens
  misc_RNA (1)...(19): siRNA sense strand
ggaaauauaccugcauuau

SEQ ID NO: 2003864 - RNA, 19 nt, Homo sapiens
  misc_RNA (1)...(19): siRNA sense strand
ggaugaaucugccuuugug

SEQ ID NO: 2003865 - RNA, 19 nt, Homo sapiens
  misc_RNA (1)...(19): siRNA sense strand
ccagaaugcuauugaaaga

SEQ ID NO: 2003866 - RNA, 19 nt, Homo sapiens
  misc_RNA (1)...(19): siRNA sense strand
gcucuggaauauacuagua

SEQ ID NO: 2003867 - RNA, 19 nt, Homo sapiens
  misc_RNA (1)...(19): siRNA sense strand
ggagagagccagacuguuc

SEQ ID NO: 2003868 - RNA, 19 nt, Homo sapiens
  misc_RNA (1)...(19): siRNA sense strand
cauagaagaugcuagugaa

SEQ ID NO: 2003869 - RNA, 19 nt, Homo sapiens
  misc_RNA (1)...(19): siRNA sense strand
gaagaugcugggaaauaua

SEQ ID NO: 2003870 - RNA, 19 nt, Homo sapiens
  misc_RNA (1)...(19): siRNA sense strand
gaggaugacgucuucuuua

SEQ ID NO: 2003871 - RNA, 19 nt, Homo sapiens
  misc_RNA (1)...(19): siRNA sense strand
gcagaaagauggugguacu

SEQ ID NO: 2003872 - RNA, 19 nt, Homo sapiens
  misc_RNA (1)...(19): siRNA sense strand
gacagaacguggccacauu

SEQ ID NO: 2003873 - RNA, 19 nt, Homo sapiens
  misc_RNA (1)...(19): siRNA sense strand
ggagaaccuacaucuaaua

SEQ ID NO: 2003874 - RNA, 19 nt, Homo sapiens
  misc_RNA (1)...(19): siRNA sense strand
aaacuucccuccacacaga

SEQ ID NO: 2003875 - RNA, 19 nt, Homo sapiens
  misc_RNA (1)...(19): siRNA sense strand
ggaggucucucagcaaaug

SEQ ID NO: 2003876 - RNA, 19 nt, Homo sapiens
  misc_RNA (1)...(19): siRNA sense strand
gaacaucagcuuggaauca

SEQ ID NO: 2003877 - RNA, 19 nt, Homo sapiens
  misc_RNA (1)...(19): siRNA sense strand
uaacauggaagaacuagaa

SEQ ID NO: 2003878 - RNA, 19 nt, Homo sapiens
  misc_RNA (1)...(19): siRNA sense strand
cagcuuaaauaccugaauu

SEQ ID NO: 2003879 - RNA, 19 nt, Homo sapiens
  misc_RNA (1)...(19): siRNA sense strand
ccaaucagcuucucaucau

SEQ ID NO: 2003880 - RNA, 19 nt, Homo sapiens
  misc_RNA (1)...(19): siRNA sense strand
gaacugauucugaacacaa

SEQ ID NO: 2003881 - RNA, 19 nt, Homo sapiens
  misc_RNA (1)...(19): siRNA sense strand
ucacaagucucacuaaacu

SEQ ID NO: 2003882 - RNA, 19 nt, Homo sapiens
  misc_RNA (1)...(19): siRNA sense strand
gaugguguauuuagauuuc

SEQ ID NO: 2003883 - RNA, 19 nt, Homo sapiens
  misc_RNA (1)...(19): siRNA sense strand
gggcuugacuccuuaagau

SEQ ID NO: 2003884 - RNA, 19 nt, Homo sapiens
  misc_RNA (1)...(19): siRNA sense strand
ccaaaugccuaaagagaca

SEQ ID NO: 2003885 - RNA, 19 nt, Homo sapiens
  misc_RNA (1)...(19): siRNA sense strand
caacuggacuaaagaugau

SEQ ID NO: 2003886 - RNA, 19 nt, Homo sapiens
  misc_RNA (1)...(19): siRNA sense strand
gggcaaagcauccugaaug

SEQ ID NO: 2003887 - RNA, 19 nt, Homo sapiens
  misc_RNA (1)...(19): siRNA sense strand
caaagacuauccgaacuug

SEQ ID NO: 2003888 - RNA, 19 nt, Homo sapiens
  misc_RNA (1)...(19): siRNA sense strand
gaauggaauuagcaaacuu

SEQ ID NO: 2003889 - RNA, 19 nt, Homo sapiens
  misc_RNA (1)...(19): siRNA sense strand
uaucagaaaucaagacauc

SEQ ID NO: 2003890 - RNA, 19 nt, Homo sapiens
  misc_RNA (1)...(19): siRNA sense strand
uggagaagcucuggaauau

SEQ ID NO: 2003891 - RNA, 19 nt, Homo sapiens
  misc_RNA (1)...(19): siRNA sense strand
gaauuuaggagacaacaga

SEQ ID NO: 2003892 - RNA, 19 nt, Homo sapiens
  misc_RNA (1)...(19): siRNA sense strand
ggaauuagcaaacuuaagg

SEQ ID NO: 2003893 - RNA, 19 nt, Homo sapiens
  misc_RNA (1)...(19): siRNA sense strand
uuagagacacccucauuua

SEQ ID NO: 2003894 - RNA, 19 nt, Homo sapiens
  misc_RNA (1)...(19): siRNA sense strand
ucauauugcugauggugua

SEQ ID NO: 2003895 - RNA, 19 nt, Homo sapiens
  misc_RNA (1)...(19): siRNA sense strand
cauaaucgguugucuaacu

SEQ ID NO: 2003896 - RNA, 19 nt, Homo sapiens
  misc_RNA (1)...(19): siRNA sense strand
caggaggucucucagcaaa

SEQ ID NO: 2003897 - RNA, 19 nt, Homo sapiens
  misc_RNA (1)...(19): siRNA sense strand
gcugguugcuucgauaauu

SEQ ID NO: 2003898 - RNA, 19 nt, Homo sapiens
  misc_RNA (1)...(19): siRNA sense strand
caaacugacuguaaaugag

SEQ ID NO: 2003899 - RNA, 19 nt, Homo sapiens
  misc_RNA (1)...(19): siRNA sense strand
gaaggaaaauaucagugua

SEQ ID NO: 2003900 - RNA, 19 nt, Homo sapiens
  misc_RNA (1)...(19): siRNA sense strand
gacacauccugaaaccaua

SEQ ID NO: 2003901 - RNA, 19 nt, Homo sapiens
  misc_RNA (1)...(19): siRNA sense strand
ggacacauccugaaaccau

SEQ ID NO: 2003902 - RNA, 19 nt, Homo sapiens
  misc_RNA (1)...(19): siRNA sense strand
ggcaaagcauccugaaugu

SEQ ID NO: 2003903 - RNA, 19 nt, Homo sapiens
  misc_RNA (1)...(19): siRNA sense strand
gagccagaaugcuauugaa

SEQ ID NO: 2003904 - RNA, 19 nt, Homo sapiens
  misc_RNA (1)...(19): siRNA sense strand
gcaucuagauuugaacaau

SEQ ID NO: 2003905 - RNA, 19 nt, Homo sapiens
  misc_RNA (1)...(19): siRNA sense strand
gcauugggcaugaagauga

SEQ ID NO: 2003906 - RNA, 19 nt, Homo sapiens
  misc_RNA (1)...(19): siRNA sense strand
uagaagaugcugggaaaua

SEQ ID NO: 2003907 - RNA, 19 nt, Homo sapiens
  misc_RNA (1)...(19): siRNA sense strand
gcaaaugcuucccuaacag

SEQ ID NO: 2003908 - RNA, 19 nt, Homo sapiens
  misc_RNA (1)...(19): siRNA sense strand
gaauaacauggaagaacua

SEQ ID NO: 2003909 - RNA, 19 nt, Homo sapiens
  misc_RNA (1)...(19): siRNA sense strand
agaagaugcugggaaauau

SEQ ID NO: 2003910 - RNA, 19 nt, Homo sapiens
  misc_RNA (1)...(19): siRNA sense strand
ccaaacugacuguaaauga

SEQ ID NO: 2003911 - RNA, 19 nt, Homo sapiens
  misc_RNA (1)...(19): siRNA sense strand
ccucagcucaaauauaaua

SEQ ID NO: 2003912 - RNA, 19 nt, Homo sapiens
  misc_RNA (1)...(19): siRNA sense strand
uagagugcuuucucgguua

SEQ ID NO: 2003913 - RNA, 19 nt, Homo sapiens
  misc_RNA (1)...(19): siRNA sense strand
caauggaucugacuauucg

SEQ ID NO: 2003914 - RNA, 19 nt, Homo sapiens
  misc_RNA (1)...(19): siRNA sense strand
gcaugggaguucugccaaa

SEQ ID NO: 2003915 - RNA, 19 nt, Homo sapiens
  misc_RNA (1)...(19): siRNA sense strand
gaggcugguugcuucgaua

SEQ ID NO: 2003916 - RNA, 19 nt, Homo sapiens
  misc_RNA (1)...(19): siRNA sense strand
gcaugcagcuuaaauaccu

SEQ ID NO: 2003917 - RNA, 19 nt, Homo sapiens
  misc_RNA (1)...(19): siRNA sense strand
aagccaaacugacuguaaa

SEQ ID NO: 2003918 - RNA, 19 nt, Homo sapiens
  misc_RNA (1)...(19): siRNA sense strand
gcgcaaagacagugaaauc

SEQ ID NO: 2003919 - RNA, 19 nt, Homo sapiens
  misc_RNA (1)...(19): siRNA sense strand
gaaaccauaauugcucuaa

SEQ ID NO: 2003920 - RNA, 19 nt, Homo sapiens
  misc_RNA (1)...(19): siRNA sense strand
acaaagaaagcauucauug

SEQ ID NO: 2003921 - RNA, 19 nt, Homo sapiens
  misc_RNA (1)...(19): siRNA sense strand
caaggaaaccagauuaagu

SEQ ID NO: 2003922 - RNA, 19 nt, Homo sapiens
  misc_RNA (1)...(19): siRNA sense strand
uuacaaggaaaccagauua

SEQ ID NO: 2003923 - RNA, 19 nt, Homo sapiens
  misc_RNA (1)...(19): siRNA sense strand
ggaauggaauuagcaaacu

SEQ ID NO: 2003924 - RNA, 19 nt, Homo sapiens
  misc_RNA (1)...(19): siRNA sense strand
guuuagaccucagcucaaa

SEQ ID NO: 2003925 - RNA, 19 nt, Homo sapiens
  misc_RNA (1)...(19): siRNA sense strand
cgagaauacuguccauaca

SEQ ID NO: 2003926 - RNA, 19 nt, Homo sapiens
  misc_RNA (1)...(19): siRNA sense strand
guuguggucugcuguguug

SEQ ID NO: 2003927 - RNA, 19 nt, Homo sapiens
  misc_RNA (1)...(19): siRNA sense strand
acaagucucacuaaacuaa

SEQ ID NO: 2003928 - RNA, 19 nt, Homo sapiens
  misc_RNA (1)...(19): siRNA sense strand
ugaauaacauggaagaacu

SEQ ID NO: 2003929 - RNA, 19 nt, Homo sapiens
  misc_RNA (1)...(19): siRNA sense strand
gagaaccuacaucuaauau

SEQ ID NO: 2003930 - RNA, 19 nt, Homo sapiens
  misc_RNA (1)...(19): siRNA sense strand
gccaauggauauauacaca

SEQ ID NO: 2003931 - RNA, 19 nt, Homo sapiens
  misc_RNA (1)...(19): siRNA sense strand
gccaauggaucugacuauu

SEQ ID NO: 2003932 - RNA, 19 nt, Homo sapiens
  misc_RNA (1)...(19): siRNA sense strand
ggagaagcucuggaauaua

SEQ ID NO: 2003933 - RNA, 19 nt, Homo sapiens
  misc_RNA (1)...(19): siRNA sense strand
cuaagaggcaugaauguga

SEQ ID NO: 2003934 - RNA, 19 nt, Homo sapiens
  misc_RNA (1)...(19): siRNA sense strand
aaccauaauugcucuaaga

SEQ ID NO: 2003935 - RNA, 19 nt, Homo sapiens
  misc_RNA (1)...(19): siRNA sense strand
ggaguucugccaaagacua

SEQ ID NO: 2003936 - RNA, 19 nt, Homo sapiens
  misc_RNA (1)...(19): siRNA sense strand
ggaagaacuagaacuggaa

SEQ ID NO: 2003937 - RNA, 19 nt, Homo sapiens
  misc_RNA (1)...(19): siRNA sense strand
cuucagacauuagacuuaa

SEQ ID NO: 2003938 - RNA, 19 nt, Homo sapiens
  misc_RNA (1)...(19): siRNA sense strand
ugacguggauacugagaau

SEQ ID NO: 2003939 - RNA, 19 nt, Homo sapiens
  misc_RNA (1)...(19): siRNA sense strand
uuuccaaucuucagacauu

SEQ ID NO: 2003940 - RNA, 19 nt, Homo sapiens
  misc_RNA (1)...(19): siRNA sense strand
cugcagacauucccagcua

SEQ ID NO: 2003941 - RNA, 19 nt, Homo sapiens
  misc_RNA (1)...(19): siRNA sense strand
ggccuuugcuggugacaga

SEQ ID NO: 2003942 - RNA, 19 nt, Homo sapiens
  misc_RNA (1)...(19): siRNA sense strand
gucauaaucgguugucuaa

SEQ ID NO: 2003943 - RNA, 19 nt, Homo sapiens
  misc_RNA (1)...(19): siRNA sense strand
agagacacccucauuuauu

SEQ ID NO: 2003944 - RNA, 19 nt, Homo sapiens
  misc_RNA (1)...(19): siRNA sense strand
cuaaucacuuugguucuaa

SEQ ID NO: 2003945 - RNA, 19 nt, Homo sapiens
  misc_RNA (1)...(19): siRNA sense strand
gcagucaucagcaacuuau

SEQ ID NO: 2003946 - RNA, 19 nt, Homo sapiens
  misc_RNA (1)...(19): siRNA sense strand
auaccugcauuaugucuaa

SEQ ID NO: 2003947 - RNA, 19 nt, Homo sapiens
  misc_RNA (1)...(19): siRNA sense strand
cuuggaaucacaaacauua

SEQ ID NO: 2003948 - RNA, 19 nt, Homo sapiens
  misc_RNA (1)...(19): siRNA sense strand
cgucucaacuggacuaaag

SEQ ID NO: 2003949 - RNA, 19 nt, Homo sapiens
  misc_RNA (1)...(19): siRNA sense strand
ggaugacgucuucuuuauu

SEQ ID NO: 2003950 - RNA, 19 nt, Homo sapiens
  misc_RNA (1)...(19): siRNA sense strand
gcacugagcuguucaagau

SEQ ID NO: 2003951 - RNA, 19 nt, Homo sapiens
  misc_RNA (1)...(19): siRNA sense strand
aaacauaucugcuagagaa

SEQ ID NO: 2003952 - RNA, 19 nt, Homo sapiens
  misc_RNA (1)...(19): siRNA sense strand
ggaagaagauagaaagaau

SEQ ID NO: 2003953 - RNA, 19 nt, Homo sapiens
  misc_RNA (1)...(19): siRNA sense strand
caaaggaacuucgauaaga

SEQ ID NO: 2003954 - RNA, 19 nt, Homo sapiens
  misc_RNA (1)...(19): siRNA sense strand
gcacagaaguugcugacaa

SEQ ID NO: 2003955 - RNA, 19 nt, Homo sapiens
  misc_RNA (1)...(19): siRNA sense strand
ggaaaggugugaccagcua

SEQ ID NO: 2003956 - RNA, 19 nt, Homo sapiens
  misc_RNA (1)...(19): siRNA sense strand
gaacugauggccacagaua

SEQ ID NO: 2003957 - RNA, 19 nt, Homo sapiens
  misc_RNA (1)...(19): siRNA sense strand
ugagugaacugaaaucaaa

SEQ ID NO: 2003958 - RNA, 19 nt, Homo sapiens
  misc_RNA (1)...(19): siRNA sense strand
caagaaaggugguaagaag

SEQ ID NO: 2003959 - RNA, 19 nt, Homo sapiens
  misc_RNA (1)...(19): siRNA sense strand
gaagagaaaccacauuaga

SEQ ID NO: 2003960 - RNA, 19 nt, Homo sapiens
  misc_RNA (1)...(19): siRNA sense strand
ccacgaacccauaugauua

SEQ ID NO: 2003961 - RNA, 19 nt, Homo sapiens
  misc_RNA (1)...(19): siRNA sense strand
gagcagcugugcaucaauu

SEQ ID NO: 2003962 - RNA, 19 nt, Homo sapiens
  misc_RNA (1)...(19): siRNA sense strand
agaagaagcuggagacaga

SEQ ID NO: 2003963 - RNA, 19 nt, Homo sapiens
  misc_RNA (1)...(19): siRNA sense strand
ggaagaagcagauccagaa

SEQ ID NO: 2003964 - RNA, 19 nt, Homo sapiens
  misc_RNA (1)...(19): siRNA sense strand
gaagaagaaggaagaaauu

SEQ ID NO: 2003965 - RNA, 19 nt, Homo sapiens
  misc_RNA (1)...(19): siRNA sense strand
caaaugugcuucccucgaa

SEQ ID NO: 2003966 - RNA, 19 nt, Homo sapiens
  misc_RNA (1)...(19): siRNA sense strand
cagauuacaucgaauaaga

SEQ ID NO: 2003967 - RNA, 19 nt, Homo sapiens
  misc_RNA (1)...(19): siRNA sense strand
ggaaggaacuggaagaaaa

SEQ ID NO: 2003968 - RNA, 19 nt, Homo sapiens
  misc_RNA (1)...(19): siRNA sense strand
gaagaagcaugcagauagu

SEQ ID NO: 2003969 - RNA, 19 nt, Homo sapiens
  misc_RNA (1)...(19): siRNA sense strand
ggaagaagcaugcagauag

SEQ ID NO: 2003970 - RNA, 19 nt, Homo sapiens
  misc_RNA (1)...(19): siRNA sense strand
uagauaaacuucaggcaaa

SEQ ID NO: 2003971 - RNA, 19 nt, Homo sapiens
  misc_RNA (1)...(19): siRNA sense strand
caugaacccucccaaauau

SEQ ID NO: 2003972 - RNA, 19 nt, Homo sapiens
  misc_RNA (1)...(19): siRNA sense strand
aaagcaagauugaagauga

SEQ ID NO: 2003973 - RNA, 19 nt, Homo sapiens
  misc_RNA (1)...(19): siRNA sense strand
gaaagacauugaugaccuu

SEQ ID NO: 2003974 - RNA, 19 nt, Homo sapiens
  misc_RNA (1)...(19): siRNA sense strand
gcaagaaggccucugagaa

SEQ ID NO: 2003975 - RNA, 19 nt, Homo sapiens
  misc_RNA (1)...(19): siRNA sense strand
gaaaucagcaaucugcaaa

SEQ ID NO: 2003976 - RNA, 19 nt, Homo sapiens
  misc_RNA (1)...(19): siRNA sense strand
caacaccaaucuagcuaaa

SEQ ID NO: 2003977 - RNA, 19 nt, Homo sapiens
  misc_RNA (1)...(19): siRNA sense strand
ccauuaggcucaagaagaa

SEQ ID NO: 2003978 - RNA, 19 nt, Homo sapiens
  misc_RNA (1)...(19): siRNA sense strand
gcugagagaaguuaucaua

SEQ ID NO: 2003979 - RNA, 19 nt, Homo sapiens
  misc_RNA (1)...(19): siRNA sense strand
ugaacaagcugaugaccaa

SEQ ID NO: 2003980 - RNA, 19 nt, Homo sapiens
  misc_RNA (1)...(19): siRNA sense strand
ggaagacugugaacaccaa

SEQ ID NO: 2003981 - RNA, 19 nt, Homo sapiens
  misc_RNA (1)...(19): siRNA sense strand
acaccaaucuagcuaaauu

SEQ ID NO: 2003982 - RNA, 19 nt, Homo sapiens
  misc_RNA (1)...(19): siRNA sense strand
gaaauugaccagcugaaga

SEQ ID NO: 2003983 - RNA, 19 nt, Homo sapiens
  misc_RNA (1)...(19): siRNA sense strand
gaaacaaguggaacaagaa

SEQ ID NO: 2003984 - RNA, 19 nt, Homo sapiens
  misc_RNA (1)...(19): siRNA sense strand
aaacagaaaugugaggaaa

SEQ ID NO: 2003985 - RNA, 19 nt, Homo sapiens
  misc_RNA (1)...(19): siRNA sense strand
gaccaaagcuaaaaucaaa

SEQ ID NO: 2003986 - RNA, 19 nt, Homo sapiens
  misc_RNA (1)...(19): siRNA sense strand
gaaaaggucuccauuuaca

SEQ ID NO: 2003987 - RNA, 19 nt, Homo sapiens
  misc_RNA (1)...(19): siRNA sense strand
acaaguggcugccugugua

SEQ ID NO: 2003988 - RNA, 19 nt, Homo sapiens
  misc_RNA (1)...(19): siRNA sense strand
agaggaaacuggaggauga

SEQ ID NO: 2003989 - RNA, 19 nt, Homo sapiens
  misc_RNA (1)...(19): siRNA sense strand
gaaggcauccgcaucugua

SEQ ID NO: 2003990 - RNA, 19 nt, Homo sapiens
  misc_RNA (1)...(19): siRNA sense strand
gcaucaauuucaccaauga

SEQ ID NO: 2003991 - RNA, 19 nt, Homo sapiens
  misc_RNA (1)...(19): siRNA sense strand
cagcaucgaugaucaggaa

SEQ ID NO: 2003992 - RNA, 19 nt, Homo sapiens
  misc_RNA (1)...(19): siRNA sense strand
gagcgacucugacagugaa

SEQ ID NO: 2003993 - RNA, 19 nt, Homo sapiens
  misc_RNA (1)...(19): siRNA sense strand
gcauccagcuugaguugaa

SEQ ID NO: 2003994 - RNA, 19 nt, Homo sapiens
  misc_RNA (1)...(19): siRNA sense strand
cugcugauauugaaacaua

SEQ ID NO: 2003995 - RNA, 19 nt, Homo sapiens
  misc_RNA (1)...(19): siRNA sense strand
ccaugaacccucccaaaua

SEQ ID NO: 2003996 - RNA, 19 nt, Homo sapiens
  misc_RNA (1)...(19): siRNA sense strand
aagaaaaggucuccauuua

SEQ ID NO: 2003997 - RNA, 19 nt, Homo sapiens
  misc_RNA (1)...(19): siRNA sense strand
ccaaagccgucuacgagaa

SEQ ID NO: 2003998 - RNA, 19 nt, Homo sapiens
  misc_RNA (1)...(19): siRNA sense strand
gcagaaggagggaaacgua

SEQ ID NO: 2003999 - RNA, 19 nt, Homo sapiens
  misc_RNA (1)...(19): siRNA sense strand
ccaagaaggccaucacuga

SEQ ID NO: 2004000 - RNA, 19 nt, Homo sapiens
  misc_RNA (1)...(19): siRNA sense strand
agauugagaugaacaagaa

SEQ ID NO: 2004001 - RNA, 19 nt, Homo sapiens
  misc_RNA (1)...(19): siRNA sense strand
aaggagagguugagaguga

SEQ ID NO: 2004002 - RNA, 19 nt, Homo sapiens
  misc_RNA (1)...(19): siRNA sense strand
gaaaccagaacuuauugaa

SEQ ID NO: 2004003 - RNA, 19 nt, Homo sapiens
  misc_RNA (1)...(19): siRNA sense strand
ggaaacgcaugcugagcuu

SEQ ID NO: 2004004 - RNA, 19 nt, Homo sapiens
  misc_RNA (1)...(19): siRNA sense strand
aauaucagauccuucauga

SEQ ID NO: 2004005 - RNA, 19 nt, Homo sapiens
  misc_RNA (1)...(19): siRNA sense strand
ugacaacgccuaucaguuc

SEQ ID NO: 2004006 - RNA, 19 nt, Homo sapiens
  misc_RNA (1)...(19): siRNA sense strand
ugaaggaacucacuuacca

SEQ ID NO: 2004007 - RNA, 19 nt, Homo sapiens
  misc_RNA (1)...(19): siRNA sense strand
agaaacaaguggaacaaga

SEQ ID NO: 2004008 - RNA, 19 nt, Homo sapiens
  misc_RNA (1)...(19): siRNA sense strand
gauaaagaaugccuaugag

SEQ ID NO: 2004009 - RNA, 19 nt, Homo sapiens
  misc_RNA (1)...(19): siRNA sense strand
aaacuggcaucugcugaua

SEQ ID NO: 2004010 - RNA, 19 nt, Homo sapiens
  misc_RNA (1)...(19): siRNA sense strand
agucauaagugaagaguga

SEQ ID NO: 2004011 - RNA, 19 nt, Homo sapiens
  misc_RNA (1)...(19): siRNA sense strand
caagggaaaccuagagaaa

SEQ ID NO: 2004012 - RNA, 19 nt, Homo sapiens
  misc_RNA (1)...(19): siRNA sense strand
gcauucaauugcagaagaa

SEQ ID NO: 2004013 - RNA, 19 nt, Homo sapiens
  misc_RNA (1)...(19): siRNA sense strand
gaaacuggaggaugaaugu

SEQ ID NO: 2004014 - RNA, 19 nt, Homo sapiens
  misc_RNA (1)...(19): siRNA sense strand
ugacaacuccucucgcuuu

SEQ ID NO: 2004015 - RNA, 19 nt, Homo sapiens
  misc_RNA (1)...(19): siRNA sense strand
gauaagauccuggcagaau

SEQ ID NO: 2004016 - RNA, 19 nt, Homo sapiens
  misc_RNA (1)...(19): siRNA sense strand
gaauuaaagaggcaacuug

SEQ ID NO: 2004017 - RNA, 19 nt, Homo sapiens
  misc_RNA (1)...(19): siRNA sense strand
ccaacugagugaacugaaa

SEQ ID NO: 2004018 - RNA, 19 nt, Homo sapiens
  misc_RNA (1)...(19): siRNA sense strand
gggcuuuacuaaugaagaa

SEQ ID NO: 2004019 - RNA, 19 nt, Homo sapiens
  misc_RNA (1)...(19): siRNA sense strand
gccgggagguucacacaaa

SEQ ID NO: 2004020 - RNA, 19 nt, Homo sapiens
  misc_RNA (1)...(19): siRNA sense strand
cugaggagcugaagaagga

SEQ ID NO: 2004021 - RNA, 19 nt, Homo sapiens
  misc_RNA (1)...(19): siRNA sense strand
aggcaucucuugaacauga

SEQ ID NO: 2004022 - RNA, 19 nt, Homo sapiens
  misc_RNA (1)...(19): siRNA sense strand
gagggaaacguauccauga

SEQ ID NO: 2004023 - RNA, 19 nt, Homo sapiens
  misc_RNA (1)...(19): siRNA sense strand
gaucaggucuuccccauga

SEQ ID NO: 2004024 - RNA, 19 nt, Homo sapiens
  misc_RNA (1)...(19): siRNA sense strand
gaucaaugcugagcugaca

SEQ ID NO: 2004025 - RNA, 19 nt, Homo sapiens
  misc_RNA (1)...(19): siRNA sense strand
acagacaccuccuucaaga

SEQ ID NO: 2004026 - RNA, 19 nt, Homo sapiens
  misc_RNA (1)...(19): siRNA sense strand
ccaagcgugucauccagua

SEQ ID NO: 2004027 - RNA, 19 nt, Homo sapiens
  misc_RNA (1)...(19): siRNA sense strand
cagaauaggcccuuugaug

SEQ ID NO: 2004028 - RNA, 19 nt, Homo sapiens
  misc_RNA (1)...(19): siRNA sense strand
uaucagauccuucaugaau

SEQ ID NO: 2004029 - RNA, 19 nt, Homo sapiens
  misc_RNA (1)...(19): siRNA sense strand
gaguacccauccucacuuu

SEQ ID NO: 2004030 - RNA, 19 nt, Homo sapiens
  misc_RNA (1)...(19): siRNA sense strand
ccaagaccgugaggaauga

SEQ ID NO: 2004031 - RNA, 19 nt, Homo sapiens
  misc_RNA (1)...(19): siRNA sense strand
gcauugaggcccagaauag

SEQ ID NO: 2004032 - RNA, 19 nt, Homo sapiens
  misc_RNA (1)...(19): siRNA sense strand
ggaaacguauccaugaacu

SEQ ID NO: 2004033 - RNA, 19 nt, Homo sapiens
  misc_RNA (1)...(19): siRNA sense strand
ggaacagauugcagaagga

SEQ ID NO: 2004034 - RNA, 19 nt, Homo sapiens
  misc_RNA (1)...(19): siRNA sense strand
ugaccuugcuaguaaugua

SEQ ID NO: 2004035 - RNA, 19 nt, Homo sapiens
  misc_RNA (1)...(19): siRNA sense strand
gggaggccaucuucuguau

SEQ ID NO: 2004036 - RNA, 19 nt, Homo sapiens
  misc_RNA (1)...(19): siRNA sense strand
caaugaguaugucaccaaa

SEQ ID NO: 2004037 - RNA, 19 nt, Homo sapiens
  misc_RNA (1)...(19): siRNA sense strand
gaaauuacuucuggcaaaa

SEQ ID NO: 2004038 - RNA, 19 nt, Homo sapiens
  misc_RNA (1)...(19): siRNA sense strand
ucaaaggucugcgcaaaca

SEQ ID NO: 2004039 - RNA, 19 nt, Homo sapiens
  misc_RNA (1)...(19): siRNA sense strand
gaagaagcagauccagaaa

SEQ ID NO: 2004040 - RNA, 19 nt, Homo sapiens
  misc_RNA (1)...(19): siRNA sense strand
gcaaaggaacuucgauaag

SEQ ID NO: 2004041 - RNA, 19 nt, Homo sapiens
  misc_RNA (1)...(19): siRNA sense strand
gcaggcagcugaggaacau

SEQ ID NO: 2004042 - RNA, 19 nt, Homo sapiens
  misc_RNA (1)...(19): siRNA sense strand
uagaggagaugcgagauga

SEQ ID NO: 2004043 - RNA, 19 nt, Homo sapiens
  misc_RNA (1)...(19): siRNA sense strand
ccacacccaguauaaauuu

SEQ ID NO: 2004044 - RNA, 19 nt, Homo sapiens
  misc_RNA (1)...(19): siRNA sense strand
caagaaggccucugagaag

SEQ ID NO: 2004045 - RNA, 19 nt, Homo sapiens
  misc_RNA (1)...(19): siRNA sense strand
gaggauauggccaugauga

SEQ ID NO: 2004046 - RNA, 19 nt, Homo sapiens
  misc_RNA (1)...(19): siRNA sense strand
uugcuaagcugaccaagga

SEQ ID NO: 2004047 - RNA, 19 nt, Homo sapiens
  misc_RNA (1)...(19): siRNA sense strand
agagugagaugaagaugga

SEQ ID NO: 2004048 - RNA, 19 nt, Homo sapiens
  misc_RNA (1)...(19): siRNA sense strand
gaacaggcacuuggcauuc

SEQ ID NO: 2004049 - RNA, 19 nt, Homo sapiens
  misc_RNA (1)...(19): siRNA sense strand
agaaagggcuaagaggaaa

SEQ ID NO: 2004050 - RNA, 19 nt, Homo sapiens
  misc_RNA (1)...(19): siRNA sense strand
ggauggaagugccuuauua

SEQ ID NO: 2004051 - RNA, 19 nt, Homo sapiens
  misc_RNA (1)...(19): siRNA sense strand
gagagacgcuguccuuuaa

SEQ ID NO: 2004052 - RNA, 19 nt, Homo sapiens
  misc_RNA (1)...(19): siRNA sense strand
gcacaucaguggaguguuu

SEQ ID NO: 2004053 - RNA, 19 nt, Homo sapiens
  misc_RNA (1)...(19): siRNA sense strand
gcacaggccuucaagaaug

SEQ ID NO: 2004054 - RNA, 19 nt, Homo sapiens
  misc_RNA (1)...(19): siRNA sense strand
caacagcccugauuccaaa

SEQ ID NO: 2004055 - RNA, 19 nt, Homo sapiens
  misc_RNA (1)...(19): siRNA sense strand
ccagaaggcugcgcaaaua

SEQ ID NO: 2004056 - RNA, 19 nt, Homo sapiens
  misc_RNA (1)...(19): siRNA sense strand
ggagagaauuauauacuga

SEQ ID NO: 2004057 - RNA, 19 nt, Homo sapiens
  misc_RNA (1)...(19): siRNA sense strand
agacuuggcucucuuuaaa

SEQ ID NO: 2004058 - RNA, 19 nt, Homo sapiens
  misc_RNA (1)...(19): siRNA sense strand
ccacaaggcuggccacuuc

SEQ ID NO: 2004059 - RNA, 19 nt, Homo sapiens
  misc_RNA (1)...(19): siRNA sense strand
ggaagugccuuauuacuac

SEQ ID NO: 2004060 - RNA, 19 nt, Homo sapiens
  misc_RNA (1)...(19): siRNA sense strand
gagagaauaugaacugugu

SEQ ID NO: 2004061 - RNA, 19 nt, Homo sapiens
  misc_RNA (1)...(19): siRNA sense strand
gaacgaggagagaauuaua

SEQ ID NO: 2004062 - RNA, 19 nt, Homo sapiens
  misc_RNA (1)...(19): siRNA sense strand
gcaaauagccaacgagaca

SEQ ID NO: 2004063 - RNA, 19 nt, Homo sapiens
  misc_RNA (1)...(19): siRNA sense strand
gaagagcaguucuggaagu

SEQ ID NO: 2004064 - RNA, 19 nt, Homo sapiens
  misc_RNA (1)...(19): siRNA sense strand
gcgaggaccugguucaguu

SEQ ID NO: 2004065 - RNA, 19 nt, Homo sapiens
  misc_RNA (1)...(19): siRNA sense strand
gagcaguucuggaaguuug

SEQ ID NO: 2004066 - RNA, 19 nt, Homo sapiens
  misc_RNA (1)...(19): siRNA sense strand
gaaggcagguggcgaucuu

SEQ ID NO: 2004067 - RNA, 19 nt, Homo sapiens
  misc_RNA (1)...(19): siRNA sense strand
ggacgccucugcugaaaca

SEQ ID NO: 2004068 - RNA, 19 nt, Homo sapiens
  misc_RNA (1)...(19): siRNA sense strand
caucauggcugcuaacuac

SEQ ID NO: 2004069 - RNA, 19 nt, Homo sapiens
  misc_RNA (1)...(19): siRNA sense strand
cuucaagacuggacaaauu

SEQ ID NO: 2004070 - RNA, 19 nt, Homo sapiens
  misc_RNA (1)...(19): siRNA sense strand
ggacaucugugggaauuuc

SEQ ID NO: 2004071 - RNA, 19 nt, Homo sapiens
  misc_RNA (1)...(19): siRNA sense strand
gagaagugacgguguuuaa

SEQ ID NO: 2004072 - RNA, 19 nt, Homo sapiens
  misc_RNA (1)...(19): siRNA sense strand
ggacagacuuggcucucuu

SEQ ID NO: 2004073 - RNA, 19 nt, Homo sapiens
  misc_RNA (1)...(19): siRNA sense strand
cuaccgagcuccaaggaaa

SEQ ID NO: 2004074 - RNA, 19 nt, Homo sapiens
  misc_RNA (1)...(19): siRNA sense strand
agacaucgcuuugauugaa

SEQ ID NO: 2004075 - RNA, 19 nt, Homo sapiens
  misc_RNA (1)...(19): siRNA sense strand
gcagacaucgcuuugauug

SEQ ID NO: 2004076 - RNA, 19 nt, Homo sapiens
  misc_RNA (1)...(19): siRNA sense strand
gaaguuuggcuuugagaaa

SEQ ID NO: 2004077 - RNA, 19 nt, Homo sapiens
  misc_RNA (1)...(19): siRNA sense strand
agaaagcccuggacauguu

SEQ ID NO: 2004078 - RNA, 19 nt, Homo sapiens
  misc_RNA (1)...(19): siRNA sense strand
gagaaaggagagaauauga

SEQ ID NO: 2004079 - RNA, 19 nt, Homo sapiens
  misc_RNA (1)...(19): siRNA sense strand
gcagacagcacgauucaga

SEQ ID NO: 2004080 - RNA, 19 nt, Homo sapiens
  misc_RNA (1)...(19): siRNA sense strand
gggcaaagcagaagaagug

SEQ ID NO: 2004081 - RNA, 19 nt, Homo sapiens
  misc_RNA (1)...(19): siRNA sense strand
gaugagaaguuuggcuuug

SEQ ID NO: 2004082 - RNA, 19 nt, Homo sapiens
  misc_RNA (1)...(19): siRNA sense strand
cgaagaagcagacagagaa

SEQ ID NO: 2004083 - RNA, 19 nt, Homo sapiens
  misc_RNA (1)...(19): siRNA sense strand
gaaggaaaucuacaucaug

SEQ ID NO: 2004084 - RNA, 19 nt, Homo sapiens
  misc_RNA (1)...(19): siRNA sense strand
ggagagagacgcuguccuu

SEQ ID NO: 2004085 - RNA, 19 nt, Homo sapiens
  misc_RNA (1)...(19): siRNA sense strand
ggaaggagccggagaucau

SEQ ID NO: 2004086 - RNA, 19 nt, Homo sapiens
  misc_RNA (1)...(19): siRNA sense strand
cagaagaagugaugaaggu

SEQ ID NO: 2004087 - RNA, 19 nt, Homo sapiens
  misc_RNA (1)...(19): siRNA sense strand
gagacgcuguccuuuaaug

SEQ ID NO: 2004088 - RNA, 19 nt, Homo sapiens
  misc_RNA (1)...(19): siRNA sense strand
gggcagacaucgcuuugau

SEQ ID NO: 2004089 - RNA, 19 nt, Homo sapiens
  misc_RNA (1)...(19): siRNA sense strand
gaaacacgaguaugggaaa

SEQ ID NO: 2004090 - RNA, 19 nt, Homo sapiens
  misc_RNA (1)...(19): siRNA sense strand
gagcaagagacuaauaaga

SEQ ID NO: 2004091 - RNA, 19 nt, Homo sapiens
  misc_RNA (1)...(19): siRNA sense strand
cgauucagaugcuguucua

SEQ ID NO: 2004092 - RNA, 19 nt, Homo sapiens
  misc_RNA (1)...(19): siRNA sense strand
ccgagcagcuguacaggaa

SEQ ID NO: 2004093 - RNA, 19 nt, Homo sapiens
  misc_RNA (1)...(19): siRNA sense strand
uuaaugagcaagagacuaa

SEQ ID NO: 2004094 - RNA, 19 nt, Homo sapiens
  misc_RNA (1)...(19): siRNA sense strand
caaggaaacaucacgcaaa

SEQ ID NO: 2004095 - RNA, 19 nt, Homo sapiens
  misc_RNA (1)...(19): siRNA sense strand
gaauaugaacugugugugu

SEQ ID NO: 2004096 - RNA, 19 nt, Homo sapiens
  misc_RNA (1)...(19): siRNA sense strand
ggacacagugaccgucuuu

SEQ ID NO: 2004097 - RNA, 19 nt, Homo sapiens
  misc_RNA (1)...(19): siRNA sense strand
gggcacaggccuucaagaa

SEQ ID NO: 2004098 - RNA, 19 nt, Homo sapiens
  misc_RNA (1)...(19): siRNA sense strand
gauccuguccuucuucauu

SEQ ID NO: 2004099 - RNA, 19 nt, Homo sapiens
  misc_RNA (1)...(19): siRNA sense strand
agagagacgcuguccuuua

SEQ ID NO: 2004100 - RNA, 19 nt, Homo sapiens
  misc_RNA (1)...(19): siRNA sense strand
cagcuucuuugucaccaua

SEQ ID NO: 2004101 - RNA, 19 nt, Homo sapiens
  misc_RNA (1)...(19): siRNA sense strand
caggcagcguggauauuua

SEQ ID NO: 2004102 - RNA, 19 nt, Homo sapiens
  misc_RNA (1)...(19): siRNA sense strand
gaaaggagagaauaugaac

SEQ ID NO: 2004103 - RNA, 19 nt, Homo sapiens
  misc_RNA (1)...(19): siRNA sense strand
gggcagaacaugagcauca

SEQ ID NO: 2004104 - RNA, 19 nt, Homo sapiens
  misc_RNA (1)...(19): siRNA sense strand
ucaaacaacuccuccuuuu

SEQ ID NO: 2004105 - RNA, 19 nt, Homo sapiens
  misc_RNA (1)...(19): siRNA sense strand
gaacaucaucggcuucuac

SEQ ID NO: 2004106 - RNA, 19 nt, Homo sapiens
  misc_RNA (1)...(19): siRNA sense strand
agguggagauugaugaaua

SEQ ID NO: 2004107 - RNA, 19 nt, Homo sapiens
  misc_RNA (1)...(19): siRNA sense strand
caaagcagaagaagugaug

SEQ ID NO: 2004108 - RNA, 19 nt, Homo sapiens
  misc_RNA (1)...(19): siRNA sense strand
ggauggcacuggugaagag

SEQ ID NO: 2004109 - RNA, 19 nt, Homo sapiens
  misc_RNA (1)...(19): siRNA sense strand
gccacgaccuccugaacaa

SEQ ID NO: 2004110 - RNA, 19 nt, Homo sapiens
  misc_RNA (1)...(19): siRNA sense strand
cuucuacgauguugaaaug

SEQ ID NO: 2004111 - RNA, 19 nt, Homo sapiens
  misc_RNA (1)...(19): siRNA sense strand
ugugagcggugaugagaaa

SEQ ID NO: 2004112 - RNA, 19 nt, Homo sapiens
  misc_RNA (1)...(19): siRNA sense strand
gaaagcccuggacauguuu

SEQ ID NO: 2004113 - RNA, 19 nt, Homo sapiens
  misc_RNA (1)...(19): siRNA sense strand
ggagaagugacgguguuua

SEQ ID NO: 2004114 - RNA, 19 nt, Homo sapiens
  misc_RNA (1)...(19): siRNA sense strand
ggcaggcggugcacuucua

SEQ ID NO: 2004115 - RNA, 19 nt, Homo sapiens
  misc_RNA (1)...(19): siRNA sense strand
gagcagcuguacaggaagu

SEQ ID NO: 2004116 - RNA, 19 nt, Homo sapiens
  misc_RNA (1)...(19): siRNA sense strand
aaggaaacaucacgcaaau

SEQ ID NO: 2004117 - RNA, 19 nt, Homo sapiens
  misc_RNA (1)...(19): siRNA sense strand
caacaggcagcguggauau

SEQ ID NO: 2004118 - RNA, 19 nt, Homo sapiens
  misc_RNA (1)...(19): siRNA sense strand
gaguccagaugagaaguuu

SEQ ID NO: 2004119 - RNA, 19 nt, Homo sapiens
  misc_RNA (1)...(19): siRNA sense strand
gagcagguccgccacaaca

SEQ ID NO: 2004120 - RNA, 19 nt, Homo sapiens
  misc_RNA (1)...(19): siRNA sense strand
agaaggaaaucuacaucau

SEQ ID NO: 2004121 - RNA, 19 nt, Homo sapiens
  misc_RNA (1)...(19): siRNA sense strand
gcagaggaccuggaugaga

SEQ ID NO: 2004122 - RNA, 19 nt, Homo sapiens
  misc_RNA (1)...(19): siRNA sense strand
uggaagugccuuauuacua

SEQ ID NO: 2004123 - RNA, 19 nt, Homo sapiens
  misc_RNA (1)...(19): siRNA sense strand
gagaauaugaacugugugu

SEQ ID NO: 2004124 - RNA, 19 nt, Homo sapiens
  misc_RNA (1)...(19): siRNA sense strand
ugagaaagcccuggacaug

SEQ ID NO: 2004125 - RNA, 19 nt, Homo sapiens
  misc_RNA (1)...(19): siRNA sense strand
uagcagaggaccuggauga

SEQ ID NO: 2004126 - RNA, 19 nt, Homo sapiens
  misc_RNA (1)...(19): siRNA sense strand
ggaaacaucacgcaaaucc

SEQ ID NO: 2004127 - RNA, 19 nt, Homo sapiens
  misc_RNA (1)...(19): siRNA sense strand
aauaugaacuguguguguu

SEQ ID NO: 2004128 - RNA, 19 nt, Homo sapiens
  misc_RNA (1)...(19): siRNA sense strand
gugcccagguggagauuga

SEQ ID NO: 2004129 - RNA, 19 nt, Homo sapiens
  misc_RNA (1)...(19): siRNA sense strand
gagaaagcccuggacaugu

SEQ ID NO: 2004130 - RNA, 19 nt, Homo sapiens
  misc_RNA (1)...(19): siRNA sense strand
uggccaacauguccuacua

SEQ ID NO: 2004131 - RNA, 19 nt, Homo sapiens
  misc_RNA (1)...(19): siRNA sense strand
ccagacggccuacagauuc

SEQ ID NO: 2004132 - RNA, 19 nt, Homo sapiens
  misc_RNA (1)...(19): siRNA sense strand
agccggagaucaugaagaa

SEQ ID NO: 2004133 - RNA, 19 nt, Homo sapiens
  misc_RNA (1)...(19): siRNA sense strand
gcaggggacugucaaacaa

SEQ ID NO: 2004134 - RNA, 19 nt, Homo sapiens
  misc_RNA (1)...(19): siRNA sense strand
aaaccgaguucaaguucga

SEQ ID NO: 2004135 - RNA, 19 nt, Homo sapiens
  misc_RNA (1)...(19): siRNA sense strand
gcaccgacaugcacaucag

SEQ ID NO: 2004136 - RNA, 19 nt, Homo sapiens
  misc_RNA (1)...(19): siRNA sense strand
gaggagagaauuauauacu

SEQ ID NO: 2004137 - RNA, 19 nt, Homo sapiens
  misc_RNA (1)...(19): siRNA sense strand
gggcuguuguucuuuguca

SEQ ID NO: 2004138 - RNA, 19 nt, Homo sapiens
  misc_RNA (1)...(19): siRNA sense strand
cacuucagcuucuuuguca

SEQ ID NO: 2004139 - RNA, 19 nt, Homo sapiens
  misc_RNA (1)...(19): siRNA sense strand
caaauugaucggagagaga

SEQ ID NO: 2004140 - RNA, 19 nt, Homo sapiens
  misc_RNA (1)...(19): siRNA sense strand
gaacuguguguguuacugu

SEQ ID NO: 2004141 - RNA, 19 nt, Homo sapiens
  misc_RNA (1)...(19): siRNA sense strand
ucaaauccaucaagcucau

SEQ ID NO: 2004142 - RNA, 19 nt, Homo sapiens
  misc_RNA (1)...(19): siRNA sense strand
acgaggaggugguggaaga

SEQ ID NO: 2004143 - RNA, 19 nt, Homo sapiens
  misc_RNA (1)...(19): siRNA sense strand
gcuaccaccuggccaccaa

SEQ ID NO: 2004144 - RNA, 19 nt, Homo sapiens
  misc_RNA (1)...(19): siRNA sense strand
ggagaagggcgugcagaug

SEQ ID NO: 2004145 - RNA, 19 nt, Homo sapiens
  misc_RNA (1)...(19): siRNA sense strand
gcagaaggaaaucuacauc

SEQ ID NO: 2004146 - RNA, 19 nt, Homo sapiens
  misc_RNA (1)...(19): siRNA sense strand
ucuggaaguuugcugaaga

SEQ ID NO: 2004147 - RNA, 19 nt, Homo sapiens
  misc_RNA (1)...(19): siRNA sense strand
ggagucaaaccgaguucaa

SEQ ID NO: 2004148 - RNA, 19 nt, Homo sapiens
  misc_RNA (1)...(19): siRNA sense strand
ggacgggacagugcacuau

SEQ ID NO: 2004149 - RNA, 19 nt, Homo sapiens
  misc_RNA (1)...(19): siRNA sense strand
ccaaggaguccaucaagca

SEQ ID NO: 2004150 - RNA, 19 nt, Homo sapiens
  misc_RNA (1)...(19): siRNA sense strand
gagcugaaguuccacuaca

SEQ ID NO: 2004151 - RNA, 19 nt, Homo sapiens
  misc_RNA (1)...(19): siRNA sense strand
ugacgucgaugaugauaca

SEQ ID NO: 2004152 - RNA, 19 nt, Homo sapiens
  misc_RNA (1)...(19): siRNA sense strand
gcagggccuuugauaacau

SEQ ID NO: 2004153 - RNA, 19 nt, Homo sapiens
  misc_RNA (1)...(19): siRNA sense strand
ugauugccaaggagaauua

SEQ ID NO: 2004154 - RNA, 19 nt, Homo sapiens
  misc_RNA (1)...(19): siRNA sense strand
ccagcagggccuuugauaa

SEQ ID NO: 2004155 - RNA, 19 nt, Homo sapiens
  misc_RNA (1)...(19): siRNA sense strand
acacagcccuucgagacaa

SEQ ID NO: 2004156 - RNA, 19 nt, Homo sapiens
  misc_RNA (1)...(19): siRNA sense strand
ggaagcuacacaacuccua

SEQ ID NO: 2004157 - RNA, 19 nt, Homo sapiens
  misc_RNA (1)...(19): siRNA sense strand
cagcagggccuuugauaac

SEQ ID NO: 2004158 - RNA, 19 nt, Homo sapiens
  misc_RNA (1)...(19): siRNA sense strand
acuccaaggugaaguuugu

SEQ ID NO: 2004159 - RNA, 19 nt, Homo sapiens
  misc_RNA (1)...(19): siRNA sense strand
caaggugaaguuugucaug

SEQ ID NO: 2004160 - RNA, 19 nt, Homo sapiens
  misc_RNA (1)...(19): siRNA sense strand
ccacggaggacuacaaggu

SEQ ID NO: 2004161 - RNA, 19 nt, Homo sapiens
  misc_RNA (1)...(19): siRNA sense strand
gaaguuugucaugguggua

SEQ ID NO: 2004162 - RNA, 19 nt, Homo sapiens
  misc_RNA (1)...(19): siRNA sense strand
ggacgugguggaugagaag

SEQ ID NO: 2004163 - RNA, 19 nt, Homo sapiens
  misc_RNA (1)...(19): siRNA sense strand
cuacggagaacgagcugaa

SEQ ID NO: 2004164 - RNA, 19 nt, Homo sapiens
  misc_RNA (1)...(19): siRNA sense strand
cacggaggacuacaaggua

SEQ ID NO: 2004165 - RNA, 19 nt, Homo sapiens
  misc_RNA (1)...(19): siRNA sense strand
gcugaaguuccacuacaug

SEQ ID NO: 2004166 - RNA, 19 nt, Homo sapiens
  misc_RNA (1)...(19): siRNA sense strand
gguagauuccuccaacaca

SEQ ID NO: 2004167 - RNA, 19 nt, Homo sapiens
  misc_RNA (1)...(19): siRNA sense strand
auggugacgucgaugauga

SEQ ID NO: 2004168 - RNA, 19 nt, Homo sapiens
  misc_RNA (1)...(19): siRNA sense strand
acggaggacuacaagguau

SEQ ID NO: 2004169 - RNA, 19 nt, Homo sapiens
  misc_RNA (1)...(19): siRNA sense strand
cggagaacgagcugaaguu

SEQ ID NO: 2004170 - RNA, 19 nt, Homo sapiens
  misc_RNA (1)...(19): siRNA sense strand
ucgcggugauugccaagga

SEQ ID NO: 2004171 - RNA, 19 nt, Homo sapiens
  misc_RNA (1)...(19): siRNA sense strand
cggaggacuacaagguaua

SEQ ID NO: 2004172 - RNA, 19 nt, Homo sapiens
  misc_RNA (1)...(19): siRNA sense strand
ggugacgucgaugaugaua

SEQ ID NO: 2004173 - RNA, 19 nt, Homo sapiens
  misc_RNA (1)...(19): siRNA sense strand
gaagggacauggaguugcu

SEQ ID NO: 2004174 - RNA, 19 nt, Homo sapiens
  misc_RNA (1)...(19): siRNA sense strand
gagcuuuggccucuacuuc

SEQ ID NO: 2004175 - RNA, 19 nt, Homo sapiens
  misc_RNA (1)...(19): siRNA sense strand
ccgcaugcacuauuacuga

SEQ ID NO: 2004176 - RNA, 19 nt, Homo sapiens
  misc_RNA (1)...(19): siRNA sense strand
gcgaagggacauggaguug

SEQ ID NO: 2004177 - RNA, 19 nt, Homo sapiens
  misc_RNA (1)...(19): siRNA sense strand
gaacuucucuacuccugua

SEQ ID NO: 2004178 - RNA, 19 nt, Homo sapiens
  misc_RNA (1)...(19): siRNA sense strand
gcagagcacugaaguacau

SEQ ID NO: 2004179 - RNA, 19 nt, Homo sapiens
  misc_RNA (1)...(19): siRNA sense strand
ugacaugguuuggcuauuu

SEQ ID NO: 2004180 - RNA, 19 nt, Homo sapiens
  misc_RNA (1)...(19): siRNA sense strand
guggagaacugcugguauu

SEQ ID NO: 2004181 - RNA, 19 nt, Homo sapiens
  misc_RNA (1)...(19): siRNA sense strand
ugcuauauguuacccauua

SEQ ID NO: 2004182 - RNA, 19 nt, Homo sapiens
  misc_RNA (1)...(19): siRNA sense strand
gcucauguuuccauaauac

SEQ ID NO: 2004183 - RNA, 19 nt, Homo sapiens
  misc_RNA (1)...(19): siRNA sense strand
uauguugguuuccuuguuu

SEQ ID NO: 2004184 - RNA, 19 nt, Homo sapiens
  misc_RNA (1)...(19): siRNA sense strand
aaagauugcuacuucuaug

SEQ ID NO: 2004185 - RNA, 19 nt, Homo sapiens
  misc_RNA (1)...(19): siRNA sense strand
aucaauaacuugcgagaaa

SEQ ID NO: 2004186 - RNA, 19 nt, Homo sapiens
  misc_RNA (1)...(19): siRNA sense strand
ucagaucgguggagaacug

SEQ ID NO: 2004187 - RNA, 19 nt, Homo sapiens
  misc_RNA (1)...(19): siRNA sense strand
ggaauagugauaggaguuu

SEQ ID NO: 2004188 - RNA, 19 nt, Homo sapiens
  misc_RNA (1)...(19): siRNA sense strand
gggaccaccuuguuuaugg

SEQ ID NO: 2004189 - RNA, 19 nt, Homo sapiens
  misc_RNA (1)...(19): siRNA sense strand
gccaugauaauuuccauuu

SEQ ID NO: 2004190 - RNA, 19 nt, Homo sapiens
  misc_RNA (1)...(19): siRNA sense strand
cagcucauguuuccauaau

SEQ ID NO: 2004191 - RNA, 19 nt, Homo sapiens
  misc_RNA (1)...(19): siRNA sense strand
gauucaccaucaugccaua

SEQ ID NO: 2004192 - RNA, 19 nt, Homo sapiens
  misc_RNA (1)...(19): siRNA sense strand
gagaacugcugguauuuug

SEQ ID NO: 2004193 - RNA, 19 nt, Homo sapiens
  misc_RNA (1)...(19): siRNA sense strand
cacaauauuuggcaaucuu

SEQ ID NO: 2004194 - RNA, 19 nt, Homo sapiens
  misc_RNA (1)...(19): siRNA sense strand
guaauccguuaauauaugg

SEQ ID NO: 2004195 - RNA, 19 nt, Homo sapiens
  misc_RNA (1)...(19): siRNA sense strand
ugccaaaacuuuaggaaua

SEQ ID NO: 2004196 - RNA, 19 nt, Homo sapiens
  misc_RNA (1)...(19): siRNA sense strand
gauugcuacuucuauguug

SEQ ID NO: 2004197 - RNA, 19 nt, Homo sapiens
  misc_RNA (1)...(19): siRNA sense strand
ggauccauauucaucacaa

SEQ ID NO: 2004198 - RNA, 19 nt, Homo sapiens
  misc_RNA (1)...(19): siRNA sense strand
gucggucccuggagcauuu

SEQ ID NO: 2004199 - RNA, 19 nt, Homo sapiens
  misc_RNA (1)...(19): siRNA sense strand
cacauguaauccguuaaua

SEQ ID NO: 2004200 - RNA, 19 nt, Homo sapiens
  misc_RNA (1)...(19): siRNA sense strand
agagggcuaugacaucuug

SEQ ID NO: 2004201 - RNA, 19 nt, Homo sapiens
  misc_RNA (1)...(19): siRNA sense strand
ggccuaugcagauggaaua

SEQ ID NO: 2004202 - RNA, 19 nt, Homo sapiens
  misc_RNA (1)...(19): siRNA sense strand
gggcuuacauuuugcaaga

SEQ ID NO: 2004203 - RNA, 19 nt, Homo sapiens
  misc_RNA (1)...(19): siRNA sense strand
ccacauguaauccguuaau

SEQ ID NO: 2004204 - RNA, 19 nt, Homo sapiens
  misc_RNA (1)...(19): siRNA sense strand
caguggccauugauagauu

SEQ ID NO: 2004205 - RNA, 19 nt, Homo sapiens
  misc_RNA (1)...(19): siRNA sense strand
cuccacauguaauccguua

SEQ ID NO: 2004206 - RNA, 19 nt, Homo sapiens
  misc_RNA (1)...(19): siRNA sense strand
gcaggauccauauucauca

SEQ ID NO: 2004207 - RNA, 19 nt, Homo sapiens
  misc_RNA (1)...(19): siRNA sense strand
uaugacaucuugguugcuu

SEQ ID NO: 2004208 - RNA, 19 nt, Homo sapiens
  misc_RNA (1)...(19): siRNA sense strand
gauccauauucaucacaau

SEQ ID NO: 2004209 - RNA, 19 nt, Homo sapiens
  misc_RNA (1)...(19): siRNA sense strand
gcucaugccaucaauaacu

SEQ ID NO: 2004210 - RNA, 19 nt, Homo sapiens
  misc_RNA (1)...(19): siRNA sense strand
ccaugauaauuuccauuuc

SEQ ID NO: 2004211 - RNA, 19 nt, Homo sapiens
  misc_RNA (1)...(19): siRNA sense strand
ucaccaucaugccauauag

SEQ ID NO: 2004212 - RNA, 19 nt, Homo sapiens
  misc_RNA (1)...(19): siRNA sense strand
uuucuucuaucccugguuu

SEQ ID NO: 2004213 - RNA, 19 nt, Homo sapiens
  misc_RNA (1)...(19): siRNA sense strand
ucagaggccuaugcagaug

SEQ ID NO: 2004214 - RNA, 19 nt, Homo sapiens
  misc_RNA (1)...(19): siRNA sense strand
gcucaguggccauugauag

SEQ ID NO: 2004215 - RNA, 19 nt, Homo sapiens
  misc_RNA (1)...(19): siRNA sense strand
caugauaauuuccauuucc

SEQ ID NO: 2004216 - RNA, 19 nt, Homo sapiens
  misc_RNA (1)...(19): siRNA sense strand
ucacacaccaaccaacuuc

SEQ ID NO: 2004217 - RNA, 19 nt, Homo sapiens
  misc_RNA (1)...(19): siRNA sense strand
gacaugguuuggcuauuuu

SEQ ID NO: 2004218 - RNA, 19 nt, Homo sapiens
  misc_RNA (1)...(19): siRNA sense strand
ggcaggauccauauucauc

SEQ ID NO: 2004219 - RNA, 19 nt, Homo sapiens
  misc_RNA (1)...(19): siRNA sense strand
ucaagugaagaaagacaaa

SEQ ID NO: 2004220 - RNA, 19 nt, Homo sapiens
  misc_RNA (1)...(19): siRNA sense strand
guuuauggcagguuucuuc

SEQ ID NO: 2004221 - RNA, 19 nt, Homo sapiens
  misc_RNA (1)...(19): siRNA sense strand
gcacugaaguacauuuugc

SEQ ID NO: 2004222 - RNA, 19 nt, Homo sapiens
  misc_RNA (1)...(19): siRNA sense strand
gaauagugauaggaguuuu

SEQ ID NO: 2004223 - RNA, 19 nt, Homo sapiens
  misc_RNA (1)...(19): siRNA sense strand
cugauuuccuccugggauu

SEQ ID NO: 2004224 - RNA, 19 nt, Homo sapiens
  misc_RNA (1)...(19): siRNA sense strand
gcuauauguuacccauuac

SEQ ID NO: 2004225 - RNA, 19 nt, Homo sapiens
  misc_RNA (1)...(19): siRNA sense strand
ucacaauauuuggcaaucu

SEQ ID NO: 2004226 - RNA, 19 nt, Homo sapiens
  misc_RNA (1)...(19): siRNA sense strand
uuauguugguuuccuuguu

SEQ ID NO: 2004227 - RNA, 19 nt, Homo sapiens
  misc_RNA (1)...(19): siRNA sense strand
uauggcagguuucuucacu

SEQ ID NO: 2004228 - RNA, 19 nt, Homo sapiens
  misc_RNA (1)...(19): siRNA sense strand
ggagaacugcugguauuuu

SEQ ID NO: 2004229 - RNA, 19 nt, Homo sapiens
  misc_RNA (1)...(19): siRNA sense strand
cuccugggauucaccauca

SEQ ID NO: 2004230 - RNA, 19 nt, Homo sapiens
  misc_RNA (1)...(19): siRNA sense strand
ucaauaacuugcgagaaaa

SEQ ID NO: 2004231 - RNA, 19 nt, Homo sapiens
  misc_RNA (1)...(19): siRNA sense strand
cucaugccaucaauaacuu

SEQ ID NO: 2004232 - RNA, 19 nt, Homo sapiens
  misc_RNA (1)...(19): siRNA sense strand
uccaguuccugcccaguga

SEQ ID NO: 2004233 - RNA, 19 nt, Homo sapiens
  misc_RNA (1)...(19): siRNA sense strand
caaucuugccaugauaauu

SEQ ID NO: 2004234 - RNA, 19 nt, Homo sapiens
  misc_RNA (1)...(19): siRNA sense strand
caaccaacuuccucauccu

SEQ ID NO: 2004235 - RNA, 19 nt, Homo sapiens
  misc_RNA (1)...(19): siRNA sense strand
cuuagcauaacauccauuu

SEQ ID NO: 2004236 - RNA, 19 nt, Homo sapiens
  misc_RNA (1)...(19): siRNA sense strand
augcucaugccaucaauaa

SEQ ID NO: 2004237 - RNA, 19 nt, Homo sapiens
  misc_RNA (1)...(19): siRNA sense strand
gggcuaugacaucuugguu

SEQ ID NO: 2004238 - RNA, 19 nt, Homo sapiens
  misc_RNA (1)...(19): siRNA sense strand
gguggagaacugcugguau

SEQ ID NO: 2004239 - RNA, 19 nt, Homo sapiens
  misc_RNA (1)...(19): siRNA sense strand
uauaugguuucuucuaucc

SEQ ID NO: 2004240 - RNA, 19 nt, Homo sapiens
  misc_RNA (1)...(19): siRNA sense strand
gaccuggacuugaauuuga

SEQ ID NO: 2004241 - RNA, 19 nt, Homo sapiens
  misc_RNA (1)...(19): siRNA sense strand
cuacagcccuccuuucuuc

SEQ ID NO: 2004242 - RNA, 19 nt, Homo sapiens
  misc_RNA (1)...(19): siRNA sense strand
ucacugagcagcuacagaa

SEQ ID NO: 2004243 - RNA, 19 nt, Homo sapiens
  misc_RNA (1)...(19): siRNA sense strand
gcuguggacucccauaaag

SEQ ID NO: 2004244 - RNA, 19 nt, Homo sapiens
  misc_RNA (1)...(19): siRNA sense strand
ggccuucguuggacuuuga

SEQ ID NO: 2004245 - RNA, 19 nt, Homo sapiens
  misc_RNA (1)...(19): siRNA sense strand
ggacuugaauuugauugag

SEQ ID NO: 2004246 - RNA, 19 nt, Homo sapiens
  misc_RNA (1)...(19): siRNA sense strand
ggaccuggacuugaauuug

SEQ ID NO: 2004247 - RNA, 19 nt, Homo sapiens
  misc_RNA (1)...(19): siRNA sense strand
gcacugccgcucacucuca

SEQ ID NO: 2004248 - RNA, 19 nt, Homo sapiens
  misc_RNA (1)...(19): siRNA sense strand
gcugaguccuugucaccuu

SEQ ID NO: 2004249 - RNA, 19 nt, Homo sapiens
  misc_RNA (1)...(19): siRNA sense strand
caagaugaaucagaaacca

SEQ ID NO: 2004250 - RNA, 19 nt, Homo sapiens
  misc_RNA (1)...(19): siRNA sense strand
uugacaagaugaaucagaa

SEQ ID NO: 2004251 - RNA, 19 nt, Homo sapiens
  misc_RNA (1)...(19): siRNA sense strand
agaugaaucagaaaccaua

SEQ ID NO: 2004252 - RNA, 19 nt, Homo sapiens
  misc_RNA (1)...(19): siRNA sense strand
cagcaucagucugccuuug

SEQ ID NO: 2004253 - RNA, 19 nt, Homo sapiens
  misc_RNA (1)...(19): siRNA sense strand
caggacagccucaacuuca

SEQ ID NO: 2004254 - RNA, 19 nt, Homo sapiens
  misc_RNA (1)...(19): siRNA sense strand
ccugaucacugagcagcua

SEQ ID NO: 2004255 - RNA, 19 nt, Homo sapiens
  misc_RNA (1)...(19): siRNA sense strand
ccucccaggugcugaguga

SEQ ID NO: 2004256 - RNA, 19 nt, Homo sapiens
  misc_RNA (1)...(19): siRNA sense strand
gcccuucucccaaguccua

SEQ ID NO: 2004257 - RNA, 19 nt, Homo sapiens
  misc_RNA (1)...(19): siRNA sense strand
ccaacugugggaacucuuu

SEQ ID NO: 2004258 - RNA, 19 nt, Homo sapiens
  misc_RNA (1)...(19): siRNA sense strand
cagugccucuucucaaugu

SEQ ID NO: 2004259 - RNA, 19 nt, Homo sapiens
  misc_RNA (1)...(19): siRNA sense strand
cccagugccucuucucaau

SEQ ID NO: 2004260 - RNA, 19 nt, Homo sapiens
  misc_RNA (1)...(19): siRNA sense strand
ugaucuggaugcccgcaaa

SEQ ID NO: 2004261 - RNA, 19 nt, Homo sapiens
  misc_RNA (1)...(19): siRNA sense strand
gaaucagaaaccauacuca

SEQ ID NO: 2004262 - RNA, 19 nt, Homo sapiens
  misc_RNA (1)...(19): siRNA sense strand
guuggacuuugacaagaug

SEQ ID NO: 2004263 - RNA, 19 nt, Homo sapiens
  misc_RNA (1)...(19): siRNA sense strand
cuuuccagcuugugucuga

SEQ ID NO: 2004264 - RNA, 19 nt, Homo sapiens
  misc_RNA (1)...(19): siRNA sense strand
ugacaagaugaaucagaaa

SEQ ID NO: 2004265 - RNA, 19 nt, Homo sapiens
  misc_RNA (1)...(19): siRNA sense strand
ggacuuugacaagaugaau

SEQ ID NO: 2004266 - RNA, 19 nt, Homo sapiens
  misc_RNA (1)...(19): siRNA sense strand
ugcacacgcuucagcauca

SEQ ID NO: 2004267 - RNA, 19 nt, Homo sapiens
  misc_RNA (1)...(19): siRNA sense strand
cugagcagcuacagaagca

SEQ ID NO: 2004268 - RNA, 19 nt, Homo sapiens
  misc_RNA (1)...(19): siRNA sense strand
augcagacaucuccaacug

SEQ ID NO: 2004269 - RNA, 19 nt, Homo sapiens
  misc_RNA (1)...(19): siRNA sense strand
gacucuggaugagcugaaa

SEQ ID NO: 2004270 - RNA, 19 nt, Homo sapiens
  misc_RNA (1)...(19): siRNA sense strand
gacccuacagcccuccuuu

SEQ ID NO: 2004271 - RNA, 19 nt, Homo sapiens
  misc_RNA (1)...(19): siRNA sense strand
ggaaggcagcagcaucucu

SEQ ID NO: 2004272 - RNA, 19 nt, Homo sapiens
  misc_RNA (1)...(19): siRNA sense strand
ccaggacagccucaacuuc

SEQ ID NO: 2004273 - RNA, 19 nt, Homo sapiens
  misc_RNA (1)...(19): siRNA sense strand
gcaucucuccaccaugguu

SEQ ID NO: 2004274 - RNA, 19 nt, Homo sapiens
  misc_RNA (1)...(19): siRNA sense strand
gggaccuggacuugaauuu

SEQ ID NO: 2004275 - RNA, 19 nt, Homo sapiens
  misc_RNA (1)...(19): siRNA sense strand
cguuggacuuugacaagau

SEQ ID NO: 2004276 - RNA, 19 nt, Homo sapiens
  misc_RNA (1)...(19): siRNA sense strand
gacaagaugaaucagaaac

SEQ ID NO: 2004277 - RNA, 19 nt, Homo sapiens
  misc_RNA (1)...(19): siRNA sense strand
agacgacacugauaaauua

SEQ ID NO: 2004278 - RNA, 19 nt, Homo sapiens
  misc_RNA (1)...(19): siRNA sense strand
gagacaacguugaucauaa

SEQ ID NO: 2004279 - RNA, 19 nt, Homo sapiens
  misc_RNA (1)...(19): siRNA sense strand
ggacccaagucaugagaaa

SEQ ID NO: 2004280 - RNA, 19 nt, Homo sapiens
  misc_RNA (1)...(19): siRNA sense strand
ggagacaacguugaucaua

SEQ ID NO: 2004281 - RNA, 19 nt, Homo sapiens
  misc_RNA (1)...(19): siRNA sense strand
gaccaugucuuccagauac

SEQ ID NO: 2004282 - RNA, 19 nt, Homo sapiens
  misc_RNA (1)...(19): siRNA sense strand
gaaccauacugaggaugaa

SEQ ID NO: 2004283 - RNA, 19 nt, Homo sapiens
  misc_RNA (1)...(19): siRNA sense strand
gaaugaggauguggaaaca

SEQ ID NO: 2004284 - RNA, 19 nt, Homo sapiens
  misc_RNA (1)...(19): siRNA sense strand
gcugcaagcuagaugaaga

SEQ ID NO: 2004285 - RNA, 19 nt, Homo sapiens
  misc_RNA (1)...(19): siRNA sense strand
gaugaagacgacacugaua

SEQ ID NO: 2004286 - RNA, 19 nt, Homo sapiens
  misc_RNA (1)...(19): siRNA sense strand
ggaggcccuugcagcuuua

SEQ ID NO: 2004287 - RNA, 19 nt, Homo sapiens
  misc_RNA (1)...(19): siRNA sense strand
agacaacguugaucauaau

SEQ ID NO: 2004288 - RNA, 19 nt, Homo sapiens
  misc_RNA (1)...(19): siRNA sense strand
gaagggacccaagucauga

SEQ ID NO: 2004289 - RNA, 19 nt, Homo sapiens
  misc_RNA (1)...(19): siRNA sense strand
ggagaagauuuggaugaga

SEQ ID NO: 2004290 - RNA, 19 nt, Homo sapiens
  misc_RNA (1)...(19): siRNA sense strand
aggcagggcucaaagaaga

SEQ ID NO: 2004291 - RNA, 19 nt, Homo sapiens
  misc_RNA (1)...(19): siRNA sense strand
gagaagcugggauucauug

SEQ ID NO: 2004292 - RNA, 19 nt, Homo sapiens
  misc_RNA (1)...(19): siRNA sense strand
caagaaccauacugaggau

SEQ ID NO: 2004293 - RNA, 19 nt, Homo sapiens
  misc_RNA (1)...(19): siRNA sense strand
cggaggcccuugcagcuuu

SEQ ID NO: 2004294 - RNA, 19 nt, Homo sapiens
  misc_RNA (1)...(19): siRNA sense strand
ugaauacgcccuucucugu

SEQ ID NO: 2004295 - RNA, 19 nt, Homo sapiens
  misc_RNA (1)...(19): siRNA sense strand
gaagacgacacugauaaau

SEQ ID NO: 2004296 - RNA, 19 nt, Homo sapiens
  misc_RNA (1)...(19): siRNA sense strand
aauacgcccuucucuguga

SEQ ID NO: 2004297 - RNA, 19 nt, Homo sapiens
  misc_RNA (1)...(19): siRNA sense strand
ugaagacgacacugauaaa

SEQ ID NO: 2004298 - RNA, 19 nt, Homo sapiens
  misc_RNA (1)...(19): siRNA sense strand
gcaucugcuuuaaugagaa

SEQ ID NO: 2004299 - RNA, 19 nt, Homo sapiens
  misc_RNA (1)...(19): siRNA sense strand
ggagaagcugggauucauu

SEQ ID NO: 2004300 - RNA, 19 nt, Homo sapiens
  misc_RNA (1)...(19): siRNA sense strand
ugagaaggguccuguucau

SEQ ID NO: 2004301 - RNA, 19 nt, Homo sapiens
  misc_RNA (1)...(19): siRNA sense strand
ggaaguacaagaccauguc

SEQ ID NO: 2004302 - RNA, 19 nt, Homo sapiens
  misc_RNA (1)...(19): siRNA sense strand
caggagaagauuuggauga

SEQ ID NO: 2004303 - RNA, 19 nt, Homo sapiens
  misc_RNA (1)...(19): siRNA sense strand
gcaaauggagcagugaagu

SEQ ID NO: 2004304 - RNA, 19 nt, Homo sapiens
  misc_RNA (1)...(19): siRNA sense strand
aagacgacacugauaaauu

SEQ ID NO: 2004305 - RNA, 19 nt, Homo sapiens
  misc_RNA (1)...(19): siRNA sense strand
gaggagaagcugggauuca

SEQ ID NO: 2004306 - RNA, 19 nt, Homo sapiens
  misc_RNA (1)...(19): siRNA sense strand
gagaaggguccuguucaug

SEQ ID NO: 2004307 - RNA, 19 nt, Homo sapiens
  misc_RNA (1)...(19): siRNA sense strand
ggauguggaaacagaaguu

SEQ ID NO: 2004308 - RNA, 19 nt, Homo sapiens
  misc_RNA (1)...(19): siRNA sense strand
uagaugaagacgacacuga

SEQ ID NO: 2004309 - RNA, 19 nt, Homo sapiens
  misc_RNA (1)...(19): siRNA sense strand
agaagggacccaagucaug

SEQ ID NO: 2004310 - RNA, 19 nt, Homo sapiens
  misc_RNA (1)...(19): siRNA sense strand
gugaagucuuggugcagaa

SEQ ID NO: 2004311 - RNA, 19 nt, Homo sapiens
  misc_RNA (1)...(19): siRNA sense strand
gugaggagaagcugggauu

SEQ ID NO: 2004312 - RNA, 19 nt, Homo sapiens
  misc_RNA (1)...(19): siRNA sense strand
caggugcuguaaaauaaua

SEQ ID NO: 2004313 - RNA, 19 nt, Homo sapiens
  misc_RNA (1)...(19): siRNA sense strand
gugguugacucaggaaaca

SEQ ID NO: 2004314 - RNA, 19 nt, Homo sapiens
  misc_RNA (1)...(19): siRNA sense strand
caaauggagcagugaaguc

SEQ ID NO: 2004315 - RNA, 19 nt, Homo sapiens
  misc_RNA (1)...(19): siRNA sense strand
augaggauguggaaacaga

SEQ ID NO: 2004316 - RNA, 19 nt, Homo sapiens
  misc_RNA (1)...(19): siRNA sense strand
gacgacacugauaaauuaa

SEQ ID NO: 2004317 - RNA, 19 nt, Homo sapiens
  misc_RNA (1)...(19): siRNA sense strand
gugcaggugcuguaaaaua

SEQ ID NO: 2004318 - RNA, 19 nt, Homo sapiens
  misc_RNA (1)...(19): siRNA sense strand
ucagaagggacccaaguca

SEQ ID NO: 2004319 - RNA, 19 nt, Homo sapiens
  misc_RNA (1)...(19): siRNA sense strand
ugaaugaggauguggaaac

SEQ ID NO: 2004320 - RNA, 19 nt, Homo sapiens
  misc_RNA (1)...(19): siRNA sense strand
ugcaggugcuguaaaauaa

SEQ ID NO: 2004321 - RNA, 19 nt, Homo sapiens
  misc_RNA (1)...(19): siRNA sense strand
agaaccauacugaggauga

SEQ ID NO: 2004322 - RNA, 19 nt, Homo sapiens
  misc_RNA (1)...(19): siRNA sense strand
ucucuuugauccaguccaa

SEQ ID NO: 2004323 - RNA, 19 nt, Homo sapiens
  misc_RNA (1)...(19): siRNA sense strand
gggugcaggugcuguaaaa

SEQ ID NO: 2004324 - RNA, 19 nt, Homo sapiens
  misc_RNA (1)...(19): siRNA sense strand
cuacugcaggagaagauuu

SEQ ID NO: 2004325 - RNA, 19 nt, Homo sapiens
  misc_RNA (1)...(19): siRNA sense strand
augaagacgacacugauaa

SEQ ID NO: 2004326 - RNA, 19 nt, Homo sapiens
  misc_RNA (1)...(19): siRNA sense strand
aggagaagcugggauucau

SEQ ID NO: 2004327 - RNA, 19 nt, Homo sapiens
  misc_RNA (1)...(19): siRNA sense strand
caucugcuuuaaugagaag

SEQ ID NO: 2004328 - RNA, 19 nt, Homo sapiens
  misc_RNA (1)...(19): siRNA sense strand
gggagcaugguuugaauac

SEQ ID NO: 2004329 - RNA, 19 nt, Homo sapiens
  misc_RNA (1)...(19): siRNA sense strand
agaggcagggcucaaagaa

SEQ ID NO: 2004330 - RNA, 19 nt, Homo sapiens
  misc_RNA (1)...(19): siRNA sense strand
auggagcagugaagucuug

SEQ ID NO: 2004331 - RNA, 19 nt, Homo sapiens
  misc_RNA (1)...(19): siRNA sense strand
cagaggcagggcucaaaga

SEQ ID NO: 2004332 - RNA, 19 nt, Homo sapiens
  misc_RNA (1)...(19): siRNA sense strand
gaaagaaagucaacccaaa

SEQ ID NO: 2004333 - RNA, 19 nt, Homo sapiens
  misc_RNA (1)...(19): siRNA sense strand
caagggagcuucacuauag

SEQ ID NO: 2004334 - RNA, 19 nt, Homo sapiens
  misc_RNA (1)...(19): siRNA sense strand
ccuacaaacugcauuauua

SEQ ID NO: 2004335 - RNA, 19 nt, Homo sapiens
  misc_RNA (1)...(19): siRNA sense strand
gcaacaauuucuagaagua

SEQ ID NO: 2004336 - RNA, 19 nt, Homo sapiens
  misc_RNA (1)...(19): siRNA sense strand
gagcaaagguuguaacaca

SEQ ID NO: 2004337 - RNA, 19 nt, Homo sapiens
  misc_RNA (1)...(19): siRNA sense strand
gaauugggaugacauagaa

SEQ ID NO: 2004338 - RNA, 19 nt, Homo sapiens
  misc_RNA (1)...(19): siRNA sense strand
gaagauaagcugagauuug

SEQ ID NO: 2004339 - RNA, 19 nt, Homo sapiens
  misc_RNA (1)...(19): siRNA sense strand
gcauggagauuucuucuau

SEQ ID NO: 2004340 - RNA, 19 nt, Homo sapiens
  misc_RNA (1)...(19): siRNA sense strand
aagcauagauucaaaggua

SEQ ID NO: 2004341 - RNA, 19 nt, Homo sapiens
  misc_RNA (1)...(19): siRNA sense strand
cagcaaccaucacaaauaa

SEQ ID NO: 2004342 - RNA, 19 nt, Homo sapiens
  misc_RNA (1)...(19): siRNA sense strand
aaacaacccuccucaaaug

SEQ ID NO: 2004343 - RNA, 19 nt, Homo sapiens
  misc_RNA (1)...(19): siRNA sense strand
gaaguaaaguaacgaaauc

SEQ ID NO: 2004344 - RNA, 19 nt, Homo sapiens
  misc_RNA (1)...(19): siRNA sense strand
ggacacaacccuuauucua

SEQ ID NO: 2004345 - RNA, 19 nt, Homo sapiens
  misc_RNA (1)...(19): siRNA sense strand
acacagaacuucaggagaa

SEQ ID NO: 2004346 - RNA, 19 nt, Homo sapiens
  misc_RNA (1)...(19): siRNA sense strand
gcaaguagaauacgagaaa

SEQ ID NO: 2004347 - RNA, 19 nt, Homo sapiens
  misc_RNA (1)...(19): siRNA sense strand
cccgaucacuuaacaauua

SEQ ID NO: 2004348 - RNA, 19 nt, Homo sapiens
  misc_RNA (1)...(19): siRNA sense strand
aaacauacccgucuacgua

SEQ ID NO: 2004349 - RNA, 19 nt, Homo sapiens
  misc_RNA (1)...(19): siRNA sense strand
gaccagauacucccaguua

SEQ ID NO: 2004350 - RNA, 19 nt, Homo sapiens
  misc_RNA (1)...(19): siRNA sense strand
ucaauacccuuccuacaaa

SEQ ID NO: 2004351 - RNA, 19 nt, Homo sapiens
  misc_RNA (1)...(19): siRNA sense strand
uaagacagcuggaaagauc

SEQ ID NO: 2004352 - RNA, 19 nt, Homo sapiens
  misc_RNA (1)...(19): siRNA sense strand
gauauuaugucaucugauc

SEQ ID NO: 2004353 - RNA, 19 nt, Homo sapiens
  misc_RNA (1)...(19): siRNA sense strand
ucacuagccucuauaaaga

SEQ ID NO: 2004354 - RNA, 19 nt, Homo sapiens
  misc_RNA (1)...(19): siRNA sense strand
gaacagggcaguaaaugga

SEQ ID NO: 2004355 - RNA, 19 nt, Homo sapiens
  misc_RNA (1)...(19): siRNA sense strand
uaaacaagaugcugacaga

SEQ ID NO: 2004356 - RNA, 19 nt, Homo sapiens
  misc_RNA (1)...(19): siRNA sense strand
ggagauggauaaaauguua

SEQ ID NO: 2004357 - RNA, 19 nt, Homo sapiens
  misc_RNA (1)...(19): siRNA sense strand
gcauuaacaucugcaagua

SEQ ID NO: 2004358 - RNA, 19 nt, Homo sapiens
  misc_RNA (1)...(19): siRNA sense strand
acacaacccuuauucuaaa

SEQ ID NO: 2004359 - RNA, 19 nt, Homo sapiens
  misc_RNA (1)...(19): siRNA sense strand
agaggaagauguuacagua

SEQ ID NO: 2004360 - RNA, 19 nt, Homo sapiens
  misc_RNA (1)...(19): siRNA sense strand
ccagaaagauaaacaagau

SEQ ID NO: 2004361 - RNA, 19 nt, Homo sapiens
  misc_RNA (1)...(19): siRNA sense strand
gaccaaaccucuaguguac

SEQ ID NO: 2004362 - RNA, 19 nt, Homo sapiens
  misc_RNA (1)...(19): siRNA sense strand
gaagaaaggauaauggaau

SEQ ID NO: 2004363 - RNA, 19 nt, Homo sapiens
  misc_RNA (1)...(19): siRNA sense strand
gcacugaaauccgaggaaa

SEQ ID NO: 2004364 - RNA, 19 nt, Homo sapiens
  misc_RNA (1)...(19): siRNA sense strand
gaaagugaagucccuauug

SEQ ID NO: 2004365 - RNA, 19 nt, Homo sapiens
  misc_RNA (1)...(19): siRNA sense strand
gagaagagauagccaggau

SEQ ID NO: 2004366 - RNA, 19 nt, Homo sapiens
  misc_RNA (1)...(19): siRNA sense strand
ccaugaagcuggaacauca

SEQ ID NO: 2004367 - RNA, 19 nt, Homo sapiens
  misc_RNA (1)...(19): siRNA sense strand
gaagaugaauuuggaucaa

SEQ ID NO: 2004368 - RNA, 19 nt, Homo sapiens
  misc_RNA (1)...(19): siRNA sense strand
uauaucaccuugaaacuug

SEQ ID NO: 2004369 - RNA, 19 nt, Homo sapiens
  misc_RNA (1)...(19): siRNA sense strand
gaucagcaaugccuacuag

SEQ ID NO: 2004370 - RNA, 19 nt, Homo sapiens
  misc_RNA (1)...(19): siRNA sense strand
ggaaagaacagaagaggau

SEQ ID NO: 2004371 - RNA, 19 nt, Homo sapiens
  misc_RNA (1)...(19): siRNA sense strand
aaagauuccuccauuaguu

SEQ ID NO: 2004372 - RNA, 19 nt, Homo sapiens
  misc_RNA (1)...(19): siRNA sense strand
ccuugaaacuugaagauaa

SEQ ID NO: 2004373 - RNA, 19 nt, Homo sapiens
  misc_RNA (1)...(19): siRNA sense strand
ccgaaagauuccuccauua

SEQ ID NO: 2004374 - RNA, 19 nt, Homo sapiens
  misc_RNA (1)...(19): siRNA sense strand
gcagaagccaucauuagaa

SEQ ID NO: 2004375 - RNA, 19 nt, Homo sapiens
  misc_RNA (1)...(19): siRNA sense strand
cguaacaucucucggauug

SEQ ID NO: 2004376 - RNA, 19 nt, Homo sapiens
  misc_RNA (1)...(19): siRNA sense strand
gagcuuaacauccugguuu

SEQ ID NO: 2004377 - RNA, 19 nt, Homo sapiens
  misc_RNA (1)...(19): siRNA sense strand
ccagggaagguaacuauua

SEQ ID NO: 2004378 - RNA, 19 nt, Homo sapiens
  misc_RNA (1)...(19): siRNA sense strand
caaaugcuaugggaaagaa

SEQ ID NO: 2004379 - RNA, 19 nt, Homo sapiens
  misc_RNA (1)...(19): siRNA sense strand
ugaagucccuauugugaaa

SEQ ID NO: 2004380 - RNA, 19 nt, Homo sapiens
  misc_RNA (1)...(19): siRNA sense strand
gacacaacccuuauucuaa

SEQ ID NO: 2004381 - RNA, 19 nt, Homo sapiens
  misc_RNA (1)...(19): siRNA sense strand
ggaggaaacuuuuaaacaa

SEQ ID NO: 2004382 - RNA, 19 nt, Homo sapiens
  misc_RNA (1)...(19): siRNA sense strand
aaagugauguuccagugua

SEQ ID NO: 2004383 - RNA, 19 nt, Homo sapiens
  misc_RNA (1)...(19): siRNA sense strand
agacuuauaucaccuugaa

SEQ ID NO: 2004384 - RNA, 19 nt, Homo sapiens
  misc_RNA (1)...(19): siRNA sense strand
guaacgaaaucuaagacuu

SEQ ID NO: 2004385 - RNA, 19 nt, Homo sapiens
  misc_RNA (1)...(19): siRNA sense strand
caucugaucaagaaacuua

SEQ ID NO: 2004386 - RNA, 19 nt, Homo sapiens
  misc_RNA (1)...(19): siRNA sense strand
gcaaagugauucagagaac

SEQ ID NO: 2004387 - RNA, 19 nt, Homo sapiens
  misc_RNA (1)...(19): siRNA sense strand
caugagaaguuuaccauuc

SEQ ID NO: 2004388 - RNA, 19 nt, Homo sapiens
  misc_RNA (1)...(19): siRNA sense strand
gcaacacgcugucaucaac

SEQ ID NO: 2004389 - RNA, 19 nt, Homo sapiens
  misc_RNA (1)...(19): siRNA sense strand
gaagagauagccaggauca

SEQ ID NO: 2004390 - RNA, 19 nt, Homo sapiens
  misc_RNA (1)...(19): siRNA sense strand
agaaagcacuauucaugaa

SEQ ID NO: 2004391 - RNA, 19 nt, Homo sapiens
  misc_RNA (1)...(19): siRNA sense strand
guacuuauaccauugaguu

SEQ ID NO: 2004392 - RNA, 19 nt, Homo sapiens
  misc_RNA (1)...(19): siRNA sense strand
caacaaguucuacaucaaa

SEQ ID NO: 2004393 - RNA, 19 nt, Homo sapiens
  misc_RNA (1)...(19): siRNA sense strand
ccacuuaccucagcugaug

SEQ ID NO: 2004394 - RNA, 19 nt, Homo sapiens
  misc_RNA (1)...(19): siRNA sense strand
ggagagagaaggagacgaa

SEQ ID NO: 2004395 - RNA, 19 nt, Homo sapiens
  misc_RNA (1)...(19): siRNA sense strand
guggacaccuacuaaauug

SEQ ID NO: 2004396 - RNA, 19 nt, Homo sapiens
  misc_RNA (1)...(19): siRNA sense strand
gaagcaacaauuucuagaa

SEQ ID NO: 2004397 - RNA, 19 nt, Homo sapiens
  misc_RNA (1)...(19): siRNA sense strand
ggaaguaaaguaacgaaau

SEQ ID NO: 2004398 - RNA, 19 nt, Homo sapiens
  misc_RNA (1)...(19): siRNA sense strand
gcauguacauuccaaacug

SEQ ID NO: 2004399 - RNA, 19 nt, Homo sapiens
  misc_RNA (1)...(19): siRNA sense strand
aaacauacccauagaacuu

SEQ ID NO: 2004400 - RNA, 19 nt, Homo sapiens
  misc_RNA (1)...(19): siRNA sense strand
gaaagcacuauucaugaaa

SEQ ID NO: 2004401 - RNA, 19 nt, Homo sapiens
  misc_RNA (1)...(19): siRNA sense strand
uuaaagagcaggaagacua

SEQ ID NO: 2004402 - RNA, 19 nt, Homo sapiens
  misc_RNA (1)...(19): siRNA sense strand
uaugucaucugaucaagaa

SEQ ID NO: 2004403 - RNA, 19 nt, Homo sapiens
  misc_RNA (1)...(19): siRNA sense strand
ucaguagacuuaacagaug

SEQ ID NO: 2004404 - RNA, 19 nt, Homo sapiens
  misc_RNA (1)...(19): siRNA sense strand
ggauaaugaugaugaccaa

SEQ ID NO: 2004405 - RNA, 19 nt, Homo sapiens
  misc_RNA (1)...(19): siRNA sense strand
ccagcaaccaucacaaaua

SEQ ID NO: 2004406 - RNA, 19 nt, Homo sapiens
  misc_RNA (1)...(19): siRNA sense strand
cgauguagcaggagagaua

SEQ ID NO: 2004407 - RNA, 19 nt, Homo sapiens
  misc_RNA (1)...(19): siRNA sense strand
uaacaucucucggauugau

SEQ ID NO: 2004408 - RNA, 19 nt, Homo sapiens
  misc_RNA (1)...(19): siRNA sense strand
ccagauacucccaguuaua

SEQ ID NO: 2004409 - RNA, 19 nt, Homo sapiens
  misc_RNA (1)...(19): siRNA sense strand
gauuauaauaggccuguua

SEQ ID NO: 2004410 - RNA, 19 nt, Homo sapiens
  misc_RNA (1)...(19): siRNA sense strand
caacuucugcuacuucuga

SEQ ID NO: 2004411 - RNA, 19 nt, Homo sapiens
  misc_RNA (1)...(19): siRNA sense strand
ggucagacaccaacacuug

SEQ ID NO: 2004412 - RNA, 19 nt, Homo sapiens
  misc_RNA (1)...(19): siRNA sense strand
ggaauccuccaagucauua

SEQ ID NO: 2004413 - RNA, 19 nt, Homo sapiens
  misc_RNA (1)...(19): siRNA sense strand
gcacaaaacuacugaagca

SEQ ID NO: 2004414 - RNA, 19 nt, Homo sapiens
  misc_RNA (1)...(19): siRNA sense strand
ggaagauguuacaguacaa

SEQ ID NO: 2004415 - RNA, 19 nt, Homo sapiens
  misc_RNA (1)...(19): siRNA sense strand
aaagugaagucccuauugu

SEQ ID NO: 2004416 - RNA, 19 nt, Homo sapiens
  misc_RNA (1)...(19): siRNA sense strand
ggaauugggaugacauaga

SEQ ID NO: 2004417 - RNA, 19 nt, Homo sapiens
  misc_RNA (1)...(19): siRNA sense strand
cagcagagccucccgauca

SEQ ID NO: 2004418 - RNA, 19 nt, Homo sapiens
  misc_RNA (1)...(19): siRNA sense strand
ggagagauagauucaguga

SEQ ID NO: 2004419 - RNA, 19 nt, Homo sapiens
  misc_RNA (1)...(19): siRNA sense strand
guaucugguucaucuagua

SEQ ID NO: 2004420 - RNA, 19 nt, Homo sapiens
  misc_RNA (1)...(19): siRNA sense strand
ggaaggaaguaaaguaacg

SEQ ID NO: 2004421 - RNA, 19 nt, Homo sapiens
  misc_RNA (1)...(19): siRNA sense strand
gaucaagaagaaaggauaa

SEQ ID NO: 2004422 - RNA, 19 nt, Homo sapiens
  misc_RNA (1)...(19): siRNA sense strand
ggaaauaaacaugaugaug

SEQ ID NO: 2004423 - RNA, 19 nt, Homo sapiens
  misc_RNA (1)...(19): siRNA sense strand
uaacagaaagcacuauuca

SEQ ID NO: 2004424 - RNA, 19 nt, Homo sapiens
  misc_RNA (1)...(19): siRNA sense strand
guagggaaccaaguuauuu

SEQ ID NO: 2004425 - RNA, 19 nt, Homo sapiens
  misc_RNA (1)...(19): siRNA sense strand
gaccaugugacaaaguuua

SEQ ID NO: 2004426 - RNA, 19 nt, Homo sapiens
  misc_RNA (1)...(19): siRNA sense strand
gaaagauuccuccauuagu

SEQ ID NO: 2004427 - RNA, 19 nt, Homo sapiens
  misc_RNA (1)...(19): siRNA sense strand
ucaaacaccggauuaaaga

SEQ ID NO: 2004428 - RNA, 19 nt, Homo sapiens
  misc_RNA (1)...(19): siRNA sense strand
gaaguauccacaacaaguu

SEQ ID NO: 2004429 - RNA, 19 nt, Homo sapiens
  misc_RNA (1)...(19): siRNA sense strand
ggugguaucugguucaucu

SEQ ID NO: 2004430 - RNA, 19 nt, Homo sapiens
  misc_RNA (1)...(19): siRNA sense strand
gaaaaccacugacuacauc

SEQ ID NO: 2004431 - RNA, 19 nt, Homo sapiens
  misc_RNA (1)...(19): siRNA sense strand
ucauggcucugcuucagua

SEQ ID NO: 2004432 - RNA, 19 nt, Homo sapiens
  misc_RNA (1)...(19): siRNA sense strand
ggaggaaacuacagacuuu

SEQ ID NO: 2004433 - RNA, 19 nt, Homo sapiens
  misc_RNA (1)...(19): siRNA sense strand
gaauaaaggugggaucaaa

SEQ ID NO: 2004434 - RNA, 19 nt, Homo sapiens
  misc_RNA (1)...(19): siRNA sense strand
ggagaaauguuuacguuca

SEQ ID NO: 2004435 - RNA, 19 nt, Homo sapiens
  misc_RNA (1)...(19): siRNA sense strand
gaagaaaccagacacaaau

SEQ ID NO: 2004436 - RNA, 19 nt, Homo sapiens
  misc_RNA (1)...(19): siRNA sense strand
gaaagacgguagccaggau

SEQ ID NO: 2004437 - RNA, 19 nt, Homo sapiens
  misc_RNA (1)...(19): siRNA sense strand
gaacgcuucuccagugguu

SEQ ID NO: 2004438 - RNA, 19 nt, Homo sapiens
  misc_RNA (1)...(19): siRNA sense strand
gcagcucccuggacaguga

SEQ ID NO: 2004439 - RNA, 19 nt, Homo sapiens
  misc_RNA (1)...(19): siRNA sense strand
caggagaaauguuuacguu

SEQ ID NO: 2004440 - RNA, 19 nt, Homo sapiens
  misc_RNA (1)...(19): siRNA sense strand
gagaagagacagcaugaga

SEQ ID NO: 2004441 - RNA, 19 nt, Homo sapiens
  misc_RNA (1)...(19): siRNA sense strand
gcaucgaacuggagauuag

SEQ ID NO: 2004442 - RNA, 19 nt, Homo sapiens
  misc_RNA (1)...(19): siRNA sense strand
gaaaccagacacaaaugaa

SEQ ID NO: 2004443 - RNA, 19 nt, Homo sapiens
  misc_RNA (1)...(19): siRNA sense strand
caucagggcggaaauagaa

SEQ ID NO: 2004444 - RNA, 19 nt, Homo sapiens
  misc_RNA (1)...(19): siRNA sense strand
gaacaguuucugaaugaga

SEQ ID NO: 2004445 - RNA, 19 nt, Homo sapiens
  misc_RNA (1)...(19): siRNA sense strand
gggcggaaauagaacaguu

SEQ ID NO: 2004446 - RNA, 19 nt, Homo sapiens
  misc_RNA (1)...(19): siRNA sense strand
ccacccagcucuuccacuu

SEQ ID NO: 2004447 - RNA, 19 nt, Homo sapiens
  misc_RNA (1)...(19): siRNA sense strand
gggcugaguuugcaugaca

SEQ ID NO: 2004448 - RNA, 19 nt, Homo sapiens
  misc_RNA (1)...(19): siRNA sense strand
gcaggaagaaggucagguu

SEQ ID NO: 2004449 - RNA, 19 nt, Homo sapiens
  misc_RNA (1)...(19): siRNA sense strand
ggaagaaggucagguucag

SEQ ID NO: 2004450 - RNA, 19 nt, Homo sapiens
  misc_RNA (1)...(19): siRNA sense strand
ucagugagcaggagaaaug

SEQ ID NO: 2004451 - RNA, 19 nt, Homo sapiens
  misc_RNA (1)...(19): siRNA sense strand
gagcaucagggcggaaaua

SEQ ID NO: 2004452 - RNA, 19 nt, Homo sapiens
  misc_RNA (1)...(19): siRNA sense strand
cagaggaaccuuucacaug

SEQ ID NO: 2004453 - RNA, 19 nt, Homo sapiens
  misc_RNA (1)...(19): siRNA sense strand
cagaagcagcacagaauaa

SEQ ID NO: 2004454 - RNA, 19 nt, Homo sapiens
  misc_RNA (1)...(19): siRNA sense strand
agaagaaaccagacacaaa

SEQ ID NO: 2004455 - RNA, 19 nt, Homo sapiens
  misc_RNA (1)...(19): siRNA sense strand
aggaguaccugaaggcaaa

SEQ ID NO: 2004456 - RNA, 19 nt, Homo sapiens
  misc_RNA (1)...(19): siRNA sense strand
gcacagcccagacgcacuu

SEQ ID NO: 2004457 - RNA, 19 nt, Homo sapiens
  misc_RNA (1)...(19): siRNA sense strand
gcucaguagugaaggucua

SEQ ID NO: 2004458 - RNA, 19 nt, Homo sapiens
  misc_RNA (1)...(19): siRNA sense strand
ggugcuagauucagacagu

SEQ ID NO: 2004459 - RNA, 19 nt, Homo sapiens
  misc_RNA (1)...(19): siRNA sense strand
gaacuggagauuaggaagu

SEQ ID NO: 2004460 - RNA, 19 nt, Homo sapiens
  misc_RNA (1)...(19): siRNA sense strand
acacagccaucaaggacuu

SEQ ID NO: 2004461 - RNA, 19 nt, Homo sapiens
  misc_RNA (1)...(19): siRNA sense strand
ugcaggagguggugaaaga

SEQ ID NO: 2004462 - RNA, 19 nt, Homo sapiens
  misc_RNA (1)...(19): siRNA sense strand
gagcugaugugugcagaag

SEQ ID NO: 2004463 - RNA, 19 nt, Homo sapiens
  misc_RNA (1)...(19): siRNA sense strand
gagaagaaaccagacacaa

SEQ ID NO: 2004464 - RNA, 19 nt, Homo sapiens
  misc_RNA (1)...(19): siRNA sense strand
gcacaggcagggcugaguu

SEQ ID NO: 2004465 - RNA, 19 nt, Homo sapiens
  misc_RNA (1)...(19): siRNA sense strand
ucagaagcagcacagaaua

SEQ ID NO: 2004466 - RNA, 19 nt, Homo sapiens
  misc_RNA (1)...(19): siRNA sense strand
caaggcgccuagacgagaa

SEQ ID NO: 2004467 - RNA, 19 nt, Homo sapiens
  misc_RNA (1)...(19): siRNA sense strand
gcugaugugugcagaagca

SEQ ID NO: 2004468 - RNA, 19 nt, Homo sapiens
  misc_RNA (1)...(19): siRNA sense strand
ccagaagccucagguccaa

SEQ ID NO: 2004469 - RNA, 19 nt, Homo sapiens
  misc_RNA (1)...(19): siRNA sense strand
aaaccagacacaaaugaaa

SEQ ID NO: 2004470 - RNA, 19 nt, Homo sapiens
  misc_RNA (1)...(19): siRNA sense strand
ggcggcagcucaguaguga

SEQ ID NO: 2004471 - RNA, 19 nt, Homo sapiens
  misc_RNA (1)...(19): siRNA sense strand
gugagcaggagaaauguuu

SEQ ID NO: 2004472 - RNA, 19 nt, Homo sapiens
  misc_RNA (1)...(19): siRNA sense strand
ggacccagcccugucuuug

SEQ ID NO: 2004473 - RNA, 19 nt, Homo sapiens
  misc_RNA (1)...(19): siRNA sense strand
accaagagccgccuacaaa

SEQ ID NO: 2004474 - RNA, 19 nt, Homo sapiens
  misc_RNA (1)...(19): siRNA sense strand
cgacuucgcccaccagagu

SEQ ID NO: 2004475 - RNA, 19 nt, Homo sapiens
  misc_RNA (1)...(19): siRNA sense strand
cggagagacuggaaagaca

SEQ ID NO: 2004476 - RNA, 19 nt, Homo sapiens
  misc_RNA (1)...(19): siRNA sense strand
cagcagcgacgauggcauu

SEQ ID NO: 2004477 - RNA, 19 nt, Homo sapiens
  misc_RNA (1)...(19): siRNA sense strand
cagaagcaauccuggacau

SEQ ID NO: 2004478 - RNA, 19 nt, Homo sapiens
  misc_RNA (1)...(19): siRNA sense strand
gaagcaauccuggacaucu

SEQ ID NO: 2004479 - RNA, 19 nt, Homo sapiens
  misc_RNA (1)...(19): siRNA sense strand
ucacaaccacgcaggagaa

SEQ ID NO: 2004480 - RNA, 19 nt, Homo sapiens
  misc_RNA (1)...(19): siRNA sense strand
ggagaagaaaccagacaca

SEQ ID NO: 2004481 - RNA, 19 nt, Homo sapiens
  misc_RNA (1)...(19): siRNA sense strand
cagaggugcugugcaggaa

SEQ ID NO: 2004482 - RNA, 19 nt, Homo sapiens
  misc_RNA (1)...(19): siRNA sense strand
agcgaaagcucaagaagag

SEQ ID NO: 2004483 - RNA, 19 nt, Homo sapiens
  misc_RNA (1)...(19): siRNA sense strand
ucacagggccaggguaaga

SEQ ID NO: 2004484 - RNA, 19 nt, Homo sapiens
  misc_RNA (1)...(19): siRNA sense strand
caagaccccucucucuaaa

SEQ ID NO: 2004485 - RNA, 19 nt, Homo sapiens
  misc_RNA (1)...(19): siRNA sense strand
caaccacgcaggagaacga

SEQ ID NO: 2004486 - RNA, 19 nt, Homo sapiens
  misc_RNA (1)...(19): siRNA sense strand
gcccguuggugcuagauuc

SEQ ID NO: 2004487 - RNA, 19 nt, Homo sapiens
  misc_RNA (1)...(19): siRNA sense strand
agugagcaguucagaaguu

SEQ ID NO: 2004488 - RNA, 19 nt, Homo sapiens
  misc_RNA (1)...(19): siRNA sense strand
cgaggguccugggaagaaa

SEQ ID NO: 2004489 - RNA, 19 nt, Homo sapiens
  misc_RNA (1)...(19): siRNA sense strand
ggaaaacacccagcaagaa

SEQ ID NO: 2004490 - RNA, 19 nt, Homo sapiens
  misc_RNA (1)...(19): siRNA sense strand
agaaaccagacacaaauga

SEQ ID NO: 2004491 - RNA, 19 nt, Homo sapiens
  misc_RNA (1)...(19): siRNA sense strand
gaaauguuuacguucacaa

SEQ ID NO: 2004492 - RNA, 19 nt, Homo sapiens
  misc_RNA (1)...(19): siRNA sense strand
ucagugagcaguucagaag

SEQ ID NO: 2004493 - RNA, 19 nt, Homo sapiens
  misc_RNA (1)...(19): siRNA sense strand
agaagcagcacagaauaaa

SEQ ID NO: 2004494 - RNA, 19 nt, Homo sapiens
  misc_RNA (1)...(19): siRNA sense strand
cagcgacgauggcauugag

SEQ ID NO: 2004495 - RNA, 19 nt, Homo sapiens
  misc_RNA (1)...(19): siRNA sense strand
gagaaauguuuacguucac

SEQ ID NO: 2004496 - RNA, 19 nt, Homo sapiens
  misc_RNA (1)...(19): siRNA sense strand
gggaggaggaaacuacaga

SEQ ID NO: 2004497 - RNA, 19 nt, Homo sapiens
  misc_RNA (1)...(19): siRNA sense strand
aaacacccagcaagaagaa

SEQ ID NO: 2004498 - RNA, 19 nt, Homo sapiens
  misc_RNA (1)...(19): siRNA sense strand
ggcggaggcaguagaugua

SEQ ID NO: 2004499 - RNA, 19 nt, Homo sapiens
  misc_RNA (1)...(19): siRNA sense strand
acccagcucuuccacuuug

SEQ ID NO: 2004500 - RNA, 19 nt, Homo sapiens
  misc_RNA (1)...(19): siRNA sense strand
gaagcagcacagaauaaag

SEQ ID NO: 2004501 - RNA, 19 nt, Homo sapiens
  misc_RNA (1)...(19): siRNA sense strand
gcaucagggcggaaauaga

SEQ ID NO: 2004502 - RNA, 19 nt, Homo sapiens
  misc_RNA (1)...(19): siRNA sense strand
gcagcucaguagugaaggu

SEQ ID NO: 2004503 - RNA, 19 nt, Homo sapiens
  misc_RNA (1)...(19): siRNA sense strand
aggaggccauccaggagua

SEQ ID NO: 2004504 - RNA, 19 nt, Homo sapiens
  misc_RNA (1)...(19): siRNA sense strand
ccggcucccugucugauga

SEQ ID NO: 2004505 - RNA, 19 nt, Homo sapiens
  misc_RNA (1)...(19): siRNA sense strand
ggccauccacgcccaagaa

SEQ ID NO: 2004506 - RNA, 19 nt, Homo sapiens
  misc_RNA (1)...(19): siRNA sense strand
caagcccacucuucuacuc

SEQ ID NO: 2004507 - RNA, 19 nt, Homo sapiens
  misc_RNA (1)...(19): siRNA sense strand
caagagccgccuacaaagg

SEQ ID NO: 2004508 - RNA, 19 nt, Homo sapiens
  misc_RNA (1)...(19): siRNA sense strand
gcgaggguccugggaagaa

SEQ ID NO: 2004509 - RNA, 19 nt, Homo sapiens
  misc_RNA (1)...(19): siRNA sense strand
gaaaacacccagcaagaag

SEQ ID NO: 2004510 - RNA, 19 nt, Homo sapiens
  misc_RNA (1)...(19): siRNA sense strand
aagcgaaagcucaagaaga

SEQ ID NO: 2004511 - RNA, 19 nt, Homo sapiens
  misc_RNA (1)...(19): siRNA sense strand
gugagcaguucagaaguuc

SEQ ID NO: 2004512 - RNA, 19 nt, Homo sapiens
  misc_RNA (1)...(19): siRNA sense strand
gcccgagacccacaggaaa

SEQ ID NO: 2004513 - RNA, 19 nt, Homo sapiens
  misc_RNA (1)...(19): siRNA sense strand
gcagugacgccagugacuu

SEQ ID NO: 2004514 - RNA, 19 nt, Homo sapiens
  misc_RNA (1)...(19): siRNA sense strand
gggcuucgaggcacagaga

SEQ ID NO: 2004515 - RNA, 19 nt, Homo sapiens
  misc_RNA (1)...(19): siRNA sense strand
cagcaucgaacuggagauu

SEQ ID NO: 2004516 - RNA, 19 nt, Homo sapiens
  misc_RNA (1)...(19): siRNA sense strand
gaugugugcagaagcaauc

SEQ ID NO: 2004517 - RNA, 19 nt, Homo sapiens
  misc_RNA (1)...(19): siRNA sense strand
ugagcaggagaaauguuua

SEQ ID NO: 2004518 - RNA, 19 nt, Homo sapiens
  misc_RNA (1)...(19): siRNA sense strand
cagaauaaaggugggauca

SEQ ID NO: 2004519 - RNA, 19 nt, Homo sapiens
  misc_RNA (1)...(19): siRNA sense strand
ccaagcgaaagcucaagaa

SEQ ID NO: 2004520 - RNA, 19 nt, Homo sapiens
  misc_RNA (1)...(19): siRNA sense strand
ccgcaagcccacucuucua

SEQ ID NO: 2004521 - RNA, 19 nt, Homo sapiens
  misc_RNA (1)...(19): siRNA sense strand
ggcggaaauagaacaguuu

SEQ ID NO: 2004522 - RNA, 19 nt, Homo sapiens
  misc_RNA (1)...(19): siRNA sense strand
ccaagagccgccuacaaag

SEQ ID NO: 2004523 - RNA, 19 nt, Homo sapiens
  misc_RNA (1)...(19): siRNA sense strand
gaggaaacuacagacuuug

SEQ ID NO: 2004524 - RNA, 19 nt, Homo sapiens
  misc_RNA (1)...(19): siRNA sense strand
gaaggcagagaugcagugu

SEQ ID NO: 2004525 - RNA, 19 nt, Homo sapiens
  misc_RNA (1)...(19): siRNA sense strand
gagcaggagaaauguuuac

SEQ ID NO: 2004526 - RNA, 19 nt, Homo sapiens
  misc_RNA (1)...(19): siRNA sense strand
gcggaggcaguagauguaa

SEQ ID NO: 2004527 - RNA, 19 nt, Homo sapiens
  misc_RNA (1)...(19): siRNA sense strand
ugucacagggccaggguaa

SEQ ID NO: 2004528 - RNA, 19 nt, Homo sapiens
  misc_RNA (1)...(19): siRNA sense strand
uagaggugguggccaugug

SEQ ID NO: 2004529 - RNA, 19 nt, Homo sapiens
  misc_RNA (1)...(19): siRNA sense strand
gacagcaucgagcaggaaa

SEQ ID NO: 2004530 - RNA, 19 nt, Homo sapiens
  misc_RNA (1)...(19): siRNA sense strand
aggaggccauccagcugua

SEQ ID NO: 2004531 - RNA, 19 nt, Homo sapiens
  misc_RNA (1)...(19): siRNA sense strand
gaagggucaacagggauga

SEQ ID NO: 2004532 - RNA, 19 nt, Homo sapiens
  misc_RNA (1)...(19): siRNA sense strand
caaauccgcugcuaaauua

SEQ ID NO: 2004533 - RNA, 19 nt, Homo sapiens
  misc_RNA (1)...(19): siRNA sense strand
ggauaccacuccauuaaua

SEQ ID NO: 2004534 - RNA, 19 nt, Homo sapiens
  misc_RNA (1)...(19): siRNA sense strand
ggauaaacuuucuacagua

SEQ ID NO: 2004535 - RNA, 19 nt, Homo sapiens
  misc_RNA (1)...(19): siRNA sense strand
gaaauaaagggucuacaaa

SEQ ID NO: 2004536 - RNA, 19 nt, Homo sapiens
  misc_RNA (1)...(19): siRNA sense strand
caucuugacuggagccuua

SEQ ID NO: 2004537 - RNA, 19 nt, Homo sapiens
  misc_RNA (1)...(19): siRNA sense strand
gauauuacauuguccaaag

SEQ ID NO: 2004538 - RNA, 19 nt, Homo sapiens
  misc_RNA (1)...(19): siRNA sense strand
ggaaauaaagggucuacaa

SEQ ID NO: 2004539 - RNA, 19 nt, Homo sapiens
  misc_RNA (1)...(19): siRNA sense strand
gagcagaccuaaccuuugg

SEQ ID NO: 2004540 - RNA, 19 nt, Homo sapiens
  misc_RNA (1)...(19): siRNA sense strand
uaacagagcaugugaucaa

SEQ ID NO: 2004541 - RNA, 19 nt, Homo sapiens
  misc_RNA (1)...(19): siRNA sense strand
aguaguaagugcuuucaua

SEQ ID NO: 2004542 - RNA, 19 nt, Homo sapiens
  misc_RNA (1)...(19): siRNA sense strand
gguugucaaucugauauua

SEQ ID NO: 2004543 - RNA, 19 nt, Homo sapiens
  misc_RNA (1)...(19): siRNA sense strand
gauaaacuuucuacaguac

SEQ ID NO: 2004544 - RNA, 19 nt, Homo sapiens
  misc_RNA (1)...(19): siRNA sense strand
uaaacuauauccugaagca

SEQ ID NO: 2004545 - RNA, 19 nt, Homo sapiens
  misc_RNA (1)...(19): siRNA sense strand
ucaaauccgcugcuaaauu

SEQ ID NO: 2004546 - RNA, 19 nt, Homo sapiens
  misc_RNA (1)...(19): siRNA sense strand
ggaguacucuauggaucua

SEQ ID NO: 2004547 - RNA, 19 nt, Homo sapiens
  misc_RNA (1)...(19): siRNA sense strand
uaucaaauccgcugcuaaa

SEQ ID NO: 2004548 - RNA, 19 nt, Homo sapiens
  misc_RNA (1)...(19): siRNA sense strand
ugagugcuguggucaguuu

SEQ ID NO: 2004549 - RNA, 19 nt, Homo sapiens
  misc_RNA (1)...(19): siRNA sense strand
gauaccacuccauuaauaa

SEQ ID NO: 2004550 - RNA, 19 nt, Homo sapiens
  misc_RNA (1)...(19): siRNA sense strand
ggcaagccaauaugauuua

SEQ ID NO: 2004551 - RNA, 19 nt, Homo sapiens
  misc_RNA (1)...(19): siRNA sense strand
gagcugggcuaucaguagu

SEQ ID NO: 2004552 - RNA, 19 nt, Homo sapiens
  misc_RNA (1)...(19): siRNA sense strand
uggauaaacuuucuacagu

SEQ ID NO: 2004553 - RNA, 19 nt, Homo sapiens
  misc_RNA (1)...(19): siRNA sense strand
uggauuggaugcagaagaa

SEQ ID NO: 2004554 - RNA, 19 nt, Homo sapiens
  misc_RNA (1)...(19): siRNA sense strand
gggcaagccaauaugauuu

SEQ ID NO: 2004555 - RNA, 19 nt, Homo sapiens
  misc_RNA (1)...(19): siRNA sense strand
gcagaagaaguaucaaauc

SEQ ID NO: 2004556 - RNA, 19 nt, Homo sapiens
  misc_RNA (1)...(19): siRNA sense strand
gcuguugguucauagcaaa

SEQ ID NO: 2004557 - RNA, 19 nt, Homo sapiens
  misc_RNA (1)...(19): siRNA sense strand
gcagugauaucuggaguac

SEQ ID NO: 2004558 - RNA, 19 nt, Homo sapiens
  misc_RNA (1)...(19): siRNA sense strand
auagugggcugcagucuug

SEQ ID NO: 2004559 - RNA, 19 nt, Homo sapiens
  misc_RNA (1)...(19): siRNA sense strand
gaucuacauuugugccaau

SEQ ID NO: 2004560 - RNA, 19 nt, Homo sapiens
  misc_RNA (1)...(19): siRNA sense strand
guaguaagugcuuucauau

SEQ ID NO: 2004561 - RNA, 19 nt, Homo sapiens
  misc_RNA (1)...(19): siRNA sense strand
uaaagggucuacaaaacua

SEQ ID NO: 2004562 - RNA, 19 nt, Homo sapiens
  misc_RNA (1)...(19): siRNA sense strand
cauuggagcugggcuauca

SEQ ID NO: 2004563 - RNA, 19 nt, Homo sapiens
  misc_RNA (1)...(19): siRNA sense strand
gccaauaugauuuagacua

SEQ ID NO: 2004564 - RNA, 19 nt, Homo sapiens
  misc_RNA (1)...(19): siRNA sense strand
gcuguugucccaauuauca

SEQ ID NO: 2004565 - RNA, 19 nt, Homo sapiens
  misc_RNA (1)...(19): siRNA sense strand
caucaaggaccacagcaaa

SEQ ID NO: 2004566 - RNA, 19 nt, Homo sapiens
  misc_RNA (1)...(19): siRNA sense strand
gcugggcuaucaguaguaa

SEQ ID NO: 2004567 - RNA, 19 nt, Homo sapiens
  misc_RNA (1)...(19): siRNA sense strand
gcugcuaaauuacauugga

SEQ ID NO: 2004568 - RNA, 19 nt, Homo sapiens
  misc_RNA (1)...(19): siRNA sense strand
caacaauggagcagaccua

SEQ ID NO: 2004569 - RNA, 19 nt, Homo sapiens
  misc_RNA (1)...(19): siRNA sense strand
gcucaagguuuggcugguu

SEQ ID NO: 2004570 - RNA, 19 nt, Homo sapiens
  misc_RNA (1)...(19): siRNA sense strand
uugguuacauuuccuguuu

SEQ ID NO: 2004571 - RNA, 19 nt, Homo sapiens
  misc_RNA (1)...(19): siRNA sense strand
ggaguacuuugggcuauag

SEQ ID NO: 2004572 - RNA, 19 nt, Homo sapiens
  misc_RNA (1)...(19): siRNA sense strand
ggaugcagaagaaguauca

SEQ ID NO: 2004573 - RNA, 19 nt, Homo sapiens
  misc_RNA (1)...(19): siRNA sense strand
ggagcagaccuaaccuuug

SEQ ID NO: 2004574 - RNA, 19 nt, Homo sapiens
  misc_RNA (1)...(19): siRNA sense strand
uuuaggccuuggaaucuua

SEQ ID NO: 2004575 - RNA, 19 nt, Homo sapiens
  misc_RNA (1)...(19): siRNA sense strand
cagaagaaguaucaaaucc

SEQ ID NO: 2004576 - RNA, 19 nt, Homo sapiens
  misc_RNA (1)...(19): siRNA sense strand
ugggcaagcucaagguuug

SEQ ID NO: 2004577 - RNA, 19 nt, Homo sapiens
  misc_RNA (1)...(19): siRNA sense strand
gcaagccaauaugauuuag

SEQ ID NO: 2004578 - RNA, 19 nt, Homo sapiens
  misc_RNA (1)...(19): siRNA sense strand
gauuuagacuauguguuug

SEQ ID NO: 2004579 - RNA, 19 nt, Homo sapiens
  misc_RNA (1)...(19): siRNA sense strand
gcaucuuucuuacaaguac

SEQ ID NO: 2004580 - RNA, 19 nt, Homo sapiens
  misc_RNA (1)...(19): siRNA sense strand
cuauggaucuacauuugug

SEQ ID NO: 2004581 - RNA, 19 nt, Homo sapiens
  misc_RNA (1)...(19): siRNA sense strand
ugggguaucuucauguuua

SEQ ID NO: 2004582 - RNA, 19 nt, Homo sapiens
  misc_RNA (1)...(19): siRNA sense strand
guacuuugggcuauagcua

SEQ ID NO: 2004583 - RNA, 19 nt, Homo sapiens
  misc_RNA (1)...(19): siRNA sense strand
guucauagcaaaucacucu

SEQ ID NO: 2004584 - RNA, 19 nt, Homo sapiens
  misc_RNA (1)...(19): siRNA sense strand
agugauaucuggaguacuc

SEQ ID NO: 2004585 - RNA, 19 nt, Homo sapiens
  misc_RNA (1)...(19): siRNA sense strand
uaccugcuguugguucaua

SEQ ID NO: 2004586 - RNA, 19 nt, Homo sapiens
  misc_RNA (1)...(19): siRNA sense strand
ggagcugggcuaucaguag

SEQ ID NO: 2004587 - RNA, 19 nt, Homo sapiens
  misc_RNA (1)...(19): siRNA sense strand
aguggcaucuuucuuacaa

SEQ ID NO: 2004588 - RNA, 19 nt, Homo sapiens
  misc_RNA (1)...(19): siRNA sense strand
ccacuccauuaauaacaga

SEQ ID NO: 2004589 - RNA, 19 nt, Homo sapiens
  misc_RNA (1)...(19): siRNA sense strand
uucaguggcaucuuucuua

SEQ ID NO: 2004590 - RNA, 19 nt, Homo sapiens
  misc_RNA (1)...(19): siRNA sense strand
ccuaaacuauauccugaag

SEQ ID NO: 2004591 - RNA, 19 nt, Homo sapiens
  misc_RNA (1)...(19): siRNA sense strand
uacaguacaccaccgcaua

SEQ ID NO: 2004592 - RNA, 19 nt, Homo sapiens
  misc_RNA (1)...(19): siRNA sense strand
ggauuuauagcugcaaugu

SEQ ID NO: 2004593 - RNA, 19 nt, Homo sapiens
  misc_RNA (1)...(19): siRNA sense strand
gcuaccugcuguugguuca

SEQ ID NO: 2004594 - RNA, 19 nt, Homo sapiens
  misc_RNA (1)...(19): siRNA sense strand
guaucuucauguuuaagga

SEQ ID NO: 2004595 - RNA, 19 nt, Homo sapiens
  misc_RNA (1)...(19): siRNA sense strand
guggucaguuuuccaauaa

SEQ ID NO: 2004596 - RNA, 19 nt, Homo sapiens
  misc_RNA (1)...(19): siRNA sense strand
ugauacuggugauggaaug

SEQ ID NO: 2004597 - RNA, 19 nt, Homo sapiens
  misc_RNA (1)...(19): siRNA sense strand
cuacauuugugccaaucau

SEQ ID NO: 2004598 - RNA, 19 nt, Homo sapiens
  misc_RNA (1)...(19): siRNA sense strand
uaucuggaguacucuaugg

SEQ ID NO: 2004599 - RNA, 19 nt, Homo sapiens
  misc_RNA (1)...(19): siRNA sense strand
gauaucuggaguacucuau

SEQ ID NO: 2004600 - RNA, 19 nt, Homo sapiens
  misc_RNA (1)...(19): siRNA sense strand
caucaaaagugaaauacca

SEQ ID NO: 2004601 - RNA, 19 nt, Homo sapiens
  misc_RNA (1)...(19): siRNA sense strand
uggagcagaccuaaccuuu

SEQ ID NO: 2004602 - RNA, 19 nt, Homo sapiens
  misc_RNA (1)...(19): siRNA sense strand
caggaguacuuugggcuau

SEQ ID NO: 2004603 - RNA, 19 nt, Homo sapiens
  misc_RNA (1)...(19): siRNA sense strand
cucuauggaucuacauuug

SEQ ID NO: 2004604 - RNA, 19 nt, Homo sapiens
  misc_RNA (1)...(19): siRNA sense strand
guuccuggguggauaaacu

SEQ ID NO: 2004605 - RNA, 19 nt, Homo sapiens
  misc_RNA (1)...(19): siRNA sense strand
uuaauaacagagcauguga

SEQ ID NO: 2004606 - RNA, 19 nt, Homo sapiens
  misc_RNA (1)...(19): siRNA sense strand
uaucaguaguaagugcuuu

SEQ ID NO: 2004607 - RNA, 19 nt, Homo sapiens
  misc_RNA (1)...(19): siRNA sense strand
uacuggugauggaauguuu

SEQ ID NO: 2004608 - RNA, 19 nt, Homo sapiens
  misc_RNA (1)...(19): siRNA sense strand
ucaguggcaucuuucuuac

SEQ ID NO: 2004609 - RNA, 19 nt, Homo sapiens
  misc_RNA (1)...(19): siRNA sense strand
gugccaaucaucuacauca

SEQ ID NO: 2004610 - RNA, 19 nt, Homo sapiens
  misc_RNA (1)...(19): siRNA sense strand
uggcaucuuucuuacaagu

SEQ ID NO: 2004611 - RNA, 19 nt, Homo sapiens
  misc_RNA (1)...(19): siRNA sense strand
guaucaaauccgcugcuaa

SEQ ID NO: 2004612 - RNA, 19 nt, Homo sapiens
  misc_RNA (1)...(19): siRNA sense strand
aggaguacuuugggcuaua

SEQ ID NO: 2004613 - RNA, 19 nt, Homo sapiens
  misc_RNA (1)...(19): siRNA sense strand
aagccaauaugauuuagac

SEQ ID NO: 2004614 - RNA, 19 nt, Homo sapiens
  misc_RNA (1)...(19): siRNA sense strand
gaucaacacaacccaagac

SEQ ID NO: 2004615 - RNA, 19 nt, Homo sapiens
  misc_RNA (1)...(19): siRNA sense strand
guuuaggccuuggaaucuu

SEQ ID NO: 2004616 - RNA, 19 nt, Homo sapiens
  misc_RNA (1)...(19): siRNA sense strand
gguucuuugugcugccaua

SEQ ID NO: 2004617 - RNA, 19 nt, Homo sapiens
  misc_RNA (1)...(19): siRNA sense strand
cucaagguuuggcugguuu

SEQ ID NO: 2004618 - RNA, 19 nt, Homo sapiens
  misc_RNA (1)...(19): siRNA sense strand
guugguucauagcaaauca

SEQ ID NO: 2004619 - RNA, 19 nt, Homo sapiens
  misc_RNA (1)...(19): siRNA sense strand
aauaacagagcaugugauc

SEQ ID NO: 2004620 - RNA, 19 nt, Homo sapiens
  misc_RNA (1)...(19): siRNA sense strand
guggauaaacuuucuacag

SEQ ID NO: 2004621 - RNA, 19 nt, Homo sapiens
  misc_RNA (1)...(19): siRNA sense strand
cagagcaugugaucaacac

SEQ ID NO: 2004622 - RNA, 19 nt, Homo sapiens
  misc_RNA (1)...(19): siRNA sense strand
ggccuuggaaucuuaaucu

SEQ ID NO: 2004623 - RNA, 19 nt, Homo sapiens
  misc_RNA (1)...(19): siRNA sense strand
ggagccuuaugcacugcuu

SEQ ID NO: 2004624 - RNA, 19 nt, Homo sapiens
  misc_RNA (1)...(19): siRNA sense strand
uaaacuuucuacaguacac

SEQ ID NO: 2004625 - RNA, 19 nt, Homo sapiens
  misc_RNA (1)...(19): siRNA sense strand
guagcuauccuuuuguuug

SEQ ID NO: 2004626 - RNA, 19 nt, Homo sapiens
  misc_RNA (1)...(19): siRNA sense strand
gaccacagcaaaagaaaug

SEQ ID NO: 2004627 - RNA, 19 nt, Homo sapiens
  misc_RNA (1)...(19): siRNA sense strand
ggaaggagauuauacauuu

SEQ ID NO: 2004628 - RNA, 19 nt, Homo sapiens
  misc_RNA (1)...(19): siRNA sense strand
uaacauggaugaacaggaa

SEQ ID NO: 2004629 - RNA, 19 nt, Homo sapiens
  misc_RNA (1)...(19): siRNA sense strand
gaaacaaccuacaacuaug

SEQ ID NO: 2004630 - RNA, 19 nt, Homo sapiens
  misc_RNA (1)...(19): siRNA sense strand
gaacugaggcccaaauaug

SEQ ID NO: 2004631 - RNA, 19 nt, Homo sapiens
  misc_RNA (1)...(19): siRNA sense strand
ggacacaagcaaacucuua

SEQ ID NO: 2004632 - RNA, 19 nt, Homo sapiens
  misc_RNA (1)...(19): siRNA sense strand
uagaggagaugucugagua

SEQ ID NO: 2004633 - RNA, 19 nt, Homo sapiens
  misc_RNA (1)...(19): siRNA sense strand
gaacaaugcuguggacuac

SEQ ID NO: 2004634 - RNA, 19 nt, Homo sapiens
  misc_RNA (1)...(19): siRNA sense strand
ugaaagaacuuacgguauc

SEQ ID NO: 2004635 - RNA, 19 nt, Homo sapiens
  misc_RNA (1)...(19): siRNA sense strand
gaacugaaggccuuuguug

SEQ ID NO: 2004636 - RNA, 19 nt, Homo sapiens
  misc_RNA (1)...(19): siRNA sense strand
ucucaaagcugcugaagug

SEQ ID NO: 2004637 - RNA, 19 nt, Homo sapiens
  misc_RNA (1)...(19): siRNA sense strand
gagaaggauuugucaaugu

SEQ ID NO: 2004638 - RNA, 19 nt, Homo sapiens
  misc_RNA (1)...(19): siRNA sense strand
ggagaaggauuugucaaug

SEQ ID NO: 2004639 - RNA, 19 nt, Homo sapiens
  misc_RNA (1)...(19): siRNA sense strand
caaaucacaccauaacuuu

SEQ ID NO: 2004640 - RNA, 19 nt, Homo sapiens
  misc_RNA (1)...(19): siRNA sense strand
caaagucacuguuucuagu

SEQ ID NO: 2004641 - RNA, 19 nt, Homo sapiens
  misc_RNA (1)...(19): siRNA sense strand
ggaaagugcuacccuggau

SEQ ID NO: 2004642 - RNA, 19 nt, Homo sapiens
  misc_RNA (1)...(19): siRNA sense strand
caggagagguguuggagaa

SEQ ID NO: 2004643 - RNA, 19 nt, Homo sapiens
  misc_RNA (1)...(19): siRNA sense strand
gguguacacuuuccacuug

SEQ ID NO: 2004644 - RNA, 19 nt, Homo sapiens
  misc_RNA (1)...(19): siRNA sense strand
gagagggaauccaaagguu

SEQ ID NO: 2004645 - RNA, 19 nt, Homo sapiens
  misc_RNA (1)...(19): siRNA sense strand
gaaggagauuauacauuuc

SEQ ID NO: 2004646 - RNA, 19 nt, Homo sapiens
  misc_RNA (1)...(19): siRNA sense strand
ggagcuuccuucaguuauu

SEQ ID NO: 2004647 - RNA, 19 nt, Homo sapiens
  misc_RNA (1)...(19): siRNA sense strand
gugcuggacucggacauua

SEQ ID NO: 2004648 - RNA, 19 nt, Homo sapiens
  misc_RNA (1)...(19): siRNA sense strand
gagcucacuuugccuuuga

SEQ ID NO: 2004649 - RNA, 19 nt, Homo sapiens
  misc_RNA (1)...(19): siRNA sense strand
caucugagcuacccauauc

SEQ ID NO: 2004650 - RNA, 19 nt, Homo sapiens
  misc_RNA (1)...(19): siRNA sense strand
ccaaagguuuccaugaaug

SEQ ID NO: 2004651 - RNA, 19 nt, Homo sapiens
  misc_RNA (1)...(19): siRNA sense strand
uggaguauauucuauguga

SEQ ID NO: 2004652 - RNA, 19 nt, Homo sapiens
  misc_RNA (1)...(19): siRNA sense strand
ggaccuaccacuuccguuu

SEQ ID NO: 2004653 - RNA, 19 nt, Homo sapiens
  misc_RNA (1)...(19): siRNA sense strand
uaacuuuacccgacaauga

SEQ ID NO: 2004654 - RNA, 19 nt, Homo sapiens
  misc_RNA (1)...(19): siRNA sense strand
gagagguguuggagaaaga

SEQ ID NO: 2004655 - RNA, 19 nt, Homo sapiens
  misc_RNA (1)...(19): siRNA sense strand
aaauggagcuuccuucagu

SEQ ID NO: 2004656 - RNA, 19 nt, Homo sapiens
  misc_RNA (1)...(19): siRNA sense strand
agaaacaaccuacaacuau

SEQ ID NO: 2004657 - RNA, 19 nt, Homo sapiens
  misc_RNA (1)...(19): siRNA sense strand
gcacaacuccagccugaug

SEQ ID NO: 2004658 - RNA, 19 nt, Homo sapiens
  misc_RNA (1)...(19): siRNA sense strand
guacagaugauacugaaau

SEQ ID NO: 2004659 - RNA, 19 nt, Homo sapiens
  misc_RNA (1)...(19): siRNA sense strand
ggacggagccacuaacucu

SEQ ID NO: 2004660 - RNA, 19 nt, Homo sapiens
  misc_RNA (1)...(19): siRNA sense strand
gagcuuccuucaguuauug

SEQ ID NO: 2004661 - RNA, 19 nt, Homo sapiens
  misc_RNA (1)...(19): siRNA sense strand
gcccaaauaugguaucaag

SEQ ID NO: 2004662 - RNA, 19 nt, Homo sapiens
  misc_RNA (1)...(19): siRNA sense strand
gcaccgugauuguguuuua

SEQ ID NO: 2004663 - RNA, 19 nt, Homo sapiens
  misc_RNA (1)...(19): siRNA sense strand
ccaaagaauuguguccuau

SEQ ID NO: 2004664 - RNA, 19 nt, Homo sapiens
  misc_RNA (1)...(19): siRNA sense strand
gggaggacauauuccaaug

SEQ ID NO: 2004665 - RNA, 19 nt, Homo sapiens
  misc_RNA (1)...(19): siRNA sense strand
ggagaaggaccucuugcaa

SEQ ID NO: 2004666 - RNA, 19 nt, Homo sapiens
  misc_RNA (1)...(19): siRNA sense strand
caggugugcucucuucauu

SEQ ID NO: 2004667 - RNA, 19 nt, Homo sapiens
  misc_RNA (1)...(19): siRNA sense strand
cgccauaccuucauuuauc

SEQ ID NO: 2004668 - RNA, 19 nt, Homo sapiens
  misc_RNA (1)...(19): siRNA sense strand
ccaaaucacaccauaacuu

SEQ ID NO: 2004669 - RNA, 19 nt, Homo sapiens
  misc_RNA (1)...(19): siRNA sense strand
cuacaacuaugaauggaau

SEQ ID NO: 2004670 - RNA, 19 nt, Homo sapiens
  misc_RNA (1)...(19): siRNA sense strand
ggaaaccaccagaaucaug

SEQ ID NO: 2004671 - RNA, 19 nt, Homo sapiens
  misc_RNA (1)...(19): siRNA sense strand
ggaccaaaucacaccauaa

SEQ ID NO: 2004672 - RNA, 19 nt, Homo sapiens
  misc_RNA (1)...(19): siRNA sense strand
ggagagagcaacugugagu

SEQ ID NO: 2004673 - RNA, 19 nt, Homo sapiens
  misc_RNA (1)...(19): siRNA sense strand
gaaguguucuggccauggu
